United States Patent Application Publication US 2011/0296543 A1 - sequence listing, part 4

SEQ ID NO: 14543 - DNA, 360 bp, Unknown
  Obtained from environmental sample
  misc_feature (1)..(360): n is a, c, g, or t
atgaaaacggatctgttaaacggaaatataataaagtcattgcttgtattcgcgatccccatgctgctgtcaaatatatttcagcagttgtataacactgtggatatggttatcgtagggcattttctcggcgagacatcccttgcctccattggcgcctgcgcggcgatatttgagctgcttataggttttattataggtatcagcaggggattcggcattgtcgcggcccggagttacggcgcgggcaaccgggatctgtttaagcgcacagtcgccggcgctgttataattggcgtcattctgacgctttttgtctcggtcgccgcaagcctgtttatgacgccgctgttaaattga

SEQ ID NO: 14544 - protein, 119 aa, Unknown
  Obtained from environmental sample
  misc_feature (1)..(119): Xaa is any amino acid
MKTDLLNGNIIKSLLVFAIPMLLSNIFQQLYNTVDMVIVGHFLGETSLASIGACAAIFELLIGFIIGISRGFGIVAARSYGAGNRDLFKRTVAGAVIIGVILTLFVSVAASLFMTPLLN

SEQ ID NO: 14545 - DNA, 534 bp, Unknown
  Obtained from environmental sample
  misc_feature (1)..(534): n is a, c, g, or t
atgatgtaccagctttgcgacggcttttccgtaaacacaggctggttcaccgtcaccgtccacatcggcggcctgtttcactcggtcaaagagatctttgaccctaaaaagcaccctgtcacgtttaagttccacatgcttaaagcgatgaagaaccttacatccctcattgaagtcatcatcaacggccacattgaagaaagcgcgtatatatccgaatacagcgacatggaagactctgagggcagcaatctttttgagccgggccacgtatgcgagattctgggccgccggataaaaatcgaaggccccgccgccgaaaccggcctctggatggttcctgttttggaccccaccaaagcggttaaagtaaaccgcatcgtgtccaacaacgcctcccgcatagaattcatccccgtctctaccgagtatgctgaaaaccgcctggaaatccgcacccggtattccggttccgccacacccctaaccgcgttacgcaccgtcaccagtcaatttgtcataagcgaggtgtag

SEQ ID NO: 14546 - protein, 177 aa, Unknown
  Obtained from environmental sample
  misc_feature (1)..(177): Xaa is any amino acid
MMYQLCDGFSVNTGWFTVTVHIGGLFHSVKEIFDPKKHPVTFKFHMLKAMKNLTSLIEVIINGHIEESAYISEYSDMEDSEGSNLFEPGHVCEILGRRIKIEGPAAETGLWMVPVLDPTKAVKVNRIVSNNASRIEFIPVSTEYAENRLEIRTRYSGSATPLTALRTVTSQFVISEV

SEQ ID NO: 14547 - DNA, 756 bp, Unknown
  Obtained from environmental sample
  misc_feature (1)..(756): n is a, c, g, or t
gtgtacgccattaacaacgcctttaagccgctcaatgaaatttttctgttcccgccccggctctgggtaaggcagccgacgatgaataactttcaagacctgtttatcattatgagcaagtcctgggttaccttttcccgctatatttttaatacggtgtttattaccgccgtgggtacgggcggactcattatcatagcttcgatgggggcctttgtggtatccaaataccgtttccccggcgcgaagttgttttttaacgtggtcatcgtcaccctgatgttctccggttacgttacggcgattcccaactacctgatcatggcgaagctgggctgggtggatactttctttgccattattgtgccggccttcgcaatgccgatgggcttcttcctgctcaagcagtttattgacaccatacctaacacccttctggaagcggcaaaggttgacggcgcgaaggaatggcgtattttttattttataattcttcccatgataaagcccgcgtggcttaccgtgatgattttttccgtgcagagtctgtggaacgcccgcgcttccaactttatctattcagagcagttaaaaaccctgccttacgcgctttcgcagatcatcatgggcggcatagcgcgcgcgggggtgggggcggcggtaacgctctttgtaatgatcgtgccgctggcgatgtttattttcgctcaaagtaatattttgcaaacgactggcgagttcgggataaaagaatga

SEQ ID NO: 14548 - protein, 251 aa, Unknown
  Obtained from environmental sample
  DOMAIN (45)...(251): Binding-protein-dependent transport system inner membrane component
  misc_feature (1)..(251): Xaa is any amino acid
MYAINNAFKPLNEIFLFPPRLWVRQPTMNNFQDLFIIMSKSWVTFSRYIFNTVFITAVGTGGLIIIASMGAFVVSKYRFPGAKLFFNVVIVTLMFSGYVTAIPNYLIMAKLGWVDTFFAIIVPAFAMPMGFFLLKQFIDTIPNTLLEAAKVDGAKEWRIFYFIILPMIKPAWLTVMIFSVQSLWNARASNFIYSEQLKTLPYALSQIIMGGIARAGVGAAVTLFVMIVPLAMFIFAQSNILQTTGEFGIKE

SEQ ID NO: 14549 - DNA, 801 bp, Unknown
  Obtained from environmental sample
  misc_feature (1)..(801): n is a, c, g, or t
ttgcgattcaaggcaggaggaaaaatgaggggaagaaataaaaataagtggattttttttacagcattattgttaatatcgcttgtactaccgataaaaatcgcggcgtcagcagatggggacccttacggcggccctagcgtcatcggccctggtggctctggtggaggcggctctggcagtggtggctctggtagcggcagtggctccggaagtagtagcgggtctggtagcggcagtagctctggaggaagcagcacgcccagcacgccaagcacgcccagtacgcccagtacgcccagtacgcccagtacgccaagcacgcccagtacgccaagcacgccaagcacgcccagtacgcccagcacgcctagcacgcctagcacgcctagcacgcccagcacgcccagcacgcctaccacacctcaacgacctagtggtggtagtagtagcaatgaaagtagtagcgaaagtaacggtagcgaaagtagctacccccaaacaccgggaggaggaaactctgcagggcaaggaacttcaggaactgaagaagaagatgaggaagaggaggaggaagaagaggagacagaagtgtttgaggacaatacagccgacatcgctatggccgaggcaatgctaatagatatggataatagagatataactgaagaagagacagatgaaatattaaactctccgagttcgggagatcctgtacttgtgactacaggaagatatgttttcgaggttgaggacattgaaataacagacagcagctttttgattaaagaaaatatataa

SEQ ID NO: 14550 - protein, 266 aa, Unknown
  Obtained from environmental sample
  misc_feature (1)..(266): Xaa is any amino acid
MRFKAGGKMRGRNKNKWIFFTALLLISLVLPIKIAASADGDPYGGPSVIGPGGSGGGGSGSGGSGSGSGSGSSSGSGSGSSSGGSSTPSTPSTPSTPSTPSTPSTPSTPSTPSTPSTPSTPSTPSTPSTPSTPSTPSTPTTPQRPSGGSSSNESSSESNGSESSYPQTPGGGNSAGQGTSGTEEEDEEEEEEEEETEVFEDNTADIAMAEAMLIDMDNRDITEEETDEILNSPSSGDPVLVTTGRYVFEVEDIEITDSSFLIKENI

SEQ ID NO: 14551 - DNA, 423 bp, Unknown
  Obtained from environmental sample
  misc_feature (1)..(423): n is a, c, g, or t
ttgccctgcagagtttcctcctcccggtgtttgggggtagctactttcgctaccgttactttcgctactactttcattgctactactaccaccactaggtcgttgaggtgtggtaggcgtgctgggcgtgctgggcgtgctaggcgtgctaggcgtgctaggcgtgctgggcgtactgggcgtgcttggcgtgcttggcgtactgggcgtgcttggcgtactgggcgtactgggcgtactgggcgtactgggcgtgcttggcgtgctgggcgtgctgcttcctccagagctactgccgctaccagacccgctactacttccggagccactgccgctaccagagccaccactgccagagccgcctccaccagagccaccagggccgatgacgctagggccgccgtaagggtccccatctgctga

SEQ ID NO: 14552 - protein, 140 aa, Unknown
  Obtained from environmental sample
  SIGNAL (1)...(22)
  misc_feature (1)..(140): Xaa is any amino acid
MPCRVSSSRCLGVATFATVTFATTFIATTTTTRSLRCGRRAGRAGRARRARRARRAGRTGRAWRAWRTGRAWRTGRTGRTGRTGRAWRAGRAASSRATAATRPATTSGATAATRATTARAASTRATRADDARAAVRVPIC

SEQ ID NO: 14553 - DNA, 525 bp, Unknown
  Obtained from environmental sample
  misc_feature (1)..(525): n is a, c, g, or t
atggggacccttacggcggccctagcgtcatcggccctggtggctctggtggaggcggctctggcagtggtggctctggtagcggcagtggctccggaagtagtagcgggtctggtagcggcagtagctctggaggaagcagcacgcccagcacgccaagcacgcccagtacgcccagtacgcccagtacgcccagtacgccaagcacgcccagtacgccaagcacgccaagcacgcccagtacgcccagcacgcctagcacgcctagcacgcctagcacgcccagcacgcccagcacgcctaccacacctcaacgacctagtggtggtagtagtagcaatgaaagtagtagcgaaagtaacggtagcgaaagtagctacccccaaacaccgggaggaggaaactctgcagggcaaggaacttcaggaactgaagaagaagatgaggaagaggaggaggaagaagaggagacagaagtgtttgaggacaatacagccgacatcgctatggccgaggcaatgctaa

SEQ ID NO: 14554 - protein, 174 aa, Unknown
  Obtained from environmental sample
  SIGNAL (1)...(22)
  misc_feature (1)..(174): Xaa is any amino acid
MGTLTAALASSALVALVEAALAVVALVAAVAPEVVAGLVAAVALEEAARPARQARPVRPVRPVRPVRQARPVRQARQARPVRPARLARLARLARPARPARLPHLNDLVVVVVAMKVVAKVTVAKVATPKHREEETLQGKELQELKKKMRKRRRKKRRQKCLRTIQPTSLWPRQC

SEQ ID NO: 14555 - DNA, 600 bp, Unknown
  Obtained from environmental sample
  misc_feature (1)..(600): n is a, c, g, or t
atgaaaagagttgtcgttggaaatctaaacgtgaaagaatcaatcaacgctttcataccaagacccgactccccactccccattatttatggtatactttccaagatgttacaaggaatcagcgctgtcgccttcgatctggacgggacactctaccccaattacagtctgaatatgcgcttgctgcctttcttgttcaggcattggaaatttatactggcttttggcaaggctagggatattatccggcgcgagcaggtcgcggcgcgagacgagctcgcgttgccgtcttccgggcttgatttctacgagcgccaggcgcagcttgtcgccgatcagcttaaagcggacaaggagaaaatccgggaaaagattgaccgtctaatctaccggggctgggagccgttcttcctgaaaataaaactgttcccccatgtaaaagaggttttacgggaattgaaggcggcggggctgaaactgggactgctctccgactttccgacggcggccaaactggaatatctggggctctcgggtttctgggacacggcgctgtgtacggaaagcataggagcgcttaaccggacgcgcgtcctttga

SEQ ID NO: 14556 - protein, 199 aa, Unknown
  Obtained from environmental sample
  misc_feature (1)..(199): Xaa is any amino acid
MKRVVVGNLNVKESINAFIPRPDSPLPIIYGILSKMLQGISAVAFDLDGTLYPNYSLNMRLLPFLFRHWKFILAFGKARDIIRREQVAARDELALPSSGLDFYERQAQLVADQLKADKEKIREKIDRLIYRGWEPFFLKIKLFPHVKEVLRELKAAGLKLGLLSDFPTAAKLEYLGLSGFWDTALCTESIGALNRTRVL

SEQ ID NO: 14557 - DNA, 816 bp, Unknown
  Obtained from environmental sample
  misc_feature (1)..(816): n is a, c, g, or t
atgagtgaaaaacctgactttctgataaagggtctcgccatcgtaatgaaaatcaccggcgtaaaaagagccttcatcggcatagaggacaacaagaaaaaactcatccccatgctggaacaggagatacggcttgaggaagaagctctgggcgaatccgggggggagattttcatcaggctctgccgcaccctgtacccccaaggcggcgagaaactcctgatcacggcccttaccggaagggaagtgccgtcgggcggcctgcccatggatgcgggctgtatcgtgcataacgtcggctccattatcgccattgccgaggcgttctatctgggcaaacccctcatcgaccgcgaccttacggtttcaggcggagcatgcaaaactcccaaaaacatccgtgcgccaataggcgcttccttaaacgacatgccgcccgagtttatggatatagaccatgacaggcttgccaagatactgtacggcggccccatgatgggcagcgccgttgcctcgcttgacgtaccgatacagaaaaacacttcgggcataatcctgatgacggatgaagagaccttcaaggatgcggaaggcccgtgtatccgctgcggccgctgtataaaatgctgctcctgccgccttagcccggttataatgaacaacagccttgaagccggcgattttgattacgctgtaaaggctggcctgcttgactgcatggaatgcgggagctgcacctataactgccctgcaaggatcaaactggttcagcgtttccgtgttggaaaacaaaaattaaagatgataaaaaaataa

SEQ ID NO: 14558 - protein, 271 aa, Unknown
  Obtained from environmental sample
  DOMAIN (1)...(164): Respiratory-chain NADH dehydrogenase 51 Kd subunit
  misc_feature (1)..(271): Xaa is any amino acid
MSEKPDFLIKGLAIVMKITGVKRAFIGIEDNKKKLIPMLEQEIRLEEEALGESGGEIFIRLCRTLYPQGGEKLLITALTGREVPSGGLPMDAGCIVHNVGSIIAIAEAFYLGKPLIDRDLTVSGGACKTPKNIRAPIGASLNDMPPEFMDIDHDRLAKILYGGPMMGSAVASLDVPIQKNTSGIILMTDEETFKDAEGPCIRCGRCIKCCSCRLSPVIMNNSLEAGDFDYAVKAGLLDCMECGSCTYNCPARIKLVQRFRVGKQKLKMIKK

SEQ ID NO: 14559 - DNA, 366 bp, Unknown
  Obtained from environmental sample
  misc_feature (1)..(366): n is a, c, g, or t
atgggtctggctccgttttcccttagcttgatgagttcttcatcggcttccttgtcaaaatcagggatgcttgcgtcatccggtaaatcgggtatatctgacgccggcaattcctcaagttccccggcatccggcgattcatcggcaatatccatgtccatttcaatgggttcaggaagctctactgtatcctcaacttcttcggcctttggcggttcggcgatgtcctctggaaggcttgtttcattgtcaggattttcttcgacaagttccatgtttaaatccagacccccgtccagatcgttaatggaaaaagtttctgaatcgtcttcaccggcgctgacggaagacgcgtcctcatcgtga

SEQ ID NO: 14560 - protein, 121 aa, Unknown
  Obtained from environmental sample
  SIGNAL (1)...(19)
  misc_feature (1)..(121): Xaa is any amino acid
MGLAPFSLSLMSSSSASLSKSGMLASSGKSGISDAGNSSSSPASGDSSAISMSISMGSGSSTVSSTSSAFGGSAMSSGRLVSLSGFSSTSSMFKSRPPSRSLMEKVSESSSPALTEDASSS

SEQ ID NO: 14561 - DNA, 927 bp, Unknown
  Obtained from environmental sample
  misc_feature (1)..(927): n is a, c, g, or t
gtggcggcgagcttaccttacttgccctgcccggtcgagcatgcctcaggctcaaagcgggtgaaagagcaggcgtccgtggaagtcggcgttggcggcggcgattatcgggaaaaagccataccggaagggctggtggaggccgggaacttcgaattggggatgttggaacccgaatctttttcaaaaccccggacgctgttgtacagcgcttataccgtaagtaaaggcgatatgattggcgggttggcggagagttttggtcttaatcaggataccctcatttcgataaacaacataaaaaacacaaggcttttacagatagggcaggttttgcgtattcccaaccaggacgggataatatacacggtaaaaaaagacgatacccttgaggcaattgcaacaaagtacaaatccaacgcttcagacattcagattgcgaacgagcttttttctgataaggctctgcccggcacctcattgtttatccccggcgcacagcttgactggatggaaaagcaggaaataaacggagatttgtttatgtggcccacttcgggctatataacttcgaattatggctaccggagctatcctttcgatgacgacggcgggcggcagttccattccggtcttgatattggcgcccctatgggttcccctgtaagggccgccatgtcgggccgcgtcagttccgcgggctgggatgacgtgcttggcaaccatgttgtgataagccatcatgccggttaccgtacgctttatggccacatgagcgtaataagggttaaaaccggggcttatgtgggaaccggcgagcgcataggcgatgttggcagtaccggccgcagcacaggcccccacgtacatttcaccgtatacaaaaacggagtaatccgtaacccgcgcgtcctcttaaataattag

SEQ ID NO: 14562 - protein, 308 aa, Unknown
  Obtained from environmental sample
  DOMAIN (122)...(164): LysM domain
  misc_feature (1)..(308): Xaa is any amino acid
MAASLPYLPCPVEHASGSKRVKEQASVEVGVGGGDYREKAIPEGLVEAGNFELGMLEPESFSKPRTLLYSAYTVSKGDMIGGLAESFGLNQDTLISINNIKNTRLLQIGQVLRIPNQDGIIYTVKKDDTLEAIATKYKSNASDIQIANELFSDKALPGTSLFIPGAQLDWMEKQEINGDLFMWPTSGYITSNYGYRSYPFDDDGGRQFHSGLDIGAPMGSPVRAAMSGRVSSAGWDDVLGNHVVISHHAGYRTLYGHMSVIRVKTGAYVGTGERIGDVGSTGRSTGPHVHFTVYKNGVIRNPRVLLNN

SEQ ID NO: 14563 - DNA, 810 bp, Unknown
  Obtained from environmental sample
  misc_feature (1)..(810): n is a, c, g, or t
atgctcagggaaggggcgggtatagcctgtaaggctttgctgttcctcaggctcgatcttgccgatttcaggcgcgctctggaaaacgccattccccgcataccgggaatcctcattcacggcgacgtacccccctcgcggcggaccaaaaccatggtagacctcgccgccggggaggccagggccatgggcagtgactttttggggacggaacacctgctgtttgccgccatgaaggagcaggattccagcgttcagtcatatttgagccacaaagcggttgatgttgatatgatccgggtcgtggtacagacgacctttaaccggccttccgtatcacgcagtgaccggccttttgtcgccgccaatggctgtccttcctattttatccagcgggaccgcccgggccgctatcccgatcagtataccgtggtgggagcggacaggccgccgcgggtcagacccgctacctacccggtccttacccccacgctggacactttttcccgtgatttaagcgcccttgcgcgggcgggcaaactggacccggttattggcagggaaaacgagatgaaccgcatcgtgcggattctggcgcggcggaccaaaaacaatcccatactggtcggcgagccgggggtaggcaaaacggccattgttgagggccttgcccaactgctcgtttcggataaagccccggaagccctttccggtaaacgaatcctttcccttgatatgggggccattgtggcgggaaccaagtaccggggtgaatttgaggaacggctcnaaaaatcacgcgggagataa

SEQ ID NO: 14564 - protein, 269 aa, Unknown
  Obtained from environmental sample
  DOMAIN (56)...(108): Clp amino terminal domain
  misc_feature (1)..(269): Xaa is any amino acid
MLREGAGIACKALLFLRLDLADFRRALENAIPRIPGILIHGDVPPSRRTKTMVDLAAGEARAMGSDFLGTEHLLFAAMKEQDSSVQSYLSHKAVDVDMIRVVVQTTFNRPSVSRSDRPFVAANGCPSYFIQRDRPGRYPDQYTVVGADRPPRVRPATYPVLTPTLDTFSRDLSALARAGKLDPVIGRENEMNRIVRILARRTKNNPILVGEPGVGKTAIVEGLAQLLVSDKAPEALSGKRILSLDMGAIVAGTKYRGEFEERLXKSRGR

SEQ ID NO: 14565 - DNA, 381 bp, Unknown
  Obtained from environmental sample
  misc_feature (1)..(381): n is a, c, g, or t
atgtatctcatcaataaacagaattacgcttcccgactgggttatctcccgcgtgatttttngagccgttcctcaaattcaccccggtacttggttcccgccacaatggcccccatatcaagggaaaggattcgtttaccggaaagggcttccggggctttatccgaaacgagcagttgggcaaggccctcaacaatggccgttttgcctacccccggctcgccgaccagtatgggattgtttttggtccgccgcgccagaatccgcacgatgcggttcatctcgttttccctgccaataaccgggtccagtttgcccgcccgcgcaagggcgcttaaatcacgggaaaaagtgtccagcgtgggggtaaggaccgggtag

SEQ ID NO: 14566 - protein, 126 aa, Unknown
  Obtained from environmental sample
  misc_feature (1)..(126): Xaa is any amino acid
MYLINKQNYASRLGYLPRDFXSRSSNSPRYLVPATMAPISRERIRLPERASGALSETSSWARPSTMAVLPTPGSPTSMGLFLVRRARIRTMRFISFSLPITGSSLPARARALKSREKVSSVGVRTG

SEQ ID NO: 14567 - DNA, 693 bp, Unknown
  Obtained from environmental sample
  misc_feature (1)..(693): n is a, c, g, or t
ttgatcagagggtggtataccggagccagcggcatgagggcgcagcagtggcggcttgacgctgtagctaacaatttatcgaatgtggatacggacggctacaagaaagatgtagccactttaaaagcttctcctgaaatgttaatcaggcggttggatgatgacggggtttacttgcacccatttggctccgcggacgccgcgcccattatcggaaaaatgggaaccggcgttgaacttaacaaattatttacaaattttgatcagggtgcgttaaaagaaacgacaagcgactttgatcttgcccttgacggcaagggttttttttctgtagctaccccttatggggaacgttatacacgaaacggttcatttatactcggtaaggaaggttttcttgaaactaaggaaggctatcctgtcctgggtgaaaacggacctatcagagtaaaggcaaacaattttaaggttgatgcagacggcagggtatggataaacgccgcctatcccgacgaacctgatgtaatggtaggcagggaaacaaatctttgggaagaaactgttcttttggatacgctgaaaatcgtagaattcgatcttgacatctatcttaaaaaaccagggttccagcctttacagcgagagcgagtattccgtcccgaatactcggccgccgcgataaccnnnntttaa

SEQ ID NO: 14568 - protein, 230 aa, Unknown
  Obtained from environmental sample
  DOMAIN (5)...(35): Flagella basal body rod protein
  misc_feature (1)..(230): Xaa is any amino acid
MIRGWYTGASGMRAQQWRLDAVANNLSNVDTDGYKKDVATLKASPEMLIRRLDDDGVYLHPFGSADAAPIIGKMGTGVELNKLFTNFDQGALKETTSDFDLALDGKGFFSVATPYGERYTRNGSFILGKEGFLETKEGYPVLGENGPIRVKANNFKVDADGRVWINAAYPDEPDVMVGRETNLWEETVLLDTLKIVEFDLDIYLKKPGFQPLQRERVFRPEYSAAAITXX

SEQ ID NO: 14569 - DNA, 720 bp, Unknown
  Obtained from environmental sample
  misc_feature (1)..(720): n is a, c, g, or t
ttgtttcaatgggcggagacgactccactatcgaaaaaacaaggaaggcgcttagcgccctgggagcgtaaaatggctatggatttggccgcgtttggccgtttttcacgcacttttcatcagggagaaattattttttccgagtttgaacctggcgatactttttatttgattcaatcgggcagggtgcagcttgtcaaacttgtcggggacatcgagcggacattggatattctgcagccctccgaaatgtttggtgaaatggcaattttggaaaattctccgcgttctgcgacggccattgcgattgatgaagtaaaagtgctggaatttaattcgcaaaattttgaaatcctgctccttggaaatccgcagattgccctgaaacttttaaaaatgttctgcaaacgcatatacgattccaaacggcgctttatgatccttacgctgccggagccgcaggtaaaaatagcggacgtatttcttatgcttgatgaaactcagcctgatattgataaaaccagcgagaggcgtgaatttaaaaccacagttgaaggagtagcgcactgggcgggaatgagcgttaacgaagcgagagatatacttggacattttgtaaaccagaggcgcgtagaaattttcccggatcgtataacagtaaaaaacatcaacgacttttcccgctttgtcagttccagacgcaactcacgcggcgcctaa

SEQ ID NO: 14570 - protein, 239 aa, Unknown
  Obtained from environmental sample
  DOMAIN (36)...(125): Cyclic nucleotide-binding domain
  misc_feature (1)..(239): Xaa is any amino acid
MFQWAETTPLSKKQGRRLAPWERKMAMDLAAFGRFSRTFHQGEIIFSEFEPGDTFYLIQSGRVQLVKLVGDIERTLDILQPSEMFGEMAILENSPRSATAIAIDEVKVLEFNSQNFEILLLGNPQIALKLLKMFCKRIYDSKRRFMILTLPEPQVKIADVFLMLDETQPDIDKTSERREFKTTVEGVAHWAGMSVNEARDILGHFVNQRRVEIFPDRITVKNINDFSRFVSSRRNSRGA

SEQ ID NO: 14571 - DNA, 765 bp, Unknown
  Obtained from environmental sample
  misc_feature (1)..(765): n is a, c, g, or t
ttgctgaataacgatattcttgcgtattatggtcatcccggttcacgtaacatgggaattttaggacgttatcctattgaagaactggacagactgctgaccgcccttgccgccgagtatgaagcggctaacggcggacgcaaagtgcgtaaggcgttttatctgatttatgggacagtttggccaaagggcgaaataggaataatcaacaataatatccttatgaaatatattgaatatggaatgaaaaacgatatattgatttttatcgatcatcaaatcgggcgttatgacccgatagattcgcttaaaagaatgcttccatacttgcgttatcccaacgtgcatcttgcgcttgatcccgaatggcggacaaaaagtccaatggctgacattggcagcgtcagagcggacgagatcaatattgcccaacaggtaatggaagattacataatagaaaataatattcccggcgagcgtatgcttgttattcatcaatttaaccatgtgatgattcaaaatcgcgcggaagttagaagcaactttaacagagtcaggctgattcattgcgccgacggttttggctctcccaacataaaacgcaattcttacgcttacaatgcgcttgcttccaatatgccgattaaagcttttaaattgttttacaattttggcataccgggcgcgggttacgataatcctttaatgtcaccgaaagacgtgtacaaccttaatccgcgaccttatatcattatgtatcaataa

SEQ ID NO: 14572 - protein, 254 aa, Unknown
  Obtained from environmental sample
  misc_feature (1)..(254): Xaa is any amino acid
MLNNDILAYYGHPGSRNMGILGRYPIEELDRLLTALAAEYEAANGGRKVRKAFYLIYGTVWPKGEIGIINNNILMKYIEYGMKNDILIFIDHQIGRYDPIDSLKRMLPYLRYPNVHLALDPEWRTKSPMADIGSVRADEINIAQQVMEDYIIENNIPGERMLVIHQFNHVMIQNRAEVRSNFNRVRLIHCADGFGSPNIKRNSYAYNALASNMPIKAFKLFYNFGIPGAGYDNPLMSPKDVYNLNPRPYIIMYQ

SEQ ID NO: 14573 - DNA, 801 bp, Unknown
  Obtained from environmental sample
  misc_feature (1)..(801): n is a, c, g, or t
ttgcgagtacttttcttggagcgggaaagtaccgtttttgcccgcaatctgcttggcgactgtatgtcaagcgaggcgcttagggaatgtgaaatagccctttacgatattgacgaaaaacgccttaaggaaagtgaaaaaattatctccgccataaacagggggaagggcagttattcaaggatttccagctatgcgggtataaataatcttgaaaaagcgcttgcgggcgctaactttgccgtaaacgcaattcaggtcggcggttacgatcccgctacaatcgccgattttgaaattcccaaaaaatacggattacgtcaaaccattggcgatacgcttggaattggcggcataatgcgcgctttacggacaattcccgttatggagcaatttgcccgcactatggaaaaagtctgcccggatgtatggcttttaaattacactaatccaatgtccatgctgacaggctttatgcagcgatatacaggcgttaagacagtcgggctttgccacagcgtgcagggttgttcgtactggcttcttaaagaactcggcatggaagataagatggacggcaggcgggaattaatcgcaggaatcaatcacatgggctggctcctgaacatttatgacaggaacaatgttgatctgtaccctgaaatccgcaaaagggcgaaagaaaaaaacgcgtcggaaaaacacaacgatatggtgcgttttgattatatcgacaaacttggattttactgtaccgagtccagcgaacacaacgccgaagtacaatccgttttatattaa

SEQ ID NO: 14574 - protein, 266 aa, Unknown
  Obtained from environmental sample
  DOMAIN (10)...(266): Family 4 glycosyl hydrolase
  misc_feature (1)..(266): Xaa is any amino acid
MRVLFLERESTVFARNLLGDCMSSEALRECEIALYDIDEKRLKESEKIISAINRGKGSYSRISSYAGINNLEKALAGANFAVNAIQVGGYDPATIADFEIPKKYGLRQTIGDTLGIGGIMRALRTIPVMEQFARTMEKVCPDVWLLNYTNPMSMLTGFMQRYTGVKTVGLCHSVQGCSYWLLKELGMEDKMDGRRELIAGINHMGWLLNIYDRNNVDLYPEIRKRAKEKNASEKHNDMVRFDYIDKLGFYCTESSEHNAEVQSVLY

SEQ ID NO: 14575 - DNA, 582 bp, Unknown
  Obtained from environmental sample
  misc_feature (1)..(582): n is a, c, g, or t
gtggataattatgggttatttccatcaatatttactctgataaaaaaacagaggccagagtgtaaagtagcacttttttatgaatggggtataattggaaatttatgtcctgataatgtaatagatattaaacaacatattaataatctttcaaaggatatatccactgtcacaaattacataaaaactgaaaagccgaatttctgctgtataataattgatgaacctgacaatgtaggacataaagagggatatgatactcaagcttattatgaagaactaaatagacttgacggacttattgcccaaataattcaatcaatagaagattctgggatttgggacagttccataatattgttttcttccgatcatggaggaattggtaaaggacacggaggtgatacaccttcagaaagatacgttccttttattatttttggcaataatataaaaaaaggaacacaaatatcacagaatgtattgatttatgatatagccccaacaatagcatatttttttgaattgaaaacacctttattatggaaaggaagaaaaatcaatgttctaaataataattaa

SEQ ID NO: 14576 - protein, 193 aa, Unknown
  Obtained from environmental sample
  DOMAIN (49)...(163): Metalloenzyme superfamily
  misc_feature (1)..(193): Xaa is any amino acid
MDNYGLFPSIFTLIKKQRPECKVALFYEWGIIGNLCPDNVIDIKQHINNLSKDISTVTNYIKTEKPNFCCIIIDEPDNVGHKEGYDTQAYYEELNRLDGLIAQIIQSIEDSGIWDSSIILFSSDHGGIGKGHGGDTPSERYVPFIIFGNNIKKGTQISQNVLIYDIAPTIAYFFELKTPLLWKGRKINVLNNN

SEQ ID NO: 14577 - DNA, 447 bp, Unknown
  Obtained from environmental sample
  misc_feature (1)..(447): n is a, c, g, or t
atgatggccgaatatacaagggaacgacgattctggaggaataagactgcggtaaaggacagagctacggtaacttatgccgaagacggaaatgcagccggttcttttgacgcggtaatcgccgtaatcggagaggacccttacgcggaaaccgaaggcgaccgttcaggcaatatcaatattcgggacagagatatggaaactctgcgtaaaatttatgaatatcgctgtcctgtaatcgttattatgctctcaggccgcccgatgaatatcggcgatgagtataaaaaatgggacgcttttatcgccgcttggctgcccggtactgaaggcggaggaatatctgatattcttttcgggaataaaagatttacgggacggactccttacacatggcgaaaaacgttaaatggagaagttttatatcctttggggtttgggatatag

SEQ ID NO: 14578 - protein, 148 aa, Unknown
  Obtained from environmental sample
  DOMAIN (4)...(148): Glycosyl hydrolase family 3 C terminal domain
  misc_feature (1)..(148): Xaa is any amino acid
MMAEYTRERRFWRNKTAVKDRATVTYAEDGNAAGSFDAVIAVIGEDPYAETEGDRSGNINIRDRDMETLRKIYEYRCPVIVIMLSGRPMNIGDEYKKWDAFIAAWLPGTEGGGISDILFGNKRFTGRTPYTWRKTLNGEVLYPLGFGI

SEQ ID NO: 14579 - DNA, 801 bp, Unknown
  Obtained from environmental sample
  misc_feature (1)..(801): n is a, c, g, or t
gtgcctgagcatgacgggccctttaatcccggcactaaatttatgtgggcgccggactgcatctgtaaagagggcgtgtattattactatttcccccacccgagcaagaacacaagcgggccgggaaacggctggaacgacaactggaaaatcggtattgccgtcagccgtcaccccgcgtcgaatttcacgattttaccggacccgctgaaaggtttgaacaacggggcggaaaaccatattgacccggccgtgtttattgacgacgacggccaggcatacctctataacggcggcggcgggaaatgtttcggcggaaaactgaaagacaatatgatcgagattgacggcgatatgaaacggatggagggcctggacaatttccatgaggcgacccaggtgcataagtacaagggcaggtattaccttgcgtattccgataacggcggcgcttaccccgacggcaccggctacggcgaccggcttaaatacgctatcagcgacaatccgttgggcctctgggaatacaagggcgtgtacgtgtacccaacgggtaacggcaccattcacggctcaatcacagagttcaaaggaaaatggtacgctttctatcacagcgattatgtgtcctacgcgggcaatgatcagggacgttccgtgcatgtggatgaattattctacaatgatgacggcacaattcaactggtaaaaacattcgggaagccccgtgcgaatgttgatcttacaataaagaataccaacggtgatccngatgtatccgcctcggccgatctgtcatga

SEQ ID NO: 14580 - protein, 266 aa, Unknown
  Obtained from environmental sample
  misc_feature (1)..(266): Xaa is any amino acid
MPEHDGPFNPGTKFMWAPDCICKEGVYYYYFPHPSKNTSGPGNGWNDNWKIGIAVSRHPASNFTILPDPLKGLNNGAENHIDPAVFIDDDGQAYLYNGGGGKCFGGKLKDNMIEIDGDMKRMEGLDNFHEATQVHKYKGRYYLAYSDNGGAYPDGTGYGDRLKYAISDNPLGLWEYKGVYVYPTGNGTIHGSITEFKGKWYAFYHSDYVSYAGNDQGRSVHVDELFYNDDGTIQLVKTFGKPRANVDLTIKNTNGDPDVSASADLS

SEQ ID NO: 14581 - DNA, 573 bp, Unknown
  Obtained from environmental sample
  misc_feature (1)..(573): n is a, c, g, or t
gtggccgcaccgtattctaaaaccggcggacttgcggctttgtttggaaacctcgctgaaaacggcgcgattgtcaagaagagcgcggtggccaaggaaatgtataaaacctcgcttacggcaaaatgtttcgatagcgaagaatcggcggttaaagccattcacggcggaaaaatcgtcgcgggcgacgtaatcgtaatccgttacgaagggccgtcgggcgggccgggcatgcgcgaaatgcttactccgacgtcggcaatcgcgggcgcggggcttgataagtcggtcgccttaatcaccgatgggcgcttttcgggcgcgacgagaggagcttctatcggccacgtttctcccgaggcggctagcggcgggcttatcgcttacgtaaaggacggcgatatcatagaaatcgacattgagaattatagccttaatttaaaggtttccgaagacgaaatcgccaaaagaaaggcctctatgaagcttctcccgccgaaaaacttgtcggggtatttaaatcgctatcaaagattggtttcctcggccgacaagggggctattctttcatga

SEQ ID NO: 14582 - protein, 190 aa, Unknown
  Obtained from environmental sample
  DOMAIN (1)...(190): Dehydratase family
  misc_feature (1)..(190): Xaa is any amino acid
MAAPYSKTGGLAALFGNLAENGAIVKKSAVAKEMYKTSLTAKCFDSEESAVKAIHGGKIVAGDVIVIRYEGPSGGPGMREMLTPTSAIAGAGLDKSVALITDGRFSGATRGASIGHVSPEAASGGLIAYVKDGDIIEIDIENYSLNLKVSEDEIAKRKASMKLLPPKNLSGYLNRYQRLVSSADKGAILS

SEQ ID NO: 14583 - DNA, 765 bp, Unknown
  Obtained from environmental sample
  misc_feature (1)..(765): n is a, c, g, or t
atgtacctggctcttgataactgggcggtcaaaaacggaaagaaaaagctcaacggttactttatttccaatgtagaccctgatgatgcatccgtcattgtttcttcggtggatctttcggaaacgatatttatcctagtatccaagagcggcaccacccaagaaactctggccaacgaactttttgtcaaggataaactcgccaaggcgggccttgattcgggcaagcacatggtggctgttaccagcgaaacaagccctcttgcccgcaatccggcctatcttgattctttttacatcgatgattttattggagggcgctattcttctacttctgcggtaggaggggtgatcctttctctggcctttggccctgatgtattttcccaatttctggcaggcgcccatgaggcggataaacttgccatggaaaaagatatacggaaaaacgcggctcttcttgatgccctccttggaatatgggaacggaattttttatcttaccctactacggcggttcttccatatagccaggccctttcccgttttcccgcccatctgcaacagcttgatatggaatctaacggcaagcgggttaaccgcttcggtaccgaggttgtttatgccacgggttccgtagtatttggtgaacccggaaccaacggacaacattcgttctaccagttactccatcagggaacggacatgttcccctgcagttgtaggtttttggacagccaacgcttctcggccgatctgtcatga

SEQ ID NO: 14584 - protein, 254 aa, Unknown
  Obtained from environmental sample
  DOMAIN (1)...(254): Phosphoglucose isomerase
  misc_feature (1)..(254): Xaa is any amino acid
MYLALDNWAVKNGKKKLNGYFISNVDPDDASVIVSSVDLSETIFILVSKSGTTQETLANELFVKDKLAKAGLDSGKHMVAVTSETSPLARNPAYLDSFYIDDFIGGRYSSTSAVGGVILSLAFGPDVFSQFLAGAHEADKLAMEKDIRKNAALLDALLGIWERNFLSYPTTAVLPYSQALSRFPAHLQQLDMESNGKRVNRFGTEVVYATGSVVFGEPGTNGQHSFYQLLHQGTDMFPCSCRFLDSQRFSADLS

SEQ ID NO: 14585 - DNA, 585 bp, Unknown
  Obtained from environmental sample
  misc_feature (1)..(585): n is a, c, g, or t
ttgaaagaggcgatcaaaaatctttccgccgaagtaactgagggcgcagtcggcgctggtgccggaacctgctgctttggatacaaggggggaattggcacatcttcccgcaagatcaacatgaaattttcggacagcgaacaaacctgcacgataggtgccctggtgcagaccaatttctccgggaatttgaatatctacggctctcctgttcccaatggtttacgcgaaaaacctcaaggcggttcctgcatgattgtagtcgccaccgatgcccctcttgacgcaagacagctcaagcgaatcgcaaaaaggggaatcgcgggaatgatacagtgcggctcgtatctggcgaatggcagcggggatttctgcatcgcgttctcaaattaccctggcaatataacgcctcgtgacaatcaaacgcttaaaaaaatcaccgtgcttcctgacgagcgcatcaatccactgtttgaagccacctgtgaagccgtccgtgaggcgatatacaactcactgaccatggcgcacggtattaccggaagagatggcagaagcgttcaggggattagcgtaaataagtag

SEQ ID NO: 14586 - protein, 194 aa, Unknown
  Obtained from environmental sample
  DOMAIN (1)...(194): Peptidase family T4
  misc_feature (1)..(194): Xaa is any amino acid
MKEAIKNLSAEVTEGAVGAGAGTCCFGYKGGIGTSSRKINMKFSDSEQTCTIGALVQTNFSGNLNIYGSPVPNGLREKPQGGSCMIVVATDAPLDARQLKRIAKRGIAGMIQCGSYLANGSGDFCIAFSNYPGNITPRDNQTLKKITVLPDERINPLFEATCEAVREAIYNSLTMAHGITGRDGRSVQGISVNK

SEQ ID NO: 14587 - DNA, 882 bp, Unknown
  Obtained from environmental sample
  misc_feature (1)..(882): n is a, c, g, or t
atgatagccnagccatctggcggcgccggaaagcggaatttaggcaccttatattccggccccatggcaatttggttcaccttattcttcctggcgcctatttttattataattatttacagtttccttaaaaaagggctgtatggcggggtggaacctgttttttcgcttgaagcctaccaatatctgggtgacaaggtctttttgggcatcacgcttcgcaccgttattacttcgactgtcgctaccattatcactatttttatcgccctgccatgcggttatttcatggccaaaagcaaaaaccagaatattctccttttgcttatcatcattcctttctggacaaattttctgatccgcgtgttcgcgtggatgaacattttggggaaccacggtttccttaacgaattcctgatccgtatcgggctgataaacgactatatccattttctctacaatcaaaaagttgtgatactggtgctggtgtacatgtacctgccctacgcgatattgccgctgttctccagcattgacaaattcgatttttccctgctggaagcggcgcgtgatcttggagcgggcaagttcaccgccatgatcaaagtgatgctgcccaatatacggggcggcattttcacggcggtgctgtttacgtttattcccatttttggagcttacgcggtgccgcttctggtgggcggcaaggattcttatatgctggggaatatcatcgccgaccagttgtccaagtcccgcaactggccccgcgcggcggctatttcgatggtgcttaccgtggtgacgacagtgggcgtattgctgatgatgaatgtccagaagcgggacgcttcacggctggcagaggcgaanaaatcatga

SEQ ID NO: 14588 - protein, 293 aa, Unknown
  Obtained from environmental sample
  DOMAIN (72)...(289): Binding-protein-dependent transport system inner membrane component
  misc_feature (1)..(293): Xaa is any amino acid
MIAXPSGGAGKRNLGTLYSGPMAIWFTLFFLAPIFIIIIYSFLKKGLYGGVEPVFSLEAYQYLGDKVFLGITLRTVITSTVATIITIFIALPCGYFMAKSKNQNILLLLIIIPFWTNFLIRVFAWMNILGNHGFLNEFLIRIGLINDYIHFLYNQKVVILVLVYMYLPYAILPLFSSIDKFDFSLLEAARDLGAGKFTAMIKVMLPNIRGGIFTAVLFTFIPIFGAYAVPLLVGGKDSYMLGNIIADQLSKSRNWPRAAAISMVLTVVTTVGVLLMMNVQKRDASRLAEAXKS

SEQ ID NO: 14589 - DNA, 864 bp, Unknown
  Obtained from environmental sample
  misc_feature (1)..(864): n is a, c, g, or t
atgttcgcgcaggacgcgatagaagtttccgcccttcttaaccttacccttacaagcagaaacggccttcctatgtgcggagttccgtaccacgcggcaaggacgtatatcgcccgtcttttaagattaggaaaaaaaatcgcgatttgcgaacaactcacgcagccgggaaaggggcagaaagtcattgacagggacgttgttgaagtaattactccgggcactaccgtagacgaagatttcctggacaagggaagctcaaattacatttgctgtcttgcggatgccggaagcgccttttctttttcctatatcgatctttctacgggcgatttttttacaagctctattcccgctgattcgccagagatactgcgccaggaacttgaacgcctccagattaaagagatattgattcaggaatctcttctggaaacgaacaaacaagtcgccgcggctttttatgataggagcggcatacttcttaaccggtgggcggactggctttttgatccggttcaggcaaagacgcgcctggaaaaacaattcggactggcgaaccttaaaagtttcggacttgacgccggaagcgcccaaatagtttccgcgggaactcttcttgagtatcttgacaccacttcaaagagccttttaccgcatataaggacgttgaaagtttactccgacagcgaataccttggaatagacgaatcaagccagcgcaatcttgagcttttatgcaaccagcgcgacggagaggcgcgtttttctcttttggaagttatggacgagacgcgctgcgccatgggacgcaagctgttaaaacggcgcatacttcaccccttgcgcgacttaaaaaaatag

SEQ ID NO: 14590 - protein, 287 aa, Unknown
  Obtained from environmental sample
  DOMAIN (1)...(80): MutS domain I
  misc_feature (1)..(287): Xaa is any amino acid
MFAQDAIEVSALLNLTLTSRNGLPMCGVPYHAARTYIARLLRLGKKIAICEQLTQPGKGQKVIDRDVVEVITPGTTVDEDFLDKGSSNYICCLADAGSAFSFSYIDLSTGDFFTSSIPADSPEILRQELERLQIKEILIQESLLETNKQVAAAFYDRSGILLNRWADWLFDPVQAKTRLEKQFGLANLKSFGLDAGSAQIVSAGTLLEYLDTTSKSLLPHIRTLKVYSDSEYLGIDESSQRNLELLCNQRDGEARFSLLEVMDETRCAMGRKLLKRRILHPLRDLKK

SEQ ID NO: 14591 - DNA, 921 bp, Unknown
  Obtained from environmental sample
  misc_feature (1)..(921): n is a, c, g, or t
atgatcaattcggccgagtgggcggacagaatcggatatccggtaatgctgaaggcctcggctggcggcggcggcaagggtatgcggccggtcatgtccaaatccgaaatgctagaggcttttcaattggtgaaggccgaggccaaggcctctttcgacgacgacgcgatttatatggaaaaactgctggttcatccgcggcatatcgagtttcaaattctggcggatgcgcatggcggaatagtagtcttgggcgagcgcgactgctcgctgcagagaaagcaccaaaaggttatggaggaatgccccgcggccgcgattccagacgccgaacgcgcgaaaatgattgatatatgccgcaaggccgtaaagaaaatgggatacctaaatgccggaacgctggagttcatgtacgaaaacggcgggttttatttcctggaaatgaatactcggctgcaggtcgagcaccccgtgaccgaaatggtctatggcgtcgatctggtcgcagagcagatacgcgtcgccgcgggcgagccgttgtcttttacgcaggacgatttgattccgcgcggacatgcgatggaatttaggataaacgccgaggatccggagacctttatccccagccccgggcggctgacgcaatacagcgcgcctggcggcctgggggtgcgcgtcgattccgccgcgttcacgggatatatgataccgccgaattacgattccatgatcgccaagctgatagtctgggccggctcgagagaggattgcatagcccgcgcggcccgcgcgctggacgagttcgacatcgaaggcgtaaagactacgatacctttgcagcggcgtctgctgaataacaatgacatccgcgccggccgcttcgacagcattggctggaaagatttttgccgccaaaactaa

SEQ ID NO: 14592 - protein, 306 aa, Unknown
  Obtained from environmental sample
  DOMAIN (195)...(301): Biotin carboxylase C-terminal domain
  misc_feature (1)..(306): Xaa is any amino acid
MINSAEWADRIGYPVMLKASAGGGGKGMRPVMSKSEMLEAFQLVKAEAKASFDDDAIYMEKLLVHPRHIEFQILADAHGGIVVLGERDCSLQRKHQKVMEECPAAAIPDAERAKMIDICRKAVKKMGYLNAGTLEFMYENGGFYFLEMNTRLQVEHPVTEMVYGVDLVAEQIRVAAGEPLSFTQDDLIPRGHAMEFRINAEDPETFIPSPGRLTQYSAPGGLGVRVDSAAFTGYMIPPNYDSMIAKLIVWAGSREDCIARAARALDEFDIEGVKTTIPLQRRLLNNNDIRAGRFDSIGWKDFCRQN

SEQ ID NO: 14593 - DNA, 873 bp, Unknown
  Obtained from environmental sample
  misc_feature (1)..(873): n is a, c, g, or t
gtgcgggccgtggcggcaaacggcgccgagcgggcggcgagcgacgcggcgatcatcatcaataacacggacggcccgaactccaacaacacaaacggcgagtcggctgggtatatccaaatagacctgcagagaccggcgaccggcgcccacggcgggacatactcccccggcgacggcagcgccggcgacctggacggggacggcgtttacgacatcgttctcaagtgggatccggacaacgcgaaggacaactcccaatccggaaccaccgacaacgtgctgatcgacgcttatacgttggcgggtaagaggttgtggcgtatcgatttagggcaaaacatacgggcgggggcgcactatacgcagttcttggtgttcgactttgacggcgacgggaaggcggaggtgatcatgaagaccgcgccggggacaaaggacggcacgggggcgtttatcaagacgggcccggcggcaagcgcgagccattccacggcgtaccgcaacgcggacggctatgtcctctcagggccggagtatatcaccatctttgaaggcgctacgggaaaagaactcgccacgatcgactactggccggcgcgcggcacggtgaacagctggggcgacaactacggcaaccgcgtggaccgcttcaacgcggtcgtcgcctacttggacggcgagcgtccgagcgcggtgttccagcgcggttactacacgcggatgaccttcttggcgttggactggcgcggcgggaaattgacggagcgttggaggttcgactccggcgcctccggcaacggggcgtacgcgggtcagggcaccatcagctcagcgtggcggatgttgacaccagcgggnagcactctataa

SEQ ID NO: 14594 - protein, 290 aa, Unknown
  Obtained from environmental sample
  DOMAIN (120)...(153): FG-GAP repeat
  misc_feature (1)..(290): Xaa is any amino acid
MRAVAANGAERAASDAAIIINNTDGPNSNNTNGESAGYIQIDLQRPATGAHGGTYSPGDGSAGDLDGDGVYDIVLKWDPDNAKDNSQSGTTDNVLIDAYTLAGKRLWRIDLGQNIRAGAHYTQFLVFDFDGDGKAEVIMKTAPGTKDGTGAFIKTGPAASASHSTAYRNADGYVLSGPEYITIFEGATGKELATIDYWPARGTVNSWGDNYGNRVDRFNAVVAYLDGERPSAVFQRGYYTRMTFLALDWRGGKLTERWRFDSGASGNGAYAGQGTISSAWRMLTPAGSTL

SEQ ID NO: 14595 - DNA, 483 bp, Unknown
  Obtained from environmental sample
  misc_feature (1)..(483): n is a, c, g, or t
atgggaattgtgttaatcatacttgcctttgtgctgatgataatcgggattatcggcgcggttgtgccggcgttgccggggccgccgttgagcttcatcggcttgatgcttgtgcagtggagcggatacggcggctttacttcggagtttttgtgggtgtgggcgggcataacggtgttcattaccgtcatggattatgttctcccgtcattgctggcaaggcggttcggaggctcgcgtgccgccgcaatcggctcgtttatcgggcttgtggtaggtataatttttttccctccctggggaatgattgccgggacttttctcggtgcgttggcgggtgaactaatccacaaccgcgaaaataaagcgcaggcgttcaaggccgctttgggtgcgttactcgcctttattgccggttccggggccaaactgatcgcaagctcaataatgctattctacgccgttaaagcaattgtaaactaa

SEQ ID NO: 14596 - protein, 160 aa, Unknown
  Obtained from environmental sample
  SIGNAL (1)...(24)
  DOMAIN (20)...(160): Protein of unknown function (DUF456)
  misc_feature (1)..(160): Xaa is any amino acid
MGIVLIILAFVLMIIGIIGAVVPALPGPPLSFIGLMLVQWSGYGGFTSEFLWVWAGITVFITVMDYVLPSLLARRFGGSRAAAIGSFIGLVVGIIFFPPWGMIAGTFLGALAGELIHNRENKAQAFKAALGALLAFIAGSGAKLIASSIMLFYAVKAIVN

SEQ ID NO: 14597 - DNA, 717 bp, Unknown
  Obtained from environmental sample
  misc_feature (1)..(717): n is a, c, g, or t
gtgttgttgggcaaagatcccttcaagaccaaccttatcatcgcgcatataggcaacggctcttcggttaacgcggtgaaggacggctgttctttcgacacgagcatgggtattaccccgctggaggggcttgtaatgggaacccgctcaggcgaccttgaccccgctctgcccttctacgttatgcgaaaagcgggaatgaacgacgcggaaattgaaaacgcgctgaacaagaaatccggccttgccggcattaccggggggcttaccgacaggcgggacattcagaaggcggctttggataacaacaagatggcgattctggcgcaggacatggaagctcacagggtaaaaaagtacatcggcgcttatcaggccatccttggccgcgtggatgcgctggtctttaccgccggtgtcggggagtttgcatggtggatgcgcaagaagatcctccagggacttgagggcatcggcatagtattcgatcccaaaaagaacgaaatgtcccacacccggaatacggaaacgctaatcagcaagccggaatcaaagatccccgtttttgtcatccccaccgacgaagagctggtaatgaccgaagacgcctacgccctgatggccggtacttacgacctgcacaccaagtttacctacactttccagagcaaagattacgtaaacaagggcagggccgatgggctaaaggaagagtga

SEQ ID NO: 14598 - protein, 238 aa, Unknown
  Obtained from environmental sample
  DOMAIN (1)...(201): Acetokinase family
  misc_feature (1)..(238): Xaa is any amino acid
MLLGKDPFKTNLIIAHIGNGSSVNAVKDGCSFDTSMGITPLEGLVMGTRSGDLDPALPFYVMRKAGMNDAEIENALNKKSGLAGITGGLTDRRDIQKAALDNNKMAILAQDMEAHRVKKYIGAYQAILGRVDALVFTAGVGEFAWWMRKKILQGLEGIGIVFDPKKNEMSHTRNTETLISKPESKIPVFVIPTDEELVMTEDAYALMAGTYDLHTKFTYTFQSKDYVNKGRADGLKEE

SEQ ID NO: 14599 - DNA, 672 bp, Unknown
  Obtained from environmental sample
  misc_feature (1)..(672): n is a, c, g, or t
atggagaataatatgaactgttattgtattgagactgacgataaatttatttattgtgtcgaaaatgttgaagaaaaatatgtagaaaacattgaacatgcatggttcaaaaaagagggaaataaatttgttaaagaatatcctaataattttaatgataaagaaataataaaaaataatttttcaaatataggcgaatcaatgtttaaaaatgaagggaattggggtaaatcattggaaatatttgctaataaatgtttaaacaataatatagaatggtatattattggcagtgtaagtgaagcggttcttggcgtaaatatagttccacatgatatagatattataattcatgtaagagatttctataaaacaaaagatttattcctggaatatttaattgagccatttgttgataatggtggtaattgggtagtacaatattttggcagaatatgtattgatggaataatgatagacattgcggctgataaaaaaatgaataatgaaaataatacttatgaaaattatttatggaaaaaatatgatttaaaaatagaaccaattaagaaacgatatgaaatagaagtccaacgaaaaagaatagaacgaataaaaaaaataaaagagtatatgcttaaaaatggaattgaatatgaattatatagttga

SEQ ID NO: 14600 - protein, 223 aa, Unknown
  Obtained from environmental sample
  misc_feature (1)..(223): Xaa is any amino acid
MENNMNCYCIETDDKFIYCVENVEEKYVENIEHAWFKKEGNKFVKEYPNNFNDKEIIKNNFSNIGESMFKNEGNWGKSLEIFANKCLNNNIEWYIIGSVSEAVLGVNIVPHDIDIIIHVRDFYKTKDLFLEYLIEPFVDNGGNWVVQYFGRICIDGIMIDIAADKKMNNENNTYENYLWKKYDLKIEPIKKRYEIEVQRKRIERIKKIKEYMLKNGIEYELYS

SEQ ID NO: 14601 - DNA, 633 bp, Unknown
  Obtained from environmental sample
  misc_feature (1)..(633): n is a, c, g, or t
gtggaataccggtactatcggtctgtttgccgacgcttaagtgaaactttagtgaaagacattcttcttacaactatcaacgcaaagtggatacatccttcccttgccctccgtcttttaaaagccaatcttggttctcttgaagaccgctgcgaaatatttgagtttgctctgcgccagccgttagatgaaaaagtccagccgttatatgccgcccgtccgcggattttgggtatctctgtctcaatctggaatcatacagcgaccttggaactgctttgtgaactggaaaagttgtgggcgggacaaagacccgtaattgtacttggcggaccggaagtttcgcatctgccgcaggaagcggaaatcttccggtatgcggattatgttatacgcggagaaggagaagaagcgtttagaacgttatgtgaaaaaatactttcagatggacatggacgcgagggaacggcaccgcatgctgtggcacaacttgctacggcgcaatttataaatgcggaaaatattgatgtcagcaaaataaaaagcggctatcatctttacacggatgaagatgtaacaaaaaaactgatttatgtgaagcaagccgcggctgtccttcaacgctcgcgataa

SEQ ID NO: 14602 - protein, 210 aa, Unknown
  Obtained from environmental sample
  DOMAIN (15)...(145): B12 binding domain
  misc_feature (1)..(210): Xaa is any amino acid
MEYRYYRSVCRRLSETLVKDILLTTINAKWIHPSLALRLLKANLGSLEDRCEIFEFALRQPLDEKVQPLYAARPRILGISVSIWNHTATLELLCELEKLWAGQRPVIVLGGPEVSHLPQEAEIFRYADYVIRGEGEEAFRTLCEKILSDGHGREGTAPHAVAQLATAQFINAENIDVSKIKSGYHLYTDEDVTKKLIYVKQAAAVLQRSR

SEQ ID NO: 14603 - DNA, 882 bp, Unknown
  Obtained from environmental sample
  misc_feature (1)..(882): n is a, c, g, or t
atgcaaatcaatcacaacattaatgcgatgataacccagcatgcgttgtacaacaacaacaatgctatgggcaagagtttggaaaaactctccaccggcttgaaaataaaccgagcgcaagacgatgccgcaggcctcgccatgagcgaacaaatgcgaactcagattcgcggtttaggaaaagctaaacaaaattcacaagatggcatagctgccttgcaaattgcagaaggaggcttggcagaaataaccaatataatgcagcgacagcgcgaattggctattcaatctgccaacgatactctaacttctacggagcgcaaatacttggatttggaattccaagagctaacgaaagaagttgcccgcattgcaaaaacaacagattataacggcaaaaatatgctgaattggtcttcggatccaaatctcagctttggcgcaattggaaataaatatgaattgcaagaggaagtaaaccgtgagataaggaaaataagcagtttagcagaaggattcactactgcggcaaaagccactcctactcccccagctactccccctgctggttggagtgctagtagcggatatgaattggttatgaatgctatcaaatgccttaacactattgcgaatgctgacccagcgaccactacaacaattaggcaggatccagctcatatcagctctccctatcctcctccgggtgaatatgataccccttctaatgttgctcctcgtactagtgatagcttgatgtatcaattgcaaaatgcaattgatatactcaaaaataatcttgatgcataccattttcccgccgataaagacagggctcttgcagaggctcttcangagacgttctcggccgatctgacatga

SEQ ID NO: 14604 - protein, 293 aa, Unknown
  Obtained from environmental sample
  DOMAIN (27)...(167): Bacterial flagellin N-terminus
  misc_feature (1)..(293): Xaa is any amino acid
MQINHNINAMITQHALYNNNNAMGKSLEKLSTGLKINRAQDDAAGLAMSEQMRTQIRGLGKAKQNSQDGIAALQIAEGGLAEITNIMQRQRELAIQSANDTLTSTERKYLDLEFQELTKEVARIAKTTDYNGKNMLNWSSDPNLSFGAIGNKYELQEEVNREIRKISSLAEGFTTAAKATPTPPATPPAGWSASSGYELVMNAIKCLNTIANADPATTTTIRQDPAHISSPYPPPGEYDTPSNVAPRTSDSLMYQLQNAIDILKNNLDAYHFPADKDRALAEALXETFSADLT

SEQ ID NO: 14605 - DNA, 756 bp, Unknown
  Obtained from environmental sample
  misc_feature (1)..(756): n is a, c, g, or t
ttgcgcaaaaattcaatttacggccttgttgagttaaacaggcaaaaaataaaaacctccgccgcgaagggacccgttatcatcggcaatcccggctgttatcccacaggcggctctctcggcgcgtttcccgctttggcaaagggccttaacaacgcgcaaatgcccgtcatcgttgacgctgtttcaggcgttacaggcggcggcagggagctgtcccgctcctttcattacgccgagtgcgcggattccgtttcgccgtacaaagtcgcctcccacaggcattctcccgaaattgcgcgtaacttggcggcgatggccgcggttgggaacaattccgcgcccagcctgatttttacgccgcgccttgcccccatgaacaggggaatcctcagcgtcatttacattccgttaacgccgcagtggcgcgttaccgttaacggcgccaatatgccgccgtcaaatgaaattgaggcgaaggccggcgaaatcagaaaactttattcggatttttacaaagacgaaccgtttgttagggtacttccggcgggtcttaccgccgccacaaaccgcgtgcgccagtcaaatttctgcgacatgtccgtccatcttgatttaaacggctccacattaattgttaccacggccatagacaacatggtaaaaggcgccgccgggcaggctgttcagaacatgaacgtcttgttcggttttgacgaanaagccggcctagacgcgataccggccctgttttag

SEQ ID NO: 14606 - protein, 251 aa, Unknown
  Obtained from environmental sample
  DOMAIN (47)...(222): Semialdehyde dehydrogenase, dimerisation domain
  misc_feature (1)..(251): Xaa is any amino acid
MRKNSIYGLVELNRQKIKTSAAKGPVIIGNPGCYPTGGSLGAFPALAKGLNNAQMPVIVDAVSGVTGGGRELSRSFHYAECADSVSPYKVASHRHSPEIARNLAAMAAVGNNSAPSLIFTPRLAPMNRGILSVIYIPLTPQWRVTVNGANMPPSNEIEAKAGEIRKLYSDFYKDEPFVRVLPAGLTAATNRVRQSNFCDMSVHLDLNGSTLIVTTAIDNMVKGAAGQAVQNMNVLFGFDEXAGLDAIPALF

SEQ ID NO: 14607 - DNA, 312 bp, Unknown
  Obtained from environmental sample
  misc_feature (1)..(312): n is a, c, g, or t
ttgatacgccctggcctattgcggggccgcagcctgaatgactgcgcggttatcctggacgaggcgcagaataccacaaaagaacagatgaaaatgttcctgacgcgaatcggcgccggagcgcgggcggttattaccggagacgtaacccagattgacctgccgggaagaaccgaatcagggttgcttcacgccgcggatattctgaaaaatgtcgacgggcttcatttttcatatctccataccgccgatgtcgtgcgtaatcccctgataaaaaaaataatacaggcttacgatgaaaaaaatccttaa

SEQ ID NO: 14608 - protein, 103 aa, Unknown
  Obtained from environmental sample
  DOMAIN (1)...(99): PhoH-like protein
  misc_feature (1)..(103): Xaa is any amino acid
MIRPGLLRGRSLNDCAVILDEAQNTTKEQMKMFLTRIGAGARAVITGDVTQIDLPGRTESGLLHAADILKNVDGLHFSYLHTADVVRNPLIKKIIQAYDEKNP

SEQ ID NO: 14609 - DNA, 627 bp, Unknown
  Obtained from environmental sample
  misc_feature (1)..(627): n is a, c, g, or t
atgaaaaaaatccttaattcccctgagatgagattacggggtttcctgtacacgctcctgaagatgccccgcatggggcgggttcccggcattatttgcgtgtgttccttttttgcctccgtaattgtcattatcactaatttgaatttaaattccgacgggctgggtgacatcagaaattttgaagtcggcaaggtagcggacagggatgtcatagccgaacactctctttcctatatagacaatgacgcgacgctgatgagggtgaaagcccaggagaacatggtccccgcggtgttccggtattctgaaaatcccggagtcgaagcgatcgattcctggaataaattctgcgacctggccgacaaactggtcacggaaggctcgtcccgaagttcaaggcaattggcaatccaggccgagtaccgcgactattttacaaacgagaccatcgactcttactttaacgctccggacagatccgccttcagatcatacgggctgaaggtactggacagcgttcttgaaaaaggggtatttacaatggactaccccgatttggggagctataaccccgatctggcggaacttattatttcccgaggcgactgtgtcgaaagggactga

SEQ ID NO: 14610 - protein, 208 aa, Unknown
  Obtained from environmental sample
  misc_feature (1)..(208): Xaa is any amino acid
MKKILNSPEMRLRGFLYTLLKMPRMGRVPGIICVCSFFASVIVIITNLNLNSDGLGDIRNFEVGKVADRDVIAEHSLSYIDNDATLMRVKAQENMVPAVFRYSENPGVEAIDSWNKFCDLADKLVTEGSSRSSRQLAIQAEYRDYFTNETIDSYFNAPDRSAFRSYGLKVLDSVLEKGVFTMDYPDLGSYNPDLAELIISRGDCVERD

SEQ ID NO: 14611 - DNA, 447 bp, Unknown
  Obtained from environmental sample
  misc_feature (1)..(447): n is a, c, g, or t
atgcccaataaaatagccgcacatgaggcttggcatagtttgttgaatcacaatattcttatcgtctggcaaccctcgtataatttgggaataccgatcgttgatgagcagcaccgggggatcgtttctaccatcaattccctttgctacgcgatacagaacaggcatggcaatgagatgctccggcccgtgatcggcatggttaccgaatacacccgcatccatttcgagatcgaagaggattttcttggaaaatgcggctaccccgatttggaaagtcatcgtacattgcacaaagaattgacacaaacgctgtcccacgtcggtaaggacagcatttggaataaagacccccaggagtttttaggctttctcaaagaatggtggatccaccatatctgtaaagaagaccaggtattcaaccgttacttgtcaagccggcaatga

SEQ ID NO: 14612 - protein, 148 aa, Unknown
  Obtained from environmental sample
  DOMAIN (90)...(143): Hemerythrin HHE cation binding domain
  misc_feature (1)..(148): Xaa is any amino acid
MPNKIAAHEAWHSLLNHNILIVWQPSYNLGIPIVDEQHRGIVSTINSLCYAIQNRHGNEMLRPVIGMVTEYTRIHFEIEEDFLGKCGYPDLESHRTLHKELTQTLSHVGKDSIWNKDPQEFLGFLKEWWIHHICKEDQVFNRYLSSRQ

SEQ ID NO: 14613 - DNA, 732 bp, Unknown
  Obtained from environmental sample
  misc_feature (1)..(732): n is a, c, g, or t
ttgggctttgaatacggcggagggccgggcggggacggcggaagagacggcgatcccaaaatacagattctcgtttatgattttggtggtacttcatcagggcgtttcggtaatgagttttatgacacggacggtttgaactttggtgaattattagaaatacatgcaggcgccgtaaattattttccagatcatgcatattctgttttagtccatgaatttcaacacatgatcaattataatgtgaaagttgagaaacaaggaaagagtacacaaccatggtattccgaaatgctttccatgctggccgaagacgtaatctcgccgttgataggcattggtcctgcagattcaaatcaccctataaattcccgtatccctggatttctgaacatttataaccaggctggcataacagaatggggttacagcggtgacactatcgtttcttatgcaattgattacggttttggcgcgtatctgctgcgaaactatgggggagcggagcttttaaaagaaatactttccaatgattcaactaacattgagtcaataacggcggcgctgagaaaagtcaatgcgaataacgggctaagttttgaagaagccatcaggcgcttcggcgaagctctggttttcagcggaaccaacatgccggccgatgtacagtcttttgataaaaccgttancaaaaaccataggcggttatacctataccgctacaaagtttaa

SEQ ID NO: 14614 - protein, 243 aa, Unknown
  Obtained from environmental sample
  misc_feature (1)..(243): Xaa is any amino acid
MGFEYGGGPGGDGGRDGDPKIQILVYDFGGTSSGRFGNEFYDTDGLNFGELLEIHAGAVNYFPDHAYSVLVHEFQHMINYNVKVEKQGKSTQPWYSEMLSMLAEDVISPLIGIGPADSNHPINSRIPGFLNIYNQAGITEWGYSGDTIVSYAIDYGFGAYLLRNYGGAELLKEILSNDSTNIESITAALRKVNANNGLSFEEAIRRFGEALVFSGTNMPADVQSFDKTVXKNHRRLYLYRYKV

SEQ ID NO: 14615 - DNA, 783 bp, Unknown
  Obtained from environmental sample
  misc_feature (1)..(783): n is a, c, g, or t
gtgggcaggtattcgcttaaacacgcttgcgacgccgtctccgtaacgctggacaacgcgcaccgcgcattgcacgacgcgaaggcgtctggggagcttgcggtgcggcttataccgatgcttgccgagctgccactcgcggtgcgccaagcgctggcggcattcgcgccggggtctatgttcaagacgctggcgataaagagtttgttcggggcgcgctacggcgttaatttggcggcgggcgagcagctgcccggcgatttgcaacaggtcggcgctccggaggagatcgctccgattgacatctcggaaataaagagcctcttttccgacgaggaaaagaccgggcgcgtaatagccggtttccatgccagaagcgcccagcaggagatggcgcttcgcgttacccacgcgttgaacaaccgggggattttggtcgctgaggcgggaaccggcacgggtaagtctctggcgtacttggtcccggccgctttccacgctctaaacaataattgccgtgtgatagtctccacgcatacccgcaatctgcaagaccagctcatcaccaaagacctgccgaatgtcgcggcgctctgcggggggaagctgcgttactctaaactgaaggggcggggcaactacctctgccgcaaccgtttttacaagatgctgaagggcgaaatcggcgccttctcgcaacgcgaacgcaacgccgcgctgccgcttatcgtctggtcgcagtacacggagagcggagacatagaagagcctcggccgatctga

SEQ ID NO: 14616 - protein, 260 aa, Unknown
  Obtained from environmental sample
  misc_feature (1)..(260): Xaa is any amino acid
MGRYSLKHACDAVSVTLDNAHRALHDAKASGELAVRLIPMLAELPLAVRQALAAFAPGSMFKTLAIKSLFGARYGVNLAAGEQLPGDLQQVGAPEEIAPIDISEIKSLFSDEEKTGRVIAGFHARSAQQEMALRVTHALNNRGILVAEAGTGTGKSLAYLVPAAFHALNNNCRVIVSTHTRNLQDQLITKDLPNVAALCGGKLRYSKLKGRGNYLCRNRFYKMLKGEIGAFSQRERNAALPLIVWSQYTESGDIEEPRPI

SEQ ID NO: 14617 - DNA, 375 bp, Unknown
  Obtained from environmental sample
  misc_feature (1)..(375): n is a, c, g, or t
atgccaaacatttctccaaaatggattaaatccctaggcgaaaatgaaattttcgtttttggcagcaacctcgcgggttttcacggaggaggcgcagccgaactggctatggaatggggagcggtttgggggcagggcgttggattgcaggggaaaacttatgccattccaacgatgtttaagtcagtagaagaaatgaaaccttatattgacgaatttctgatttttgcaaaagcgcatcccgaattgaaatttctagttacggaattgggatgcggaatagcaggttttacgccaaaagatgtggcaccgcttttcaatgcggtgatagacgaaaatattgagaatgtgtatttgccggagaggtttgtttga

SEQ ID NO: 14618 - protein, 124 aa, Unknown
  Obtained from environmental sample
  misc_feature (1)..(124): Xaa is any amino acid
MPNISPKWIKSLGENEIFVFGSNLAGFHGGGAAELAMEWGAVWGQGVGLQGKTYAIPTMFKSVEEMKPYIDEFLIFAKAHPELKFLVTELGCGIAGFTPKDVAPLFNAVIDENIENVYLPERFV

SEQ ID NO: 14619 - DNA, 762 bp, Unknown
  Obtained from environmental sample
  misc_feature (1)..(762): n is a, c, g, or t
ttgagcaagggcgacgctcagaccgccctcaagctctgcaaagagcttgcgttgctcacgccgaacgatcccaaaccctttaaaaccctctacgaagcgtcgctcaaggacggaaacaagaaggacggcgtcatgtacctgcggaacttcgtgctgttggactcaagcgacgccgccgccataaagcagctcgccgacctgctctacgaatccaaagatgccgacggcgcgctaaacgaataccgcaaggccctgcggcgcgacccgaacatcaaaggtatttacaagaactatgtcgccatccttatagacaaaaagcaggatgaagaggcgctgaaagccgttcaaaaggccatcgccctgaaagaggtcaatgcgatgatttacggggctgcgggggatatgtacaagaaacgcggcgaaaacgcgaacgcgataaagatgtaccaggccgctttgacgctcgacaagcagaacgtagagcttttggccaaactcgccgacgcccaaacggcctccggcgaaatccgcaacgcgatagtctcctacgaacagttggttgtcctcaacccgaacgtctctaacgaatacaaagtgttgggcgacttggtgacaaagtcaggcaaggccaaggagggcatggacaactacaaaaagtacttggccaaggttccgtccgacaacgaggtctccgtaaggtcggcctctacgagtactgggcacagcagtacaagtcggctgtctcctacccctagcatgtga

SEQ ID NO: 14620 - protein, 253 aa, Unknown
  Obtained from environmental sample
  DOMAIN (126)...(159): Tetratricopeptide repeat
  misc_feature (1)..(253): Xaa is any amino acid
MSKGDAQTALKLCKELALLTPNDPKPFKTLYEASLKDGNKKDGVMYLRNFVLLDSSDAAAIKQLADLLYESKDADGALNEYRKALRRDPNIKGIYKNYVAILIDKKQDEEALKAVQKAIALKEVNAMIYGAAGDMYKKRGENANAIKMYQAALTLDKQNVELLAKLADAQTASGEIRNAIVSYEQLVVLNPNVSNEYKVLGDLVTKSGKAKEGMDNYKKYLAKVPSDNEVSVRSASTSTGHSSTSRLSPTPSM

SEQ ID NO: 14621 - DNA, 885 bp, Unknown
  Obtained from environmental sample
  misc_feature (1)..(885): n is a, c, g, or t
gtgggcgcgatacagatagagcgcaagcagtacgccgcgggcgtggccaacttagagaaagccgccgccgccaaatccgacgactacgaggtatgcatgctgcttgccgccggatacaccaacatcggcaaacccaaagaatccgccgcccaatacaaaaaggcgaagtctctcaaacccgacaacgtctccatccgcctaagcatcatagaggcgcttgagaagtcgggcgacgccgagggcatcaaggaggagaagacctcccttgccgaactcgatcgtaaaatagcggcctccgacaagaagaacgtggaatcgcgccagcgcctaatagcctactgcagggccaacaacgacaacgcgcgcgcctacacatacctaaacgaactcgcggaactgacgccgaaagacccggcggttttcaagagcctctacgatatagctatggcggacggcaaaaagaaagacgccataggctatctgaagaagtacatagccctaaagccgaacttagccgacgcgcagaaaaaccttgggcttttgctctacgacgataaagacttcgatggggcgttgaccgctttcagggaggcgcgcaggatggatcccgcgataacaggcatatataaagcctacgtggccatcctcatccaaaagaagctggatagcgagatgctgacggtcggcgccgccgccgtcgcggccaaagaggtcgacgccgtaacctacgccgccatgggcgatatctactccagacagggcaagtattccgaagccgccaaaatgtataagggcgcgctcgacatagacaagcaaaatacctctatgctcgctatctacgccgagtgttggcgaaaggcggcgacctccggggcgcgtccatag

SEQ ID NO: 14622 - protein, 294 aa, Unknown
  Obtained from environmental sample
  DOMAIN (172)...(205): Tetratricopeptide repeat
  misc_feature (1)..(294): Xaa is any amino acid
MGAIQIERKQYAAGVANLEKAAAAKSDDYEVCMLLAAGYTNIGKPKESAAQYKKAKSLKPDNVSIRLSIIEALEKSGDAEGIKEEKTSLAELDRKIAASDKKNVESRQRLIAYCRANNDNARAYTYLNELAELTPKDPAVFKSLYDIAMADGKKKDAIGYLKKYIALKPNLADAQKNLGLLLYDDKDFDGALTAFREARRMDPAITGIYKAYVAILIQKKLDSEMLTVGAAAVAAKEVDAVTYAAMGDIYSRQGKYSEAAKMYKGALDIDKQNTSMLAIYAECWRKAATSGARP

SEQ ID NO: 14623 - DNA, 765 bp, Unknown
  Obtained from environmental sample
  misc_feature (1)..(765): n is a, c, g, or t
ttgcaaaattgggcgcgggagattaactcaggtaatgaagccgtcgcctgttatgtgaccattgagcgctgccagagactgcctgaaccagagcggtgtatgccaaatatatgcgttgcaattcaggaacatgccgttttttcagaattgcctgttcctgttttggagacaagtgaaccaaacagcatggtaagcaatattcttgctgactggtcaaaaaaaacagcccccaaaccgctggttttactgtttgatgaagttgacgctctggaaggggacgctatgatcagcttcttgcgccaactgcgcggtggttttatgaatcgcggcattggaaaattcccggtatccgtcgcgcttgtcggcatgagggacttaaaagattatattacactcgctaaagacggagttcaaccaagcccgctgtcccctttcaatataaaaacagattcaattttactggggaattttatacaggatgatgtaaaaaaattgtttgcccagcgcaccgaagaaacagggcagcaaatcacagatgaggctttagagtatgtgtgggagcaatcccagggacaaccgtggataattaattcattatttgatcgcgttacaatgcgtatattaaaaaagggcgattatagctctgtaactatagaacacatagaacaggcccgcgagcagatgattctcgcgagggaaacgcatttggattcgcttgcttaccgtattgaagatccaaaaatagaaaaattatgtcaaccttaa

SEQ ID NO: 14624 - protein, 254 aa, Unknown
  Obtained from environmental sample
  misc_feature (1)..(254): Xaa is any amino acid
MQNWAREINSGNEAVACYVTIERCQRLPEPERCMPNICVAIQEHAVFSELPVPVLETSEPNSMVSNILADWSKKTAPKPLVLLFDEVDALEGDAMISFLRQLRGGFMNRGIGKFPVSVALVGMRDLKDYITLAKDGVQPSPLSPFNIKTDSILLGNFIQDDVKKLFAQRTEETGQQITDEALEYVWEQSQGQPWIINSLFDRVTMRILKKGDYSSVTIEHIEQAREQMILARETHLDSLAYRIEDPKIEKLCQP

SEQ ID NO: 14625 - DNA, 345 bp, Unknown
  Obtained from environmental sample
  misc_feature (1)..(345): n is a, c, g, or t
atggataaaggttctcttgaaatactaaaagaaaatctttattcgctcaatttaagcctcaacaggcttatatattcttatgatgaatgcagtaaaatcaatttaaaagatgcttattcagataaagaattcgtggcttttgaggcaatgacagcaagatattccagaaccaccgatatgttaattaacaaggtattgcgaagccttgacgcagttgaatacatagatggcggaacggttattgacgcgacgtataatacggagaaacgcggtatcgctgacgcccaggaattacggaaattgaaggatctgcgaaacctgatcgcgcacctcggccgattctga

SEQ ID NO: 14626 - protein, 114 aa, Unknown
  Obtained from environmental sample
  misc_feature (1)..(114): Xaa is any amino acid
MDKGSLEILKENLYSLNLSLNRLIYSYDECSKINLKDAYSDKEFVAFEAMTARYSRTTDMLINKVLRSLDAVEYIDGGTVIDATYNTEKRGIADAQELRKLKDLRNLIAHLGRF

SEQ ID NO: 14627 - DNA, 585 bp, Unknown
  Obtained from environmental sample
  misc_feature (1)..(585): n is a, c, g, or t
atgtctgcggcgatacagggacagagcggaagcggcaaaagtactttgcttaacatcttgggtgggcttgaccgcgccgacggagggagcgtttttatcggcaatgatgaaattacttccctttccgaaaaagaaatgccggtgtatagatcaaaacgcgtcggttttatttttcagtttcattatctgcttaaagattttaccgcccttgaaaacattatgattcccgcctacatagccggaatgaaggaaaaggacgcaatggacagggcaagaacgcttcttgccgacgtaaaccttgaagatcgcggcggccatttcccatctcagctttccggcggagaacgtcagcgtatagcggttgcaaggtctatggtaaacgatcccgctctgatacttgcggatgaaccgaccggtaatcttgatcctgtaaacagcgacattgtttcggaattgctctatgccgccgcgcaaaagagggggaaaacattaattgttgtaactcacgatgaaaaagcggcggcaagggcttctgtccgccttgttctggaaaacggacagttgtcgcaggggcatataatttga

SEQ ID NO: 14628 - protein, 194 aa, Unknown
  Obtained from environmental sample
  DOMAIN (3)...(186): ABC transporter
  misc_feature (1)..(194): Xaa is any amino acid
MSAAIQGQSGSGKSTLLNILGGLDRADGGSVFIGNDEITSLSEKEMPVYRSKRVGFIFQFHYLLKDFTALENIMIPAYIAGMKEKDAMDRARTLLADVNLEDRGGHFPSQLSGGERQRIAVARSMVNDPALILADEPTGNLDPVNSDIVSELLYAAAQKRGKTLIVVTHDEKAAARASVRLVLENGQLSQGHII

SEQ ID NO: 14629 - DNA, 864 bp, Unknown
  Obtained from environmental sample
  misc_feature (1)..(864): n is a, c, g, or t
atgttgnaagatgattttaatctggaaacgctcattatctgcccgcctaatttgatggaaatgtgggaagattacaggcataagtaccagcttcgcgcaagagtaatgtcccttggcgaagttcaatataaattaaaaaacatgccccgttaccgcatagtgataattgatgaaagccataatcttagaaaccgggaaggacggcgttaccgcgcgatagccgaatatttggctcttaacaattcaaaagtaataatgcttaccgctacgccttataataaaagttatcttgacctttcaaaccagttgcggcttttcttaaatgaaaatcaaaatctgggcattactcctgaacgctatataaaagaaatcggcggcaatgtacaatttgccgcaaaacatcaggtaaaagaaacaagccttgcggcttttgaaaaaagcgaatattcggacgattgggctgaactcatgaggctgtttttagtccgccgtacccgcagttttattaaggcaaaccattcgaaaaaagatgaaaaaacaggcagaatgtacattgaattcgcgcctaacgatgacggcgtaaaagaaaaaagtttcttccccgaccgcatacccgcaaaagttgagtattcatttaataaaggcgacaatgacgaccaatacgcaaggctttattcagccgatgtggtaagcacaattaatgaattgcttctgccccgttacggtatcggacaggatatttatgaaaacaaggcaaacgttaaaaacataaaaccggaagaagtaaaaattaaaaacaaccttgctaaagcgggcaaacagctccgcggtttgcacgtctcggccgatctgatcatgaattga

SEQ ID NO: 14630 - protein, 287 aa, Unknown
  Obtained from environmental sample
  misc_feature (1)..(287): Xaa is any amino acid
MLXDDFNLETLIICPPNLMEMWEDYRHKYQLRARVMSLGEVQYKLKNMPRYRIVIIDESHNLRNREGRRYRAIAEYLALNNSKVIMLTATPYNKSYLDLSNQLRLFLNENQNLGITPERYIKEIGGNVQFAAKHQVKETSLAAFEKSEYSDDWAELMRLFLVRRTRSFIKANHSKKDEKTGRMYIEFAPNDDGVKEKSFFPDRIPAKVEYSFNKGDNDDQYARLYSADVVSTINELLLPRYGIGQDIYENKANVKNIKPEEVKIKNNLAKAGKQLRGLHVSADLIMN

SEQ ID NO: 14631 - DNA, 708 bp, Unknown
  Obtained from environmental sample
  misc_feature (1)..(708): n is a, c, g, or t
ttgcctgatcttctgcccgccatcgcggaggttcccggcgatttctgggtgcgcctgctctatttgcatccggaccattttccgctggctatccttgatattatggaaagggacacccgcttccttccctattttgacatccccttccagcatggttcaaaaaagatactttcggcaatgaaccgctgtggcgacgcggagagctatatcgcgttagctgaaaccatcaggaagcggctccccgccgccgttatacgcacgacctttcttgcgggctttcccggcgaaactgaagacgatttttccctgctgacggatttccaggaaaaactccggcctgactgggccggctgtttcgcctattcccgcgaggatggcacccccgcgtatacgataaaaccgcagatttcacccaaaactgccgcccgcaggaagcgtgaaattgaggaacgccagattccaattaccgaaaaaagcatggatcgctttgtgggccaaaaccttgacgcgctttttgaggaacagttttccggaacagaaaacgaggatatttggcttggccgtctttactgtcacgcgccggaggttgacggggccgccgtaatcacgggcgccatgcccggaacgaagccccaagccggggatctgctgccatgccgggtaatagcccgcaggggcattgatctagaagtaatttgcaatgtatga

SEQ ID NO: 14632 - protein, 235 aa, Unknown
  Obtained from environmental sample
  misc_feature (1)..(235): Xaa is any amino acid
MPDLLPAIAEVPGDFWVRLLYLHPDHFPLAILDIMERDTRFLPYFDIPFQHGSKKILSAMNRCGDAESYIALAETIRKRLPAAVIRTTFLAGFPGETEDDFSLLTDFQEKLRPDWAGCFAYSREDGTPAYTIKPQISPKTAARRKREIEERQIPITEKSMDRFVGQNLDALFEEQFSGTENEDIWLGRLYCHAPEVDGAAVITGAMPGTKPQAGDLLPCRVIARRGIDLEVICNV

SEQ ID NO: 14633 - DNA, 381 bp, Unknown
  Obtained from environmental sample
  misc_feature (1)..(381): n is a, c, g, or t
ttgaatcaagccattaccccaagccgccgttcaggggcgtcgttcgcgagcgcccaggggctcgctctgctccagcggaactatgtcgcttcctttgtttccagccccgaccccgtgccccttgatgccggctcgcatgaagaagtggtcaagctcaggcttgcccggcggactatatcggagggcttcagggagataattctcagcgtcgacgccgccagcaaattgatacgccgcattgaaggtcgtaccattgccgatgtccaggtccggttcgatttcaccaatatcaggacaaacattggtattcccgagcttcgttttatttatgattctccggcgtccgccaatatgtataacaatttcctgttcagggattaa

SEQ ID NO: 14634 - protein, 126 aa, Unknown
  Obtained from environmental sample
  misc_feature (1)..(126): Xaa is any amino acid
MNQAITPSRRSGASFASAQGLALLQRNYVASFVSSPDPVPLDAGSHEEVVKLRLARRTISEGFREIILSVDAASKLIRRIEGRTIADVQVRFDFTNIRTNIGIPELRFIYDSPASANMYNNFLFRD

SEQ ID NO: 14635 - DNA, 648 bp, Unknown
  Obtained from environmental sample
  misc_feature (1)..(648): n is a, c, g, or t
ttgaaggtcgtaccattgccgatgtccaggtccggttcgatttcaccaatatcaggacaaacattggtattcccgagcttcgttttatttatgattctccggcgtccgccaatatgtataacaatttcctgttcagggattaactcgggggaaatagtggaatctcttggtgaaaaattaagaacggctcgtgaggaaaagggccttactctggacgatgccggaaaggataccaaaataactataaggtatcttgaggcgcttgagaaggaagatttttccgggtttcccggcgaggcctatgtcaccggttttttaagaaattacagcgcgtaccttgaccttgacgtacaggaaatcctctctctttactatgctcttaaaatccaggagcagcctataccggaacagcttttaagaaaaactccggttatcgcgccaaaaattattgttggcacgttattggggattattctttttggcataattggcggaggggtttattacattataaaccgtcccagaaaaccgaggtctgcggcggcggctcccagaacccctgtggaatatgtcatggaagagacagtttcgagcgtcgtttttaccaaggcgattcggttttggttccggcccgggacgagcagttaa

SEQ ID NO: 14636 - protein, 215 aa, Unknown
  Obtained from environmental sample
  misc_feature (1)..(215): Xaa is any amino acid
MKVVPLPMSRSGSISPISGQTLVFPSFVLFMILRRPPICITISCSGINSGEIVESLGEKLRTAREEKGLTLDDAGKDTKITIRYLEALEKEDFSGFPGEAYVTGFLRNYSAYLDLDVQEILSLYYALKIQEQPIPEQLLRKTPVIAPKIIVGTLLGIILFGIIGGGVYYIINRPRKPRSAAAAPRTPVEYVMEETVSSVVFTKAIRFWFRPGTSS

SEQ ID NO: 14637 - DNA, 489 bp, Unknown
  Obtained from environmental sample
  misc_feature (1)..(489): n is a, c, g, or t
atgtcctacgagaattacttcaggctccccgccaaattagtcttcggcagcgaggtaaagttgggcgcgataaccccgctcgtcggtaatcttaaaatatcgagagacgacctattcaccggcggcggcgcctacggcgacgcgataatcaggggttactccgattgggcgttcggcgggtatcgccgttggtggatgggcgacgggatatcgatgttcgcggtgaatatgtcgctgcgctacccgatcgtagatcagcaggtatacataggcatgttcgccgatatgggcaacacttggccggcaatctccaagatcgacatcggcgatctgtaccgcggcgtgggcggcggtctccgcatcaatctgcctatgatcggggtgatgggcgtcgatatcgggtacgggctcgacccgctcgacaagagcggtatcaacaacgcgccgagcgggaccagttggcatatcattatgaatagaggtttttga

SEQ ID NO: 14638 - protein, 162 aa, Unknown
  Obtained from environmental sample
  misc_feature (1)..(162): Xaa is any amino acid
MSYENYFRLPAKLVFGSEVKLGAITPLVGNLKISRDDLFTGGGAYGDAIIRGYSDWAFGGYRRWWMGDGISMFAVNMSLRYPIVDQQVYIGMFADMGNTWPAISKIDIGDLYRGVGGGLRINLPMIGVMGVDIGYGLDPLDKSGINNAPSGTSWHIIMNRGF

SEQ ID NO: 14639 - DNA, 435 bp, Unknown
  Obtained from environmental sample
  misc_feature (1)..(435): n is a, c, g, or t
ttgatcagatcggccgagagggagcttgcctccaggttcggcaacagagaagtccacggcattgccgccccggaacttgtggaatttgtcgaaagccggttcaattccgcttcgcccgatgaaaagagaaatatcgttatgggctatctgaaccgcttccgcgccgaaggcgttgacaccctggtactgggctgtacgcactttctcttgctgttagacgaattccagcgtgaagcggcccctgacattaccgtgtttgattcaatcaccggaatttcacaccgcattgaatctttgatggggcaaaaaagcggcggagaaaaccaccgccgtcaaaatcgtattctgctgacaggcccctccgctcccgagccttcatggatctctctggcgcagcggcttggtttcagcctgtcgctgttggatgcgccatga

SEQ ID NO: 14640 - protein, 144 aa, Unknown
  Obtained from environmental sample
  misc_feature (1)..(144): Xaa is any amino acid
MIRSAERELASRFGNREVHGIAAPELVEFVESRFNSASPDEKRNIVMGYLNRFRAEGVDTLVLGCTHFLLLLDEFQREAAPDITVFDSITGISHRIESLMGQKSGGENHRRQNRILLTGPSAPEPSWISLAQRLGFSLSLLDAP

SEQ ID NO: 14641 - DNA, 855 bp, Unknown
  Obtained from environmental sample
  misc_feature (1)..(855): n is a, c, g, or t
atgacagatcgccgagggcaaggcatgcgctggctacggggaagaatgctcaataacaacgcggatgcatatcccggcagtgttgaactgacactgaacaaggaagggacactggatataaaaacctccagtcctgacagcgatcatgtaagcgtctggaacgctctggcctctaaaattctggaaatagacaaaaaaaaggttcggataagctataacgccgattcccgggattccggacccttgacaagcttccgcaatataacaattttaaccaaactgatagaacaggcctgcaagacaatgcaaaaacgcagggagaaagagcccctgcccataacggtacgcaaaaccgcgcgtccccagaaaaccgatgttttggaagacagccatccaaaaggcgttttagacgcaaacagtttttccctgcttggatgggcttcggcggtcgtagaagtggaatttgatcccataggctatatgccgcgcatacggggagtttggatgtgcgtagacggcggtaaaatcttatcggaggacaatgcccgcaaaaacctgaaaatttcgattgtacaggctttgggctggtcttttcgggaacaaatcagttatattgacggggcgattcccgtcgagcagtttgagaatttcgagattccgggcatagcggagattccgcctatagttattacttttataaacagcaattccggagagccaaagggaataggggatctgccgtttagctgcatacccgcggcttttgtgcaggcggtttcacaggcggcgggctgccatttcaaagggatcccgctgaaagcgaaggagatattcagcgccgggaggatggcatga

SEQ ID NO: 14642 - protein, 284 aa, Unknown
  Obtained from environmental sample
  misc_feature (1)..(284): Xaa is any amino acid
MTDRRGQGMRWLRGRMLNNNADAYPGSVELTLNKEGTLDIKTSSPDSDHVSVWNALASKILEIDKKKVRISYNADSRDSGPLTSFRNITILTKLIEQACKTMQKRREKEPLPITVRKTARPQKTDVLEDSHPKGVLDANSFSLLGWASAVVEVEFDPIGYMPRIRGVWMCVDGGKILSEDNARKNLKISIVQALGWSFREQISYIDGAIPVEQFENFEIPGIAEIPPIVITFINSNSGEPKGIGDLPFSCIPAAFVQAVSQAAGCHFKGIPLKAKEIFSAGRMA

SEQ ID NO: 14643 - DNA, 858 bp, Unknown
  Obtained from environmental sample
  misc_feature (1)..(858): n is a, c, g, or t
atgacagatccgagactattttgccatattccgggtatggcgctgggagtcggtcttttaagccgctttcccagtttgagggagacaagggtcacnacttcggtttatataaatggtgaagtcgccccacggccaatgctggaagtgaagataattacacctaacacaaccgcggacaagaccgcttcggaaagtgccgataattcgctgctgctttttgtctgccactggaaatccaagctcggcggcgatgacgccaccgaaagtgcccgcagagcatcggcgcgcattatcctccgcaggcttcgcgaactggctgaaaccgagccggagcttcctgtggttatcatgggcgatctgaacgagaaccacgacgatttttaccgccgcagtggaaaagtaatcagcgcccttatgcccgatgatccccgcgcggcggaattttcaggcttgcacggaattgacagcgaggatccgcgatccgccgcggcgattgcggaaagacaaaaagacttcctcattcttgtcaaaaacaaaccgcctgcgccacggtatttcccttccggagtgataatcctgtactcgccgtggtttgcggaactgcgaaacgaaggtgaagatttttcaggttcctattactacaaaaacaactgggaaaccatcgatcatttcctgctttcaccccgatttttcgatgaaaccggctgggaatttgaaaacgcgcggataataaattttccgccttttaccagcgcanagggaacgcccattgcgtataacccgcgaaccggctccggtctgagcgatcatttaccattgttgctgctgttgaagaagggagtcgggagtggggagtag

SEQ ID NO: 14644 - protein, 285 aa, Unknown
  Obtained from environmental sample
  DOMAIN (13)...(277): Endonuclease/Exonuclease/phosphatase family
  misc_feature (1)..(285): Xaa is any amino acid
MTDPRLFCHIPGMALGVGLLSRFPSLRETRVTTSVYINGEVAPRPMLEVKIITPNTTADKTASESADNSLLLFVCHWKSKLGGDDATESARRASARIILRRLRELAETEPELPVVIMGDLNENHDDFYRRSGKVISALMPDDPRAAEFSGLHGIDSEDPRSAAAIAERQKDFLILVKNKPPAPRYFPSGVIILYSPWFAELRNEGEDFSGSYYYKNNWETIDHFLLSPRFFDETGWEFENARIINFPPFTSAXGTPIAYNPRTGSGLSDHLPLLLLLKKGVGSGE

SEQ ID NO: 14645 - DNA, 618 bp, Unknown
  Obtained from environmental sample
  misc_feature (1)..(618): n is a, c, g, or t
atggccgaagatgtaactaagagactggggagcaaaggcgatattgattattttaaatataacggcaagcaggcggctgttttggaattgaatttcggagacaaattaaacggttgggggacttgcgttgagcttgccggaactaaaggaagccgtccgcctctgcttctttcccttgcttacggtcccgccgcaaagagcgaattgactttgtttcatttttccgcacttgattcaatcgcaccctcgaacgcggaaatattatatcccggcatgataacggaatacagttatcctcggggagagcagataattacccccattgcctcaagcggggttacagccgctatatgcaaagacgacgctgaagccgcgcaggtttttattgaaagggaatttaaaattttatcaacttatgttaatactcccgcgtggcagaacgcgtggattcgctattacagatcgatttaccgtgattcatacacaagagtaaaaaacattgccgaagcgctgataaaaaaatgggggcgcggcaacgagagagttttcgcgcagaaagcgcttacttttgtacaggggtttaaatatgaaagaaatcacgaaggcagcgatttttaa

SEQ ID NO: 14646 - protein, 205 aa, Unknown
  Obtained from environmental sample
  misc_feature (1)..(205): Xaa is any amino acid
MAEDVTKRLGSKGDIDYFKYNGKQAAVLELNFGDKLNGWGTCVELAGTKGSRPPLLLSLAYGPAAKSELTLFHFSALDSIAPSNAEILYPGMITEYSYPRGEQIITPIASSGVTAAICKDDAEAAQVFIEREFKILSTYVNTPAWQNAWIRYYRSIYRDSYTRVKNIAEALIKKWGRGNERVFAQKALTFVQGFKYERNHEGSDF

SEQ ID NO: 14647 - DNA, 729 bp, Unknown
  Obtained from environmental sample
  misc_feature (1)..(729): n is a, c, g, or t
ttgatactggaagagttaggccttaccaatgagaatttctcgagctacagcgaagacctgggccttaacgaggtaaaattcgatctgcccttcaaattgacggagcatcagatcgcccgcttaagggaaattgtgggcaaggattatgtccgtaccgatgattacgcccgcctgtcggtagcctatggcaaaaccatgtacgacctaatgcgcctgcgacacaagatcgtacagaacgttcccgacgccgtactctaccccgacactaaagaacagatcgagcggcttgtggcgtactgcgcagcggaaaagatccccctttacgtttacggcgggggttcttcggttaccagaggcgtagaatgcgttaagggcggcgtctccctggatatgcggctgcgctttaacaaagtcgtaagctttaacgaggtcgatcaggccatcaccgtggaagcgggaataagcggccctaaactggaagagatactgaacaacgcccaaacctatttcggcgcaaggagggcatatacctgcggccacttcccccagagctttgagcattcatcggtgggcggctgggttgtcacccacggcgccgggcagaattcgacctactacggttgcattcaggacattgtgctgggccaggactacgccacgccggtgggcgtcatctcaaccgaccgctatccgcgcaaagccacaggccccgatcggggcaaatcatga

SEQ ID NO: 14648 - protein, 242 aa, Unknown
  Obtained from environmental sample
  DOMAIN (81)...(228): FAD binding domain
  misc_feature (1)..(242): Xaa is any amino acid
MILEELGLTNENFSSYSEDLGLNEVKFDLPFKLTEHQIARLREIVGKDYVRTDDYARLSVAYGKTMYDLMRLRHKIVQNVPDAVLYPDTKEQIERLVAYCAAEKIPLYVYGGGSSVTRGVECVKGGVSLDMRLRFNKVVSFNEVDQAITVEAGISGPKLEEILNNAQTYFGARRAYTCGHFPQSFEHSSVGGWVVTHGAGQNSTYYGCIQDIVLGQDYATPVGVISTDRYPRKATGPDRGKS

SEQ ID NO: 14649 - DNA, 405 bp, Unknown
  Obtained from environmental sample
  misc_feature (1)..(405): n is a, c, g, or t
atgtcttttctcgcgggagcggctttcggcgcgggctggacgccctgtgtcggccccatcctcacgggtgttcttttaatggcagctcaggacggaagaaccggaacagcggttttttatctggcggtgtattccgccgggcttgccgcgccctttctccttgcagccctgtttttggatttctttttaaagcgaggctccgccctgcgtaaacatctgccgcttatcaggcgcgtcagcggcatcatcctgataataatcgggcttatgatccttaccggaaaatactcatcgcttaacatactgattcaaagggcaactttaagttatatttattgggcggaagataaagcccttccgttcaggcttttggccaacgtcttaagctggcttcaaaatttttaa

SEQ ID NO: 14650 - protein, 134 aa, Unknown
  Obtained from environmental sample
  SIGNAL (1)...(28)
  DOMAIN (1)...(93): Cytochrome C biogenesis protein transmembrane region
  misc_feature (1)..(134): Xaa is any amino acid
MSFLAGAAFGAGWTPCVGPILTGVLLMAAQDGRTGTAVFYLAVYSAGLAAPFLLAALFLDFFLKRGSALRKHLPLIRRVSGIILIIIGLMILTGKYSSLNILIQRATLSYIYWAEDKALPFRLLANVLSWLQNF

SEQ ID NO: 14651 - DNA, 609 bp, Unknown
  Obtained from environmental sample
  misc_feature (1)..(609): n is a, c, g, or t
atggcgggcattaccgcggctcaaaaaatgcgaaatgaagcaccgctgattttaagccgcgccgaagcctacatcggcgttttggtggatgacctcaccaccctgggaaccaaagaaccctaccgaatgttcacaagccgcgccgaacaccgtcttgtgctaaggcacgacaccgcggatacccgcctcactcccaaagcgagagacctgggcttaatcgacgacgaacgctgggaaaggtttcaaaagaaaattgaagggttaaatcagataaaggagctgttaaaagcgaaacacgcttccagtcaggttaatcccggagcatcccccgaatttgcaccatggccggctgaatgggtcgagcgggtatacctggacatcaaatattccggttacatcgaaaaagaaaaacgcgccattgaaaaattcgctaaaatggagggcgtaaaaattccgggggatctggattattcctgcgttacggggctttcggctgaggcaaaggaaaaactaatcgcggtaaagcctttaacactgggacaggccgcccgcatccccggcatacgtcagggagacattgcccttttaatgattattatgaaaaaataa

SEQ ID NO: 14652 - protein, 202 aa, Unknown
  Obtained from environmental sample
  misc_feature (1)..(202): Xaa is any amino acid
MAGITAAQKMRNEAPLILSRAEAYIGVLVDDLTTLGTKEPYRMFTSRAEHRLVLRHDTADTRLTPKARDLGLIDDERWERFQKKIEGLNQIKELLKAKHASSQVNPGASPEFAPWPAEWVERVYLDIKYSGYIEKEKRAIEKFAKMEGVKIPGDLDYSCVTGLSAEAKEKLIAVKPLTLGQAARIPGIRQGDIALLMIIMKK

SEQ ID NO: 14653 - DNA, 324 bp, Unknown
  Obtained from environmental sample
  misc_feature (1)..(324): n is a, c, g, or t
atgcggaataaaatccttgaaggtcttgaaggtatcggcattgtttatgatcccaagaagaatgaattatcgcatacaagaaatacggaaaccattatcagcaagccggaatcgaaaataccgatttacattattcctacggacgaagaacttgtaatgacggaagacgcttttgcgctgatgaagggaacttacgacatacacaccaaatttacctattccttccagagcaaggattatgtgaacaagggacgcgccgaagggttagtgcatgatcttgcgaaaaatcccgctattgaggaaattatcgcaagaccgaaataa

SEQ ID NO: 14654 - protein, 107 aa, Unknown
  Obtained from environmental sample
  misc_feature (1)..(107): Xaa is any amino acid
MRNKILEGLEGIGIVYDPKKNELSHTRNTETIISKPESKIPIYIIPTDEELVMTEDAFALMKGTYDIHTKFTYSFQSKDYVNKGRAEGLVHDLAKNPAIEEIIARPK

SEQ ID NO: 14655 - DNA, 603 bp, Unknown
  Obtained from environmental sample
  misc_feature (1)..(603): n is a, c, g, or t
atgccatggagaaagtgcggattttttctgccattgcctggcaaacacaatgcagagaatgctgctgccgcaaccgctgcttgcatagttgctggggtgtctttaaaagaatgtgcagaggctctcaaaacttggaaaggcattcaccgccgtagccaaatttacaactgcaaaaacggaattactatggttgacgactacgcccacaaccccgcgaagatagcggcgagtattcgctcttgccaagattttgcaaagggcaaggtgttcgcttggtttcagccgcacggttttggtccaacaaaatttttgaaagacgatttggtaaaagagatttctgaagttctgcgcccaagcgatgaaatgtggttcagctccatatattacgctggcggcacagcagaccgcagctttgattctgatattctttcaaatgctttgaaagaaaaaggttgcaatgcaaattttatttcaaatagagatgagtgtttaaaagagataatcagcaaagcaaaatccggcgatgttattttgctgatgggagcgagagaccccagtttgtcggagttctctaaaggagtatatcaacaaatactgtcttaa

SEQ ID NO: 14656 - protein, 200 aa, Unknown
  Obtained from environmental sample
  DOMAIN (48)...(139): Mur ligase family, glutamate ligase domain
  misc_feature (1)..(200): Xaa is any amino acid
MPWRKCGFFLPLPGKHNAENAAAATAACIVAGVSLKECAEALKTWKGIHRRSQIYNCKNGITMVDDYAHNPAKIAASIRSCQDFAKGKVFAWFQPHGFGPTKFLKDDLVKEISEVLRPSDEMWFSSIYYAGGTADRSFDSDILSNALKEKGCNANFISNRDECLKEIISKAKSGDVILLMGARDPSLSEFSKGVYQQILS

SEQ ID NO: 14657 - DNA, 927 bp, Unknown
  Obtained from environmental sample
  misc_feature (1)..(927): n is a, c, g, or t
atggaagactccgccggtcttggccttgcgcttgcaaagaaacttgttgaccaacaaaatatcgaaatcatcctgttaaaaggaaaattatcaaatgagaaaaattattcctcattccttattcttaattcttcattgaaagaatccatccccaatcttaaagaacacctgacagattacgagttaatcatcacccattacggacttacatcttttgaggccttatacgcgggtgttcctgtactgctggcttcgcccaccgtatatcaccaaaaacttgcaaaaacagcgggcttttgtacgcttggtatcgggaaaaagaacgctgttaaaaaaataaataatttgctaaaaaaaagcgattttttttcttcatacttgagtgatataaaaaaacattgcgcctcactggcggtaaaattcgacttggatcatgagccaaaacaaagtctcgcggaacttgtaaacaattatacgcccgatgtcagccgtaactgtcctgtctgcggcgcaacgcttaacaggcaagtattggctcgatttcctgaacgcagctatctccgttgtaaacgctgtggtgcgataagcatgaaccgaattactctcatgcccattgaatacggtaaggaatacttttttgagcaatatcaaaaacaatacggcaagacctacattgaggattttccaaatttgatagtaatggcgaaacgtaggctcgcaataatcaggaaaagggggaactcaagggacctggnnattggggaactgggggaaaagagaatagaagagcaaagaggcaaatgnaaaatagtaaaagagnaaaagaaaagaaaanttgggaaaggaaaanatgaaaggaaaaaaataaaatctttaggaaaaaaaatannnngggnncttaggggcccagggtccccaggaccctga

SEQ ID NO: 14658 - protein, 308 aa, Unknown
  Obtained from environmental sample
  misc_feature (1)..(308): Xaa is any amino acid
MEDSAGLGLALAKKLVDQQNIEIILLKGKLSNEKNYSSFLILNSSLKESIPNLKEHLTDYELIITHYGLTSFEALYAGVPVLLASPTVYHQKLAKTAGFCTLGIGKKNAVKKINNLLKKSDFFSSYLSDIKKHCASLAVKFDLDHEPKQSLAELVNNYTPDVSRNCPVCGATLNRQVLARFPERSYLRCKRCGAISMNRITLMPIEYGKEYFFEQYQKQYGKTYIEDFPNLIVMAKRRLAIIRKRGNSRDLXIGELGEKRIEEQRGKXKIVKEXKKRKXGKGKXERKKIKSLGKKIXXXLRGPGSPGP

SEQ ID NO: 14659 - DNA, 450 bp, Unknown
  Obtained from environmental sample
  misc_feature (1)..(450): n is a, c, g, or t
atgaacagggatcaattacgcttaagggtacaggacctctccattgattttggagggcttaaagccgtcagcgaattttcctgcgagctgcaccacggggaactggtcgggcttatcggcccgaacggggctggtaaaacaaccgtgtttaatatgctttccggcatatacgctccgaccgaaggggagattgaattccgcgaccgcaaaggcggcctctgtcttgtaaaaaacatgaaccccgcaaagttgaaccggattggccttgccaggacttttcagaatatacgcctgttttccaatctttccgtcgaggacaatatccgcatagcgttacattccggcaggacgagcggccccattgacgcgctgttccgcctcaagcgtttccgtattgacgaggaacggatgagggcgcaggcgcaggaacttctttccctttcaaaatga

SEQ ID NO: 14660 - protein, 149 aa, Unknown
  Obtained from environmental sample
  DOMAIN (33)...(149): ABC transporter
  misc_feature (1)..(149): Xaa is any amino acid
MNRDQLRLRVQDLSIDFGGLKAVSEFSCELHHGELVGLIGPNGAGKTTVFNMLSGIYAPTEGEIEFRDRKGGLCLVKNMNPAKLNRIGLARTFQNIRLFSNLSVEDNIRIALHSGRTSGPIDALFRLKRFRIDEERMRAQAQELLSLSK

SEQ ID NO: 14661 - DNA, 507 bp, Unknown
  Obtained from environmental sample
  misc_feature (1)..(507): n is a, c, g, or t
gtgctcacgacgataacgctggttattatcctcgcgttgctgcaaaattttctccgttccagctacggacgggcgatcaaggctgncagggaagatgaaattgcggctaacgctaacggaattaccattttccgctacaagatgctcggcttcgtcatcgcggcttttatcgccggcattggcggatgcctctacgcgatggttaacggctttgtcaaaccggatgcggcgcagttcctcagatccatcgactaccttatttatgtcgtgcttggcggcatgggttcaatgaccggctcgattctttcggcttatgtccttacctatttgcaggaattcctgcgtttcctgcaggactaccgccttttgatataccctgtgatactgatactcgtcatgctattccgccctcagggccttttgggaatgaaagaattttccatagtgggctttgttgataaaatttacaacaaattcctccagcgggcgaagagaggagcggcatga

SEQ ID NO: 14662 - protein, 168 aa, Unknown
  Obtained from environmental sample
  misc_feature (1)..(168): Xaa is any amino acid
MLTTITLVIILALLQNFLRSSYGRAIKAXREDEIAANANGITIFRYKMLGFVIAAFIAGIGGCLYAMVNGFVKPDAAQFLRSIDYLIYVVLGGMGSMTGSILSAYVLTYLQEFLRFLQDYRLLIYPVILILVMLFRPQGLLGMKEFSIVGFVDKIYNKFLQRAKRGAA

SEQ ID NO: 14663 - DNA, 363 bp, Unknown
  Obtained from environmental sample
  misc_feature (1)..(363): n is a, c, g, or t
atgactataatttttttgggaatatccttcatcattatatggcttggaacaacattctttataatccgctatatcaaaaagatcaaaaaagatttgcctggcagattctcctacgaggaaaaaccatcggaaaaaaagagtgaatttgacaatgtcaaacgcgccgaccctgaaaacttgttgaactttatcaaacaggaacacccgcaaataatcgcccttgttttggcgcatctggaaccggacaaagcttcggttattctgcagaaactacccagcgaactgcaaagcgacgtgtccctgcgtatcgctaacctggaccgggtcagccctgaagtgatccgtgaaattgaacaggtttag

SEQ ID NO: 14664 - protein, 120 aa, Unknown
  Obtained from environmental sample
  misc_feature (1)..(120): Xaa is any amino acid
MTIIFLGISFIIIWLGTTFFIIRYIKKIKKDLPGRFSYEEKPSEKKSEFDNVKRADPENLLNFIKQEHPQIIALVLAHLEPDKASVILQKLPSELQSDVSLRIANLDRVSPEVIREIEQV

SEQ ID NO: 14665 - DNA, 576 bp, Unknown
  Obtained from environmental sample
  misc_feature (1)..(576): n is a, c, g, or t
atgagcgccgagattntaaggcgtgactcctttatgaaagaaatactgacatgggattccgnaacagttatcctgccgcttcgcccgatcaaagcgggctattgctacntgaggcttggggacaggcgcgtatggcattgccaaatactgccggattgcaagctgtactccaaaacaatcaagattgtcaattacgctgaaaaaccatttggaacggagggaaattatatggaaacggataaagtaaatccgctcgtggcggacgctttgtctaacgcgtttatgaaggttaccgtggaactgggagccactcataaaacagtaaaggaagtctacgggattggcgaggggacagttcttgagcttgacaaactcgccggggaaccgttagacgtaatggctaacgggatcgtcatcgctaaaggggaagtggtggtcattgacgagaacttcggggtaaggattaccgaggttatcggaaaccacgacacttccgggcttcccgactggccggagcagccaatgccgtcattcacaggatcagcaggagcagcaacagacggagaagcaaaatga

SEQ ID NO: 14666 - protein, 191 aa, Unknown
  Obtained from environmental sample
  DOMAIN (86)...(162): Surface presentation of antigens (SPOA) protein
  misc_feature (1)..(191): Xaa is any amino acid
MSAEIXRRDSFMKEILTWDSXTVILPLRPIKAGYCYXRLGDRRVWHCQILPDCKLYSKTIKIVNYAEKPFGTEGNYMETDKVNPLVADALSNAFMKVTVELGATHKTVKEVYGIGEGTVLELDKLAGEPLDVMANGIVIAKGEVVVIDENFGVRITEVIGNHDTSGLPDWPEQPMPSFTGSAGAATDGEAK

SEQ ID NO: 14667 - DNA, 390 bp, Unknown
  Obtained from environmental sample
  misc_feature (1)..(390): n is a, c, g, or t
ttgtcgctggtatgtgagataggagattttaaacggtttcccacggcgggggcatttatgtcgtacattgggcttgtaccgagcgaatactcaagctggaacaaacggaaacaggggggaatcacgaaaaccggtaacgggcatatacggaaactactgaccgaagcggcatggcattatacccgtcctgtaaaggtaagcatacggctggccgaacgaagagtcggaacgtcagaaacggttatttcgtatgcggacagagccctgaaccggctacatggcaaatatgtaaaactgctgtttaaggggaaatcgaaacaggcggctgtaacggcagtagccagggaactgtcaggttttctttggggcgtgatgaccgcagtagcgtaa

SEQ ID NO: 14668 - protein, 129 aa, Unknown
  Obtained from environmental sample
  DOMAIN (1)...(74): Transposase IS116/IS110/IS902 family
  misc_feature (1)..(129): Xaa is any amino acid
MSLVCEIGDFKRFPTAGAFMSYIGLVPSEYSSWNKRKQGGITKTGNGHIRKLLTEAAWHYTRPVKVSIRLAERRVGTSETVISYADRALNRLHGKYVKLLFKGKSKQAAVTAVARELSGFLWGVMTAVA

SEQ ID NO: 14669 - DNA, 435 bp, Unknown
  Obtained from environmental sample
  misc_feature (1)..(435): n is a, c, g, or t
gtgaaaaacggaaggcggctggtatttcccggccagggtgacgcgagtcaaaacggcgccccggcaggtgatttgtatgtgatagtccggataaaaccccatgagtattttgagcggcatgactttgatctgtactgcgcggttccaatctcgataacccaggcggccctgggcgcggaaatccgcgtcagcacccttgacggcaaaacaataaaagtgaaagtaccccccggaacccaaaacggcaaaatgctccgcatccgcgacgagggcgtgccttcaggtagccaccggggaaatctctacatcaaattgattgtccgcattccggataaactttcccgccgcggcaaggagctgatggaagaactgtcccgcaccgagggcgaaaacgacagccccggacctgttccgctttcacagctgagcgagtaa

SEQ ID NO: 14670 - protein, 144 aa, Unknown
  Obtained from environmental sample
  DOMAIN (5)...(125): DnaJ C terminal region
  misc_feature (1)..(144): Xaa is any amino acid
MKNGRRLVFPGQGDASQNGAPAGDLYVIVRIKPHEYFERHDFDLYCAVPISITQAALGAEIRVSTLDGKTIKVKVPPGTQNGKMLRIRDEGVPSGSHRGNLYIKLIVRIPDKLSRRGKELMEELSRTEGENDSPGPVPLSQLSE

SEQ ID NO: 14671 - DNA, 522 bp, Unknown
  Obtained from environmental sample
  misc_feature (1)..(522): n is a, c, g, or t
gtgtctacaacgggcaaaatatcaagagaggtttatgagcagagcgaccttgtgctgaataatcataagcaatgctttttaacagtgggcggcatggggcacgcttctatgatagcttttggcatagcaaaaaaatctccgagcaaaagggtgatttgcatggatggcgatggtgcagctttgatgcacttgggcaatatggcttttatcggcaaacagaacactcaaaaccttattcatatctgcttgaacaacgaggctcacgaatccgtgggtggaatgccaaccgccgcgccggattttaaatacgcacaagccgcaaaggtttgcggctatccaagcgtttttgagattaaaacagcaagcgaattcagcagcctcattgaaaagtttaaaaatctcaaaggcttgacattcatagagataaaagtagcgaatacatcaagagacgatttggttcgcccaaaagaaaccgcattggaaaatgcggttgggtttatggattgtgtatttaaagcgtga

SEQ ID NO: 14672 - protein, 173 aa, Unknown
  Obtained from environmental sample
  DOMAIN (16)...(142): Thiamine pyrophosphate enzyme, C-terminal TPP binding domain
  misc_feature (1)..(173): Xaa is any amino acid
MSTTGKISREVYEQSDLVLNNHKQCFLTVGGMGHASMIAFGIAKKSPSKRVICMDGDGAALMHLGNMAFIGKQNTQNLIHICLNNEAHESVGGMPTAAPDFKYAQAAKVCGYPSVFEIKTASEFSSLIEKFKNLKGLTFIEIKVANTSRDDLVRPKETALENAVGFMDCVFKA

SEQ ID NO: 14673 - DNA, 684 bp, Unknown
  Obtained from environmental sample
  misc_feature (1)..(684): n is a, c, g, or t
ttgggaacaattacccctgttcacgagatgattcaaatcgcacacgggaacggcgtacgcattcttgttgacggggcacagtctgtggctcacacaccgctgaatgtaagtgcaatggatgcagatttctttgttttctccggccataaaatctttggacccacaggcataggtgccttgtatggaaaatccgatgttttagaagaagcccagccatatcagggcggcggaaatatgataaaagatgtgacttttgaacacacagtctataaccctgcaccatctaagtttgaagctggaaccggaaacattgcagatgctgttggtcttggagcagctttggattatgtttcaaacataggaattgcaaacataggtgcttatgaacacgaattgctgaattatgcaacccgtgaactccaacgcataaacggcttgcacctcataggcacagcagcagaaaaagctagcgttttgtcttttataatagacggagcaagcgtggagcaggttggcaaacatcttgcgagccacggcattgccgtgcgtgccggacatcattgcgcccagcctattttgcgccgctttgggttagaagcaactgtacgcccaaccatagccttttacaacacatcagaagaaattgataagctggtaagcacaattagggaaattgcactgtaa

SEQ ID NO: 14674 - protein, 227 aa, Unknown
  Obtained from environmental sample
  DOMAIN (1)...(218): Aminotransferase class-V
  misc_feature (1)..(227): Xaa is any amino acid
MGTITPVHEMIQIAHGNGVRILVDGAQSVAHTPLNVSAMDADFFVFSGHKIFGPTGIGALYGKSDVLEEAQPYQGGGNMIKDVTFEHTVYNPAPSKFEAGTGNIADAVGLGAALDYVSNIGIANIGAYEHELLNYATRELQRINGLHLIGTAAEKASVLSFIIDGASVEQVGKHLASHGIAVRAGHHCAQPILRRFGLEATVRPTIAFYNTSEEIDKLVSTIREIAL

SEQ ID NO: 14675 - DNA, 408 bp, Unknown
  Obtained from environmental sample
  misc_feature (1)..(408): n is a, c, g, or t
atgaaatttagtacatttacaaaaagggataaaatggatataagcacaatttgcatacacggttgcgaaaaaaagtttgacacaacaggttcggttgccactccgatatttgcatctgctacattcgctcacctaggcgttgggcaaagcacaggttttgattactcccgctcgcttaacccaactaacgtgcatttagaagataccattgccacacttgaaggaggcaccgaggctattgcgttttcttctggcatggcggcggtttcaacacttatggaactattttcgccaggcgaccatataatagcctccgatgatctttatggcggaacctttcgcctctttgagagagtgtcccataagaacnggcgtaaatttttcttacgcagccactccaaaagatag

SEQ ID NO: 14676 - protein, 135 aa, Unknown
  Obtained from environmental sample
  DOMAIN (15)...(135): Cys/Met metabolism PLP-dependent enzyme
  misc_feature (1)..(135): Xaa is any amino acid
MKFSTFTKRDKMDISTICIHGCEKKFDTTGSVATPIFASATFAHLGVGQSTGFDYSRSLNPTNVHLEDTIATLEGGTEAIAFSSGMAAVSTLMELFSPGDHIIASDDLYGGTFRLFERVSHKNXRKFFLRSHSKR

SEQ ID NO: 14677 - DNA, 423 bp, Unknown
  Obtained from environmental sample
  misc_feature (1)..(423): n is a, c, g, or t
atggatatagaccattttaaaaaattcaatgatactcacgggcacgtggctggagacgaagccttgcgccatgcggttaaggttgttagctcaaggcttagaaaaaacgattttatgggaaggtatggcggtgaagaatttgtacttttcttttactatgctaataaagaaacagggctaaaaatactggataggcttcgtgtgaacttatctgaatcgcccgtttatttggaaaaaggcctcatagaaattcatgcaagttttggtcttgtggaaattgatgtggaaagagcggtagaaaaaggttatatacataaattgatccgcgatgcggactcagccctttatgctgccaaattatcaggtagaaacaaggtagtggtttttagccaggaaatggattctgggtattatgaaatttag

SEQ ID NO: 14678 - protein, 140 aa, Unknown
  Obtained from environmental sample
  DOMAIN (1)...(125): GGDEF domain
  misc_feature (1)..(140): Xaa is any amino acid
MDIDHFKKFNDTHGHVAGDEALRHAVKVVSSRLRKNDFMGRYGGEEFVLFFYYANKETGLKILDRLRVNLSESPVYLEKGLIEIHASFGLVEIDVERAVEKGYIHKLIRDADSALYAAKLSGRNKVVVFSQEMDSGYYEI

SEQ ID NO: 14679 - DNA, 477 bp, Unknown
  Obtained from environmental sample
  misc_feature (1)..(477): n is a, c, g, or t
atggacgccaaccgcatcttcggcgcggtgcgtatttggaggcaggggcttgtgtccaagatagtgctgaccggcgggcttttagagtggacgaccgacgaggcggttcctgaggctgtcagcatgtttgatctgctaagcgagcatttcggcgtggacagcgccgatgtgatacttgagggtgcggcgcagaacaccaaggaaaacgcgtggtacacgcgtgaagcgctcaatgaggccgggcttgagcttgacgttatattggtgacgagcgcctaccacatgccgcgcgccgtggcggtttttgaaaaggccggattcaccgttactcccgcccctatcggttatttcgcggacagtaatttcagccgcaagcctctaaggtggctgcccgcggccgcgtcgctctttgagtcgacgattgcgctgcgagagtattttgggatggtcgtatacagggcgatggggtggatatga

SEQ ID NO: 14680 - protein, 158 aa, Unknown
  Obtained from environmental sample
  DOMAIN (4)...(149): DUF218 domain
  misc_feature (1)..(158): Xaa is any amino acid
MDANRIFGAVRIWRQGLVSKIVLTGGLLEWTTDEAVPEAVSMFDLLSEHFGVDSADVILEGAAQNTKENAWYTREALNEAGLELDVILVTSAYHMPRAVAVFEKAGFTVTPAPIGYFADSNFSRKPLRWLPAAASLFESTIALREYFGMVVYRAMGWI

SEQ ID NO: 14681 - DNA, 327 bp, Unknown
  Obtained from environmental sample
  misc_feature (1)..(327): n is a, c, g, or t
gtggatatgagcgtccgcaacgattttcacgtgcactccaacgagtcggacggtcagttgagtccggagatgctgatagacgccgccatagggaacggtgtgtccgcgattgccctctgcgatcacgatactaccgccggggggcggcgcttcgttcagtacgggcgcagccgcggcataaaggccatacaggggaatgaactctcggccaagtggcatggcgggaactgccacctcatcggccttgncgtgaacgacggctacaagccgctggaggccgtcctcaaaagacgcggagagccgccacagcgcaacttcctgatataa

SEQ ID NO: 14682 - protein, 108 aa, Unknown
  Obtained from environmental sample
  misc_feature (1)..(108): Xaa is any amino acid
MDMSVRNDFHVHSNESDGQLSPEMLIDAAIGNGVSAIALCDHDTTAGGRRFVQYGRSRGIKAIQGNELSAKWHGGNCHLIGLXVNDGYKPLEAVLKRRGEPPQRNFLI

SEQ ID NO: 14683 - DNA, 840 bp, Unknown
  Obtained from environmental sample
  misc_feature (1)..(840): n is a, c, g, or t
atggaactgaccgtcgtctatcgtcaatttcacgcctactatggggaatccgataatcttgccnttagtcagacacgccctgaaaccctgntcgcaggaggggatatattctatggggatcacgccgcccttgatgttgtcaacaaactcgtaatcctgctcgtgattgggctccagaatacccgccacgcggccgtactgacccgcgccgccggtctgcttcttgtgggtgtagtcgaaacgcgccgccgtcgtgaccgtctcgcggtaggccacctgcggcataccggtctctatagagaccttgtactcacgacgcatcctctctatgtatacgtcgagatgcaactcgcccatccctcgtatgatcgtttcgttggactccggatcgacaaacgtcttgaacgtcgggtcctctttcgtgaaccggttcagcgccttagacatgttgtcggaggactgcttgtcgaccggcttgatggcgagcgatataaccggctccggcacgtacatcgtcgtcatagcgtagttcagcccgttctccgtgaacgtgtcgccggaggcgcactctataccgaagagcgccactatgtcgccgggcccggcatcgttgatgtcctcggtggaggaggcgtgcattcggataagacgccccaccttgaaccgcttgccgctgcgcgtgttcgtcagctctacgcccttcttgatagtaccttgatatacccttatatacgtcaactgaccgtactgaccgtcctcgagcttgaacgcgagcgctatcataggcgcacttgcgtcggccttgaggatgatcggcgcctcgttgttgtcgaggtctag

SEQ ID NO: 14684 - protein, 279 aa, Unknown
  Obtained from environmental sample
  misc_feature (1)..(279): Xaa is any amino acid
MELTVVYRQFHAYYGESDNLAXSQTRPETLXAGGDIFYGDHAALDVVNKLVILLVIGLQNTRHAAVLTRAAGLLLVGVVETRRRRDRLAVGHLRHTGLYRDLVLTTHPLYVYVEMQLAHPSYDRFVGLRIDKRLERRVLFREPVQRLRHVVGGLLVDRLDGERYNRLRHVHRRHSVVQPVLRERVAGGALYTEERHYVAGPGIVDVLGGGGVHSDKTPHLEPLAAARVRQLYALLDSTLIYPYIRQLTVLTVLELERERYHRRTCVGLEDDRRLVVVEV

SEQ ID NO: 14685 - DNA, 507 bp, Unknown
  Obtained from environmental sample
  misc_feature (1)..(507): n is a, c, g, or t
gtggtgccccgcaactacataccagccgtcgaggacggcatgaaggactactgcaagcagggcccgcttggcttccccgtcgttgacatttcggtggagctattcttcggcagctaccacgacgttgactcaagcgacatggcctttaagacagccgcccgcataggcatgcaggacggcctgacaaagtgttcgccggttctgctggagccgatcctcaaggtgcagataagcgtgcccaacgaacacaccagcaaggctcagcgccttgtgacaggtcaccgcgccggccagatactcggcttcgatgccaagcccgaatggcccaactgggacgtggtggacgcctacctgccccagagcgagatgaacgacctcataatcgaaatcaggtcccagacaatgggcgtgggcttcttcacttgggtgtttgaccacctgcaggaactggagggccgcgaggccgaaaagattgtggagacccgcaagaaggccctggaagggtga

SEQ ID NO: 14686 - protein, 168 aa, Unknown
  Obtained from environmental sample
  DOMAIN (2)...(65): Elongation factor G, domain IV
  misc_feature (1)..(168): Xaa is any amino acid
MVPRNYIPAVEDGMKDYCKQGPLGFPVVDISVELFFGSYHDVDSSDMAFKTAARIGMQDGLTKCSPVLLEPILKVQISVPNEHTSKAQRLVTGHRAGQILGFDAKPEWPNWDVVDAYLPQSEMNDLIIEIRSQTMGVGFFTWVFDHLQELEGREAEKIVETRKKALEG

SEQ ID NO: 14687 - DNA, 885 bp, Unknown
  Obtained from environmental sample
  misc_feature (1)..(885): n is a, c, g, or t
atgggcagccgattcggtggcctgaagcaggtcgagcgggtcggtcccaatggcgagacggtcatggactacagtgtcttcgacgccgttagggcgggcgtgagagagatagtcttcgtcgtcaggaaagagttcgagatggacttccacaggcaggtgggcgcgaggtttgccaagcggatggatgtgacctacgcctaccaggagattgatctgttgcccaagggctttgatgtgccaagtgaccgcctgaagccctggggcacgggccacgccgtgctttcggccaaggacgtggtcaagggaccgttcatggtcataaacgcggacgacttttatgggcgcggggcatacatggcgcttgcggcttggttggctgccgaagagctgggagcgcaggtaccttctggctgcgagagctacgcgctcgtcgctttcaagatggtcaacacgctctcgccattcgggggcgtggccaggggcgtgtgcgaagtgggcgatgacgggatgctcgtctcggtgaaagagtacaccacgctcgcggcatctggcgaaggtgtgcgcgacagctcgtccgacgtgttcactggtctggagccagtctcgatgaacttctgggggttcaggcccagcgtctttggttttctggaggccatgttcgaggacttcctgaaggctggcggtctcgacgccaagtcggagttctacctgcccagcgcggtggactccatgattcgctccaagctggcgcgggtgcgggtgctggagacacccgacaggtggttcggcgtgacctaccgcgaggacaaggaatacgtggtttcgcgcatcggggagttggttgctcacggcgagtacccttcccctctgtggggcgaccaatga

SEQ ID NO: 14688 - protein, 294 aa, Unknown
  Obtained from environmental sample
  misc_feature (1)..(294): Xaa is any amino acid
MGSRFGGLKQVERVGPNGETVMDYSVFDAVRAGVREIVFVVRKEFEMDFHRQVGARFAKRMDVTYAYQEIDLLPKGFDVPSDRLKPWGTGHAVLSAKDVVKGPFMVINADDFYGRGAYMALAAWLAAEELGAQVPSGCESYALVAFKMVNTLSPFGGVARGVCEVGDDGMLVSVKEYTTLAASGEGVRDSSSDVFTGLEPVSMNFWGFRPSVFGFLEAMFEDFLKAGGLDAKSEFYLPSAVDSMIRSKLARVRVLETPDRWFGVTYREDKEYVVSRIGELVAHGEYPSPLWGDQ

SEQ ID NO: 14689 - DNA, 909 bp, Unknown
  Obtained from environmental sample
  misc_feature (1)..(909): n is a, c, g, or t
atgcttaaagataccgcctcgctattccccgatttggtgtataaggggatcgcgtttcagaagggcgacgcgggcgtgcgctatgtctctaccagcggcggcagttcgtctcaaattaccaattgggcgagccgcaccgatntggcctacaacgtgacaatacgcgacaccgttccattcggcgtgaggtacgtagccggatcggccgcgggcgctgtcaacacggtaacgccgccgaagcaattgtccggcagcgtcagcggcaatgtaatttcttggccggtggtaagcggcgattccgctttgggcgcgaacgattccctcacggtgacgtggcgcggcgtcgtagacacctccaagacgggctacgtcgtcaacaccgcctacgctgatctcggcggccaccccaaggacgccgtcggcgctcagatacggtcgagattctcgcttgtcagcgggccggacgatcccgacgacccgccccccgaagacacgcttgcggtcgacacgctgaggagcgatttgactttatcggttactccgtcggggtatccgtcgccgtgcatgtttgccgggtctgtgagggttacgctgtcgtcgcggcccgacgcctccatttggtataccgtaaacggtttggaacctgattcgacgtcgtttgcctctcggcgctacactggaccgcttgagtttgtcatggacaccgagctgcgggccgtggcctacgccgccggctttgagccggtctttacggatacgcataaatacataccggtcaacaccgttccgatcatgtttgccatgttctacgacaacgtgggcgacgggctggcgcacggggttaagttgatagtctatccaaattgggcgtcgagtctgaatcagtccgtcgtcnctcggccgatctga

SEQ ID NO: 14690 - protein, 302 aa, Unknown
  Obtained from environmental sample
  misc_feature (1)..(302): Xaa is any amino acid
MLKDTASLFPDLVYKGIAFQKGDAGVRYVSTSGGSSSQITNWASRTDXAYNVTIRDTVPFGVRYVAGSAAGAVNTVTPPKQLSGSVSGNVISWPVVSGDSALGANDSLTVTWRGVVDTSKTGYVVNTAYADLGGHPKDAVGAQIRSRFSLVSGPDDPDDPPPEDTLAVDTLRSDLTLSVTPSGYPSPCMFAGSVRVTLSSRPDASIWYTVNGLEPDSTSFASRRYTGPLEFVMDTELRAVAYAAGFEPVFTDTHKYIPVNTVPIMFAMFYDNVGDGLAHGVKLIVYPNWASSLNQSVVXRPI

SEQ ID NO: 14691 - DNA, 447 bp, Unknown
  Obtained from environmental sample
  misc_feature (1)..(447): n is a, c, g, or t
ttgcaaatcttgtgtttctcggctattataaacctaatgagcgaaaatcagtttacggttttggatctcatagacattgacttaaaggaacacaactccctggatctaaagtgcatagcggggcggaaggggcttgtccgggagataaacgttcccgacataaacaggcctgggctggccctatccgggttttttgattccttcgcgcacgagaggctccaaatatttgggcgaggggaaggggcgtatctaaaaaaactggaaaatgataactcatacgatactatcaggcagatgttcacctttcccattccatgctgcatttttacccacggcctttcgccgaatgaaacctttattgaaattgccgaaaaagcccaatgcccgattttgcagactgccctttctacctcggaattcagtaccaggataactcggccgatctga

SEQ ID NO: 14692 - protein, 148 aa, Unknown
  Obtained from environmental sample
  DOMAIN (24)...(148): HPr Serine kinase N terminus
  misc_feature (1)..(148): Xaa is any amino acid
MQILCFSAIINLMSENQFTVLDLIDIDLKEHNSLDLKCIAGRKGLVREINVPDINRPGLALSGFFDSFAHERLQIFGRGEGAYLKKLENDNSYDTIRQMFTFPIPCCIFTHGLSPNETFIEIAEKAQCPILQTALSTSEFSTRITRPI

SEQ ID NO: 14693 - DNA, 654 bp, Unknown
  Obtained from environmental sample
  misc_feature (1)..(654): n is a, c, g, or t
atgttgaagccggaattctccctgcagcgtaccgacaattttatcgaccaccggccttatgtgccgggagacgacccccggcgaatcaactggaaacttttcagccacggcggcgggctttttgtccgcgaaggcgagcatgagccgccaccgcaatcgaatctgatcattttaattgataccgaatatgatcccctgctgtacagtaaatcagaagcgcggcacgggattgatatgttatgcgaaaccgcgctggcggcggcccttgcctgcgccgaatcgggaatggatgtgcataccggatactccggtattgccggacaaactgccggcgcaatgcgcgggggaacagccgccgaacttgccgcatcgcttgcctggcccgccgctgtaccgttgtcctccgccggggaactgccttccacgccgagtaactgcggcattctgattctggcccttccccgttccggcacggaaagctcaagcctcgaccgttttttgaacagtaccgcgcatcgccgcaccggagataatgcccaaacgatagaattactttttctgtatgataacgcacgcagcgaagaacttgccgccgccgaagtttgcgccgcgttgtacaaccagcggccgggtgtgagggcaaggttgttgtaa

SEQ ID NO: 14694 - protein, 217 aa, Unknown
  Obtained from environmental sample
  misc_feature (1)..(217): Xaa is any amino acid
MLKPEFSLQRTDNFIDHRPYVPGDDPRRINWKLFSHGGGLFVREGEHEPPPQSNLIILIDTEYDPLLYSKSEARHGIDMLCETALAAALACAESGMDVHTGYSGIAGQTAGAMRGGTAAELAASLAWPAAVPLSSAGELPSTPSNCGILILALPRSGTESSSLDRFLNSTAHRRTGDNAQTIELLFLYDNARSEELAAAEVCAALYNQRPGVRARLL

SEQ ID NO: 14695 - DNA, 465 bp, Unknown
  Obtained from environmental sample
  misc_feature (1)..(465): n is a, c, g, or t
atgaaaatcaagtttaaactgagcattgtagtgatcgcaatcatggctgtcgtggtagcaggaattgccacattattgctgttgcaggcttccaagaataccctgcaattgagcctgcggagccaggagcatttggcaaatagccgcgccgaattctggaaaggccgggaagacggctacattcgggcgttaactacgctggcgaatgtaatgggagactttgaaacggtcaaaccggaggaacgccgggacaggtatgacgccatgctgaaatcggctctggatgaagagccccagatggttgccctgtatacggtctggaaaccaaacgcccttgacggcatggatgaacagtatatcggacggactggagcaagcccgacaggacagtacgcgatggcctggggcaaagaaacaggcacaacgataaagcggctcaccaccatctcggccgatgtttcatga

SEQ ID NO: 14696 - protein, 154 aa, Unknown
  Obtained from environmental sample
  SIGNAL (1)...(20)
  misc_feature (1)..(154): Xaa is any amino acid
MKIKFKLSIVVIAIMAVVVAGIATLLLLQASKNTLQLSLRSQEHLANSRAEFWKGREDGYIRALTTLANVMGDFETVKPEERRDRYDAMLKSALDEEPQMVALYTVWKPNALDGMDEQYIGRTGASPTGQYAMAWGKETGTTIKRLTTISADVS

SEQ ID NO: 14697 - DNA, 315 bp, Unknown
  Obtained from environmental sample
  misc_feature (1)..(315): n is a, c, g, or t
atgaaagaagcctatcaggttttagttgcgccgcacataacagacaagactgttaaaaagaattttgaccgcaacaatgacgcatacacttatgtgttccgcgttgatttgaaagcgaataagtttgaaataaaaaaagcaattgaaagttattttggtgttcaagtgggttctataaataccttaattgtgcgtggcaaagttaagcgcgcacagcttaaaacaaaattcacttcgggtaaattgccaaattggaaaaaagcctacgttaaattgaaacctgggcaaaaaatatccgagtttgagggaatgtaa

SEQ ID NO: 14698 - protein, 104 aa, Unknown
  Obtained from environmental sample
  DOMAIN (5)...(104): Ribosomal protein L23
  misc_feature (1)..(104): Xaa is any amino acid
MKEAYQVLVAPHITDKTVKKNFDRNNDAYTYVFRVDLKANKFEIKKAIESYFGVQVGSINTLIVRGKVKRAQLKTKFTSGKLPNWKKAYVKLKPGQKISEFEGM

SEQ ID NO: 14699 - DNA, 531 bp, Unknown
  Obtained from environmental sample
  misc_feature (1)..(531): n is a, c, g, or t
ttgagggaatgtaagatgggaataaagagttacaaaccaaccactcctaccttgcgctacaaacagattagcaccaaggaagaggtcacagccgaaaagccttacaagccgctcaccgttggcataaagagaagttcgggcagggataatcaaggtcatatttccagccgccgccgcggtggtggtcataaaaagaaatatcgcattatagatttcaaaagaaaagaattcatgggtgttccctgcacagtggaaaccattgaatacgatccgaatcgcagcgcctatatagcgctcgttaaatacgcaaatggaagcagggcatacatcttggctccaaatggagttaaagtaggtgaaaaattgaattctggttctggttctgaatacaagccaggcaacacaatgccgctaaaagaaattcctttgaacgctttgattcacaatgttgagttaaaacctgggcacggcggtcagctcgcacgttctgctggaacagccgcagaactcatcgctaaagacgaanaataa

SEQ ID NO: 14700 - protein, 176 aa, Unknown
  Obtained from environmental sample
  DOMAIN (130)...(176): Ribosomal Proteins L2, C-terminal domain
  misc_feature (1)..(176): Xaa is any amino acid
MRECKMGIKSYKPTTPTLRYKQISTKEEVTAEKPYKPLTVGIKRSSGRDNQGHISSRRRGGGHKKKYRIIDFKRKEFMGVPCTVETIEYDPNRSAYIALVKYANGSRAYILAPNGVKVGEKLNSGSGSEYKPGNTMPLKEIPLNALIHNVELKPGHGGQLARSAGTAAELIAKDEX

SEQ ID NO: 14701 - DNA, 900 bp, Unknown
  Obtained from environmental sample
  misc_feature (1)..(900): n is a, c, g, or t
ttggtttctgaagttaccatcaatcagaacgttcttttgctgagaaaaaccattttggattttcgctcaaaaatggggcttatcaaaaacaattccgaggaacccgttcccactccagaggaaattctcggcaaaccagaagcaataaaagaagcacttaatattgcagcttttagaaaaatagccgcagaaatttatcaggaactaaaaaagtcagacccttcgcttttgcacatagcgggtactcgctctcttggaaatttttacgagcaacagtctatagattgcgccatagtttctgcattgcttgcaaaacgctacaattttaccccagacgaaattgaagatataattttggcagtattgcttatggacataggttactttattttgccagaccacgtattaagcccgaactcaaaactatctttgcaagagttggagcttaaaaaacagcatccgaattatggttatgaaattatcaggatatgcaacctctctttgatttgcgcaaatgttgctttgcagcaccacgagcggcaagacggcggcggttaccctcgcaagctgacaggaacaaatagcccacccgtgcgcacaacaggaccaactgttaaaggaaccatgaatagatatgcagaaatagccgcggttgccttggattatatctctcttatatttccgccaccaggcatcaccgcccaaacaccaataaacagcataaaatttttggtgcggctttctggcgcaaagctgaattcctcccattgtgaaacccttattgctatgattcccgtatatagctcaggagacagaataatgttcacctcagacggcgaaggaaaaattaactggctgtgtaggaatagtgatgcgctcaattacaaaagaacggaatag

SEQ ID NO: 14702 - protein, 299 aa, Unknown
  Obtained from environmental sample
  DOMAIN (89)...(226): HD domain
  misc_feature (1)..(299): Xaa is any amino acid
MVSEVTINQNVLLLRKTILDFRSKMGLIKNNSEEPVPTPEEILGKPEAIKEALNIAAFRKIAAEIYQELKKSDPSLLHIAGTRSLGNFYEQQSIDCAIVSALLAKRYNFTPDEIEDIILAVLLMDIGYFILPDHVLSPNSKLSLQELELKKQHPNYGYEIIRICNLSLICANVALQHHERQDGGGYPRKLTGTNSPPVRTTGPTVKGTMNRYAEIAAVALDYISLIFPPPGITAQTPINSIKFLVRLSGAKLNSSHCETLIAMIPVYSSGDRIMFTSDGEGKINWLCRNSDALNYKRTE

SEQ ID NO: 14703 - DNA, 627 bp, Unknown
  Obtained from environmental sample
  misc_feature (1)..(627): n is a, c, g, or t
atgacgcagatgtccgcctccgcgaagcgccccttcatctccgccgccatctccgccgcggtcctgacgcggatgacattcgcgccggagggcggcggctctgaagccggtccgctcaccaccgtgacccgcgcgcccatggagagcgcagtcttggcaagcgcggcgcccatcttgccggaagacctgttggtgatgactctgacggggtctatgggttcctccgtagggccggaggatatcagaacgttctttccttttaacgcggtatttgcgggtttatcagacgcattaaagcgatccataacccgtttgacaatctcttccgtaccggccatccgccccggcccgcgcacgccgcaagccagctcgccctcccccaccggcagcaccgtcacgcccctcgacgccaacgcgccgacattggcctgcgtggcattgttcgcccacatgacgcagttcattgcggggactacgatgatctttgcttcgggaatagacagcgtaagcgtggtcagcagattatcggcaatgccgcccgccatcttcgcgatggtgttcgcggtcgcggggcagatcaacagtaagtcggcccattcggagaggcggatgtggtccatgtcgtaa

SEQ ID NO: 14704 - protein, 208 aa, Unknown
  Obtained from environmental sample
  SIGNAL (1)...(28)
  misc_feature (1)..(208): Xaa is any amino acid
MTQMSASAKRPFISAAISAAVLTRMTFAPEGGGSEAGPLTTVTRAPMESAVLASAAPILPEDLLVMTLTGSMGSSVGPEDIRTFFPFNAVFAGLSDALKRSITRLTISSVPAIRPGPRTPQASSPSPTGSTVTPLDANAPTLACVALFAHMTQFIAGTTMIFASGIDSVSVVSRLSAMPPAIFAMVFAVAGQINSKSAHSERRMWSMS

SEQ ID NO: 14705 - DNA, 750 bp, Unknown
  Obtained from environmental sample
  misc_feature (1)..(750): n is a, c, g, or t
atgacagatgatcagcttgccgcccgaagagtggaactcggacttgacaaaccgttttaccaacagtactttctctggctcaaacgcgttattggcgagcataaccttggagtaagtttaatttcccgcgcgcctgtttcttttctgctttccacaagaataataaattcgctaattttaaatattatttcgctaatttttataactattttttctttcgcgttgggcgtttatttttccaccaaggctggaacaaaagccgattacgcggtgacttttttcgcccttgtgcttcatgccttccccggtttattacttcttatattattgcaactcttcgcatccgtatcaggactttttcccgttactgcatacccgccctttcctttctcgcaagctccgggcaagtttgtcttctcttatatgcaccacatattcctaccgctttttgcatcgttccttggcggaattggcggctctctaagaatgatccgcgccacaatgcttgaccaacttggacagccttacatcatgtcattgcgctcacgcggcatagccgaatggcgcgtttattttgcccacgctttccgcaacacgcttaacccctacatcacgggaagcgccaatcttttagccggacttttctccggctctttgatactggaaattatttttgcctaccccggcgtaggaaggctcatgtatgaagccgtccttcaacaggacattaatcttgttttggcaatataa

SEQ ID NO: 14706 - protein, 249 aa, Unknown
  Obtained from environmental sample
  DOMAIN (54)...(249): Binding-protein-dependent transport system inner membrane component
  misc_feature (1)..(249): Xaa is any amino acid
MTDDQLAARRVELGLDKPFYQQYFLWLKRVIGEHNLGVSLISRAPVSFLLSTRIINSLILNIISLIFITIFSFALGVYFSTKAGTKADYAVTFFALVLHAFPGLLLLILLQLFASVSGLFPVTAYPPFPFSQAPGKFVFSYMHHIFLPLFASFLGGIGGSLRMIRATMLDQLGQPYIMSLRSRGIAEWRVYFAHAFRNTLNPYITGSANLLAGLFSGSLILEIIFAYPGVGRLMYEAVLQQDINLVLAI

SEQ ID NO: 14707 - DNA, 522 bp, Unknown
  Obtained from environmental sample
  misc_feature (1)..(522): n is a, c, g, or t
ttggctatactctttccctcaactcagctcaaaattttagattacaacaggcttgtgaaagatttgagcgggcacagccccgaagattttttaaaagccctcgaagagatntgcgatatagaacaactgccggaactcgctgccccgcaaaaagcaaagcagttcagcctttatttaaaaggtgcttggtatagctgcacctttcacgataaacatcattccaaaaaagatcctttgagaaatttagacgtttcgattttgcaaaatttggttttaaaacccttgctcaaaataaacaacccccgcacatcagatagaatagattttgttggtggaataagagggcttggagaattgcaagcaagggtggactctggcgaatgggcagttgcttttgccatgtaccccacttctttagaagaacttatgaacatagcagatgccgaagaaattatgccgcctaaaagcacttggtttgagcccaagctgagagacgggcttttggttcatcttttggattaa

SEQ ID NO: 14708 - protein, 173 aa, Unknown
  Obtained from environmental sample
  DOMAIN (1)...(172): Protein of unknown function (DUF1015)
  misc_feature (1)..(173): Xaa is any amino acid
MAILFPSTQLKILDYNRLVKDLSGHSPEDFLKALEEXCDIEQLPELAAPQKAKQFSLYLKGAWYSCTFHDKHHSKKDPLRNLDVSILQNLVLKPLLKINNPRTSDRIDFVGGIRGLGELQARVDSGEWAVAFAMYPTSLEELMNIADAEEIMPPKSTWFEPKLRDGLLVHLLD

SEQ ID NO: 14709 - DNA, 471 bp, Unknown
  Obtained from environmental sample
  misc_feature (1)..(471): n is a, c, g, or t
ttgataaaatgcatgaagatgagctcctgccggactgaatacacctcatcatcgccgcaggatactgaagcttttggcagccgcctggcctgccgtctggggccgggttcggttatcgccctgtcaggcggtttgggagccggcaagacctgtctggtaaagggaatagcccgcgccctcggcatcgacgaaaatataaccagccccacctatacgattatcaacgaataccgaccggtggccggacgactcaacaactgctccctgtaccatattgacgcataccgcctgaacggggatgaggattttgaatccaccggggcgggcggctgtttttccgcaggcggaattacaatcgttgaatggagcgaccgtattccgggttccatacccgttgacgcgatacgcatagaaattgaaatatccggcccgcaaagccggattttccgtttacggggattaagcctatga

SEQ ID NO: 14710 - protein, 156 aa, Unknown
  Obtained from environmental sample
  DOMAIN (22)...(149): Uncharacterised P-loop hydrolase UPF0079
  misc_feature (1)..(156): Xaa is any amino acid
MIKCMKMSSCRTEYTSSSPQDTEAFGSRLACRLGPGSVIALSGGLGAGKTCLVKGIARALGIDENITSPTYTIINEYRPVAGRLNNCSLYHIDAYRLNGDEDFESTGAGGCFSAGGITIVEWSDRIPGSIPVDAIRIEIEISGPQSRIFRLRGLSL

SEQ ID NO: 14711 - DNA, 405 bp, Unknown
  Obtained from environmental sample
  misc_feature (1)..(405): n is a, c, g, or t
atgaaaattcagcgttgcgatcaccccgaactgttggcccccgccggaagccgggagtgtttccacgccgccatagacgccggggcggacgccgtttatttaggcctcggcgatttcaacgcccgcctgcgggctaagaacttcacaatccgcgatttgtcgaccctggttccgttcgctcattcccgcaatgtcaaagtttatgttacgttaaacacgctgataaagcaaaatgagatcgccccagctttgaatgtgctgtatcaattggatcaactcggcgtggacgccgttatcgccgcggatatcgggttgatgagattgtcggcgaataatttcccaaatctgcgtatccacggcagtactcaagcgtctgtacataacgcgtatgggagcgatttttaa

SEQ ID NO: 14712 - protein, 134 aa, Unknown
  Obtained from environmental sample
  misc_feature (1)..(134): Xaa is any amino acid
MKIQRCDHPELLAPAGSRECFHAAIDAGADAVYLGLGDFNARLRAKNFTIRDLSTLVPFAHSRNVKVYVTLNTLIKQNEIAPALNVLYQLDQLGVDAVIAADIGLMRLSANNFPNLRIHGSTQASVHNAYGSDF

SEQ ID NO: 14713 - DNA, 591 bp, Unknown
  Obtained from environmental sample
  misc_feature (1)..(591): n is a, c, g, or t
atgcggattaggttggccgcaccggcgttaataccggcggccttctgcgccgaggccacgtccttgaggccgttacctgtaacaatcgaaactacaagcgcgtcatggggaataagcccgttagccgccgcttttaccagccccgcggtcccggcaacgccggcaggctcgccgaaaaccccggcgctttttcccaacaactgcattgccgcaagaatttcatcatcgctgacattaacgatgatgcctttggattcacggattgccgtcagggccttgtccccgttgcgcggcacccccacggcgatactgtccgcgatggtgttttcttccattttttcaatggcggtattattctcaatagcgcggttaatggggcagcagccctcggcctgtacgctgataagacggggcagcttgtcaataaggccggttgcgtacaggtctttgaaacccttccagactccggcaatggtacagccgtcgccgacagaaaccgcggcaaaatccggggctctaaatttgcctgttgcaagacccagttgttcggcgatttccatggacactgtttttttcccctcggataaatag

SEQ ID NO: 14714 - protein, 196 aa, Unknown
  Obtained from environmental sample
  SIGNAL (1)...(19)
  misc_feature (1)..(196): Xaa is any amino acid
MRIRLAAPALIPAAFCAEATSLRPLPVTIETTSASWGISPLAAAFTSPAVPATPAGSPKTPALFPNNCIAARISSSLTLTMMPLDSRIAVRALSPLRGTPTAILSAMVFSSIFSMAVLFSIARLMGQQPSACTLIRRGSLSIRPVAYRSLKPFQTPAMVQPSPTETAAKSGALNLPVARPSCSAISMDTVFFPSDK

SEQ ID NO: 14715 - DNA, 432 bp, Unknown
  Obtained from environmental sample
  misc_feature (1)..(432): n is a, c, g, or t
gtgttaaaaccggcggataatccgcttttacgatccgggattttattggctggcggtaatcacgcgtggacaaataaccctgtagaaggcgtggacagcggaatacttaccgcggctaaaatagccgggatgaacctgttaggcgctaaattaatagtgttgtccgcgtgtcagaccggtttaggcgatgtaaaaaacagcgaaggagttttcggcttacaacgcgccttcaaactagcgggagtggaaacattaataatgagcctttgggaagtagacgatgaggcaacctcattattaatgagtactttttacaatgaatggttgattttaggaaagagcaaacaggcagcgtttaaagaagcgcagaaaaaagtccgcgatgaatacgagacacccttttattgggcggcgtttgtaatgatggactga

SEQ ID NO: 14716 - protein, 143 aa, Unknown
  Obtained from environmental sample
  misc_feature (1)..(143): Xaa is any amino acid
MLKPADNPLLRSGILLAGGNHAWTNNPVEGVDSGILTAAKIAGMNLLGAKLIVLSACQTGLGDVKNSEGVFGLQRAFKLAGVETLIMSLWEVDDEATSLLMSTFYNEWLILGKSKQAAFKEAQKKVRDEYETPFYWAAFVMMD

SEQ ID NO: 14717 - DNA, 528 bp, Unknown
  Obtained from environmental sample
  misc_feature (1)..(528): n is a, c, g, or t
atgggcaaaaaggaaagacatgattttatcagcgaactggaatccctttcattcgccgatattattatcatagacaccagcgccggcgttagcagcaatgtccttgatttcatcgccgccgcggatgacgcgattgttgtcaccacgcccgaacccacggcgataaccgacgcctacagcataatcaagattatcgcaacggagtacaacacgttaaatatggaacttaaactggttgtaaaccgggcgcgcggggctgcggaagctaatatcgtcgcggacaaaatgataaacgtgacaggacagtttcttcatgttaaaatggagtacctgggttttatttatgaagaccataccgtgctaaacgcggtgcggcagcagaaaccgtttatggtggttgatccgaaatgcaaggcaagccaaagcatccagcacctggtggtgcgtatggataaaaaccagacaaacgagcctgccggtttaagcgctatgttcaggaagatgttcaaccgttcacagggggcataa

SEQ ID NO: 14718 - protein, 175 aa, Unknown
  Obtained from environmental sample
  misc_feature (1)..(175): Xaa is any amino acid
MGKKERHDFISELESLSFADIIIIDTSAGVSSNVLDFIAAADDAIVVTTPEPTAITDAYSIIKIIATEYNTLNMELKLVVNRARGAAEANIVADKMINVTGQFLHVKMEYLGFIYEDHTVLNAVRQQKPFMVVDPKCKASQSIQHLVVRMDKNQTNEPAGLSAMFRKMFNRSQGA

SEQ ID NO: 14719 - DNA, 558 bp, Unknown
  Obtained from environmental sample
  misc_feature (1)..(558): n is a, c, g, or t
atgaaaatagatttaacctcttttggctcgcaagagatttctgtgaactccttgaacgctacggtttttgtagagcttcaaacaaggggcttacctatggaagacaacataagaacggagtcaaaagggcttgctattgataggactttgtttagccaaaacggagagagaatcaccgcttcgcagataaagcaaggcgaggcgttctggattgtttttggtgttaggtcgtttgcttccagccgtgttgataatgtggctctgtctagcattttgccttcgagctttgaaatttccaacgaaaggctgaacgaatacgatagaccggggtggctaaataatatcccgtctctttccacagcggattatatggacataagggacgaccgcatcaactggttctttagcctttatccgggtgaaactaaggcttttgccgttcaaattcatcctagctacgcgggagaattcagatggcccggtcttgttcttgaagcgatgtatagccctgattactttgcgcgtattgccggcagcagaattggaatttcgccgtga

SEQ ID NO: 14720 - protein, 185 aa, Unknown
  Obtained from environmental sample
  misc_feature (1)..(185): Xaa is any amino acid
MKIDLTSFGSQEISVNSLNATVFVELQTRGLPMEDNIRTESKGLAIDRTLFSQNGERITASQIKQGEAFWIVFGVRSFASSRVDNVALSSILPSSFEISNERLNEYDRPGWLNNIPSLSTADYMDIRDDRINWFFSLYPGETKAFAVQIHPSYAGEFRWPGLVLEAMYSPDYFARIAGSRIGISP

SEQ ID NO: 14721 - DNA, 528 bp, Unknown
  Obtained from environmental sample
  misc_feature (1)..(528): n is a, c, g, or t
ttgatagcgggcccgtggccgtatacgtttaattcatggtcattatcatttgtttcgtcgtttggagcggacggttttatctctccgctggaaaataacaggcagaatcttgaacgcactttgggtattaaaagccggggcagtgaaaaaaagggcgggaaaaaatcgcataacgcgttacagtcaaaatattttattacggtttttaactggccgccgctttttaatataagggcggacatgagcgccgttattaattttgattcatttacagataacaaagacgaggctttttcgcttgcgacaagccccgaaggttcgcgtatctatccgcaaaagccgttttccataattgataaaattcagtttttaaaagaggcagggtttgcccgctttataatagacttatcaggcccggtaatattgaaaaaatcaaactaccgcgacttaatgcgcgccgttaaagagagcgcacccctgccccacgcaagccgttttaactggaaagacggcttttacagcggctag

SEQ ID NO: 14722 - protein, 175 aa, Unknown
  Obtained from environmental sample
  misc_feature (1)..(175): Xaa is any amino acid
MIAGPWPYTFNSWSLSFVSSFGADGFISPLENNRQNLERTLGIKSRGSEKKGGKKSHNALQSKYFITVFNWPPLFNIRADMSAVINFDSFTDNKDEAFSLATSPEGSRIYPQKPFSIIDKIQFLKEAGFARFIIDLSGPVILKKSNYRDLMRAVKESAPLPHASRFNWKDGFYSG

SEQ ID NO: 14723 - DNA, 450 bp, Unknown
  Obtained from environmental sample
  misc_feature (1)..(450): n is a, c, g, or t
atgaaagcaatgtctttgtatcggccaaacaccatccacaacgcattgagcgatttcgatcgctacttcgagtccttcttcggggacaaccttttatctcccggatcaagggttcttaatcacctgccggcagtagatgtccgggaaacggagaagtcctatgtcatggacatggaactgcccggctatgacgagaaggacattgagattcacattgacggcagcagcctttcgattgcatcgaaacacgaagaaacccgcgacgcgaaagatgaagaggacaacaagggaacatggattctccgcgaacggcgggttaattctttcagccgctcgttcaaactgcccgaaaacgccaaccctgaagatgtcaccgctgaattcaaaaagcggcatcctcagcatggagataaaaaacgagccgaagcccagaagagaacgatcagataa

SEQ ID NO: 14724 - protein, 149 aa, Unknown
  Obtained from environmental sample
  DOMAIN (46)...(145): Hsp20/alpha crystallin family
  misc_feature (1)..(149): Xaa is any amino acid
MKAMSLYRPNTIHNALSDFDRYFESFFGDNLLSPGSRVLNHLPAVDVRETEKSYVMDMELPGYDEKDIEIHIDGSSLSIASKHEETRDAKDEEDNKGTWILRERRVNSFSRSFKLPENANPEDVTAEFKKRHPQHGDKKRAEAQKRTIR

SEQ ID NO: 14725 - DNA, 306 bp, Unknown
  Obtained from environmental sample
  misc_feature (1)..(306): n is a, c, g, or t
gtgatggacatggaactgcccggctacaacgaaaaggacattcagattaacattgacggcagcagcctttccattaccgcaaagcaggaagaagccaaagaagaaaaagagaagaaccccgcagaaaaccatggaacatggcttctcagggaacggcgggtcagttccgtcagccgctcgttcaaactgccccagaacgccgaccacgaagatgtaaccgctgaatttaaaagcggcatccttaccatagaaattaaaaaacgggcggaggcccagaaacggacgattcaggttaaagcggcctaa

SEQ ID NO: 14726 - protein, 101 aa, Unknown
  Obtained from environmental sample
  DOMAIN (1)...(99): Hsp20/alpha crystallin family
  misc_feature (1)..(101): Xaa is any amino acid
MMDMELPGYNEKDIQINIDGSSLSITAKQEEAKEEKEKNPAENHGTWLLRERRVSSVSRSFKLPQNADHEDVTAEFKSGILTIEIKKRAEAQKRTIQVKAA

SEQ ID NO: 14727 - DNA, 465 bp, Unknown
  Obtained from environmental sample
  misc_feature (1)..(465): n is a, c, g, or t
atgggtctggttaaacaatatttaaaaggagaaatggatttctaccgggagaacaatataaagctgcgccacgccggaaaccgcgaggggcttccggcggatgtcttgcatgacctggatgaagcctgcgcagtaacaagcgcttttggaggcctccaggtgatcctggcgctcaactacgggggcagggacgaaatcatcagagcggtacaaaagctaatttactctggcgttccggcaactgctgaaaacctgagccggtatatggacaacccggacatccctgacccggatctgataatcaggacagcaggagaattcagaacgagtaatttccttctttgggaaggagcttacacagaatactatatttctgataagctatggcctgactggacagaagacgatcttgaaaaggctatcctggcatataaaaacagggatcgccgcttcggaggcgtataa

SEQ ID NO: 14728 - protein, 154 aa, Unknown
  Obtained from environmental sample
  DOMAIN (1)...(153): Putative undecaprenyl diphosphate synthase
  misc_feature (1)..(154): Xaa is any amino acid
MGLVKQYLKGEMDFYRENNIKLRHAGNREGLPADVLHDLDEACAVTSAFGGLQVILALNYGGRDEIIRAVQKLIYSGVPATAENLSRYMDNPDIPDPDLIIRTAGEFRTSNFLLWEGAYTEYYISDKLWPDWTEDDLEKAILAYKNRDRRFGGV

SEQ ID NO: 14729 - DNA, 519 bp, Unknown
  Obtained from environmental sample
  misc_feature (1)..(519): n is a, c, g, or t
gtgtccaatgtctttttacaaatactcgacgacggccgcctgacggacggacagggacgcgttgtcgattttagaaatgtaataatcattatgacaagcaatttaggctctgacttgatattggaagcaaaaaatcctgaaaccttacgtaactcgctgatggaacttttaaaacacagttttaggccggagtttattaaccgtattgacgagacagttattttcaaccggcttggcaagggagaaatcggtaaaatagttgatattcaactaatacggctttccaagcggcttgcggaacgtaaaatcacgcttgtactgacaaacgcagcaaagtccctgcttgccgaacgcggatacgatcctctgtttggcgcgcgcccgcttaaacgaacaatccaaagcgaccttgaaaacccgcttgcaaagcagatcatcgcaggagtcattcgcgaaggcgatacaattaccgccgatgtttccacagataaagaagggatcgtttttaagaagacctga

SEQ ID NO: 14730 - protein, 172 aa, Unknown
  Obtained from environmental sample
  DOMAIN (1)...(72): ATPase family associated with various cellular activities (AAA)
  misc_feature (1)..(172): Xaa is any amino acid
MSNVFLQILDDGRLTDGQGRVVDFRNVIIIMTSNLGSDLILEAKNPETLRNSLMELLKHSFRPEFINRIDETVIFNRLGKGEIGKIVDIQLIRLSKRLAERKITLVLTNAAKSLLAERGYDPLFGARPLKRTIQSDLENPLAKQIIAGVIREGDTITADVSTDKEGIVFKKT

SEQ ID NO: 14731 - DNA, 726 bp, Unknown
  Obtained from environmental sample
  misc_feature (1)..(726): n is a, c, g, or t
atggattatgacaaatttacaattaaagctcaagaagctttaaatgaagccgccggtatcgcgcaaaaaagtgaccattctcaaattgaaagcgaacatttactgctggcgttattgcgacaggaaaacggaattgttacgccgattatcgagcggataggaggcgatgccgtaagactttcctccgatgttgaggagcttgttaataaaacaccgaaggttttcggagaagcggcgcaggttttctactcaccggcattatcaaaaattttagcgaaagccgaagttgaggcttcggcattaaaagacgaatatgtctctacagaacacatattaattgctatttctgcgagcgagggcaaggcggcggatctgcttaaaaaaacgggcgttaacaaggacgctattcttggcgcattgaagcatgttagaggaaacgcacgcgtgaccgatcaaaatccggaagaaaaatatcaggcgctggaccgctactgccgcgatcttaccgctcttgcgcgtcaggaaaaacttgatcccgttatcggacgcgatgaagaaatacgcaggtgtatgcaggttctgtctcgcagaacaaagaataatcccgtacttatcggcgaacccggcgtttggaaaacggcgattgtcgaggggcttgcaagacgtattgtggcgggcgacgtaccggacggattgaaggtaaaaaaatacttgcgctcgatatag

SEQ ID NO: 14732 - protein, 241 aa, Unknown
  Obtained from environmental sample
  DOMAIN (94)...(145): Clp amino terminal domain
  misc_feature (1)..(241): Xaa is any amino acid
MDYDKFTIKAQEALNEAAGIAQKSDHSQIESEHLLLALLRQENGIVTPIIERIGGDAVRLSSDVEELVNKTPKVFGEAAQVFYSPALSKILAKAEVEASALKDEYVSTEHILIAISASEGKAADLLKKTGVNKDAILGALKHVRGNARVTDQNPEEKYQALDRYCRDLTALARQEKLDPVIGRDEEIRRCMQVLSRRTKNNPVLIGEPGVWKTAIVEGLARRIVAGDVPDGLKVKKYLRSI

SEQ ID NO: 14733 - DNA, 921 bp, Unknown
  Obtained from environmental sample
  misc_feature (1)..(921): n is a, c, g, or t
ttgtcgcgggtgggcaacgaattttaccgggcgggactccccagggcgccgctccggcgaaaaggcnctttgatcaaaagttccttattgggcggcggccagcttatcgacggcgtgcttaaaacaagcgactaccgccggaaatgggcggcctatgaattgcttaagtcaataagaaagaaaaacctccaggcggcacccgaacaggtcccggcgcataaagcgccgtattctcatcttgcaagctggatggaaaaagccgagggcatgaggggtataggcatagccctgggatgccagggtaacggcttgctcagtaacgacgcggcgcggtttccctgctccgtcgaactgaccctggacggggaggggagcctggaaattaaaaccggcatggtcagttcggacagcgatcacggaagcgtctgggctgatctcgtttcgaagattctggagatagacaggaaaaaggtgcgggtaagctattcgggcgaatcccaggattcggggccttcgacaacgtcgcgcaatatcgccgtcctgaccaggcttatcgaacaggcgtgcgaagccatacgcaagcggagagagaaagagtccctgcccctgacggtacgcaaaacggcgagcccgcagaaggccgacgttccggacgggcttttccttcagggcgattcggactcgggcggcatacagcccggctgggcctcgtcagtcgtcgaagtcgaattcgacacaatagactatgtgcctcgggtgcgcggcgtgtggatgtgcgtggacggcgggaagattttttccgaggacagggccccgcagaacattaaatcttcggttatacaggctttgggctggtcttacattgagcaaataagctatgttaacggcatgatacccgccagccagtttgagaatttgtaa

SEQ ID NO: 14734 - protein, 306 aa, Unknown
  Obtained from environmental sample
  misc_feature (1)..(306): Xaa is any amino acid
MSRVGNEFYRAGLPRAPLRRKGXLIKSSLLGGGQLIDGVLKTSDYRRKWAAYELLKSIRKKNLQAAPEQVPAHKAPYSHLASWMEKAEGMRGIGIALGCQGNGLLSNDAARFPCSVELTLDGEGSLEIKTGMVSSDSDHGSVWADLVSKILEIDRKKVRVSYSGESQDSGPSTTSRNIAVLTRLIEQACEAIRKRREKESLPLTVRKTASPQKADVPDGLFLQGDSDSGGIQPGWASSVVEVEFDTIDYVPRVRGVWMCVDGGKIFSEDRAPQNIKSSVIQALGWSYIEQISYVNGMIPASQFENL

SEQ ID NO: 14735 - DNA, 465 bp, Unknown
  Obtained from environmental sample
  misc_feature (1)..(465): n is a, c, g, or t
atgggggaagacgttgtgattcactgcgaggcgggcaggaggctcattgacatactgcgggtgaatttcgggcttctgggcgcaaagacgggctgccttagcgggaagtgcgggttctgcgcggtgatattcaacggccttgtcagccacgcctgcctgatccccgcgttccagctccggggtagcgaagtgattactattgaggggttttcccagacggacgaatacaacgacattgtcacaggttttgcccaggcggacatggacggctgcgggtactgcaacgccagcaagatactcaacgcgggggcgctgctggacaggagcaagcggccttcgcggcaggagatactccaggcgttcggggggatacagtgccgctgtacagacaccgagaagctgatcgaaggcatagaaaaagctgcggagatccgccagcggaggcgttatggccgatcagcttaa

SEQ ID NO: 14736 - protein, 154 aa, Unknown
  Obtained from environmental sample
  DOMAIN (66)...(140): [2Fe-2S] binding domain
  misc_feature (1)..(154): Xaa is any amino acid
MGEDVVIHCEAGRRLIDILRVNFGLLGAKTGCLSGKCGFCAVIFNGLVSHACLIPAFQLRGSEVITIEGFSQTDEYNDIVTGFAQADMDGCGYCNASKILNAGALLDRSKRPSRQEILQAFGGIQCRCTDTEKLIEGIEKAAEIRQRRRYGRSA

SEQ ID NO: 14737 - DNA, 834 bp, Unknown
  Obtained from environmental sample
  misc_feature (1)..(834): n is a, c, g, or t
atgctaatattccgtcattcgtattcagcgatgaatacggctggcgcaggttattacaaaccttatgacaaacgcgataaatttacgccggagaacggcaaggtaacattgagcgcggaaaagctggaagaaaaagacggtgaaattaccgtaagaatcgaagttgcggactcaggcattgggatttcgccggaacagcaggcaaaactctttcaggcttacaatcaggccgactcaagcatcaccagcaaattcggcggtacggggctggggcttgtcattaccaaacgtataatagaactgatgcagggaaagatatggattgagtcggaactcggcaagggagcgaaatttatatttaccataaaagtgaaacagggggcgcagagcgcgggtaaggctgcgtctaccggttcgccttcgggcagtataaaagcggccgatttacatttacagggttataccatattggccgcggaagacatggattttaacagggaagttcttgccaaatatctggaaaagaccggcgtaacaatagattttgccgagaacggcaaaatatgcgttgataagttcaaagagaatcccgataaatactgtttgatttttatggacattaatatgccggaaatgaccggagatgaagcgacaaaggtgatacgggcgcttgatatgaagcaggcaaaggagatacctattgtcgccatgacggcggatgtttttaaggaagatgtcgaaaaatgcctttcgataggcatgaacgatcatatctcaaagccgattgttccaaaaattgtactttcaaagctcaaacaacatttgaagatataa

SEQ ID NO: 14738 - protein, 277 aa, Unknown
  Obtained from environmental sample
  DOMAIN (154)...(272): Response regulator receiver domain
  misc_feature (1)..(277): Xaa is any amino acid
MLIFRHSYSAMNTAGAGYYKPYDKRDKFTPENGKVTLSAEKLEEKDGEITVRIEVADSGIGISPEQQAKLFQAYNQADSSITSKFGGTGLGLVITKRIIELMQGKIWIESELGKGAKFIFTIKVKQGAQSAGKAASTGSPSGSIKAADLHLQGYTILAAEDMDFNREVLAKYLEKTGVTIDFAENGKICVDKFKENPDKYCLIFMDINMPEMTGDEATKVIRALDMKQAKEIPIVAMTADVFKEDVEKCLSIGMNDHISKPIVPKIVLSKLKQHLKI

SEQ ID NO: 14739 - DNA, 690 bp, Unknown
  Obtained from environmental sample
  misc_feature (1)..(690): n is a, c, g, or t
ttgtggcatatcatgaagatatattcgttctacggctttagcgagttcgtgatactcacgggctataagtcgcacgtcatcaaagacttcttcataaactactacgcccgctactccgacgttactatcgacatgattaataacgcggtagagtaccacaacgtcagggcggagccttggcgggtgacggtgctctacaccggagaacagaccatgacgggcgggcggcttttgcgggcgcgggggttcttgggcggcgagaggttcctcctcacctacggcgacggcgtgagcgatgtggacatccctgcggttatagcttcccacgaggccgccggtaagctcgtaacaataactgcggtgatgccggcggagcgcttcggcacaatagcggtgggcggcgacggcgccgtcagcgcgtttcgcgagaaacccgacggcggcggcggcgtttgggtaagcggcgggttcttcgtcatggagccgggtgtttttgattaccttaccggcggtgacgaaacggtgctggaacgcgaacccttcgagcgcttggcggacgaggggcggattaatgcctacaagcacgccggtttctggcatcccatggacaccctgcatgacaaaaacgtactgacggatatgtggacgagcgccaaagccccgtgggcgcgctgggagaagaggctatga

SEQ ID NO: 14740 - protein, 229 aa, Unknown
  Obtained from environmental sample
  DOMAIN (17)...(208): Nucleotidyl transferase
  misc_feature (1)..(229): Xaa is any amino acid
MWHIMKIYSFYGFSEFVILTGYKSHVIKDFFINYYARYSDVTIDMINNAVEYHNVRAEPWRVTVLYTGEQTMTGGRLLRARGFLGGERFLLTYGDGVSDVDIPAVIASHEAAGKLVTITAVMPAERFGTIAVGGDGAVSAFREKPDGGGGVWVSGGFFVMEPGVFDYLTGGDETVLEREPFERLADEGRINAYKHAGFWHPMDTLHDKNVLTDMWTSAKAPWARWEKRL

SEQ ID NO: 14741 - DNA, 324 bp, Unknown
  Obtained from environmental sample
  misc_feature (1)..(324): n is a, c, g, or t
atggaacagcagcgcttgtcgatagaaaattacgtccgcttgatagactacgagatccgcagcgcccatatagaggtgcagcgggcaaagaggcagatagagacggcgaagacggtgagcgcgttgcagttgcagaaattagaagcggagcaagagaagatgaacgccggaaagtcgacgggctacgcggtgttgcaggtacagcgcgatcttgtatccgcgaacttagacgaggcgcaagcccgcacgtctcacgtggcggccttgttaacgctgtactcaaaggacgggacgttcttacggcgccgaggaattaagttttga

SEQ ID NO: 14742 - protein, 107 aa, Unknown
  Obtained from environmental sample
  misc_feature (1)..(107): Xaa is any amino acid
MEQQRLSIENYVRLIDYEIRSAHIEVQRAKRQIETAKTVSALQLQKLEAEQEKMNAGKSTGYAVLQVQRDLVSANLDEAQARTSHVAALLTLYSKDGTFLRRRGIKF

SEQ ID NO: 14743 - DNA, 573 bp, Unknown
  Obtained from environmental sample
  misc_feature (1)..(573): n is a, c, g, or t
atgacgatgtgcggctcttcgaaaaaaacgtttgagtacgcggccgtagccgtgctggtctcagccgccttgctgcttctaattaaggatgtcgtcatatacctattggcgcccgcttatcggagcgccgtaatgataatgccgtttttgctgcttgtgccgctgatgaacttgttgagcgagatcaccggatcgggcatcaggttcaagaagcgtacctatctctacataatagtggtggcggtcggcgttgcggcgaactntgcgggaaaccacttcctgatcccgataataggcgctcgcggcgcggcgatctccaccggggcggcctacacaatatactttgtgatgcaaacgcaaatagccggccggctcttcgcggcgaactacaagatatacaagatgataccggcgtttctggtgatagcggcatttatggcgctgaacactttttataatgttccgtggtggtgcaacgcggcgccgatcgcggttgtggcgttgatacattggggtgttgttgcggaagttttaaagtatctaaaatcaaaacttaattcctcggcgccgtaa

SEQ ID NO: 14744 - protein, 190 aa, Unknown
  Obtained from environmental sample
  misc_feature (1)..(190): Xaa is any amino acid
MTMCGSSKKTFEYAAVAVLVSAALLLLIKDVVIYLLAPAYRSAVMIMPFLLLVPLMNLLSEITGSGIRFKKRTYLYIIVVAVGVAANXAGNHFLIPIIGARGAAISTGAAYTIYFVMQTQIAGRLFAANYKIYKMIPAFLVIAAFMALNTFYNVPWWCNAAPIAVVALIHWGVVAEVLKYLKSKLNSSAP

SEQ ID NO: 14745 - DNA, 765 bp, Unknown
  Obtained from environmental sample
  misc_feature (1)..(765): n is a, c, g, or t
atgattatgcacagaaaaatcataaaaacaattaaatcaaccatctttgattatgaggaaaaaaaccattttaaaatatggaggaaacctattatcgaaattatttcggcaaagaataaaaaattacgggaattaaaaaaaattgtgtctatagatcactttatgccttacgatattttaccggacgctaaaagcataatcagcttttttattccatttaaaaaatatattgttaaaagcaatatcagcggaacaatggcttcaaaagaatgggcggcggcatacattataacaaatgaattaatagacgaaattaataataaaatagaaaaattaatggaaaccaacggatataaaaccggaaaaattccggctacgcataattttaataagaaaacgctgattagcaattggtcacacaggcatattgcgtacatagcgggtataggcgcatttgggataaataatatgcttataaccgggaaaggctgcagcggacggtttggaagcataataatcagttataaattgaaaaaatataaaaaaacaagcaaagtaaaagaaaaatgcttaaataagacaaaaaatgaatgcggaatatgtcaaaaaagatgcatagtaaacgcgtatgaaaacaatggttttaacaggaataaatgttataaacagtgcatggaaaatgaaaactaccataaagaaacgggatatgcggatgtctgcggaaaatgtcttgttgggctgccttgttcaataaaagaaccttaa

SEQ ID NO: 14746 - protein, 254 aa, Unknown
  Obtained from environmental sample
  misc_feature (1)..(254): Xaa is any amino acid
MIMHRKIIKTIKSTIFDYEEKNHFKIWRKPIIEIISAKNKKLRELKKIVSIDHFMPYDILPDAKSIISFFIPFKKYIVKSNISGTMASKEWAAAYIITNELIDEINNKIEKLMETNGYKTGKIPATHNFNKKTLISNWSHRHIAYIAGIGAFGINNMLITGKGCSGRFGSIIISYKLKKYKKTSKVKEKCLNKTKNECGICQKRCIVNAYENNGFNRNKCYKQCMENENYHKETGYADVCGKCLVGLPCSIKEP

SEQ ID NO: 14747 - DNA, 945 bp, Unknown
  Obtained from environmental sample
  misc_feature (1)..(945): n is a, c, g, or t
ttgcagacagacgtttccggacggacattaaaattaggtgccgagggacagcaaaaacgccgacgcgacgcagaacctttacatagaagccgatatctggaagtcctgaaactcttgcgtcaaaactactacggcgcggtgaaaatgatttacatagacccgccgtataacacagggaacgattttgtctatcgagacgacttcaccatgagtaaggccgaaagcgatgaggcggaaggagaaacagttggcggcgagcgcatagtggtcaatcagaaatcaagcaaccgctttcacgctaactggttgaatatgatgtatccgcgcttgcgcgtagcaaaagatttgttgcgtgatgatggcgtgatttttattagcattgacgacgatgaaattgaaaacttaataaaaatatgcaatgaaatatttagtgttgacaattttattgctaatattgtctggaaacgaaagcgcggacgcgataattcagcgcgctggtttagcagggcacacgagtatctcttggtctactcaaaaaataaagatgcctttgacgtaaactatcttcagttggacgatgaaacaagagaagcatataaaaatcccgacaatgatcaacggggttgttggcgaatgcttgcgtgttgggctcgcggaacacaaggtggcgtaaggtatgattttaaaacaaaagctggacaatatttctctgagagattgtggctatttagtaaagttaacctggctaaacttgacgacgaaagcaaacttgtgattcgtggcgataatatttatcgcaaaatgttcatcaccgaaaatcgtggaaagattcctgaaacgctttgggataatgtgtcgaatgcggcgaatgccgccgatgaaattaaacgagtttttgaggagaaaattatttttgatactcctaagccagtaccttatgtatag

SEQ ID NO: 14748 - protein, 314 aa, Unknown
  Obtained from environmental sample
  DOMAIN (47)...(305): DNA methylase
  misc_feature (1)..(314): Xaa is any amino acid
MQTDVSGRTLKLGAEGQQKRRRDAEPLHRSRYLEVLKLLRQNYYGAVKMIYIDPPYNTGNDFVYRDDFTMSKAESDEAEGETVGGERIVVNQKSSNRFHANWLNMMYPRLRVAKDLLRDDGVIFISIDDDEIENLIKICNEIFSVDNFIANIVWKRKRGRDNSARWFSRAHEYLLVYSKNKDAFDVNYLQLDDETREAYKNPDNDQRGCWRMLACWARGTQGGVRYDFKTKAGQYFSERLWLFSKVNLAKLDDESKLVIRGDNIYRKMFITENRGKIPETLWDNVSNAANAADEIKRVFEEKIIFDTPKPVPYV

SEQ ID NO: 14749 - DNA, 420 bp, Unknown
  Obtained from environmental sample
  misc_feature (1)..(420): n is a, c, g, or t
atgtatcagatcggccgagacatgaaattactgctggatacccatactttattgtggacaataggaaaaacaagtgaattatccgaaaaagctattaaagaaataaaaaacgcaaataacgaaatttttgtaagcgctgtttcattatgggaaattgccttaaaatgcagtattggaagattgctcgttagttttaatgtagataaaataccggaatattgccgaaaaatgggatttacgttaattccgctggagccgattgacgcgttaaacagtttacaccttcctcaaaaagacagccataaggatccatttgatagaatgttgatatttcaatgtataaaaaatgaatatatttttgtcagcaaagatacgcaaatggaactatatgaagatgaaggattgataaacttatggtaa

SEQ ID NO: 14750 - protein, 139 aa, Unknown
  Obtained from environmental sample
  DOMAIN (10)...(138): PIN domain
  misc_feature (1)..(139): Xaa is any amino acid
MYQIGRDMKLLLDTHTLLWTIGKTSELSEKAIKEIKNANNEIFVSAVSLWEIALKCSIGRLLVSFNVDKIPEYCRKMGFTLIPLEPIDALNSLHLPQKDSHKDPFDRMLIFQCIKNEYIFVSKDTQMELYEDEGLINLW

SEQ ID NO: 14751 - DNA, 342 bp, Unknown
  Obtained from environmental sample
  misc_feature (1)..(342): n is a, c, g, or t
gtggattttcacgctcaggcaagcgcggaaaaaaagacttttttctacgccgccgacggtctttgttccgccgtaataggttcgcacatcagagttcaaaccgcggatgaaaccatcatgcctaaaggaacggcttgtataagcgacgccggcagaacgggaagccttcaatctgtcggaggctgtgaaataacttcgcgcataaacgaataccttacaggcatcccccactggacaaaagaagcgtgggacgcgccgcaattacagggtgtgtatctggatatcgacaaagacggtaagacgcgcgcgattgagagagttcgtatcgatactacagaataa

SEQ ID NO: 14752 - protein, 113 aa, Unknown
  Obtained from environmental sample
  misc_feature (1)..(113): Xaa is any amino acid
MDFHAQASAEKKTFFYAADGLCSAVIGSHIRVQTADETIMPKGTACISDAGRTGSLQSVGGCEITSRINEYLTGIPHWTKEAWDAPQLQGVYLDIDKDGKTRAIERVRIDTTE

SEQ ID NO: 14753 - DNA, 363 bp, Unknown
  Obtained from environmental sample
  misc_feature (1)..(363): n is a, c, g, or t
ttggacagaattcggcacgagcccatggattgttggatatttatgaggttgaacgatgaagttttaagtaatcgcgccggtagtgcgccgaacaagcgaaagaccggaaaaccgtttgacgcgccgtgtaatatgccctttacgcaactaataattcgcgcggactgcggtgtgagtttgtgttgcaacgacgctttgggggatgtgacgcttggaaacgtgggagagcagacgcttgaggagatttggtacgggcagaagcactttgacatacttgaatcgatgcgcaaaaatataagaagcggaatttgcagggattgcgacgtagtttcttccgggaaacattacgggactttcgcgtga

SEQ ID NO: 14754 - protein, 120 aa, Unknown
  Obtained from environmental sample
  misc_feature (1)..(120): Xaa is any amino acid
MDRIRHEPMDCWIFMRLNDEVLSNRAGSAPNKRKTGKPFDAPCNMPFTQLIIRADCGVSLCCNDALGDVTLGNVGEQTLEEIWYGQKHFDILESMRKNIRSGICRDCDVVSSGKHYGTFA

SEQ ID NO: 14755 - DNA, 459 bp, Unknown
  Obtained from environmental sample
  misc_feature (1)..(459): n is a, c, g, or t
atggtcgcttacgacccaaacctgcggttgcagcgatggtcgctcgaagacgcccgcgagggtttgtggagcgtgctatcgctnatagacgtcttcttcgtatcctgcccggaggagtccaaagcgctggtcggatttgaacgcgatatagacgtgataggcttcttgtttaataggggtgtgggcaccgtggtggtcaaaaaaggcgccgacgggtgcgtggtgggccacgccgggaacgtaaaacccatcccgcagcacagttacgacggagctaatccgttcaaaacgccggcgctcgccggcagcgcgttcaacggcgctttcctcaactgcatcgcaaacggttacgacccgttcgccgcgggggaattcgcgaattccgtcgcgctgtttaagggaatcaaaggatgggggatcgactcgctgcccacggtggacgatttgcgcaaagattag

SEQ ID NO: 14756 - protein, 152 aa, Unknown
  Obtained from environmental sample
  misc_feature (1)..(152): Xaa is any amino acid
MVAYDPNLRLQRWSLEDAREGLWSVLSLIDVFFVSCPEESKALVGFERDIDVIGFLFNRGVGTVVVKKGADGCVVGHAGNVKPIPQHSYDGANPFKTPALAGSAFNGAFLNCIANGYDPFAAGEFANSVALFKGIKGWGIDSLPTVDDLRKD

SEQ ID NO: 14757 - DNA, 573 bp, Unknown
  Obtained from environmental sample
  misc_feature (1)..(573): n is a, c, g, or t
atggaaggcattatagtccgcatactggcgaatatgcgcgaggcttggacgaccgtaatagacctgcgcccgagactggggcagattgataccaatccccagttcgcacagattgtcccccccacggaaatggttattctggtaacgctggaaaccaaggtaggcgacgtggaagggatgatgaatttttgtattccgtatattacaatagaaccgatagtaggcaagctttccgcccaattctggtattcgtcggtacggcgcaacgccacttccgaaaacctcactgtattaaaggaaaagctggcgactgtcgatgttaatgtagtagcagaaattgggaagatcgatattcccgtaagggacgttctttccctgcaggcaggagacgttatccgcttgtacaatacccgtgtggaagaaccgtatttcctgaatattggcaataaaccaaagttcctgtgccgtcccgggctaatagggagaaaactggcggtacaaattacaaagaagattgccgagcttgaagaaaacgactttgaagagctggtaaacgatgagggggtcatgtaa

SEQ ID NO: 14758 - protein, 190 aa, Unknown
  Obtained from environmental sample
  DOMAIN (1)...(77): Flagellar motor switch protein FliM
  misc_feature (1)..(190): Xaa is any amino acid
MEGIIVRILANMREAWTTVIDLRPRLGQIDTNPQFAQIVPPTEMVILVTLETKVGDVEGMMNFCIPYITIEPIVGKLSAQFWYSSVRRNATSENLTVLKEKLATVDVNVVAEIGKIDIPVRDVLSLQAGDVIRLYNTRVEEPYFLNIGNKPKFLCRPGLIGRKLAVQITKKIAELEENDFEELVNDEGVM

SEQ ID NO: 14759 - DNA, 864 bp, Unknown
  Obtained from environmental sample
  misc_feature (1)..(864): n is a, c, g, or t
gtgcttggttactgcgagaacccggacgatcaaaagtgggagaagcccggcattatcaacaaagcgccggctaacgctctgcttgacaaatatggctcaccggaagcggctgacaaggcgcttgccgcgttaaaagaatactgggacgcgcttttgggccgcttcagcgtagaggccgaggacaaacgtatggcgcgtatggctggggtgtggaaccagtaccagtgcatggtcacgtttaacatgtcgcgcagcgcgtcttattttgaatccggcatagggcgcggcatgggtttccgcgattcaaatcaggaccttttgggcttcgtgcatctagtgccggtacgcgcccgcgctcgcattttggacatcgcggccacgcagtttcccgacggcagcgcgtaccatcaatatcagccgctgaccaagcgcggcaacaacgaggtaggctcaggctttaacgacgatcccctgtggctgatctgcggcgtggcagcgtacatcaaagagacaggcgatttcggcattcttgatgagaaggttcctttcgataacaaagaagagctggcggaaagcctgtttgtccatttaaaacgttctttcgattacactgttacgcataccggcccgcacggtctgccgctgattggccgcgctgactggaatgattgtttgaacctcaactgcttttccaaaacgccgggcgaatccttccagaccacggccaattttgaaagcggcgtagcagaatcagttttaatcgccgcgatctttgtgttcaccggccccgattatgttgaaatctgccgccgcacgaaccgtacggaagaagccgcgtacgccaccaaggcgattcctcaatga

SEQ ID NO: 14760 - protein, 287 aa, Unknown
  Obtained from environmental sample
  misc_feature (1)..(287): Xaa is any amino acid
MLGYCENPDDQKWEKPGIINKAPANALLDKYGSPEAADKALAALKEYWDALLGRFSVEAEDKRMARMAGVWNQYQCMVTFNMSRSASYFESGIGRGMGFRDSNQDLLGFVHLVPVRARARILDIAATQFPDGSAYHQYQPLTKRGNNEVGSGFNDDPLWLICGVAAYIKETGDFGILDEKVPFDNKEELAESLFVHLKRSFDYTVTHTGPHGLPLIGRADWNDCLNLNCFSKTPGESFQTTANFESGVAESVLIAAIFVFTGPDYVEICRRTNRTEEAAYATKAIPQ

SEQ ID NO: 14761 - DNA, 594 bp, Unknown
  Obtained from environmental sample
  misc_feature (1)..(594): n is a, c, g, or t
atgctgtttatttgcgccaaaatccccgcccgcgcggcattcgcgaaccgcggattcatcctgttcctcatcgcgttagttgtaattctacaaacggttttcggcggcggcttaatcacgggcttaatgataggctgccgcatcataagccttgtcatcatactcccgcttttaaccatgactaccccgccgggggatattagttttggcattacaaagctggggttcaactataaaaccgcctatattattacatccgcttttaacatactgccgtcattccgggaggacgcggggcaattgattgacgcgcgcaggctgaggggcagaacgccgcggttcgggaaaagaaacgtgttcgcgcgctttggcgagtacgcgaaaatcgcgcttccgctgatgataaaagcgatgcggcgggcctcggccgcggggctggctatggattccagggcgttcggggcataccgtgccaggacctggcattccagaacctggncgcgcgcggcccgaaatgtcgcgcttgatttcacggcattgccgcgggattatttacgcgcggttgttgtaacagctaactatttaataaattaa

SEQ ID NO: 14762 - protein, 197 aa, Unknown
  Obtained from environmental sample
  DOMAIN (1)...(162): Cobalt transport protein
  misc_feature (1)..(197): Xaa is any amino acid
MLFICAKIPARAAFANRGFILFLIALVVILQTVFGGGLITGLMIGCRIISLVIILPLLTMTTPPGDISFGITKLGFNYKTAYIITSAFNILPSFREDAGQLIDARRLRGRTPRFGKRNVFARFGEYAKIALPLMIKAMRRASAAGLAMDSRAFGAYRARTWHSRTWXRAARNVALDFTALPRDYLRAVVVTANYLIN

SEQ ID NO: 14763 - DNA, 513 bp, Unknown
  Obtained from environmental sample
  misc_feature (1)..(513): n is a, c, g, or t
atggaaattatccgcggtgatattaccaaactcaaggtagacgctattgtgaacgccgccaattcaagtctgatgggaggcggcggcgttgacggggccatccaccgcgcggcgggcccgcaattactggaagaatgtatgaaaatcgccgcggagcgccgccccggcagtccctgtccggcgggtggcgcggtaattaccggcgcgtaccggcttccctgtaaacacgtcattcacaccgtcggcccggtctggcacgggggagggcagggtgaagcggaaacccttgcgtcctgttatcgtaacagtctgctgcttgccgcccaaaccactcttaccagcatcgccttccccaacatcagcaccggcgtctacggctaccccaaagacaaagccgccgccattgccgtggaaaccgtgcggaaaaccctccctgaaactcccgccatccagcgggtactgtttgtctgttttgatgaagagaattactgcctctatgaaaaactgatataa

SEQ ID NO: 14764 - protein, 170 aa, Unknown
  Obtained from environmental sample
  DOMAIN (17)...(136): Appr-1-p processing enzyme family
  misc_feature (1)..(170): Xaa is any amino acid
MEIIRGDITKLKVDAIVNAANSSLMGGGGVDGAIHRAAGPQLLEECMKIAAERRPGSPCPAGGAVITGAYRLPCKHVIHTVGPVWHGGGQGEAETLASCYRNSLLLAAQTTLTSIAFPNISTGVYGYPKDKAAAIAVETVRKTLPETPAIQRVLFVCFDEENYCLYEKLI

SEQ ID NO: 14765 - DNA, 828 bp, Unknown
  Obtained from environmental sample
  misc_feature (1)..(828): n is a, c, g, or t
ttgatgcggactctcaagacgcacgctgaccgcgatagaatccgacaacaaatggaagaagagagcaaagcacttgacgcccacatggacgagatgaacaccatggaggcgcggcttgtagaaatgcagagaaacatctacggtcttgcccttgagaaaaacgccaaagaaaacgaggcgcggcttttgggcgaacgacgcaacgaaggcaaagcaaagattgaacagagcgaagtaagggaaaaacagataaataacaagatagaagagctaaatgatgacgctgcagggcaagatgaagttgtgtctgaattgagacaaaaagctgtaagcatagaggataacatcaaatccttcgaagaaaacatccaacttgcctcaacccgcataggcgacaatgaaaaagccatacataagaccgaatccgagatacacagccttgaaaaagagcaagcccaatttgaaatacagttggcacagataaccgatgatattgtcgcggaactggacgccgggcttaaaaaagccggttactcagcttcggaacgacgtaatattgaagctgctcttaatgagacactgaacaggttacgcacggtacttacaggcaggggaacccttatccgcgacctctccgctgccgcttccgttgagtccgccgagcttcaacgtatttccggaactctggcgacggaacttgccaatgccgcgtcggacgcggaaaaagcatcgccctctttgagagttatcgcagccattcgcccctgttcattgacgagtttctggcgccgcagggtatcatcaccaaaaagcgggaactggacgtaa

SEQ ID NO: 14766 - protein, 275 aa, Unknown
  Obtained from environmental sample
  misc_feature (1)..(275): Xaa is any amino acid
MMRTLKTHADRDRIRQQMEEESKALDAHMDEMNTMEARLVEMQRNIYGLALEKNAKENEARLLGERRNEGKAKIEQSEVREKQINNKIEELNDDAAGQDEVVSELRQKAVSIEDNIKSFEENIQLASTRIGDNEKAIHKTESEIHSLEKEQAQFEIQLAQITDDIVAELDAGLKKAGYSASERRNIEAALNETLNRLRTVLTGRGTLIRDLSAAASVESAELQRISGTLATELANAASDAEKASPSLRVIAAIRPCSLTSFWRRRVSSPKSGNWT

SEQ ID NO: 14767 - DNA, 864 bp, Unknown
  Obtained from environmental sample
  misc_feature (1)..(864): n is a, c, g, or t
ttgacattagttttattaaccgttgtattaatatcgggattaacatcggttttgacattagcggcattaaccgttgtattaacatcggtcttgacattagtcgtattgactgtcgtattaattgtcatattaacgccggaagtaacgtcagccttgacatcggccttattaaccgttgggttaacatcgggattaacgtcaaccttgacatttgtcgtattgacggttttattaacgtcgggattaacgtcagccttgacattagccttattaacggttgtgttaacatcgggattaacgccgaccttgacatcagccttattaacggttgtattaacgcctaaattaacgtcggccttgacatcgggtttggcttccgccttgacatccgtcttaacgttcgctttattgataaccgtattaacatccgaatcaatcttcacggactttgcgccgcccgtttggttagccttgctcagcgccgccttgagtatctccgacttgacggtgcccaattccacggccgccctttcaaggtcggtcatatcggcttgcccgcgtacaatctgcctaacgcggtcggcggaggcggacagttcttctcttataaggttgctgaaggcgctcacggtgtcggctaccgacatgctcaggtcggcggggttgacggcttgnggaataccggtggcggttccggcgtcgctactctcggccattttctcggcgatcatgccgctgacgcctatcagccctgaggccatgtccatgcggaacttctcggtacgcagagcggcggcgaaactcgagaagtcggcggcgttctgttcgggctctatgtgggctatcgggctctccatgccgtag

SEQ ID NO: 14768 - protein, 287 aa, Unknown
  Obtained from environmental sample
  SIGNAL (1)...(21)
  misc_feature (1)..(287): Xaa is any amino acid
MTLVLLTVVLISGLTSVLTLAALTVVLTSVLTLVVLTVVLIVILTPEVTSALTSALLTVGLTSGLTSTLTFVVLTVLLTSGLTSALTLALLTVVLTSGLTPTLTSALLTVVLTPKLTSALTSGLASALTSVLTFALLITVLTSESIFTDFAPPVWLALLSAALSISDLTVPNSTAALSRSVISACPRTICLTRSAEADSSSLIRLLKALTVSATDMLRSAGLTAXGIPVAVPASLLSAIFSAIMPLTPISPEAMSMRNFSVRRAAAKLEKSAAFCSGSMWAIGLSMP

SEQ ID NO: 14769 - DNA, 942 bp, Unknown
  Obtained from environmental sample
  misc_feature (1)..(942): n is a, c, g, or t
gtgcgggtggtcaaaatcggcggggttgggccggtgaaacgacggattatggagatgggcataaccaagggggtggaggtttatgtccgaaaggtggcgccgttgggcgatccgatggaggttacggtgcggaactaccaactctccctcaggaaggcggacgtcgaactgattgaggtcgagcacagtcgcttgtacgtcgtcggcgacaatccgcaggaaaacgccgccgcccgtatggatggcgccgataaagcggatgttccgccaaaagaggcgtctaacagggaaaaaaagcgtattagaatcgcgcttgccgggaatcccaacagcggcaaaaccacgcttttcaacgctctcaccggatcaaaccagtttgtagggaactggccgggcgtgacggtagagaagatggagggcaagctgaaaggccatgatgaggtggtcgtgactgacctgccgggcatatactccctctccccatacacgcctgaagaggtcgtcgcccgcaattatttgatcgacgagcgtcccgacgtcatcctcaacatcgtagacgccacgaatttggagcgcaacttgttccttaccacacagctcaccgaactcggtatacccgtcgtagtggcgttgaacatgatggacatcgtgcgcaaaagaggcgacaagattgataccgcgaggctcgccgaagaactcggctgccgtgttgaggaggtctccgccctncagggctacggtatcgctgaagcctctgacgcggcggttagggcggcggacggcgtaaagaccgtgccgcagcatagtttctccggcggcgtggagcatactttggcgcacatcggagaggcggtgcttcacaatatgcccggagagcatcaacgcttcttttccgtaaactctttgagcgggacaggaaattatcaaaaatttggaacttaa

SEQ ID NO: 14770 - protein, 313 aa, Unknown
  Obtained from environmental sample
  DOMAIN (98)...(266): Elongation factor Tu GTP binding domain
  misc_feature (1)..(313): Xaa is any amino acid
MRVVKIGGVGPVKRRIMEMGITKGVEVYVRKVAPLGDPMEVTVRNYQLSLRKADVELIEVEHSRLYVVGDNPQENAAARMDGADKADVPPKEASNREKKRIRIALAGNPNSGKTTLFNALTGSNQFVGNWPGVTVEKMEGKLKGHDEVVVTDLPGIYSLSPYTPEEVVARNYLIDERPDVILNIVDATNLERNLFLTTQLTELGIPVVVALNMMDIVRKRGDKIDTARLAEELGCRVEEVSALQGYGIAEASDAAVRAADGVKTVPQHSFSGGVEHTLAHIGEAVLHNMPGEHQRFFSVNSLSGTGNYQKFGT

SEQ ID NO: 14771 - DNA, 960 bp, Unknown
  Obtained from environmental sample
  misc_feature (1)..(960): n is a, c, g, or t
atgcgccgagtggctgcggaacttaattgtagacggcattgtggcgggcgtgggcccgttcttcgncttcgtgccgcagatgtttatcctgttcatgttcctcgccttttggaagcgtgcggatacatgccgcgtatcgcgtttatcatggacagaatcttccgccacttcgggctgtcgggaaaatcattcattcccatcttgataggcaccggttgcagcgttccgggaattatggcgtcgcgcacaattgagaacgaccgcgaccgcaaaatgaccgtcataaccacatccttcatcccatgttcggccaagctgccgataatagcgcttatcgcaggcgctctcttcggcggggcgtggtgggtcgcccccagcgcctacttcgttgggatcgcggccatcatctgctccggcataattctgaagaagacgaaattgttcgccggagaggtcgcgccgttcgtcatggaactccccgcctaccattggccgaccgccgccaacattctgcgtagcatgtgggaacgcgggtggtcgttcatcaagaaggccggaaccatcgtccttttggctacgatatgcgtctggttcgcctccgacttcggttgggggaaagacgggttcggcatggttgacatgagcgagagtattttggcgaagatcggcggagcgatcgcccccctcttcgcgccgctcggttggggcagttggcaagccgccgtcgccgccatcaccggcgtgatcgcaaaagaaaacgtggtgggcacgttcggcatcctctacaacgccggaagcgacgcggaaacatggagcgccctgcgcggcggattcagcgggctggccgcgtactcgttcttggtcttcaacctgctatgcgccccgtgcgtcgccgctatgggcgccatcagacgggagatgaacaacgcgaaatggtcttcgccgcctcggccaatctga

SEQ ID NO: 14772 - protein, 319 aa, Unknown
  Obtained from environmental sample
  DOMAIN (123)...(177): Ferrous iron transport protein B C terminus
  misc_feature (1)..(319): Xaa is any amino acid
MRRVAAELNCRRHCGGRGPVLRLRAADVYPVHVPRLLEACGYMPRIAFIMDRIFRHFGLSGKSFIPILIGTGCSVPGIMASRTIENDRDRKMTVITTSFIPCSAKLPIIALIAGALFGGAWWVAPSAYFVGIAAIICSGIILKKTKLFAGEVAPFVMELPAYHWPTAANILRSMWERGWSFIKKAGTIVLLATICVWFASDFGWGKDGFGMVDMSESILAKIGGAIAPLFAPLGWGSWQAAVAAITGVIAKENVVGTFGILYNAGSDAETWSALRGGFSGLAAYSFLVFNLLCAPCVAAMGAIRREMNNAKWSSPPRPI

SEQ ID NO: 14773 - DNA, 780 bp, Unknown
  Obtained from environmental sample
  misc_feature (1)..(780): n is a, c, g, or t
atggcggcatataacacagcaggcaagtatatgacatttctttcaggcagcagggttgatgcgctaatcggaaactttgtaagagcaagaggcctcggcgttattaacggaaccgacactgagtatacaggaactgtggataaaatatactctgattcgcttggcagagtattggatttaggtatgataccgattctgccgtgcataggctggagtccttcgggaaaaccgtacaatgttccaagcgatgaaattgcacttgccgtatcatcagcgcttggagcggctaaattattcattctgtacgcccatgataaactacagatagataatctcaatataaagaaaaaaccttcatcattgatgcaacgtttggttaatatagtcgatgctccgttcgtcaagcataaacaaaattcattaatgcggcgatctataaccattacaaataaacccctcgcccagcaggttattctcgaaaatctggaaacaagagaagacggcagcttggtgcgtcttactccccagcaggcggaactgataatttccagtatcaatgaattaagcggcggcaatgaagatttccccaaagaacagtatgttcgggaactcaatcttgctttaatggcaagcagggcaggcgttcaccgtgtacacattattgacggaagagaagaaagcgctgttttaaaaagactgttctccaatttgggtgtggggactatggtctatgctgatgaatatgactctattcgttcaatcattcagagaattacctga

SEQ ID NO: 14774 - protein, 259 aa, Unknown
  Obtained from environmental sample
  misc_feature (1)..(259): Xaa is any amino acid
MAAYNTAGKYMTFLSGSRVDALIGNFVRARGLGVINGTDTEYTGTVDKIYSDSLGRVLDLGMIPILPCIGWSPSGKPYNVPSDEIALAVSSALGAAKLFILYAHDKLQIDNLNIKKKPSSLMQRLVNIVDAPFVKHKQNSLMRRSITITNKPLAQQVILENLETREDGSLVRLTPQQAELIISSINELSGGNEDFPKEQYVRELNLALMASRAGVHRVHIIDGREESAVLKRLFSNLGVGTMVYADEYDSIRSIIQRIT

SEQ ID NO: 14775 - DNA, 540 bp, Unknown
  Obtained from environmental sample
  misc_feature (1)..(540): n is a, c, g, or t
atgtacaaggataccgggctgggaaaactatttctgcgctttacgcagccgttgaacatggtatggcagaacatgacctacgacagttttgtcagccgggaaaagagtttcggcggcacggtggccaggattaccgcttacggagtggcggccctgatagtggccgcaatgcggggggcgctggcaaagaaggacggcgaggacatggaaccggaggagcttatgcggcgggtgttttattacctggttgtttccaactttgcagagagcacgccgcttatcgggaatatggctgccggcgccatggaacggatgattaccggcgaggggactgtttaccgggacaataactttgaactagcctaccggctgttggatatgccggggcggctgaataaaaaagactgggaaggggcggtaaaagacgctctgcttgccttgagcttggggacggggctgccgtggtcgcaggccaaccgggttatcagggcggtcaaggaacaaaggccgggggccgtattcgggtataacccgcagtaa

SEQ ID NO: 14776 - protein, 179 aa, Unknown
  Obtained from environmental sample
  misc_feature (1)..(179): Xaa is any amino acid
MYKDTGLGKLFLRFTQPLNMVWQNMTYDSFVSREKSFGGTVARITAYGVAALIVAAMRGALAKKDGEDMEPEELMRRVFYYLVVSNFAESTPLIGNMAAGAMERMITGEGTVYRDNNFELAYRLLDMPGRLNKKDWEGAVKDALLALSLGTGLPWSQANRVIRAVKEQRPGAVFGYNPQ

SEQ ID NO: 14777 - DNA, 876 bp, Unknown
  Obtained from environmental sample
  misc_feature (1)..(876): n is a, c, g, or t
ttgatcgcgagnatggcggctgattgggaaaaggcgacaaataaccaggtgcgcgtaatcgtcagtcatgacgggagggaaggcaccgaagcgaaaatgctttcttctctttccagcgacgctattcaagtgggtgtatttacttccgcaggagtgtcggatatttgccccgccgtaatgaatttaagcatcccgtttatgattaaaaatgaaactgagtttgagcttgtgctaaaagacgtactgccgattattaataaccgcgttaagaaagattttgttattctggcatggtccaagggcggctgggtttatgtattctcaaaggaaaaagtattaacgccggatgatttgcgtaaacaaaagctcgcgacaagttccgatcttaaggatatgaatacggtatttagaactatgggattccagcttgtggaggccgatttcgtaaatgtaggaaccaaactcgcaagtaacgctataaacgccgtatacattattcccgcgagtgtcgctcctttacagttatataagagcttaaaccatatgcttgatgtgcctatcgctccaatcctgggcgcgattgtcatgaaccgcgttacatggaataaaattagcccggcaaatcaacaggaaatacttaaagctacgggcaagattgcttcggaatttgacgcttcagtagtaaaaacggaagcgggcgctatcgcggcaatgggcaaagacgggcttagcgtaaacaaacctaaccaggctcagcaggatatgtggagtaatgaattaaaaaacaccctgccttcgcttgttggatctatttttgaccgcgatatattcaatcggattaacgctatactggataaagtgagaagcggacgataa

SEQ ID NO: 14778 - protein, 291 aa, Unknown
  Obtained from environmental sample
  DOMAIN (1)...(271): Bacterial extracellular solute-binding protein, family 7
  misc_feature (1)..(291): Xaa is any amino acid
MIAXMAADWEKATNNQVRVIVSHDGREGTEAKMLSSLSSDAIQVGVFTSAGVSDICPAVMNLSIPFMIKNETEFELVLKDVLPIINNRVKKDFVILAWSKGGWVYVFSKEKVLTPDDLRKQKLATSSDLKDMNTVFRTMGFQLVEADFVNVGTKLASNAINAVYIIPASVAPLQLYKSLNHMLDVPIAPILGAIVMNRVTWNKISPANQQEILKATGKIASEFDASVVKTEAGAIAAMGKDGLSVNKPNQAQQDMWSNELKNTLPSLVGSIFDRDIFNRINAILDKVRSGR

SEQ ID NO: 14779 - DNA, 549 bp, Unknown
  Obtained from environmental sample
  misc_feature (1)..(549): n is a, c, g, or t
atgaatttaccgatagattatacgattattcattattttattggagcgttaatacccggatttattcttgtgttagttacgattatcgccggtttaattctttcttcaaaagtaaaaattcaaactgaaaaatttaacggcaagaacgcgttgcgttcgttaaaagagtctttttttgaaattttattaccgataattctggttttaggttattttaccggattccttactttgatagaggtaagcgcggtatcggttgtatatgtgataattgtagaagtttttattaagaaagatattttatttaaggatataccgaaagtttttcttaaagccgttcccataatcggagggattctggcgattttggcgatggcaaaggccttatcctacgcgtttatcgactccggcgttcctgaaagtttttcattctggatgcagagcacgattaaatcaaaatatgtttttctgttgctgttgaatttcgctttgcttgtgcttggctgtataatggatatattttcagcgatactgttttccttccgttaa

SEQ ID NO: 14780 - protein, 182 aa, Unknown
  Obtained from environmental sample
  misc_feature (1)..(182): Xaa is any amino acid
MNLPIDYTIIHYFIGALIPGFILVLVTIIAGLILSSKVKIQTEKFNGKNALRSLKESFFEILLPIILVLGYFTGFLTLIEVSAVSVVYVIIVEVFIKKDILFKDIPKVFLKAVPIIGGILAILAMAKALSYAFIDSGVPESFSFWMQSTIKSKYVFLLLLNFALLVLGCIMDIFSAILFSFR

SEQ ID NO: 14781 - DNA, 852 bp, Unknown
  Obtained from environmental sample
  misc_feature (1)..(852): n is a, c, g, or t
atggctttgaatgtccgcggccttgtaaatattcaatatgtatattatgagaatgacatttatgtaatcgaggtaaacccgcgcgcgtcgcggacggttccgtatatcagcaaggttaccggcgttcagatgtgcgagattgcgacaaaggtcagcgttgggcagacgcttgtctctcttggttatacgtcggggatagcgaagattcccccttatgtcgcggtcaaggttcccgtcttttcctttgaaaagcttgccggtcttgatactcaccttggccccgagatgaaatccaccggcgaagttttggggattggcaagaatcttgaagaagcgcttttcaaaggacttgtcgccgcgggatacaaaattttaaggggcggcggagtgttgattacagtacgcgacggcgacaagggcgagattgccggcgttgccgaaaaatttgtcaaatgcggttattctctgcacgcgacaaggggaaccgcccgttttctcgccggcaaaggttttactgttcacgcgatagacaaaatctgcgataatgacatggttaacaccgaaacgcttttggcaagcggaaagatcagctacattatttcaacttcggagaaaggcagggacccggcgtttgacgatgtaaaactccgcagaaaggcctgttcactcggcgttccgtgcctgacatcaattgatactgcaaacgcgcttgccgactcgctgctttccgattacagcgagataaacacggagcttgtcgatataaacggtttaagaaacgtccgcgtacagcttcccgtttacaagatgcacggctgcagcaacgattatatctacataaactgtttttga

SEQ ID NO: 14782 - protein, 283 aa, Unknown
  Obtained from environmental sample
  DOMAIN (141)...(229): MGS-like domain
  misc_feature (1)..(283): Xaa is any amino acid
MALNVRGLVNIQYVYYENDIYVIEVNPRASRTVPYISKVTGVQMCEIATKVSVGQTLVSLGYTSGIAKIPPYVAVKVPVFSFEKLAGLDTHLGPEMKSTGEVLGIGKNLEEALFKGLVAAGYKILRGGGVLITVRDGDKGEIAGVAEKFVKCGYSLHATRGTARFLAGKGFTVHAIDKICDNDMVNTETLLASGKISYIISTSEKGRDPAFDDVKLRRKACSLGVPCLTSIDTANALADSLLSDYSEINTELVDINGLRNVRVQLPVYKMHGCSNDYIYINCF

SEQ ID NO: 14783 - DNA, 909 bp, Unknown
  Obtained from environmental sample
  misc_feature (1)..(909): n is a, c, g, or t
ttgttttntnnnggatatcgcggacttcacgggaaatttcgggtttccgctgacaacgtttcggtctgcacggtcttctacaacaaagagatcttccagaggctgaaccttcaggtacccactaccatggcgcaatttgaaacggtattggagacccttaaaaggaacaacataacccccttctcgctggctaacaaaacccagtggacaggctccatgtactttatgttcctggctacccgccgtggcggtaccgcgccctttattaagggagttgacggcacaggcagtttcctggatccggcctttatttatgccggcgagaaaatccaggactgggtgaacaagggatacttcctgcccggctttaacggccttgattgggattccggccaggcccgcgccccgatgtacagaggcgaaacggcgatgctgatcatgggaagctggtttgtatcccaggcacagagtgaaagccccgaattcttctccaaaatgggcgtctttaaattcccccgcgacgagcagggcgtaggcgatcccaatacggtagtcggaacggtaggggataacttctatcacataagcacaaacaataagaacccggccaaggcctttgagcttcttacctactgcattgacgaccaggcggtacaggatatgctcaaagacggcaagattcctccggtcaagggcgtaaggctcgataacccgcttttggcggaactctttacccaggttacttctgctccggatatacagctctggtatgaccagtccctgtccccggatgtagccgaagttcacaaggtaacaagccaggagctcttcggccttacaatgaccccaagagacgcggcgcagaagctccaggacgcgcaggcggcctatctcagaagcaagagataa

SEQ ID NO: 14784 - protein, 302 aa, Unknown
  Obtained from environmental sample
  misc_feature (1)..(302): Xaa is any amino acid
MFXXGYRGLHGKFRVSADNVSVCTVFYNKEIFQRLNLQVPTTMAQFETVLETLKRNNITPFSLANKTQWTGSMYFMFLATRRGGTAPFIKGVDGTGSFLDPAFIYAGEKIQDWVNKGYFLPGFNGLDWDSGQARAPMYRGETAMLIMGSWFVSQAQSESPEFFSKMGVFKFPRDEQGVGDPNTVVGTVGDNFYHISTNNKNPAKAFELLTYCIDDQAVQDMLKDGKIPPVKGVRLDNPLLAELFTQVTSAPDIQLWYDQSLSPDVAEVHKVTSQELFGLTMTPRDAAQKLQDAQAAYLRSKR

SEQ ID NO: 14785 - DNA, 900 bp, Unknown
  Obtained from environmental sample
  misc_feature (1)..(900): n is a, c, g, or t
ttgcgggggcagatttacccgattacccccggtcgccccgagattctcggcaagaagtgctacaagacgctgaccgagttgccgggcgaggtcgacctcgtcgtcgtggtggtcgggcgcgacctcgtgatcncggtgctcaaggagatggggcagaaggggagcaaggcggccgtcgtcatcaccgccgggttcggcgagacgggcgaggagggcaagaagctgcagctggagatgatcgaggtcgtgaagcagtacgggatcacgatggtggggcccaactgtcttggggtgctcaacccctcgcacaagctcaacgcctccttcggcggggcggcgggggagccgggcgggatcgcgcttatctcccagtccggggctctgctcaccgcggtgcaggacatcgctgctcgggagcagctcgggtggtcggtgctcgcctccataggcaacaaggcctcgctcgacgaggtggagtgcctgcaggggctcaaaaacgataagaacacaaaggttatcaccgcctaccttgagaacatcacgcgcgggcgcgacttcatccgcgaggcggaggagacgagcaaggagaagccgatcgtcattctgaaggcggggcggacgagcgccggcgccgcggcggcgtcatcccacacgggcagcctcgccggagccgactccacctacgccgccgccttcgacagggtgggcgtgatccgcgccgagtccatagagcatctcttcgacgtggccatggccttctcctacatgcccctgcccaaaggcgacagggtcgcggttgtgaccaacgcgggcggccccggcatcatgatgtccgacgcgattgagatggccggcttgaagatcgcccatttgacgacgccactactaagaagttactga

SEQ ID NO: 14786 - protein, 299 aa, Unknown
  Obtained from environmental sample
  misc_feature (1)..(299): Xaa is any amino acid
MRGQIYPITPGRPEILGKKCYKTLTELPGEVDLVVVVVGRDLVIXVLKEMGQKGSKAAVVITAGFGETGEEGKKLQLEMIEVVKQYGITMVGPNCLGVLNPSHKLNASFGGAAGEPGGIALISQSGALLTAVQDIAAREQLGWSVLASIGNKASLDEVECLQGLKNDKNTKVITAYLENITRGRDFIREAEETSKEKPIVILKAGRTSAGAAAASSHTGSLAGADSTYAAAFDRVGVIRAESIEHLFDVAMAFSYMPLPKGDRVAVVTNAGGPGIMMSDAIEMAGLKIAHLTTPLLRSY

SEQ ID NO: 14787 - DNA, 462 bp, Unknown
  Obtained from environmental sample
  misc_feature (1)..(462): n is a, c, g, or t
gtgataacctttgtgttcttatcgtttttgagcccctgcaggcactccacctcgtcgagcgaggccttgttgcctatggaggcgagcaccgaccacccgagctgctcccgagcagcgatgtcctgcaccgcggtgagcagagccccggactgggagataagcgcgatcccgcccggctcccccgccgccccgccgaaggaggcgttgagcttgtgcgaggggttgagcaccccaagacagttgggccccaccatcgtgatcccgtactgcttcacgacctcgatcatctccagctgcagcttcttgccctcctcgcccgtctcgccgaacccggcggtgatgacgacggccgccttgctccccttctgccccatctccttgagcaccgngatcacgaggtcgcgcccgaccaccacgacgacgaggtcgacctcgcccggcaactcggtcagcgtcttgtag

SEQ ID NO: 14788 - protein, 153 aa, Unknown
  Obtained from environmental sample
  SIGNAL (1)...(19)
  misc_feature (1)..(153): Xaa is any amino acid
MITFVFLSFLSPCRHSTSSSEALLPMEASTDHPSCSRAAMSCTAVSRAPDWEISAIPPGSPAAPPKEALSLCEGLSTPRQLGPTIVIPYCFTTSIISSCSFLPSSPVSPNPAVMTTAALLPFCPISLSTXITRSRPTTTTTRSTSPGNSVSVL

SEQ ID NO: 14789 - DNA, 447 bp, Unknown
  Obtained from environmental sample
  misc_feature (1)..(447): n is a, c, g, or t
gtgctacaagacgctgaccgagttgccgggcgaggtcgacctcgtcgtcgtggtggtcgggcgcgacctcgtgatcncggtgctcaaggagatggggcagaaggggagcaaggcggccgtcgtcatcaccgccgggttcggcgagacgggcgaggagggcaagaagctgcagctggagatgatcgaggtcgtgaagcagtacgggatcacgatggtggggcccaactgtcttggggtgctcaacccctcgcacaagctcaacgcctccttcggcggggcggcgggggagccgggcgggatcgcgcttatctcccagtccggggctctgctcaccgcggtgcaggacatcgctgctcgggagcagctcgggtggtcggtgctcgcctccataggcaacaaggcctcgctcgacgaggtggagtgcctgcaggggctcaaaaacgataa

SEQ ID NO: 14790 - protein, 148 aa, Unknown
  Obtained from environmental sample
  misc_feature (1)..(148): Xaa is any amino acid
MLQDADRVAGRGRPRRRGGRARPRDXGAQGDGAEGEQGGRRHHRRVRRDGRGGQEAAAGDDRGREAVRDHDGGAQLSWGAQPLAQAQRLLRRGGGGAGRDRAYLPVRGSAHRGAGHRCSGAARVVGARLHRQQGLARRGGVPAGAQKR

SEQ ID NO: 14791 - DNA, 879 bp, Unknown
  Obtained from environmental sample
  misc_feature (1)..(879): n is a, c, g, or t
gtggacatgctgaagcgtttgcaggcgcaggcgagaagccgaaagctgattttcggagtgaagatcacaaatacctttccggtgcaaatcaaaaggaacgaactgccgggaaatgagatgtacatgtcgggccgttcgctttttcccctgtcgatcaatacggcaaaaaaactgtcgcgggcgtttgacggagaaatttccatctcctactcagggggcgcggattattttaacctgaaggatattcttgaaaccggcataaggccggttaccgtggcgaccacgatcctcaaacccggcggctatgaacgtctgctccagcttgcggaaatagcggaagaaacggtaaaggatatatccatggccgcgcctgtcaatgtaaacgctcttaacgcgctcgcggaatccctgccgaaaagaaacagataccgcaaagagtaccgtcaaacaggtctgcgaaaaaccggaagtcctctgccattgttcaactgcgcaaaagcgccttgtatggacggaggctgccccattcatcagcgtatacccgaatacctcaccgccgtcgccgccggtaattatgacgaggctttcaaaatcatcgcggcggataataccgcgccttcaattaccggaactatctgcgatcaccagtgccagtacaggtgtacgcgccttgattacgaagatcctctgcaaataagaaaagcgaagctgcttgccgccgacaaggcgcaaaacgcgtttatttccttgctgcaaagccctcaaataaaaaccaataaatcggcggccgttatcggcgcgggtccggcgggaatcgcggcggcggtctttctgcggagatgcggcgtgcccgtgaccgtgtatgaaaacgcgggataa

SEQ ID NO: 14792 - protein, 292 aa, Unknown
  Obtained from environmental sample
  misc_feature (1)..(292): Xaa is any amino acid
MDMLKRLQAQARSRKLIFGVKITNTFPVQIKRNELPGNEMYMSGRSLFPLSINTAKKLSRAFDGEISISYSGGADYFNLKDILETGIRPVTVATTILKPGGYERLLQLAEIAEETVKDISMAAPVNVNALNALAESLPKRNRYRKEYRQTGLRKTGSPLPLFNCAKAPCMDGGCPIHQRIPEYLTAVAAGNYDEAFKIIAADNTAPSITGTICDHQCQYRCTRLDYEDPLQIRKAKLLAADKAQNAFISLLQSPQIKTNKSAAVIGAGPAGIAAAVFLRRCGVPVTVYENAG

SEQ ID NO: 14793 - DNA, 843 bp, Unknown
  Obtained from environmental sample
  misc_feature (1)..(843): n is a, c, g, or t
ttgatagcagaaatccgcgctcattcaataatagtctgtgttttggtatggggcttttcctttattcngattaaggaatccctgccggtttttccgcccatgtcgctgggagctgtgcgttttgttattgccattgttgcgctttttttaatgtaccggctttccccggattggcggggcacggacaaggcgcttaagcgggatctgcccctgttgataggttcggggctggcgggggtgacattttactttttctttgaaaacaacggcgtggcgcgggttaccgcatcggaggcttcgattattacggcgtccattccggtgcttacgatgatggccgactggttcatggcaaaagcgtcttttgccggcaaggtttcacttaacgatacgacgcttaataatgcgcttcggcttggctggaagtcatggctgggggcttttatttccatcggaggagtggcgttggtcgcgggggtctctttttcgctttcggggagtatttccggctatgtttacatgggcggcgccgcgttgtgctgggttggctacagtctgcttacccgcccccttttcgacagaaaacggccccggctctatatagtgttctggcagaattttttcgggtttctcgggctgcttccctttgccgtgttggagtacaaaagctggggcagtccaaatctgcctgttgtgcttcatgtggtctttctcgctttgggctgttccgcccttgggtactggctttacgcccacgctatggaagttttgggcgtttcggtaacatcggtatttatcaatttaattccggtagtgacggtaattgccgggttcatcgtttga

SEQ ID NO: 14794 - protein, 280 aa, Unknown
  Obtained from environmental sample
  DOMAIN (15)...(159): Integral membrane protein DUF6
  misc_feature (1)..(280): Xaa is any amino acid
MIAEIRAHSIIVCVLVWGFSFIXIKESLPVFPPMSLGAVRFVIAIVALFLMYRLSPDWRGTDKALKRDLPLLIGSGLAGVTFYFFFENNGVARVTASEASIITASIPVLTMMADWFMAKASFAGKVSLNDTTLNNALRLGWKSWLGAFISIGGVALVAGVSFSLSGSISGYVYMGGAALCWVGYSLLTRPLFDRKRPRLYIVFWQNFFGFLGLLPFAVLEYKSWGSPNLPVVLHVVFLALGCSALGYWLYAHAMEVLGVSVTSVFINLIPVVTVIAGFIV

SEQ ID NO: 14795 - DNA, 621 bp, Unknown
  Obtained from environmental sample
  misc_feature (1)..(621): n is a, c, g, or t
atggggatagtggcttccgctttcaggggaaaaagaacagacgcggtgattaccactacatcaatgctgatttacgcgcttccttcattctggttaggcatgattctgctgtcattatttgcggtaaaactgaagcttgttcctgtaaacggaatgataacgcccggcatgaattatgaaacatatttttcatatgtagcggatttaacacggcacattatcgtaccgatgctttcttattctcttgccattttcggaagctacttcctcataatgcgcagctccatgatcgatgttttctcggaggattttgtgctgaccgcccgcgccaagggactctcgcgaagaaaggtcattacccggcacgtggttcccaacgcccttctgccgattaccaccattgttgtgaccagcattgcgctgatgttcaccggcgctttttcgattgaaatacttttttcctggcctggcgtcggcaggctgatggtcgaagcggtaacccggcaggactaccccgtaatgcaggctatcaattaccttattgccgttgttgttgtaggggcaaactttattgtggacatactgtatagttatttggatccgcgtgtaagggttgaatag

SEQ ID NO: 14796 - protein, 206 aa, Unknown
  Obtained from environmental sample
  DOMAIN (1)...(205): Binding-protein-dependent transport system inner membrane component
  misc_feature (1)..(206): Xaa is any amino acid
MGIVASAFRGKRTDAVITTTSMLIYALPSFWLGMILLSLFAVKLKLVPVNGMITPGMNYETYFSYVADLTRHIIVPMLSYSLAIFGSYFLIMRSSMIDVFSEDFVLTARAKGLSRRKVITRHVVPNALLPITTIVVTSIALMFTGAFSIEILFSWPGVGRLMVEAVTRQDYPVMQAINYLIAVVVVGANFIVDILYSYLDPRVRVE

SEQ ID NO: 14797 - DNA, 870 bp, Unknown
  Obtained from environmental sample
  misc_feature (1)..(870): n is a, c, g, or t
gtgttcagtgcaaaggacaccgacccacatctaggaagtccccctcaacctcaacaaagaggggttagacgcaaaagtgacgtccctgcttgcctaagagacgcagaacccgacctgcgggcttggattgaccttgtgggcngaatacgcaacccaaaacgcagcgtgaaagtggccgtggtgggcaagtacgtcgggttcaaagaaagttacaaaagcttggaggaagccattaaccatgctgggtacggcctagaagtgcaggttgacgtcaagtgggtcgagtccgaaaaacttgagtcagtcctccccagtacccacctaggagattgccaaggaatactaatccccagcggtttcggggtgcggggcatgaagggcctgatattggcagcccagcacgcccgcgagaaaagagtccctttttttgggataggcctaggaatgcagatggccacagtggaattcgcccgcaacgtggcgatgctggagggggcagactcgactgagtttgaagagagtccgcgccacaagatcatctgtcagtacggggaaatagccgacgaagaagagtcgcgcggcctgatgcgactgggcagcttcccctgcacgatcaaagagggcagcctagcttcaaaagcgtaccagcgcggcatcattggcgagcgccaccgccaccgctacgaatttaacgtgccggggtacttggacatccttgaaaaggcggggatggccttcaccgggctgagtcctgacaataactttgtcgagatcatcgagatacctggccacccattttttattggctgccatttccaccccgagttaagtcgaagccatgagcccacacccgcgttccgctggcgataa

SEQ ID NO: 14798 - protein, 289 aa, Unknown
  Obtained from environmental sample
  DOMAIN (66)...(288): Glutamine amidotransferase class-I
  misc_feature (1)..(289): Xaa is any amino acid
MFSAKDTDPHLGSPPQPQQRGVRRKSDVPACLRDAEPDLRAWIDLVGXIRNPKRSVKVAVVGKYVGFKESYKSLEEAINHAGYGLEVQVDVKWVESEKLESVLPSTHLGDCQGILIPSGFGVRGMKGLILAAQHAREKRVPFFGIGLGMQMATVEFARNVAMLEGADSTEFEESPRHKIICQYGEIADEEESRGLMRLGSFPCTIKEGSLASKAYQRGIIGERHRHRYEFNVPGYLDILEKAGMAFTGLSPDNNFVEIIEIPGHPFFIGCHFHPELSRSHEPTPAFRWR

SEQ ID NO: 14799 - DNA, 789 bp, Unknown
  Obtained from environmental sample
  misc_feature (1)..(789): n is a, c, g, or t
atggatgcaggcatccagctcaaggcccccgtggccggcgtggctatgggactcgtctctgagggcgacaagtacgtaatactcaccgacatagccggccaagaagaccactatggcgacatggacttcaaggttgcaggcacccgcaagggcatcacagccctccagatggacatcaagattggcggcgtcgatgccgagctgctgaccaaggcccttgcccaagctaaaaaaggtaggctggagcttctcgacgcgatggaagaaatactgcctgcgccgcgtccagaggtcaacgaacacgcacccaaggtggtcacgctgcacatacccaaggacaagatacgcgacataattggcaaaggcggtgccaccatcaggggaatcatcgaagcctcgggctgcacggtgaacgtagaggacgacggtacctgccaagtcgccggctcgaacaaagacaaattggacaaagctctaaagatgataggcgacctcttgcagaccgcggaagtaggcgagacctatttaggcaaggtggcaaaagtgaccgactttggtgcctttgtcactatattgccaggcgtggacggcttgttgcacgtttccgaaatggctccgtacagagtgaagagtccggctgacgaggtcagcgagggtcaagaaatattagtcaagtgcataggcatggaaggccaatggcaagatacgcctgaaccgcaaggcccttctagctcccggcgaaagcggcgaggccccaccatcccaggccaacccacccaaaaacattag

SEQ ID NO: 14800 - protein, 262 aa, Unknown
  Obtained from environmental sample
  DOMAIN (168)...(247): S1 RNA binding domain
  misc_feature (1)..(262): Xaa is any amino acid
MDAGIQLKAPVAGVAMGLVSEGDKYVILTDIAGQEDHYGDMDFKVAGTRKGITALQMDIKIGGVDAELLTKALAQAKKGRLELLDAMEEILPAPRPEVNEHAPKVVTLHIPKDKIRDIIGKGGATIRGIIEASGCTVNVEDDGTCQVAGSNKDKLDKALKMIGDLLQTAEVGETYLGKVAKVTDFGAFVTILPGVDGLLHVSEMAPYRVKSPADEVSEGQEILVKCIGMEGQWQDTPEPQGPSSSRRKRRGPTIPGQPTQKH

SEQ ID NO: 14801 - DNA, 909 bp, Unknown
  Obtained from environmental sample
  misc_feature (1)..(909): n is a, c, g, or t
atgacagattggacgagccaagcctggcggaccaagcgagatagaaaaaacctggtggacgcgcagagggccaggcgcgttctggacaggctggtcggctacaaggtcagccaagtgctttgggacaaagtcaggcgcggcctctccgccggccgcgtccagagcgtggcggtgcgcctcatcgccgacagggaaaaagaaatcaccgcgttcaagcccgtcgagtactggacgcttaagggccagttcggtgccaatgagccgccgaccttttggatgaggctggtgaaactgggcggctccgcgctccaagtgggcaacaaagagacccgcaggagaatagaggacgagcgccaagccaaatacctgaaagagcacctggagaaggcgcactggaaagtcacatcgctggaggtgaaagacaagcgccgcaacccagcggcgccattcaccacggcgcgcctgcagcaggaggccgccacgaagctcaggttcgccgtgagcaggacgatgcagacggcgcagcgcctgtacgagggcatagactttggccagggccccatcggcctgatcacgtacatgaggacagactcgcctcggctggcgcctgaggcggtgacatccatccgcgaatacatcaaaaagcattacggggctgaccacctgccagacaagccccgcgcatacaaaggcaaggctggggcgcaggacgcccacgaggccattcggccgacggacatttccctgacgcccgagagcctccgcggtcggcttgacggcgaccaattccgcctctactcgctgatttggcgcaacgcggtggcctgcccaatgaaggcgggcaggttcgacgaaaccgtcgtcggggcgggtcgcacactgccaagcgcggaggaagcccttttttga

SEQ ID NO: 14802 - protein, 302 aa, Unknown
  Obtained from environmental sample
  DOMAIN (14)...(302): DNA topoisomerase
  misc_feature (1)..(302): Xaa is any amino acid
MTDWTSQAWRTKRDRKNLVDAQRARRVLDRLVGYKVSQVLWDKVRRGLSAGRVQSVAVRLIADREKEITAFKPVEYWTLKGQFGANEPPTFWMRLVKLGGSALQVGNKETRRRIEDERQAKYLKEHLEKAHWKVTSLEVKDKRRNPAAPFTTARLQQEAATKLRFAVSRTMQTAQRLYEGIDFGQGPIGLITYMRTDSPRLAPEAVTSIREYIKKHYGADHLPDKPRAYKGKAGAQDAHEAIRPTDISLTPESLRGRLDGDQFRLYSLIWRNAVACPMKAGRFDETVVGAGRTLPSAEEALF

SEQ ID NO: 14803 - DNA, 900 bp, Unknown
  Obtained from environmental sample
  misc_feature (1)..(900): n is a, c, g, or t
ttgacagttacccgcgtttacgtgtaccagctttcagaagaactgggtaaaaaagtacagcttaccattgaggggaaagaaaacgaattcgacaaaaacattatcgaagctctctcggaagtgtttatgcacatggtgcgtaacgcgatagatcacggaatagaaatgcctcaggatcgccttgccgctggaaaagacgaggccggaaaaatttcgattgtctgctccagggaaagcggcaacatgaaaatcatcatttccgatgacgggcgcggcattgaccttgaaaagatcaggcagaaggcggtacaggaaggatttgtaaccgaagctaccgcgccgtcgctttccaaagaggaactgaccagtttaattttccagagcggcttttccacatcgggtaagataagcagcgtttccggcaggggcgtgggaatggacgtggttcgcgacagtgttgaagccctgaaaggcagcatcatcgtggacagcgtcctgggaaaaggcacagcctttaccattacggttcccctctcaatcgccgcgctgatgggattccccatagtctgcggcgggatgaagttcatcatccccgcgaatttcgtggacaccatattgctgttaagccacgatgagattatcaccgtggttgaccgcccggaaataaaatacaacaaccgcatgataaagctctatgacctcagtcaggtattgcggataaaagccggatcctcccagactgcagccgttgtctttgtggtcattatccgttcctacgacgatattgcggccctggctgttgataacatctccaccatgagatcggtcattcttaaaacaatgccggcctttatgaagaatatgacggtgttttcgggaatcgttctaacgaagatataa

SEQ ID NO: 14804 - protein, 299 aa, Unknown
  Obtained from environmental sample
  DOMAIN (33)...(179): Histidine kinase-, DNA gyrase B-, and HSP90-like ATPase
  misc_feature (1)..(299): Xaa is any amino acid
MTVTRVYVYQLSEELGKKVQLTIEGKENEFDKNIIEALSEVFMHMVRNAIDHGIEMPQDRLAAGKDEAGKISIVCSRESGNMKIIISDDGRGIDLEKIRQKAVQEGFVTEATAPSLSKEELTSLIFQSGFSTSGKISSVSGRGVGMDVVRDSVEALKGSIIVDSVLGKGTAFTITVPLSIAALMGFPIVCGGMKFIIPANFVDTILLLSHDEIITVVDRPEIKYNNRMIKLYDLSQVLRIKAGSSQTAAVVFVVIIRSYDDIAALAVDNISTMRSVILKTMPAFMKNMTVFSGIVLTKI

SEQ ID NO: 14805 - DNA, 513 bp, Unknown
  Obtained from environmental sample
  misc_feature (1)..(513): n is a, c, g, or t
atgcggttgttgtattttatttccgggcggtcaaccacggtgataatctcatcgtggcttaacagcaatatggtgtccacgaaattcgcggggatgatgaacttcatcccgccgcagactatggggaatcccatcagcgcggcgattgagaggggaaccgtaatggtaaaggctgtgccttttcccaggacgctgtccacgatgatgctgcctttcagggcttcaacactgtcgcgaaccacgtccattcccacgcccctgccggaaacgctgcttatcttacccgatgtggaaaagccgctctggaaaattaaactggtcagttcctctttggaaagcgacggcgcggtagcttcggttacaaatccttcctgtaccgccttctgcctgatcttttcaaggtcaatgccgcgcccgtcatcggaaatgatgattttcatgttgccgctttccctggagcagacaatcgaaatttttccggcctcgtcttttccagcggcaaggcgatcctga

SEQ ID NO: 14806 - protein, 170 aa, Unknown
  Obtained from environmental sample
  misc_feature (1)..(170): Xaa is any amino acid
MRLLYFISGRSTTVIISSWLNSNMVSTKFAGMMNFIPPQTMGNPISAAIERGTVMVKAVPFPRTLSTMMLPFRASTLSRTTSIPTPLPETLLILPDVEKPLWKIKLVSSSLESDGAVASVTNPSCTAFCLIFSRSMPRPSSEMMIFMLPLSLEQTIEIFPASSFPAARRS

SEQ ID NO: 14807 - DNA, 870 bp, Unknown
  Obtained from environmental sample
  misc_feature (1)..(870): n is a, c, g, or t
atgctcatactggtaggctctttcaggtacagtttttcatgcgcgattttttccggcatatacgcgggtatctgttattcaatagttattattataaacagaaacgtgatagacttgccctactcttttctgcttgaaggtaaaacgataccggtgcgtttccctctgtacaacgaaaccttccgtgttatgggcatgatagtagcgggcgcgattgccagcatggcaagcaagagccatgttacgcttatgggcaagatgattgaatccgaggcagccgcggccatggccgcctcaaaaaccgtagaacagacacgcagcatggcaaaaacaatccaaaaatcaaccgatgaaatattcctttcgtcaaaaaacattttttccatcgcgaacaaccaggccgcgagcgttcaggaaatcgaaagcacaataaacgaaaacacgcagattgccgttgaaatcgccgacaagacctcaagcgtcgccaccatcgcctctaaaatggaaaatgacgtaatccacggtttttccgtccttgagcgtaacgttgatcaaatggaaaacatcaagaaaaaaaacgacggcgtcatctccggcatcatcgcgctgggaaacaagattacaaaaatccgcgaaattgtgaaatcgataaataccattaccgatcagaccaaagttatcgcttttaacgcggccctggaggcggcaagcgccggggaccggggaaagcgcttctcggtagtggcaagcgaggtaaaccgccttgccaatgacattgcggcgctgaccaaacaaattcgcgaacaggttgaggaaattcagaaatcatcctcatcgctgattatttccagcgaggagagcgccgactag

SEQ ID NO: 14808 - protein, 289 aa, Unknown
  Obtained from environmental sample
  DOMAIN (131)...(288): Methyl-accepting chemotaxis protein (MCP) signaling domain
  misc_feature (1)..(289): Xaa is any amino acid
MLILVGSFRYSFSCAIFSGIYAGICYSIVIIINRNVIDLPYSFLLEGKTIPVRFPLYNETFRVMGMIVAGAIASMASKSHVTLMGKMIESEAAAAMAASKTVEQTRSMAKTIQKSTDEIFLSSKNIFSIANNQAASVQEIESTINENTQIAVEIADKTSSVATIASKMENDVIHGFSVLERNVDQMENIKKKNDGVISGIIALGNKITKIREIVKSINTITDQTKVIAFNAALEAASAGDRGKRFSVVASEVNRLANDIAALTKQIREQVEEIQKSSSSLIISSEESAD

SEQ ID NO: 14809 - DNA, 681 bp, Unknown
  Obtained from environmental sample
  misc_feature (1)..(681): n is a, c, g, or t
ttgatgggcaaggtaaaatcagcggaaaaacggcagtatatcgggaaagatattcaggatgtaatagatctgccggatcttatcgatattcagttgaattcttacgagcgttttttacagagagaaaaagtcaaaaagggcgagaaactcgcagtacaaggtcttcaggaagtttttgaaaccacattccccataaaaagtcccaatgaagatatgcggctggaattcgaatattacacttttgacgaagacaatataaaagtgacggagcttgaatgcaagcaaaaaggacttacctatgctgttccgctgaaagcgcgcgttaatttagcttttcagcagaccggagaaatcaggcagaaagatatttacatgggcgatattcctattatgaccgaacggggtacgtttatcataaatggagcggagagggtagtagtttcacagatacaccgctcgccgggcgttattttttgtcatgaaaagggaatatactcatcgcggattattccctatcgcggaagctggcttgaatttgaaatcgatcaaaagcgggaattaatctacgcaaagattgacaggaaaaagcgtattttgggaacgatctttctgcgtacattggggtttacttcaagagaagatattatcagcgctttttatgttacccatacattaaaataa

SEQ ID NO: 14810 - protein, 226 aa, Unknown
  Obtained from environmental sample
  DOMAIN (26)...(223): RNA polymerase beta subunit
  misc_feature (1)..(226): Xaa is any amino acid
MMGKVKSAEKRQYIGKDIQDVIDLPDLIDIQLNSYERFLQREKVKKGEKLAVQGLQEVFETTFPIKSPNEDMRLEFEYYTFDEDNIKVTELECKQKGLTYAVPLKARVNLAFQQTGEIRQKDIYMGDIPIMTERGTFIINGAERVVVSQIHRSPGVIFCHEKGIYSSRIIPYRGSWLEFEIDQKRELIYAKIDRKKRILGTIFLRTLGFTSREDIISAFYVTHTLK

SEQ ID NO: 14811 - DNA, 735 bp, Unknown
  Obtained from environmental sample
  misc_feature (1)..(735): n is a, c, g, or t
atgtcgaaacagcacgggttaatgtttatactcgacctgcacgagtgcccggggcacgactttgccgacgcggcgagttcgccggttcaaaaattattctccggcgacgatactttcgtcaaaaaagcggagaagatatgggcgtgcctgtcggagcgttacggcgcggacagtcacgtattgtttgagtcgcttaacgagcctgtcgcgcctacggcggcgatttggaacaaggtgaaagacaggatatgccgcgagatacggcgtcacgcgcctaagtctacgataattaccggctccaatatgtggaattggccggcaacgtttggcgaactcacgccgtttgacgatgataacgtcgtctactccgtgcacttttacgagccgttgctcttcacgcaccaattcgcgccgtggctctcacaaccggagattaaggttaagagaacgtacccgtccgactacggccccggcttcgtgctgcaatatgaacgtgtgttttccaaaggcatgtggaacaaggaacggattgtggaggagttcacgcctgtcaacgcgttcagaacgaaatacggcgtgccggtgatctgcaacgagttcggcgtatacgcgcccgtggaacttgaggcgcagttgcgttggtacaacgatttgctctccgtcctcagggatatggggataggtttttcgtattggaattacaagaaacctcgatttcgggataatctcccgtag

SEQ ID NO: 14812 - protein, 244 aa, Unknown
  Obtained from environmental sample
  DOMAIN (1)...(242): Cellulase (glycosyl hydrolase family 5)
  misc_feature (1)..(244): Xaa is any amino acid
MSKQHGLMFILDLHECPGHDFADAASSPVQKLFSGDDTFVKKAEKIWACLSERYGADSHVLFESLNEPVAPTAAIWNKVKDRICREIRRHAPKSTIITGSNMWNWPATFGELTPFDDDNVVYSVHFYEPLLFTHQFAPWLSQPEIKVKRTYPSDYGPGFVLQYERVFSKGMWNKERIVEEFTPVNAFRTKYGVPVICNEFGVYAPVELEAQLRWYNDLLSVLRDMGIGFSYWNYKKPRFRDNLP

SEQ ID NO: 14813 - DNA, 717 bp, Unknown
  Obtained from environmental sample
  misc_feature (1)..(717): n is a, c, g, or t
gtgagagctgatcccgctatggccgccgatgataccgataaattgaaagtctgccacttcgtaacatattacctgccggttacgcagaattggatttacagccaattggcgcataatgaagagtgccgcgccgcagtgctgtgtcaacggttggtgaatcccaagcaattcccgttcgacgccgtgtatcccatctgtaaatcgagcggtttgccgtctgtgccggataggttgatccataaaattttgggacgctacccgctggagccgcatttatcgacagtaacgcggataaagccggatattctgcacggccatttcttgcttgaatcatggcggaattaccatttggtcaaacgcttggatattcctttggtgacgacttgttacggtcaagacgtgacgagtttattgagaaagccgttttgggcggcgcggagcagaaaagtttttgagcatggggcggcgtttatggttgagggcgaatatatggggaatatgcttgcggctaaagggtgtccgaaagataagatacgtgttatcaaattgggtgttgacgcggataaaattcgcggtatcgacgttgataatcggcacggtaatatcagcggtgatgataaaaaagtccgcatattattcaccggactgaaccgcgaaaaaaagggggcggtatacgccgccaaggcgttgtcaaagcgcgtcctcggccgattctga

SEQ ID NO: 14814 - protein, 238 aa, Unknown
  Obtained from environmental sample
  misc_feature (1)..(238): Xaa is any amino acid
MRADPAMAADDTDKLKVCHFVTYYLPVTQNWIYSQLAHNEECRAAVLCQRLVNPKQFPFDAVYPICKSSGLPSVPDRLIHKILGRYPLEPHLSTVTRIKPDILHGHFLLESWRNYHLVKRLDIPLVTTCYGQDVTSLLRKPFWAARSRKVFEHGAAFMVEGEYMGNMLAAKGCPKDKIRVIKLGVDADKIRGIDVDNRHGNISGDDKKVRILFTGLNREKKGAVYAAKALSKRVLGRF

SEQ ID NO: 14815 - DNA, 384 bp, Unknown
  Obtained from environmental sample
  misc_feature (1)..(384): n is a, c, g, or t
ttgcaggtgccgacgataagtcaattaatacggaaagggcgggcgcagctggagaatcgcagtaaatctccggctctgcatagttgtccgcagaggcgcggggtgtgtacccgtgtgttcacgaccactcccaagaagcccaactccgcgcttcgcaaggttgcccgtgtgcgcctgaccaaccacatggaggtcaacgcgtatattccgggcgaggggcacaaccttcaggagcactcgatagtcctcataagggggggccgcgttaaggatgtccccggtgtgcgctaccacattatccgcggcgcgcttgatacgcagggcgtccaaaaccgtaaacgtagccgttcaaagtacggcgtaaaacggcctaaggccaaatag

SEQ ID NO: 14816 - protein, 127 aa, Unknown
  Obtained from environmental sample
  DOMAIN (4)...(125): Ribosomal protein S12
  misc_feature (1)..(127): Xaa is any amino acid
MQVPTISQLIRKGRAQLENRSKSPALHSCPQRRGVCTRVFTTTPKKPNSALRKVARVRLTNHMEVNAYIPGEGHNLQEHSIVLIRGGRVKDVPGVRYHIIRGALDTQGVQNRKRSRSKYGVKRPKAK

SEQ ID NO: 14817 - DNA, 306 bp, Unknown
  Obtained from environmental sample
  misc_feature (1)..(306): n is a, c, g, or t
ttggacgccctgcgtatcaagcgcgccgcggataatgtggtagcgcacaccggggacatccttaacgcggcccccccttatgaggactatcgagtgctcctgaaggttgtgcccctcgcccggaatatacgcgttgacctccatgtggttggtcaggcgcacacgggcaaccttgcgaagcgcggagttgggcttcttgggagtggtcgtgaacacacgggtacacaccccgcgcctctgcggacaactatgcagagccggagatttactgcgattctccagctgcgcccgccctttccgtattaa

SEQ ID NO: 14818 - protein, 101 aa, Unknown
  Obtained from environmental sample
  misc_feature (1)..(101): Xaa is any amino acid
MDALRIKRAADNVVAHTGDILNAAPPYEDYRVLLKVVPLARNIRVDLHVVGQAHTGNLAKRGVGLLGSGREHTGTHPAPLRTTMQSRRFTAILQLRPPFPY

SEQ ID NO: 14819 - DNA, 471 bp, Unknown
  Obtained from environmental sample
  misc_feature (1)..(471): n is a, c, g, or t
atgtcgagaagaagaaacgcggaaaagcgcgaagttacggcggatcccaagttcaacagtacgctggtgacgcagttcataaacagtgttacgcgcagcggaaagaagcgcttggcggagaatatcttttacagcgcggttgatatggccgggcagcgcgccgggcaggacggtctgacggtctttaagaaggctgtggacaacgtgaaaccggtgcttgaggtcaagtcccgccgtatcggcggcgccaactaccaggtgcccattgaggtgtcgccggagaggcgtacctcgctagccatccgttggctgataaactacgctcgggagcgctcggagaagaatatggccgagaagttggccaacgagttcgttcaggcgtttaagaacgagggcggggccatacgcaagaagatagacacccacaagatggcggaagcgaacaaggcgtttgcgcacttccgctactga

SEQ ID NO: 14820 - protein, 156 aa, Unknown
  Obtained from environmental sample
  DOMAIN (1)...(149): Ribosomal protein S7p/S5e
  misc_feature (1)..(156): Xaa is any amino acid
MSRRRNAEKREVTADPKFNSTLVTQFINSVTRSGKKRLAENIFYSAVDMAGQRAGQDGLTVFKKAVDNVKPVLEVKSRRIGGANYQVPIEVSPERRTSLAIRWLINYARERSEKNMAEKLANEFVQAFKNEGGAIRKKIDTHKMAEANKAFAHFRY

SEQ ID NO: 14821 - DNA, 456 bp, Unknown
  Obtained from environmental sample
  misc_feature (1)..(456): n is a, c, g, or t
ttggaaagcatatatatgtttttgcccctgcctaaattcagtgtttcaccaatcaaggaattttcgggaatgtcaaagtattattgcatagacaacggctttaattacgctttgcaaggcgcggtttctgaaaataagggggtatttttagaaaatgcggtttatttgcatttgcggagaaagcatccctttggcaaagatttgttttatttcaaagaaaaatacgaatgtgattttttgtgtttggaaaagcaaagcgtaagcgaattaatacaagtttgctggagtttggaaaatccagaaacagagaaaagagagataaacggcttgatagaggcagcaaaagctactggttgcaggaatttgaaaaatataactgctgcttcgggagagcatattaaaattggtgagtttgaggttttagttcagcctgctgggaagtttatggtggggtga

SEQ ID NO: 14822 - protein, 151 aa, Unknown
  Obtained from environmental sample
  misc_feature (1)..(151): Xaa is any amino acid
MESIYMFLPLPKFSVSPIKEFSGMSKYYCIDNGFNYALQGAVSENKGVFLENAVYLHLRRKHPFGKDLFYFKEKYECDFLCLEKQSVSELIQVCWSLENPETEKREINGLIEAAKATGCRNLKNITAASGEHIKIGEFEVLVQPAGKFMVG

SEQ ID NO: 14823 - DNA, 555 bp, Unknown
  Obtained from environmental sample
  misc_feature (1)..(555): n is a, c, g, or t
atgattctggatgagaaagtacattttgacgctttgaccggtatttataaccggcgtnttctggatgacaacattaaacggattataaataccatgtcccgcacccacggatcgttaagcgtcatgatgctggacatcgattattttaaaaaatacaacgatacctacggccacagcatgggggatgaatgtcttaaggctgtcgcggaagcgctttccgagaccggaagggcggatgactgcgtgatacggtacggcggcgaggaattcgtgatcttgctgccgaacaccgacgaggccggcgcgggaataacggcgcaaaggcttcttgaaagcgtaaggacccttgaaataccccatataaacagcgacatcgcggattatgtaaccatttcgattggagcgacgacaatacaggtgaagcacaaccatcaatacaagaattacattgaacgcgccgacgaggcgctgtacatatcaaaagataccgggcgtaacaagtacacccatctgaaataccatgatgaagaaggaggcaaaggcaatgaagcttaa

SEQ ID NO: 14824 - protein, 184 aa, Unknown
  Obtained from environmental sample
  DOMAIN (3)...(167): GGDEF domain
  misc_feature (1)..(184): Xaa is any amino acid
MILDEKVHFDALTGIYNRRXLDDNIKRIINTMSRTHGSLSVMMLDIDYFKKYNDTYGHSMGDECLKAVAEALSETGRADDCVIRYGGEEFVILLPNTDEAGAGITAQRLLESVRTLEIPHINSDIADYVTISIGATTIQVKHNHQYKNYIERADEALYISKDTGRNKYTHLKYHDEEGGKGNEA

SEQ ID NO: 14825 - DNA, 324 bp, Unknown
  Obtained from environmental sample
  misc_feature (1)..(324): n is a, c, g, or t
gtggagatacaggtggggattttgaaggggcttccggggacggcgatttcgcggcacaatgaagcgtttgggatgcggtataattgcaagccgccttatgatatagaagaaacttcgtcactttccgagggggatttacggcgcgtaaaaaactttgccgctttttgggagcggcttgtgaatagggggcttttgtctttggataacgaaccagtttttgagaaattcatggctctttcagattcgctttttgcccattttggcagaaactggggtattgataaaaatgagctgcttaaaaaagcgactgaaaatttgttctag

SEQ ID NO: 14826 - protein, 107 aa, Unknown
  Obtained from environmental sample
  misc_feature (1)..(107): Xaa is any amino acid
MEIQVGILKGLPGTAISRHNEAFGMRYNCKPPYDIEETSSLSEGDLRRVKNFAAFWERLVNRGLLSLDNEPVFEKFMALSDSLFAHFGRNWGIDKNELLKKATENLF

SEQ ID NO: 14827 - DNA, 465 bp, Unknown
  Obtained from environmental sample
  misc_feature (1)..(465): n is a, c, g, or t
atgaaacatagaagaggatttaatccgcttgagcgaatggcggcgcaccgcaaagccctgcaccgcaacatggtgacaagcctgttcaggtatgagcgcgttgaaaccaccaaggcgaaagcccttgcggtccgccgcaccgcggaaaaaatgatcacgcgcgccaaggttgattccgtccataacaggcgcatcgtttccggccgtctgtacaatgaaggcattgtggcgaagctgtttaccgtcatcgcgccgaggatgaaggaccggaacggcggctacacaaggatactcaagacaggacaaaggcttggggacgccgcgcagatggtgattttggaactggtcgactataatcttgatgttgaaggcggagccaagaagaaagaagccaaggcgaanagcaaggccgacaaaaaagaagccgacnaaaaagaaaaagaagaaaaagaagagaagaaataa

SEQ ID NO: 14828 - protein, 154 aa, Unknown
  Obtained from environmental sample
  DOMAIN (20)...(116): Ribosomal protein L17
  misc_feature (1)..(154): Xaa is any amino acid
MKHRRGFNPLERMAAHRKALHRNMVTSLFRYERVETTKAKALAVRRTAEKMITRAKVDSVHNRRIVSGRLYNEGIVAKLFTVIAPRMKDRNGGYTRILKTGQRLGDAAQMVILELVDYNLDVEGGAKKKEAKAXSKADKKEADXKEKEEKEEKK

SEQ ID NO: 14829 - DNA, 465 bp, Unknown
  Obtained from environmental sample
  misc_feature (1)..(465): n is a, c, g, or t
atggcgactaaccataagcctgtaattaaaggaaccgatcacggcatttggcggcggataaagctaatcccatttacgaccacaataccggacgaaaagcaggataaaagtcttgaagaaaagctaaagctggaggcatgcgggattttgaactggctgctggaaggcacggcgcggtggaggcgcgaaaggctacaggttccagcggcgatactgaacgccacggacgaataccgtggggaaatggacgtaatcggcaattttttgaaagaacgctcggcgcagggaaaagaatactcgatacggattagggaactgtacaaggcttacgccgactggtgcgacgataacaaggaacacgccataagcgaaaggttttttaccatgcgccttaaagaaatggggtttgcgcagtcaaggaccgccgaggcgcggttttggtcgggggtggcattgcgggtttag

SEQ ID NO: 14830 - protein, 154 aa, Unknown
  Obtained from environmental sample
  misc_feature (1)..(154): Xaa is any amino acid
MATNHKPVIKGTDHGIWRRIKLIPFTTTIPDEKQDKSLEEKLKLEACGILNWLLEGTARWRRERLQVPAAILNATDEYRGEMDVIGNFLKERSAQGKEYSIRIRELYKAYADWCDDNKEHAISERFFTMRLKEMGFAQSRTAEARFWSGVALRV

SEQ ID NO: 14831 - DNA, 882 bp, Unknown
  Obtained from environmental sample
  misc_feature (1)..(882): n is a, c, g, or t
atggccaagaaggaggccaccagaaaagaagccagcaaaagcagcggcagtagtagcagcagcggcgtaggaaaaaccatcggagactggacactcgtaaatgataacacaatcgctataacccgcattggagcgatctcttatggcaacgcaaagtttgttgcaggcggacagaacgtcgtagaggctaagcccataatagcgtgttcaacagacggcgtaaaatggacagtcattgatgtcagcggcacattttataataacgtctacaaagtagtttatggaaacaatatgtttatagcgctgggcgctctcggcaaaatggcgatttcaacggacggcgaaaaatggacggaaggagcgaacaacctgtttataacagaaaattatcggtacgctgtcaacgcaattgtctatggcaaagacaagtttgtggccgttggcggaggcggcaaaatggcatattcaacagacggtttaaaatggacagatgtaacggacagcacattcgactcaaaccaaatctccgcaattacctatggtaacggcaagtttgttgcgagcggcgaaaaccgcataatagcgtattcaacggatggcataaactggacatctgtagatcttaaaaacgtattcgacgacgtcaacgattggtggaaaagcggcaatgacatctgggcaattacctttggcaaggacaagtttgtcgcagtgtgcaatagctggggcagtgacaaagataataaaatggcgtattcgtctgacgctgtaacatggacagccgtaacgaatagcgcattcgacaaagatgaatggatcaacgcaatagcctggggcaacaataagtttgtagcagtggggagaaacggtaaaatanngtga

SEQ ID NO: 14832 - protein, 293 aa, Unknown
  Obtained from environmental sample
  misc_feature (1)..(293): Xaa is any amino acid
MAKKEATRKEASKSSGSSSSSGVGKTIGDWTLVNDNTIAITRIGAISYGNAKFVAGGQNVVEAKPIIACSTDGVKWTVIDVSGTFYNNVYKVVYGNNMFIALGALGKMAISTDGEKWTEGANNLFITENYRYAVNAIVYGKDKFVAVGGGGKMAYSTDGLKWTDVTDSTFDSNQISAITYGNGKFVASGENRIIAYSTDGINWTSVDLKNVFDDVNDWWKSGNDIWAITFGKDKFVAVCNSWGSDKDNKMAYSSDAVTWTAVTNSAFDKDEWINAIAWGNNKFVAVGRNGKIX

SEQ ID NO: 14833 - DNA, 630 bp, Unknown
  Obtained from environmental sample
  misc_feature (1)..(630): n is a, c, g, or t
atgtcatttcccacggtgatgttgttttttcaagaaagacctacgggaaaccctgaaaagatcccctatgtattgcggcccgacaacctgaacccgcagccgccgggaacaggctcgcgaatttataaggtcaccggccaaaagattgcggtagccgtgctgcttgggcaaagcggtttcaacagactccattcggcaagcccctttattctgttgcccgtgcttcttgagcgtctgtgccaggaaacgccctatgtcattattgattttcacgcacaggcgactgccgaaaagaaaacccttttcttcaccgcggacggcgcttgttccgcagtcatcggctctcatacccgggtgcagacatccgacgaggtggtactcccccaggggacggccgtgatcagcgacgccggacgcaccggctcaagcgaatcaatcggcggctgtgacgccagttcccgcatacaggaataccttagcggcatccccgaatggacaaaagactcgtgggacaaaccggaactgcagggcgtgtatatcgacatagcccccgacggcaaggcgagatccattgaaagggtgaaaatacaagtgaacaatgaacagataacagtgaacagtgaacagtga

SEQ ID NO: 14834 - protein, 209 aa, Unknown
  Obtained from environmental sample
  misc_feature (1)..(209): Xaa is any amino acid
MSFPTVMLFFQERPTGNPEKIPYVLRPDNLNPQPPGTGSRIYKVTGQKIAVAVLLGQSGFNRLHSASPFILLPVLLERLCQETPYVIIDFHAQATAEKKTLFFTADGACSAVIGSHTRVQTSDEVVLPQGTAVISDAGRTGSSESIGGCDASSRIQEYLSGIPEWTKDSWDKPELQGVYIDIAPDGKARSIERVKIQVNNEQITVNSEQ

SEQ ID NO: 14835 - DNA, 672 bp, Unknown
  Obtained from environmental sample
  misc_feature (1)..(672): n is a, c, g, or t
atggataaagaatttgaaggcgcgataagcgcaggcgacgacgctgccgcggatgtccaggaaaccgcggaaaccctggtttccgatgtggaagccgcccctgccagacgatcctacggccacggcggcggcagagaaggcggaaggggcaaaggccgcgggcgcgatcgtgacagggacagggaaccggttgaaaaggaatttgtagaaaagctggtaaagctgaaccgcaccgcaaaagttgtcaagggcgggcgccgtttttcgttctccgcccttacggtcatcggtgaccgcaaaggcaatgtcggttacggttttggcaaggccaatgacgtatccgaagccatacgaaagagcattgacaaggcaaagcgcaacatggtgaaactgccggttgtaaaaggcacgattccccacgaggtaaccgggttcttcaaggcttcgcaggtgctgcttaagcccgcgcgctcggggacggggatcatcgcgggagggccggtacgcgccataatggaagcgggaggcgtcaccgatatactttcaaagtcaatcggcgcggcgagccagtacaacgtggtcaaggcgaccttcgactgcatcagcaggatgatggacgcgaagaccgtaacgaaaaacaggggcaagtccctggacgagatgtggggttga

SEQ ID NO: 14836 - protein, 223 aa, Unknown
  Obtained from environmental sample
  DOMAIN (142)...(215): Ribosomal protein S5, C-terminal domain
  misc_feature (1)..(223): Xaa is any amino acid
MDKEFEGAISAGDDAAADVQETAETLVSDVEAAPARRSYGHGGGREGGRGKGRGRDRDRDREPVEKEFVEKLVKLNRTAKVVKGGRRFSFSALTVIGDRKGNVGYGFGKANDVSEAIRKSIDKAKRNMVKLPVVKGTIPHEVTGFFKASQVLLKPARSGTGIIAGGPVRAIMEAGGVTDILSKSIGAASQYNVVKATFDCISRMMDAKTVTKNRGKSLDEMWG

SEQ ID NO: 14837 - DNA, 921 bp, Unknown
  Obtained from environmental sample
  misc_feature (1)..(921): n is a, c, g, or t
ttgccctatggtttggacaaaggcgacgcccaacaaaaaatccttgtatacgaccttgagggcggtacattcgacgttnccattttggaacttggagacggagtattcgaagtccttgccaccaacggcgacacaagattgggcggtgacgactttgacgaacgcataatgaaacttgtaatcgacgatttcaaatccaaaaacggcatcgacttgtcaaaagacaaaatggccctccaacgtatcaaacttgcctcggaaaaggccaaaaaagaactntccggcatgacaaaaacaaccatatccgaagcctatatcaccgcagacgcctcgggcccaaaacaccttgaatttgagttgacccgcgcaaaattcgacagcattacatcagacctcgtcgaaaagacaatcaaacttgtcgacctttgcatgaaggacgccaaattgaaattcaccgacattcaaaaggtcatccttgtcggcggctcaacgcgtatccctgcggtagtcgaaacacttgaaaagaaaaccggccacaaaccattcaaaggcatcaatcccgacgaatgcgtagccgtaggcgccgcaatccaaggcggtgttttgggcggagatgtaaaagatgtattgctccttgacgtaacaccattgtccttgggtattgaaactttgggcggaatctgcacaaaacttattgaacgaaacaccacaatcccaacgaaaaagtcccaagtcttctcaaccgcaagcgacaatcaaccaagcgtcgacatccacgtattgcaaggcgaacgcgaatttgccgccgacaacaaaaccctcggaaggttcattttaagcgacattccgcccgcacctcgcggtatcccacaaatcgaagtcaccttgacatcgacgcaaacggcatcgtcctcgcgataa

SEQ ID NO: 14838 - protein, 306 aa, Unknown
  Obtained from environmental sample
  DOMAIN (1)...(306): Hsp70 protein
  misc_feature (1)..(306): Xaa is any amino acid
MPYGLDKGDAQQKILVYDLEGGTFDVXILELGDGVFEVLATNGDTRLGGDDFDERIMKLVIDDFKSKNGIDLSKDKMALQRIKLASEKAKKELSGMTKTTISEAYITADASGPKHLEFELTRAKFDSITSDLVEKTIKLVDLCMKDAKLKFTDIQKVILVGGSTRIPAVVETLEKKTGHKPFKGINPDECVAVGAAIQGGVLGGDVKDVLLLDVTPLSLGIETLGGICTKLIERNTTIPTKKSQVFSTASDNQPSVDIHVLQGEREFAADNKTLGRFILSDIPPAPRGIPQIEVTLTSTQTASSSR

SEQ ID NO: 14839 - DNA, 366 bp, Unknown
  Obtained from environmental sample
  misc_feature (1)..(366): n is a, c, g, or t
ttgcttaacctctttgtggcggatcagaatacagctattggcaaaagaaatattcattcgcttaaacccggctattccttaacaattggcggcggcaactcggattttcttatctttcttgttcccgttccgccgcgcatcgcggaagtcaggcatgatggcagaacctgcgcttttatacccgtaaaaccacagtacttccctgacataggctctcagacagtaccaaactgcataggcaaaactttcagggtaatctcggataaaaaatacgagcttcacatccggcttgaaaaatacgaggatccgttaaacgctttgaacaaaatgctgcgatcaattaaggtacccggaccggtagtatag

SEQ ID NO: 14840 - protein, 121 aa, Unknown
  Obtained from environmental sample
  misc_feature (1)..(121): Xaa is any amino acid
MLNLFVADQNTAIGKRNIHSLKPGYSLTIGGGNSDFLIFLVPVPPRIAEVRHDGRTCAFIPVKPQYFPDIGSQTVPNCIGKTFRVISDKKYELHIRLEKYEDPLNALNKMLRSIKVPGPVV

SEQ ID NO: 14841 - DNA, 312 bp, Unknown
  Obtained from environmental sample
  misc_feature (1)..(312): n is a, c, g, or t
atggccgaggtctggacgagacagttccgggttcttgaatatctgcaatgcgtcagcaaattctttgtgcacgaatcctgcggtaagtgtattccctgccgcgaaggcaaccggcagattttcaaacttctgcgcaggctctccgtccccaatgccgccgcttccggcgatctggacactttgcgcggccttatccgcgccatgactgacgcgtcattttgcgggctggggcagactgccgccgcggcccttaacagcgcatggaaacattttaagagcgaatttgaagcgcaggttaaggaaagaccatga

SEQ ID NO: 14842 - protein, 103 aa, Unknown
  Obtained from environmental sample
  misc_feature (1)..(103): Xaa is any amino acid
MAEVWTRQFRVLEYLQCVSKFFVHESCGKCIPCREGNRQIFKLLRRLSVPNAAASGDLDTLRGLIRAMTDASFCGLGQTAAAALNSAWKHFKSEFEAQVKERP

SEQ ID NO: 14843 - DNA, 528 bp, Unknown
  Obtained from environmental sample
  misc_feature (1)..(528): n is a, c, g, or t
ttgatgtttgaatttctcgcaatcacaaaccgccatctctgcttcaaagggaacgccgcgttcgtgaacgcgccgtttctggagcaaatcaaaaaaatcgccgcttcgggggttaaggccgttgtgttaagggaaaaagatctttcattgaaagattatcttgaccttgcaagggatgtctttgaactttgtacagccaggaaaataaagtttattgttcatggcctgccccagatagccctggagctggggtgcccttatcttcatctgccctggacagtgtttcaagaaaactgcttaagttcaaattcgccccccttatggagagaaaaaagtattcattctttcggggtttctgttcataatacggaagaagcgaaacttgccatagcccacggagcctcatggcttattgggggccatatttataacaccaaaagcaaagacggccttgaaggcagggggccggaattcctcgcggaactctgtaagttgtcctctgtccccgtgtacggatcgggggcataa

SEQ ID NO: 14844 - protein, 175 aa, Unknown
  Obtained from environmental sample
  DOMAIN (5)...(175): Thiamine monophosphate synthase/TENI
  misc_feature (1)..(175): Xaa is any amino acid
MMFEFLAITNRHLCFKGNAAFVNAPFLEQIKKIAASGVKAVVLREKDLSLKDYLDLARDVFELCTARKIKFIVHGLPQIALELGCPYLHLPWTVFQENCLSSNSPPLWREKSIHSFGVSVHNTEEAKLAIAHGASWLIGGHIYNTKSKDGLEGRGPEFLAELCKLSSVPVYGSGA

SEQ ID NO: 14845 - DNA, 390 bp, Unknown
  Obtained from environmental sample
  misc_feature (1)..(390): n is a, c, g, or t
ttgggcgattcaacggaaatacccccacgcggaaatcttttctcatgcccgcgcttaagacctattgttaataacaatgacaaaaatttcaaaccctttaatgtaagcgaagctgatttactccaggttatttgcgcgttccgcctctttatgcccagttcggggattaccatttcgtcaagggaaaacgcccggttccgggatcacgcctgcgagatcgcagttacgagaatttccgccggggttgacgtgggcattggcggtcacagcggcgcttccagcggtgacgagcagtttgagatcagcgattccaggggagtcgaggaaatataccaaatgctcctttcccgtgggcttcagccggtaatgagcgattacgttgatgtttga

SEQ ID NO: 14846 - protein, 129 aa, Unknown
  Obtained from environmental sample
  DOMAIN (14)...(121): Biotin and Thiamin Synthesis associated domain
  misc_feature (1)..(129): Xaa is any amino acid
MGDSTEIPPRGNLFSCPRLRPIVNNNDKNFKPFNVSEADLLQVICAFRLFMPSSGITISSRENARFRDHACEIAVTRISAGVDVGIGGHSGASSGDEQFEISDSRGVEEIYQMLLSRGLQPVMSDYVDV

SEQ ID NO: 14847 - DNA, 756 bp, Unknown
  Obtained from environmental sample
  misc_feature (1)..(756): n is a, c, g, or t
ttggccgagccatggggcttccggcacaaggcgaagtctaaaaccaaactgccgaaatgcgcggcggcggatgaattcgcgtggattgacgacaccttgtctgaagaaccgaccgtatcggtgatattcgagttcttcccggacgatgatgaatcggagaatgagtactacgagcccatagagatagatatggtaatgtcgccgccgccgccaatgccaacgccgacaacgccggccacgccggcgacgccaacgacgacggagccggatcccatgccgcaacccacggctgaggagacggagatgctcgttgtttcccaacgcgcgatcaacttcgtgtccggcagcgcaaaccttaccgagagctcctacgcgccgctcaacgcgatagcgaaccttctgaaactgtacccgcacatacgctacgagatacaggggcacaccgactcgaagggcacggagatgcacaatctgctgctctccgcggagcgcgccgcggtggtgaagtactacctgatttcgcgcggcgcgccggaatcaagcttagtggcggtgggctacggaaagaacataccaatagccgacaaccaaaacacggtgggccgcgcgctgaacagacgcgtggagttcgtgcaaatactgtcgcaggaacactacgactgggtaaagagatttgaactggaaatgataccgaggcttaccaatagggtaatacttcacaagaagagaattacggaaccgaatttaggggaatag

SEQ ID NO: 14848 - protein, 251 aa, Unknown
  Obtained from environmental sample
  DOMAIN (111)...(206): OmpA family
  misc_feature (1)..(251): Xaa is any amino acid
MAEPWGFRHKAKSKTKLPKCAAADEFAWIDDTLSEEPTVSVIFEFFPDDDESENEYYEPIEIDMVMSPPPPMPTPTTPATPATPTTTEPDPMPQPTAEETEMLVVSQRAINFVSGSANLTESSYAPLNAIANLLKLYPHIRYEIQGHTDSKGTEMHNLLLSAERAAVVKYYLISRGAPESSLVAVGYGKNIPIADNQNTVGRALNRRVEFVQILSQEHYDWVKRFELEMIPRLTNRVILHKKRITEPNLGE

SEQ ID NO: 14849 - DNA, 696 bp, Unknown
  Obtained from environmental sample
  misc_feature (1)..(696): n is a, c, g, or t
atgccatttttacccacacttatattttacctcttaacattagcgacaaccgctttggcacaagagcagcaaataaaaacgcttgccgcccagtttgactctgtgaatacatcggttagggataataaaatagacaaagctcaagcgttgaaaaaatttcaagaaattttaccagaattgcaaaccgcatacaataagctaaaaccaaatgaaacaaaaaaagaaaagtggatttttccagtggaaggttattcctcaaaagacataggcggtacccacggtgaaggttatgttccaaaaggatatgattattttgatggcaacaagcacggtgggcatccggctcaggatatttttatcaaagacaaaaaccaagactgcaaagacgatgcaacaggaaagtttgtgaatgttcgttctgtgagcaacggtattgtggttgcattggaaaagcactgggactctgcaagttctttgcgcggaggcaagtacatatatatttattccccaagcgacaacgctcttttttattatgcgcataataacgaggttcttgtgaatatagggcagataatcaacaaaggcgatatcattgccaccgtaggccgcacaggtttgaatgcttttaaaaaaaggtcgccaacacatttgcattttatgaaattggaattagataaagagctcggccgaatctga

SEQ ID NO: 14850 - protein, 231 aa, Unknown
  Obtained from environmental sample
  SIGNAL (1)...(20)
  DOMAIN (111)...(226): Peptidase family M23
  misc_feature (1)..(231): Xaa is any amino acid
MPFLPTLIFYLLTLATTALAQEQQIKTLAAQFDSVNTSVRDNKIDKAQALKKFQEILPELQTAYNKLKPNETKKEKWIFPVEGYSSKDIGGTHGEGYVPKGYDYFDGNKHGGHPAQDIFIKDKNQDCKDDATGKFVNVRSVSNGIVVALEKHWDSASSLRGGKYIYIYSPSDNALFYYAHNNEVLVNIGQIINKGDIIATVGRTGLNAFKKRSPTHLHFMKLELDKELGRI

SEQ ID NO: 14851 - DNA, 783 bp, Unknown
  Obtained from environmental sample
  misc_feature (1)..(783): n is a, c, g, or t
atggtatggatagcaggcggaagttttacaatgggcagtcccgaaactgaaccgaacaggtatagcgatgaaacacaacattcggtaacgttgaatgggttttacatgggcaagtatcaggtaacgcaagagcagtatcaggcggttatgggaagtaatcccagcagttttaacggtagtacaggcagagaacctgctactggggaaacacaaggcaaacgacctgtggaaagggtaagttggtatgacgcattagtattctgcaataaattaagcatgatagaaggattaagccccgcgtacagcattagcggcagtaccgatcctgcggtatggggaacagtaccaacaagcagtaatacaacatgggatgctgtagtaatcgttgccggttctaccggttatcgtttaccgacggaagcggaatgggaatatgcgtgtcgagccggaacaacaacagcgtataacacgggagatacgattagcgacaatacagggtggtattcaagtaacagcggaacacatgaggtaggaaagaaacccgccaatgcttgggaactgtatgacatgcatgggaatgtgtatgaatggtgctgggactggtatggagataactcaagtggtgcacagaccgacccaatgggcgcgtcctcggggtctggccgggtgctacgcggcgggagctggaactacggcggtctgaacctgcgttctgcgtatcgaggcagcgtctacccggacttccggggcagcgacgtcggcttccggctggtgcgtccctga

SEQ ID NO: 14852 - protein, 260 aa, Unknown
  Obtained from environmental sample
  DOMAIN (1)...(259): Domain of unknown function (DUF323)
  misc_feature (1)..(260): Xaa is any amino acid
MVWIAGGSFTMGSPETEPNRYSDETQHSVTLNGFYMGKYQVTQEQYQAVMGSNPSSFNGSTGREPATGETQGKRPVERVSWYDALVFCNKLSMIEGLSPAYSISGSTDPAVWGTVPTSSNTTWDAVVIVAGSTGYRLPTEAEWEYACRAGTTTAYNTGDTISDNTGWYSSNSGTHEVGKKPANAWELYDMHGNVYEWCWDWYGDNSSGAQTDPMGASSGSGRVLRGGSWNYGGLNLRSAYRGSVYPDFRGSDVGFRLVRP

SEQ ID NO: 14853 - DNA, 303 bp, Unknown
  Obtained from environmental sample
  misc_feature (1)..(303): n is a, c, g, or t
atggatattgaacaggagaggattggcaagtcaacggtggcgctgacgcttaacggacgccttgacacggtaaacgcccccctgcttggaagcaagatgagggagcaggaagacataactgaactggagcttgactttaagggtgttacctatatttccagtatgggccttagggtattgctacaggcgaaaaagacaatgaaaacgcggggtgtcaggatgagcataaaaaatatgcaggattccgtccgggaaatttttgagatgacaggtttcttaaatttaatgatgaaggaagaataa

SEQ ID NO: 14854 - protein, 100 aa, Unknown
  Obtained from environmental sample
  DOMAIN (4)...(100): STAS domain
  misc_feature (1)..(100): Xaa is any amino acid
MDIEQERIGKSTVALTLNGRLDTVNAPLLGSKMREQEDITELELDFKGVTYISSMGLRVLLQAKKTMKTRGVRMSIKNMQDSVREIFEMTGFLNLMMKEE

SEQ ID NO: 14855 - DNA, 813 bp, Unknown
  Obtained from environmental sample
  misc_feature (1)..(813): n is a, c, g, or t
ttgcagctcggtgcccctgcggcgctgccctgggcgggcaaggtaaaaggtatactttcggcgtatctttgcgggcaagcgggaagcggcgctgttgttgatttgcttttgggcaaaagttccccaagcggtaagcttgcggaaacctggccgttctccctggaggacactccctgttacaattattatccgggaagcgtccgaagcgcggagtacagggaaagcatatttgtgggttaccgctactatgatcatggcgaaaaacctgttgcttttccttttggctatggcctttcttataccacttttgcgtacagcaatttaaaactgagcagcgcttcttttaaatccggcgataagctggaggtcagttttgacgttaaaaacacaggggatacgtccggggctgaaatcgcccaagtatacgttgcgccaaaaggtactgctattttcagggctctaaaagaactcaaaggttttgagaaagtttctctgcaaaaaggcgaaagccgcaccgtaaagatcactctggatgctcgttccttctcttactacaatgttccgaaaggaacctgggctatcgaaggcggcgtttacgaaatcctagtaggcgcttcaagccgcgacatttccctgcggggcgaagtccaggtaacaggcgatgggtatgaaacgcttctgttggaacaacgcanaaactcgccggaatactttaacgttgacgctaaaggcctaaaaatcagcgacgcgtcttttgaagccttgtatggacaaaagctgtcttcaagcaaaaagaaaacgggggcaaattga

SEQ ID NO: 14856 - protein, 270 aa, Unknown
  Obtained from environmental sample
  DOMAIN (1)...(102): Glycosyl hydrolase family 3 C terminal domain
  misc_feature (1)..(270): Xaa is any amino acid
MQLGAPAALPWAGKVKGILSAYLCGQAGSGAVVDLLLGKSSPSGKLAETWPFSLEDTPCYNYYPGSVRSAEYRESIFVGYRYYDHGEKPVAFPFGYGLSYTTFAYSNLKLSSASFKSGDKLEVSFDVKNTGDTSGAEIAQVYVAPKGTAIFRALKELKGFEKVSLQKGESRTVKITLDARSFSYYNVPKGTWAIEGGVYEILVGASSRDISLRGEVQVTGDGYETLLLEQRXNSPEYFNVDAKGLKISDASFEALYGQKLSSSKKKTGAN

SEQ ID NO: 14857 - DNA, 915 bp, Unknown
  Obtained from environmental sample
  misc_feature (1)..(915): n is a, c, g, or t
ttgaggtgcgcgttgttcgggcctagcggaagcgggaaaacaatgaccggcctgcgcatggcaaaggggattgctgataaaatgggagtcccctttgcggtaatcgacacggaggcgagatcggcttcaaagtatgctgaccgcatacaatttgaggttgataatctggataaaaagacggttgactattacattgcttcgatgaacgaggcagggaaagcggggtataaggtactgtttattgattcgctctcccatgcgtggcgcgagcttaccgaggaagtggatcgcattacccaattgagtacgagcaaaaacagcgtcttatcatgggctaaagtttcacccaaacagaagcggttcatcaacgcgatactcaatttcccgggccatatcattgtcaccatgcggagcaaaacggaatgggtaatcggcgagggaaaggatggaaaaaccgcgccgcagaagctcggccttgcgccggaacagggaaagggtattgagtatgagtttgacctgctcattgaaatggatcagaaacacaatgccacaataaccaaagaccgaaccggtaagttccaggatgaaactattgaaaagccgggcgaggattttggcgttgccctttatgaatggcttgcgggcggcgcggcggagatgccgggtatgccggttgagaatgctcctgccaagcctatagaatcaacacccacacccgcccaagcaaaaccggaaaccggcagccttaccgcttcttcaggaaaaagctttgaaagaacaggcgatgaattatcaagagatcggggggatcattacgctgccgataacgcgctcgtatttctccgagatgannagagggagccagcagatatcaggatacaagctgatgaaaaagctaccgatttgaagatttaa

SEQ ID NO: 14858 - protein, 304 aa, Unknown
  Obtained from environmental sample
  misc_feature (1)..(304): Xaa is any amino acid
MRCALFGPSGSGKTMTGLRMAKGIADKMGVPFAVIDTEARSASKYADRIQFEVDNLDKKTVDYYIASMNEAGKAGYKVLFIDSLSHAWRELTEEVDRITQLSTSKNSVLSWAKVSPKQKRFINAILNFPGHIIVTMRSKTEWVIGEGKDGKTAPQKLGLAPEQGKGIEYEFDLLIEMDQKHNATITKDRTGKFQDETIEKPGEDFGVALYEWLAGGAAEMPGMPVENAPAKPIESTPTPAQAKPETGSLTASSGKSFERTGDELSRDRGDHYAADNALVFLRDXXREPADIRIQADEKATDLKI

SEQ ID NO: 14859 - DNA, 918 bp, Unknown
  Obtained from environmental sample
  misc_feature (1)..(918): n is a, c, g, or t
atgagtgagagtgcgggggttattcaggattatatctcttacctgggggcggtgcgctttctttccgcgcggacgctcagggcttacggggatgatctggctatgtttgcttcctactgcgataatcacagtattgatcccgagaaggccgactcacatcaagttaggggctttgtcgccgacttgagttttgaacgcgcgtccgccgccagcgtgaaccgcaggctttcatctgtccggggcttttaccgctggctgaccaaattccgcggacgtgttgataatccctgcgacggcggtcccggcggacttatccgcaatgttaaaacgccgcagaccatgccttccctgctctgggaagacgaaatggcggattttgcggatctgccggacgagaaaaaaatgctgtggccggtcagggacaaggccctgattttgactatgtattccgcggggctgcgtatttcagaactggtttcattaaatatgaagatgatggcggctaacatggagagcgcgagaataacaggaaagggcggcaaggaacgtatggtgttcttttccgaagaggcgaggattgcgattcgcgagtatctcgtggaacgggacgcgaggatcaggagcgcggggcttacaggcgaggatttaaaaggggcgttatttgtaagccataagggtcgatgcctttccgtttccggcacgcgctggattatcagccaatacgccacggtttcgggacttgggaagaacatacacccgcacagtttccgccacagttttgccacacaccttgtgaacgcgggctgcgacgtgcgggtcgtgcaggaaatgcttgggcacgcgaggctttccaccacacagcgttactcccatgtcagcatgaaagttgaagaagggtacgcgctcggccgaatctga

SEQ ID NO: 14860 - protein, 305 aa, Unknown
  Obtained from environmental sample
  DOMAIN (8)...(91): Phage integrase, N-terminal SAM-like domain
  misc_feature (1)..(305): Xaa is any amino acid
MSESAGVIQDYISYLGAVRFLSARTLRAYGDDLAMFASYCDNHSIDPEKADSHQVRGFVADLSFERASAASVNRRLSSVRGFYRWLTKFRGRVDNPCDGGPGGLIRNVKTPQTMPSLLWEDEMADFADLPDEKKMLWPVRDKALILTMYSAGLRISELVSLNMKMMAANMESARITGKGGKERMVFFSEEARIAIREYLVERDARIRSAGLTGEDLKGALFVSHKGRCLSVSGTRWIISQYATVSGLGKNIHPHSFRHSFATHLVNAGCDVRVVQEMLGHARLSTTQRYSHVSMKVEEGYALGRI

SEQ ID NO: 14861 - DNA, 933 bp, Unknown
  Obtained from environmental sample
  misc_feature (1)..(933): n is a, c, g, or t
ttgttttnnnnnncccatgtatcagatcggccgagaattcctctcctttgccgccgcgcttcaacgctaaaagaagcaggcggcggcattctaaagattggcaggggagtgtggcgcgccggtcctatagaaattttttccaatattacggtttctctggacgaaggggctgttctttcctttattcccgaacctgagctctataaacctgtatggacccgctgggaggggcttgagtgttacgcgatgcatccgtgtgtttttgccgcaggacaggaaaatatttccattaccggaaaaggcgttctggacggagacggcaggcgctggtgggatacgttacgtgaaaaaagacggcttggccagcaggagccgcagacgccgcaggaacttgcgttagctgaactgaaccgcggttatgagacgcagcaatccggaggtggcggcaggaaaatgcagtttttgcggcctccgctggttcagttttataattgctctaaaataaggcttgaaggcgttacgctgcaaaattccccgttctggacgctgcatccgctgtactgccgcggcgttgttatttcaggaattaccgttaaaaatcctgttgacgctcccaacacggacggcatggacattgattcctgcgaggacgtgctaatcgaaaactgcatggtctcggtgggggatgacggcattgtgctcaagtccggctcaggcgaggacggtattcgcgtgggaaaaccgtgccgcagaataactgtgcgtaactgtatgatagaagacggccacgggggaattgttataggcagtgaaacagcggcgggcgtttatgaagtgctgactgaggattgtcttttcangggaaccgaccggnggataaagataaaaacccgacgcggcaggggaggaaaaatcacgatttggatttcgtaa

SEQ ID NO: 14862 - protein, 310 aa, Unknown
  Obtained from environmental sample
  DOMAIN (26)...(310): Glycosyl hydrolases family 28
  misc_feature (1)..(310): Xaa is any amino acid
MFXXXHVSDRPRIPLLCRRASTLKEAGGGILKIGRGVWRAGPIEIFSNITVSLDEGAVLSFIPEPELYKPVWTRWEGLECYAMHPCVFAAGQENISITGKGVLDGDGRRWWDTLREKRRLGQQEPQTPQELALAELNRGYETQQSGGGGRKMQFLRPPLVQFYNCSKIRLEGVTLQNSPFWTLHPLYCRGVVISGITVKNPVDAPNTDGMDIDSCEDVLIENCMVSVGDDGIVLKSGSGEDGIRVGKPCRRITVRNCMIEDGHGGIVIGSETAAGVYEVLTEDCLFXGTDRXIKIKTRRGRGGKITIWIS

SEQ ID NO: 14863 - DNA, 513 bp, Unknown
  Obtained from environmental sample
  misc_feature (1)..(513): n is a, c, g, or t
gtgctgataatcccaatgctggccggtgccactcttcccgcaaaacagatgcaaatgaaaaagcaagaaagcgcagcggcacttgcaaaaaagcagttatntgatgctccacccacagacaaatcgggacttagcgtacgctcctatgttgttcgcaggggcgataatctgagttccatctcaaggcggttcggaatatcttcgcaaagtttgatgacgtggaataatttgcaaaccaacaaggtgatgataggtcagcgtctatacctgcaagaccctgggaaacaagattccaaaaaaagcgaaggcattgccattaccccaattaatccaattaccccaaaaggaattcaaggcaccacaagccagggtacaagctatgtgataaaacaaggcgacaacctatgggatatagctcggagcaacaatgtaaccgttcagcaactgttgcaatggaacccaggtttggataaaaaaatctatcccggaatgaagattaaaatcagcgattga

SEQ ID NO: 14864 - protein, 170 aa, Unknown
  Obtained from environmental sample
  DOMAIN (49)...(91): LysM domain
  misc_feature (1)..(170): Xaa is any amino acid
MLIIPMLAGATLPAKQMQMKKQESAAALAKKQLXDAPPTDKSGLSVRSYVVRRGDNLSSISRRFGISSQSLMTWNNLQTNKVMIGQRLYLQDPGKQDSKKSEGIAITPINPITPKGIQGTTSQGTSYVIKQGDNLWDIARSNNVTVQQLLQWNPGLDKKIYPGMKIKISD

SEQ ID NO: 14865 - DNA, 897 bp, Unknown
  Obtained from environmental sample
  misc_feature (1)..(897): n is a, c, g, or t
atgattcccgcgcagatgggcttcagctttgagcggcccatgatcgccgccgcggcgctgattgtcattccgctggcaatgtttcttgcccggaagctgggaagcccgtttaccgcatccgttcccctggggcccccgggcggtattccctttaaggcgcctctcaatctgggaggaattgtaaaaacgctccgtatactggaatactgcggggcgctgctgctttttgtaagcgctgccaatccgctgataaaagtatcggaaacggtatggttaaaccggggggcggatatactgtttgtactggacatcagtcccagtatggcggctcttgatatgggcggggcaagccgctttaacatcgcccgtgaactgctgaaaaattttgcggaacaccgcccttcggacagcattggtcttgcggtagtcggatacgatgccgccctgcttgtcccgccaactacagaccgggaattacttgcctcgcggctggatagactgcgtcttggcgagatgggcgacggaaccgctctgggtatggggcttgcactcgcggcctaccatcttgaaaaatccaccgcgccccgcagagcggcagttcttatcagcgacggggaaaataacgcgggggcgattcacccggaaaccgccgccgcaatgctcaaggatattggggtttcgctgtgggtcattgggattggttccggcggggaagttcccattgattatgttgatccctttacccggatacgtcgtaccggcctgtttgactccagctacgatacggaggctctccgtaaaataaacgccgcaggcggcggaaacctgatttccgcgccatcggcggacgctcttgccgcggcttttgcccgtctgacgatcagctcggccatctga

SEQ ID NO: 14866 - protein, 298 aa, Unknown
  Obtained from environmental sample
  DOMAIN (97)...(292): von Willebrand factor type A domain
  misc_feature (1)..(298): Xaa is any amino acid
MIPAQMGFSFERPMIAAAALIVIPLAMFLARKLGSPFTASVPLGPPGGIPFKAPLNLGGIVKTLRILEYCGALLLFVSAANPLIKVSETVWLNRGADILFVLDISPSMAALDMGGASRFNIARELLKNFAEHRPSDSIGLAVVGYDAALLVPPTTDRELLASRLDRLRLGEMGDGTALGMGLALAAYHLEKSTAPRRAAVLISDGENNAGAIHPETAAAMLKDIGVSLWVIGIGSGGEVPIDYVDPFTRIRRTGLFDSSYDTEALRKINAAGGGNLISAPSADALAAAFARLTISSAI

SEQ ID NO: 14867 - DNA, 468 bp, Unknown
  Obtained from environmental sample
  misc_feature (1)..(468): n is a, c, g, or t
atggcgagcgcgcacagcatcgttgtgggctttgcaatgggcttcgctgtgatacctataatatttagcatctccgaagacgctttttccgcagtgcctaaatccctgtcctccgcaagccttgcctgcggcgcctccccttggcagacggcatggcgcgttgtgctgccaacggccagcccaggagttttttcggcggtgatggttggctttggacgcgccataggcgaaacaatgatagtgctcatggccactggcaacactcccctgatggactgggggcctttcaatggcatgagaaccctttcggcaaacatcgccgttgagataccagaggccccccaccaagggacgctgtacaggatactatttttcactgcactgctactgttcgtgctgacgtttttgctaaacactgccgcagagctgatacggcaatcgcttcgcaagcgatatgagtccatgtga

SEQ ID NO: 14868 - protein, 155 aa, Unknown
  Obtained from environmental sample
  misc_feature (1)..(155): Xaa is any amino acid
MASAHSIVVGFAMGFAVIPIIFSISEDAFSAVPKSLSSASLACGASPWQTAWRVVLPTASPGVFSAVMVGFGRAIGETMIVLMATGNTPLMDWGPFNGMRTLSANIAVEIPEAPHQGTLYRILFFTALLLFVLTFLLNTAAELIRQSLRKRYESM

SEQ ID NO: 14869 - DNA, 777 bp, Unknown
  Obtained from environmental sample
  misc_feature (1)..(777): n is a, c, g, or t
ttgatgcgggagggagccatgccaaatgaaattggctttaccgatgcttacgctgaaaaagccaaaactgccgccgccgcgctaaaggctgaggtttttaactccaataccgaggctgttgaaaaagccgatttcgttttcctcgcagtcaaaccacagatactatctgatgtgctgaccgaaattgccccggttattcaaaaacgtatggcggcgggcgcgtacgatgcgcccctgctggtatcgatggcggcaggctggacaattgagaagctccaggccgcagttgcgtataacacttcggcaaaaattccttttgcccgaataatgcccaatacgccggcattgatctcaaaaggcatgatcgcccttgccgtatcgccggaagtctccggtgaaaaagccgatgcgttagaggcaatgctcaggggagcgggtatagttgacagggtttctgaaaattattttaacgccgttacgggcctttccggttccggccccgcgtttgcttttctgttcattgaggccctcgccgatgggggagtccttgccggcctgccccgtgacaaagccctgcgttacgcggctcagaccatgctgggttccgcggcgatggttttggaaacgggcagacaccccggcgaattaaaagacatggtcgcctctcccggaggcactaccattgccggtgtcgccgcgcttgagtcaggcggcttccgggctgccgcaatacangctgttgaaaccgcatggaaaanagcaatggaattggggtaa

SEQ ID NO: 14870 - protein, 258 aa, Unknown
  Obtained from environmental sample
  DOMAIN (3)...(242): NADP oxidoreductase coenzyme F420-dependent
  misc_feature (1)..(258): Xaa is any amino acid
MMREGAMPNEIGFTDAYAEKAKTAAAALKAEVFNSNTEAVEKADFVFLAVKPQILSDVLTEIAPVIQKRMAAGAYDAPLLVSMAAGWTIEKLQAAVAYNTSAKIPFARIMPNTPALISKGMIALAVSPEVSGEKADALEAMLRGAGIVDRVSENYFNAVTGLSGSGPAFAFLFIEALADGGVLAGLPRDKALRYAAQTMLGSAAMVLETGRHPGELKDMVASPGGTTIAGVAALESGGFRAAAIXAVETAWKXAMELG

SEQ ID NO: 14871 - DNA, 456 bp, Unknown
  Obtained from environmental sample
  misc_feature (1)..(456): n is a, c, g, or t
gtggcggatattgtaaatggtctttccgatgaacttatcaaaattattgatgatctcaaagacgacaaaaactcatttgaaaaactgggcattacctatgaagaaaagattttttacgatattttagttaaagttcgtgatgatcatggttttgagtactccgaggataaatgtattattcttgccggagaaataaaaaaactggtcgatgataaatcaaagtatatagattgggctgcccgtgaagatattaagaacgagttaaatatggatttgaccaagctactgtataaaaacggctatccccctgaatgggatgatgaagtttttgagcaggttttggaacaatcagaaaattataaaaaatattccgttgtggttgaatatgaatacccaaacacacaaaacagttatggttatgcaatggcggcggaagatcctcctcttaagctttaa

SEQ ID NO: 14872 - protein, 151 aa, Unknown
  Obtained from environmental sample
  misc_feature (1)..(151): Xaa is any amino acid
MADIVNGLSDELIKIIDDLKDDKNSFEKLGITYEEKIFYDILVKVRDDHGFEYSEDKCIILAGEIKKLVDDKSKYIDWAAREDIKNELNMDLTKLLYKNGYPPEWDDEVFEQVLEQSENYKKYSVVVEYEYPNTQNSYGYAMAAEDPPLKL

SEQ ID NO: 14873 - DNA, 816 bp, Unknown
  Obtained from environmental sample
  misc_feature (1)..(816): n is a, c, g, or t
atgatgttgtattctaaagataaaaataaacccattaagctaactgccgtctctcttttttccggatgcggagggtttgattggggagcggttcaagcaggaatagaaattatatgggcaaacgatataaacaaatatgcagcacaagcatataaaaccatactcccaaaagttccttttaattttggcgatataagagattttaaaaaatttccaaaatcggatatacttattggttgttatccatgcacaggcttcagtattgctgctcgtagaagatggaaaaatcaggaatttcgggatttaactaaagcagaaggaaattttttgtatttggaattcatacgcgccctggaacaaataaagccaaaatatttttttgttgaaaatgttaatggcatggttagtgcaatagacggttggttttttaaacaacaactggaaagttttagatcacttggttatcaacctcagtataagttattaagagcaattgattatggcgcacctcaggacagaaggcgaatattcatagtaggtgtaagaaatgatatagcccaaactttcacatataaatttcctgaaccaacacatggtcctaatactaaaaaaaattatgtaactatggctgatgtcttaaaaggactggacccttggccaattggtgatttctcaactcaaaattttcacggacactatttaactagaaatcgaaaaaggaactggaatgagccaagttatacaattgtcgcaaatgaatcacatattccattacacccaatgggtaaaccaatggtaaatataagaaaaggatga

SEQ ID NO: 14874 - protein, 271 aa, Unknown
  Obtained from environmental sample
  SIGNAL (1)...(29)
  DOMAIN (14)...(270): C-5 cytosine-specific DNA methylase
  misc_feature (1)..(271): Xaa is any amino acid
MMLYSKDKNKPIKLTAVSLFSGCGGFDWGAVQAGIEIIWANDINKYAAQAYKTILPKVPFNFGDIRDFKKFPKSDILIGCYPCTGFSIAARRRWKNQEFRDLTKAEGNFLYLEFIRALEQIKPKYFFVENVNGMVSAIDGWFFKQQLESFRSLGYQPQYKLLRAIDYGAPQDRRRIFIVGVRNDIAQTFTYKFPEPTHGPNTKKNYVTMADVLKGLDPWPIGDFSTQNFHGHYLTRNRKRNWNEPSYTIVANESHIPLHPMGKPMVNIRKG

SEQ ID NO: 14875 - DNA, 837 bp, Unknown
  Obtained from environmental sample
  misc_feature (1)..(837): n is a, c, g, or t
atggaattatcggaaaaaatttccattcttgcgggcgcggcaaaatatgacgcttcatgcgcatcctcagggagcgacggaaaaggggcgttgggcgggaaaaaattcggcgcgagcgtgccggccggggtttgccatagctggactgaggacgggcgctgcgtcagccttctcaaactgcttttctccaatgtgtgccgttatgactgcgcctactgcgtgaaccgcgcttcggcggatattccgcgcaacagcttcaccgtacaggaactggttgacttaaccagcgaattttaccggcgcaattatatcgaggggctgtttttgtcttcgggtgttttcgccgatcccgacatcgtaatggaaaaactcatagaaaccgcgcggaccctgcgaacacaggcaggctatggaggctatatccacttaaagataatccccggcacaggagagcgccttatcaaagaggcgggcctttgggcggacaggctcagcgttaacattgaattgcccacggaaaaaagcctgatacaccttgcgccggacaagtcagggcagtcgatccttggcgcaatgggggatttttcggatattagctgcgagtttgaggaagcccggcgcaaaccgcgttttttgccgcaggggaagatggcagttccggctttcgcgccggcagggcagagtacccagcttatcgtaggcgccagcgcggaagatgaccgtcagatcataaatttgtcaagttccctttaccggaaattctccctgcggagagtgtactattccgcgtttattcatccgggaagcccgngcacgggatacctcgtgccgatctga

SEQ ID NO: 14876 - protein, 278 aa, Unknown
  Obtained from environmental sample
  DOMAIN (60)...(250): Radical SAM superfamily
  misc_feature (1)..(278): Xaa is any amino acid
MELSEKISILAGAAKYDASCASSGSDGKGALGGKKFGASVPAGVCHSWTEDGRCVSLLKLLFSNVCRYDCAYCVNRASADIPRNSFTVQELVDLTSEFYRRNYIEGLFLSSGVFADPDIVMEKLIETARTLRTQAGYGGYIHLKIIPGTGERLIKEAGLWADRLSVNIELPTEKSLIHLAPDKSGQSILGAMGDFSDISCEFEEARRKPRFLPQGKMAVPAFAPAGQSTQLIVGASAEDDRQIINLSSSLYRKFSLRRVYYSAFIHPGSPXTGYLVPI

SEQ ID NO: 14877 - DNA, 318 bp, Unknown
  Obtained from environmental sample
  misc_feature (1)..(318): n is a, c, g, or t
atgcagcaaatcaatattaaatccgtgacggacggtatggttttggcggagtctttgaaaaatgctcacggaggcattgttttgggaaaaggaactattttaacagaagcttttgccaacaggctttctcgcatggggttttacacggtttgcgtggaaggagaacaagtagtgtcaaaagagaataccgagggtgcgcaagcaggcgatattcaaagaatacccttggaaaaactatttgaaaaaaaacttgatagtgaatttatgatggaaatttacaaagccttgttgaggtatagagaatcaagtggcagataa

SEQ ID NO: 14878 - protein, 105 aa, Unknown
  Obtained from environmental sample
  misc_feature (1)..(105): Xaa is any amino acid
MQQINIKSVTDGMVLAESLKNAHGGIVLGKGTILTEAFANRLSRMGFYTVCVEGEQVVSKENTEGAQAGDIQRIPLEKLFEKKLDSEFMMEIYKALLRYRESSGR

SEQ ID NO: 14879 - DNA, 420 bp, Unknown
  Obtained from environmental sample
  misc_feature (1)..(420): n is a, c, g, or t
gtgatactgaacccggcttacgggatgaggctgggggacgacaaggagcttatagagacctaccgaggcataggcgcgttcttcaagcagaagtgcaaaggctatcgcggaggagtattcacggctaacacggggctggcggggcaggtcgggctgaaagccaaaaggaaagtgccgtttgttaacgggaagatcgagcgcgggctctatgtttatgatcggtatggagggcgtgatccgtccgccgctgttttttccgtcccccttggcccggaccgcgcccgtatattatttggcttaactgacgcgcccaaggacttccgtcatccatattctcaaaatgacaaaagaggctccgaaaaatatataaaatattttttgactcccgcaaccggcatatattatatttatagacaatga

SEQ ID NO: 14880 - protein, 139 aa, Unknown
  Obtained from environmental sample
  misc_feature (1)..(139): Xaa is any amino acid
MILNPAYGMRLGDDKELIETYRGIGAFFKQKCKGYRGGVFTANTGLAGQVGLKAKRKVPFVNGKIERGLYVYDRYGGRDPSAAVFSVPLGPDRARILFGLTDAPKDFRHPYSQNDKRGSEKYIKYFLTPATGIYYIYRQ

SEQ ID NO: 14881 - DNA, 603 bp, Unknown
  Obtained from environmental sample
  misc_feature (1)..(603): n is a, c, g, or t
ttgtctgtaaaggacttgctgagcaatctagacgatgaacagataaaagccgtcaccctggaaatcaacggcgttgtaacggctggagccggctcgggtaaaaccagggttctggcaagccgctacgcgtggcttgtaatgggaaaaaagctcaagccggaagaaatattaaccctcacttttaccaacaaagcggtaagcgaaatgtacaatcgcatttaccgctacctgctggatcaggctgacccggaggccgccaaggcgcttgagaatttccacaaggcaaagattagcaccctggattccttttccgcgaatgtggcaagaaccgcagcggcacgttacgggatcagccccgatttttcaaacgacgacacggcgctccgcggccttgcgcgggaagctgccctgcgttttgtcctcgatcaccgcgaaacgccggctatacgccagctcctggtggatcacaaaataaaagacctcgcggaagaaattttcgccaaagtagtccttaattatagtcccatctcaagccctctgaatttaaataaaaacctttcatctcaaaaaagagaaataaccagagtaggcgggaaaaagtaa

SEQ ID NO: 14882 - protein, 200 aa, Unknown
  Obtained from environmental sample
  misc_feature (1)..(200): Xaa is any amino acid
MSVKDLLSNLDDEQIKAVTLEINGVVTAGAGSGKTRVLASRYAWLVMGKKLKPEEILTLTFTNKAVSEMYNRIYRYLLDQADPEAAKALENFHKAKISTLDSFSANVARTAAARYGISPDFSNDDTALRGLAREAALRFVLDHRETPAIRQLLVDHKIKDLAEEIFAKVVLNYSPISSPLNLNKNLSSQKREITRVGGKK

SEQ ID NO: 14883 - DNA, 867 bp, Unknown
  Obtained from environmental sample
  misc_feature (1)..(867): n is a, c, g, or t
atgacagaatcggccgagcatcacgaacaaatggacgccggaacgcttgtggtaaccggtaacggtgttaatgggtataatcttggtaaatatggcaatttattcgcacaacatttaattaacagccttcaagtagaaaaaacaaataacgaaaaaccagatcaagaacctattcaagaacaaaaaaaagaggcttttcaattccgtcctttcggcgcgtggacggattttaattcccgactttctttacaggaaagagaacgtctcaataatgaagcgattgcggtactggaaaaagccagggaagggacaataagcgatattgataaatcgattcttcgccgttacagcggctttggcggtatatccgcagctgatgagcgcggcgtactctacgattactacacgtcgccgccggtcgcgcatcttgtgtggcagcttcttgagaaatcagggcaaatagaatcaggcgcgaatattcttgaaccttcttgcggaaccggcgtattttttgaatacgctcccaaagataaatcgcttacctttgccggcgtagaactcgatgaaagaaccgcgaatgttgccgaacacatccacaacacagacaatattttgatactcaattcaagttatgaagcatttaacctttccggaaaggccggatactatgaccatgttattggaaacgcgccattcggcgagcgcggcgcggcgctgtctgcccttgatatgccggaagaaaaatcgctggataattatttcgtcagccggtcaatcgacaacttaaaagataatggtactatggcgttaattgtcgcacccggagtactggaaaacaaaaccaatgaaggattccgtttgtcataa

SEQ ID NO: 14884 - protein, 288 aa, Unknown
  Obtained from environmental sample
  misc_feature (1)..(288): Xaa is any amino acid
MTESAEHHEQMDAGTLVVTGNGVNGYNLGKYGNLFAQHLINSLQVEKTNNEKPDQEPIQEQKKEAFQFRPFGAWTDFNSRLSLQERERLNNEAIAVLEKAREGTISDIDKSILRRYSGFGGISAADERGVLYDYYTSPPVAHLVWQLLEKSGQIESGANILEPSCGTGVFFEYAPKDKSLTFAGVELDERTANVAEHIHNTDNILILNSSYEAFNLSGKAGYYDHVIGNAPFGERGAALSALDMPEEKSLDNYFVSRSIDNLKDNGTMALIVAPGVLENKTNEGFRLS

SEQ ID NO: 14885 - DNA, 381 bp, Unknown
  Obtained from environmental sample
  misc_feature (1)..(381): n is a, c, g, or t
ttgagccgcaggctgccggcgaccttaagaaacgcggaatacattgccgcaaaggaaaaacaggttctgcttaatacgacagcggaaaggctcaaggaagaccttgaccgcgcccagttatttgatccggcggccgttgatttctccagggtatcattcgggactgttgttgttttacacaatcacagcaatgacagaaaagaggaatacaccattcttggcccatgggaatccgatcccgagaacaatgtcatctcctatctggccccctttggaaaaattatgatgggcaggacagaaggagaacaattcaattttatcagcgacggcgagaaagtttcatatacggtagagagtataagagcggctgttataaattaa

SEQ ID NO: 14886 - protein, 126 aa, Unknown
  Obtained from environmental sample
  DOMAIN (50)...(122): Prokaryotic transcription elongation factor, GreA/GreB, C-terminal domain
  misc_feature (1)..(126): Xaa is any amino acid
MSRRLPATLRNAEYIAAKEKQVLLNTTAERLKEDLDRAQLFDPAAVDFSRVSFGTVVVLHNHSNDRKEEYTILGPWESDPENNVISYLAPFGKIMMGRTEGEQFNFISDGEKVSYTVESIRAAVIN

SEQ ID NO: 14887 - DNA, 351 bp, Unknown
  Obtained from environmental sample
  misc_feature (1)..(351): n is a, c, g, or t
gtgattgcccttctggaaccaaccgggctggcgatagactgcgctgaaaacggcaaggtcgccgtaaaaatggttacaggcgcggataaaccctacgatgtaatttttatggatctgcaaatgcccgagatgaacgggtttgaggccgctattaaaataaggcaatttgaggaaagcagttcagaacgaaacgtaaaacaaattccgattatcgccatgaccgcaagcgtatccagagttgatattgaaaaatgccttgagacaggcatgaatgaacacataggcttgcctatggatattgaggaagtgctggaaaaactgcgtttctacctgaacccgcaaacattctga

SEQ ID NO: 14888 - protein, 116 aa, Unknown
  Obtained from environmental sample
  DOMAIN (1)...(108): Response regulator receiver domain
  misc_feature (1)..(116): Xaa is any amino acid
MIALLEPTGLAIDCAENGKVAVKMVTGADKPYDVIFMDLQMPEMNGFEAAIKIRQFEESSSERNVKQIPIIAMTASVSRVDIEKCLETGMNEHIGLPMDIEEVLEKLRFYLNPQTF

SEQ ID NO: 14889 - DNA, 759 bp, Unknown
  Obtained from environmental sample
  misc_feature (1)..(759): n is a, c, g, or t
atgcggaaagccgaggaaggaattaaaaagctgcgcgagtttgttgacaccctgataataattccgaatgagaatctgtttaaacttgttgacagcaaaacgacctcggtccaggcgtattcccttgcggacgatgttcttcaccaggcggtgcagagcatagttgagttaattattaagacaggattaataaatattgatttcgcggacgtccagtcgaccatgaaggatcagggagacgcccacatgggaatagggattggcagaggggacaaccgcgccaaggcggcagccgacgcggccattgacaatcctcttctggaagacaccggcatcgagggcgcgacgcggcttttggtcaacatttccggtcccgaaaccgtctccatgcttgaggttaaggatataatggcggccatcaaggcaaaagcgtctccaaatgttgaaatcatttttggccaatacattgaacctgaactgggtgaggatatcaaggtaaccgtcatagccacgggtttcaacgccaaaagcgcgtcgtcggtaaagagttccgactcgggcagaaaagcggaaaccgctcccggcgatgtgctcagcattgagcattttaacagaatacggcagggttccggcacccacagcagtgataactatgtcggaattgtaaacaggtccagggatattagtaataatctggatattcccacgtatgtccgaaaaaatacccttgaagaactggacaaagcggcgtcaagataa

SEQ ID NO: 14890 - protein, 252 aa, Unknown
  Obtained from environmental sample
  DOMAIN (64)...(187): Tubulin/FtsZ family, C-terminal domain
  misc_feature (1)..(252): Xaa is any amino acid
MRKAEEGIKKLREFVDTLIIIPNENLFKLVDSKTTSVQAYSLADDVLHQAVQSIVELIIKTGLINIDFADVQSTMKDQGDAHMGIGIGRGDNRAKAAADAAIDNPLLEDTGIEGATRLLVNISGPETVSMLEVKDIMAAIKAKASPNVEIIFGQYIEPELGEDIKVTVIATGFNAKSASSVKSSDSGRKAETAPGDVLSIEHFNRIRQGSGTHSSDNYVGIVNRSRDISNNLDIPTYVRKNTLEELDKAASR

SEQ ID NO: 14891 - DNA, 495 bp, Unknown
  Obtained from environmental sample
  misc_feature (1)..(495): n is a, c, g, or t
ttgatcccatggggaggcgtcagcggcccggccctcatcgcagaaggttgcgatgtgattgcccagcactgcgatacggcgattccccagctagaggctgaaaaggcgaagatatggggcatcggctacaacaccgatatgaggagcgaagctccaggagcagtcctcacttcggtactctggcattggggcgcgtattatactatgctggttcaaagcgttattaacggcgcctttaccccaacgccctggtatggttcaatgaaagacggcattgtgcagctttcccccctgagtgaaatcataacctgggaacctgagactctccgtatacttaaagaagaacaagaacgcatcgaatccggcgtgtttgatgtgttcttcggagttatggaaaccaatgatggccggcgtgtgggcagggaggcagaaaacctgccggatgcggtaatcagaaatgaaattaattggtattaccggaacgtaatggaatga

SEQ ID NO: 14892 - protein, 164 aa, Unknown
  Obtained from environmental sample
  misc_feature (1)..(164): Xaa is any amino acid
MIPWGGVSGPALIAEGCDVIAQHCDTAIPQLEAEKAKIWGIGYNTDMRSEAPGAVLTSVLWHWGAYYTMLVQSVINGAFTPTPWYGSMKDGIVQLSPLSEIITWEPETLRILKEEQERIESGVFDVFFGVMETNDGRRVGREAENLPDAVIRNEINWYYRNVME

SEQ ID NO: 14893 - DNA, 333 bp, Unknown
  Obtained from environmental sample
  misc_feature (1)..(333): n is a, c, g, or t
ttggacgatagacgcaatagaaaggctataaaggaggacagtatgaaagtaatctacaaaattacctaccctaacaagaaaatctatgtcggcaaggactcaacaggcgacattctacggtatttcggcagtccctacaggaaatacgttgaaaaggattttacttggaaacaattacaggatataaccattcggaaaaaaatacttttttccagcgaagatatatccgagtctgaattgagaaaaaaggaaaccgaatttattgtaaaactcggttccaacaaccccgacaaaggttacaacatacgaccgaaatggaaggcgaaaaagtaa

SEQ ID NO: 14894 - protein, 110 aa, Unknown
  Obtained from environmental sample
  misc_feature (1)..(110): Xaa is any amino acid
MDDRRNRKAIKEDSMKVIYKITYPNKKIYVGKDSTGDILRYFGSPYRKYVEKDFTWKQLQDITIRKKILFSSEDISESELRKKETEFIVKLGSNNPDKGYNIRPKWKAKK

SEQ ID NO: 14895 - DNA, 417 bp, Unknown
  Obtained from environmental sample
  misc_feature (1)..(417): n is a, c, g, or t
atgcccggcgacgacgtaacacaccccgtaccggacaatacaggatatattacggaaggccagtactatcttaaaaacggccgcatcgaaccgttcggctctctttcccgtcttaaacagcaggttaacggcaaaacgcgcgaagaccaccgcgccctcatggacggcatgatcaaactttattcggctttccgcgacacaatggaaaagaaagcgatgggctttatcatgaccaactgggacgagaagctcttaaaatacggcgatcagtttgaaaagaggatgatgtccctttccgtaaatattccgttggaaaaagcgctggatcttgggtgggagattttatcttcctgctttaaccctgaagagacaggattaagaaccgaacttattaataagttctggccgaaaaattag

SEQ ID NO: 14896 - protein, 138 aa, Unknown
  Obtained from environmental sample
  misc_feature (1)..(138): Xaa is any amino acid
MPGDDVTHPVPDNTGYITEGQYYLKNGRIEPFGSLSRLKQQVNGKTREDHRALMDGMIKLYSAFRDTMEKKAMGFIMTNWDEKLLKYGDQFEKRMMSLSVNIPLEKALDLGWEILSSCFNPEETGLRTELINKFWPKN

SEQ ID NO: 14897 - DNA, 762 bp, Unknown
  Obtained from environmental sample
  misc_feature (1)..(762): n is a, c, g, or t
gtggcggtggcggacacaggggttgggataagcgaggaagcccggaaaaggctctttaccagttttatgcaagccgatgtttccaatacccggcgcttcggtggaaccggccttggcctggccataaccagggagcttgtagaactcatgaacggccaaatcgagatgatccccaatggtaaaaagggctccgtttttcagttcactatccccctggaattacagaatgaggaattggtctcattgcctgttatagaaaaaatcgaagccgtccgcgccctggtagtggatgaccgggacgagccccgggcgatcctttcttcctacttgaaggatcttggctgccctcatgttgattccgccgcgtcaggacaagaagcgctggaaatgatgcggagcgccgcttcccggaaaactccctataccctttgtttcctggatgaagcaatgccgtgtatggacggctggaggctggctgcggaaatccataataaccaatatatcgaggacccacatatcaataaaacaaactttgttttactggttccccttggccacgcaaacgttcacggcgaacaccacgccgataccaaaaaactgccctcaaaatggttcaaggcaaggatcagcaagcccgtcaagcggaaggagcttgtggaaacgatccgtgttgttcttcangaacaccttgagggtccagagtatgcctcagaacgaatacaccgggaaaccggaagcgttacccgcgggaatttccggtga

SEQ ID NO: 14898 - protein, 253 aa, Unknown
  Obtained from environmental sample
  DOMAIN (91)...(223): Response regulator receiver domain
  misc_feature (1)..(253): Xaa is any amino acid
MAVADTGVGISEEARKRLFTSFMQADVSNTRRFGGTGLGLAITRELVELMNGQIEMIPNGKKGSVFQFTIPLELQNEELVSLPVIEKIEAVRALVVDDRDEPRAILSSYLKDLGCPHVDSAASGQEALEMMRSAASRKTPYTLCFLDEAMPCMDGWRLAAEIHNNQYIEDPHINKTNFVLLVPLGHANVHGEHHADTKKLPSKWFKARISKPVKRKELVETIRVVLXEHLEGPEYASERIHRETGSVTRGNFR

SEQ ID NO: 14899 - DNA, 537 bp, Unknown
  Obtained from environmental sample
  misc_feature (1)..(537): n is a, c, g, or t
ttgcgcgaagttgacgacgtgcgcaaacttgccgcgtatctttctcaggctgtggagccgattaaagagatgggcgttcttcttgattcgcaaagcgctcttcttaccgaaatccccagcatttggcctgtcaaaggcggcatagggagcatttcaatgttcttcggccagaatattaacccgataagcgggcagtactatattcacaagggaattgatatttccacccaccgggcaggcgatcaggttttggcgaccgcagacggccaggtagtggctaccgaatataccaacgacttcggcaattttgtaattatcaggcacaagcacggttattatacccgttacgcgcacttgcagagcagcagggtaaaactcgggcagagcgttcagcagggcgaagttatcggttatatcggaaataccggcatatccaccgggccccacctgcattacgaagttcatatcggttcagatgttgtagatccctatcgctatattacccttcgttccagagttgccaaacaaggacattaa

SEQ ID NO: 14900 - protein, 178 aa, Unknown
  Obtained from environmental sample
  DOMAIN (67)...(163): Peptidase family M23
  misc_feature (1)..(178): Xaa is any amino acid
MREVDDVRKLAAYLSQAVEPIKEMGVLLDSQSALLTEIPSIWPVKGGIGSISMFFGQNINPISGQYYIHKGIDISTHRAGDQVLATADGQVVATEYTNDFGNFVIIRHKHGYYTRYAHLQSSRVKLGQSVQQGEVIGYIGNTGISTGPHLHYEVHIGSDVVDPYRYITLRSRVAKQGH

SEQ ID NO: 14901 - DNA, 564 bp, Unknown
  Obtained from environmental sample
  misc_feature (1)..(564): n is a, c, g, or t
gtgcctgaagcaatcaggaacggcagccagccagcggtattcatgtccaaccacgaaagctacttggaccccccactgctcatgggggctatcccagtgcccgccgtgtacatagcaaagaggggggtcaaatggatgcccttcgtcggctgggcagcctgggtcggcgggatgatattcattgacaggggcaacagcaaaaaggccgcactgagcatgggaaacgcagcggaagagatcaggcgcggcaaaaacgtggtgatttttccagagggcacacgcagcaaaaatggcagggtgggcactttcaagaagggtggctttcgcctcgcagccgaagctggcgttcccatagtcccacttgcaacggtgggcggatgggacgtgctgcccaaggggacgctgacgccaaaaccaggcacaatccacgtggtattcggaaacgccgtgttccccggcagcttccccacaaaggaagcgttgatggaagaagtggagaggcagattaggggattggccgccggcatccgcccagtgcggtctggcgcggaaatccgcccatga

SEQ ID NO: 14902 - protein, 187 aa, Unknown
  Obtained from environmental sample
  DOMAIN (2)...(124): Acyltransferase
  misc_feature (1)..(187): Xaa is any amino acid
MPEAIRNGSQPAVFMSNHESYLDPPLLMGAIPVPAVYIAKRGVKWMPFVGWAAWVGGMIFIDRGNSKKAALSMGNAAEEIRRGKNVVIFPEGTRSKNGRVGTFKKGGFRLAAEAGVPIVPLATVGGWDVLPKGTLTPKPGTIHVVFGNAVFPGSFPTKEALMEEVERQIRGLAAGIRPVRSGAEIRP

SEQ ID NO: 14903 - DNA, 813 bp, Unknown
  Obtained from environmental sample
  misc_feature (1)..(813): n is a, c, g, or t
ttgacgccgagtcaggaagcgtgnngaaataacgcgcagggaatagagccggtaaagggaacttttcttggagcggctccctggagaagaataattgtttcttttgccggtcccctgtttaatctggtgtttgccgcgctggtgctgtcatgtatctggggcatcggttttgaggtgcaaactttagacagccggatagtgcttgcgtccgaactcacgaccaatacgctataccccgcagatgcggccggatttaagaccggcgaccggatcatcgcggtaaacggcaaaaaaaccgcttactatcatgaagttcaggagaacatagccaccaaccccgacaaactgctgcccgtaaccgttgaacggcagggggaaaccattacgttatacgtcacacccaatcttgacaaaagtaccggagcgggaaaaataggcgtttatttctggaacgatccggtagtcaccgctcttgttcccgacggagacgccgccattgcggggcttttgccgggtgaccggataatccgcgcaaacggcgagatggttaccaacaccattgattttatgaaggcgctggaaacacattccggtgtcgctgaaattgattatatgcgggacggggccgaaaacagggcaaaaattgtcatttcccggcccgatggagacggactgggtattatctggccgcgggtacagtacaaaacccccagcctctcgccgcctgcgggtgtggcaaaagggatatcggaaaagcttggaaaaccctggttatttcactgcgcaagatcggtctgccctttaagggcatag

SEQ ID NO: 14904 - protein, 270 aa, Unknown
  Obtained from environmental sample
  misc_feature (1)..(270): Xaa is any amino acid
MTPSQEAXXNNAQGIEPVKGTFLGAAPWRRIIVSFAGPLFNLVFAALVLSCIWGIGFEVQTLDSRIVLASELTTNTLYPADAAGFKTGDRIIAVNGKKTAYYHEVQENIATNPDKLLPVTVERQGETITLYVTPNLDKSTGAGKIGVYFWNDPVVTALVPDGDAAIAGLLPGDRIIRANGEMVTNTIDFMKALETHSGVAEIDYMRDGAENRAKIVISRPDGDGLGIIWPRVQYKTPSLSPPAGVAKGISEKLGKPWLFHCARSVCPLRA

SEQ ID NO: 14905 - DNA, 360 bp, Unknown
  Obtained from environmental sample
  misc_feature (1)..(360): n is a, c, g, or t
atgtcaagagcaatagacggttccaaacgcaagaaccatcgcaaaaagatacttaagctggcaaaaggttattggggccgcaggcactcaaactataaaacagccaaggacgcggtagccaagagcctttcgtatgcgtaccgggacaggaaggacagaaaaggcgattttcgcaggctatggatcatccgtataaacgccgcctgcagagctgaaggcctttcctattccaagtttgttgacggcctcaataaagcgggaatcaatattaacaggaaagccctggcttccctggcaattgacgattcaggcgcctttaaggaggttgtctcaaaggcaaaagccgcattggaggcatga

SEQ ID NO: 14906 - protein, 119 aa, Unknown
  Obtained from environmental sample
  DOMAIN (2)...(109): Ribosomal protein L20
  misc_feature (1)..(119): Xaa is any amino acid
MSRAIDGSKRKNHRKKILKLAKGYWGRRHSNYKTAKDAVAKSLSYAYRDRKDRKGDFRRLWIIRINAACRAEGLSYSKFVDGLNKAGININRKALASLAIDDSGAFKEVVSKAKAALEA

SEQ ID NO: 14907 - DNA, 567 bp, Unknown
  Obtained from environmental sample
  misc_feature (1)..(567): n is a, c, g, or t
ttgaaaggactatcagaattcaaaaacgaatgggcgctttgcgtttatttagccgaatcttttcctaaagaccacggcatattggctcctctttacctgaacatagttgaactggacaaaggatcggcgatgtacgtcccggcaggcatacttcacagttacatcaagggccttggaatagagcttatgaacgattccgacaatgtaatccgtggtggccttagttccaaatacatagacgaagcggagcttttaagcatattgaatttttcaaaatacaagccggaggtaatgaaggttcccagcccggctcccttccgctttacatacccggctccaatcgaaaattttgccctctctgtaatgcatggttcaggaggtacggccatttatgccgaggcaggcccgtcaatattggtagtaacctccgggcgcatgacaataaaccagaccatgtcttttagcaccggagaatcggcttttattcctccagataaaaacctggagctttcaggaacttttaccgcttatttagcttctgtaaaaattaaccaaaaagtctattaa

SEQ ID NO: 14908 - protein, 188 aa, Unknown
  Obtained from environmental sample
  misc_feature (1)..(188): Xaa is any amino acid
MKGLSEFKNEWALCVYLAESFPKDHGILAPLYLNIVELDKGSAMYVPAGILHSYIKGLGIELMNDSDNVIRGGLSSKYIDEAELLSILNFSKYKPEVMKVPSPAPFRFTYPAPIENFALSVMHGSGGTAIYAEAGPSILVVTSGRMTINQTMSFSTGESAFIPPDKNLELSGTFTAYLASVKINQKVY

SEQ ID NO: 14909 - DNA, 465 bp, Unknown
  Obtained from environmental sample
  misc_feature (1)..(465): n is a, c, g, or t
atgttcggcgaaatggccatccttgaaaattcgccaagatccgctacagccatagccctggatacagtcaaggtgctggaatttaacagccaaaattttgaaatcctcatgctgggaaaccctcaaatagcgcttaaactgctcaggatgttttccaagcgcatttacgattcaaagcgccgctttatgattctgaccctggaagaaccccaggcgaagatagccgatgtctttcttatgctggatgaaagccagtccgacatagacaaaagcaccgaaaggcgcgaatttaaaaccaccgtggatgatgtcgcgcactgggccggaatgactgtatccgacacccgtgatattcttggccattttgccactcagcatcgtattgagatgtttccggacagaatagcggtaaaaaatatcaatgacttttcacgctttgttaattcgcgaagaagaaagacctag

SEQ ID NO: 14910 - protein, 154 aa, Unknown
  Obtained from environmental sample
  misc_feature (1)..(154): Xaa is any amino acid
MFGEMAILENSPRSATAIALDTVKVLEFNSQNFEILMLGNPQIALKLLRMFSKRIYDSKRRFMILTLEEPQAKIADVFLMLDESQSDIDKSTERREFKTTVDDVAHWAGMTVSDTRDILGHFATQHRIEMFPDRIAVKNINDFSRFVNSRRRKT

SEQ ID NO: 14911 - DNA, 909 bp, Unknown
  Obtained from environmental sample
  misc_feature (1)..(909): n is a, c, g, or t
ttgcttatttgcgagagatgcgggcgacgcggtttcttggaggcaatcgtagagccggaggttatggtggacacggtcgaacaccaggcgagcgtggtcttcaaggtgagagaggggccggtagtcactatcggagagataaatatacagtcgaggggattcaaaaagtataccgtgaggcgggaactctccatacgcagcggagatacgctgaacctccgtaacgtgcgggagtcggagcgcaacctctacaccaccggcctcttcaactacgtgcagataaaaccgatgttcgactcctcggtagcggcggcggaattgccggacagcatatacgacgtgctggtgcgcgtgacgaggggcgagtacgtccgcatgcaggcgggcctcggctacagcaccgacgagggcgcgcgggtctccgccaccgctacgtggaggaacatgttcggcttggggcaaagtttgtcgctcagcaccaaactctcgcttgtctctcagggcgcggaggcggtccacgcgataccgtggtttctctacatgccggtgcagttaaataccaaactgtactacacgaggttcgataaacctaaactctacgagggaaatttcgacggtctgcgcctatcgctcggccgccaatccaacttcgatatactctaccaagtatggtcgcagtgggaggaggttcactggataaaggccccgtctcaagacgacgccgtaaccgaggttcccaactacccgacgcaaagtatcggcggcgacatagcctacgacgacaggaacgacctgttcagccccacaaaggggcggcttcgccaggctcagcgtggagttggcgggagtcttcggcgggaaatcgaatcatttcgtaaagacgaccttagactcgcgcgtctactttaa

SEQ ID NO: 14912 - protein, 302 aa, Unknown
  Obtained from environmental sample
  DOMAIN (42)...(121): Surface antigen variable number repeat
  misc_feature (1)..(302): Xaa is any amino acid
MLICERCGRRGFLEAIVEPEVMVDTVEHQASVVFKVREGPVVTIGEINIQSRGFKKYTVRRELSIRSGDTLNLRNVRESERNLYTTGLFNYVQIKPMFDSSVAAAELPDSIYDVLVRVTRGEYVRMQAGLGYSTDEGARVSATATWRNMFGLGQSLSLSTKLSLVSQGAEAVHAIPWFLYMPVQLNTKLYYTRFDKPKLYEGNFDGLRLSLGRQSNFDILYQVWSQWEEVHWIKAPSQDDAVTEVPNYPTQSIGGDIAYDDRNDLFSPTKGRLRQAQRGVGGSLRREIESFRKDDLRLARLL

SEQ ID NO: 14913 - DNA, 576 bp, Unknown
  Obtained from environmental sample
  misc_feature (1)..(576): n is a, c, g, or t
atggaagcgatcttggccggcgaggccgacgggatgctggtcgaggagccggtggccaggaagttcgcggcgcagcacccggaatcgctgatcgtgctctaccccaaggtggacagggaggactacgccaacctgttctgcaagaaggacgccggcaagatgcgcaccgagttcaacgctttcctgaaagcgatccaggccaacgggacctacaaggagatggtggagcgctggattgaaatgcccgagtcgccgccaatgccggagatcgtcctaaaccccgataaaaagccattggtcttcgccacctccgactgcgacctgccattctctttcaaggacggcaacggcgcgatcgtgggtttcgacgtggagatggcgctgcgcttcgcccagtccggcggctacggacttgaggtcaaggtgatggccttcccggacatcattccggcggtcgcgtccggctcgatagacttcgcggccaacctgatagccataaccgacgagcgtaagaacttcgtggacttctcggagcccgtgtacttcggggggacggtaatgctcgctcgtaagtaa

SEQ ID NO: 14914 - protein, 191 aa, Unknown
  Obtained from environmental sample
  misc_feature (1)..(191): Xaa is any amino acid
MEAILAGEADGMLVEEPVARKFAAQHPESLIVLYPKVDREDYANLFCKKDAGKMRTEFNAFLKAIQANGTYKEMVERWIEMPESPPMPEIVLNPDKKPLVFATSDCDLPFSFKDGNGAIVGFDVEMALRFAQSGGYGLEVKVMAFPDIIPAVASGSIDFAANLIAITDERKNFVDFSEPVYFGGTVMLARK

SEQ ID NO: 14915 - DNA, 426 bp, Unknown
  Obtained from environmental sample
  misc_feature (1)..(426): n is a, c, g, or t
atgattgcgagaataactttacaaaacaacctgatcgaatctgtacacaactacatagacatggatgccaaaataatgagaaaaggggcaatttccgctaaagaaaacgaaacctgcatcatcccaataaatatggcggatggggtgcttctgtgcaagggaaagggcaatcctgaatggaattgctcggctccacacggggcagggagagttctctcaagaagtcagtccaaaaagaacttctctatggacgaatacaaggaacgaatgggcaaagtctggagctcgtgcgtgaacgaatccacgcttgacgagtccccgatggcttacaagaaaatggattatctgatcagcttcataggagaaaccgtgaacgtactggaccatttgaaagaggtttacaattttaaggcggctgaaccttaa

SEQ ID NO: 14916 - protein, 141 aa, Unknown
  Obtained from environmental sample
  misc_feature (1)..(141): Xaa is any amino acid
MIARITLQNNLIESVHNYIDMDAKIMRKGAISAKENETCIIPINMADGVLLCKGKGNPEWNCSAPHGAGRVLSRSQSKKNFSMDEYKERMGKVWSSCVNESTLDESPMAYKKMDYLISFIGETVNVLDHLKEVYNFKAAEP

SEQ ID NO: 14917 - DNA, 468 bp, Unknown
  Obtained from environmental sample
  misc_feature (1)..(468): n is a, c, g, or t
ttgatcgcnagggacggacgcattttcagtttctggcatgggggtctttggcacggtatgtttttgatcacagaacgtttattcgggatgagagaagtacggagcaagaaaattattccgctgcgttatgcaatgacaatgctgatagttgttataggctgggttttcttccggtcttcggggctgcgttatgcgctgtcgtatcttggaataatgtttggtattgtacagtctgaaaacgtaggttttacagattggttttattttagcccaaaagtcatttttctactatgtttggcggtttttacatcaactcctgtattaaaacttgcaggtaattatttcaaaatacaggataacgttaccttgagaaaagcagcattggcgctgcttattgttcttttctttgtgtgcatagttattgttacttcgtcatcttacaatccgtttatctatttcaggttttag

SEQ ID NO: 14918 - protein, 155 aa, Unknown
  Obtained from environmental sample
  misc_feature (1)..(155): Xaa is any amino acid
MIARDGRIFSFWHGGLWHGMFLITERLFGMREVRSKKIIPLRYAMTMLIVVIGWVFFRSSGLRYALSYLGIMFGIVQSENVGFTDWFYFSPKVIFLLCLAVFTSTPVLKLAGNYFKIQDNVTLRKAALALLIVLFFVCIVIVTSSSYNPFIYFRF

SEQ ID NO: 14919 - DNA, 660 bp, Unknown
  Obtained from environmental sample
  misc_feature (1)..(660): n is a, c, g, or t
ttgagcatttccccctcctgttttattataacggtattagtcttcatggtgtactaccctgatttcgtcattaaaggacatgatccaacttctttagatattgttgtagattatctttctacccatacaaatatagactttttttgtatcaaagaacgccttttacgggagaaagaaaattacttattatatcctaaaaccggtaatataaatgaattgtgtcattataatgaaataggtgctttttttgcctacaatgaattgatgaaacacattagtaagtatttcccaaatttacagccgttcactttatatgatactaatataacatatcaaatcaacggttcggctagcgtaactctaaaacacgaaaaaaaatatgaacggattgaagcaagattctttgataatgctcttgagtttgaaaacaaggatacaagtttgcctacgcttttgcttttccatgatagttatgccagttggtttccaaattatctacctcaacactttagcagaacaattatgcatcattggggttttttaggacatcttgaagaatgtattgatttatacaagcccgatatcgttgtaattgagtctgcggaacgcgtaatacccgaattcgccgcctgtgtcgcaggaatccctgaactaccgtaa

SEQ ID NO: 14920 - protein, 219 aa, Unknown
  Obtained from environmental sample
  misc_feature (1)..(219): Xaa is any amino acid
MSISPSCFIITVLVFMVYYPDFVIKGHDPTSLDIVVDYLSTHTNIDFFCIKERLLREKENYLLYPKTGNINELCHYNEIGAFFAYNELMKHISKYFPNLQPFTLYDTNITYQINGSASVTLKHEKKYERIEARFFDNALEFENKDTSLPTLLLFHDSYASWFPNYLPQHFSRTIMHHWGFLGHLEECIDLYKPDIVVIESAERVIPEFAACVAGIPELP

SEQ ID NO: 14921 - DNA, 621 bp, Unknown
  Obtained from environmental sample
  misc_feature (1)..(621): n is a, c, g, or t
ttggaggaaaagttgaaaaggaacattctgttatttgcggtgttggccgcccttgtcatgaccggtatttcatgcgcgaaagatcggctaaacatttacaactggagttattataccccgccatcggtgatcgaaaagttcgaaaaagaatacggtgtccgtgtaatcgtagatgaatacgccagcaacgaggaaatgtataccaagctcaagaccggaggaaccggctacgaccttgtgtttccttcgcaggattatgtgtcgatcatgatccaccaggatatgtttgaaaaaatcgacagaagtttaattccgaatcttaagaacattgatccggcggtactcaaaaaaaccgattacgatcccaatatggactattcggttccctattactggggagccgccggcatcctggtgaacacaggcaaagtgccgaatttcgaaaggagctggtcaatttttggccgcagcgatctccgcggcaggatgaccatgctggacgacatgagggaggtgatgggcgatgctttggtatacttgggttactcggtgaacagcaaaaacccaaccgagattgaagcggcaaagaacctgattaacaaccagtggaagccaaattga

SEQ ID NO: 14922 - protein, 206 aa, Unknown
  Obtained from environmental sample
  SIGNAL (1)...(26)
  misc_feature (1)..(206): Xaa is any amino acid
MEEKLKRNILLFAVLAALVMTGISCAKDRLNIYNWSYYTPPSVIEKFEKEYGVRVIVDEYASNEEMYTKLKTGGTGYDLVFPSQDYVSIMIHQDMFEKIDRSLIPNLKNIDPAVLKKTDYDPNMDYSVPYYWGAAGILVNTGKVPNFERSWSIFGRSDLRGRMTMLDDMREVMGDALVYLGYSVNSKNPTEIEAAKNLINNQWKPN

SEQ ID NO: 14923 - DNA, 750 bp, Unknown
  Obtained from environmental sample
  misc_feature (1)..(750): n is a, c, g, or t
gtggaagcaggattttccggttcgggcaccgaaatgatcgaggaggaagtgcgccggacttttccagatctcaggataatgaggattgacgcggataccaccgaaaaaaaaggaagcctgaaaaaagcccttgatcattttaaggccggagaagttgacatccttcttggaacgcagatggtagcgaagggtcttaactttccgggtgtgcggcttgtgggagtaatactggcggacatgggccttcaactgcctgattttcgggcggctgaaagaacctttgcgcttgtggtacaggtggcgggaagatccggacgctacttcagcgacggcaaagttgtcgttcaaaccctccgcccttgggatcccgccattgtgaaatcctgcgccctggacgtggaaggtttttttgaaacagagctaaaccagcgccaggccctttcattcccgccgtatacaaggctaatacgttttaccttccgctccagggacgaaaaaagaacgcaagccgccgccgccgccctcgcctcaatcgccacgccccttctgccgcctgacgccgacgccttgggccccgccgagtgtccgcttggagtaatatcgaaccagtacagaaggcatctgattcttcgcggcaagaacatgggaaccctgcacgccgcggccggggccatgcttgcccaatacgaaaaacgaaaagacagcaaggtttatcttgaagttgacgtagacccggtgagcttgttgtaa

SEQ ID NO: 14924 - protein, 249 aa, Unknown
  Obtained from environmental sample
  DOMAIN (18)...(108): Helicase conserved C-terminal domain
  misc_feature (1)..(249): Xaa is any amino acid
MEAGFSGSGTEMIEEEVRRTFPDLRIMRIDADTTEKKGSLKKALDHFKAGEVDILLGTQMVAKGLNFPGVRLVGVILADMGLQLPDFRAAERTFALVVQVAGRSGRYFSDGKVVVQTLRPWDPAIVKSCALDVEGFFETELNQRQALSFPPYTRLIRFTFRSRDEKRTQAAAAALASIATPLLPPDADALGPAECPLGVISNQYRRHLILRGKNMGTLHAAAGAMLAQYEKRKDSKVYLEVDVDPVSLL

SEQ ID NO: 14925 - DNA, 468 bp, Unknown
  Obtained from environmental sample
  misc_feature (1)..(468): n is a, c, g, or t
ttgcacgagggtaagggtctcgaacatctcatcgagcgtgccgaacccgcccggcataactataaccgccgacgtatacttcagaaacattaccttgcgcacgaagaagtgcttgaaactgagcattgtttttatgtaagggttggcgtgttgctcaaacggaagttgtatgttgagccctatggagacaccgccctcctcgtgagcgccgcgattagcggcctccattatgccgggaccgccgccggtaatcacgccgaaaccgctgcgcacgacctccttagcgacttcaaccgtcaacttgtagtggggatgatcgacggaagtccgcgcgctaccgaaaattgtcacgcaacgatcgcacttagagagtgtctcaaacccctccacgaactcggccattatccgaaatatgcgccacacgtctttgttcatcgcgtcggccaccggcccttttacttgttttga

SEQ ID NO: 14926 - protein, 155 aa, Unknown
  Obtained from environmental sample
  misc_feature (1)..(155): Xaa is any amino acid
MHEGKGLEHLIERAEPARHNYNRRRILQKHYLAHEEVLETEHCFYVRVGVLLKRKLYVEPYGDTALLVSAAISGLHYAGTAAGNHAETAAHDLLSDFNRQLVVGMIDGSPRATENCHATIALRECLKPLHELGHYPKYAPHVFVHRVGHRPFYLF

SEQ ID NO: 14927 - DNA, 663 bp, Unknown
  Obtained from environmental sample
  misc_feature (1)..(663): n is a, c, g, or t
gtggccgacgcgatgaacaaagacgtgtggcgcatatttcggataatggccgagttcgtggaggggtttgagacactctctaagtgcgatcgttgcgtgacaattttcggtagcgcgcggacttccgtcgatcatccccactacaagttgacggttgaagtcgctaaggaggtcgtgcgcagcggtttcggcgtgattaccggcggcggtcccggcataatggaggccgctaatcgcggcgctcacgaggagggcggtgtctccatagggctcaacatacaacttccgtttgagcaacacgccaacccttacataaaaacaatgctcagtttcaagcacttcttcgtgcgcaaggtaatgtttctgaagtatacgtcggcggttatagttatgccgggcgggttcggcacgctcgatgagatgttcgagacccttaccctcgtgcaaacgcagaaggtggactccatgccggtcgtccttatcgggaaggattattgggcagggcttgtcgattggctgaaagccaagatgctagacgaaaacaagtacatagacgccgacgatattccgttgatgtacatcaccgacgatccgaaggaggccgtgcgggtgattaccgagcgtttaaagaaaagcgagcctaaatcaagtttcgatttttaa

SEQ ID NO: 14928 - protein, 220 aa, Unknown
  Obtained from environmental sample
  DOMAIN (74)...(208): Possible lysine decarboxylase
  misc_feature (1)..(220): Xaa is any amino acid
MADAMNKDVWRIFRIMAEFVEGFETLSKCDRCVTIFGSARTSVDHPHYKLTVEVAKEVVRSGFGVITGGGPGIMEAANRGAHEEGGVSIGLNIQLPFEQHANPYIKTMLSFKHFFVRKVMFLKYTSAVIVMPGGFGTLDEMFETLTLVQTQKVDSMPVVLIGKDYWAGLVDWLKAKMLDENKYIDADDIPLMYITDDPKEAVRVITERLKKSEPKSSFDF

SEQ ID NO: 14929 - DNA, 678 bp, Unknown
  Obtained from environmental sample
  misc_feature (1)..(678): n is a, c, g, or t
gtggcgttcgatatacataagcggcgttaccgccgctttaataaggagttaaagatggcattaacggacaagattgagattccaagaaggacgatggtattgttctttgtcattgacacatcgggcagcatggacggaagcaagataggggcggtgaacaccgctatcgaggaagttatccctgccatcaaggaattgtcggacgagaacgcggacgcgcagataaaaatcgcggcactggaattttcttcaggcgctcgctggatcacaacaagcggccctgttgaagccgataagttccgctggacctttctggacgccgcaggcgttaccgactttggggccgcctgcaaaatattgaatgataaactttcgacaaaggcttttatgcaggaagcgactggttcgtttgcgcccgcgatatttttgctttctgatggggagccgacagatgacgactgggcaaaagagctggcaaagctaaagcagaacaactggttcaaagcggcggtcaaggtcgcagtcgccataggcgatgacgcanacaaggaagtgcttaaggaatttaccggctccatggaagcggttctggaagtacataacgcggcggtattaaagaagatgataaaatttgtcagtgtccgcgcatcccaggttgcaagcaagagttccatgtaa

SEQ ID NO: 14930 - protein, 225 aa, Unknown
  Obtained from environmental sample
  misc_feature (1)..(225): Xaa is any amino acid
MAFDIHKRRYRRFNKELKMALTDKIEIPRRTMVLFFVIDTSGSMDGSKIGAVNTAIEEVIPAIKELSDENADAQIKIAALEFSSGARWITTSGPVEADKFRWTFLDAAGVTDFGAACKILNDKLSTKAFMQEATGSFAPAIFLLSDGEPTDDDWAKELAKLKQNNWFKAAVKVAVAIGDDAXKEVLKEFTGSMEAVLEVHNAAVLKKMIKFVSVRASQVASKSSM

SEQ ID NO: 14931 - DNA, 624 bp, Unknown
  Obtained from environmental sample
  misc_feature (1)..(624): n is a, c, g, or t
ttggccctgctcctgaacgaagtgcgccattcgtctttcaagcgtttcatccagactgtaacgtacctcccccacttcatttccatgattgtcgtcgccggcattatcgttgacttttccatgtccactggcctgtttaacgacataatcgtcttctttggcgggaacaggttccccttactccagcagcccaacctgtacaggcccatttatatcacctcggatatctggcagcacataggctgggggacaatcatttacctctctgccctgtcggcaatagacccccagttgtacgaagccgccatgatagacggggccgggcgcttcaagcaggtcctccatgttacgctcccgtcaattgcccctaccatcgttattcttttgatcctgcgggttgggcaccttctgagcgtcggctacgagaaaaccattttattgtacaaccccgcgacctacgagacagcggatataatttccacctatgtgtaccgggcggggcttctggaacagaactggagttattccaccgccatcggcctctttaactcggtgattaactttacgttgataatcctcgccaacaggattagcccgcaaggttcagaaacgagtctctggtag

SEQ ID NO: 14932 - protein, 207 aa, Unknown
  Obtained from environmental sample
  misc_feature (1)..(207): Xaa is any amino acid
MALLLNEVRHSSFKRFIQTVTYLPHFISMIVVAGIIVDFSMSTGLFNDIIVFFGGNRFPLLQQPNLYRPIYITSDIWQHIGWGTIIYLSALSAIDPQLYEAAMIDGAGRFKQVLHVTLPSIAPTIVILLILRVGHLLSVGYEKTILLYNPATYETADIISTYVYRAGLLEQNWSYSTAIGLFNSVINFTLIILANRISPQGSETSLW

SEQ ID NO: 14933 - DNA, 333 bp, Unknown
  Obtained from environmental sample
  misc_feature (1)..(333): n is a, c, g, or t
atgatggaacctttgcagatcgaaattgactgcgcagtaaacggcgtggaagcggtagaaatgttttccgcggaaccggatcgctacgatttgatttttatggatttgcaaatgccggtaatggacggctttgaagcttcccgcgaaattcgcaatttaaattttgaaaaggcaaagacggttcccatcgttgccatgacagcaaatgttttccgcgaggatgttgaaaaatgcctggaggccggtatgaacgaccacatagggaaacctctggactttgacaaagtgctggaaaagttaaggctttttctggcagcggaatcgggggagtaa

SEQ ID NO: 14934 - protein, 110 aa, Unknown
  Obtained from environmental sample
  DOMAIN (1)...(101): Response regulator receiver domain
  misc_feature (1)..(110): Xaa is any amino acid
MMEPLQIEIDCAVNGVEAVEMFSAEPDRYDLIFMDLQMPVMDGFEASREIRNLNFEKAKTVPIVAMTANVFREDVEKCLEAGMNDHIGKPLDFDKVLEKLRLFLAAESGE

SEQ ID NO: 14935 - DNA, 612 bp, Unknown
  Obtained from environmental sample
  misc_feature (1)..(612): n is a, c, g, or t
atgtttgaagagcgtttgtcttctttcaaaaaagtttggacacagggaagcgatataaaaatattctcggaattatgctattgtctgtgtacagcgagagaaaaagcgaaaaatgccttaaatgccattgattcattatcaaaaaataattatgagattttaattaacggcaataagaataaaatagataaagttttatgcgagaataatattgcgttacatcctgataaagcggatcgaataattaaaaatagaaaaatattttatccaaataccagaaatattttacagtccaaatattgctttgatgatattaaaaaagcccgtgaagaacttgtgcgtgatgtagtcgggtttggatttaaggaggcgtcccattttttaagaaatatcgggtttggcgggaatttggcgataattgatcggcatattaaaaaccaattaataaaatacggagtaatagcggaagatacaaaatccgcgtccattaccaaaaagcggtattacgaaattgaggaaaaaatgatacaatttgcccgtaaaattaaaataccggtagacatcctggacatgttgttaatatatgctgaaaataaagaaataataaaataa

SEQ ID NO: 14936 - protein, 203 aa, Unknown
  Obtained from environmental sample
  misc_feature (1)..(203): Xaa is any amino acid
MFEERLSSFKKVWTQGSDIKIFSELCYCLCTAREKAKNALNAIDSLSKNNYEILINGNKNKIDKVLCENNIALHPDKADRIIKNRKIFYPNTRNILQSKYCFDDIKKAREELVRDVVGFGFKEASHFLRNIGFGGNLAIIDRHIKNQLIKYGVIAEDTKSASITKKRYYEIEEKMIQFARKIKIPVDILDMLLIYAENKEIIK

SEQ ID NO: 14937 - DNA, 783 bp, Unknown
  Obtained from environmental sample
  misc_feature (1)..(783): n is a, c, g, or t
atgcccgattttgtacggcttgccaccatctggaagccggacgccattgacggcatggacagccgttatataggccgccccggctcaaccgaaacggggcagttcgcttatacactgtcaagggaaaccgggcagatagaggtacaggccagcaccatcattcaggagacaattgccatattgaacagttcaagcggcagagtagtcaatatgagcgaccccgccccctttaaaaatcatggaatagatacatacgctgtcagaattaccgtacccattatcaataagaggatcaatgacgtggtcggagccgtaatcgcccagttggatattggcataatacaaccaactgtagaaaacactcttaaaaccagcaaggaagttaccagcgcggttctttattccaacaacgggtttattttggcgaattatatgccggagtttataggaaagcaaattgacgcggaaacgcaatacggccaccagttagacgccgtcaaaacagctattaaaaactcgaaagaatggctgggagaagagtatgaccccggaatacatactaaggtggtaatggcagtagccactattcccatagggtcttctccgacaacatggtcgataatgatcggctcatccgaagactacatcatgcaggacgtcgagaggatgattgaatttaccattattctggcggcggtggcgcttatcgcgtctgtgttagttgtttatttgatcataaacgccgttaccaggccaatcgtcatggtaaccgaaaacccttag

SEQ ID NO: 14938 - protein, 260 aa, Unknown
  Obtained from environmental sample
  misc_feature (1)..(260): Xaa is any amino acid
MPDFVRLATIWKPDAIDGMDSRYIGRPGSTETGQFAYTLSRETGQIEVQASTIIQETIAILNSSSGRVVNMSDPAPFKNHGIDTYAVRITVPIINKRINDVVGAVIAQLDIGIIQPTVENTLKTSKEVTSAVLYSNNGFILANYMPEFIGKQIDAETQYGHQLDAVKTAIKNSKEWLGEEYDPGIHTKVVMAVATIPIGSSPTTWSIMIGSSEDYIMQDVERMIEFTIILAAVALIASVLVVYLIINAVTRPIVMVTENP

SEQ ID NO: 14939 - DNA, 567 bp, Unknown
  Obtained from environmental sample
  misc_feature (1)..(567): n is a, c, g, or t
atgattggaggtatacatatgacaaagcacgcacttttattaatattctgtctggttatgcttatagcagcgacagctattcatgcccagggcttttttggccctggctcctttcttacgccacccccaggaggcccaggttatggtccaccgccgcctcttggaggtccaggttttggcccaccgccacccccagggccaggtctaaaccatcctcatcctgggccgggacatgcccctcctccttcgtcaatttatggaactcaaggctggtacgggttcacaggccaggttcagactgtcaccgtagaacaggtaaaaacttttacacacagaactccggtaattgtagcaggcactattgttcaggctattggcggtgatttttatctatttcgtgattcatcaggggaaataatgcttaaaataggccccaatgaatggtacaccctgggttcaacgatcagtccgtctgaacaaattgaaatcagcggcgaacttcacagaaatccaagagactggcaaggagtgcctgaaattcacgcaagatatatcaggaaattgtag

SEQ ID NO: 14940 - protein, 188 aa, Unknown
  Obtained from environmental sample
  SIGNAL (1)...(23)
  DOMAIN (81)...(187): Domain unknown function (DUF388)
  misc_feature (1)..(188): Xaa is any amino acid
MIGGIHMTKHALLLIFCLVMLIAATAIHAQGFFGPGSFLTPPPGGPGYGPPPPLGGPGFGPPPPPGPGLNHPHPGPGHAPPPSSIYGTQGWYGFTGQVQTVTVEQVKTFTHRTPVIVAGTIVQAIGGDFYLFRDSSGEIMLKIGPNEWYTLGSTISPSEQIEISGELHRNPRDWQGVPEIHARYIRKL

SEQ ID NO: 14941 - DNA, 888 bp, Unknown
  Obtained from environmental sample
  misc_feature (1)..(888): n is a, c, g, or t
ttgtacaaccgccgattcctgtacaaagccagcgtaacccctgaaattcagttagataccaataccaaggaagttcgtagctacaaccgagctttgtggcgaggtatgaaaatgataagcgaacgccctctttctacaaatattttcataaacattgtgcaagaaatcaaacaagatactgctggaattcgcgttattcccggtactgttttaaaaaatcctgttaccggagaagttgtttatactccaccaaacggagaaaatgttattcgtgataaattgaaaaatctggaagattttttatattcaccgcaatacgccgaaattgaccctttgataaaattagctgttatgcactatcaatttgaggctatacatccgtttgcagacggcaatgggcgtacagggcgcattataaatattctttggctggtacaggaaaaattgctgaaccgtccaattttattcttgtcaaaatattttcttagtcataaggaagaatattacaatggtttaagaaaggtcacttcggatggtgaatgggaaaaatggattttgtatgtgctggatgcggtggaacaaacagctcgcgatactggtgaattgatagataaaatcatagatgctcgcagggaatgcaaagacgaattgaaatcttattttccaaaaatatattctttagatttggttgagacaattttttctgcgccatacttcagaatggaagactatttgcggaaaaatccaacaattagtcgccaaacggcatcaaaatatttgcatcagctttgcagcccttacaagcgaaaagacaatataacggcacaaatcttaaaaatataccgctcagggagagagaatatattttttcaatcaggctatgtttga

SEQ ID NO: 14942 - protein, 295 aa, Unknown
  Obtained from environmental sample
  DOMAIN (25)...(178): Fic protein family
  misc_feature (1)..(295): Xaa is any amino acid
MYNRRFLYKASVTPEIQLDTNTKEVRSYNRALWRGMKMISERPLSTNIFINIVQEIKQDTAGIRVIPGTVLKNPVTGEVVYTPPNGENVIRDKLKNLEDFLYSPQYAEIDPLIKLAVMHYQFEAIHPFADGNGRTGRIINILWLVQEKLLNRPILFLSKYFLSHKEEYYNGLRKVTSDGEWEKWILYVLDAVEQTARDTGELIDKIIDARRECKDELKSYFPKIYSLDLVETIFSAPYFRMEDYLRKNPTISRQTASKYLHQLCSPYKRKDNITAQILKIYRSGRENIFFQSGYV

SEQ ID NO: 14943 - DNA, 378 bp, Unknown
  Obtained from environmental sample
  misc_feature (1)..(378): n is a, c, g, or t
gtgcttgagtcctacaaaaccgcggcgatcctccacaagcacgcgaaaggaattccctccgctgcctgggcggaaccgcccctcatgctttttgaaaacaacaagaaaatatttgagcgttttataagcggcaaaatcggaaccatcgcgaaggatcactacgcggacatcatcatcgtcgattattccggcccgaccccggtcaacgcggacaccataaacagccatatcctctttggcataacgggccgtcatgtggataccacgataatcaacggcagaatcgtcatgaaaggcagggttttgctcgacatcgacgaggaagctttgatggctaaatcccgtgagcaggcgcaaaaactttgggagcggatttag

SEQ ID NO: 14944 - protein, 125 aa, Unknown
  Obtained from environmental sample
  misc_feature (1)..(125): Xaa is any amino acid
MLESYKTAAILHKHAKGIPSAAWAEPPLMLFENNKKIFERFISGKIGTIAKDHYADIIIVDYSGPTPVNADTINSHILFGITGRHVDTTIINGRIVMKGRVLLDIDEEALMAKSREQAQKLWERI

SEQ ID NO: 14945 - DNA, 678 bp, Unknown
  Obtained from environmental sample
  misc_feature (1)..(678): n is a, c, g, or t
gtgcttttggaaaaagtcaagcgcttattgctccgtctgctggctggcaaaaaagagcaggaccataaagaggaatctgtaaaattagtgatggattttttgacaaaactcccaaaaatcagggcaagcctcgccaccgacgttgaggccgcgtttgatagcgacccagcagctataggcaaagaggagattatcatctcttatccgggcatttatgccatatcaatttacaggcttgcacatgagctttacctattcaacatcccgatgctcccacggataatgaccgaatacgcccattcagtgacgggaatagatattcaccccggagcgcaaataggcgattattttttcatagaccacggaacaggcattgtaataggcgaaacaacggttataggcgagcacgtgaaaatttatcaaggggtaactttgggcgcactctccacaaaaggcgggcagagcttgagagggaaaaagagacacccaacggtagaagataatgtgaccatatattctggagcttccatttttggcggagatacggttataggcaaaaattccgtgctgggcagcaatgtgtttgtaacggaatctattccggccgattcaaaattgagcatatatgacagacctattaaaagaaaatcacaaaaatattggtattatgagatttag

SEQ ID NO: 14946 - protein, 225 aa, Unknown
  Obtained from environmental sample
  misc_feature (1)..(225): Xaa is any amino acid
MLLEKVKRLLLRLLAGKKEQDHKEESVKLVMDFLTKLPKIRASLATDVEAAFDSDPAAIGKEEIIISYPGIYAISIYRLAHELYLFNIPMLPRIMTEYAHSVTGIDIHPGAQIGDYFFIDHGTGIVIGETTVIGEHVKIYQGVTLGALSTKGGQSLRGKKRHPTVEDNVTIYSGASIFGGDTVIGKNSVLGSNVFVTESIPADSKLSIYDRPIKRKSQKYWYYEI

SEQ ID NO: 14947 - DNA, 756 bp, Unknown
  Obtained from environmental sample
  misc_feature (1)..(756): n is a, c, g, or t
ttggttatagggctggtaagaaaactgattaagccggtgtttcttgcggcgcttaccactatggcgggttttatatcgttctgttttacgccgattgtcccaatgagggaattcggctattgcgcgagcttcggggtattcgccgcctttgccgtggctgtgttgtttattccctcaatgttcctgcttcgcggcccccgcgttctgaaaggcaagcagaaagaaaaaaccagcagcggttttaacaatactatcgccgtattttttaccggtattgcggagaaaaaagttcttgtactgattattgcggcgctggccgtggtaatttcgttatacggactttcaaaggttatagttgataacgcggtggttgaattctttaagaacgaaacagacataagccgctctgaccgctttatccgcgagtattttggcggttcaaaggatttaagcctggtggttacggcggacactacggaagaacttctgcaccctgacgtgttacaggcggtggataacctttccgcttatcttaccgcgaatgttccggctgtgggcaaagtcgtcggttttacggatattatcaagcggatcaatcaggtgttcaatgtcagcgaaagccctgatgggctgcagcgttccatttcgcataacgtctctggtaacgacttannggggtcggttatagtgataacgacaccgcgggttttggttttggaaattttagttttggcaatgatgctgttgaaattctga

SEQ ID NO: 14948 - protein, 251 aa, Unknown
  Obtained from environmental sample
  SIGNAL (1)...(30)
  misc_feature (1)..(251): Xaa is any amino acid
MVIGLVRKLIKPVFLAALTTMAGFISFCFTPIVPMREFGYCASFGVFAAFAVAVLFIPSMFLLRGPRVLKGKQKEKTSSGFNNTIAVFFTGIAEKKVLVLIIAALAVVISLYGLSKVIVDNAVVEFFKNETDISRSDRFIREYFGGSKDLSLVVTADTTEELLHPDVLQAVDNLSAYLTANVPAVGKVVGFTDIIKRINQVFNVSESPDGLQRSISHNVSGNDLXGSVIVITTPRVLVLEILVLAMMLLKF

SEQ ID NO: 14949 - DNA, 711 bp, Unknown
  Obtained from environmental sample
  misc_feature (1)..(711): n is a, c, g, or t
atggatatttcctcgcaaatgatacgggataagataaaaacgatcagggatgagcgttctcttgtgcctgccggagcaagcgcaatatncgaagacaggcggctttacggctataacggcagtgtacaggataaagattgttccatggaagttattttacgcatagaggatgaggcgcgcagggttcttactatagagcgttttcttcattccagaaacactgcccttttggcgcatgatctttgcctccgcttcggcataaatccaaagatgggctaccttgcgggaattgcccacgatttagcaaaacagatggagcccaaacttttattgaaaatggtgaaggacgacggcctgccggttacggaaattgaaaagggaaaaccaaatcttcttcacggaagggcggcggcggtattgctaaaggagcgcttctgtattcataataaagatgtgcttgaggcggtggcatttcatacgtccggaaaagaaaatatgagcccgctggcgaaagtggtttatattgccgacaaaattgaagtgtcaaggaatatagatcccgctttaagaaaaatgtgcgtaaatgaagatttagacagcattctttatgctgttctgaaaaagcaaatcggcaagctgcagtcaaagggagtgaatttgttcgaggatacattgcggctgctgaacaagatgaaggaaagagcgcgttga

SEQ ID NO: 14950 - protein, 236 aa, Unknown
  Obtained from environmental sample
  DOMAIN (67)...(182): HD domain
  misc_feature (1)..(236): Xaa is any amino acid
MDISSQMIRDKIKTIRDERSLVPAGASAIXEDRRLYGYNGSVQDKDCSMEVILRIEDEARRVLTIERFLHSRNTALLAHDLCLRFGINPKMGYLAGIAHDLAKQMEPKLLLKMVKDDGLPVTEIEKGKPNLLHGRAAAVLLKERFCIHNKDVLEAVAFHTSGKENMSPLAKVVYIADKIEVSRNIDPALRKMCVNEDLDSILYAVLKKQIGKLQSKGVNLFEDTLRLLNKMKERAR

SEQ ID NO: 14951 - DNA, 504 bp, Unknown
  Obtained from environmental sample
  misc_feature (1)..(504): n is a, c, g, or t
atgcacaaagcggctttcctctatcttgttcccgcccatgagccgccgcataaaatagaaattgacccgggccttaaatgctttttggaagatatttccgataccggctgcgcggttaccgtcggcggcaaggctgatccaggtttaagggttaagattcaattcgcgttaagcaactccgccgtgtgcatgaccggcactgtccgttcaacagaatacaaagaagatattaaccgttcgactctgcatattgaggcggaaaccttgcccatagaaatacgaaaccatattctgggcgaagtatttggcatgctgccggatgaagatgaagatgaagaactgccgttccgtgttctggacggcgaaacggtaagcgccagttcggacggtgattcaacaaacaatgaatcaggcggcaagctgtccgaggattcggacaataccatatccgctaaagtgactgtcagcatggctgactcgcaaatcgctgccaataacggctaa

SEQ ID NO: 14952 - protein, 167 aa, Unknown
  Obtained from environmental sample
  DOMAIN (2)...(103): PilZ domain
  misc_feature (1)..(167): Xaa is any amino acid
MHKAAFLYLVPAHEPPHKIEIDPGLKCFLEDISDTGCAVTVGGKADPGLRVKIQFALSNSAVCMTGTVRSTEYKEDINRSTLHIEAETLPIEIRNHILGEVFGMLPDEDEDEELPFRVLDGETVSASSDGDSTNNESGGKLSEDSDNTISAKVTVSMADSQIAANNG

SEQ ID NO: 14953 - DNA, 498 bp, Unknown
  Obtained from environmental sample
  misc_feature (1)..(498): n is a, c, g, or t
gtgaaaggcgagttgccaaaaacaaaaggctattggaaagatgttggcactttagatgccttttncgaagcaaatatggatatatgcgcgcaagaacccatatttgacctttataacgaagcctggcccattcgcacctataactggaatatgccacctgcaaaattttctggaaataccaatgataacaatcagggcatcgctgtgaactcggttgtttcggcaggctgcattataaatggtggcagagttataaattccgttttaagccccagcgtgactgttcaaaaagatgcactagtggaagattccatccttttcccaggtgttacaatagcacctggtgcaaaaattcgcagagcgatcattgaaaaaaacatgcacattccagcaggctttgaaataggctacaatttagacagagatgctgctatgttccatttaaccgagtctggagttgttgtgctggctaaggatactgttataaagggaaattag

SEQ ID NO: 14954 - protein, 165 aa, Unknown
  Obtained from environmental sample
  misc_feature (1)..(165): Xaa is any amino acid
MKGELPKTKGYWKDVGTLDAFXEANMDICAQEPIFDLYNEAWPIRTYNWNMPPAKFSGNTNDNNQGIAVNSVVSAGCIINGGRVINSVLSPSVTVQKDALVEDSILFPGVTIAPGAKIRRAIIEKNMHIPAGFEIGYNLDRDAAMFHLTESGVVVLAKDTVIKGN

SEQ ID NO: 14955 - DNA, 882 bp, Unknown
  Obtained from environmental sample
  misc_feature (1)..(882): n is a, c, g, or t
atgatggccgagcatgcgcttgcgcgccttatttcagataacgctcaggagaccggacaacaaggcgggaagaacgggtttggacggaaaatcggcgaagtgattaacgccctgcgtctggaagcgcggttttcaaaaaatgaaattcttgaaatgtatttaaattccctacccttcggattcagaaccgaaggcgccgcttccgccgcgcggaattttttttcaggcgatctttccatgctttccccagcccagattttctgcctggcggttattccccggcggccaaacctctacaacccgttggaaaaccccgaatcctgcgtcaaagcggcgtcggaattgcaggccgctttttccaaaaataaaaaacttaaagatgcctggccactgttagctgaaataaatgacgaagactggaaatacgccgcttcatcggcccgccgtttcgcgtatcctttcgctctgcctcacctgatacggcatatcaacgcgggattgacgcctgacacaaatattcaacatggtgaaatatatctctccgttgatcttgcccttcagcgttacattgaggggcttattacaggtaacgtagaccgttattacaattcccgcctgacaaacggcgcggccattgttattgacaacgacaacggagaaatacttgcctgggtgggcagcgccgatttcaacaacagcgaagccgcggggcagattgacggagtagtggccctgaaccagccgggcagcgccatgaaacccttcctttacgcgatggccatggaaaacggctttaagcccacagatgtcatcgcggatattccggttaatttcggcgaaagcgaattgtatattccctcggatttcaacaacctgctttaa

SEQ ID NO: 14956 - protein, 293 aa, Unknown
  Obtained from environmental sample
  DOMAIN (8)...(105): Transglycosylase
  misc_feature (1)..(293): Xaa is any amino acid
MMAEHALARLISDNAQETGQQGGKNGFGRKIGEVINALRLEARFSKNEILEMYLNSLPFGFRTEGAASAARNFFSGDLSMLSPAQIFCLAVIPRRPNLYNPLENPESCVKAASELQAAFSKNKKLKDAWPLLAEINDEDWKYAASSARRFAYPFALPHLIRHINAGLTPDTNIQHGEIYLSVDLALQRYIEGLITGNVDRYYNSRLTNGAAIVIDNDNGEILAWVGSADFNNSEAAGQIDGVVALNQPGSAMKPFLYAMAMENGFKPTDVIADIPVNFGESELYIPSDFNNLL

SEQ ID NO: 14957 - DNA, 480 bp, Unknown
  Obtained from environmental sample
  misc_feature (1)..(480): n is a, c, g, or t
atggccgccagggtgacgcaggccgtcaagcgggccgcgcgcaacacgccggttatcgtgaagctgtcgccgaacgtgacggacatcaccctcatcgccaaagccgtggaagacgcgggcgccgatgcgctcacctgcatcaataccctgagcgccatgggcgttgacgtccgaacgcgtaaacccctgctggccaacgtcatcggcggcctttccggcccggccgtcaaacccgtggccctgcgctgcgtctggcaggtcagccgcgcggcgcgtattccggtcatcggcgtggggggcatcgcctgcgtcgaggacgtgctggaatttattctggtcggcgcacacgccgtgcaggtcggcaccatgaatttttcccgcccggatttcgcgttccgcctcgtggaagagcttccctcagcatgtgcgcgtctggggattgacgatttggccgcattcagggcatctttgcaagtctaa

SEQ ID NO: 14958 - protein, 159 aa, Unknown
  Obtained from environmental sample
  DOMAIN (1)...(142): Dihydroorotate dehydrogenase
  misc_feature (1)..(159): Xaa is any amino acid
MAARVTQAVKRAARNTPVIVKLSPNVTDITLIAKAVEDAGADALTCINTLSAMGVDVRTRKPLLANVIGGLSGPAVKPVALRCVWQVSRAARIPVIGVGGIACVEDVLEFILVGAHAVQVGTMNFSRPDFAFRLVEELPSACARLGIDDLAAFRASLQV

SEQ ID NO: 14959 - DNA, 420 bp, Unknown
  Obtained from environmental sample
  misc_feature (1)..(420): n is a, c, g, or t
gtggcggagcccgcccagattcgaccggatgtagctctgaggattttcaatactgtaccgcactccggcctgggccgccagatgcaccacatggctgaagccctgcgcccggaaaagctcgttcagacgcgtttcatccgccacatccgcctgcangaagatgaaggccgcgtgctgttccagcagcgccagacgatcccgcttcaaacgcacgctgtaatagtcgttcagattatccaggccgacgacgccgcggccttccgaaagaaggcgttgcgccagatgaaagccgatgaagcccgcggccccggtaagcaggatgtgcatggcgttcctctcgcagcgcccggagaaaagcgcggcgcgttgcgccgccgctccccgcagggatgcgatgcgtgtcgcgtgacgcgacgttag

SEQ ID NO: 14960 - protein, 139 aa, Unknown
  Obtained from environmental sample
  misc_feature (1)..(139): Xaa is any amino acid
MAEPAQIRPDVALRIFNTVPHSGLGRQMHHMAEALRPEKLVQTRFIRHIRLXEDEGRVLFQQRQTIPLQTHAVIVVQIIQADDAAAFRKKALRQMKADEARGPGKQDVHGVPLAAPGEKRGALRRRSPQGCDACRVTRR

SEQ ID NO: 14961 - DNA, 402 bp, Unknown
  Obtained from environmental sample
  misc_feature (1)..(402): n is a, c, g, or t
ttgggggaaataccggaaaagaaacgggtgtatgttgatgaaagcggcatacataagcagttaccacggaaatacggctacgctgaacgcggtgagaaggtgtgcgacaccaagagtggaaaaaacagtcggcgtatgaatgtcatagggggggctttgcaacggggaacacatattgtagttgaacagtatgaacataccaccgatgccgtattttttgagcaatggttttctgaacgcctgcttaaagaggttcctagagggagtacgataatcatggacaacgcgtctttccaccgcaaggatgtgttgcgtgaattgataaaaaagacaaggcggaaggtgggcctgttatttctgcctgcatattctcctgattttaatcctatagagaaatcatag

SEQ ID NO: 14962 - protein, 133 aa, Unknown
  Obtained from environmental sample
  misc_feature (1)..(133): Xaa is any amino acid
MGEIPEKKRVYVDESGIHKQLPRKYGYAERGEKVCDTKSGKNSRRMNVIGGALQRGTHIVVEQYEHTTDAVFFEQWFSERLLKEVPRGSTIIMDNASFHRKDVLRELIKKTRRKVGLLFLPAYSPDFNPIEKS

SEQ ID NO: 14963 - DNA, 777 bp, Unknown
  Obtained from environmental sample
  misc_feature (1)..(777): n is a, c, g, or t
gtgaaagaaaagggaatggggagcggggagtcggaagcaagcncttcagaatgtacagtcgcctacggttactccgtgaactccggccttattaccgggctgccaacaagcgaggctcaggtcaaaatcaccaagtggcttgaagaacgcaagttgggtaaatcggcggtgaactacaaactccgcgactggatattcagccgccagaggtattggggagagcccatacccctagttcactgtgataaatgcgaagctgagcatggctcagcaatagtaccaattaacgaggcggatcttccgcttaaactgcccgacgtggaatcctacgcgccgaccggtaccggcgaatctccgttagccgccatttcaagctgggtgaacaccacttgccccaaatgcggcggccccgcgaaacgtgaaaccaacaccatgccgcaatgggcaggttcatgctggtattaccttcgttaccttgacccgcataacgataaggtttttgcgggcagggacaaaattgactattgggccccggttgatctttacgtcggcggggtggaacacgctgtgcttcatttgctctacgcaagattttggcacaaggtgctgtacgatgcaggctttgtaaataccaaagaaccctttatacgcctcgtgaaccaggggatgatcgtttcctttgcctatcagcgaaaagataaaacccttgtgcccatcgaccagattgaaaaaagaccggacggcagttttgttgaaaaagcgaacggcnngaagtag

SEQ ID NO: 14964 - protein, 258 aa, Unknown
  Obtained from environmental sample
  misc_feature (1)..(258): Xaa is any amino acid
MKEKGMGSGESEASXSECTVAYGYSVNSGLITGLPTSEAQVKITKWLEERKLGKSAVNYKLRDWIFSRQRYWGEPIPLVHCDKCEAEHGSAIVPINEADLPLKLPDVESYAPTGTGESPLAAISSWVNTTCPKCGGPAKRETNTMPQWAGSCWYYLRYLDPHNDKVFAGRDKIDYWAPVDLYVGGVEHAVLHLLYARFWHKVLYDAGFVNTKEPFIRLVNQGMIVSFAYQRKDKTLVPIDQIEKRPDGSFVEKANGXK

SEQ ID NO: 14965 - DNA, 852 bp, Unknown
  Obtained from environmental sample
  misc_feature (1)..(852): n is a, c, g, or t
atggaaggggtatttgccgagccgcggcatggatttatttatatagaaagggacactccttatcaaaaaaaacgacgcgggctgattgccgcggttgatcttgaacagtacgagtggaagccggaagcgcgtcctctgatccgttgtaccgaggggactgttgcggacaggcttcctccgcgaatggacatccgcaggggcgcgccgctggaacttcctcacgttcttctgctaatcaacgacgagggggatactcttttacccgcactgggagatatggcaaaaaaatccgcgcctgtttacaatacgccgcttatgatggaaagcggcagtatcgcgggctggtttttggacgcggaagaggggcagccttccgccgcgctggattttcttgttgaaaaactggacgctttgtacagccgttctgttacgcgctatgacggaaacaactctccgttcctgtttgcggtgggagacggcaaccattcgcttgcgtccgccaaaggcatttgggaagaatacaaaagctctcaccccgacgaacctttacacccctgccgctacgcgcttgtagagatagaaaacatttatgatcctgctattcagtttgagccgatttaccgtgttgtttttgacgtcggcgttgacgagatttgttccatactttcgccgctacctgatttttcccgccgttccgtggataacgctaaagaacttatccggctttgcgcgaacccgtctgcggcgaactgttttggcattatttctcagggacgttatgcgctaattgaaacatccgccggcggaatctccaccgcctgccttcaacctttgtggacagcgcgcagataa

SEQ ID NO: 14966 - protein, 283 aa, Unknown
  Obtained from environmental sample
  DOMAIN (1)...(278): Protein of unknown function (DUF1015)
  misc_feature (1)..(283): Xaa is any amino acid
MEGVFAEPRHGFIYIERDTPYQKKRRGLIAAVDLEQYEWKPEARPLIRCTEGTVADRLPPRMDIRRGAPLELPHVLLLINDEGDTLLPALGDMAKKSAPVYNTPLMMESGSIAGWFLDAEEGQPSAALDFLVEKLDALYSRSVTRYDGNNSPFLFAVGDGNHSLASAKGIWEEYKSSHPDEPLHPCRYALVEIENIYDPAIQFEPIYRVVFDVGVDEICSILSPLPDFSRRSVDNAKELIRLCANPSAANCFGIISQGRYALIETSAGGISTACLQPLWTARR

SEQ ID NO: 14967 - DNA, 774 bp, Unknown
  Obtained from environmental sample
  misc_feature (1)..(774): n is a, c, g, or t
ttgaatcccatggaacaatactccgcgcggcttgcaaaagtctgggactggatgaccgaagaatcaatttcgcttgtaatgctggaagatacagagaaccgacgggatcagaatatccgctggcttacaggtcatccgggagatgccctgctctttctttcccagaatagaaaggcggttcttacggcatgggatataaacctggctaaacaatatgcaggtaacgcgcccgtgcttcttacggcatacaacgactttgaccgtcagtcatgcaaagcaattgccgcggctgcccagatgcttgatattcccgcaggttcaaaaatagaaattccttccgttacgccctaccctctctttcttgactatgtaggtaaattaacaaactacgatattatctgccgtgaaaaaggcgcgggcgcgcagttaagaaaattccgttccattaaagatagtaaagaaatagaaattacgcggaaggccgcggaaatcactaacgaattaattgagcttttggaaaaaaatgtacgcggcggaaaaataaaaaccgaagcggacgcggctttgttaatcgaggtagaggcgcgaaaacgcggctgtgagggaacaagttttgatacccttgcggcgggtcctaaacgaagttttgccattcacgcgtttccaaactggacatattccgcctttggagacgacgggctttctatcttggactttggggtaagattggacggctattccacggatgtaaccctacctttacccgcaacctaa

SEQ ID NO: 14968 - protein, 257 aa, Unknown
  Obtained from environmental sample
  misc_feature (1)..(257): Xaa is any amino acid
MNPMEQYSARLAKVWDWMTEESISLVMLEDTENRRDQNIRWLTGHPGDALLFLSQNRKAVLTAWDINLAKQYAGNAPVLLTAYNDFDRQSCKAIAAAAQMLDIPAGSKIEIPSVTPYPLFLDYVGKLTNYDIICREKGAGAQLRKFRSIKDSKEIEITRKAAEITNELIELLEKNVRGGKIKTEADAALLIEVEARKRGCEGTSFDTLAAGPKRSFAIHAFPNWTYSAFGDDGLSILDFGVRLDGYSTDVTLPLPAT

SEQ ID NO: 14969 - DNA, 681 bp, Unknown
  Obtained from environmental sample
  misc_feature (1)..(681): n is a, c, g, or t
atgcgagctgaatgcattccaaaaataaagaagcatttttccaaaaggaaaaagaaaaatccatgcaatggcagttgcacgatgcggaccacaaaaccaggctggctcttttgcctccaacacagaccatggcctttacgagctttgctctctcatagagacggtgccttgccttgcgaatttacntgcataatttccaaccacgcagttttagaaccacttgcgagatttttcaatctgcctttctttttggtttcaagcactctcccaaaacccgaacaagacaataagttcaacgaaattttgcactcttcgcaaacagagggaattgtgcttgctcgctatatgcaaattttgagcaaggaattcacagaggagtggaatgaacgcataataaatatccaccatggttttttgcctgcgttcaagggcgcaaaaccatatcaccaagcgtgggcaaagggcgtaaagataataggcgcaactgcgcatttcgcaaccgcagacttagaccaaggtcccattatttggcaaagtgttcagcaagttgcagacacaggcagcattgagcaattcgttcaaattggcaaagaggttgaaaagcgcacattgttgcaggctttaaaactttggttggagcatagggtgtttttgcacgaggggcggacttttattttgtag

SEQ ID NO: 14970 - protein, 226 aa, Unknown
  Obtained from environmental sample
  DOMAIN (46)...(208): Formyl transferase
  misc_feature (1)..(226): Xaa is any amino acid
MRAECIPKIKKHFSKRKKKNPCNGSCTMRTTKPGWLFCLQHRPWPLRALLSHRDGALPCEFTCIISNHAVLEPLARFFNLPFFLVSSTLPKPEQDNKFNEILHSSQTEGIVLARYMQILSKEFTEEWNERIINIHHGFLPAFKGAKPYHQAWAKGVKIIGATAHFATADLDQGPIIWQSVQQVADTGSIEQFVQIGKEVEKRTLLQALKLWLEHRVFLHEGRTFIL

SEQ ID NO: 14971 - DNA, 522 bp, Unknown
  Obtained from environmental sample
  misc_feature (1)..(522): n is a, c, g, or t
atgcgtatccttgacccggagataagaagcctgttcggcggccttggcgatatctgtaccccgttggaagatgcagctgatcttggtattagaccgacgcatgtctttattgtcgaaaatcttcagacagggctggcttttgaggatttacccggctcaattgtgatcatggctttagggtatggcgttgacgttttaggaaacattcagtggcttcattacgctcgatgcatttactggggagacattgatacgcatggctttgcaattcttaaccgggccagagcatacttgccttccatggaatcggtgctaatggatgagccaacactacttgcccaccgggatttatgggtagaggagaaagagcaaagcgcatcatccgaattgccgttactcaccaaaagcgaacaggaactttttttatcgctgaagaataattcctttgggcagcatgttcgtctggaacaagagcggatctgttgggatactgcatggaaagccatacaagctgtccattaa

SEQ ID NO: 14972 - protein, 173 aa, Unknown
  Obtained from environmental sample
  misc_feature (1)..(173): Xaa is any amino acid
MRILDPEIRSLFGGLGDICTPLEDAADLGIRPTHVFIVENLQTGLAFEDLPGSIVIMALGYGVDVLGNIQWLHYARCIYWGDIDTHGFAILNRARAYLPSMESVLMDEPTLLAHRDLWVEEKEQSASSELPLLTKSEQELFLSLKNNSFGQHVRLEQERICWDTAWKAIQAVH

SEQ ID NO: 14973 - DNA, 468 bp, Unknown
  Obtained from environmental sample
  misc_feature (1)..(468): n is a, c, g, or t
gtgaccggggagcggaaaataattatcgttgtagatgattctcttgaaaatctggccatcctcaaagaaaccttaaaaagcgcgtacgaggtatatccatgcccttcggcggcaaagatgtttgaattgctgaaacatgttatgccggatctaattctgctggatgtggaaatgccggaaatgaacgggtatgaagccgcaaagaaactgaaaagcatcgtgaaatacagccaaataccctttatgtttctgactgtcagggacgacgtacaaagcgaaattcttggtttggagctgggcgccgttgattatatacacaaaccgtttctctctccccttcttctccagcggataaaaaaccangtcaccctgatggattatcaaaaaatagcgattatctcagtggcgacggtaaccgccatgaatcacatcagggaaaggttttgtccttgtggacgtggaccataa

SEQ ID NO: 14974 - protein, 155 aa, Unknown
  Obtained from environmental sample
  DOMAIN (6)...(119): Response regulator receiver domain
  misc_feature (1)..(155): Xaa is any amino acid
MTGERKIIIVVDDSLENLAILKETLKSAYEVYPCPSAAKMFELLKHVMPDLILLDVEMPEMNGYEAAKKLKSIVKYSQIPFMFLTVRDDVQSEILGLELGAVDYIHKPFLSPLLLQRIKNXVTLMDYQKIAIISVATVTAMNHIRERFCPCGRGP

SEQ ID NO: 14975 - DNA, 816 bp, Unknown
  Obtained from environmental sample
  misc_feature (1)..(816): n is a, c, g, or t
gtgtttgatttaggcgtcgcaggcgccgcgtgggcgacaatcatatcgcagtttgtatcgttcgtttttgttatgggatatttttcctcaaaatggacaaagctgcggttccgcgttaaacacatgaagttaaacgccgggataacgagcagtattcttgccattggtttcgcgccgtttattatgcagtttgccatgagcctcgtcggcgtcttgcagaatgccgtgattttgaaatacggcggagacgaggcgcttacggccatgacaatttgcttcagtatgtttatcgttgtcattatgccgctcatgggaatagggcagggagcgcagcctattatcggttataattacggcgcgaaacaatatgaccgggtaaaaaaatgttataagctggcccttctcgcctgtaccgcagttcttaccgcggggcttctcacggcgcaattagccccggcgttttgcttctcgctgttcagcaaagataccggttctctgcgcgatcttggaatactgaccatacgcatcagtaccggtttgtttcccattatagggctacagatgatgagcggacagctttttcaggcgattggcaaacctgttcaggcggctattttaagcctttcccggcaaattctcttttttattccgctgattttgtttttgcccgttctgtttgaaaccgcgggccttcgccccatttacggcgtatattgcagttttcccctggctgatttttgttcggcgagtatatcaggattatttgtctacaggcagttcaggatgtggaaaaataacggcgggggcagttgttaa

SEQ ID NO: 14976 - protein, 271 aa, Unknown
  Obtained from environmental sample
  DOMAIN (58)...(221): MatE
  misc_feature (1)..(271): Xaa is any amino acid
MFDLGVAGAAWATIISQFVSFVFVMGYFSSKWTKLRFRVKHMKLNAGITSSILAIGFAPFIMQFAMSLVGVLQNAVILKYGGDEALTAMTICFSMFIVVIMPLMGIGQGAQPIIGYNYGAKQYDRVKKCYKLALLACTAVLTAGLLTAQLAPAFCFSLFSKDTGSLRDLGILTIRISTGLFPIIGLQMMSGQLFQAIGKPVQAAILSLSRQILFFIPLILFLPVLFETAGLRPIYGVYCSFPLADFCSASISGLFVYRQFRMWKNNGGGSC

SEQ ID NO: 14977 - DNA, 807 bp, Unknown
  Obtained from environmental sample
  misc_feature (1)..(807): n is a, c, g, or t
ttgacgcgccgtaagagcgcgcttgacatatcgtcgttgccgggaaagctcgccgactgtcaggagcgcgatccggccaagtccgagatattcatagtcgagggagattccgcaggtggcagcgcgaagcaggggcgcaaccgcgccaaccaggccatactgcccctgcgcggaaaaatcctcaatgtggagcgcgcgcggttcgaccgcgtgataggctcggagatgatcggcacgttgatcatggcgcttggttgcggcataggcgagaccgaattcgatctggaaaaaatccgctaccacaagattataatcatgaccgacgcggatgtcgacggtgcgcacatacgcacgctgctattgacatttttctatcgccagatgcccgaggtgatcaaccgcggctatctctatatcgcgcagccgccgctatataaagtgaagcgcgggcagtcggaagcctacatgaaagatgacgcggcgcttgagaactatctcgtggacatcattgctggcgaagctgtgctggaaaccaacacaggcacgcgcgtggcgcacgccgacctgcgcgagctgataaactcggcgcggaaaatattgaaactgtccgagccgctnttgaaattcgcacctcanaaggtagtcgagaacgcggcgctggccgggctgttcgacgagggcgctgatcttgaagcctgtgccaagcgggcgtgcgcgcgcatggatttgtttgagggcgaacaccaaagggctggaagtcgatgtgctttaggcaatgtgcggttcttcgaaaactgcncggcgtga

SEQ ID NO: 14978 - protein, 268 aa, Unknown
  Obtained from environmental sample
  DOMAIN (28)...(135): Toprim domain
  misc_feature (1)..(268): Xaa is any amino acid
MTRRKSALDISSLPGKLADCQERDPAKSEIFIVEGDSAGGSAKQGRNRANQAILPLRGKILNVERARFDRVIGSEMIGTLIMALGCGIGETEFDLEKIRYHKIIIMTDADVDGAHIRTLLLTFFYRQMPEVINRGYLYIAQPPLYKVKRGQSEAYMKDDAALENYLVDIIAGEAVLETNTGTRVAHADLRELINSARKILKLSEPLLKFAPXKVVENAALAGLFDEGADLEACAKRACARMDLFEGEHQRAGSRCALGNVRFFENCXA

SEQ ID NO: 14979 - DNA, 888 bp, Unknown
  Obtained from environmental sample
  misc_feature (1)..(888): n is a, c, g, or t
ttgtcgcgagaagtggctgaggtgtggaagtttatggggaagaacaaagagaatgttggcattgtccggcctgaggcagcgcagggcgaggatgagcatgacttgagtctgcgcccgcggcggctttcggagtttttgggacaacaggcgatgaaggaaaatctctcggtttttatttcaacggccaagcagcgcggtgaaagcctagatcacctttttttgatagggccccccggattgggcaaaactacgctggcgcaggtggtggcaaatgaacttgaaaccggttttgtgcagacatcggcgccagctatggacaaacccaaggaccttgtgggacttcttaccaacctgaaaaaaggcgaggttttctttattgatgaaatccacaggttaaaacctcccattgaggaacttctgtatatcgctatggaagattacgaactggactggattgtagggcaggggcctatggcaaggacgctgagaatccccatacagccttttactctggtcggagccaccaccaaggcgggaattgtctcaggcccgcttatcagccgttttggtattacctgccgtttttcattttaccagcaggaggatatggaagccattgtccgccgttccgccgggcttttgaatattaaaattgatagtgacgccgcttctctgcttgcaaagtcctcaaggggaacgccgagggtggtaaaccggcttctacggcgtatgagggattttgcccagtataccggtaacagcagtattacgttagccgttgtaaaagacgggctaacaaaacttgaaatagacgtactggggcttgaaaagcaggacagggacatattgcgaatcataatcgaacgataccagggcgggcccccgtag

SEQ ID NO: 14980 - protein, 295 aa, Unknown
  Obtained from environmental sample
  DOMAIN (42)...(203): Magnesium chelatase, subunit ChlI
  misc_feature (1)..(295): Xaa is any amino acid
MSREVAEVWKFMGKNKENVGIVRPEAAQGEDEHDLSLRPRRLSEFLGQQAMKENLSVFISTAKQRGESLDHLFLIGPPGLGKTTLAQVVANELETGFVQTSAPAMDKPKDLVGLLTNLKKGEVFFIDEIHRLKPPIEELLYIAMEDYELDWIVGQGPMARTLRIPIQPFTLVGATTKAGIVSGPLISRFGITCRFSFYQQEDMEAIVRRSAGLLNIKIDSDAASLLAKSSRGTPRVVNRLLRRMRDFAQYTGNSSITLAVVKDGLTKLEIDVLGLEKQDRDILRIIIERYQGGPP

SEQ ID NO: 14981 - DNA, 663 bp, Unknown
  Obtained from environmental sample
  misc_feature (1)..(663): n is a, c, g, or t
atgaatcaaatttcggcaatgaccggtgtccctgtgattcatatcagcgccgatctgcgcggcactcccgaaaccttccgtaccctaggcaaacttctgggcagagaaaaaaagggtgaagaacttgcccttttttgcgaaaaaattcttttccaagcggaacatattatgaacaatgtgggaacagaaaaaaaatccgctctttattgcatgggaaaaaacgggcttaatgttctggcgcggaattcttatcactcggaaatttttgactggatgaccgataaccttgcattggttgacaacccttcttcaaggggcagcgggaatgaaagcaatatggaacagttgtttctttggaatcctgaggtgattttttttagccccgacagtgtctacgcttcggtaaaaaacgatcccgtatggaaaaatttcaaagcgatacgcaacggtacatattatgaggttcccaatgatccctacaactggttgggaagtcctccttcggtcaaccgatatctcggtatactctggttgggtatgattctttatccgcaatacgcggattatgatctgtatgcggaaacaagagaatactaccggcttttttacggttataacctttcgcgggaacggtttaacagtcttattgccaacagcaaataa

SEQ ID NO: 14982 - protein, 220 aa, Unknown
  Obtained from environmental sample
  misc_feature (1)..(220): Xaa is any amino acid
MNQISAMTGVPVIHISADLRGTPETFRTLGKLLGREKKGEELALFCEKILFQAEHIMNNVGTEKKSALYCMGKNGLNVLARNSYHSEIFDWMTDNLALVDNPSSRGSGNESNMEQLFLWNPEVIFFSPDSVYASVKNDPVWKNFKAIRNGTYYEVPNDPYNWLGSPPSVNRYLGILWLGMILYPQYADYDLYAETREYYRLFYGYNLSRERFNSLIANSK

SEQ ID NO: 14983 - DNA, 366 bp, Unknown
  Obtained from environmental sample
  misc_feature (1)..(366): n is a, c, g, or t
gtgggttacggcttcggcaaggccaacgacgtttcggaggccatacgcaagagcatagacaaggcaaagcgcaacatggtgaaactgccggttataaaaggcacgattccccacgaggtgacggggtacttcaaggcttcgcaggttctgcttaagccggcccgctccgggacggggatcatcgccggagggccggtacgcgccataatggaagccggcggcgtaaccgacatactctcaaagtcaatcggcgcggcgagccagtacaacgtggtcaaggcgaccttcgactgcatcagcaggatgatggacgcgaagacgatagcgaaaaacaggggaaaatccctgaacgagttgtggggttga

SEQ ID NO: 14984 - protein, 121 aa, Unknown
  Obtained from environmental sample
  DOMAIN (1)...(31): Ribosomal protein S5, N-terminal domain
  misc_feature (1)..(121): Xaa is any amino acid
MGYGFGKANDVSEAIRKSIDKAKRNMVKLPVIKGTIPHEVTGYFKASQVLLKPARSGTGIIAGGPVRAIMEAGGVTDILSKSIGAASQYNVVKATFDCISRMMDAKTIAKNRGKSLNELWG

SEQ ID NO: 14985 - DNA, 924 bp, Unknown
  Obtained from environmental sample
  misc_feature (1)..(924): n is a, c, g, or t
atgaaacgccggacggggtacatggtagaacgccatgaacgcgatattttcccattgatgaaaagacgctatcttttctccggcagcgaaaatttcaggctttatgatttgtactgcggcggttccgtaaacgatagcgttttcgcgtactccaaccgcgtgaaaaccggccttggagacgagagggcgctggttttctacaataactcctactatgaaacctcaggctggataaaagtcagcgatccccccattccctgcgaaggcggtacgcggagggacagcttaagcgaagcccttttaatccacggcgacagcaggtattttacattgttacgcgaacaaaaatctaatctttggtatatacgctcttccaaggcaatcagcgaaaacgggttttttgtaggcttaaaaggctacgagacccaggtcttccttgacatttatgaagttgaggacgacggaaaaggacgctgggcaaggcttaacaacgaccttgaaggcagaggggtctccgatcccttagccgcaattaaggatattttcctgggcgaactttattatcattttatggaaatgtttaagccggaaattgtcgaaaaactgtgctgcttaaaagacaaaaattccgccgcgggggacataaaagaggacgcaggagaattttttataaccgcgtctttctttatggacggggcgaacggcgcttatgacgaatgggcggcattcgatgaaaaaggcgttaagcgaaaatttacaatgatttccaacgatgatattcttctggaattcaattcattccttgaacggatgatgacaatcagggaaatgctccttaaaccggattctccgttccttaaaagcatgaaagagcgcaccgatgaaggtcaaaagttatgcgccctcggccgatctgatcaatga

SEQ ID NO: 14986 - protein, 307 aa, Unknown
  Obtained from environmental sample
  misc_feature (1)..(307): Xaa is any amino acid
MKRRTGYMVERHERDIFPLMKRRYLFSGSENFRLYDLYCGGSVNDSVFAYSNRVKTGLGDERALVFYNNSYYETSGWIKVSDPPIPCEGGTRRDSLSEALLIHGDSRYFTLLREQKSNLWYIRSSKAISENGFFVGLKGYETQVFLDIYEVEDDGKGRWARLNNDLEGRGVSDPLAAIKDIFLGELYYHFMEMFKPEIVEKLCCLKDKNSAAGDIKEDAGEFFITASFFMDGANGAYDEWAAFDEKGVKRKFTMISNDDILLEFNSFLERMMTIREMLLKPDSPFLKSMKERTDEGQKLCALGRSDQ

SEQ ID NO: 14987 - DNA, 570 bp, Unknown
  Obtained from environmental sample
  misc_feature (1)..(570): n is a, c, g, or t
atgaagaatgtgggattgaatccgacggttttgtacagccttatgccgacagcccccggggatcctgaaaatgtgggagagcacgtatatattcagatcatcaataacgcaaaggaatatgtgtatattaatactccgtatttggtcattgacgataatctgctttcggccctgtgcttatcggccaagagcggagtcgatgtgcggatcattaccccgtaccgctgggacaagtggatcgtggcggttgcttcccggtcctattaccgccagttgatcctggcgggagtgaagatttacgagtacacccagggctttaatcattcaaaaacctttgtctccgatgacaaaaccgcgactgtgggtaccacgaaccttgacttccgcagcctctaccttcattttgagtgcggggtgtggatgtataaaaccaattcggtaacggaagtaaaaaaggattttctcagcaccctccccctctgccacgagatcaccctgcaagaatgcagccggaacgcattccaacgggtctttcaggatgtgcttcggctctttgcgcctttgatgtaa

SEQ ID NO: 14988 - protein, 189 aa, Unknown
  Obtained from environmental sample
  DOMAIN (103)...(130): Phospholipase D Active site motif
  misc_feature (1)..(189): Xaa is any amino acid
MKNVGLNPTVLYSLMPTAPGDPENVGEHVYIQIINNAKEYVYINTPYLVIDDNLLSALCLSAKSGVDVRIITPYRWDKWIVAVASRSYYRQLILAGVKIYEYTQGFNHSKTFVSDDKTATVGTTNLDFRSLYLHFECGVWMYKTNSVTEVKKDFLSTLPLCHEITLQECSRNAFQRVFQDVLRLFAPLM

SEQ ID NO: 14989 - DNA, 402 bp, Unknown
  Obtained from environmental sample
  misc_feature (1)..(402): n is a, c, g, or t
ttgggttttattatttatcggggaaaaaccttccctgacggcgctcgcgggcggaatcatcattttaatcgcggtggtgtcttcgtccctgatcagcaagtaccgggaggacagggaagcattgcaatgactgaaagtacgcttcgtataatccaagcaatcaaagccattcccaaaggtaaggtttcatcctaccgcgacgtggctttagccgcagggcttcccaacggtgcgcggcaggtcgtacgggttctccactcgctttcagaaaaatacgatcttccctggtaccgtgtaatacgttccaacggcagcattgccttaaaagaaggggaaggaagggaactgcaaatacagctcctcggtgccgaaggggtggaagttcgcagaatggattggtga

SEQ ID NO: 14990 - protein, 133 aa, Unknown
  Obtained from environmental sample
  DOMAIN (43)...(129): 6-O-methylguanine DNA methyltransferase, DNA binding domain
  misc_feature (1)..(133): Xaa is any amino acid
MGFIIYRGKTFPDGARGRNHHFNRGGVFVPDQQVPGGQGSIAMTESTLRIIQAIKAIPKGKVSSYRDVALAAGLPNGARQVVRVLHSLSEKYDLPWYRVIRSNGSIALKEGEGRELQIQLLGAEGVEVRRMDW

SEQ ID NO: 14991 - DNA, 636 bp, Unknown
  Obtained from environmental sample
  misc_feature (1)..(636): n is a, c, g, or t
atgatttgttttataccagccaataagctcaccacttccgccaatgtaatcatgcttcagtacagtgccccggtttgggcggccctgctggctagggccttggtgcacgaaaagccgcattgggaacactggggcgcactggttctgattagctcaggcctttttctctttttccgggacggcttaagcgcgggctcccatttgggagacgcaatttctatactgtcaggtgtctttttggggagttcttcggttttcttgcgaatgatgaaaaaaggcagtccgcaagacgcaatgtttatgggccaggtaattgtcgccgttgtctgtactccctttttcttcctgtttcccccttcttttgatcctaccgtagtcatatccatcacttttttgggcttcttccaggcaggtttggcgtcggtaaccttttcctatggtataaagcgaatcagcgcggttcaggccatgctcattgccgccgcggagccgattctaaacccgatttgggttttattatttatcggggaaaaaccttccctgacggcgctcgcgggcggaatcatcattttaatcgcggtggtgtcttcgtccctgatcagcaagtaccgggaggacagggaagcattgcaatga

SEQ ID NO: 14992 - protein, 211 aa, Unknown
  Obtained from environmental sample
  SIGNAL (1)...(27)
  DOMAIN (78)...(199): Integral membrane protein DUF6
  misc_feature (1)..(211): Xaa is any amino acid
MICFIPANKLTTSANVIMLQYSAPVWAALLARALVHEKPHWEHWGALVLISSGLFLFFRDGLSAGSHLGDAISILSGVFLGSSSVFLRMMKKGSPQDAMFMGQVIVAVVCTPFFFLFPPSFDPTVVISITFLGFFQAGLASVTFSYGIKRISAVQAMLIAAAEPILNPIWVLLFIGEKPSLTALAGGIIILIAVVSSSLISKYREDREALQ

SEQ ID NO: 14993 - DNA, 429 bp, Unknown
  Obtained from environmental sample
  misc_feature (1)..(429): n is a, c, g, or t
atgggcgagaacgggccaatccgtgtaaaagctaataattttcagatagataagttagggcagatttggataaatgccgaatatgacgacaacgatcccaatgtccttgtatcaagggaaggcaacagctggtccgaccccgtcttgttggatatcctcaaagtggttgattttgatattgacagatatttaaagaaacagggttccagtctttattacgatactgaaacttccgggcctgccatgatcgtggaagaagaagacaggcccaaggtaatacagggctttgtggaagcggccaatgtggaacctgtccgcgaaatggtgcagatgatcgaagtaaaccgcgcttacgaggcaaatcaaaaagttatacaaacccacgatactatgcttggcgttttgatcaatcaggtagccaaggtttaa

SEQ ID NO: 14994 - protein, 142 aa, Unknown
  Obtained from environmental sample
  DOMAIN (100)...(138): Domain of unknown function (DUF1078)
  misc_feature (1)..(142): Xaa is any amino acid
MGENGPIRVKANNFQIDKLGQIWINAEYDDNDPNVLVSREGNSWSDPVLLDILKVVDFDIDRYLKKQGSSLYYDTETSGPAMIVEEEDRPKVIQGFVEAANVEPVREMVQMIEVNRAYEANQKVIQTHDTMLGVLINQVAKV

SEQ ID NO: 14995 - DNA, 705 bp, Unknown
  Obtained from environmental sample
  misc_feature (1)..(705): n is a, c, g, or t
gtggttgataataccaccgaaatccgtgtagccaccaaaagcggcaaggagtatcccgctaaacttgtgggaaaggacgaacgcaaagacctggcaatgatctcctttgaaacaagcgacagctatccactggcggtattggccgattccgacgccgtgcgggtgggcgactgggcaatagcgatgggtaatcctctgggtgagcagttttcattttcggtaactatgggtatcgtcagcgcgctgggacgcaccggcggaccgggcggcaatatcaacgattttatccaaaccgacgcgcccattaatatgggaaactcaggcggcgctttagtcaatatacggggcgaagttatcgggattaacacctggatcgccagtaatgccaccggcggcggcaacgtgggcctgggttttgccattcccattaacaacgccaaacgttcaatagatgaattcatcagttccggcacgatcagttacggttggctgggcgtgtcgcttattgaacccggcaaggaaaccgccgcggcgctgggcattgagggcaaacgaggggcaatggcatcgcaggtttttctcggttctccagcggacaagggcggtatatgtcccggcgactttatcacccatgttgacggtaaagaagtcagaggcgtcaatccccttaccctgacggtaggcgatttgaaacccggcgactga

SEQ ID NO: 14996 - protein, 234 aa, Unknown
  Obtained from environmental sample
  DOMAIN (2)...(150): Trypsin
  misc_feature (1)..(234): Xaa is any amino acid
MVDNTTEIRVATKSGKEYPAKLVGKDERKDLAMISFETSDSYPLAVLADSDAVRVGDWAIAMGNPLGEQFSFSVTMGIVSALGRTGGPGGNINDFIQTDAPINMGNSGGALVNIRGEVIGINTWIASNATGGGNVGLGFAIPINNAKRSIDEFISSGTISYGWLGVSLIEPGKETAAALGIEGKRGAMASQVFLGSPADKGGICPGDFITHVDGKEVRGVNPLTLTVGDLKPGD

SEQ ID NO: 14997 - DNA, 573 bp, Unknown
  Obtained from environmental sample
  misc_feature (1)..(573): n is a, c, g, or t
atgatgaaactgaggttcaaacatcaatcctttcaggccgacgcggccaaagctgtctgcgatgtgtttgccggacagccgttccgtacctcaacctatatgatggattccggttgggggcagcaatccacgactatgacagaagactttaccggtttcggtaacgcgccggtcgctatcggcgatgaaatcgtgttgaagaatattcaacgcgtacagatgcgggaaaacctcaagccgtccgattcgctcaatggtcggtttaacctgactgtggagatggaaaccggcgtgggtaagacatacacctatatcaaaaccatgtatgaactcaacaaacggtacgggtggagcaagttcattattgttgtgccaagcatggccattcgcgagggagtgtataagtcatttgtgatgacaaaagagcactttatggaggactatggcaagaagattcgcttttttatctatgattcngagccggcacggttgaacgagataaaccactttgccaatgacagcgagatgaatgctatgataatcaacaatcaagcgtttaacgcgcgcgggtag

SEQ ID NO: 14998 - protein, 190 aa, Unknown
  Obtained from environmental sample
  DOMAIN (5)...(169): Type III restriction enzyme, res subunit
  misc_feature (1)..(190): Xaa is any amino acid
MMKLRFKHQSFQADAAKAVCDVFAGQPFRTSTYMMDSGWGQQSTTMTEDFTGFGNAPVAIGDEIVLKNIQRVQMRENLKPSDSLNGRFNLTVEMETGVGKTYTYIKTMYELNKRYGWSKFIIVVPSMAIREGVYKSFVMTKEHFMEDYGKKIRFFIYDSEPARLNEINHFANDSEMNAMIINNQAFNARG

SEQ ID NO: 14999 - DNA, 666 bp, Unknown
  Obtained from environmental sample
  misc_feature (1)..(666): n is a, c, g, or t
ttggaagtttacttccttgggatgctgcccaactttattggcggcgcggctgatcgcgcgcagtatgaaagcggggcaaagaaactgaatgacgccaattttaccgccgctttccaggctatggcggattccgcaaaataccttcccaagggctatacgtcggtgacgtataacgattctcaggcgcttttcaatacccagcaggctgtgatgtttatggatggctcatggaccgccggcgtatacgcgggagcgtcgtttgaatggggcgtttttgccatgcccgccccgcagggaaaaaagaccgcgataaccttccatcccgatatggcgattacctggaacgccaaaaccaaatacccccaggaaagtaaagatttcctggcatggattgccagccgtgaaggggcgactacggcgtccgcggctttgcctttgggctttttccccatgatcaatttccccatccagcttactgacgctcatgccaatgaattcctcgccctgaaccgcggtaaagaaactgacgcccgctttgtgtggcctaaatttatggacctgtatgcgctcatgaaccangctgtaatcctggttataaagggagaaaatactcccagccaggcccgcggatcaaatggaagccgcctgcggcaaaactgcgtttaa

SEQ ID NO: 15000 - protein, 221 aa, Unknown
  Obtained from environmental sample
  misc_feature (1)..(221): Xaa is any amino acid
MEVYFLGMLPNFIGGAADRAQYESGAKKLNDANFTAAFQAMADSAKYLPKGYTSVTYNDSQALFNTQQAVMFMDGSWTAGVYAGASFEWGVFAMPAPQGKKTAITFHPDMAITWNAKTKYPQESKDFLAWIASREGATTASAALPLGFFPMINFPIQLTDAHANEFLALNRGKETDARFVWPKFMDLYALMNXAVILVIKGENTPSQARGSNGSRLRQNCV

SEQ ID NO: 15001 - DNA, 741 bp, Unknown
  Obtained from environmental sample
  misc_feature (1)..(741): n is a, c, g, or t
ttgatcattgtggaatctcccaccaaagccgcgtcgtttgaaaaataccttggcgctgattataccgttaaagcgtctatgggccacctcattgatcttcccaaatcgaggaccggcgttgatacggagcataattttgagcccgaatatataaccgtccgcggacgggcaaagatactcaaggaattgctgtcggaggcaaaaaaggcggagaaagtactgttggcaagcgaccctgaccgtgaaggtgaggcgattgcctggcatttgaaaaacgccattttgtcaaaactggaaaccatgtctgttcagcggatcagtttcaacgaagtgactcccatggcgataaaggaagcggtggcaaacccccgccccattgacgaagcgctggttgaatcacaaaaggcccgcagggtgctggacaggctggttgggtacagcctgtctccgctgttgtggaaaaaagtgaaaaacggcctttccgccggacgggtgcaatccgtggcccttcgccttatatgcgaacgggaaaaggaagttgaatcgttcattcccgaagaatactggactttggaagcggatttttatgccggtaaaacaatgtttaccgcccaactggtaaaatggaagggtaacaaatcggaactgcctcatgaagcggcggttcangccattattaccgcgctttccgaatctgattgcattgtcagtgatattaaagaaactgataaaatcccttag

SEQ ID NO: 15002 - protein, 246 aa, Unknown
  Obtained from environmental sample
  DOMAIN (1)...(109): Toprim domain
  misc_feature (1)..(246): Xaa is any amino acid
MIIVESPTKAASFEKYLGADYTVKASMGHLIDLPKSRTGVDTEHNFEPEYITVRGRAKILKELLSEAKKAEKVLLASDPDREGEAIAWHLKNAILSKLETMSVQRISFNEVTPMAIKEAVANPRPIDEALVESQKARRVLDRLVGYSLSPLLWKKVKNGLSAGRVQSVALRLICEREKEVESFIPEEYWTLEADFYAGKTMFTAQLVKWKGNKSELPHEAAVXAIITALSESDCIVSDIKETDKIP

SEQ ID NO: 15003 - DNA, 633 bp, Unknown
  Obtained from environmental sample
  misc_feature (1)..(633): n is a, c, g, or t
gtgagcggagccattcactccacggcagacactgttcgcccagccttaactataataaaacctcgcgaaggaacctcgataataagctcggtcttttttatgtgcttaccaactcaagtgcttgtttatggagactgtgccataaaccccaaccccaccacagacgaacttgcacaaattgcaattcaatgcgcagatacagcgagcgattttggcattgtacctcgagttgcgatgttaagctacagcacaggagagagcggcaaaggcgaagatgtgaacaaggtaaaagaagccaccgcaaaggtaaaggaactgcgcccagatatcgaaatagacggccccctgcaatacgatgctgcgataatggaatctgttgcgcacacaaaggcaccaaacagccacatagccggacgagccaccgtatttgtgttcccggacctaaatacaggcaacacaacctacaaagccgttcaacgtagcgcaaaaaccgtaagcataggtcctatgcttcaggggttagcaaaacctgttaatgatttgtctcgcggtgcattggtagatgatattgtttataccatagccataactgctgtacaagctggaatgaaccgtcaaataagcgaaaagtaa

SEQ ID NO: 15004 - protein, 210 aa, Unknown
  Obtained from environmental sample
  DOMAIN (1)...(198): Phosphate acetyl/butaryl transferase
  misc_feature (1)..(210): Xaa is any amino acid
MSGAIHSTADTVRPALTIIKPREGTSIISSVFFMCLPTQVLVYGDCAINPNPTTDELAQIAIQCADTASDFGIVPRVAMLSYSTGESGKGEDVNKVKEATAKVKELRPDIEIDGPLQYDAAIMESVAHTKAPNSHIAGRATVFVFPDLNTGNTTYKAVQRSAKTVSIGPMLQGLAKPVNDLSRGALVDDIVYTIAITAVQAGMNRQISEK

SEQ ID NO: 15005 - DNA, 366 bp, Unknown
  Obtained from environmental sample
  misc_feature (1)..(366): n is a, c, g, or t
gtgcgggcagtaggtgcagaagctggtgtagctgcagagcnaggagcggctactggtgcaggagcagctgtgggtacaggcgcggcagcaggtgtagctttaggtgcaggtgcaactttaggtgctggtgcagctttagatgcaggtgcaggggtttgggcaaaggagcaaatcacggatattgctaccaaaaataaaatgcgttttgtaatcatggctttctccaaaaaatttaggtataagatagaaaatttacttttcgcttatttgacggttcattccagcttgtacagcagttatggctatggtataaacaatatcatctaccaatgcaccgcgagacaaatcattaacaggttttgctaa

SEQ ID NO: 15006 - protein, 121 aa, Unknown
  Obtained from environmental sample
  misc_feature (1)..(121): Xaa is any amino acid
MRAVGAEAGVAAEXGAATGAGAAVGTGAAAGVALGAGATLGAGAALDAGAGVWAKEQITDIATKNKMRFVIMAFSKKFRYKIENLLFAYLTVHSSLYSSYGYGINNIIYQCTARQIINRFC

SEQ ID NO: 15007 - DNA, 900 bp, Unknown
  Obtained from environmental sample
  misc_feature (1)..(900): n is a, c, g, or t
atgagcggttctgtttcggacggcgacattgcggcgcttggccgcgacgccggcgcccagtacgtttgtgtcgtacagcgttcggagcttgacggtatctcatacgtcgcgacccgtatggtgagcgttcagagcaaggtggcggagttggcggacattgtggagttgccgcccggcggcaaggtcatagacataatacagtggcagataggatctatgctcgggatgccggtggggccgaggcctacggggtcggggtatgcggcggcggctcgaccggcggcttcacaatacccggcgcaaacaagcgccgtgtcggtaggcagaaccgagccgccgattcaggggacgattgttccggggggcagtttggggcagaaattggcttggttgcaaaagagcgctgatagccacgagacgtacattattgaggtgaacgccgatgagaccatcgctccgaataatacgcttgagttcagcggcgggattaacattaccgtggttttgaggggtgttggtggaaaccggactatcaggctttcatcccacggaacgatgtttaccgtaaagaaagaggttacgcttattttggagaataacgttacccttcaggggcataagggtaataccggtaggatgattagtttagaggatggaactcttaaaataaaggctggagcggtaattatcggcaatagcggcggcggtgtaagtggaagcggaatccttgaaatgagcggaggcacaatctcaggtaatgggcgcggcaacgatcttaatggcggtggggttgatatgtcgggcgggagcattaccatgaccggtggtactatttccggcaataatgccgttatgggcggcggagtaaaatttggaaggtgggggtggtggaacgtttaa

SEQ ID NO: 15008 - protein, 299 aa, Unknown
  Obtained from environmental sample
  misc_feature (1)..(299): Xaa is any amino acid
MSGSVSDGDIAALGRDAGAQYVCVVQRSELDGISYVATRMVSVQSKVAELADIVELPPGGKVIDIIQWQIGSMLGMPVGPRPTGSGYAAAARPAASQYPAQTSAVSVGRTEPPIQGTIVPGGSLGQKLAWLQKSADSHETYIIEVNADETIAPNNTLEFSGGINITVVLRGVGGNRTIRLSSHGTMFTVKKEVTLILENNVTLQGHKGNTGRMISLEDGTLKIKAGAVIIGNSGGGVSGSGILEMSGGTISGNGRGNDLNGGGVDMSGGSITMTGGTISGNNAVMGGGVKFGRWGWWNV

SEQ ID NO: 15009 - DNA, 519 bp, Unknown
  Obtained from environmental sample
  misc_feature (1)..(519): n is a, c, g, or t
atgatcgcgcaggaacggggggatatagatgccgccgagggctggtacaaacgatcactgacaattgcgcagaaactggatatcgagcatagcatagcccttatttaccatcaactggggacggttgcggataaacggggagatttagacgccgccgaggactggtacaaacgatcgctggtaattacgcagaaacagggtgacgagcatggtatggccggtacttactatcaactggggattgttgcgtataaacggtgggatttagataccgccaaggattggtacaaacgatcgctggtaattgcgcagaaacaggatgacgagcatggcatagcccttatttaccatcaactggggacagttgctgagggacgtcggtattttaatgccgccaatggctggtacaaccagtcgttgacgattttagagcggttgaatgaccggcataatgcaaacattgtcagggaaagtattgcccggcttcagacattaaaatcagacaagcccgatggttaa

SEQ ID NO: 15010 - protein, 172 aa, Unknown
  Obtained from environmental sample
  misc_feature (1)..(172): Xaa is any amino acid
MIAQERGDIDAAEGWYKRSLTIAQKLDIEHSIALIYHQLGTVADKRGDLDAAEDWYKRSLVITQKQGDEHGMAGTYYQLGIVAYKRWDLDTAKDWYKRSLVIAQKQDDEHGIALIYHQLGTVAEGRRYFNAANGWYNQSLTILERLNDRHNANIVRESIARLQTLKSDKPDG

SEQ ID NO: 15011 - DNA, 342 bp, Unknown
  Obtained from environmental sample
  misc_feature (1)..(342): n is a, c, g, or t
atggaacagaatgaatttnctgaatgggaaagagtatttgttgctgttgatgataataatatagcggggtattgtacttttgtaaaaagcgactgtattcccgatgttaaatacactccttacattagttgtatttttattggagaacaatatcgcggaaaaagattaagcgaaaaaatgatattgaccgtaatagaatacgctaaagaaataaaatttaacgaagtctatattgtaagtaatcatataaatttatatgaaaaatatggatttataaaaattgatgaaaagaaggattattggaataatgatgaaaaaatatataagaaaataataacataa

SEQ ID NO: 15012 - protein, 113 aa, Unknown
  Obtained from environmental sample
  DOMAIN (13)...(92): Acetyltransferase (GNAT) family
  misc_feature (1)..(113): Xaa is any amino acid
MEQNEFXEWERVFVAVDDNNIAGYCTFVKSDCIPDVKYTPYISCIFIGEQYRGKRLSEKMILTVIEYAKEIKFNEVYIVSNHINLYEKYGFIKIDEKKDYWNNDEKIYKKIIT

SEQ ID NO: 15013 - DNA, 465 bp, Unknown
  Obtained from environmental sample
  misc_feature (1)..(465): n is a, c, g, or t
ttggaaatgacggtggacgaggcgctgatcttcttcgacagtctttcggcgatccgccaaaaactgcaagtcctgtcgcaggtcggcctgggctacatcaaactcggccaatccgccacgacgctctccggcggcgaggcgcagcggatgaagttagcctccgaattgtctaaaagggctacggggaagactctgtacatcttggacgaaccgaccacggggctgcacttcgaagatataaggatgctgatgtcggtcatacaagagctggtggacaaagacaattcggttatagtcatagagcataacttagacgtgataaagtgcgccgaccatatagtggacttaggccccgacggcggcgacaggggcggcgagatagtcgccgtagggacgccggaagaggtggcgaagaatccggcgtcggtcacggggaagtttttgaaggggtatctgaagcgttga

SEQ ID NO: 15014 - protein, 154 aa, Unknown
  Obtained from environmental sample
  DOMAIN (1)...(120): ABC transporter
  misc_feature (1)..(154): Xaa is any amino acid
MEMTVDEALIFFDSLSAIRQKLQVLSQVGLGYIKLGQSATTLSGGEAQRMKLASELSKRATGKTLYILDEPTTGLHFEDIRMLMSVIQELVDKDNSVIVIEHNLDVIKCADHIVDLGPDGGDRGGEIVAVGTPEEVAKNPASVTGKFLKGYLKR

SEQ ID NO: 15015 - DNA, 387 bp, Unknown
  Obtained from environmental sample
  misc_feature (1)..(387): n is a, c, g, or t
gtggcccgaaagcaaaatccgaggttaccagcccgggcggttcagcttcaacaccaaaggcgggcgatgcgaggcttgcgagggcgacggggagctgcggatagagatgcacttcctgcccgacgtctaggtcaaatgcgaaacctgcggcgggaggcgctacaaccgggagactctcgaagttctatacaagggcaaatctatagcggacgtattggaaatgacggtggacgaggcgctgatcttcttcgacagtctttcggcgatccgccaaaaactgcaagtcctgtcgcaggtcggcctgggctacatcaaactcggccaatccgccacgacgctctccggcggcgaggcgcagcggatgaagttagcctccgaattgtctaa

SEQ ID NO: 15016 - protein, 128 aa, Unknown
  Obtained from environmental sample
  misc_feature (1)..(128): Xaa is any amino acid
MARKQNPRLPARAVQLQHQRRAMRGLRGRRGAADRDALPARRLGQMRNLRREALQPGDSRSSIQGQIYSGRIGNDGGRGADLLRQSFGDPPKTASPVAGRPGLHQTRPIRHDALRRRGAADEVSLRIV

SEQ ID NO: 15017 - DNA, 696 bp, Unknown
  Obtained from environmental sample
  misc_feature (1)..(696): n is a, c, g, or t
ttgcagagcgaaatcggcgtgttaaaacatgtgccggagattattgttgacttggctgttcccagagatgtggagccgtcggtcggtagcattaagggcgttactttattgacgatagacgatatatcggatgacggacggagtctttcacctgagagtgttttgatgacggaggatattatagcggaacatgtcgctaaatataataagtggaaggaacattctatggtcaatcaaaaatcattcttcccgctgtttattgatatgaacgggaaaaaggtattgatagtaggcggcgggaatgtggccgagcggcgggtgaagatacttgcttctttcaatgccgatattaccgttatatcgccggatatcactgattatattgaacgagcctcatcatcaaacataatacgtctattaaaacgaaagtatgaaagtaacgatataattaccatcaacccattcttagttatcgccgctacaaacgagcggcaagtaaaccatgccgtaatgacggaagccgaaagtcaaaacatctgcgtatcggtagcagataaccgtgaagagtgtacgttttattttccggcgattgcggaaaatgatgattatatagcggggattgtgtcaaaaaagggcgataatcactccggtgttaaactngacgcggaaaagataagggaggttattgacggatga

SEQ ID NO: 15018 - protein, 231 aa, Unknown
  Obtained from environmental sample
  misc_feature (1)..(231): Xaa is any amino acid
MQSEIGVLKHVPEIIVDLAVPRDVEPSVGSIKGVTLLTIDDISDDGRSLSPESVLMTEDIIAEHVAKYNKWKEHSMVNQKSFFPLFIDMNGKKVLIVGGGNVAERRVKILASFNADITVISPDITDYIERASSSNIIRLLKRKYESNDIITINPFLVIAATNERQVNHAVMTEAESQNICVSVADNREECTFYFPAIAENDDYIAGIVSKKGDNHSGVKLDAEKIREVIDG

SEQ ID NO: 15019 - DNA, 321 bp, Unknown
  Obtained from environmental sample
  misc_feature (1)..(321): n is a, c, g, or t
atgaaaatcaccttcctaggcgccggcagtaccgtctttgccaaaaacgtcctcggcgactgtatcctcacgccggaactcggcaaattcgaaatcgccctctacgacatagacctacagcgcctaaacgacagctgtaaaatcatctccgcgatcaaccgtaaatacaaaggcaaagcggtcgttgtagcctacgccgaaccggaaaaagcgtttaaagacgtcgactacataatcaatgccatacaagtcggcggctacgagccttgcaacggtaccgacttcgaaatccccaaaaatacggcctccgtcaaaccatag

SEQ ID NO: 15020 - protein, 106 aa, Unknown
  Obtained from environmental sample
  misc_feature (1)..(106): Xaa is any amino acid
MKITFLGAGSTVFAKNVLGDCILTPELGKFEIALYDIDLQRLNDSCKIISAINRKYKGKAVVVAYAEPEKAFKDVDYIINAIQVGGYEPCNGTDFEIPKNTASVKP

SEQ ID NO: 15021 - DNA, 648 bp, Unknown
  Obtained from environmental sample
  misc_feature (1)..(648): n is a, c, g, or t
gtgtttttggtggtctcctgcccctgcgccctggttatttccatacctttaagttttttcggcggcataggcggggcgtcccggcagggcatactcataaaagggggtggcttcctttccgccctgaacgacgttgagacggtggtgttcgataaaacaggaacgcttacaaaagggcagttcgcggtaagcgaggtgttatgcgaaaacgggattacacgcggggaattgctgtactacgcggcggcggcggaatccaattccagccacccaatcgccaaatctgttctgaacgcctacgagggggagatcgcttcctccgacatcgcctcatacgaggaaattcccggcaaagggataagcgtccgcgtaaggggcagggcggtgctggcgggaaacgcccggtttttggagagtaagggcgttacgttacacgcgatcagcgcggcgggaaccgccgtgtatatcgcgctggacggcctgtacgcgggctgcctggtcattgccgatgaagtcaagccggacgcgaggcaggcaatggacgaactgagaagggcgggggcgcgcctggcttgtgatgctttcaggcgacaaccgcgccacggcggaaagatcggcgggcagctcggcctgacgcggttatcctga

SEQ ID NO: 15022 - protein, 215 aa, Unknown
  Obtained from environmental sample
  SIGNAL (1)...(28)
  misc_feature (1)..(215): Xaa is any amino acid
MFLVVSCPCALVISIPLSFFGGIGGASRQGILIKGGGFLSALNDVETVVFDKTGTLTKGQFAVSEVLCENGITRGELLYYAAAAESNSSHPIAKSVLNAYEGEIASSDIASYEEIPGKGISVRVRGRAVLAGNARFLESKGVTLHAISAAGTAVYIALDGLYAGCLVIADEVKPDARQAMDELRRAGARLACDAFRRQPRHGGKIGGQLGLTRLS

SEQ ID NO: 15023 - DNA, 744 bp, Unknown
  Obtained from environmental sample
  misc_feature (1)..(744): n is a, c, g, or t
atgggcgaggccgtcgccggtgataaaaattgggagtttgacggggcttactcgcttgtcaggacgggaaagatgaaagagggagagttcaacgcggaagactttatgcttgtggggccgaacggggcgcagtataagttcgcgacgttgaccgaaggcggcgccgacgcaggcgtttccgttcccggagctattattttcgcggaaaaaaacatcggcgccggggacacatacatacagttttcctccaacaccggagccgctctcgccgccgactacaagagcatggcggtaggcgacagcgtaacgttcatcttctcacgttatcaggccccgtcgtcaaatttagccgattcgtttatggtccaaataggcgccaacagcggtcagacggctttcatctcgataggcgatatgcgagctcaagctatcggtgtggcaaatatagatatcagcacgaagtggggcgccgcgacggccattgagacggtggacaacgccatacaatcggtttctcaccaacgcagttatctcggcgccgtccaaaaccgtctggaacacactatcagaagcctagacacggcaatcgagaacttgcaagccgccgagagccgcattcgcgacatagatatggcgaaagagataatggagttcacgaagcaaaatatcctattgcaagtgtctcaggcgatgctggcctcagcgaattcgcaacctaaaagcgtgttgacgttgttgaggtaa

SEQ ID NO: 15024 - protein, 247 aa, Unknown
  Obtained from environmental sample
  DOMAIN (154)...(225): Bacterial flagellin C-terminus
  misc_feature (1)..(247): Xaa is any amino acid
MGEAVAGDKNWEFDGAYSLVRTGKMKEGEFNAEDFMLVGPNGAQYKFATLTEGGADAGVSVPGAIIFAEKNIGAGDTYIQFSSNTGAALAADYKSMAVGDSVTFIFSRYQAPSSNLADSFMVQIGANSGQTAFISIGDMRAQAIGVANIDISTKWGAATAIETVDNAIQSVSHQRSYLGAVQNRLEHTIRSLDTAIENLQAAESRIRDIDMAKEIMEFTKQNILLQVSQAMLASANSQPKSVLTLLR

SEQ ID NO: 15025 - DNA, 789 bp, Unknown
  Obtained from environmental sample
  misc_feature (1)..(789): n is a, c, g, or t
ttgaaaatcccggtaagcgacattgaggcaaaaattccggcgcagtattaccgattgtaccagcctgttgaaattgccgtaaacgtcccttatccattaattgcctcgcttgccgaacgcaaggattccctgcctggtgtatcgtggaacagcaaacctttgcggaattacgcggatttgcgaagcctgtcccatgttgtagggtatgtcggagatattaccagggatgagctgacccagctttacaaccagggctatcagcagggggatacaataggcaagacggggatagagcggcagtacgacgcgctgctaaggggaaaggacggaagagagacaaggactgtagacgtaaggggaagaagaatcgccggacagggaagccgcgttcctcctgaaacggggaaaaatctggtactgacaatcgacaggcaaatccaaatgcttgccgaacaggcgttaggagaaaggatgggcgctatcgttgtaatgcgtcccaacggagaaatactggcccttgtttcatacccctggtttgatcccaatatgtttaccggcggggggcggggccagtataatatacttgtcaacgatccgaacaggccttttctgaaccgcgccatacagtcaagttatcccccggcttcaacctttaagggtattatgaccacgggaatacttgccgaaaacgccttccctacggaaaagaccgtggactgcccgggcgagattgattatggaaacaggcagtggcgctgccatgtccgcagccggggcatggacgattga

SEQ ID NO: 15026 - protein, 262 aa, Unknown
  Obtained from environmental sample
  DOMAIN (2)...(127): Penicillin-binding Protein dimerisation domain
  misc_feature (1)..(262): Xaa is any amino acid
MKIPVSDIEAKIPAQYYRLYQPVEIAVNVPYPLIASLAERKDSLPGVSWNSKPLRNYADLRSLSHVVGYVGDITRDELTQLYNQGYQQGDTIGKTGIERQYDALLRGKDGRETRTVDVRGRRIAGQGSRVPPETGKNLVLTIDRQIQMLAEQALGERMGAIVVMRPNGEILALVSYPWFDPNMFTGGGRGQYNILVNDPNRPFLNRAIQSSYPPASTFKGIMTTGILAENAFPTEKTVDCPGEIDYGNRQWRCHVRSRGMDD

SEQ ID NO: 15027 - DNA, 489 bp, Unknown
  Obtained from environmental sample
  misc_feature (1)..(489): n is a, c, g, or t
atgaaccttcaagccggaagggtgcgtgtagacgtgaaccctcctgccggatccaaggcggcgctatctgtaagcagcccttccgccaccgcttccgtgcgcggaacaagttttacttttgatacaaggaacgtcagagttcgcgaagggactgtagcctttaaaggaaaagtgggctacacggtgcgggtaggcgccggttcttcaagcgggatagcggcatacagcatggcatcagcttcccagaaggaagcgcctgtacccccaacccctgtgggatacgatccctcaacatcagcaagcacaggcggcacgggagtagccggcgcgccggatgaacctgctccacccaaaccacccacaactccacctggcggcggcagcagcggcggtggtggtggcggcaattcaggcggtaatagcggtggtaacaacaccggcggaggcagtaccggcggggttggcatagatgttggttatcccaattaa

SEQ ID NO: 15028 - protein, 162 aa, Unknown
  Obtained from environmental sample
  misc_feature (1)..(162): Xaa is any amino acid
MNLQAGRVRVDVNPPAGSKAALSVSSPSATASVRGTSFTFDTRNVRVREGTVAFKGKVGYTVRVGAGSSSGIAAYSMASASQKEAPVPPTPVGYDPSTSASTGGTGVAGAPDEPAPPKPPTTPPGGGSSGGGGGGNSGGNSGGNNTGGGSTGGVGIDVGYPN

SEQ ID NO: 15029 - DNA, 843 bp, Unknown
  Obtained from environmental sample
  misc_feature (1)..(843): n is a, c, g, or t
ttggcgctgttcgtatcctgtcagccgaattctgatgagccggagcctgaacccgggtttaccaaaacggcttctgagtatttcattggcaatgacataagcgtcggtataaatataggcaattcaatggacgccaacagcgaaacgggctggggcaacccaaaaattaaccaggccctgcttaacggcattaaagaatccggctttaacatcgtgcggattccagtaacatggtcgacccatatgggggcggctccgaattacaaacttaacgaaacatggcttgaacgcgttgtggaaattacgggttacgcgaaaacggcgggaataaaggctgtcattatcaacctgcaccacgacggttcaaccgattccgcggcttctgaaagcggctggctttccataaataaatcccttgcggatcccgcccaaaaacaggcaataacaacaagattcacaaaggtatgggaacagatagccaaccgtttcaaagacgagggcgaatggcttttctttgaggccttcaacgaactgcatgacggcgggtggttttgggcaaccagggcggttccgcctgagcagtacgcccttatcaacgaatggagccaggtctttgttgataccgtgcgcgccacaggcggcaataacagtaaacgctatcttgtaattcctggctactgtaccggcgccgaggcgctccttaccgataaatttgttcttccggcggacacggtggaagacaggttggtcgtttccttccattactaccgtcccgatggttttgcccttaacggaaaaaacacaacatgngataccgccgcggccagggctgatataacctaa

SEQ ID NO: 15030 - protein, 280 aa, Unknown
  Obtained from environmental sample
  DOMAIN (40)...(279): Cellulase (glycosyl hydrolase family 5)
  misc_feature (1)..(280): Xaa is any amino acid
MALFVSCQPNSDEPEPEPGFTKTASEYFIGNDISVGINIGNSMDANSETGWGNPKINQALLNGIKESGFNIVRIPVTWSTHMGAAPNYKLNETWLERVVEITGYAKTAGIKAVIINLHHDGSTDSAASESGWLSINKSLADPAQKQAITTRFTKVWEQIANRFKDEGEWLFFEAFNELHDGGWFWATRAVPPEQYALINEWSQVFVDTVRATGGNNSKRYLVIPGYCTGAEALLTDKFVLPADTVEDRLVVSFHYYRPDGFALNGKNTTXDTAAARADIT

SEQ ID NO: 15031 - DNA, 615 bp, Unknown
  Obtained from environmental sample
  misc_feature (1)..(615): n is a, c, g, or t
ttgtaccgatcagcgggcgatattcatgacaactggaaatcaatcgagggaatcatgctgtcccaattgaataacgcctgcttcagcggaatcgattgctggaacgatatggatatgctcgtngtcggcatgggcggcggcggcgaaaactcgtatgttttgagcacaggctgcagtgaaaccgaatatagaacgcatttttccgtgtgggcaatgatgaattcccccttgatgataggcgttgatgtacgcaatatgtcggagcaaaccgcggcaattcttacaaataaagacgtaatagcgttaaatcaggatattgaagggcgcgctccttattgcgttcgtcaatggaataatttagacaatgttttctctcttgttaaaccgctttccacgggcggcgactacgccgtagcaatggtaaacatcagcgatgttaaagcggaaatgtccctgcaattttatgatattgggttgacttacgcttctggtctggggcttgaattttacgattgctggaagcatgaggttatcggcttctttacggaacgcgcttcaattgacattgaacctcatgaatgccgcgtgttcagatgcagggtaaaaaaagcatga

SEQ ID NO: 15032 - protein, 204 aa, Unknown
  Obtained from environmental sample
  misc_feature (1)..(204): Xaa is any amino acid
MYRSAGDIHDNWKSIEGIMLSQLNNACFSGIDCWNDMDMLVVGMGGGGENSYVLSTGCSETEYRTHFSVWAMMNSPLMIGVDVRNMSEQTAAILTNKDVIALNQDIEGRAPYCVRQWNNLDNVFSLVKPLSTGGDYAVAMVNISDVKAEMSLQFYDIGLTYASGLGLEFYDCWKHEVIGFFTERASIDIEPHECRVFRCRVKKA

SEQ ID NO: 15033 - DNA, 450 bp, Unknown
  Obtained from environmental sample
  misc_feature (1)..(450): n is a, c, g, or t
atgttaagtgaagctctccggcggcgtacgtttgcgatagtatcccatcccgacgcgggcaagacgacgctgacggagaagctcttgctctacggaggcgcgctgcacttggcggggacggtcaccgctcggaagaaagagcgggctacggtctcggactggatggagcttgaacgcaaacgcggcatctccgtcagctccaccgtgctgaattttgactacggcggctaccgtgtcaacttgttggacacgcccggccacaaggatttctcggaggacacttaccgcgtgcttacggctgtggactcggtaattatggttatcgacggcggtaaaggcatagagggccaaacgcgcaagctctttgagttngccgccgcaggatacgcctgttttcacatttgtcacagatggacgtccgcgctcgacagctggcctgctgacgaataa

SEQ ID NO: 15034 - protein, 149 aa, Unknown
  Obtained from environmental sample
  DOMAIN (9)...(139): GTPase of unknown function
  misc_feature (1)..(149): Xaa is any amino acid
MLSEALRRRTFAIVSHPDAGKTTLTEKLLLYGGALHLAGTVTARKKERATVSDWMELERKRGISVSSTVLNFDYGGYRVNLLDTPGHKDFSEDTYRVLTAVDSVIMVIDGGKGIEGQTRKLFEXAAAGYACFHICHRWTSALDSWPADE

SEQ ID NO: 15035 - DNA, 405 bp, Unknown
  Obtained from environmental sample
  misc_feature (1)..(405): n is a, c, g, or t
gtgacaaatgtgaaaacaggcgtatcctgcggcggcnaactcaaagagcttgcgcgtttggccctctatgcctttaccgccgtcgataaccataattaccgagtccacagccgtaagcacgcggtaagtgtcctccgagaaatccttgtggccgggcgtgtccaacaagttgacacggtagccgccgtagtcaaaattcagcacggtggagctgacggagatgccgcgtttgcgttcaagctccatccagtccgagaccgtagcccgctctttcttccgagcggtgaccgtccccgccaagtgcagcgcgcctccgtagagcaagagcttctccgtcagcgtcgtcttgcccgcgtcgggatgggatactatcgcaaacgtacgccgccggagagcttcacttaa

SEQ ID NO: 15036 - protein, 134 aa, Unknown
  Obtained from environmental sample
  misc_feature (1)..(134): Xaa is any amino acid
MTNVKTGVSCGGXLKELARLALYAFTAVDNHNYRVHSRKHAVSVLREILVAGRVQQVDTVAAVVKIQHGGADGDAAFAFKLHPVRDRSPLFLPSGDRPRQVQRASVEQELLRQRRLARVGMGYYRKRTPPESFT

SEQ ID NO: 15037 - DNA, 816 bp, Unknown
  Obtained from environmental sample
  misc_feature (1)..(816): n is a, c, g, or t
atgctgcacgaaacgatggactttgtaagccgcggcggattgaacgtaattcttacgccgggcaggtacaacgccgcgtactttgaacactcgtacctcgccgaacgcacaggcgcgatacttgtcaaagcttcggagttggtcgttgacggcgctgttttgtacatgaaagattacctcggcattaaggcgaaagtcggcacggtgtaccgccgcatctccgacgagtaccttgacccgatgacgtttatggcggactcactaatcggtgtgccgcatatcatggacgcctaccgttcgggaaatgtagcgataatcaatgcgccgggcaacggcgtcgcggacgacaagggcatatattattttgtgcctaaaatgataaaatactatctggacgaagaaccgatcctgcaaaatgcgccgacatacctgccttactacgaggacgacctgaagttcacgctcgagaacataaagcgccttgtcataaaagacgtttcggaggcgggcggctacggcgtagtgttcggcagcgaattgtcggaagaaaagttagctgaaatcaaggctcttatcataaaagagccgcggcggttcatatcgcaggaagtcatcgactttatcgaccttgatataatggacgaagacggcaaggctgtcccgcgaaaagccgatttaagggcgttcgtgctgacaggcaaaactacgcgcgtgtgggcaagcgggctgacccgtttctcgcgcgttgtcggctcgtttatcgtcaattcttcgcaaggaggaggttttaaagacacatgggtactatctcggtag

SEQ ID NO: 15038 - protein, 271 aa, Unknown
  Obtained from environmental sample
  DOMAIN (2)...(101): Domain of unknown function (DUF404)
  misc_feature (1)..(271): Xaa is any amino acid
MLHETMDFVSRGGLNVILTPGRYNAAYFEHSYLAERTGAILVKASELVVDGAVLYMKDYLGIKAKVGTVYRRISDEYLDPMTFMADSLIGVPHIMDAYRSGNVAIINAPGNGVADDKGIYYFVPKMIKYYLDEEPILQNAPTYLPYYEDDLKFTLENIKRLVIKDVSEAGGYGVVFGSELSEEKLAEIKALIIKEPRRFISQEVIDFIDLDIMDEDGKAVPRKADLRAFVLTGKTTRVWASGLTRFSRVVGSFIVNSSQGGGFKDTWVLSR

SEQ ID NO: 15039 - DNA, 888 bp, Unknown
  Obtained from environmental sample
  misc_feature (1)..(888): n is a, c, g, or t
atgatgaaattcgccggcttactggaaagccacattttatatatcggcatacaggaaacattgaacgaatacgcgattcaaagcggacaacggtttgaggatttcgttccccatgaccggctcaatccgtcaattgccgacaacgactggtattacgactgcaaaaactcccgcaacgagtataccttgaatatagatattgataaagtaacacgtacgcgccttctatggatcaaccacaaggtcatggagaacgggaatctattgggcatattctgcgccggactcccgtttgacgaagtgattcacgccctgttcgagcggtatgacaccgaaaatgtaaaaggctatgttatcgacagggacggcattgtccagatggacagtacgctttccattctatccgaggacgagcataaaaggatccccgaggcggattctgatccggcgcttgccgccgcaatcgaattacatttaaaaaatatcgaaggttacttcggatcggatgaggatctgcaggtaatcaagctgacaaaagggccgtatcaatacgtatccatcaagccaatcgccggttccgactggtcaattgttacttttttcagcaatagatcgctgttcagcatatggcggcttcttccgcttatgatctccctgctgtccgcgtttgtgctgtattcgctgttgggaaacatatttatcaaccatattgtaataaaaccgcttaacctccttacaggaagcatttcagcggaacatggcagtatattcggcaatgaccgcggcgatgaaatcggcgaacttgcgcggactatacaggacatgcgggtaaaaatccacgaggcggacgagcgcgtaaggctcatgctggctcgtgccgaattctga

SEQ ID NO: 15040 - protein, 295 aa, Unknown
  Obtained from environmental sample
  DOMAIN (216)...(281): HAMP domain
  misc_feature (1)..(295): Xaa is any amino acid
MMKFAGLLESHILYIGIQETLNEYAIQSGQRFEDFVPHDRLNPSIADNDWYYDCKNSRNEYTLNIDIDKVTRTRLLWINHKVMENGNLLGIFCAGLPFDEVIHALFERYDTENVKGYVIDRDGIVQMDSTLSILSEDEHKRIPEADSDPALAAAIELHLKNIEGYFGSDEDLQVIKLTKGPYQYVSIKPIAGSDWSIVTFFSNRSLFSIWRLLPLMISLLSAFVLYSLLGNIFINHIVIKPLNLLTGSISAEHGSIFGNDRGDEIGELARTIQDMRVKIHEADERVRLMLARAEF

SEQ ID NO: 15041 - DNA, 840 bp, Unknown
  Obtained from environmental sample
  misc_feature (1)..(840): n is a, c, g, or t
atgaataatatttttcaatatatttttgcggtagattttgcctattcggtgttccgggtaactactcccattctgcttgcggcgctggcctcggtagtagcggaacgggccggagcttccaatatcgcactggaagggataatgcttttcgcggctcttttcggcgctatcggatcagggcttaccggaggcagtctgttctggggatttgtgatggcgctggcgggagggctcgttattgcggtactcctggcttatttcggcttataccttaaaaccaatattatcctggcgggtattgcccttaacacgctggctgccggagggacggtgttcctgatgttcgcccttatcggcgataaaggaactacctcgtctctggtttcggcgagttttccccgaatcaatatccctcttctaaaagacattcccatattggggccgattttttcaggtcagaatacccttacctatctggcttttttcatggtctttgtcgtgtgggtactgctgtataaaacccgccttggaatgcatctaagggccgtgggagaaaacgcggaagccgccgcgtcagtgggaatcccggtgcgaaaaatacaatttatcgcgcttatgatcagcggctttttggcttccgccggcggcgcttttctttccatggggtacatgaatggctttacccggaacatggtatccggccgcggctttattgccctggctgccgccgccatggggcagctttcgccgaattcaacnatgctggctttcttggtttttggttttcttgacgctctttccatattctcgcggcaatgcgtatccccgatgaatttgtaa

SEQ ID NO: 15042 - protein, 279 aa, Unknown
  Obtained from environmental sample
  DOMAIN (13)...(275): Branched-chain amino acid transport system / permease component
  misc_feature (1)..(279): Xaa is any amino acid
MNNIFQYIFAVDFAYSVFRVTTPILLAALASVVAERAGASNIALEGIMLFAALFGAIGSGLTGGSLFWGFVMALAGGLVIAVLLAYFGLYLKTNIILAGIALNTLAAGGTVFLMFALIGDKGTTSSLVSASFPRINIPLLKDIPILGPIFSGQNTLTYLAFFMVFVVWVLLYKTRLGMHLRAVGENAEAAASVGIPVRKIQFIALMISGFLASAGGAFLSMGYMNGFTRNMVSGRGFIALAAAAMGQLSPNSTMLAFLVFGFLDALSIFSRQCVSPMNL

SEQ ID NO: 15043 - DNA, 711 bp, Unknown
  Obtained from environmental sample
  misc_feature (1)..(711): n is a, c, g, or t
ttgggacagaaaaaattcaggtacgatatttcctgtatgagcaaaaacggagaaccaatcgacgtagaaatgtccttccatccgattgacgatgagctttacaggattgagtattttgcgtccagattgttcgtcggacaagacatacaaggcattgataaaaactatgccgatntgaagggaacttaccagatttcaatactggcgcagagactgttttttcccgacaaatacctgacgcacgtctttcagttttacgatccgcagacctgcgtttcactggatggtaagatacgaataattacgctggaactggaaaaatcggcagtgtttattgacaaacctattgaagaaatgaccactacgcaacgatgggcggcgtattttcaatatttgacaaacgagacaaaaagagagaaaataaaagagataatagaccgcgaggagggaatagccatggcaacgaatgcgctgtatcaagtttcagcggaatatgaagcatacgcgcttcaaaccagccttatgaaaggcgaactcgactggcggagcagcatgaaagatgccaagcgtgaagggcttaaggaaggtcttgccgaaggaatcaacaaagccagtcttgacattgcccggaatcttaaaaaaatggggttgcctattactcaaatagccgagggaacgggcctccccatagaaaccattgaacaaatgtag

SEQ ID NO: 15044 - protein, 236 aa, Unknown
  Obtained from environmental sample
  misc_feature (1)..(236): Xaa is any amino acid
MGQKKFRYDISCMSKNGEPIDVEMSFHPIDDELYRIEYFASRLFVGQDIQGIDKNYADXKGTYQISILAQRLFFPDKYLTHVFQFYDPQTCVSLDGKIRIITLELEKSAVFIDKPIEEMTTTQRWAAYFQYLTNETKREKIKEIIDREEGIAMATNALYQVSAEYEAYALQTSLMKGELDWRSSMKDAKREGLKEGLAEGINKASLDIARNLKKMGLPITQIAEGTGLPIETIEQM

SEQ ID NO: 15045 - DNA, 684 bp, Unknown
  Obtained from environmental sample
  misc_feature (1)..(684): n is a, c, g, or t
atgtctaacgaagaagtacaagaagaacaggaattggttacgggcgagcttccgcctgttgaaagcgtagaggagctttcttgcataattcaggcgttggtgtttgcctcgactgaagttgtaactttaaaaaaactaaaagaaattttgggtgattttttagatcaagcacaggtttctagtgcgctccggcacgcaaacgaacagctcgcaaaaatcaaatcaccttttgaaattgtggaagttgccagcggctatcgctttcgcacaaagaacgtatactatccttatatccgcaaacttttcccggatagcaatcctcgcaaactctcccttgccgcgctggaaacactttccataatagcctacaaacaacccataacaaaagcgggcatagaggctattcgcggcgttatgtgtgatgctcctctgcacaacctcttggacaaaaaattcataacgcttgggcaacgcgcagacaccgttggcaacccatacacatacataaccacagaggaatttttaaaatactttggcataaaccgtattccagacgatttgcctcgtttaacggaattcagcgatattctcaacagcgattttttaattccgcaatatcccatgcaaaaacagatgcccgaacaaatttctctgcaagaatccaccaaacaatttgggccataa

SEQ ID NO: 15046 - protein, 227 aa, Unknown
  Obtained from environmental sample
  DOMAIN (28)...(190): Putative transcriptional regulators (Ypuh-like)
  misc_feature (1)..(227): Xaa is any amino acid
MSNEEVQEEQELVTGELPPVESVEELSCIIQALVFASTEVVTLKKLKEILGDFLDQAQVSSALRHANEQLAKIKSPFEIVEVASGYRFRTKNVYYPYIRKLFPDSNPRKLSLAALETLSIIAYKQPITKAGIEAIRGVMCDAPLHNLLDKKFITLGQRADTVGNPYTYITTEEFLKYFGINRIPDDLPRLTEFSDILNSDFLIPQYPMQKQMPEQISLQESTKQFGP

SEQ ID NO: 15047 - DNA, 669 bp, Unknown
  Obtained from environmental sample
  misc_feature (1)..(669): n is a, c, g, or t
atgtctacggcggaggctgcaacggccaggccggcgcctgccgccacggtcttgcccgcgctctttgtcaggtggatcataccaattacaccagtctgcgcagcaacggttatcttacccgcgacccgcgcatggttgaacgtaaaaagtacggacgccccggcgcaagacggcgcttccagttctccaagcgttagtttggaagatttcgaaaacgataccacttcttatctgcaggcgaagaacaccgctctgcgtttaattgccagagcggaacaatgcgttcaaggcctctccttcaaacttgaaaggcggggctatgacgcgcattgcattaacacggtaatctccgaacttacagaagaaaacctgctcaacgatttgcgctttgcccaactgtggcttgaatccagaatgaggctgacgcgcactccccagcggcttctcgcttccctttgcgggcgcggcatagaccgcaaagacgccgaggccgctttcagaaaagtttttgacgaggaaacagagttgtctcttttaaaacgttttgtcaaaaaaaaccggcaaaagccgcgccgaggcaagagcgaagaaacttcgcgctctttgaaatatttgttgaacagcgaagggttttcgccgttggtgattagacggtattttgaggaatag

SEQ ID NO: 15048 - protein, 222 aa, Unknown
  Obtained from environmental sample
  DOMAIN (102)...(222): RecX family
  misc_feature (1)..(222): Xaa is any amino acid
MSTAEAATARPAPAATVLPALFVRWIIPITPVCAATVILPATRAWLNVKSTDAPAQDGASSSPSVSLEDFENDTTSYLQAKNTALRLIARAEQCVQGLSFKLERRGYDAHCINTVISELTEENLLNDLRFAQLWLESRMRLTRTPQRLLASLCGRGIDRKDAEAAFRKVFDEETELSLLKRFVKKNRQKPRRGKSEETSRSLKYLLNSEGFSPLVIRRYFEE

SEQ ID NO: 15049 - DNA, 507 bp, Unknown
  Obtained from environmental sample
  misc_feature (1)..(507): n is a, c, g, or t
gtgatttcctttgatcttaatatccgcgcctttatgataaaggacaaagaggcttttatcaggcgcacggaaaaactcatcgccgcttctactatcgttaaaatttctaacgctgatatagactatttatatccgggcatggataccgacaaagctattgaacgaattttaacctntgggccacgtctggttattgctacactaggtccggatggcgctctggctctgctccggcgtcatgacggaaatattatcaaagtcagcgctccggctgtagatattccccttgcggataccataggcgcgggagatactttccacggggctttcctttcatggcttgaaataaaagggaagatgtcccgttccgcgcttgcaaatatgagcagtaccgaactctatgaggctctcttttttgccaacaaagcggcggctatagtttgttcccgcaggggcgcggagcctcccactctgaaagaagtggaagaactgagaaccccgctttga

SEQ ID NO: 15050 - protein, 168 aa, Unknown
  Obtained from environmental sample
  misc_feature (1)..(168): Xaa is any amino acid
MISFDLNIRAFMIKDKEAFIRRTEKLIAASTIVKISNADIDYLYPGMDTDKAIERILTXGPRLVIATLGPDGALALLRRHDGNIIKVSAPAVDIPLADTIGAGDTFHGAFLSWLEIKGKMSRSALANMSSTELYEALFFANKAAAIVCSRRGAEPPTLKEVEELRTPL

SEQ ID NO: 15051 - DNA, 828 bp, Unknown
  Obtained from environmental sample
  misc_feature (1)..(828): n is a, c, g, or t
ttggggtcgttgctggtgggcttaagttttgcaaaggcctttgcctgggcaaggggcataccctttatcgccgttgatcatatgctggcccacctttacgcgccccggcttgaaaacgaggatatcgagtatccttttcttggcctgcttgtgtccggggggcacagcattatctgcaaggccgatagttttgacgacattacagttttgggtacaactatcgacgacgcggtgggagaggcctttgacaaagtttccaagcattacggctttgggtatcccggcggagcggtaatagacaagctggccaaatctggggacagcggggcgtttaattttcccctgcccaatttgtacaagggggaccatcgttacgatttttcttactccgggctgaaaacggcggtgataaaccaactcgataaatttcgtgccggacctcccaaagccgagggtgacagtcccgccgatattgccgccgcctttcagaaaaccgcggtggagattttgttacgcagtctttttaacgcggtagaagataccggccttaaaaggatcgtcgcggggggaggggtagccgccaactcgtgccttagagccgccctggccgaaaggcgggaccttgactgcgtttttccaccgcttgaactttgcggcgacaacggggcaatggtcgcgggtcttggctatcagtacctttcaaggggagagcgctcttcgctcagggctcaggccagtcgcagggtagcttcgtttaagcgaggtacccatgacaaagcagtcgtaagcgaagttttattcgctaatagcaatttgaatgcacactaa

SEQ ID NO: 15052 - protein, 275 aa, Unknown
  Obtained from environmental sample
  DOMAIN (2)...(227): Glycoprotease family
  misc_feature (1)..(275): Xaa is any amino acid
MGSLLVGLSFAKAFAWARGIPFIAVDHMLAHLYAPRLENEDIEYPFLGLLVSGGHSIICKADSFDDITVLGTTIDDAVGEAFDKVSKHYGFGYPGGAVIDKLAKSGDSGAFNFPLPNLYKGDHRYDFSYSGLKTAVINQLDKFRAGPPKAEGDSPADIAAAFQKTAVEILLRSLFNAVEDTGLKRIVAGGGVAANSCLRAALAERRDLDCVFPPLELCGDNGAMVAGLGYQYLSRGERSSLRAQASRRVASFKRGTHDKAVVSEVLFANSNLNAH

SEQ ID NO: 15053 - DNA, 690 bp, Unknown
  Obtained from environmental sample
  misc_feature (1)..(690): n is a, c, g, or t
atgcacagtattgaaaaactggaaaaattaaatgtgttagacgatcattgcctttttatccactgtatcgctctcagcgatgaagatatagaaaaagccgcaaaggcgggcgtaagcgtttcgtggtgcggattctccaatatgtttatgtttaatgtgacggcaaaagtgcgcaaaatgatcaaagcgggaattaatgtcacaatcggaacggattcatcggctacaggttccgccaatcttcttgcggaaattaaatacgacagggaattgtatcaaaaactttacggcgaggatcttccggcgcaaaaaatcttcgagatggttacaattaacgccgcaaaagcgtttagaatggacggcagaacaggctctctggaagaaggcaagttaggtgatattttagtcttaaaggcgaaaaaagacgatccgtacgaaaatcttgtcgatgccgacatgaaagatatagaactgcttacgcttgccggaaatccgatatacggcgagatgcgtttccttgatattttcaacggaactctgcctgaaggttatacaaaaataacggttggaaacagagaaatgtttgtaaaaggcgatccagccggaatttataacgaagcgagaaaaaaaataggttttaagagaatacttgactatctgccgtttgagccggcacaggaaggcgcataa

SEQ ID NO: 15054 - protein, 229 aa, Unknown
  Obtained from environmental sample
  misc_feature (1)..(229): Xaa is any amino acid
MHSIEKLEKLNVLDDHCLFIHCIALSDEDIEKAAKAGVSVSWCGFSNMFMFNVTAKVRKMIKAGINVTIGTDSSATGSANLLAEIKYDRELYQKLYGEDLPAQKIFEMVTINAAKAFRMDGRTGSLEEGKLGDILVLKAKKDDPYENLVDADMKDIELLTLAGNPIYGEMRFLDIFNGTLPEGYTKITVGNREMFVKGDPAGIYNEARKKIGFKRILDYLPFEPAQEGA

SEQ ID NO: 15055 - DNA, 564 bp, Unknown
  Obtained from environmental sample
  misc_feature (1)..(564): n is a, c, g, or t
ttgcgcgggtgccgcctgaacaagttgatcttgtcaaacagcagcttcaaaatttcgccagtttattttttgcttatacagacggtaaacgccgtattcgccggttacacgataaacgccattttcgggctcggcgaagaactcgggtggcgcggttatttgctcanagcgttgcaagacaaaaaatttatgaccgtttcgttgattatcggaacggtgtggggtttgtggcacttcccgcttattcttatagggcataattatccgcaacatccggcagccggcgtggggatgatggttgttttttgtattttgcttacgccgatgatgatctataccgtaataaaatccaaatctgtaattgccgccgccgtttttcatggagttaataacgccatctgcgggattaccgtcttatacaccgtaggcggcaacgacctgacgaacggcgcaacaggaatcgccggatttatcgccttgctgttggcgaacctcgtgtttttcatatacgataagtatattaccaaagaaaacatttttgcaaagccgataggagagtattaa

SEQ ID NO: 15056 - protein, 187 aa, Unknown
  Obtained from environmental sample
  DOMAIN (33)...(138): CAAX amino terminal protease family
  misc_feature (1)..(187): Xaa is any amino acid
MRGCRLNKLILSNSSFKISPVYFLLIQTVNAVFAGYTINAIFGLGEELGWRGYLLXALQDKKFMTVSLIIGTVWGLWHFPLILIGHNYPQHPAAGVGMMVVFCILLTPMMIYTVIKSKSVIAAAVFHGVNNAICGITVLYTVGGNDLTNGATGIAGFIALLLANLVFFIYDKYITKENIFAKPIGEY

SEQ ID NO: 15057 - DNA, 666 bp, Unknown
  Obtained from environmental sample
  misc_feature (1)..(666): n is a, c, g, or t
ttggctcactcgcttggcgcagagattaaagcagttgccatgacagaagcagcgagaaaagccaaaaatcaagaggagcttttgcaggcggtggaaaaagttctttgggtgaaacctcgcataataagtggcgaagaagaagccgagctttcttacaaagctgtttcaaaggtttatgggcaagggattttaaccgttgatgtgggcggaggttcaacagagctggcaaatggaaagaattttttgagcattcccgttggtgcccttgaactctatgaacgcatgggtgcaatcccaggtcctgaatacaaaaaatggacaaaggatttttttaaggaaattaatataaagccttttgctaaaagagaatcttattttgttggaggaacggctgttgcccttggaatgcttgttaaagaaatgcaaagtttcaatgcgaaagccttggaaggagagtctgtttttgttgctgatattgaacgggttataatacatttaagcggtttgtcaaaagagctaagaaacacaatgcctggtttggagaaaggcaggggagatattattatatgcgggctttattggataaggtccctttgcgaaaaattgaaaatagattccataaaaatttcaacgcttggtttaaggttcgggcttttgtgtgactag

SEQ ID NO: 15058 - protein, 221 aa, Unknown
  Obtained from environmental sample
  DOMAIN (2)...(221): Ppx/GppA phosphatase family
  misc_feature (1)..(221): Xaa is any amino acid
MAHSLGAEIKAVAMTEAARKAKNQEELLQAVEKVLWVKPRIISGEEEAELSYKAVSKVYGQGILTVDVGGGSTELANGKNFLSIPVGALELYERMGAIPGPEYKKWTKDFFKEINIKPFAKRESYFVGGTAVALGMLVKEMQSFNAKALEGESVFVADIERVIIHLSGLSKELRNTMPGLEKGRGDIIICGLYWIRSLCEKLKIDSIKISTLGLRFGLLCD

SEQ ID NO: 15059 - DNA, 381 bp, Unknown
  Obtained from environmental sample
  misc_feature (1)..(381): n is a, c, g, or t
atgaacattccatcagaattaaagtacagcaacgaccacgagtgggttaaatcggaaggcgaaatggccgtaatcggcatcaccgactatgcacaaaaagaacttggcgacatcgtttttgttgatgttacctgcgaaggcgaaacacttgcagcaggcgaaattttcggaaccatcgaagccgtgaaaaccgttagcgacctcctattgcccgttggcggcgaagtggttgagttcaactcgtctttggaaacagacgcagccgtgatcaacagcgatccgtatggcaaaggctggatcatcaaagtgaaaatgtctaatccttcggaactttcgaaattgatggatgcgggcgcctacaaaacacatatcggagcataa

SEQ ID NO: 15060 - protein, 126 aa, Unknown
  Obtained from environmental sample
  DOMAIN (7)...(123): Glycine cleavage H-protein
  misc_feature (1)..(126): Xaa is any amino acid
MNIPSELKYSNDHEWVKSEGEMAVIGITDYAQKELGDIVFVDVTCEGETLAAGEIFGTIEAVKTVSDLLLPVGGEVVEFNSSLETDAAVINSDPYGKGWIIKVKMSNPSELSKLMDAGAYKTHIGA

SEQ ID NO: 15061 - DNA, 417 bp, Unknown
  Obtained from environmental sample
  misc_feature (1)..(417): n is a, c, g, or t
atggggaaaatgaaaaaaacacgaaatttgggattgagttttgcgaataaccaatggaccgaaagtcgttcggacgactgggttttcggactaggctacgtgttcaaagacgttgaatttaatgttttgacaggaaacatcaagcgcaaagtgaaaagtgacatcaacgtcagagccggtgtttcgtttcgttccaacgtaacaatgcttcgtcgaatcgaccaacgcatcgacctggtttcagccggttcaaaagttacaacactgaacttctcggcagactatcaactgtctccaaatttcgttgtgcggctgttctacgaccacaccatgaatcgtcccgaattgcctaccatgttctacaactcaaccgcaaacgggggaattagtttaaaatttacgattaattataattaa

SEQ ID NO: 15062 - protein, 138 aa, Unknown
  Obtained from environmental sample
  misc_feature (1)..(138): Xaa is any amino acid
MGKMKKTRNLGLSFANNQWTESRSDDWVFGLGYVFKDVEFNVLTGNIKRKVKSDINVRAGVSFRSNVTMLRRIDQRIDLVSAGSKVTTLNFSADYQLSPNFVVRLFYDHTMNRPELPTMFYNSTANGGISLKFTINYN

SEQ ID NO: 15063 - DNA, 540 bp, Unknown
  Obtained from environmental sample
  misc_feature (1)..(540): n is a, c, g, or t
ttggttgcccagcttgaggcgtttcgtttcggaaatttacggctgcttgcttccctggcagatgaaagcgatttttccgaataccgcccgataatttactataccctctggaagattgaacaaaacccggcgtggaaaacttttttagctaaagatttccctttaagcccggaagcaaaaataaccgccggtaaagcgcttcaggcccagacgccgctatggatacttttccccggcagggaagacatcggcttaaccagcctaacccagtcagctcctccaattgcagcggccatgccatcaccggatccggcggcaatcgggacggttctccaggccggtctcttcagccgtgaagaaaatgccctcgcattctccgagaagatcatcaaagcgggtttccagaccattgttcaaacgaagctgcaaaacagcgctacttactgggttgtctatgttccgtacggctccgacatgaacgcgatgattaaaaaactaaaagacgccggcttcgagtccttcccagtaacgctgaactaa

SEQ ID NO: 15064 - protein, 179 aa, Unknown
  Obtained from environmental sample
  DOMAIN (105)...(177): Sporulation related domain
  misc_feature (1)..(179): Xaa is any amino acid
MVAQLEAFRFGNLRLLASLADESDFSEYRPIIYYTLWKIEQNPAWKTFLAKDFPLSPEAKITAGKALQAQTPLWILFPGREDIGLTSLTQSAPPIAAAMPSPDPAAIGTVLQAGLFSREENALAFSEKIIKAGFQTIVQTKLQNSATYWVVYVPYGSDMNAMIKKLKDAGFESFPVTLN

SEQ ID NO: 15065 - DNA, 876 bp, Unknown
  Obtained from environmental sample
  misc_feature (1)..(876): n is a, c, g, or t
atgcaaaactgccctttcccctggcgagggttcaggggggcagctctgtcggcggcgtggcgggagagtaactacaggggcacgctggtaaactgctacgccacgggcaaagtttcaggggccagctctgtcggcggcgtgataggatactcatcaagcgataacatgggctctataggacactgctacgccacgggcgatgtttcaggaacaggcaacaatgtcggcggcgtggtaggacaaaccagcgggagcagtataggcaactgctacgccacgggcaaggtatcagggggcagctctgtcggcggcgtggcaggatctaacggaggaagcggctacggtggcggccacttgtccaattgctacgccacgggcaatgtttcagggggcagctctgtcggcggcgtaacgggaagtacctatctcgccacagtgtattcctgttacgccacgggcactgtttcaggaaccggcaatacagtcggcggtgtggcggggagtagcaacgggtattcgtcgagtagcggtgtcagaagcgcgacgaaaaactgtgtagcgctgagcccgaacataagcgggtcaagcgacgtttatcgtgtttcgtaccctggcaacggcacactgcaaaataactacgggcggagcgatatggtagtaaatgctaccgccgtcagttcagatgacgcgaacagtgtaaacggcgcggatattacagaggacaattgggaggacgcaagctggtggcaagctcatgggtttaacgcgacagattgggatttcacaggcattaccgacggaatcaagctgccaaagctgaaggagatgccgggagggctagaggcgcaggatccggaggtgcaaccgttaccgtaa

SEQ ID NO: 15066 - protein, 291 aa, Unknown
  Obtained from environmental sample
  DOMAIN (71)...(97): The GLUG motif
  misc_feature (1)..(291): Xaa is any amino acid
MQNCPFPWRGFRGAALSAAWRESNYRGTLVNCYATGKVSGASSVGGVIGYSSSDNMGSIGHCYATGDVSGTGNNVGGVVGQTSGSSIGNCYATGKVSGGSSVGGVAGSNGGSGYGGGHLSNCYATGNVSGGSSVGGVTGSTYLATVYSCYATGTVSGTGNTVGGVAGSSNGYSSSSGVRSATKNCVALSPNISGSSDVYRVSYPGNGTLQNNYGRSDMVVNATAVSSDDANSVNGADITEDNWEDASWWQAHGFNATDWDFTGITDGIKLPKLKEMPGGLEAQDPEVQPLP

SEQ ID NO: 15067 - DNA, 819 bp, Unknown
  Obtained from environmental sample
  misc_feature (1)..(819): n is a, c, g, or t
atgatgggcgagccgcccggctatcccagttacaccgtggccttcgacagcaacggggggagcgacgtcgcaagccagaacgtgaagaggcacagcaaggccgcagagcccgccgagccggccaggggcggctggttctttgtcgactggtacagcgacaacacgaccttcaacgaccgatacgcttttcatacccccgttaccgcaggcataaccctgtacgccaggtggagcaacgttgctccctttgtcgtaacgtttgacaagaacagcggggacaccgaggcggatccatcaagcgagaaagccctttccggggaaacagtaaccctgcccgcgcccccgacccggacgggccatgcctttgccggatggaacacccaggccaacggaagcggcgcggcttttaccgagtccacccccgttacggctgacatcaccgtgtacgcccagtggactgcaaacacgctaaccataagctacgatccaggcggcggcacgggcagcgcgccagcgtcccccacatcggcggcctacggtacgagcgtcgccatgcccgcctgtacctacgacaatccaggccaccccttcgtcggctgggaagtgggcggcccaggcgcgatatccggcacccacgcggcgggcgcgagcgtcgcggtatccgcgctctcaagcgccatagccacaggcgatgcgggcgtcacgctcacagcctcgtgggccgcaccgggcgacggcagcaccgcaaacccctttttggtaagcactgttgaggacttatcccatgtcggcaaaccaaccaccgggcggagcttatga

SEQ ID NO: 15068 - protein, 272 aa, Unknown
  Obtained from environmental sample
  misc_feature (1)..(272): Xaa is any amino acid
MMGEPPGYPSYTVAFDSNGGSDVASQNVKRHSKAAEPAEPARGGWFFVDWYSDNTTFNDRYAFHTPVTAGITLYARWSNVAPFVVTFDKNSGDTEADPSSEKALSGETVTLPAPPTRTGHAFAGWNTQANGSGAAFTESTPVTADITVYAQWTANTLTISYDPGGGTGSAPASPTSAAYGTSVAMPACTYDNPGHPFVGWEVGGPGAISGTHAAGASVAVSALSSAIATGDAGVTLTASWAAPGDGSTANPFLVSTVEDLSHVGKPTTGRSL

SEQ ID NO: 15069 - DNA, 696 bp, Unknown
  Obtained from environmental sample
  misc_feature (1)..(696): n is a, c, g, or t
atgtcaacagatgataaaaaaataatttactccatgcacaaagtttcaaaaaagcatgggacaaaacaggttcttaaagatatcagtatctcctacttttacggcgctaaaataggcgttatcggccttaacggatcgggaaaatccagtcttttaaaaatacttgccggcacagacactgagtttgccggagatacttcaatcagccccggattttcaatcggtttccttgaacaggagccgtaccttgaaccgggcaaaactgttaaggaaatagtgtccgaaggggctaaagagcttgtcgcccttcttgcggaatttgacaaggtaagcgaagcgtttggagagccggacgcggactacgacaagcttggcgcgaaacaggcggaattacaggaaaagatcgaggctgcagacggctggaatttggacagccgccttgagcttgcaatggaagctcttcgctgtcctcccggcggcgaagttgtcgatcacctatcaggcggagagaggcggcgcgtcgctctttgccgtctgctcctgcaaaagcctgacatcctgttacttgacgagccgaccaatcatctggacgcggaaaccgtggcatggctggaacgtcatctgcgggattacgccggcactgtaatcgccgtacgcacgaccgctattttggacaatgagcctcggccgatctga

SEQ ID NO: 15070 - protein, 231 aa, Unknown
  Obtained from environmental sample
  DOMAIN (35)...(227): ABC transporter
  misc_feature (1)..(231): Xaa is any amino acid
MSTDDKKIIYSMHKVSKKHGTKQVLKDISISYFYGAKIGVIGLNGSGKSSLLKILAGTDTEFAGDTSISPGFSIGFLEQEPYLEPGKTVKEIVSEGAKELVALLAEFDKVSEAFGEPDADYDKLGAKQAELQEKIEAADGWNLDSRLELAMEALRCPPGGEVVDHLSGGERRRVALCRLLLQKPDILLLDEPTNHLDAETVAWLERHLRDYAGTVIAVRTTAILDNEPRPI

SEQ ID NO: 15071 - DNA, 528 bp, Unknown
  Obtained from environmental sample
  misc_feature (1)..(528): n is a, c, g, or t
atgaaaacagctaacgcgcttgaagccgcggaaatcttactgccttaccagaaggcttggatagaggacgaaagcccgcttaagatttgggaaaaaagcaggcggatcggggcttcctggacggaggcgctcaactccgtcctgcagacgcagggctcaaaagggcaaaacacatactatctttcatataacaaggacatgacccggcagttcataacggattgcaaattctgggcggggatcgtcaacatagccgccggagaattaaaagaagaaatcgtcaaagaggacggcaaagaattcacggtataccgcataacgtttttaaacggcagggaaatcgtcgggctgccaagcgttccgtacgcgataaggagcaagcaggggcgcgtcattcttgacgaggcggcgttcacggacgaatttgaagaaatcaaaaaggcggcgctcgcccttttaatctgggcagggtcgttttcgattatatctacgcataacggcgacgacagcgagttttatttctcctga

SEQ ID NO: 15072 - protein, 175 aa, Unknown
  Obtained from environmental sample
  misc_feature (1)..(175): Xaa is any amino acid
MKTANALEAAEILLPYQKAWIEDESPLKIWEKSRRIGASWTEALNSVLQTQGSKGQNTYYLSYNKDMTRQFITDCKFWAGIVNIAAGELKEEIVKEDGKEFTVYRITFLNGREIVGLPSVPYAIRSKQGRVILDEAAFTDEFEEIKKAALALLIWAGSFSIISTHNGDDSEFYFS

SEQ ID NO: 15073 - DNA, 387 bp, Unknown
  Obtained from environmental sample
  misc_feature (1)..(387): n is a, c, g, or t
atggacaggacggcctccgttccagaaacatggaaactggatcattgggcggtgaacacaggctccgcattgggcgcggctggcgtaattcgcttacagcacaaagacggtgaaagtaaaaaattggtctgcctaggcgacggccccatcgactcgatctttaaatcgataaaccagattgtaggcaaagaacctgagcttgaactttatgaaataggcgcagttaccggcggctcatcttcgcaaggcgaagcaatggtaaaaatagcgatggacggacgccgctggaacggtcgcggagtctccaccgacgtaattgaagcctcgataatggcgtacctttccgcgataaacgcaatggagtgggatttagcagataacaattaa

SEQ ID NO: 15074 - protein, 128 aa, Unknown
  Obtained from environmental sample
  DOMAIN (1)...(121): LeuA allosteric (dimerisation) domain
  misc_feature (1)..(128): Xaa is any amino acid
MDRTASVPETWKLDHWAVNTGSALGAAGVIRLQHKDGESKKLVCLGDGPIDSIFKSINQIVGKEPELELYEIGAVTGGSSSQGEAMVKIAMDGRRWNGRGVSTDVIEASIMAYLSAINAMEWDLADNN

SEQ ID NO: 15075 - DNA, 951 bp, Unknown
  Obtained from environmental sample
  misc_feature (1)..(951): n is a, c, g, or t
gtgactctggcgcagaaagaaggaattatcccctggaaaaagggcatgaaaataaaaagcggcgataaattctatttcagccgccgcacaaaggcggcggttttctgtactgtcgggaagaaaagtttttctcagggtatttccattgccgccgcccatatagactcaccccggctggattttaaaatgcgtccattatatgaagattccggtatggctttttttgacactcattattacggaatgataaagccgtatcagtggacgggtattcccctggctctgcacggttttattatccgcgcggacgggcaggagcttgccatacaaataggcgaagatcaggatgacccgcgtttttttatagcggatctgcttccccatctgggagaaaagaaccccgcgaaagatccggttccggcggaaaaccttgatgttcttgccggacttaattgcgcgccgggtgaaagcggggcagggacggttaaactaaatatactccgcctgttatacgaaaaatacggaattaccgaaaaagatttaatctccgccgagatttgcgcggttccggcgtttcccgcttcggatcttggcttcgacaggagcatggtaggagcctatggtcaggatgacaaggcatgcgcctatgcctgtcttaccgcgttcctttccgcaagggaaccggaatacacctcgtgcctggtcctcgccgacaaggaagaaacaggttctgtgggaatcagcggaatgcagtcggcttttttttcaggctttatcagtgaattgattgaggcccgggacaattccgcgaccgtccacgaagttttttcaaattcattatgcgtttccgcggatgttaatacctgctggcatcccctgtataaagaatttcttgacgaacatggagaggcaaaattaatcacggggtcatcttccgctgtgccgcgataa

SEQ ID NO: 15076 - protein, 316 aa, Unknown
  Obtained from environmental sample
  DOMAIN (3)...(314): Aminopeptidase I zinc metalloprotease (M18)
  misc_feature (1)..(316): Xaa is any amino acid
MTLAQKEGIIPWKKGMKIKSGDKFYFSRRTKAAVFCTVGKKSFSQGISIAAAHIDSPRLDFKMRPLYEDSGMAFFDTHYYGMIKPYQWTGIPLALHGFIIRADGQELAIQIGEDQDDPRFFIADLLPHLGEKNPAKDPVPAENLDVLAGLNCAPGESGAGTVKLNILRLLYEKYGITEKDLISAEICAVPAFPASDLGFDRSMVGAYGQDDKACAYACLTAFLSAREPEYTSCLVLADKEETGSVGISGMQSAFFSGFISELIEARDNSATVHEVFSNSLCVSADVNTCWHPLYKEFLDEHGEAKLITGSSSAVPR

SEQ ID NO: 15077 - DNA, 474 bp, Unknown
  Obtained from environmental sample
  misc_feature (1)..(474): n is a, c, g, or t
atgaacatggtgagcgaacccaaggaagccgatgtagcgatgaagatacgcaggtcatgcgaggagtaccttgaccttaaaatagagtaccttggggtaatttaccgcgacatggttcaggacacggcccttgcctcaaaaatgccgataaccatttacaaacccaagtccatactttcccaggcggtttaccgcatcgccgataaaatcatggaaagcagcgaaaattcctttgtaccggactcggagcaaatcaatgatagtttccaggaagcgggaatggaagcggaagccgatttcgagagcaaaatggactacatcggggaactgctgcattcaggcgccttaacccagggcgaccttatcgagacggttaagacccagcagctggaaatctccaaactcagaaaagaatgcaactttgtaaagaaaaaactgacgcaagccatacaaatgggctttaacccaaaatag

SEQ ID NO: 15078 - protein, 157 aa, Unknown
  Obtained from environmental sample
  misc_feature (1)..(157): Xaa is any amino acid
MNMVSEPKEADVAMKIRRSCEEYLDLKIEYLGVIYRDMVQDTALASKMPITIYKPKSILSQAVYRIADKIMESSENSFVPDSEQINDSFQEAGMEAEADFESKMDYIGELLHSGALTQGDLIETVKTQQLEISKLRKECNFVKKKLTQAIQMGFNPK

SEQ ID NO: 15079 - DNA, 519 bp, Unknown
  Obtained from environmental sample
  misc_feature (1)..(519): n is a, c, g, or t
atgcagaccgccctggcttcccttttcaccatgaaatacggttccatcattgtcatggaagagatgagttacgcccaggctctgcccctctacggcctaaggcagaacatcttcacggatccccagaaaccaatgaaggttgaaccggggatctaccccatcaacggagcggacgaaaacgcgatctgcgccaccaccgtggactttgccctgacttactttatcatttcaggggaactggaacgttccggcgttcccgtgaacctcctcatctccgatgccgggggctattcggtgcttaccgcctgggcagcgggaaaactgtccgcttcttccatggccaaattcatcaaagagcacggggtggaaactaaaatcaaaaaccgtaacctcatcatccccggcaaggtagcggtcctcaaaggcgaactggaagaaagccttccaggctggaagatcatagtcgcccccggagaagccataggcattgtaaagttcctcaaggaacttaaggtttaa

SEQ ID NO: 15080 - protein, 172 aa, Unknown
  Obtained from environmental sample
  misc_feature (1)..(172): Xaa is any amino acid
MQTALASLFTMKYGSIIVMEEMSYAQALPLYGLRQNIFTDPQKPMKVEPGIYPINGADENAICATTVDFALTYFIISGELERSGVPVNLLISDAGGYSVLTAWAAGKLSASSMAKFIKEHGVETKIKNRNLIIPGKVAVLKGELEESLPGWKIIVAPGEAIGIVKFLKELKV

SEQ ID NO: 15081 - DNA, 840 bp, Unknown
  Obtained from environmental sample
  misc_feature (1)..(840): n is a, c, g, or t
atgccgaccgtggcaaaagacccgatgctcatttatttttcttccggtactgccggaatgcctaaaatggtgcttcacaaccacagtctgccgttgggacatattgttacggcaaaatactggcactgcgtggaagataaccgcgtccacctgacgcagactgattcagggtgggcaaaatttgcgtggggtaagatttacggacagtggatttgcggcgcgacaataggtgtttacgacacggaaaaatttacccccaaaggaatgttagacgctattcaacggttaaagcccacgacattttgcgctcccgccactgtattccgttatcttattaaggaagacctttcacattatgattttagttttattcgccacacgtccgtggccggggagccgttaagccctgaggtttacaataaatttaaggaacttacaaaacttgaaatttacgaaggttttggccaaagtgagacttccgtaatggcggccgtttttaaatggttgtccgtaaaacccggttcaatgggaaaaccagcgcctcttttcggcctcaaactgttagacgaaaacgggatagaatgtgacgaaggtattgttggaaacatgagtataacgggcgctggaaaaaacatgtacgaaaccgaaggcggcgcctcggaaaatattccgcccgtagtaggcaattctgattttcccggtcttttccggggttactggaaagaaagggaaataactttaaataattggaatcacggaacgtaccanactggcgacatggcgtggaaggacgacgacngctatctgtggtttgtcgggcgtaatgacgatgtgatctag

SEQ ID NO: 15082 - protein, 279 aa, Unknown
  Obtained from environmental sample
  DOMAIN (2)...(279): AMP-binding enzyme
  misc_feature (1)..(279): Xaa is any amino acid
MPTVAKDPMLIYFSSGTAGMPKMVLHNHSLPLGHIVTAKYWHCVEDNRVHLTQTDSGWAKFAWGKIYGQWICGATIGVYDTEKFTPKGMLDAIQRLKPTTFCAPATVFRYLIKEDLSHYDFSFIRHTSVAGEPLSPEVYNKFKELTKLEIYEGFGQSETSVMAAVFKWLSVKPGSMGKPAPLFGLKLLDENGIECDEGIVGNMSITGAGKNMYETEGGASENIPPVVGNSDFPGLFRGYWKEREITLNNWNHGTYXTGDMAWKDDDXYLWFVGRNDDVI

SEQ ID NO: 15083 - DNA, 510 bp, Unknown
  Obtained from environmental sample
  misc_feature (1)..(510): n is a, c, g, or t
gtgttggtcgtttttgcgctattctgtatgtattttttcagagacccaaaaataaaagtcacgcagggagaagggttgatactctctccgtgtaacggaacagttatggaagtgacggaagacggagagcataaaattatccgggtgtttctttctattttcagcgtccacttacaacgctctcctgtcagcggaactgttgttgatgtaacgcataaggacggaaaattttacgcggcgtggaatccgcgcgcgcattccgaaaatgaacagaatattatcaccattaggagcgaggacagtatgtatgtggtgcgccaaattgccggattggtggcaaggcggtgcgtgtcatgggtgaagaaaaacgacgctcttaaagcgggagataaaataggaatgattaaattcagctctcaggttgatctgcacctgcccaaaaaagcggtgatagacgtaaaaccgggagataaaacaaaagcgggtattacggtaatggggaggaaataa

SEQ ID NO: 15084 - protein, 169 aa, Unknown
  Obtained from environmental sample
  DOMAIN (5)...(167): Phosphatidylserine decarboxylase
  misc_feature (1)..(169): Xaa is any amino acid
MLVVFALFCMYFFRDPKIKVTQGEGLILSPCNGTVMEVTEDGEHKIIRVFLSIFSVHLQRSPVSGTVVDVTHKDGKFYAAWNPRAHSENEQNIITIRSEDSMYVVRQIAGLVARRCVSWVKKNDALKAGDKIGMIKFSSQVDLHLPKKAVIDVKPGDKTKAGITVMGRK

SEQ ID NO: 15085 - DNA, 687 bp, Unknown
  Obtained from environmental sample
  misc_feature (1)..(687): n is a, c, g, or t
atgagaacaaaaattacgccgctttttacgatacttatcttttcgtttttaattttttcctgcaagacaataaatcacagcagagatgaacttaatatccggcaatttattgtttacttcagctttgatgacgggccgaacggcaaaggggatactaccgcaagacttttggatgtattgaaaaaatatcaaattaaagccatgttttgtttgataggagaaaacgcggaacaatatcccgaacttgtcaggcgtatttatgatgaggggcattatatcgccaatcacggatattccgataaatgggcaagtaaaatgaaaccggatgaattccgtgataaccttgtacgcgggggagccgcaatttccgcggccttgggacacgaaatgaatcccaggttatacaggccccacggaggtttttacaacgcggctaaagaaaaaattattcacgatgaaggttacagaattgttctaagcaatatcagggtatatgacgcggttgttgaaggaaaaaaacaaaataaagttgttaaacaagttatcaggaaagttgaaaaacaaggcgggggaattgttttactccatgacgcgagggattcccattttcttacggaagcacagcttgcgaaagatcctcacggcgtatttgatcgttcatggattccggacgcttggaaaaaataa

SEQ ID NO: 15086 - protein, 228 aa, Unknown
  Obtained from environmental sample
  SIGNAL (1)...(20)
  DOMAIN (31)...(158): Polysaccharide deacetylase
  misc_feature (1)..(228): Xaa is any amino acid
MRTKITPLFTILIFSFLIFSCKTINHSRDELNIRQFIVYFSFDDGPNGKGDTTARLLDVLKKYQIKAMFCLIGENAEQYPELVRRIYDEGHYIANHGYSDKWASKMKPDEFRDNLVRGGAAISAALGHEMNPRLYRPHGGFYNAAKEKIIHDEGYRIVLSNIRVYDAVVEGKKQNKVVKQVIRKVEKQGGGIVLLHDARDSHFLTEAQLAKDPHGVFDRSWIPDAWKK

SEQ ID NO: 15087 - DNA, 552 bp, Unknown
  Obtained from environmental sample
  misc_feature (1)..(552): n is a, c, g, or t
gtgttttcacataaccctaaaaaaattatcgacataggcggaaataccgccaagtgggcaatttgctgctgccgttataatcccaatgtagaggtaaccattgtggatcttccggggcagatcaacgccgcgcggcagaaaattacacaggcaggtttttctgacagaattaatactattgcctgcaatgttctggacgcgcaaacggccattccttccggagcggatataatctggatgagccagtttctggactgtttttcccttgaggaagttaccgcgataatgagaaaaatacactgtgcggcgggaccttccgcgaaggtttatattcttgaacctttttgggataaacagcgttttgaagccgcttcttattcgcttcaagccacatccctttattttacctgtatggcaaacggaaacagtaaaatgtaccgctgcggggaacttgcgcaggctgtagaaagagcgggctttgagattgttgaagcaaagcataatcttggttccaatgattattcgcttctttgctgccggatcaagccatga

SEQ ID NO: 15088 - protein, 183 aa, Unknown
  Obtained from environmental sample
  misc_feature (1)..(183): Xaa is any amino acid
MFSHNPKKIIDIGGNTAKWAICCCRYNPNVEVTIVDLPGQINAARQKITQAGFSDRINTIACNVLDAQTAIPSGADIIWMSQFLDCFSLEEVTAIMRKIHCAAGPSAKVYILEPFWDKQRFEAASYSLQATSLYFTCMANGNSKMYRCGELAQAVERAGFEIVEAKHNLGSNDYSLLCCRIKP

SEQ ID NO: 15089 - DNA, 732 bp, Unknown
  Obtained from environmental sample
  misc_feature (1)..(732): n is a, c, g, or t
atgttcaaaacaaggtgggaagaagaaaaagaacgaatgatttcttcggcaaaagaagaagccgataacattgtacaagacgctcagaaagcggcctttgcggaagttaaaagacagactgacgaggctcaggttttaaaacagcaggctgaagaagaagcgcagcgcataatagcggaagcaaaagaaaaggcaaacgatattgaggccgaggtaaggaagtctctggagaatgaacgcagggatgcgaaggaacagggaaagactgagggcaaggaagacggatatgccgaagggaaagcggaagtagaccgccttattgaaagaacccaggtagtgcttgaacgcgcccaggacaagagagcggatattttaagcgataccgaaaaagaaattatttatctggtgcttcttattacgcgaaaagttatcaaagttatctcagagaatcagcgtgatgtgataatttccaatgttgttgaagccctgcgtaaagttaaggcgaagggaaatatcacaattaaggttaaccttgcggatcttaaacttgccaccgaacacaagcagaattttatcgctcttatggaaggcgtaaaaacaattaatattgttgaagacagttccgtagacaagggcggctgcataatagaaactgnatttggcgagatagacgcgcggatcgcaagccagcttgccgagttggaaaacaggatactggaaatttcaccataa

SEQ ID NO: 15090 - protein, 243 aa, Unknown
  Obtained from environmental sample
  DOMAIN (34)...(235): Flagellar assembly protein FliH
  misc_feature (1)..(243): Xaa is any amino acid
MFKTRWEEEKERMISSAKEEADNIVQDAQKAAFAEVKRQTDEAQVLKQQAEEEAQRIIAEAKEKANDIEAEVRKSLENERRDAKEQGKTEGKEDGYAEGKAEVDRLIERTQVVLERAQDKRADILSDTEKEIIYLVLLITRKVIKVISENQRDVIISNVVEALRKVKAKGNITIKVNLADLKLATEHKQNFIALMEGVKTINIVEDSSVDKGGCIIETXFGEIDARIASQLAELENRILEISP

SEQ ID NO: 15091 - DNA, 888 bp, Unknown
  Obtained from environmental sample
  misc_feature (1)..(888): n is a, c, g, or t
atgatcagatggccgagacatgaaattacagaacttgaatgtaagcagaaagggattacttattctattccgcttaaagcgcatgttaatctggtcttccagcaaaccggcgagatcaggatgaaagatatttatcttggcgatattccgcttatgaccgaaagaggcacatttatcatcaacggcgcggagagggtggtagtttcccagatacaccgctcgcccggcgtaattttcagccacgaaaaaggagttttctcatcaaggattattccataccgcggcagttggcttgaatttgaaattgatcaaaaacgcgaattaatttacgcgaaaatagacagaaaaaaacgcatactgggaacaatcttccttcgtacgttgggtttttccagcagggaagaaattatcgacgctttctataaaacagatacccttaaaatcaaagatgaccgcgaaacaaaagaaaaaatttccggtaaaattctcgcgaaagccgtcctggtaaaaaatgataatcctgaaggacaaaagtccaacggacacaagtccgacggcatgaaaaccctttaccgcgcgggagagaaacttcacccgcacaatgtagacgagcttttatcaaacggggttaagtccattgaatgtattgattttgaagccgaaggttcccttaactcgcccatgcttcttaattgctttgagcgggaagatataaaatatttaaaagaaggatccggcggagagccgaccaaagaagaggcgttaatggcggtatattccgtattgatgccgggtgaatccttgaccgtcgatcaggcggcgaaagatttggaggggatgttctttactagcagacgctacgatcttggncaggtggggcgtttatag

SEQ ID NO: 15092 - protein, 295 aa, Unknown
  Obtained from environmental sample
  DOMAIN (3)...(246): RNA polymerase beta subunit
  misc_feature (1)..(295): Xaa is any amino acid
MIRWPRHEITELECKQKGITYSIPLKAHVNLVFQQTGEIRMKDIYLGDIPLMTERGTFIINGAERVVVSQIHRSPGVIFSHEKGVFSSRIIPYRGSWLEFEIDQKRELIYAKIDRKKRILGTIFLRTLGFSSREEIIDAFYKTDTLKIKDDRETKEKISGKILAKAVLVKNDNPEGQKSNGHKSDGMKTLYRAGEKLHPHNVDELLSNGVKSIECIDFEAEGSLNSPMLLNCFEREDIKYLKEGSGGEPTKEEALMAVYSVLMPGESLTVDQAAKDLEGMFFTSRRYDLGQVGRL

SEQ ID NO: 15093 - DNA, 873 bp, Unknown
  Obtained from environmental sample
  misc_feature (1)..(873): n is a, c, g, or t
atggccttcctatgcgcctgcctgcttcacgaccttggccatttcccctttacccattcactgaaggaactgcccctgcgctctcacgaatcgcttacaggggaaataatcctttcggagccaatgaaaagcctggttgccgcctgtggcgcggatcctgcgctgacggcggcgataattgacaaggatatctccgccgccgataaagagctgtttttctaccggaaactcctgtcgggatgccttgacccggacaagctggattatttgaaccgcgacgcccggtactgcggcgtcccttacggggttcaggacgtagatttcatcctttcacggttaataccctgtcttgacagaggcgccgacattgattccaggctaatccccaatgtggaggcgatacttttcgcgaaatacctgatgtatcggacggtttactggcaccggcaggtacgctcggctacctccatgatcaaaaaagcgctgttggagggcatggaagaaggggcaataaccggcgatgatctgtacaaccttgatgatcagagtcttttttttctgtttaaagagataaaaacaggaagcgcgcttgcgcaagcggtatggaacggcaggctttactccgttgccgcggaaattccctttaaccaacaggatcatgccggtttgaaagatattgccggccgttcccgtcgcgaagaacggcttgccggtgaattccgccgcgcgggcgtccctcttggcgataatgaccttatcattgacgtgcctgagccggtctcatttgagacagggcttttcgtatcggacgaaaatcgcagttttgccgaaagttccagcgccttccagacaacacgctggattcctttgtaa

SEQ ID NO: 15094 - protein, 290 aa, Unknown
  Obtained from environmental sample
  misc_feature (1)..(290): Xaa is any amino acid
MAFLCACLLHDLGHFPFTHSLKELPLRSHESLTGEIILSEPMKSLVAACGADPALTAAIIDKDISAADKELFFYRKLLSGCLDPDKLDYLNRDARYCGVPYGVQDVDFILSRLIPCLDRGADIDSRLIPNVEAILFAKYLMYRTVYWHRQVRSATSMIKKALLEGMEEGAITGDDLYNLDDQSLFFLFKEIKTGSALAQAVWNGRLYSVAAEIPFNQQDHAGLKDIAGRSRREERLAGEFRRAGVPLGDNDLIIDVPEPVSFETGLFVSDENRSFAESSSAFQTTRWIPL

SEQ ID NO: 15095 - DNA, 357 bp, Unknown
  Obtained from environmental sample
  misc_feature (1)..(357): n is a, c, g, or t
atgtcaattattgaacatggtttaagattatatgaagatgaaaaaaataacaaaattggactggagtatcctgttgatggaatatacattgatattttggctttagataaaaatgacaattttgttgtcattgaacttaaagtttcaaggggttatgatagaattgttggacaacttttaagatacaaaaactggataaaaagaaatatggctgaaaacggtcaaaatataagaggaataattatctgtaaagaaataaccgatgatttattacttgcttgtgatggcttagataatatagaattatttgaatacgaattatatataaaattacataaaaaggaaattgaaaaatga

SEQ ID NO: 15096 - protein, 118 aa, Unknown
  Obtained from environmental sample
  misc_feature (1)..(118): Xaa is any amino acid
MSIIEHGLRLYEDEKNNKIGLEYPVDGIYIDILALDKNDNFVVIELKVSRGYDRIVGQLLRYKNWIKRNMAENGQNIRGIIICKEITDDLLLACDGLDNIELFEYELYIKLHKKEIEK

SEQ ID NO: 15097 - DNA, 678 bp, Unknown
  Obtained from environmental sample
  misc_feature (1)..(678): n is a, c, g, or t
ttgatcgaagtacccgccaggcgggaatactatgctccgattaagcctttggactacactgccgatgccgatgccgataatgcctgcaacgaacccaacattgccgacattttgggagcgaggcgcgtccaaaccaggctgtacagtgatattgccataagcgaagaggcaagttctttcaccctggaaataatgaaccgtttttcggcaaacccacgttggctcattttcctgccgcctaccatgtcccccagcggaaccagcaaacttgaatccttcctggaacatccgatggaagcttttgattattacaaaaagcgcggggtaacaaagatcatctgcgaagaaaagcacatgggttcccgtgcggtaattgttctctgccggaatagcgaaacgtcgaaaacccgcttcggcatcgagggcgattctccggggatcatctacacccgcacgggccgccacttttttttagaagaaaaagccaatgaacaggcgatccttacacggcttaaagccgccctggacaagtccggtttttgggaagcattttccacgaactgggtgtgtttggatacggagttaatgccctggtcggccaaagcccgttcccttatcctggaacagtacgccccgaccggcagggcggggcaaaacggccttgcgaaagaccgttga

SEQ ID NO: 15098 - protein, 225 aa, Unknown
  Obtained from environmental sample
  misc_feature (1)..(225): Xaa is any amino acid
MIEVPARREYYAPIKPLDYTADADADNACNEPNIADILGARRVQTRLYSDIAISEEASSFTLEIMNRFSANPRWLIFLPPTMSPSGTSKLESFLEHPMEAFDYYKKRGVTKIICEEKHMGSRAVIVLCRNSETSKTRFGIEGDSPGIIYTRTGRHFFLEEKANEQAILTRLKAALDKSGFWEAFSTNWVCLDTELMPWSAKARSLILEQYAPTGRAGQNGLAKDR

SEQ ID NO: 15099 - DNA, 705 bp, Unknown
  Obtained from environmental sample
  misc_feature (1)..(705): n is a, c, g, or t
gtgtctgccgggcaatgggaagaaatggcaaacgaaatagtctactacctcaatatgcagaagcagaggagcaaatataacgacactgaaatctttaatagggaacacaacgagagtttcaaaaattatattgcgaaccactctacctatcgggatgagcttgaacgcaaatataaccgtatcttcaacactgaaatcggcgtccctgttaagacctaccctgtctacattgaaggttggcgcacggattctaagacgctgaaaggccatcaatggcagtccgtccaccatctttaccgcgagggcaagggcatatctgctttgggtacaggctttggcaagaccctgaccgccattgcgcttcacgctttattaaaacaggaaggctgtatccatagggcatggtttcaggttcccaacaacaaggtgaaggattgggttaaggaattccatgaagtgctacccagccgtacaatcggttttgtcgatcctgaaatgcagggctactccagtagggacaaacgctactccctttaccagcaacttgcttcaagcgcatacgatattatcctcatgcctgaaagttcggctggtgaaatccagttaagccctgagaatgaccgcatcattgtcgatgaagttatctataagcatgtcggcgagaagggggataacaagagcgaacgcttcattgagagcctttaa

SEQ ID NO: 15100 - protein, 234 aa, Unknown
  Obtained from environmental sample
  misc_feature (1)..(234): Xaa is any amino acid
MSAGQWEEMANEIVYYLNMQKQRSKYNDTEIFNREHNESFKNYIANHSTYRDELERKYNRIFNTEIGVPVKTYPVYIEGWRTDSKTLKGHQWQSVHHLYREGKGISALGTGFGKTLTAIALHALLKQEGCIHRAWFQVPNNKVKDWVKEFHEVLPSRTIGFVDPEMQGYSSRDKRYSLYQQLASSAYDIILMPESSAGEIQLSPENDRIIVDEVIYKHVGEKGDNKSERFIESL

SEQ ID NO: 15101 - DNA, 627 bp, Unknown
  Obtained from environmental sample
  misc_feature (1)..(627): n is a, c, g, or t
atggcgaacattactgcggcagaggtaaaatccctccgggagaaaaccggtgcgggaatgatggaatgtaagaacgcgctggtagaatgtgacggagattttgccaaggctgaaaaactcttaaaagaaaaaggcctggcggcattggaaaaacgggccgatagggccaccaatcaaggcaaggtttttatcaaggttaagaacgacggttccctggcggtcctggtggaaatggttgcggaaactgattttgttgcccggaatcctgaatttattgccctgggcggaacaattgcggataaagttctggaaaaaggctatgaacaaagtgagctggccccggaaggaacggttcatggagaactgaacgcccttgtgacggatttggccaccaagatccgggaaaacatgagccttaaacgggtcaaagtgatcagagcaggccagggagagtacctcagcacgtatattcacggagacggcgccattggtgtagtggtaaagtgtaaggccgataaaccggaagtctggcaaaaagaagaggccaaggcgtttgtgtttaccctggccctccacattgcggcctttaatcccatggccctggatcggaccaagattgatccctga

SEQ ID NO: 15102 - protein, 208 aa, Unknown
  Obtained from environmental sample
  DOMAIN (57)...(207): Elongation factor TS
  misc_feature (1)..(208): Xaa is any amino acid
MANITAAEVKSLREKTGAGMMECKNALVECDGDFAKAEKLLKEKGLAALEKRADRATNQGKVFIKVKNDGSLAVLVEMVAETDFVARNPEFIALGGTIADKVLEKGYEQSELAPEGTVHGELNALVTDLATKIRENMSLKRVKVIRAGQGEYLSTYIHGDGAIGVVVKCKADKPEVWQKEEAKAFVFTLALHIAAFNPMALDRTKIDP

SEQ ID NO: 15103 - DNA, 567 bp, Unknown
  Obtained from environmental sample
  misc_feature (1)..(567): n is a, c, g, or t
atgattaaccagcgtaaatttatcacgggtttggttcttacggccctgtttgccgcgctgatatccgcaggggcttttattaccgttcctgtcgggcctgtccctttagtgctccaaaacttttttaccctgctttccggccttgtacttgggccttttttgggggttgctgcggtgggattgtttatcgctgccggggcaatcggagtgcctgttttttccaataacggctctcctatgggtatagcccggctcatgggacctacaggcgggttttatttaggttatcttttgggtacgcttattgccggtattgttataggcattccaaagcagggcgaaagaattaagatttggcggctggcgcttgccgccgcgcttgggcttctcacggttttcataccggggcttatccggttaaaattctttttggaaacatggcctaaaactctggcagccggtttttacccgtttttaatcggggatgccattaagggcgtcgttgctgccttgattacgccgcgcctgcgaaagacagcggcgcgacaattgggaacgggaaattaa

SEQ ID NO: 15104 - protein, 188 aa, Unknown
  Obtained from environmental sample
  SIGNAL (1)...(23)
  DOMAIN (27)...(180): BioY family
  misc_feature (1)..(188): Xaa is any amino acid
MINQRKFITGLVLTALFAALISAGAFITVPVGPVPLVLQNFFTLLSGLVLGPFLGVAAVGLFIAAGAIGVPVFSNNGSPMGIARLMGPTGGFYLGYLLGTLIAGIVIGIPKQGERIKIWRLALAAALGLLTVFIPGLIRLKFFLETWPKTLAAGFYPFLIGDAIKGVVAALITPRLRKTAARQLGTGN

SEQ ID NO: 15105 - DNA, 669 bp, Unknown
  Obtained from environmental sample
  misc_feature (1)..(669): n is a, c, g, or t
ttgaagcgagggcttttggaaacggggaacaggattaggtgtctacgtctattgataaagttcctttttttgccgataatagcaataatgaactatagatttttttgtcatataattgtatttctttgtttcttttcgctttttccttcagccgcccatgcccaggctgaaaacacaagcgggaaaacggcggaggaagacatgaaaaccctgccaaggcagttcagggaaataagccttggcatggggctggacaatcttaaagaggcgctgcaaaaagacaaattgttcaatttccgcggcgacagggatgtttctttcatccccgcgagggaagaaagcctggttgaaacaaccggttcctcttttgtaaggcgggcgtttttccagctcagggacggggtactttttatcatgtcattcacccttgataccgggttgatggatcattattcaatgtttaccaatctggtggaaaaatacggccagccttctttccttgacaccagggaagccctgtgggaaaccgaagacacgctcgtaactctagaacgcccgctgacaataaagtatattgataaaaaagtttttactgatatcatcagcgagtccgcgcttatacagtcccgccgggtaaaggaacgccaggaattcctcgatgaattctaa

SEQ ID NO: 15106 - protein, 222 aa, Unknown
  Obtained from environmental sample
  misc_feature (1)..(222): Xaa is any amino acid
MKRGLLETGNRIRCLRLLIKFLFLPIIAIMNYRFFCHIIVFLCFFSLFPSAAHAQAENTSGKTAEEDMKTLPRQFREISLGMGLDNLKEALQKDKLFNFRGDRDVSFIPAREESLVETTGSSFVRRAFFQLRDGVLFIMSFTLDTGLMDHYSMFTNLVEKYGQPSFLDTREALWETEDTLVTLERPLTIKYIDKKVFTDIISESALIQSRRVKERQEFLDEF

SEQ ID NO: 15107 - DNA, 645 bp, Unknown
  Obtained from environmental sample
  misc_feature (1)..(645): n is a, c, g, or t
atgcttaaaccgtataatttactcgaaaatattctgcttgatattgagaacggcatcaaagacaatataaacgtgtcggctctttccaagaaatacggtttttcggaagttcatttacgcaggctgttcagtttcgccttcaaacaaaccatctccgcttatatacgttcccgcacattagcggcaagccttaacaatttactggagactgatgccactattcttgacatcgcgattgattacggttttgaatatgaacagtcatatatcagggctttcaagcgtgaattcggaataacccccggcgatttgcgtaagacagggaaaattacaaaaatcaagccgccgcttcatctttttgatgaaaacaaactgggcgacagcgttttttttggccccgatattgtaatagttccgcagtttcatattataggcaaacggcaccggataccgtttgaagtttccacggacatggcgccacaggtgggaaaacaattctgggaaacagaacgcaaacaaataaaaggggcggtaaatccccatgtatatatcggcttaacgagtaacataaatcagaaagaaaaacactcggaatatacaccgtcggtacaggttgagaatttaaaaaacattccgcatgattaa

SEQ ID NO: 15108 - protein, 214 aa, Unknown
  Obtained from environmental sample
  DOMAIN (10)...(56): Bacterial regulatory helix-turn-helix proteins, AraC family
  misc_feature (1)..(214): Xaa is any amino acid
MLKPYNLLENILLDIENGIKDNINVSALSKKYGFSEVHLRRLFSFAFKQTISAYIRSRTLAASLNNLLETDATILDIAIDYGFEYEQSYIRAFKREFGITPGDLRKTGKITKIKPPLHLFDENKLGDSVFFGPDIVIVPQFHIIGKRHRIPFEVSTDMAPQVGKQFWETERKQIKGAVNPHVYIGLTSNINQKEKHSEYTPSVQVENLKNIPHD

SEQ ID NO: 15109 - DNA, 393 bp, Unknown
  Obtained from environmental sample
  misc_feature (1)..(393): n is a, c, g, or t
atgaataaaaaaattattgcggtatttgttttcttcgctttggttaccgttgcggcaaacgctcaggacgcggcatcgataatcgagcaatcgcgaaatcgtataaaggctgatacgatcagcacccgctcaaggatgatcattactgcaaaaaacggcactgtaacggagcgcgttatggatcagtattcaaaaaaggacgctcaggggaatgccagggcggtcatcgtttttcaggagccggcatctgtcaggggaagccgctttcttaccatggaaaatccgggcagggaaaaggatcagtggattttccttccaagccttggaaaaataaggcggattgccgcttcagaaggagctggcagttttatgggtttgactcggccgctctga

SEQ ID NO: 15110 - protein, 130 aa, Unknown
  Obtained from environmental sample
  SIGNAL (1)...(21)
  misc_feature (1)..(130): Xaa is any amino acid
MNKKIIAVFVFFALVTVAANAQDAASIIEQSRNRIKADTISTRSRMIITAKNGTVTERVMDQYSKKDAQGNARAVIVFQEPASVRGSRFLTMENPGREKDQWIFLPSLGKIRRIAASEGAGSFMGLTRPL

SEQ ID NO: 15111 - DNA, 507 bp, Unknown
  Obtained from environmental sample
  misc_feature (1)..(507): n is a, c, g, or t
gtgaagtcccagatcatctcggtgctgatttctattctancagtgtttcttattatcactttttccaaccgctcgttgattgcgggtttggtgggcattacccctttatccatatgcattttggttaatttcgcggttatgggttttgcggggatcaagctgaacatcgggacttccatggtggcaagcgtttctgtgggaatcgggatcgactatacgattcattacatggaagcctacaagcgggaatatttggcaagcggggggaagggggactttcttcttaatacctttgcatcttccggcaaggcaatacttataaacgccgtctcggtgggcgcgggttttgccgtacttgttttttcccagtttatcatgctgcggcaccttgggctcttaatcgcccttacgatgtgttcaagcgctctggcaagccttaccgtgatcccggttttgcttttgacagtcaatccaaaattcattcgcaaggagtataaaaatgaataa

SEQ ID NO: 15112 - protein, 168 aa, Unknown
  Obtained from environmental sample
  SIGNAL (1)...(28)
  misc_feature (1)..(168): Xaa is any amino acid
MKSQIISVLISILXVFLIITFSNRSLIAGLVGITPLSICILVNFAVMGFAGIKLNIGTSMVASVSVGIGIDYTIHYMEAYKREYLASGGKGDFLLNTFASSGKAILINAVSVGAGFAVLVFSQFIMLRHLGLLIALTMCSSALASLTVIPVLLLTVNPKFIRKEYKNE

SEQ ID NO: 15113 - DNA, 333 bp, Unknown
  Obtained from environmental sample
  misc_feature (1)..(333): n is a, c, g, or t
atgcacacaaagtccgccctggtcgaggagctgaaaaagatagaccgcgtgattgagtcaaaagccgccgggtgccgctatatcaaatacctggtgctggacgccacaaccggaaggaacgccctttcccaggcggagacattcaaggaggcggtaatgccggacgggataatactgaccaaatacgattccagcgccaggggagggacggtcttttcccttgcggaagatttggggctccccgtgatctttctctgtaccggagaaaaatacggggatatagctccttttgatccacagcgttatgcggaagaattcatcggccttgcgtaa

SEQ ID NO: 15114 - protein, 110 aa, Unknown
  Obtained from environmental sample
  DOMAIN (1)...(108): SRP54-type protein, GTPase domain
  misc_feature (1)..(110): Xaa is any amino acid
MHTKSALVEELKKIDRVIESKAAGCRYIKYLVLDATTGRNALSQAETFKEAVMPDGIILTKYDSSARGGTVFSLAEDLGLPVIFLCTGEKYGDIAPFDPQRYAEEFIGLA

SEQ ID NO: 15115 - DNA, 651 bp, Unknown
  Obtained from environmental sample
  misc_feature (1)..(651): n is a, c, g, or t
gtgcgggtctcctgcacaagcgttgggaaaggcgggtcgggaaattgcggagataggagagttttgtttatgattatggaaggtttaagtattgccagaattattattgcagttcacggtttatttaaaaaagtatattttagaaaatcttttgtagatgaacgagacaaacaaaaatatcgcatagtaagaattggcacgcagacttggatggcagagaatttgaattatgatataccgaacagtcaatgctataagaaagaatacggcaggttatataattggatggctgctagaatggcttgtcctccaggctggcgtttgccaacagatgaagattggataattttaacgaattatgtaggcggaatcagtgtagctggaaataaactaaaagcaaaacacagctggactaatggtaatggcacagatgattataaattctcagctctgccaggtggagactgtagccctggtggaaattttagcggtgctggtaagttcggaagttggtggacaaataccgaatataatcctaccctagcgtataattggcacttagattccgaaggatttagatataaagtaaagtgtaataatggattttatgataagtcccaattgttttcggttcgctgtataaaatgctga

SEQ ID NO: 15116 - protein, 216 aa, Unknown
  Obtained from environmental sample
  misc_feature (1)..(216): Xaa is any amino acid
MRVSCTSVGKGGSGNCGDRRVLFMIMEGLSIARIIIAVHGLFKKVYFRKSFVDERDKQKYRIVRIGTQTWMAENLNYDIPNSQCYKKEYGRLYNWMAARMACPPGWRLPTDEDWIILTNYVGGISVAGNKLKAKHSWTNGNGTDDYKFSALPGGDCSPGGNFSGAGKFGSWWTNTEYNPTLAYNWHLDSEGFRYKVKCNNGFYDKSQLFSVRCIKC

SEQ ID NO: 15117 - DNA, 753 bp, Unknown
  Obtained from environmental sample
  misc_feature (1)..(753): n is a, c, g, or t
ttggatgtttctattcaccagggggaagacgggatttcttttgccatttcagctttcaatttcgatgatacagcaaacgatacaggaaatgattttggatacaaggacgatgtccgtatcagtaccatttttatcaacggctcggcggataacgacccgcggcaaatccaggcaaacgtccggctggattctttttccatgggggacatactgagttttgttgacccttttgttccgctttcttcgaccataccctcagtagttcgtttcatcgctgatgatttgtctgttaccacggagatcttttttatcactgattatacccatatccttttcaacgcacccaggattgtcgcggcatacgaagggcttcaggaggttctcatcgcggcttccttctcgggaacggacagaggtatggaactaagttcctgccgaattacctggaataacgttactgccgaatttaacggcaatgcggattttaacgatccaaacgatattctgttttcatttggagccagtctacagaatttgacatactcctttgaagggatgatccaggaccaaaaaaatataactctcaggggctcttacgggattcaggcaacgcttgttgccgacgaatccggcttccgtaccggatatgccagaggggattttgtaccgttcccgtccggaaataattttgcttcgctaagttttcttttttctttttcctatgaatctccggagtattggcggacaggatag

SEQ ID NO: 15118 - protein, 250 aa, Unknown
  Obtained from environmental sample
  misc_feature (1)..(250): Xaa is any amino acid
MDVSIHQGEDGISFAISAFNFDDTANDTGNDFGYKDDVRISTIFINGSADNDPRQIQANVRLDSFSMGDILSFVDPFVPLSSTIPSVVRFIADDLSVTTEIFFITDYTHILFNAPRIVAAYEGLQEVLIAASFSGTDRGMELSSCRITWNNVTAEFNGNADFNDPNDILFSFGASLQNLTYSFEGMIQDQKNITLRGSYGIQATLVADESGFRTGYARGDFVPFPSGNNFASLSFLFSFSYESPEYWRTG

SEQ ID NO: 15119 - DNA, 615 bp, Unknown
  Obtained from environmental sample
  misc_feature (1)..(615): n is a, c, g, or t
ttgtcaatggaagatatgatcctttccattgccggggatttaaccgctcaggataccgagatgagcgttaatgccgaggaaatagcgttagcccgggaaggccgcggcgctttcggtttggaagatcaaaaagtatccgtaataacggacatcaatgtcagaacagggcggagggttgaatttttctggcccagcgtggatttaccggtgatccaggccaatgcggacttagggacgggagtccatgttacaagcgactctatggcaaagcgtttcacgctgaatggggacgttaagctgagaagcggggagatattctatctggaacggaatttctatatcagggagggtactttgttcttcagggagaatgaagtggaattcgatccaaaaatatccgcaagggcagagattcgggatcaggctaaaatcggcccggttacaatctccatgatcatcgataacgcccctttaagatcgttttcaccaaggtttgtatcagctccgcctctttcacagctggaaatttactcccttctgggccaggccccccaggggggagaggaggcgccgaggaatctggctatggctacttccgcggtaatggacagttga

SEQ ID NO: 15120 - protein, 204 aa, Unknown
  Obtained from environmental sample
  misc_feature (1)..(204): Xaa is any amino acid
MSMEDMILSIAGDLTAQDTEMSVNAEEIALAREGRGAFGLEDQKVSVITDINVRTGRRVEFFWPSVDLPVIQANADLGTGVHVTSDSMAKRFTLNGDVKLRSGEIFYLERNFYIREGTLFFRENEVEFDPKISARAEIRDQAKIGPVTISMIIDNAPLRSFSPRFVSAPPLSQLEIYSLLGQAPQGGEEAPRNLAMATSAVMDS

SEQ ID NO: 15121 - DNA, 459 bp, Unknown
  Obtained from environmental sample
  misc_feature (1)..(459): n is a, c, g, or t
ttggaatacgaagatgagcatatagccataatctataaacgtcctaaaaattactccgccgccgaacattttcagttcagagtagcctcttctggtatttttatctttgaaaatttgctcatcatagtatctgacatagatctgccgctaggggatgaaaagaaattctcaaaattaacatctctcaagatgcttgcgctgagattgctcagtttttccaccctgcatttttacgagcatctgcgcgtgataaacaaaatgagcaacgaattggaagaaaagcatatttacaaacttaaaaaagaggaatacttgattgtctttggccttagcaagagcttggtttattatatgaacgccatttcctctaacgaagccttgctcnaaaggatgcagatnagcagaaacttgaattttgacgaanacgagtcagaaattttggacgatattatnatttga

SEQ ID NO: 15122 - protein, 152 aa, Unknown
  Obtained from environmental sample
  misc_feature (1)..(152): Xaa is any amino acid
MEYEDEHIAIIYKRPKNYSAAEHFQFRVASSGIFIFENLLIIVSDIDLPLGDEKKFSKLTSLKMLALRLLSFSTLHFYEHLRVINKMSNELEEKHIYKLKKEEYLIVFGLSKSLVYYMNAISSNEALLXRMQXSRNLNFDEXESEILDDIXI

SEQ ID NO: 15123 - DNA, 489 bp, Unknown
  Obtained from environmental sample
  misc_feature (1)..(489): n is a, c, g, or t
atgcaaataaaaccgatgattagaagcaatatctgtctgaacgcccatcctgcggggtgtgcggccggagtattaaagcagattgaatatgcgaaaaaacatttatctccgactgaaggtacgccaaaattggttttggttgtcggatgctctaatggttacggtcttgccagccgtatatgcgccggttttggatacaaagccgtcacaatcggcgtctctcttgagaatgaaccttcggaaaagcggacaggcacttccggtttttacaataatcagacctttgatctggaagcggcaaaggcggggcttgtttcaatctcattaaacggcgacgcttattccgatgaaataaaatttaaaacaaccgaggcagtcaaagaagccgcctgcaaggtcggcatacctgcaaagatcgatttatttatttattcgctcgcttctcccgtaagaaagatccccagacaggtgttatgtacaaatctgtaa

SEQ ID NO: 15124 - protein, 162 aa, Unknown
  Obtained from environmental sample
  DOMAIN (1)...(162): Short-chain alcohol dehydrogenase
  misc_feature (1)..(162): Xaa is any amino acid
MQIKPMIRSNICLNAHPAGCAAGVLKQIEYAKKHLSPTEGTPKLVLVVGCSNGYGLASRICAGFGYKAVTIGVSLENEPSEKRTGTSGFYNNQTFDLEAAKAGLVSISLNGDAYSDEIKFKTTEAVKEAACKVGIPAKIDLFIYSLASPVRKIPRQVLCTNL

SEQ ID NO: 15125 - DNA, 789 bp, Unknown
  Obtained from environmental sample
  misc_feature (1)..(789): n is a, c, g, or t
atgaaaaagctcggcaaaagctataacgccgaaaccaggggcgtatacacgcggatgggcttttccccggtatgggatgacaatttcctgtttgtcgccgcgacattgcttaacgcctcattcagggaggcccagccccttgcctgggatgccccggcgcttgagcgggcgatggattttatttatgaatggatccacgaggcgaattcgggcattcaggctgttgacgattttaccttcaaatattactacaatcccccggccaagctcgcgctttccggccgcatactcttatcgtatatggacagcgacgatttttttacccttgccgaggatcagcgcaaccgccttgatttccgctggcttgcggagagaaacacaatcccccttaacgaaagatcggtgtacctcgggttggtaaaaaagggcaggtctccaaaagcggccgcggccttcctccgctggtttttcaatccccagacccagcgcggcctgctggaacaaagcattaaactgcggattcaggaaacctcgtttggcattgccgggggtttttccgccatgcgtccggttacggagcaggtcctgccccagttctatcccgacctgctcaggcacatgcccccccaggaattcctttccccggccaatatacttcccagcaactggatgacgctaaaggaacgggtcgtcctcccctggctccacgaccgcgcccggcagccaaacagcaacggaataatctccctggaaagacggctagcggactggcagagattaaacagatag

SEQ ID NO: 15126 - protein, 262 aa, Unknown
  Obtained from environmental sample
  misc_feature (1)..(262): Xaa is any amino acid
MKKLGKSYNAETRGVYTRMGFSPVWDDNFLFVAATLLNASFREAQPLAWDAPALERAMDFIYEWIHEANSGIQAVDDFTFKYYYNPPAKLALSGRILLSYMDSDDFFTLAEDQRNRLDFRWLAERNTIPLNERSVYLGLVKKGRSPKAAAAFLRWFFNPQTQRGLLEQSIKLRIQETSFGIAGGFSAMRPVTEQVLPQFYPDLLRHMPPQEFLSPANILPSNWMTLKERVVLPWLHDRARQPNSNGIISLERRLADWQRLNR

SEQ ID NO: 15127 - DNA, 891 bp, Unknown
  Obtained from environmental sample
  misc_feature (1)..(891): n is a, c, g, or t
atgcagcattattttaatatgaatccattagccacagaactaaacgaaattcttgaagaaaccgttgcgggaaggctcttttccaatctgggaaagcgcctttattttcccaagggcattatagcgcagtcggcggaggcgaaaaaatccgcgtcaatggcaaacggcaccatcggcatggcgtacaaaaacggcaaaccgctgatcctctccgcaatcgccgacaatatggcggcctttactccggaagaagccgtcgcctacgccccgacagcggggattgaaaaggcaagaacagcctggagggatcaaatgatccaaaaaaatccctcgctggatcctgaaaaaatctccctgcccgcggtaatagccgggcttacagccggcctttcatgcactgcggatctgttcataggcaaaggttcaaacctgattgccagcgacccctgctgggataactacagccttatttttgaaacgcgcaggcaggctcatttagtacccgtccagttcctggggcaaggcccggggcaaggcctcgacatggaagcgataagcgcggcggtcaggaaagaggcaaaaagcggcacggtgcggataatcttcaattttcccaacaacccttcgggctattccgccacaacggaagaagcggacgcgctggtgcgcctccttggggaaaccgccgatgaaaaggctgacgtgctggtgatctgcgatgacgcttacttcggcctgttctacgaggacaacatctcgaaggagtcgctgttcgcgaaattcgcgaacatccacgagcgtgtcctggcgatcaagctcgacggccccatcaaagaagattatgtgtgggggcttcgcatgggcttcctcacgttcggctcaaaggcttga

SEQ ID NO: 15128 - protein, 296 aa, Unknown
  Obtained from environmental sample
  misc_feature (1)..(296): Xaa is any amino acid
MQHYFNMNPLATELNEILEETVAGRLFSNLGKRLYFPKGIIAQSAEAKKSASMANGTIGMAYKNGKPLILSAIADNMAAFTPEEAVAYAPTAGIEKARTAWRDQMIQKNPSLDPEKISLPAVIAGLTAGLSCTADLFIGKGSNLIASDPCWDNYSLIFETRRQAHLVPVQFLGQGPGQGLDMEAISAAVRKEAKSGTVRIIFNFPNNPSGYSATTEEADALVRLLGETADEKADVLVICDDAYFGLFYEDNISKESLFAKFANIHERVLAIKLDGPIKEDYVWGLRMGFLTFGSKA

SEQ ID NO: 15129 - DNA, 774 bp, Unknown
  Obtained from environmental sample
  misc_feature (1)..(774): n is a, c, g, or t
ttggcggctctctccgctgctttggaagaaggtgggagcggaaaaaaagttgtgcttttgaatttcccaaataacccaacaggctacacggtgacagaaactgaggcaaatgaaatttgcgaagtgcttaaatcctgcgctaagaaaggcaacgatgttgttgttctcttagacgatgcttattttggcttggtttatgaaaagggtatatacaaagaatccctatttgggcttttggcagatgctcacgaaaatctattagccgtgaagctagatggcccaacgaaagaggattatgtttggggttttagaattggttttataacctttgcttttcacggagcaagcgtgttgcagctcaaagccttagaagacaaagccgccggtatggtgcgtgccactatatccaacaccgcaagcacatctcaagaaattttgcttaacgcatatagcagcgaaaactacgaaaaagagaagcatgaaaaataccacactctaaaaattcgctacgaaaaaataaagcatattttggcagctcacaaggaatacgagcagtcttttacagctatgccttttaacagcggatattttatgtgcgttaaaataaacggagcagaccccgaagttgttcggcaggagtgtttgaaaaatcacgggcttggggttataatgctatctgggcttattcgcatagcattctcctctgttgccttaaacaaaatagaagaactttttgaacggctccacaaagcagtgcaggcggtaaaagcatga

SEQ ID NO: 15130 - protein, 257 aa, Unknown
  Obtained from environmental sample
  misc_feature (1)..(257): Xaa is any amino acid
MAALSAALEEGGSGKKVVLLNFPNNPTGYTVTETEANEICEVLKSCAKKGNDVVVLLDDAYFGLVYEKGIYKESLFGLLADAHENLLAVKLDGPTKEDYVWGFRIGFITFAFHGASVLQLKALEDKAAGMVRATISNTASTSQEILLNAYSSENYEKEKHEKYHTLKIRYEKIKHILAAHKEYEQSFTAMPFNSGYFMCVKINGADPEVVRQECLKNHGLGVIMLSGLIRIAFSSVALNKIEELFERLHKAVQAVKA

SEQ ID NO: 15131 - DNA, 624 bp, Unknown
  Obtained from environmental sample
  misc_feature (1)..(624): n is a, c, g, or t
atggataatcagttaaattcagaaaaaacaacggaaagcctcaaaaatttagtcattgatatcccatcagagccgggagtttatcttatgaaagacgctgatgggcagatcatctatataggaaaagcgaaatccctgaaaaacagggtaaaatcatatttttccggcgacaaggatataaaaaccaataccctgatgcgtcatgtgcgcagtatagaaactattattgtctccagtgaatacgaagccctgcttttggaaaataccctgataaagcagcattcgccgaaatataatatcaaccttaaagacggcaaaacatatcctgttataaaaattacaaacgaaaatttcccaagaattttcagaacccgccgtattattcaggataacggtcattacttcggaccttttccgaatgtgcataatgttgacattatgctggaacttatcgataaactgtttccccttcgtaaatgtaaaaaaattaaaaagaacggaccgtgtatgtactatcacataagccgttgtatggcttcttgctgcggaaaaattaattcggaggaatacgatctttatgtgcagcgcgttcaaaactgcttggaggggaaacagattcattaa

SEQ ID NO: 15132 - protein, 207 aa, Unknown
  Obtained from environmental sample
  DOMAIN (24)...(105): GIY-YIG catalytic domain
  misc_feature (1)..(207): Xaa is any amino acid
MDNQLNSEKTTESLKNLVIDIPSEPGVYLMKDADGQIIYIGKAKSLKNRVKSYFSGDKDIKTNTLMRHVRSIETIIVSSEYEALLLENTLIKQHSPKYNINLKDGKTYPVIKITNENFPRIFRTRRIIQDNGHYFGPFPNVHNVDIMLELIDKLFPLRKCKKIKKNGPCMYYHISRCMASCCGKINSEEYDLYVQRVQNCLEGKQIH

SEQ ID NO: 15133 - DNA, 819 bp, Unknown
  Obtained from environmental sample
  misc_feature (1)..(819): n is a, c, g, or t
gtgctccgctgcatggaccattcgttcttcaggcttaaaaagcccaaagaggcgatgagctttatccgcaaggcaatcgacctcgccccggacgacaaggaatccctttataccctggcggagtgttattacgaagccaaccaggtagaccaggccaccaagatattcagccacctccgcgccgaccccataatgggccccagcgcctgccttatatccggtaatatccacaacgagatccgcagggccgacctagcgattcaggattttgaaatggggttaaagcacgagaacataaggccggatatcctcgtggaactccgttactacctcgccgtttcctacatcaagataaacgagataagcaaggccatacccttgctccagctaattcaggcggacaacccctcgtacaaagacgtaaacgtgcttataagcaagtaccaggaacttaacgccaacaagaacctccagatcttcctgatggcaacctccgccgactttgtcgccctctgccgtaaaatagtaatgacctatttcgccagggcaaaagtaaaagtcctgaacatctcggttcacaaaaacgaatgggctgatattctcgcggaagttaacacccccaagtggtcggacgtggttatgttcaggtttatccgaacccagggctccatcggggagctaatcgtgcgcgacttccattcccacctgaaagacgtaaaagccggcaaaggcgtctgcatgacagtcggcgtcttcagcgaagaagcaaagcgctacaccgaagcacgcctgattgatctgatagagaaagaccgctga

SEQ ID NO: 15134 - protein, 272 aa, Unknown
  Obtained from environmental sample
  DOMAIN (172)...(272): Restriction endonuclease
  misc_feature (1)..(272): Xaa is any amino acid
MLRCMDHSFFRLKKPKEAMSFIRKAIDLAPDDKESLYTLAECYYEANQVDQATKIFSHLRADPIMGPSACLISGNIHNEIRRADLAIQDFEMGLKHENIRPDILVELRYYLAVSYIKINEISKAIPLLQLIQADNPSYKDVNVLISKYQELNANKNLQIFLMATSADFVALCRKIVMTYFARAKVKVLNISVHKNEWADILAEVNTPKWSDVVMFRFIRTQGSIGELIVRDFHSHLKDVKAGKGVCMTVGVFSEEAKRYTEARLIDLIEKDR

SEQ ID NO: 15135 - DNA, 894 bp, Unknown
  Obtained from environmental sample
  misc_feature (1)..(894): n is a, c, g, or t
atgagcataggcatgatcttctcgggtttagaagtaataaaagacggcttcgccccccatacgcgacatccaggagttcataggctgttccacaagttctccgccgacacataccccggggtgctcaaatgcgccctcgccggctgcatagtcacactcatcgtgcagtcctcctcggccactatcggtatcacaatgggcctcgccgcctccggcatcatacagttcgaaaccgccgccgccctagtcctgggcgaaaacatcggcaccaccatcaccgcctacttggcgtcgcttggcaccacgaccaacggcaaacgcgccgcttacgcgcacatcgtcttcaacgtcatcggcgtcctgtggatcaccgctatcttcagcttctatataacgtgcatccgaaagttcatcggccacgaccccaatacaatggtaatggtcaacggcgccgagactttcccctacatacaggccggcatagccgcggtccactcgggattcaacgtattcaacacgctactcttcctgccgcttaccaacgtcttggcgtacgtgctgataaaagccgtccccgacaaaccgtacaaggaaccgccaaaactcacgaaactcggcaaccacctggtcgattcgcctatggtgggcatagcgcaagcgcgctacgagatcatcaacatgggaaagcatgaccgcgagatgctcgacaaactcaaagccctcctctccggaaacaccgggagcgctgggggtgtagagggcgttgaaaacgaagagaaacttgtcaatagcatattctataaggaagaggtcatggacaacatacaacgcgagataaccgccttcctaaccgacgtcctatcaggcaacgtccccagaagccttcggccataa

SEQ ID NO: 15136 - protein, 297 aa, Unknown
  Obtained from environmental sample
  DOMAIN (5)...(164): Na+/Pi-cotransporter
  misc_feature (1)..(297): Xaa is any amino acid
MSIGMIFSGLEVIKDGFAPHTRHPGVHRLFHKFSADTYPGVLKCALAGCIVTLIVQSSSATIGITMGLAASGIIQFETAAALVLGENIGTTITAYLASLGTTTNGKRAAYAHIVFNVIGVLWITAIFSFYITCIRKFIGHDPNTMVMVNGAETFPYIQAGIAAVHSGFNVFNTLLFLPLTNVLAYVLIKAVPDKPYKEPPKLTKLGNHLVDSPMVGIAQARYEIINMGKHDREMLDKLKALLSGNTGSAGGVEGVENEEKLVNSIFYKEEVMDNIQREITAFLTDVLSGNVPRSLRP

SEQ ID NO: 15137 - DNA, 852 bp, Unknown
  Obtained from environmental sample
  misc_feature (1)..(852): n is a, c, g, or t
atgcgtattgtcgaggggctggccgcggaacttgccggggcggaagccgaggcggaaaacgcccttaccctgtttgaaaactaccgcagccattcgcccctgtttatcgacgaattccttgccccggagggtattatcaccaaaaagcgggcgctggacgcgcagattcggggggtaaaagacggcattgaggaacgcaggcagcggatacgggtcctcgcaagcgataacgccgcgcttaccgccaaaatcaacgagtaccgttccacgctggaagacctccgcgttaaccttgcccgaatgaacgcccaggcaaaatccgccgaagaacaggcgcggctgatacggcgagaactttcgggccagcaggcgatgctggaaaacatcagcagcgagcttgtgctggaccgcaagcggctggcggaaattgacgaacgcattgccggcactcacgcggaaattgccgaaattgaacttcaggcccaaaacctcaacaaggaactggaaaagctggaaaaggatattaaaaaacgttcgggcgacgttgcgggcaaacaggaacttatcaggaaacggacggcggaactgggaagggtacaggaagcgcttgaaaaaatccatcttgaactggcgcagtccgaaacggaaattaaaaatatccaggacaatttccgcgagacccattcccgcgatttaatggaatttgaggaaaggatttttaccattaccacccagcccgccgaattgcgggaaaaacttgccgaggcccgttcccagatgcgggaccctgggtcggtaaaacttatggctccggaagatttatcgagacgaaagaacgctacgaattcctga

SEQ ID NO: 15138 - protein, 283 aa, Unknown
  Obtained from environmental sample
  misc_feature (1)..(283): Xaa is any amino acid
MRIVEGLAAELAGAEAEAENALTLFENYRSHSPLFIDEFLAPEGIITKKRALDAQIRGVKDGIEERRQRIRVLASDNAALTAKINEYRSTLEDLRVNLARMNAQAKSAEEQARLIRRELSGQQAMLENISSELVLDRKRLAEIDERIAGTHAEIAEIELQAQNLNKELEKLEKDIKKRSGDVAGKQELIRKRTAELGRVQEALEKIHLELAQSETEIKNIQDNFRETHSRDLMEFEERIFTITTQPAELREKLAEARSQMRDPGSVKLMAPEDLSRRKNATNS

SEQ ID NO: 15139 - DNA, 594 bp, Unknown
  Obtained from environmental sample
  misc_feature (1)..(594): n is a, c, g, or t
atggtgcctgttattaaaactgttttccacgttaggccatatatagctatgctttttattttgggagtgctntggactgtggttgagcttttagcccgcaggcacaaaagtatcccgaataggctaaatgttcaccacgtgataaaagatgttgatactccaagcgtgctgttctttgcgggaattttgctggctgttggcgttttggaggcaactgggcagcttgaagcccttgcaaaaatattggaaaatgctttgggcgatgttcgcataatcacagtcataataggctttttgtctgctgttgtggataatgttcctttggttgcagctacaatgggtatgtacgacttgagtgctttccctgaagatcatttgatgtgggaattcatagcctattgcgcaggcacgggtggttctatgcttgtaattggctctgctgcaggtgttgcggctatgggcatagacagaaacctctcttttggctggtatttaaaaagaattgctcctttggcattgctcggctatttggcaggtgctggagtgtatttgttaatgcatataggtggtaattggtcaatggtaggtggataa

SEQ ID NO: 15140 - protein, 197 aa, Unknown
  Obtained from environmental sample
  misc_feature (1)..(197): Xaa is any amino acid
MVPVIKTVFHVRPYIAMLFILGVLWTVVELLARRHKSIPNRLNVHHVIKDVDTPSVLFFAGILLAVGVLEATGQLEALAKILENALGDVRIITVIIGFLSAVVDNVPLVAATMGMYDLSAFPEDHLMWEFIAYCAGTGGSMLVIGSAAGVAAMGIDRNLSFGWYLKRIAPLALLGYLAGAGVYLLMHIGGNWSMVGG

SEQ ID NO: 15141 - DNA, 768 bp, Unknown
  Obtained from environmental sample
  misc_feature (1)..(768): n is a, c, g, or t
ttgggttatggcggcgcacttaaactggacgcccaggccgaagcaaggtacatacgccccggcgacagaacaatggtaaccgggcaattggggaatctgcttaatttaaattttgacattataaccgtatttggctatcaatttgctgcgaagctaaaccttgccatttctgacaaccaggcaaatgtttttgccgatacaacgctattcggcctttcggggcaggaaattaaatttcaaaacacgagtacctaccgctaccgtgattccaacatcgaccctgataccggcaagccgatttattccggcgttacaagggaaattgtttcgggcctggtgcttgaaataaaaggctgggtttccggcgacggaatgatcactaccactgttacagcgtcagtgtccaagcgcggagtggagtcgcattccgccgtaggaaatccgccgcccacctcagagagggttttaacaacccaggttcgcgccagatcgggcgagacggttgtattaagcggacttaggcaaaacgactccagcattatcgaacagcggcttccgctgctttcaaaattaccacttttgggctggctttttaaaagcaagaacaattcgacagaagattcgcagatgataatataccttgtacctcatgttgattttgccaacgatgagtacaccgtaagcggtttaaagaccgcttcaatttacacccgccttgtggaaccgtacatcgaaccgtcaattggacaatccttggagggaaaatga

SEQ ID NO: 15142 - protein, 255 aa, Unknown
  Obtained from environmental sample
  DOMAIN (8)...(219): Bacterial type II and III secretion system protein
  misc_feature (1)..(255): Xaa is any amino acid
MGYGGALKLDAQAEARYIRPGDRTMVTGQLGNLLNLNFDIITVFGYQFAAKLNLAISDNQANVFADTTLFGLSGQEIKFQNTSTYRYRDSNIDPDTGKPIYSGVTREIVSGLVLEIKGWVSGDGMITTTVTASVSKRGVESHSAVGNPPPTSERVLTTQVRARSGETVVLSGLRQNDSSIIEQRLPLLSKLPLLGWLFKSKNNSTEDSQMIIYLVPHVDFANDEYTVSGLKTASIYTRLVEPYIEPSIGQSLEGK

SEQ ID NO: 15143 - DNA, 849 bp, Unknown
  Obtained from environmental sample
  misc_feature (1)..(849): n is a, c, g, or t
gtgcagatcgtctgcacggtgatctccgccgatgataagtacgacacggacgtgttggccgtgacggcggcgtccacggcgctgtgcctctcggatatgccgtttcaggaaccggtcgcggcggtgcgcgtcggcatggtcgacggaaagctcaaggttttccccacttacgcggagacggagagcggcgagctcgacatggtcgtggccggtacggaagagtcgatcatgatggtcgaaggcggcgcgatggaactctccgaagacgtgttgctcgaggcgattctcttagcgcacgccgagataaagaaactgacggcgatacaaaaggaccttgtgtccaaatgcggcaagcaggtcgcgccgtataccgctccggttgtgaacgaggaacttgtgaacgcggtcaaggaaatagtgagctcgcgtttgcacgacgcgagttttatgggtatcaaaccggagcgctacgcggcggtggccgcgctacgcgacgaggcggtgacggcgctcgccgaacgcttcccggactcaaagaaagcgatctcagaaattttcactngaattgagcgcgacgacatccgccagtcgatcctgaacaacagcgtccgcatcggcggccgcgggctcgacgagatacgcaagatcacctgcgaactcgacgtgctgcctcgcgcccacggatcggcgctcttcacgcgcggcgaaacgcagtcgctcgccgccaccacgcttgggacgaaactcgacatccagcacatcgacaacatacagggtaactaccaccaatcgtatatgctccacttacaatttcccgccctaatcggtgaacgaggtcaagccggatga

SEQ ID NO: 15144 - protein, 282 aa, Unknown
  Obtained from environmental sample
  DOMAIN (132)...(209): Polyribonucleotide nucleotidyltransferase, RNA binding domain
  misc_feature (1)..(282): Xaa is any amino acid
MQIVCTVISADDKYDTDVLAVTAASTALCLSDMPFQEPVAAVRVGMVDGKLKVFPTYAETESGELDMVVAGTEESIMMVEGGAMELSEDVLLEAILLAHAEIKKLTAIQKDLVSKCGKQVAPYTAPVVNEELVNAVKEIVSSRLHDASFMGIKPERYAAVAALRDEAVTALAERFPDSKKAISEIFTXIERDDIRQSILNNSVRIGGRGLDEIRKITCELDVLPRAHGSALFTRGETQSLAATTLGTKLDIQHIDNIQGNYHQSYMLHLQFPALIGERGQAG

SEQ ID NO: 15145 - DNA, 651 bp, Unknown
  Obtained from environmental sample
  misc_feature (1)..(651): n is a, c, g, or t
atgaacgccatatggaatcaacataattacgttgaaagttatcatcttttcggccagaggtatcctgataaaggttacggtgggtgtttcaaatgttggatgtatgccgaaaaaccggagtcgtataatagtgngggtaatggttccgctatgagggctagtcctattgggtggtacggcaacagtattgaagaggttatggctgaggcgcggaagtcagcggaagtcacccataatcacccggaaggtgtaaaaggagcgcaagcgacggctgttgcggtttatctagcgcggataggtaaaagtaaacgtgaaataaaaaagtttataactgatacattccagtataatcttgaacgaaaaatcaatgacataagacagacttattactttgacgtaagctgtcaaggcacggtgccggaagcgatcatagcgtttttagagagtatggattttgaaaatgctgttaggctggccatctccatcggtggggatagtgatacgattgcgtgtatcgccggtgggatttcggaagcctattatggggtgattcctgaatatattgttgaaaaggtttatgaattgttgcccgaagaattattggatattgttgaggtgttttcgggcaaatatgggttcaggagtgggtag

SEQ ID NO: 15146 - protein, 216 aa, Unknown
  Obtained from environmental sample
  DOMAIN (1)...(206): ADP-ribosylglycohydrolase
  misc_feature (1)..(216): Xaa is any amino acid
MNAIWNQHNYVESYHLFGQRYPDKGYGGCFKCWMYAEKPESYNSXGNGSAMRASPIGWYGNSIEEVMAEARKSAEVTHNHPEGVKGAQATAVAVYLARIGKSKREIKKFITDTFQYNLERKINDIRQTYYFDVSCQGTVPEAIIAFLESMDFENAVRLAISIGGDSDTIACIAGGISEAYYGVIPEYIVEKVYELLPEELLDIVEVFSGKYGFRSG

SEQ ID NO: 15147 - DNA, 774 bp, Unknown
  Obtained from environmental sample
  misc_feature (1)..(774): n is a, c, g, or t
gtggttggactgattgcggtaaacctaaaactaacaaaaaagggaaaccatatcatggcgactgatcgggcagtgcaagcggcgtatcgattcgatacgcaaagggtgcgggcgggctacgagcctaaggatcatcaaggcgccgtatcgccgcccatctatcaaaccgcatcgtacgattttcgggatgtggaacacgcaaggaatctcttcaataattcggaggcgggaaacctgtacacccgtgtgggcaatctcacggtggcggtgctggaacagcgggtggccgcgcttgacggagcggcgggcgctatcgccttggcctccggaatggcggctatcagctatacgctattggccctcgccgaaggcggcggtcggatactcacctcgccatacctctacggcggcagcgccgacagcttcaaaatggtctaccccagattcggaatccatttcgattacgccaaaaacatactgaatccaaaggaattggagaaggagatcaaaccggataccaaggcgatattcattgagagcataagcaacccgaacgcgacgctgctggatgtggacgccattgcggccgtagcccacaaacacgggattccgctcgtggtggacaacacggtggccacgccgtacctcttcaacccgatagcccacggcgcggacattgtgatctattccgcgaccaaagggctgagcggccacggcaatattatcggcggattggtgctggaaagcggcaagttcaattggcaaaagcggtaa

SEQ ID NO: 15148 - protein, 257 aa, Unknown
  Obtained from environmental sample
  DOMAIN (32)...(257): Cys/Met metabolism PLP-dependent enzyme
  misc_feature (1)..(257): Xaa is any amino acid
MVGLIAVNLKLTKKGNHIMATDRAVQAAYRFDTQRVRAGYEPKDHQGAVSPPIYQTASYDFRDVEHARNLFNNSEAGNLYTRVGNLTVAVLEQRVAALDGAAGAIALASGMAAISYTLLALAEGGGRILTSPYLYGGSADSFKMVYPRFGIHFDYAKNILNPKELEKEIKPDTKAIFIESISNPNATLLDVDAIAAVAHKHGIPLVVDNTVATPYLFNPIAHGADIVIYSATKGLSGHGNIIGGLVLESGKFNWQKR

SEQ ID NO: 15149 - DNA, 909 bp, Unknown
  Obtained from environmental sample
  misc_feature (1)..(909): n is a, c, g, or t
atggcgctcccccaccgcgccatcttcgtcatggggctctgcgccacggagttcccggggacaaacgaggcgcccagttgggatctgctgccgagcaagcggatagtgggcgactccgacagagtgcgggacaaccgcttcgcgttcttagaacttctgcacgcggcaaaggagcggctgatactatcctatagggcgcgcgatatgcaaaaggacgaggaacttcaaccatccagcgtcgtgctggaattggaggaatatctaataggacagggattagttgacggtgagggaaattcgcggaaatgctccgtgcggcgagagatcccgtgggtgatacacgaaacgctgaacaaggcaagagaggcggggcgcaaacacgggtcgtgggataaggaacaaaggatactggcggcggagagcttgaaggagagggtcaagcataggcatgatctggccgttaatcgccgtttatcaaaaaacgtcagtttatccgctgatatcaattcgtccgcaaaaaccaccgacttgcgggctttgaagctgtttctctccaatccgtttgaataccacctcagcaaaacattgggaatacgggacgacgacgataccggcgacatgacggcgacggacgaacctattgattcggggtacaagatatcgaaactgcgaaaaaatgtgtggataaaaattttgagcgccatttttacaaccggaattgacaatatcgatactgtagcggttgacgcggcccacgatgtttacgacgatcacatagactccgggcaggctccagagggacatatctgccgtatggagcgcgaggaacctgaaggaatgggccaaaggagtgcgcccaacgcttcgggccaagttactggaaaaccctttccgaaccaaccaatttga

SEQ ID NO: 15150 - protein, 302 aa, Unknown
  Obtained from environmental sample
  misc_feature (1)..(302): Xaa is any amino acid
MALPHRAIFVMGLCATEFPGTNEAPSWDLLPSKRIVGDSDRVRDNRFAFLELLHAAKERLILSYRARDMQKDEELQPSSVVLELEEYLIGQGLVDGEGNSRKCSVRREIPWVIHETLNKAREAGRKHGSWDKEQRILAAESLKERVKHRHDLAVNRRLSKNVSLSADINSSAKTTDLRALKLFLSNPFEYHLSKTLGIRDDDDTGDMTATDEPIDSGYKISKLRKNVWIKILSAIFTTGIDNIDTVAVDAAHDVYDDHIDSGQAPEGHICRMEREEPEGMGQRSAPNASGQVTGKPFPNQPI

SEQ ID NO: 15151 - DNA, 525 bp, Unknown
  Obtained from environmental sample
  misc_feature (1)..(525): n is a, c, g, or t
atggccatcggccttgcgctgaaagacaccctgggaaacatgcggtccgggataataatccttcttttgggcagctaccacaaaggagactttattgaattcggtcttttcatgggaaccgtgaaggatataaacctgttcacgacgatcctcgaaacccccgacggcattaatatttccgctcccaattcatgtatttggggcgctcccctgcggaactacaccagaaacggtaaacgaagaatggagctttccgtcggcatatcctattcggattccgttgacacggcttttcaggtaatgaaggacattatcgcggcagaaccgcggctgctgaaagaccccacgccccaggttatacttcaatccctcgaaagcagctcggtgataataacagtcagggcctgggcttcccttaaggattactgggatatctattgggaactgaacaaaaccataaaggcaaaaatcgaagccgccggtctgcacatcccctttccccatgtccaaattgtacgggattaa

SEQ ID NO: 15152 - protein, 174 aa, Unknown
  Obtained from environmental sample
  DOMAIN (2)...(165): Mechanosensitive ion channel
  misc_feature (1)..(174): Xaa is any amino acid
MAIGLALKDTLGNMRSGIIILLLGSYHKGDFIEFGLFMGTVKDINLFTTILETPDGINISAPNSCIWGAPLRNYTRNGKRRMELSVGISYSDSVDTAFQVMKDIIAAEPRLLKDPTPQVILQSLESSSVIITVRAWASLKDYWDIYWELNKTIKAKIEAAGLHIPFPHVQIVRD

SEQ ID NO: 15153 - DNA, 351 bp, Unknown
  Obtained from environmental sample
  misc_feature (1)..(351): n is a, c, g, or t
gtgcttgcgaatatttggaataaaaaccttggcgagtggtttggccctgactggtcattctggagaaccagtgtcgtggtgggggcgcatttctcgtacttcctcatggatgaaggcgagacgcctctgtggatggggcagttcctcggccaatgggaggtaataaaatccgacatgagttttttcttcccgaaatggaagtacttcaaatcattgtcgttttacgttgagccgggcgtttggtttgccccgtcggatgtgagcgaagatatcgaccccgagaccggaaagaacagagcctggcgcaccttgtttactattgcttttggcctacgggttaatttgttctaa

SEQ ID NO: 15154 - protein, 116 aa, Unknown
  Obtained from environmental sample
  misc_feature (1)..(116): Xaa is any amino acid
MLANIWNKNLGEWFGPDWSFWRTSVVVGAHFSYFLMDEGETPLWMGQFLGQWEVIKSDMSFFFPKWKYFKSLSFYVEPGVWFAPSDVSEDIDPETGKNRAWRTLFTIAFGLRVNLF

SEQ ID NO: 15155 - DNA, 507 bp, Unknown
  Obtained from environmental sample
  misc_feature (1)..(507): n is a, c, g, or t
atggtcaacgaaaatagatcgaacaataaccctttccctcttccctttgcgtcctctgcgcctctgcgcctctgcgagaggaatagccggagaagcgcgccttggcgctggcgaatattcgtattatgcgctctgttagctgtaattggcagtccggtgtgggctggcgggagggggcaggttgaacctgtcaccgctgagggcgatgaaacctggcggcataattttattcttaaagggcggggaaaaggcacttacaactatattgtaaacgcccaggaccatgcgggaaacgaagcggtttccggccctttcaatataaagatcgatcccaattcgggcctccccacagtgacggtattatttccggaaattggcacagtcatacggcagaatataaatgttttgggcaccgccaaggggtattttagcgttgaaaaagtgtctgtctgtctggatcacggtgaaactcttgagcggaaggcagtgaatactggaccagaatga

SEQ ID NO: 15156 - protein, 168 aa, Unknown
  Obtained from environmental sample
  misc_feature (1)..(168): Xaa is any amino acid
MVNENRSNNNPFPLPFASSAPLRLCERNSRRSAPWRWRIFVLCALLAVIGSPVWAGGRGQVEPVTAEGDETWRHNFILKGRGKGTYNYIVNAQDHAGNEAVSGPFNIKIDPNSGLPTVTVLFPEIGTVIRQNINVLGTAKGYFSVEKVSVCLDHGETLERKAVNTGPE

SEQ ID NO: 15157 - DNA, 420 bp, Unknown
  Obtained from environmental sample
  misc_feature (1)..(420): n is a, c, g, or t
gtgtttgtgaagccggcgtcagcggagcgcaaatggtatgtgattgacgctgagggcaaggtaatgggcagagtcgcggcaaaggtcgcgtccatagtccggggtaaaaataagccgattttcgcgccccatcaggaaatgggggattttgttgtggttatcaatgccgataaggtcaccgttaccggcagaaaaacccagcaaaaaatctattaccggcattcgggctatgtgggcgggttaaaagccgtcaattttgagaaactaatcgccaaacaccccacccagcccctggaaaacgccattaaaggaatgttgccaaaaggaccgcttggcaggaaactggcaaaaaacgcaaaaatttacgccggggcagcgcatccccatgccgcccaaaacccaacggcgattgacttatag

SEQ ID NO: 15158 - protein, 139 aa, Unknown
  Obtained from environmental sample
  DOMAIN (12)...(139): Ribosomal protein L13
  misc_feature (1)..(139): Xaa is any amino acid
MFVKPASAERKWYVIDAEGKVMGRVAAKVASIVRGKNKPIFAPHQEMGDFVVVINADKVTVTGRKTQQKIYYRHSGYVGGLKAVNFEKLIAKHPTQPLENAIKGMLPKGPLGRKLAKNAKIYAGAAHPHAAQNPTAIDL

SEQ ID NO: 15159 - DNA, 393 bp, Unknown
  Obtained from environmental sample
  misc_feature (1)..(393): n is a, c, g, or t
gtggtcaagaatctaggaataggcacaggcagaagaaaaacttctgtggcgcgggtgtatgtcaggtcaggaagcggcaaaatctcgataaacggcaaggagcttacccaatattttccccagggcgagcattgcctgatagtccgccagccgttaatggtaacagccagtgaagacaagtttgatattttgataaatgtgtacggaggcggaaacaacggtcaggcgggagcctgccgccacggtcttgcccgcgccttggtcaatgttgatcaggccaattatacaagcctgcggagcaacggatacctcacccgcgattcgcgcatggtggaacggaaaaaatacggccgccgcggcgctcgcagacgcttccagttctccaaacgctag

SEQ ID NO: 15160 - protein, 130 aa, Unknown; identical to SEQ ID NO: 6366
  Obtained from environmental sample
  DOMAIN (10)...(130): Ribosomal protein S9/S16
  misc_feature (1)..(130): Xaa is any amino acid

SEQ ID NO: 15161 - DNA, 843 bp, Unknown
  Obtained from environmental sample
  misc_feature (1)..(843): n is a, c, g, or t
atggcaatatcaatggcgattgcgacaagtttccgcgagattgcaaagccgaaaataccgcttattatttccgctgcgacaacggtgattaatacaataggaaactggattttaatttacggtaacctcggcgcgcctcgtcttgaagttaaaggcgcagcttacgctaccatgatagcgcggtgcgttgaagttgcggcgtttctggtttacgctgctgtttccaacgcgccgttttttgcgaatattaaaagattgttccttattcataaaaaattgataatagaaattttcggcaaatccgccatgatattcgcttccgaaatatcttgggtcgcttccgagacattgatgatcgccatgtataacaggagaggcggcgcggaagttgtcgccggaatgtccgccggttggactatcgcaaatattttctttcttctgttcggcggattgtggacggtatcctacgttttggttgggggcgcgcttggtggcggaaaacttgacgaagcgaaaaatcgcgcaggttggcttaaatggggcggctttactgcggggcttgtttttgccataccgggcttttttataacttccgctttagttccgctggtttttcacaaccttagcgcggacgcaagagcgaattgccttgggcttgtctttgtaattcttgtctatttgccgttatggtgttacttaaatgttcaattcgcggtttcacgcgcaggaggagatacggcaatgggaatgtatacggacgtatccgtcaacacttttcttttcgcgccgggctccgttcttctttctttatttaccaatctgcccccagtgcctcggccataa

SEQ ID NO: 15162 - protein, 280 aa, Unknown
  Obtained from environmental sample
  DOMAIN (102)...(267): MatE
  misc_feature (1)..(280): Xaa is any amino acid
MAISMAIATSFREIAKPKIPLIISAATTVINTIGNWILIYGNLGAPRLEVKGAAYATMIARCVEVAAFLVYAAVSNAPFFANIKRLFLIHKKLIIEIFGKSAMIFASEISWVASETLMIAMYNRRGGAEVVAGMSAGWTIANIFFLLFGGLWTVSYVLVGGALGGGKLDEAKNRAGWLKWGGFTAGLVFAIPGFFITSALVPLVFHNLSADARANCLGLVFVILVYLPLWCYLNVQFAVSRAGGDTAMGMYTDVSVNTFLFAPGSVLLSLFTNLPPVPRP

SEQ ID NO: 15163 - DNA, 804 bp, Unknown
  Obtained from environmental sample
  misc_feature (1)..(804): n is a, c, g, or t
gtggagccgtatccggttattcggatcgacctgagtaccggggattacccgaattacgggatcaaggcgctcaactccgtcatatgtgacgagatgcggagggaggcccaaaagtatggtgttaaacttgatcggaaggctgcatcggccagccaattcaagaacctcatagagggagtcggcgaaaagacaggcgaaaaggccgttgtgattatcgacgagtacgacagtccgctgacgaataccttaaataagctggatcttcattttgagttgcgagacgcgctcaaagcgttctacagcgtcctcaaatcatacgacgcgtacttgcgcttcgtcttaataaccggcgtgagcaagttctcccacgtaagcctattctccggcatgaaccagctgaccgatctgactttagacccgcgttgcgccgacatctgcggactcacccaagaggagatggttgtcaatttcgggccggaaatagacggtatcttggaaaataccggacgtaaccgcgaggagtacatggaccaactgcgcctctattacaacggctatcgcttctccaaaaaaccgcttacggtctacagtccgttcgggttgctcaagcatttttacggcggcggagaattctcagaccactggtacgaaacaggcaccccgtctttccttgttgatttgatcaccaataacaaaatcaatatcctcgacctgaaggacacacaggtcacgcaaagcgatttcggcaagtacgacgcagacaacatagcgctggcgccgttgctctgccaaccggctacctaa

SEQ ID NO: 15164 - protein, 267 aa, Unknown
  Obtained from environmental sample
  DOMAIN (1)...(265): Protein of unknown function (DUF1703)
  misc_feature (1)..(267): Xaa is any amino acid
MEPYPVIRIDLSTGDYPNYGIKALNSVICDEMRREAQKYGVKLDRKAASASQFKNLIEGVGEKTGEKAVVIIDEYDSPLTNTLNKLDLHFELRDALKAFYSVLKSYDAYLRFVLITGVSKFSHVSLFSGMNQLTDLTLDPRCADICGLTQEEMVVNFGPEIDGILENTGRNREEYMDQLRLYYNGYRFSKKPLTVYSPFGLLKHFYGGGEFSDHWYETGTPSFLVDLITNNKINILDLKDTQVTQSDFGKYDADNIALAPLLCQPAT

SEQ ID NO: 15165 - DNA, 324 bp, Unknown
  Obtained from environmental sample
  misc_feature (1)..(324): n is a, c, g, or t
gtggtgtcttcaatctgttttttgatttgtgcaacgcgagcttttatatccttgggtttcccagcaccttctactatagtggtattgtccttgtctatgattatggactttgcctgcccaagaacgcttgacggaacatcttccagctttgcacctgtttcttcgcttacaagcataccgccagttaaaatggcgatgtcttctaacatggcttttctgcggtcgccaaagccaggagctttaacggcagcaactttaagggttccacgcattttgtttatgatgagcgttgccaaggcttccccatcaacatcttcggcataa

SEQ ID NO: 15166 - protein, 107 aa, Unknown
  Obtained from environmental sample
  SIGNAL (1)...(19)
  misc_feature (1)..(107): Xaa is any amino acid
MVSSICFLICATRAFISLGFPAPSTIVVLSLSMIMDFACPRTLDGTSSSFAPVSSLTSIPPVKMAMSSNMAFLRSPKPGALTAATLRVPRILFMMSVAKASPSTSSA

SEQ ID NO: 15167 - DNA, 873 bp, Unknown
  Obtained from environmental sample
  misc_feature (1)..(873): n is a, c, g, or t
ttggcaacgctcatcataaacaaaatgcgtggaacccttaaagttgctgccgttaaagctcctggctttggcgaccgcagaaaagccatgttagaagacatcgccattttaactggcggtatgcttgtaagcgaagaaacaggtgcaaagctggaagatgttccgtcaagcgttcttgggcaggcaaagtccataatcatagacaaggacaataccactatagtagaaggtgctgggaaacccaaggatataaaagctcgcgttgcacaaatcaaaaaacagattgaagacaccacaagcgactacgaccgcgaaaagttgcaggaacgcttggcaaagctctccggtggcgttgccgtgattaaagttggcgcagataccgaagttgccatgaaggagaaaaaagaccgctttgacgatgccttgcacgcaacccgtgctgctattgaagagggcattgtagctggcggtggggtagcctttatccgcgctgcctctgcaatagattctctgcaattggaaaaccaagaccaaaagactggtgctgcgattatccgccgtgccttagaagaacccttacgccagattgcagaaaacgcaggcgtggaaggttccgttgtggtcaacaaggtcaaggagcacaaaggtgattatggctacaatgccaaaaccgatgtttacgaagacctctccaaagcgggtgtaattgacccagcanaggtttccaaaaccgctctcttaaaagcggcttccattgcctctatgattctcataaccgattgcgttgtagctgagaagaaagaggataaaccgctcatgccaggcgcaggcggcatgggtggaaatgggcgcatgggcngaatggatatgtag

SEQ ID NO: 15168 - protein, 290 aa, Unknown
  Obtained from environmental sample
  DOMAIN (1)...(267): TCP-1/cpn60 chaperonin family
  misc_feature (1)..(290): Xaa is any amino acid
MATLIINKMRGTLKVAAVKAPGFGDRRKAMLEDIAILTGGMLVSEETGAKLEDVPSSVLGQAKSIIIDKDNTTIVEGAGKPKDIKARVAQIKKQIEDTTSDYDREKLQERLAKLSGGVAVIKVGADTEVAMKEKKDRFDDALHATRAAIEEGIVAGGGVAFIRAASAIDSLQLENQDQKTGAAIIRRALEEPLRQIAENAGVEGSVVVNKVKEHKGDYGYNAKTDVYEDLSKAGVIDPAXVSKTALLKAASIASMILITDCVVAEKKEDKPLMPGAGGMGGNGRMGXMDM

SEQ ID NO: 15169 - DNA, 342 bp, Unknown
  Obtained from environmental sample
  misc_feature (1)..(342): n is a, c, g, or t
ttgtgctccttgaccttgttgaccacaacggaaccttccacgcctgcgttttctgcaatctggcgtaagggttcttctaaggcacggcggataatcgcagcaccagtcttttggtcttggttttccaattgcagagaatctattgcagaggcagcgcggataaaggctaccccaccgccagctacaatgccctcttcaatagcagcacgggttgcgtgcaaggcatcgtcaaagcggtcttttttctccttcatggcaacttcggtatctgcgccaactttaatcacggcaacgccaccggagagctttgccaagcgttcctgcaacttttcgcggtcgtag

SEQ ID NO: 15170 - protein, 113 aa, Unknown
  Obtained from environmental sample
  misc_feature (1)..(113): Xaa is any amino acid
MCSLTLLTTTEPSTPAFSAIWRKGSSKARRIIAAPVFWSWFSNCRESIAEAARIKATPPPATMPSSIAARVACKASSKRSFFSFMATSVSAPTLITATPPESFAKRSCNFSRS

SEQ ID NO: 15171 - DNA, 306 bp, Unknown
  Obtained from environmental sample
  misc_feature (1)..(306): n is a, c, g, or t
atgaatatttttgaatcaataatgctgatttgtttcggcttcgcgtggccgatttccatatacaaatcacttgtatccaaaaagacggcgggtaaaagcctgttgttcctgctagtattgcaaacaggttatgtggccggcattttttttaaactaacagaatactggagtaatctacaaattaacccggacgagactatcagtataaatctatacttatacattcttaattttataatgataacaatagacgagttattatttctgagaaaccgcaagttagaaaaaagaaacgagggaaaatga

SEQ ID NO: 15172 - protein, 101 aa, Unknown
  Obtained from environmental sample
  misc_feature (1)..(101): Xaa is any amino acid
MNIFESIMLICFGFAWPISIYKSLVSKKTAGKSLLFLLVLQTGYVAGIFFKLTEYWSNLQINPDETISINLYLYILNFIMITIDELLFLRNRKLEKRNEGK

SEQ ID NO: 15173 - DNA, 345 bp, Unknown
  Obtained from environmental sample
  misc_feature (1)..(345): n is a, c, g, or t
gtgtatatgcgtcttgcaaacaacagcgctgtgattctaaaggatatttttgataaattttcaactgaagtaccgggtgattttgacagaaccattgtccctataattttaacaaacaccgatgacttagtgtcgcgttcacaggcaagacgaattttaagcggtcttgaattattcaaggaggttattctggattttaaaaatatcgaaaatatcggacaggcgtttgcggatgaaattttccgcgtatttccaaacagaaatcccgacaccagaataaccgcgcaaaatacaaacgcgaatgttcaatacatgattaatagagccataaatacaaaattatga

SEQ ID NO: 15174 - protein, 114 aa, Unknown
  Obtained from environmental sample
  misc_feature (1)..(114): Xaa is any amino acid
MYMRLANNSAVILKDIFDKFSTEVPGDFDRTIVPIILTNTDDLVSRSQARRILSGLELFKEVILDFKNIENIGQAFADEIFRVFPNRNPDTRITAQNTNANVQYMINRAINTKL

SEQ ID NO: 15175 - DNA, 561 bp, Unknown
  Obtained from environmental sample
  misc_feature (1)..(561): n is a, c, g, or t
atgaaaaagctagaactgataatggacgcccacgccctagacctagccctaacccgcatctcgcaccagattttggagcggcacggcgacttgggggacgcctgcatcgtcggcatgcagtcgcggggtgtctttttggcgcgtcggatcgcggccaagatcaccgccatggagggtctggccgcgccgcttttgaccggcgttttggacaccaccctctaccgcgacgactaccgctcgcgtctccgtcagcctgaggttcggataaccgacatacctttcgacataaacgagaagagcgtcgttctcgtagacgacgtcctctttacggggcgcaccgtgcgggcggcgctggacgcgcttatggaccacgggcggccccgcgagatacagctggccgtgctcatagaccgcgggcaccgcgaactgcccatacgcgccgattatgtgggcaagaagatcaccacctccccgacgcaggaggtcgcgctcagggtgagcgaactcgacggggaggattcgctttggctcatggaacttgacggggagggcggtcaatga

SEQ ID NO: 15176 - protein, 186 aa, Unknown
  Obtained from environmental sample
  DOMAIN (2)...(152): Phosphoribosyl transferase domain
  misc_feature (1)..(186): Xaa is any amino acid
MKKLELIMDAHALDLALTRISHQILERHGDLGDACIVGMQSRGVFLARRIAAKITAMEGLAAPLLTGVLDTTLYRDDYRSRLRQPEVRITDIPFDINEKSVVLVDDVLFTGRTVRAALDALMDHGRPREIQLAVLIDRGHRELPIRADYVGKKITTSPTQEVALRVSELDGEDSLWLMELDGEGGQ

SEQ ID NO: 15177 - DNA, 774 bp, Unknown
  Obtained from environmental sample
  misc_feature (1)..(774): n is a, c, g, or t
ttggaggttataatgcgggtagccggcatggggcagcttccgtacaggtgtcccgacccgctctttggggtgcggttgatcccaaatgccgcctatgagcagatgggcgagggatattccagcggacgtatcaacagcaacagcttgagggatcgcgatattccgtacgagaatccggagaattctaaacgcatattgattctcggcgactcttttatggaagcccttcaggttgatcttgacagcagcttccctagattgcttcaaacatttatcggtgaggcgctgctgcggcacaacgtcaagacaatcaacgcgggacgtagcggaatgggcacggcggaggagtacctttggtacgtgaccgagggggttaaatacagcccggatctcgtactcctggcgttttacgccgggaacgatttccgcgacaactcaaaggagctctcggggcaagccgcgttcaagccgtacattatgttcgacgcggataccttttgggtcgacgcctcgttttcagagaaccgctcctacaagatcagggcgctcttttggccgctgttcaacgcctccgttttggcagccgagacggcgcggcgtattgaggtgttcagacgcggcgcggccaaggcaaacggcgcgccttgtccaatggatctcggcgtcttcaacgttaaacaagacggcgcttgggagagcgcatacaccgtcaccggtaagctcgtggccttgcttgacgacgcggtaaacgcaacgcctccgcgttttgcgtga

SEQ ID NO: 15178 - protein, 257 aa, Unknown
  Obtained from environmental sample
  misc_feature (1)..(257): Xaa is any amino acid
MEVIMRVAGMGQLPYRCPDPLFGVRLIPNAAYEQMGEGYSSGRINSNSLRDRDIPYENPENSKRILILGDSFMEALQVDLDSSFPRLLQTFIGEALLRHNVKTINAGRSGMGTAEEYLWYVTEGVKYSPDLVLLAFYAGNDFRDNSKELSGQAAFKPYIMFDADTFWVDASFSENRSYKIRALFWPLFNASVLAAETARRIEVFRRGAAKANGAPCPMDLGVFNVKQDGAWESAYTVTGKLVALLDDAVNATPPRFA

SEQ ID NO: 15179 - DNA, 309 bp, Unknown
  Obtained from environmental sample
  misc_feature (1)..(309): n is a, c, g, or t
atggctaaggaaaaaattacaagatggaacgtcctggacggacttaggaacgatagggaaatagccgcctacctcgaggccgccctcgaggagggatacgggtttttcctgtccgccctcgacgacgcggcgcgcgcgcgcggcataaacgcaatagcgaaaaggatgggcgtcaacaggcagagcctttacaagagtttcggcaaaaacaagcgcccaaacttcgagaccgtattcaaggcgatcgacggcctcgggctgcagatccatttcaccccaagggagcggatgggcgtggcgtcggcttga

SEQ ID NO: 15180 - protein, 102 aa, Unknown
  Obtained from environmental sample
  misc_feature (1)..(102): Xaa is any amino acid
MAKEKITRWNVLDGLRNDREIAAYLEAALEEGYGFFLSALDDAARARGINAIAKRMGVNRQSLYKSFGKNKRPNFETVFKAIDGLGLQIHFTPRERMGVASA

SEQ ID NO: 15181 - DNA, 681 bp, Unknown
  Obtained from environmental sample
  misc_feature (1)..(681): n is a, c, g, or t
atgagagccgtcgcgcgcccggcctcgaccgcccgccccgccccgcccccttggtggaatcggacttccattcggcgtcgcggtcctgccgttcatttgaatcagtcctctcctccgtgcgcgtctccgaatacggcaaattcgacaccaacttcaaggccttcctctacgacaacgtcgcaaaactcgtcgagcgccacaccgaagacatgtcccgcatctccgaggctttcaactccctcgtcgatcttgacgcaaagacctccgtcaacctcgcaaaccttgatttcaagcgcgaacaaggccaaatcgaacgcgattccatcctctctcaaatgcgcgacgaccgcgacgccgccgtctctgaccgcgaagccgcccgccttgaccgccttgccgccgcaaaggataacgaagaccaagctatcgcccgcactaaacaacgcatcctcaaggatttctcctcccagattctctccaggtgcaccaataccgccaccaccctggccaccagcaattctctcgccttgctcgactccctctccgataaaattaatgataagggcttattgtttgacagctcgcagaagctctccgattacaattccttcaatgttaaagatgagtctggcgctgcgatcagttccactcccgatccactcacacaaaaatctctcatga

SEQ ID NO: 15182 - protein, 226 aa, Unknown
  Obtained from environmental sample
  misc_feature (1)..(226): Xaa is any amino acid
MRAVARPASTARPAPPPWWNRTSIRRRGPAVHLNQSSPPCASPNTANSTPTSRPSSTTTSQNSSSATPKTCPASPRLSTPSSILTQRPPSTSQTLISSANKAKSNAIPSSLKCATTATPPSLTAKPPALTALPPQRITKTKLSPALNNASSRISPPRFSPGAPIPPPPWPPAILSPCSTPSPIKLMIRAYCLTARRSSPITIPSMLKMSLALRSVPLPIHSHKNLS

SEQ ID NO: 15183 - DNA, 504 bp, Unknown
  Obtained from environmental sample
  misc_feature (1)..(504): n is a, c, g, or t
gtgaccggcaaaagccttcttgcccactgcgcctaccgcatgggagaagtcgccgtggcggacattcttgcgacgctgaataacggacnagggaacagggaacagggagccgtcaacaaaactaatcgtatgcgctataatgccataccctgggccgtntacggcatcaccgaagcagccggcgtcggactcaccgaacaggaggccgacgcgaaaggaatcgccattctcaaggcaagccttcccatgaaagtgtcgggccgcttcgccgcggaaaacactttttcaggagcgggagcggtcaaagttatcgccaacgccgcggaccgccgcattctgggtatacacgcggtcggcgcgtattcgccggaatttatctggggcggcgcggcccttatcgaacaggaattccgtattgacgaagttaagcagcttatttttccccatcccacggtgagcgaactcattcgggatgcagtgtgggaaatagggagtagggagtag

SEQ ID NO: 15184 - protein, 167 aa, Unknown
  Obtained from environmental sample
  DOMAIN (49)...(160): Pyridine nucleotide-disulphide oxidoreductase, dimerisation domain
  misc_feature (1)..(167): Xaa is any amino acid
MTGKSLLAHCAYRMGEVAVADILATLNNGXGNREQGAVNKTNRMRYNAIPWAVYGITEAAGVGLTEQEADAKGIAILKASLPMKVSGRFAAENTFSGAGAVKVIANAADRRILGIHAVGAYSPEFIWGGAALIEQEFRIDEVKQLIFPHPTVSELIRDAVWEIGSRE

SEQ ID NO: 15185 - DNA, 903 bp, Unknown
  Obtained from environmental sample
  misc_feature (1)..(903): n is a, c, g, or t
atgatggccgggggggccagcttttttgtcgttatgtttgtggttttgggaattatggccataaacggcttgctaacgccttttgttccctttgcctttatcaccggcggcttcttttccggcctttcgggctttatcgggatgaaaatcgccacttccgccaacgccagaaccgcccaggcctcgtctgaaagcctgaacaggggactcagggtcgccttttcatccggtacggtgatgggctttaccgtaatcggattggggcttctggacctgtcaatatggtttttcttattgaagtatgtgttttatacccccgagtcaaaggctattgtagccttcctcgcgagtaaccccggcaagtccgtagatgccgctcagattcagcttatttcttctgcaatgctgaccttcggcatgggcgcttccagtatggccctctttgcccgtgtaggcggcggtatctttaccaaggccgccgatgttggcgccgacctggtcggaaaggttgaggccggaatccccgaagacgatccccgtaatccggcggttatagccgacaacgtaggcgataacgtaggcgacgttgcgggcatgggcgccgacctttatgagtcctatgtcggttccattgtcgctaccgtcgccctggcggtttcggcgggttttgactttaacggcgcggtggttcccatgctgatggcagcagtcggaacggtagcatccattatcggaaccttcttcgtgcgctgcggagagaaagcggatcaaaaatcactgcttggcgcgttgcggaaaggaacctacatttcttccgctatcatcgttattgcgtcctacccggtcattcgtatagcgcttcctacaaccagggtgtctatttcgcggtattatcggggttga

SEQ ID NO: 15186 - protein, 300 aa, Unknown
  Obtained from environmental sample
  DOMAIN (1)...(300): Inorganic H+ pyrophosphatase
  misc_feature (1)..(300): Xaa is any amino acid
MMAGGASFFVVMFVVLGIMAINGLLTPFVPFAFITGGFFSGLSGFIGMKIATSANARTAQASSESLNRGLRVAFSSGTVMGFTVIGLGLLDLSIWFFLLKYVFYTPESKAIVAFLASNPGKSVDAAQIQLISSAMLTFGMGASSMALFARVGGGIFTKAADVGADLVGKVEAGIPEDDPRNPAVIADNVGDNVGDVAGMGADLYESYVGSIVATVALAVSAGFDFNGAVVPMLMAAVGTVASIIGTFFVRCGEKADQKSLLGALRKGTYISSAIIVIASYPVIRIALPTTRVSISRYYRG

SEQ ID NO: 15187 - DNA, 363 bp, Unknown
  Obtained from environmental sample
  misc_feature (1)..(363): n is a, c, g, or t
ttgagaacgccagccaggtcagcaactattttggcttggtggccccgtgtatatatgtccggagacgttgtaaagtatgggaagattaccaagagggggaactcctatgcccgtgcgcttttggtacaggctgcatgggcattaatccggacgaaagcaggagggaagctaaaagagcggtatgagtatatgactgtagaaaaatcgataagcaaaaagaaagcgatagtggcaatagcgaggcggatagcggagctgctatataccctgatgaaggacgggacaaaacatgagcatcgtccttttatccgtgagaagaaagcggcagaaggaatagccgcccagttagcaaaaagcgcataa

SEQ ID NO: 15188 - protein, 120 aa, Unknown
  Obtained from environmental sample
  misc_feature (1)..(120): Xaa is any amino acid
MRTPARSATILAWWPRVYMSGDVVKYGKITKRGNSYARALLVQAAWALIRTKAGGKLKERYEYMTVEKSISKKKAIVAIARRIAELLYTLMKDGTKHEHRPFIREKKAAEGIAAQLAKSA

SEQ ID NO: 15189 - DNA, 846 bp, Unknown
  Obtained from environmental sample
  misc_feature (1)..(846): n is a, c, g, or t
ttgaaatgccttgatataagcgaggcggaaaataacgaagactttggcataacggcgagcacgtataacagggaagatgacaggcttgagccgggaatcaacgggcctggcctccgggtcattaattttgccccaatattaaaatacgatttgttcccctttgccgaggttcttgacgcaattctgggcattgcctcaaaaagcatgggcctgcctgtcgaaattgaatttgcggtcagcaaacaaaacgaaacgcggattttttatcttctgcaaattaagcctcttattcaaaatacaggaaggcaggaaaccaatattgacttacaggatattgacaggtgctttgttttttccggaaggagcatggggaacggcagggataacacgatcagtaacattgtttgggttgatccggaaactttttctcccatgtatacggccataatcgcaaaagaaattgaaacgctcaacgggatgttaaaggcgcgcggcctgcgttacgttcttgtcggccccgggcgttggggaaccagggattattcccttggtatccccgtaaattttccgcagatttcattttcgcgcgttatcgttgaaaccagcctgcccaatttcagcgtagaatcatccctggggagccatttctttcataatgttaccagcatgaatatcggttatttgtcggtatcgcctgggcaagataaggattatattgactgggaatggcttaaatcgcttcattgcgaggaaaaaactcagttttgcaggtggagcanaacagaggaacctcttgatattgttatggatgggcgggttgcanatacggtgatttataagtgttga

SEQ ID NO: 15190 - protein, 281 aa, Unknown
  Obtained from environmental sample
  misc_feature (1)..(281): Xaa is any amino acid
MKCLDISEAENNEDFGITASTYNREDDRLEPGINGPGLRVINFAPILKYDLFPFAEVLDAILGIASKSMGLPVEIEFAVSKQNETRIFYLLQIKPLIQNTGRQETNIDLQDIDRCFVFSGRSMGNGRDNTISNIVWVDPETFSPMYTAIIAKEIETLNGMLKARGLRYVLVGPGRWGTRDYSLGIPVNFPQISFSRVIVETSLPNFSVESSLGSHFFHNVTSMNIGYLSVSPGQDKDYIDWEWLKSLHCEEKTQFCRWSXTEEPLDIVMDGRVAXTVIYKC

SEQ ID NO: 15191 - DNA, 825 bp, Unknown
  Obtained from environmental sample
  misc_feature (1)..(825): n is a, c, g, or t
ttggacgtggcgcagcacgtacacaacgcaatggtcgaagctgaattccaaatgtacgtgtggtggtacatccgtagatcatacggccctctgaaagaggatggcgccataagcaagcgcggctatatgatggcccacttttcaaagttcgtccgccccggatacgtgagaatcgacgccacaaaaaccccggaaaccaacgtcttcgtatccgcatataagagcggaaacaaggttgttatcgttgcggtcaacaagaaaacgtccgcctccggcatgaattttaccgtaagcgggggcgccgctacgggcagtgtggagtcttggcggacctccggtactgaaaacttggtaaaggcgtccggcacgattgccgtgaacggcgggaagttttccgccaccctgccggcgcaaagcgtcacgacgtttgtcgggacattgggtaccggcggcggtaacaccaacgtcaacgtaacatgcaacgtaaataatctcaacgcgagttacgtttcaggaagcagtattccgaggccaaacgtcggttgcgggcaagggattgcggcgggagcggcaacatttaacattaacggtacggaaattacgggatggagttctccgggcggcacccataaactatataacgatggcactagaacaatcttattgaacagccttgagtgcgacggcgtcaacgtaaccccgagcacaccggtatcctgcggtactgttgaaattctgccggaaacgcctacatccgtcgtgaccggcggcgccgccatacgtgcgcctctctctgtaaatgtgcgcgtaaaacgctgtttataa

SEQ ID NO: 15192 - protein, 274 aa, Unknown
  Obtained from environmental sample
  misc_feature (1)..(274): Xaa is any amino acid
MDVAQHVHNAMVEAEFQMYVWWYIRRSYGPLKEDGAISKRGYMMAHFSKFVRPGYVRIDATKTPETNVFVSAYKSGNKVVIVAVNKKTSASGMNFTVSGGAATGSVESWRTSGTENLVKASGTIAVNGGKFSATLPAQSVTTFVGTLGTGGGNTNVNVTCNVNNLNASYVSGSSIPRPNVGCGQGIAAGAATFNINGTEITGWSSPGGTHKLYNDGTRTILLNSLECDGVNVTPSTPVSCGTVEILPETPTSVVTGGAAIRAPLSVNVRVKRCL

SEQ ID NO: 15193 - DNA, 438 bp, Unknown
  Obtained from environmental sample
  misc_feature (1)..(438): n is a, c, g, or t
gtgaaccgtaaactaatcatatatcttgatacgtgttgctacagtcggctatttgacgttaccgaccaaatcgacgtaatagaggaagtcggtcggattcgacatattatacggaaccgcttttccggcaagtacatcattgtcggcagtggtaccgtaaccgccgaaattagtcggaatcccgacaataaagagcggcgaattactgaaaggctttatacccgaatcaaaagcgacgagacgcagttgaccgcgcaaatcatattacgggcgcaaagattacagttaaaggggctgaaagaaatggacagttttcaccttgcggcggctgaagcgatgaacgccgattaccttttaaccgtggacaaatattttataaaaaagtgttcaatgccgaattttacggcggtagcggttataaatcctataaacttttga

SEQ ID NO: 15194 - protein, 145 aa, Unknown
  Obtained from environmental sample
  misc_feature (1)..(145): Xaa is any amino acid
MNRKLIIYLDTCCYSRLFDVTDQIDVIEEVGRIRHIIRNRFSGKYIIVGSGTVTAEISRNPDNKERRITERLYTRIKSDETQLTAQIILRAQRLQLKGLKEMDSFHLAAAEAMNADYLLTVDKYFIKKCSMPNFTAVAVINPINF

SEQ ID NO: 15195 - DNA, 510 bp, Unknown
  Obtained from environmental sample
  misc_feature (1)..(510): n is a, c, g, or t
atgcgggatgtcggaatagcaggcgagttccacttttttgggatcgatcattatcagccgcaactcttccggttttttcgtcatcagcatactgcaaacgagcgagtttatgcacacgcttttccccgcgcccgtctgaccggcgataagcacgtgcggcattttggctatgtcggtcacgtacggcgcgccggagatgttcgtcccgatgacgacagggatgtcggcggtgctcttcttgaacgcgtccgattgcaggacttgcttgaagtagaccgtctgccgcgtggggttgggcagttcgattccgatcgccgacttgccggggatcggggcttggatgcgtattttctgaccgctcaccgccatcgatatgtcgtcgtgcagatttaccactttgctcaccttaaccccgggcgcgagttctatttcgtagcgcgttacgacggggccggggcttacgcagatcaccttgccttccacgccgaagttcatcagcgtcttctctaa

SEQ ID NO: 15196 - protein, 169 aa, Unknown
  Obtained from environmental sample
  misc_feature (1)..(169): Xaa is any amino acid
MRDVGIAGEFHFFGIDHYQPQLFRFFRHQHTANERVYAHAFPRARLTGDKHVRHFGYVGHVRRAGDVRPDDDRDVGGALLERVRLQDLLEVDRLPRGVGQFDSDRRLAGDRGLDAYFLTAHRHRYVVVQIYHFAHLNPGREFYFVARYDGAGAYADHLAFHAEVHQRLL

SEQ ID NO: 15197 - DNA, 519 bp, Unknown
  Obtained from environmental sample
  misc_feature (1)..(519): n is a, c, g, or t
atgaagggaacttacgcatttcaaggaaaagagccacttgttgggaaagatgtgttcatagctccgggtgcccgcgttataggcgatgtggaactctcggacgatgtttccatttttcacaatgcggttttgcgaggagatataaacagcataaaaattgggaaaaactcaaatgtccaagataattcaacggtgcatttggcaagcgacaaaggagttattataggtgagggagtaacagttggccacaatgccattatccacgcttgcacagttgaggattattgcataattggcatgggtgcttgcgttatggacggagccgtaattggccaccacagcattgttggtgcctgtgcccttgtaaccagcggcaaagaatttcctccttattccctgataaccggaagtccggcacgcagagttagggatttgacagaagatgaaataaaacactgcgagtggagtgcgaaaaaatatgtggaagttaaaaataattttttggagaaaaactcgtaa

SEQ ID NO: 15198 - protein, 172 aa, Unknown
  Obtained from environmental sample
  misc_feature (1)..(172): Xaa is any amino acid
MKGTYAFQGKEPLVGKDVFIAPGARVIGDVELSDDVSIFHNAVLRGDINSIKIGKNSNVQDNSTVHLASDKGVIIGEGVTVGHNAIIHACTVEDYCIIGMGACVMDGAVIGHHSIVGACALVTSGKEFPPYSLITGSPARRVRDLTEDEIKHCEWSAKKYVEVKNNFLEKNS

SEQ ID NO: 15199 - DNA, 759 bp, Unknown
  Obtained from environmental sample
  misc_feature (1)..(759): n is a, c, g, or t
gtgataataggccgcccatccgtgggaaaatccaccttgcttaacaaaatgtgcggcgaaaaagtcgccattgtaagcaaagtgccgcagacaacccgcaatgcaatcaggggaattgtcaaccgtgctcagggacagctcatttttattgatactcctggacggcacaattcgcggaaaaaacttaatataaaactgatggaagtatctgagcgcgctttggaagaaggtgatcttgttttgtatgttatggacgctgtccgtgctccaggtcccgaagaagatgaaattgccgctcttctttctccgttagctgaaaagacaataatcgcagtcaataaaatggacgatcccggcgccgattttacgcgcgctcatgaatatatagcacagcgttttcccgcggtaaaagatcgctgttttgaagtgtccgctaacaccgggcagggaatagacgctcttcttgacgcgctttacgatctcgcgccggaaggcgaagcactctacggagacgaatattacaccgatcaggaaacaggttttcgcattgcagaaattatccgcgagcaggcaatcaaccgcctgcgtcaggaactgccccattcgctgtatgtggatattgccgacatggaatttaaggaagaaaaactctgggtaagggcgtttatcatcgttgaacgcgaatcccaaaaaggcatggtagtcggcaaaggcggagagatgataaaggcaatacgcttggcctctttaaaaatttga

SEQ ID NO: 15200 - protein, 252 aa, Unknown
  Obtained from environmental sample
  DOMAIN (2)...(166): Elongation factor Tu GTP binding domain
  misc_feature (1)..(252): Xaa is any amino acid
MIIGRPSVGKSTLLNKMCGEKVAIVSKVPQTTRNAIRGIVNRAQGQLIFIDTPGRHNSRKKLNIKLMEVSERALEEGDLVLYVMDAVRAPGPEEDEIAALLSPLAEKTIIAVNKMDDPGADFTRAHEYIAQRFPAVKDRCFEVSANTGQGIDALLDALYDLAPEGEALYGDEYYTDQETGFRIAEIIREQAINRLRQELPHSLYVDIADMEFKEEKLWVRAFIIVERESQKGMVVGKGGEMIKAIRLASLKI

SEQ ID NO: 15201 - DNA, 612 bp, Unknown
  Obtained from environmental sample
  misc_feature (1)..(612): n is a, c, g, or t
atgaaacggggcgagaatttatcttttacaatttttcttaagttccccgatattgaacaaattccgtccgccttgacattaagggcgggacttgccgtctgtcttgctatcgaagattntgcgccgtgtttacaaggttcatgtttggttaagtggcccaatgatattctgataaaagctgttaatagcgaaggttataaaaaagcggttggaattctctgtgaagcggacggcggtaatgttcatcttggtataggcataaacacggcgcaaaaagaatttcctccccatttgcgggataaggccgtaagtatcgctcttgccgcgggtcttgatatttcacgggaagaacgtattattttattggaaaatatactttttcgtctttacagcgaattggacgttaaaaacgcgaataactggaaatctcgccttgaacaaaaactgtataaaaaagacgaacaggttttatttattgaaggagccgccggttccggcaaagaagtcaaaggccgtcttacaggtattgcggacaacggtgaacttttaattattcccgacggggaaacagaagcgcgctcatttatcaccggcgaattgatttttttctaa

SEQ ID NO: 15202 - protein, 203 aa, Unknown
  Obtained from environmental sample
  misc_feature (1)..(203): Xaa is any amino acid
MKRGENLSFTIFLKFPDIEQIPSALTLRAGLAVCLAIEDXAPCLQGSCLVKWPNDILIKAVNSEGYKKAVGILCEADGGNVHLGIGINTAQKEFPPHLRDKAVSIALAAGLDISREERIILLENILFRLYSELDVKNANNWKSRLEQKLYKKDEQVLFIEGAAGSGKEVKGRLTGIADNGELLIIPDGETEARSFITGELIFF

SEQ ID NO: 15203 - DNA, 516 bp, Unknown
  Obtained from environmental sample
  misc_feature (1)..(516): n is a, c, g, or t
gtgctttttgaaaaaatagccgctgccctgcacgggaaaaacgtgctgttgctttcggcgcgcgaggaaaactacaaaacagtggcagtagccgcagttcaggcttacgggcataaggccggggccgaatcctcggtcgacataaacctcgcgaaacagctcaacgtgcttatctcccagcttggggtacaaggcaacaatatcgtgatgaatcccggttccgcagccgccggttacggctttgagtatatagcctccaccatggacaggataaaagccgcagcccttgcccaaaacgataccatgctgcaaataccgatcatcacgcctgttggggaagaagcctggtcggtaaaggaagcggttgtttccgaggaagattttcccaactgggggcctgtggaacagcggggcatagacatggaaattaccacggcggccgcgtgccttgcctcaggttcaaacgccgttattttaaggcatccggcttcagtgtcggttgtaaaaaactcatag

SEQ ID NO: 15204 - protein, 171 aa, Unknown
  Obtained from environmental sample
  misc_feature (1)..(171): Xaa is any amino acid
MLFEKIAAALHGKNVLLLSAREENYKTVAVAAVQAYGHKAGAESSVDINLAKQLNVLISQLGVQGNNIVMNPGSAAAGYGFEYIASTMDRIKAAALAQNDTMLQIPIITPVGEEAWSVKEAVVSEEDFPNWGPVEQRGIDMEITTAAACLASGSNAVILRHPASVSVVKNS

SEQ ID NO: 15205 - DNA, 600 bp, Unknown
  Obtained from environmental sample
  misc_feature (1)..(600): n is a, c, g, or t
gtggtttttatcagcaaagggaaggaacgctttaacgggcttgagaagatcgatataaataaattctggagagagtaccttcttcaatattttgaaaacgtggttatccccaaaaaatggcgttatcctgaaagcctgcccctcgacgcgcaagggaagaaaaagaaagaagatattgagcttcttttctcaggtgaaaaggaagctgcggataacgccgttgatacaagcggcgcttttacaagcgaaggttttggcgcgctggatatggaaaaaattattgagaaaaccgaaaattccgtcagcatggaattttccattcccggtacaagcccgtattttgacggtcattttccgggattccccatccttccggcggtagcccaggcggaattaattattcgtttcgcggcgcggtattttggaacaggcatcagtccctctgaaataaagcgttttaagtttaccaaatttatccggcctggcgcgcctctcctgctcaaactgataaaaaaaggaaaaacaatctcctttattataagttctcctgaaaatgaaacagtttattcaacggggacagttattccggaggatacgtga

SEQ ID NO: 15206 - protein, 199 aa, Unknown
  Obtained from environmental sample
  misc_feature (1)..(199): Xaa is any amino acid
MVFISKGKERFNGLEKIDINKFWREYLLQYFENVVIPKKWRYPESLPLDAQGKKKKEDIELLFSGEKEAADNAVDTSGAFTSEGFGALDMEKIIEKTENSVSMEFSIPGTSPYFDGHFPGFPILPAVAQAELIIRFAARYFGTGISPSEIKRFKFTKFIRPGAPLLLKLIKKGKTISFIISSPENETVYSTGTVIPEDT

SEQ ID NO: 15207 - DNA, 777 bp, Unknown
  Obtained from environmental sample
  misc_feature (1)..(777): n is a, c, g, or t
gtgatagacatagaccaatcccccatcggccgcacgccgcgctcaaatcccgccacctacacgaaggtgttcgacgccatacgcaacctcttcgccatgctgcccgaaagcaagatacgcggctaccagcccggacgcttcagtttcaacacgaaaggcggtcgttgcgaggcctgcgagggcgacggtgagttgcgcatagagatgcacttcctgcccgacgtctacgtaaaatgcgaaacgtgcggcgggaaaagatacaacagggagacgctcgaggtactctacaaggggaaatccatcgcggacgtattggagatgacggtagacgaggcgctgctcttcttcgacagcctgtcggcgatacggcagaaactgcaggtgctgtcgcaggtgggcttgggctacatcaaactcggccaatccgccacaacgctatccggcggcgaggcgcagaggatgaagctggcctccgaactctcaaaacgggcgacgggaaaaacgttatatattctggacgagccgaccaccggattgcacttcgaggatataaggatgcttatgtcggtcatacaagagttggtcgacaaagacaattcggtgatagtcatagagcataatttagacgtgataaagtgcgccgaccacatagtagacctcggccccgacggcggcgacaggggcggcacgatagtcgccgtagggacgcctgaagaggtggccaagaatccggcgtcggtcaccggaaagtttttgaaagggtatttgaaacggtaa

SEQ ID NO: 15208 - protein, 258 aa, Unknown
  Obtained from environmental sample
  DOMAIN (63)...(224): ABC transporter
  misc_feature (1)..(258): Xaa is any amino acid
MIDIDQSPIGRTPRSNPATYTKVFDAIRNLFAMLPESKIRGYQPGRFSFNTKGGRCEACEGDGELRIEMHFLPDVYVKCETCGGKRYNRETLEVLYKGKSIADVLEMTVDEALLFFDSLSAIRQKLQVLSQVGLGYIKLGQSATTLSGGEAQRMKLASELSKRATGKTLYILDEPTTGLHFEDIRMLMSVIQELVDKDNSVIVIEHNLDVIKCADHIVDLGPDGGDRGGTIVAVGTPEEVAKNPASVTGKFLKGYLKR

SEQ ID NO: 15209 - DNA, 387 bp, Unknown
  Obtained from environmental sample
  misc_feature (1)..(387): n is a, c, g, or t
atgcgaaacgtgcggcgggaaaagatacaacagggagacgctcgaggtactctacaaggggaaatccatcgcggacgtattggagatgacggtagacgaggcgctgctcttcttcgacagcctgtcggcgatacggcagaaactgcaggtgctgtcgcaggtgggcttgggctacatcaaactcggccaatccgccacaacgctatccggcggcgaggcgcagaggatgaagctggcctccgaactctcaaaacgggcgacgggaaaaacgttatatattctggacgagccgaccaccggattgcacttcgaggatataaggatgcttatgtcggtcatacaagagttggtcgacaaagacaattcggtgatagtcatagagcataa

SEQ ID NO: 15210 - protein, 128 aa, Unknown
  Obtained from environmental sample
  misc_feature (1)..(128): Xaa is any amino acid
MRNVRREKIQQGDARGTLQGEIHRGRIGDDGRRGAALLRQPVGDTAETAGAVAGGLGLHQTRPIRHNAIRRRGAEDEAGLRTLKTGDGKNVIYSGRADHRIALRGYKDAYVGHTRVGRQRQFGDSHRA

SEQ ID NO: 15211 - DNA, 381 bp, Unknown
  Obtained from environmental sample
  misc_feature (1)..(381): n is a, c, g, or t
ttggccgagtttgatgtagcccaagcccacctgcgacagcacctgcagtttctgccgtatcgccgacaggctgtcgaagaagagcagcgcctcgtctaccgtcatctccaatacgtccgcgatggatttccccttgtagagtacctcgagcgtctccctgttgtatcttttcccgccgcacgtttcgcattttacgtagacgtcgggcaggaagtgcatctctatgcgcaactcaccgtcgccctcgcaggcctcgcaacgaccgcctttcgtgttgaaactgaagcgtccgggctggtagccgcgtatcttgctttcgggcagcatggcgaagaggttgcgtatggcgtcgaacaccttcgtgtaggtggcgggatttga

SEQ ID NO: 15212 - protein, 126 aa, Unknown
  Obtained from environmental sample
  misc_feature (1)..(126): Xaa is any amino acid
MAEFDVAQAHLRQHLQFLPYRRQAVEEEQRLVYRHLQYVRDGFPLVEYLERLPVVSFPAARFAFYVDVGQEVHLYAQLTVALAGLATTAFRVETEASGLVAAYLAFGQHGEEVAYGVEHLRVGGGI

SEQ ID NO: 15213 - DNA, 690 bp, Unknown
  Obtained from environmental sample
  misc_feature (1)..(690): n is a, c, g, or t
gtgctttttgttttggtctatgcggatgtcgtcgtcgatgttgtgaacggttttatctatgcgcaccctcacgtacccgctcttttgcagtttcgcgagaagatctttgtacacgcccttcctgttgttgacgaccggggcgagtatttggaacttcacccccgcgtcgagcgccaggattctgtcggttatctcctgtacggattgccgggcgatgacgcgcccgcacttgtggcaggtgggcgtccccacgcgggcgaagagcaggcgcatatagtcgtgtatctcggtgatagtccccaccgtggaacgcgggttgtgcccggaggtcttctgttctatggatatggccggcgacaacccgtctatcctgtcgacgtcgggcttctccataagccccaagaactgccgcgcgtaggaggagagcgattcgacgtagcgccgctggctttcggagtagagcgtgtcgaaagccagcgacgactttccggagccggaaagcccggtgatcaccgtgaggctgttacgcggtatggtaacgtcgatgttcttaagattgtggacgcgcgcgccctttatttctatgttgcgcatagtgtttccgttggtttcacagcttaccacttccggcagacgtcgggcttggcgtggcttttggctatatcggcgactaactcctcaagcgtctaa

SEQ ID NO: 15214 - protein, 229 aa, Unknown
  Obtained from environmental sample
  misc_feature (1)..(229): Xaa is any amino acid
MLFVLVYADVVVDVVNGFIYAHPHVPALLQFREKIFVHALPVVDDRGEYLELHPRVERQDSVGYLLYGLPGDDAPALVAGGRPHAGEEQAHIVVYLGDSPHRGTRVVPGGLLFYGYGRRQPVYPVDVGLLHKPQELPRVGGERFDVAPLAFGVERVESQRRLSGAGKPGDHREAVTRYGNVDVLKIVDARALYFYVAHSVSVGFTAYHFRQTSGLAWLLAISATNSSSV

SEQ ID NO: 15215 - DNA, 588 bp, Unknown
  Obtained from environmental sample
  misc_feature (1)..(588): n is a, c, g, or t
atggaagagctcgggcggaggcgggaagagaggaacctggaaatcgtagacaggatgaacaaggcaggcattgaggttttatacagcgatataagctcccagaccggaaggtctgaggttgccggacattcaatcggaaggccccatttcgcggcgtatctggcggaaaagaaaatcgttaaaaaccgcaagcaggccttttcccgttacctgggcaagggaaagcctttctatataccaaaggtgggcgtggaatttgaactggcgttaaaaattattcacaaatccggcggtattgccgtcctggcccatcccatgtctctgtacgtagcctggggaaagctccctgaattgataaaaagccttaaagaaaagggccttgacggaattgaggcctggcacccttcgacaaaagtatcctcatgcaaaaggctggaagagctgggaagaaaactcggtctttacataaccgcagggagcgactttcacggagaagcgagaaaggaccgaaaactgggttttacagcgggtggaaaaaaaataagcgaaacatttttggaagacataccagctttgggcgctatatga

SEQ ID NO: 15216 - protein, 195 aa, Unknown
  Obtained from environmental sample
  misc_feature (1)..(195): Xaa is any amino acid
MEELGRRREERNLEIVDRMNKAGIEVLYSDISSQTGRSEVAGHSIGRPHFAAYLAEKKIVKNRKQAFSRYLGKGKPFYIPKVGVEFELALKIIHKSGGIAVLAHPMSLYVAWGKLPELIKSLKEKGLDGIEAWHPSTKVSSCKRLEELGRKLGLYITAGSDFHGEARKDRKLGFTAGGKKISETFLEDIPALGAI

SEQ ID NO: 15217 - DNA, 339 bp, Unknown
  Obtained from environmental sample
  misc_feature (1)..(339): n is a, c, g, or t
gtggaacaaaaactcttggaaggcagggatgttgcctttgacttggatgtttttggaaaactcaattttgacaaagtttacccacaggcaataggtattttaattttgccgcctagtttggaagatttggaaaagcgactgcgcgaccgaaaaacagaaacagaagaatcaataaggattagaatggaaaatgctaaaaaagaaattgaatttgcaatcacaaaaggcaaatatcaatacaccattcataacggcgatttggaaacagccactgccgaactcaaaggcataatggaaaaatacagctcttttaagtcttctatccaaagcgggtcttga

SEQ ID NO: 15218 - protein, 112 aa, Unknown
  Obtained from environmental sample
  misc_feature (1)..(112): Xaa is any amino acid
MEQKLLEGRDVAFDLDVFGKLNFDKVYPQAIGILILPPSLEDLEKRLRDRKTETEESIRIRMENAKKEIEFAITKGKYQYTIHNGDLETATAELKGIMEKYSSFKSSIQSGS

SEQ ID NO: 15219 - DNA, 684 bp, Unknown
  Obtained from environmental sample
  misc_feature (1)..(684): n is a, c, g, or t
ttggggcgtaacatgggctttagaagattcgccgttacttatcttatgaaagggttattaagcgttgtctgtaaaattgactgcaaagaatttatatcagcgttaaaaaacaacaaaccaatgctggttatttttaaccatattaattttctggaagtccctattctggtaacgcacagttatccactttatgtatcgggacttgttaagtcggagacatgggataacccgctatttgcgtttatctttgatacctacaaagcaattccgattgacagaagaggcgcttttagcggatcttttaagaaagcgctggaagcgatagaaaaagggtattatatatgcgtcgcgccggaaggaacaagaagcaaagacggcgtactgggaaaaggaaaacccggaattattcagcttgcccttgaggcaaacgcgccaatacttccggttgcccattacggaggcgaggatatctggaaaaacatgcgccgtctgcgccgcactccgttttgttttaaggcgggccaccctttccgcattaactgtgacagtatgcccgggaaagaagaacgggaaaaaataatgacggaagttatggctcanatggcgcgtcttttgcccgaaagactgcgcggagaatatgcagggcagttgaataacgaatgtaagtatttggaatttatataa

SEQ ID NO: 15220 - protein, 227 aa, Unknown
  Obtained from environmental sample
  DOMAIN (25)...(152): Acyltransferase
  misc_feature (1)..(227): Xaa is any amino acid
MGRNMGFRRFAVTYLMKGLLSVVCKIDCKEFISALKNNKPMLVIFNHINFLEVPILVTHSYPLYVSGLVKSETWDNPLFAFIFDTYKAIPIDRRGAFSGSFKKALEAIEKGYYICVAPEGTRSKDGVLGKGKPGIIQLALEANAPILPVAHYGGEDIWKNMRRLRRTPFCFKAGHPFRINCDSMPGKEEREKIMTEVMAXMARLLPERLRGEYAGQLNNECKYLEFI

SEQ ID NO: 15221 - DNA, 597 bp, Unknown
  Obtained from environmental sample
  misc_feature (1)..(597): n is a, c, g, or t
atgattggaacaaaaggaatagtgacagccgttaacggcaacatggtaagcgtccgctttgacggaatcgtctccatgaacgaggtcggctatgtgaaagtcgccgataagcggctgaaaagcgaagtaatcaggattcgcggcgagataagccaacttcaggtttttgaaattactaaaggtatttccattggcgatgaagttgaatttacaggggatatgttgtcggttgagttgggccccggtcttcttggacaggtttacgacggccttcaaaacccgcttccccagttggcgcaggccacgggattctttctggaaaggggcgtttatcttgacgctctgtcggtgtccagtatgtggcaatttacgccaaaggcaaagcccggcgataaagttgaacgcgccgatacactgggaacagtaccggaaggttcttttacccaccgtattatggtgccttttaacctcttcggcaattataccgtttcatggataaaacccgcgggcagttacaatattcgcgaaactatcgcggagttaaaagatgaaaaaggaaacgccgttccgttaccctcagtttccggtggcctgtaa

SEQ ID NO: 15222 - protein, 198 aa, Unknown
  Obtained from environmental sample
  DOMAIN (8)...(72): ATP synthase alpha/beta family, beta-barrel domain
  misc_feature (1)..(198): Xaa is any amino acid
MIGTKGIVTAVNGNMVSVRFDGIVSMNEVGYVKVADKRLKSEVIRIRGEISQLQVFEITKGISIGDEVEFTGDMLSVELGPGLLGQVYDGLQNPLPQLAQATGFFLERGVYLDALSVSSMWQFTPKAKPGDKVERADTLGTVPEGSFTHRIMVPFNLFGNYTVSWIKPAGSYNIRETIAELKDEKGNAVPLPSVSGGL

SEQ ID NO: 15223 - DNA, 795 bp, Unknown
  Obtained from environmental sample
  misc_feature (1)..(795): n is a, c, g, or t
atgggcgcaggcatggttatcgatccaaaagcgttattcgatgagattaaaatgctggaagaacgcggcatagacacaaagggcaggctttttatttcagaccgcgcccatatcgtgcttccaaaatatattcagatagacaaagagcgcgatgccgcgcggaaaaaacctataggcactacaggccgcggcataggaatcacatattcaatgaagagcgaaagggacagcatccgcattgccgaccttaactggaaagaaaaaatggatgagcttgacaaagccgacaatgatttcctcgcgccttacaaagacaggctccttgaaatgtcggttgatctaagcacataccttatgcacagaaaaaattcgcaggtgctttttgaaggcgctcaggggacccttcttgatcttgatcttggaacttatccctatgtgtccagcggaatgtcatgcgctgccggcgcggcggttggcggctgtataggcccccgctccatcgacaaggtgctcggcgttttcaaagcctattccacccgcgtcggaaacggtccgctcccctcggaatttgatccgtcttccgaagacgaactttgccgctttgtccgcgagacaggcagagaatacggcgtaacaacgggtagaccgcgccgctgcggctacctggaccttgtttctctgcgttacgcctgctttacaaattcaatagacagtctcgttatgacccaccttgacgtgtacgacactttcgaggaaataaagcgtgcatcgcctaccgcatcggcgataaaatag

SEQ ID NO: 15224 - protein, 264 aa, Unknown
  Obtained from environmental sample
  DOMAIN (2)...(264): Adenylosuccinate synthetase
  misc_feature (1)..(264): Xaa is any amino acid
MGAGMVIDPKALFDEIKMLEERGIDTKGRLFISDRAHIVLPKYIQIDKERDAARKKPIGTTGRGIGITYSMKSERDSIRIADLNWKEKMDELDKADNDFLAPYKDRLLEMSVDLSTYLMHRKNSQVLFEGAQGTLLDLDLGTYPYVSSGMSCAAGAAVGGCIGPRSIDKVLGVFKAYSTRVGNGPLPSEFDPSSEDELCRFVRETGREYGVTTGRPRRCGYLDLVSLRYACFTNSIDSLVMTHLDVYDTFEEIKRASPTASAIK

SEQ ID NO: 15225 - DNA, 771 bp, Unknown
  Obtained from environmental sample
  misc_feature (1)..(771): n is a, c, g, or t
ttgatgagttacggcgaaactggaggcatagaagtcggatgccgggtaatcgcttcaggctcatgccttgatgtggcggtctccatgaaactccttgggcgcgtattgaaccaccttggtaagcccgtggacgacaaaggcgatattgagtctccggtacgttatcccgcgctggcggatgcccctgacccataccgccgtccaaggatcaaggaacgcgtaagcaccggcatccgcgctattgacggtcttttggcaacaggcaagggccaacggcttggcatttttgccggatcgggggtagggaagtccaccctccttggcatggttgcccgtaacaccagcgccgatgtcaacgttgtggcgttaatcggcgagcgcggcagggaagtaaacgagtttatagaaaacgatcttggaaaggaggggcttgcccgcagcgtcctcgtggttacgccttccaattctcctcccctggcgcggcttaggggggcttatgtggcaacggcaatcgcggagtatttccgcgaccagggccttgacgtgatgctcctgttcgattcgctgacccgctttgccagggcgcaaagggaaatagggcttgcttcaggcgagccttccgccacaaggggctatacgccttccatgttcgattccatgcccaagctgcttgaacgcagcggcacttccgaaaaggggagcataaccggcttttacacgatcctggtgagcggcgacgacctgacgagctgtctcggctctgccatctga

SEQ ID NO: 15226 - protein, 256 aa, Unknown
  Obtained from environmental sample
  DOMAIN (76)...(254): ATP synthase alpha/beta family, nucleotide-binding domain
  misc_feature (1)..(256): Xaa is any amino acid
MMSYGETGGIEVGCRVIASGSCLDVAVSMKLLGRVLNHLGKPVDDKGDIESPVRYPALADAPDPYRRPRIKERVSTGIRAIDGLLATGKGQRLGIFAGSGVGKSTLLGMVARNTSADVNVVALIGERGREVNEFIENDLGKEGLARSVLVVTPSNSPPLARLRGAYVATAIAEYFRDQGLDVMLLFDSLTRFARAQREIGLASGEPSATRGYTPSMFDSMPKLLERSGTSEKGSITGFYTILVSGDDLTSCLGSAI

SEQ ID NO: 15227 - DNA, 303 bp, Unknown
  Obtained from environmental sample
  misc_feature (1)..(303): n is a, c, g, or t
ttggaaggcgtaaccacgaggacgctgcgggcaagcccctcctttccaagatcgttttctataaactcgtttacttccctgccgcgctcgccgattaacgccacaacgttgacatcggcgctggtgttacgggcaaccatgccaaggagggtggacttccctacccccgatccggcaaaaatgccaagccgttggcccttgcctgttgccaaaagaccgtcaatagcgcggatgccggtgcttacgcgttccttgatccttggacggcggtatgggtcaggggcatccgccagcgcgggataa

SEQ ID NO: 15228 - protein, 100 aa, Unknown
  Obtained from environmental sample
  misc_feature (1)..(100): Xaa is any amino acid
MEGVTTRTLRASPSFPRSFSINSFTSLPRSPINATTLTSALVLRATMPRRVDFPTPDPAKMPSRWPLPVAKRPSIARMPVLTRSLILGRRYGSGASASAG

SEQ ID NO: 15229 - DNA, 327 bp, Unknown
  Obtained from environmental sample
  misc_feature (1)..(327): n is a, c, g, or t
atgggcttcaggatcgcatttgccagtaccggagaatatatagaccagcatttcggttcggcgcggcattttcaggtttatgatctcgcggatggcggaaaccatgaacacattgaagcccgcgccgcgaaatgtatgggcaattgcgagggcggttttgaccacctattggaaattctgggcgactgcgacgcggtatttgtcagcagaatcgggcaaagcgcggcggcatttatgatttcaaacggcaaacgggtgtttgaggcaaacggcagaatagatgatattttaacgaagctgacggaaganaatcttttggaaaagtaa

SEQ ID NO: 15230 - protein, 108 aa, Unknown
  Obtained from environmental sample
  DOMAIN (10)...(102): Dinitrogenase iron-molybdenum cofactor
  misc_feature (1)..(108): Xaa is any amino acid
MGFRIAFASTGEYIDQHFGSARHFQVYDLADGGNHEHIEARAAKCMGNCEGGFDHLLEILGDCDAVFVSRIGQSAAAFMISNGKRVFEANGRIDDILTKLTEXNLLEK

SEQ ID NO: 15231 - DNA, 744 bp, Unknown
  Obtained from environmental sample
  misc_feature (1)..(744): n is a, c, g, or t
atgaaaatagttaataaaatactaataattgtctcaattacaatattttcgatatttttaatattgctggtaacgcctattctttttaaggggaaattactcaatattgctaaaacagaattaaataagatgctggaggcgcatgtcgatttttcggaccttaaattgtcatttatccgtaatttcccgaacgcttatgtggctttggaaaatttgacggtaacaggaaaggacgaatttaacggcgaaacgcttgtggcatttaaaagtttcagcgtaacagtggacattaagagcgttatcaaaatgaataatatacgggtaaaatcaatactgctggatcaggcgcggataaacgcccatatagcggaaaacggcagcgcaaactgggatattatgaaacccggaaaggaggaagaaaaaccttcttctgaaagaccagccgataaaagcggccctgaaaataccacagcgcttaaggtgacccttaataaattcgagatacgcaatgccaacctttcttttcaagatgacaagaataaaatgaaagcaactgtaaatgatctcaattatattctgcagggcgatatgtcgctggacaacgctgttttgaaaatgaaattggatattgccgatataaatttcctgatgagcggcattcgtatgcttaccaacgcgcgcataggctttgtttcggaggtcgacgccgatctaaaaatatggaattcacctaaaaagacataa

SEQ ID NO: 15232 - protein, 247 aa, Unknown
  Obtained from environmental sample
  misc_feature (1)..(247): Xaa is any amino acid
MKIVNKILIIVSITIFSIFLILLVTPILFKGKLLNIAKTELNKMLEAHVDFSDLKLSFIRNFPNAYVALENLTVTGKDEFNGETLVAFKSFSVTVDIKSVIKMNNIRVKSILLDQARINAHIAENGSANWDIMKPGKEEEKPSSERPADKSGPENTTALKVTLNKFEIRNANLSFQDDKNKMKATVNDLNYILQGDMSLDNAVLKMKLDIADINFLMSGIRMLTNARIGFVSEVDADLKIWNSPKKT

SEQ ID NO: 15233 - DNA, 933 bp, Unknown
  Obtained from environmental sample
  misc_feature (1)..(933): n is a, c, g, or t
atgagcttcttcagcaggaaacancaggatcagaaaccctccaaagagaagaaccgttatgacgcggacgaataccttgacgaaaaagtaagcctgtttaacgtaaagcgcgttttaggttatctgttaaaagcaaagggccctttaaggctctcgcttatattcagcatccttgcctcaatttcaggccttgtgggcccgctttttattaaaactgcgctggacgaagccgtcccgcataaagacatgcgccaacttgtcatgatgggcatataccttaccgcgtccattcttgtaagcgtggcgttaagcgccgtaagaaacatacttgtcgcaaaggcgggcgccggcattatccacgatataaggcaggacttgttcgcccacctacaaaaattatctttcagcttttttgactcccgcccgcacggaaaaattttcgtgcgcgtagtcccgtacataaacagcgtgtcggacgcgctttccaacggaattatcaactttgtaatagaggtgttaaacatcttctttatcatcttttttatgtacaaggtagatccgcatcttgcgacggttacggtaatcggccttcccctgctcgccttgtttatctggacgataaagcccgcccagcgcaaggcatggcaggccgtatcaaacaaaggctcgaatataaacgcgtacattcaggaatccatagacggcgtaaaggtgactcaggcctttgacaggcaggataaaaaccttgacataattaacgatcttgcgaacgagcgcaacaatgtctggatgaaggccatatatatttccaatacggtatggttttcaacggaatcaataagccagttggtctggtcgtttgtgtacattatgggcgtctactggatgaacccgatggcaagtttcggaatgctgctgtatggctcgccataa

SEQ ID NO: 15234 - protein, 310 aa, Unknown
  Obtained from environmental sample
  DOMAIN (49)...(306): ABC transporter transmembrane region
  misc_feature (1)..(310): Xaa is any amino acid
MSFFSRKXQDQKPSKEKNRYDADEYLDEKVSLFNVKRVLGYLLKAKGPLRLSLIFSILASISGLVGPLFIKTALDEAVPHKDMRQLVMMGIYLTASILVSVALSAVRNILVAKAGAGIIHDIRQDLFAHLQKLSFSFFDSRPHGKIFVRVVPYINSVSDALSNGIINFVIEVLNIFFIIFFMYKVDPHLATVTVIGLPLLALFIWTIKPAQRKAWQAVSNKGSNINAYIQESIDGVKVTQAFDRQDKNLDIINDLANERNNVWMKAIYISNTVWFSTESISQLVWSFVYIMGVYWMNPMASFGMLLYGSP

SEQ ID NO: 15235 - DNA, 636 bp, Unknown
  Obtained from environmental sample
  misc_feature (1)..(636): n is a, c, g, or t
atgcttttaataattgacgtgcagaatgatttctgtccgggaggggcgttggcggtgaatgacggggacaaagttgtcgctccgttaaacgcgatttcccgctctcttgccgaaaaaggcgggcaagttgccgtcactgcggactggcactgtgcgggtcatatttctttcgcgtcgtcgcatgacggcaaaaaacccggtgacgtaatagacacacctcttgttaaagagcaggttctttggccggatcattgcgttcagaaaactaaaggcgctgatttccacaaagatattgacttaaaaccggtatctttgaccgtccgcaagggttttcataaagatattgattcatattcggcgttttttgaaaatgacagaaaaactaaaacggaacttgaaaaacacctgcgggatcttggcatagaaacggttattatgggcggtattgccaccgattactgcgtctttttcagcgcgatggattgtaaaaacctgggattcaatgtcattgtcgccaacgacgccgtgcgcggggtcggctttcctgagggatccgtggaaaaagcggtagcagaaatgaaaaacgcgggggttaaattcatctcttccaaagaaattattaatagtttaaaataa

SEQ ID NO: 15236 - protein, 211 aa, Unknown
  Obtained from environmental sample
  DOMAIN (2)...(208): Isochorismatase family
  misc_feature (1)..(211): Xaa is any amino acid
MLLIIDVQNDFCPGGALAVNDGDKVVAPLNAISRSLAEKGGQVAVTADWHCAGHISFASSHDGKKPGDVIDTPLVKEQVLWPDHCVQKTKGADFHKDIDLKPVSLTVRKGFHKDIDSYSAFFENDRKTKTELEKHLRDLGIETVIMGGIATDYCVFFSAMDCKNLGFNVIVANDAVRGVGFPEGSVEKAVAEMKNAGVKFISSKEIINSLK

SEQ ID NO: 15237 - DNA, 474 bp, Unknown
  Obtained from environmental sample
  misc_feature (1)..(474): n is a, c, g, or t
atgaataatgtacaagttaaatttattaataccgataaaacggtaacctgcccttatggcacaatcgcttcaactcttattgagcattttggtattccgcaggagaaaatcgcggcagtcaaggaaaataatgaattacgcccccttggaacatccctccttgtgaacgcggcacttgagcccgtccttatggattctaccgaaggcgtaatggtttatcgccgcacgctttcttttgttcttgctattgcggcgcggaaaatatttccaaataacggcgtgtatgtcggacattcgcttggaaacagttattattattcgttaagctcgggcgaaaagccgaaagaaagcgacgttaaagcccttgccgatgaaatgcgcaatattataaaagaaaatcttccaataacatttaaatatctttcttatgaagaagcccttgcagttattcaaagaaaacaatcaaacggatag

SEQ ID NO: 15238 - protein, 157 aa, Unknown
  Obtained from environmental sample
  misc_feature (1)..(157): Xaa is any amino acid
MNNVQVKFINTDKTVTCPYGTIASTLIEHFGIPQEKIAAVKENNELRPLGTSLLVNAALEPVLMDSTEGVMVYRRTLSFVLAIAARKIFPNNGVYVGHSLGNSYYYSLSSGEKPKESDVKALADEMRNIIKENLPITFKYLSYEEALAVIQRKQSNG

SEQ ID NO: 15239 - DNA, 321 bp, Unknown
  Obtained from environmental sample
  misc_feature (1)..(321): n is a, c, g, or t
gtgttaagtattgatgatgatgaagatgtattaaaaaacggacagcgttattccttctggcacccttccgcggattaccgtcattttgtttatacaatcgaaggaagcgcgaccgcaatgttaaaaaaacgcatggaaaacggcgttctgacaggagaacaacctcttcttgagaaaattaaagcctataccacatcagaccttgaaagttttgattcgacatataaaaggcttttaaatccccatatttacaaagtttcaattaccgataaattacgttcccttaaactggagttgatacagaaactgttaagttcttga

SEQ ID NO: 15240 - protein, 106 aa, Unknown
  Obtained from environmental sample
  misc_feature (1)..(106): Xaa is any amino acid
MLSIDDDEDVLKNGQRYSFWHPSADYRHFVYTIEGSATAMLKKRMENGVLTGEQPLLEKIKAYTTSDLESFDSTYKRLLNPHIYKVSITDKLRSLKLELIQKLLSS

SEQ ID NO: 15241 - DNA, 684 bp, Unknown
  Obtained from environmental sample
  misc_feature (1)..(684): n is a, c, g, or t
atggccgagaacgggaaagccgccgccgtggcgggggcctttgaagaaaggttcaaaatcaccgtccctgtttcatccggcgcgggcggcgcggctatgtaccgctacagcaaggccaatggacaaacttacgaccttagcggctattttagttataacaacggcggcagttggacaattgacgaaagcaatcctcaaagccttagtaacgtacaggttgattcaggcggcggatggtttaaccaaaaatttaagacctttaacgaccctaaaaggctgacttttgatcagcattttctttttgccttatgcgccgacaagaacagatacctgtttatgataaacggatttgaaggggataagtggacgaaccctccggggttcttctatacttttgagcaaacaaaagttgcgtttaatcttttaggcgtaccccaaaacatcgcggtttccatgcaccgtttcttacacggcattgagcaggaagacatggtcaagttgattaaattcgccaatttctttttctacggcattaaagatttagactttgattttgcggaaaccgaaaaaccaaagcccgagacatggatcgagtttatgcagagtttgcatataacgccgttctcggcatcagtcagccctgaaaacaacgcgacttatgagtcggggaaacccaccaagtaa

SEQ ID NO: 15242 - protein, 227 aa, Unknown
  Obtained from environmental sample
  misc_feature (1)..(227): Xaa is any amino acid
MAENGKAAAVAGAFEERFKITVPVSSGAGGAAMYRYSKANGQTYDLSGYFSYNNGGSWTIDESNPQSLSNVQVDSGGGWFNQKFKTFNDPKRLTFDQHFLFALCADKNRYLFMINGFEGDKWTNPPGFFYTFEQTKVAFNLLGVPQNIAVSMHRFLHGIEQEDMVKLIKFANFFFYGIKDLDFDFAETEKPKPETWIEFMQSLHITPFSASVSPENNATYESGKPTK

SEQ ID NO: 15243 - DNA, 867 bp, Unknown
  Obtained from environmental sample
  misc_feature (1)..(867): n is a, c, g, or t
atgatccatgcatcgttccgcgcgcggtaccgtgcgtggaagcagcggcagctattgccttgtacgacgcctatttggatcgttagacgctataaaggagaaaccataatggacttacaggattaccgccagcagattgacaaggtagacgatgagcttttaaggctgttcaaagaaaggatgtgcatttcccgacagatttcccaatacaaaaaggagcataatcttcccgtgctggacgccgcgcgggagagggaaaagctggtcgatgtttgcggaaaagcgggggaagagattcgttcatacgcgcatattttatacacaacgatatttgaactcagccgcgcgtaccagtggggtttcatgaacgccgagtccgatctcaacaggatcattaatgaggcggtggaacacacagatcggctgttcccacagcacgcattggccgcctgtcagggcgtggagggcgcgtattcgcagatcgcctgtgacaggttgtttgccaatcctaacatcttgtacttcactggctttgacggggtattctcggcaatccgggatggtctgtgccaatacggggtattgcctttggaaaacagcacagccggttcggtcaacatgatatacgaccttatgatgcgctacagtttcaagatcgtgcggagcgtgcggctaaagatcgatcacaacctgctcgcgaaggcaggcgtcaaaaaggaggacatccgcgaaattttttcgcatgagcaggcgatccagcaatgcgcggggtaccttaaggggtttggcaagaggtgtgaaaatcaccaccgtcgcaaataccgccgaagccgcgaaaatggggggaatcggaactcggccatctga

SEQ ID NO: 15244 - protein, 288 aa, Unknown
  Obtained from environmental sample
  DOMAIN (149)...(288): Prephenate dehydratase
  misc_feature (1)..(288): Xaa is any amino acid
MIHASFRARYRAWKQRQLLPCTTPIWIVRRYKGETIMDLQDYRQQIDKVDDELLRLFKERMCISRQISQYKKEHNLPVLDAAREREKLVDVCGKAGEEIRSYAHILYTTIFELSRAYQWGFMNAESDLNRIINEAVEHTDRLFPQHALAACQGVEGAYSQIACDRLFANPNILYFTGFDGVFSAIRDGLCQYGVLPLENSTAGSVNMIYDLMMRYSFKIVRSVRLKIDHNLLAKAGVKKEDIREIFSHEQAIQQCAGYLKGFGKRCENHHRRKYRRSRENGGNRNSAI

SEQ ID NO: 15245 - DNA, 366 bp, Unknown
  Obtained from environmental sample
  misc_feature (1)..(366): n is a, c, g, or t
gtgaacgtgcgtaccatttatcaatacgtacatcccgccgtgtgtcaaagttgtcagttagtcatgggtatgacggtgcttgaggaaggatcggtctggaataccatgccctgccatacccatgaaagacgtatggaagtttacctgtattttgatataaagccgggagccgtagttttccatatacacggacagccgcatgaaacccgccatatcgtcatgaataacgaacaagcggttatttcgccttcatggtcgatacattccggggcgggcacggcggcttatacttttatctgggcaatggtcggggaaaaccaaacctttgacgatatggataatgtttcgacggttgatttaaaataa

SEQ ID NO: 15246 - protein, 121 aa, Unknown
  Obtained from environmental sample
  DOMAIN (1)...(121): 5-keto 4-deoxyuronate isomerase
  misc_feature (1)..(121): Xaa is any amino acid
MNVRTIYQYVHPAVCQSCQLVMGMTVLEEGSVWNTMPCHTHERRMEVYLYFDIKPGAVVFHIHGQPHETRHIVMNNEQAVISPSWSIHSGAGTAAYTFIWAMVGENQTFDDMDNVSTVDLK

SEQ ID NO: 15247 - DNA, 726 bp, Unknown
  Obtained from environmental sample
  misc_feature (1)..(726): n is a, c, g, or t
atgaataaattaatgcgaatagtgttctttctgcgggaattgcttttccaggccgggtgcagtgtctgcgggcggccgtgtacttcccttgatgaggcgtggtacggactctgcgacggctgccgtagagggatcgaagagtatcttgcggaaattcaagggctggaatcctgcgaatattgcggcaaaccgcttatatcggagcaggggcgctgcctttcatgcaggcggaatgaagccctaagcgccgacagattaatagtcatatttccctattcagggaaatatcaaaaattacttagttcttacaaatttgacaagcatataagtcttggaaatttttttgttgaaataataaggaaagcccttgaaaaaaaaggcttgcctgttgaaacagccatagtcccggtcccgccacgcccggggaagatccgtaaaacaggctgggatcaggtagaatacctcgcgaggctgctggaaaggagtaaggggttggctgtcagccgctgcctgaaaaggctgaagtcaaaaagccagaaagaacttgaccgtaaaagccgtaaaaccaaccttaaggggcgcataatacccaaaaaacaaagcccaaaaaccgccgtaattattgacgacgttattacaacaggctcgacgcttgacgcctgcgctcttgccctgaaagaagccggcgcccaaaccgtctgcggactttgtctgttctatgactaa

SEQ ID NO: 15248 - protein, 241 aa, Unknown
  Obtained from environmental sample
  misc_feature (1)..(241): Xaa is any amino acid
MNKLMRIVFFLRELLFQAGCSVCGRPCTSLDEAWYGLCDGCRRGIEEYLAEIQGLESCEYCGKPLISEQGRCLSCRRNEALSADRLIVIFPYSGKYQKLLSSYKFDKHISLGNFFVEIIRKALEKKGLPVETAIVPVPPRPGKIRKTGWDQVEYLARLLERSKGLAVSRCLKRLKSKSQKELDRKSRKTNLKGRIIPKKQSPKTAVIIDDVITTGSTLDACALALKEAGAQTVCGLCLFYD

SEQ ID NO: 15249 - DNA, 573 bp, Unknown
  Obtained from environmental sample
  misc_feature (1)..(573): n is a, c, g, or t
atgtttccggcgttgcacacgtttcatattcctgttatgggaacttgctatacggcagatacccctgcaagggtagctccgtttgggatatcctccgttgtgtctttggtagacgatttgcttttggagagattccgcaaaatttatgcggaggaatacaaactgcaatatgagcctattccgcaacgggaattggacggcagggcaaagaggataaccgcatatcttaacactttggcagaggttgtgaaaattcgctttgaaacgataaaaaaacagcctttcttttctaaaaacgacaaagctaaatattttgaaatgctccccaccggtcaccccctaagagttctttacttgaagctgatgggtatgaaggattctcccgaaagagaggagatagaaaccactttaaatcacggtatggtagaaggctccatagatgtaaacataatggttaagctagaccgcttgcctccaaacccagacggtaaagagcctttggacggagaatggacagatgccaaaaccgctntgaaaggctatgcaaaatcttctctgaaaattctgctatag

SEQ ID NO: 15250 - protein, 190 aa, Unknown
  Obtained from environmental sample
  misc_feature (1)..(190): Xaa is any amino acid
MFPALHTFHIPVMGTCYTADTPARVAPFGISSVVSLVDDLLLERFRKIYAEEYKLQYEPIPQRELDGRAKRITAYLNTLAEVVKIRFETIKKQPFFSKNDKAKYFEMLPTGHPLRVLYLKLMGMKDSPEREEIETTLNHGMVEGSIDVNIMVKLDRLPPNPDGKEPLDGEWTDAKTAXKGYAKSSLKILL

SEQ ID NO: 15251 - DNA, 345 bp, Unknown
  Obtained from environmental sample
  misc_feature (1)..(345): n is a, c, g, or t
atggtcaatattcgagaggtttttgccaaaaatttacgggaaaatcgccgcaaatgcggactaacacaggcaaatttagccgaaaagtctaatgtttccacccattatattgcgctaattgaaatggctaggaatatcccaaaagtagaagtaatagaacgttttgccaaagttttgaatatggaaatatacgagctttttcttgtacctaattctcatacatcagaaatgaataaaatgcaccaaacaattattgacgacattaaggatattgttaaggaagcggtaaaagaagcctttgaaaaagagaaaacaaatcagaaaaaaacacgcaaaaccccataa

SEQ ID NO: 15252 - protein, 114 aa, Unknown
  Obtained from environmental sample
  DOMAIN (12)...(66): Helix-turn-helix
  misc_feature (1)..(114): Xaa is any amino acid
MVNIREVFAKNLRENRRKCGLTQANLAEKSNVSTHYIALIEMARNIPKVEVIERFAKVLNMEIYELFLVPNSHTSEMNKMHQTIIDDIKDIVKEAVKEAFEKEKTNQKKTRKTP

SEQ ID NO: 15253 - DNA, 714 bp, Unknown
  Obtained from environmental sample
  misc_feature (1)..(714): n is a, c, g, or t
atggggttggaccagttgagcgcgttcatcgatatgccgtcggtttacatcacggtgggcggctctatttcgtcgactatcgcggcgtttccgggcgcccgcctgatgaacgcggtggcggtcgtcaagaacgtcatatttgtcaagaatcaatcgccggtgacggtgatttcgcagatcatagagttcgcggagcaggcgcgccgcgagggtattttggcgctggagtcccgtgcgctggagatcaccgaccagttcatgaagcaggggatcgggttggcggtggacggcacggagcctgatcttatcagggagattctcgaaacggagatatcgcacatggagagccggcacgacgacggttcgaagatattcgattttttgggcgcggcggcgccgtcgttcggtatgataggaacgctggtaggtctcgtgctgatgttgggcaacatgagcgacgtggcctctatcggcccgaatatggcggtggcgctcatcaccacgctttacgggtcgattttggcgaacatcatctgtatacccttcgctgagaagttgaaggcgtattccgccaaggaggttatggtaaaggaacttatgttggaggggataatggcgttgcagtccggcgacaacccgcgcattgtggcgcagaagctgagcgttttccttgaaccggcgcaacgcgccatggttttgaaggacaagaagtaa

SEQ ID NO: 15254 - protein, 237 aa, Unknown
  Obtained from environmental sample
  DOMAIN (69)...(202): MotA/TolQ/ExbB proton channel family
  misc_feature (1)..(237): Xaa is any amino acid
MGLDQLSAFIDMPSVYITVGGSISSTIAAFPGARLMNAVAVVKNVIFVKNQSPVTVISQIIEFAEQARREGILALESRALEITDQFMKQGIGLAVDGTEPDLIREILETEISHMESRHDDGSKIFDFLGAAAPSFGMIGTLVGLVLMLGNMSDVASIGPNMAVALITTLYGSILANIICIPFAEKLKAYSAKEVMVKELMLEGIMALQSGDNPRIVAQKLSVFLEPAQRAMVLKDKK

SEQ ID NO: 15255 - DNA, 639 bp, Unknown
  Obtained from environmental sample
  misc_feature (1)..(639): n is a, c, g, or t
gtgagcgacatactgtcacaagaagaggtcgatgccctgcttaacgcggtgtcatccggggatcttgccgaccagtcgttcgacgaggtgaaggccgacgcccccattgaggacgagataccgttgtcgctctacgactttaagaggccggacagggtatccaaggagcagatgcgcactctgcaaaacctgcacgagggctacgcccgccagttttccaccacgctcacgaactttttgcgcaccttcatagagaccgaccttgtgagcgtcgaccagttgacctactccgagtttgtgatgtccatatcgaacccgagttgcatctacgtgttccgtatggaaccgcttgagggtttggcgatcatagagataaacccgtcgcttgttttctacatcatagacaggctgtttggcgggcaggggcgtccgtttgagggtaaccgtgagttgacaatgatagagcagaacgtgataaaccgaattgtgcagcgcggtcttctcgatttgcgcacggtttgggagcatatcggctcgttcacgcccaagattgaggcctacgagacaaacccgcagtttgtgcagatcgcgccgccgagcgagacggtatcctcatatcatggagtctcggccatctga

SEQ ID NO: 15256 - protein, 212 aa, Unknown
  Obtained from environmental sample
  DOMAIN (45)...(212): Flagellar motor switch protein FliM
  misc_feature (1)..(212): Xaa is any amino acid
MSDILSQEEVDALLNAVSSGDLADQSFDEVKADAPIEDEIPLSLYDFKRPDRVSKEQMRTLQNLHEGYARQFSTTLTNFLRTFIETDLVSVDQLTYSEFVMSISNPSCIYVFRMEPLEGLAIIEINPSLVFYIIDRLFGGQGRPFEGNRELTMIEQNVINRIVQRGLLDLRTVWEHIGSFTPKIEAYETNPQFVQIAPPSETVSSYHGVSAI

SEQ ID NO: 15257 - DNA, 801 bp, Unknown
  Obtained from environmental sample
  misc_feature (1)..(801): n is a, c, g, or t
atgcgtccgggacagcgagacgggaaagctgctgaaggcgcacttttttgtggcggcggtaggggattcaggatacccggtggtagcgaaccttcggttcgagcctacccgaatgagaagagcgagaactggatacatgcgcatgtggaaaccttcaaccggcttggcgggctgccacaagtcgtagtgccggataactgcaagaccgcagtcagcaaggcaaactattacgacccccagttgaacaaggcgtactacgaccttgcgctgtattataacattgcggttatccccgcgcgggtccgccgcccacaggataaaagtttggtggaaggcagcatagggtggctcgaaacctggctggtggaatggctgaaaggcggcgggccttcgccccggcagttttcaagtttcgccgagcttaacgcggccataaaaacccgccttgcggaactggtgaagcggccgttccagaaaagggccggcagccgggaaagcgtgttcctggaacttgaccgccccgccctgcgccctctgccgggcgccccttatgaacaccccagttacgtcgaaaggcgggtgccgaacaactaccacgttgaatatacgggcttttattactcggtcccccaccggtactataaacagcaggtaaccgtaaaagcgacatattcggtcattgaagtgtatgcggacaggcttaaccggatagccgtccacgaacgtcggtacaccgggagccggtatagtacggagcgcagccacatgccgcccgcctcggccgatactgacctagtctaa

SEQ ID NO: 15258 - protein, 266 aa, Unknown
  Obtained from environmental sample
  misc_feature (1)..(266): Xaa is any amino acid
MRPGQRDGKAAEGALFCGGGRGFRIPGGSEPSVRAYPNEKSENWIHAHVETFNRLGGLPQVVVPDNCKTAVSKANYYDPQLNKAYYDLALYYNIAVIPARVRRPQDKSLVEGSIGWLETWLVEWLKGGGPSPRQFSSFAELNAAIKTRLAELVKRPFQKRAGSRESVFLELDRPALRPLPGAPYEHPSYVERRVPNNYHVEYTGFYYSVPHRYYKQQVTVKATYSVIEVYADRLNRIAVHERRYTGSRYSTERSHMPPASADTDLV

SEQ ID NO: 15259 - DNA, 570 bp, Unknown
  Obtained from environmental sample
  misc_feature (1)..(570): n is a, c, g, or t
atgttttggaaatttttatatttatcatatatggcttcttctactcttactgaatcaaaagtatctaaaactctcaattgggtttacgaaaaagcaagcgacggtttgctgaatatggaatctgcttccgaaatggcagaattgtacatgaaaaaatatccaaacaacaagcttgcagcagcgaacgctttaatacgtgcgcaaaatgtgaaatctgctgcctctggttttattaccggactcggtggcttggctacaatgccaattgcaattccaatgaatttggcaagcgtgctttatattcaagttagaatggtgatggcggttgcaattataggcgggcacaatgttaaagaagataaagtaaaagcttttgtttttgcctgtcttgcagggaacaaagcaagagaacttttaaaagaagctggagttcaaatcgcgcgaaactttgtgcttcaaagtttatccgcagatgctattctcagaataaacagaatggttgggtttaatcttataactaaattaggcggaagcggagtgattagaataagcaaagcgatgcctatttag

SEQ ID NO: 15260 - protein, 189 aa, Unknown
  Obtained from environmental sample
  misc_feature (1)..(189): Xaa is any amino acid
MFWKFLYLSYMASSTLTESKVSKTLNWVYEKASDGLLNMESASEMAELYMKKYPNNKLAAANALIRAQNVKSAASGFITGLGGLATMPIAIPMNLASVLYIQVRMVMAVAIIGGHNVKEDKVKAFVFACLAGNKARELLKEAGVQIARNFVLQSLSADAILRINRMVGFNLITKLGGSGVIRISKAMPI

SEQ ID NO: 15261 - DNA, 423 bp, Unknown
  Obtained from environmental sample
  misc_feature (1)..(423): n is a, c, g, or t
gtgtcgccctatgaccgtattctggctatccgcaaaaacggaatgtatacggttatggatttaagcgagaagacatttatcggagcggaagcgtggtttatcggagccgcggataaagatattctttccaaaacaatctttacaattatttacaaggaaaaagataccggctacccgtgcattaaacgctgtgtaattgaaggctggataatgaataaggattatttccttgtccctgacggagcggaagtattgcacatagacattaaaccgaaatttacatttacggttaaatataaaccaaaaccgaggcttaaagttctttctgaaacttttaaagcgcaggattataatgttcgcggtttaaaagccggcggtatcaggctttccgcaaaagaagcggaaaaagtatcggacgtatag

SEQ ID NO: 15262 - protein, 140 aa, Unknown
  Obtained from environmental sample
  misc_feature (1)..(140): Xaa is any amino acid
MSPYDRILAIRKNGMYTVMDLSEKTFIGAEAWFIGAADKDILSKTIFTIIYKEKDTGYPCIKRCVIEGWIMNKDYFLVPDGAEVLHIDIKPKFTFTVKYKPKPRLKVLSETFKAQDYNVRGLKAGGIRLSAKEAEKVSDV

SEQ ID NO: 15263 - DNA, 609 bp, Unknown
  Obtained from environmental sample
  misc_feature (1)..(609): n is a, c, g, or t
ttgaaactcgttaagtccatggcatacgccaaatttgacgaaaccgttgatctttcagttaaactgaatcttaaaaaaagccagtccgtgcgcgacaccgtcgtcctgcccaaccagttcaggggcgagaaaaaaatcctggtgttctgcaagcctgaaaaagaaaaggaagcccaggaagcgggcgccgcgtttatcggcgccgacgaccttatcgaaaaagtaaagggcggctggacggactttgatattgccgtcgcgactccggacatgatgaaggatgtcgggaagctcggcatggtgcttgggcgcaagggccttatgcccaacccgaaaaccggcaccgtcaccttcgatctcaaggggacccttgctgaattgaaaaaaggccgcacggagttccgcgccgacaagaccggcgtaattcatttggccgtgggaaaggtttccatggcgccggaacagattgccgataatatcaatgctgtcatcggtgaagttaagcggaaacgccctgcggacgcaaaaggcgattttattaagtccgtatcggttgcctcaaccatggggcccggcgtatgggttgccgtcgctgaacaacaggaatag

SEQ ID NO: 15264 - protein, 202 aa, Unknown
  Obtained from environmental sample
  DOMAIN (1)...(192): Ribosomal protein L1p/L10e family
  misc_feature (1)..(202): Xaa is any amino acid
MKLVKSMAYAKFDETVDLSVKLNLKKSQSVRDTVVLPNQFRGEKKILVFCKPEKEKEAQEAGAAFIGADDLIEKVKGGWTDFDIAVATPDMMKDVGKLGMVLGRKGLMPNPKTGTVTFDLKGTLAELKKGRTEFRADKTGVIHLAVGKVSMAPEQIADNINAVIGEVKRKRPADAKGDFIKSVSVASTMGPGVWVAVAEQQE

SEQ ID NO: 15265 - DNA, 486 bp, Unknown
  Obtained from environmental sample
  misc_feature (1)..(486): n is a, c, g, or t
atgatggccggntcagcccgccggttttacggagtgcggcttggctggtcaattgttcccaaagaactcaagtacgcttccggcgaaagcgtaaacgcggactggagccgcgtctgctcgacaatcttcaacggcgcttccaacatcgcccaggccggagggcttgccgctctggacgaggcgggacaacgggaaatccgcggccttaccgatttttatcttggcaacgcgcaattgatcagaaacgcgctgcaaaacctgggcgttacctgcgtgggcggagataattccccctacatttgggcgcattttcccgggcgggacagttgggaggtctttacggaaatactcgaaaagtgccaggtagttaccactcccggttcgggttttggaccggcgggccagagctttatccgcttctccgccttcggccaccgcgccgatgtggaagaagcctgcaagaggttagttaagaatctggtttaa

SEQ ID NO: 15266 - protein, 161 aa, Unknown
  Obtained from environmental sample
  misc_feature (1)..(161): Xaa is any amino acid
MMAGSARRFYGVRLGWSIVPKELKYASGESVNADWSRVCSTIFNGASNIAQAGGLAALDEAGQREIRGLTDFYLGNAQLIRNALQNLGVTCVGGDNSPYIWAHFPGRDSWEVFTEILEKCQVVTTPGSGFGPAGQSFIRFSAFGHRADVEEACKRLVKNLV

SEQ ID NO: 15267 - DNA, 465 bp, Unknown
  Obtained from environmental sample
  misc_feature (1)..(465): n is a, c, g, or t
atgcctcagccttccgggcgcctggtcataaacttctcgctcttctgcggcgcgaaactgcgcgggcgatcaggggcgtttgcggcgtttctgggaaccgtgctgccgtcgtttctgatgattgttatagcggcggcgttcctattcccatacttcgcgcatccatccgtagcggcttttctgcgcggcgcggcggcggttgtggccgggcttctgggctataccgcgcttaaattatgcaaaccgatgatctcgcgggtctcgcacgccgtagccgcgctcatcgctgtgggaattgcgctaatccccgacgtcaacccgatattcgcgctcatactcgtcagcgcggccgtttaccttttatcaatcaaggaaagagttaaaatcgccgcggatagcgccggtatcaatacaataaacggtaacggcaagagtataaacaaaataaacggcggtgataattga

SEQ ID NO: 15268 - protein, 154 aa, Unknown
  Obtained from environmental sample
  DOMAIN (1)...(129): Chromate transporter
  misc_feature (1)..(154): Xaa is any amino acid
MPQPSGRLVINFSLFCGAKLRGRSGAFAAFLGTVLPSFLMIVIAAAFLFPYFAHPSVAAFLRGAAAVVAGLLGYTALKLCKPMISRVSHAVAALIAVGIALIPDVNPIFALILVSAAVYLLSIKERVKIAADSAGINTINGNGKSINKINGGDN

SEQ ID NO: 15269 - DNA, 876 bp, Unknown
  Obtained from environmental sample
  misc_feature (1)..(876): n is a, c, g, or t
gtgccagacgccatgaaaaccgcgcctaagaggttgctgctcggtaaaactccccgcttgatagacgaatggcaggtgcagcccgatctgtgtaactatgtgcgtcacgaggtggacgagcggaagctgacggcgcagtttatactcaccggctcggctaatcccgaggaggccgccaaactgcactccggcgccggcaggttcaccacgctcaatatgaggactatgtcttggcaggagctaggcgtctcttccggcgaaatcagtatgaaagagctgttcaagggggcgaaaatcgatatatgcgacgaaccgaccgagttggaattcatagttgataaactgatcgtaggcggttttcctacactattagacaagcgcgccgatcaagccgccgacctgaaccgcgcctatatcgacctgctcgccgaggcggatgtgagcagggtatcaaacgtcaaacgcgatccgttcaaagtacgcgacctgctgcgctccatagcccgcaacaccgcgacgcctgcggaaataacgacgctggctgaggatatccacgaaaaagagatgaacaatatttcacgcccgaccatctatgactacttagatgtcctgaaccgtctgatgattaccgaagatcaaccggtgtggaatacgcatattcgctcttccgcgtcgctgcgcaaaacgcccaagcgccaccttaccgacgtctccttagcggtggccgccctaggcgccgacgctgaaacgcttcttaacgacatccgctttaccggctttctatttgagtctttagtaacccacgaattacgagtatacgcccaagcaaatgacgccgacgtatactactaccgcgacacaagcggttggaggtag

SEQ ID NO: 15270 - protein, 291 aa, Unknown
  Obtained from environmental sample
  misc_feature (1)..(291): Xaa is any amino acid
MPDAMKTAPKRLLLGKTPRLIDEWQVQPDLCNYVRHEVDERKLTAQFILTGSANPEEAAKLHSGAGRFTTLNMRTMSWQELGVSSGEISMKELFKGAKIDICDEPTELEFIVDKLIVGGFPTLLDKRADQAADLNRAYIDLLAEADVSRVSNVKRDPFKVRDLLRSIARNTATPAEITTLAEDIHEKEMNNISRPTIYDYLDVLNRLMITEDQPVWNTHIRSSASLRKTPKRHLTDVSLAVAALGADAETLLNDIRFTGFLFESLVTHELRVYAQANDADVYYYRDTSGWR

SEQ ID NO: 15271 - DNA, 360 bp, Unknown
  Obtained from environmental sample
  misc_feature (1)..(360): n is a, c, g, or t
atgatgagcaagtctcccgtaacagcgactaatcccgccgccgccattaccgaaagcgcaatcggcagatcgagcgcggctccgtcttttttcaatcctgcgggagcgagattaattaaaattctgtccagcggaaaactgaaacctgaatttctgaaagccgcccgcactctgtcacgcgcttccctgaccgctccttccgcaagccctgaaatgtcaacgccgggaattcccctgcgaatatccgtctcaacccggacaatgattccgccagccccggagggcataaatgtaaaaatacccatagaatctcctgcctatatatggcgcgaagatgctccggcgcttgaccgaaaatga

SEQ ID NO: 15272 - protein, 119 aa, Unknown
  Obtained from environmental sample
  misc_feature (1)..(119): Xaa is any amino acid
MMSKSPVTATNPAAAITESAIGRSSAAPSFFNPAGARLIKILSSGKLKPEFLKAARTLSRASLTAPSASPEMSTPGIPLRISVSTRTMIPPAPEGINVKIPIESPAYIWREDAPALDRK

SEQ ID NO: 15273 - DNA, 462 bp, Unknown
  Obtained from environmental sample
  misc_feature (1)..(462): n is a, c, g, or t
atgtttttcggggtgggcactattttcgaggcgggacagcgggcggcggtgcaaaaaaagccgggcgtacatttcggcgtctctccgggaattattccgcaaattgtcaaggaagctgcgaaagcaaaacttccctttgcgcccggaattgccacaccaagcgaattggaacaggcaatttccctcggatgccgtgtcgtcaaatttttccccgcggagggcatgggcggtntgagttatttaaaaaatattaacgctccttataatcacctcgggataaagtacattcctctgggaggcgtaacagtaaacaatcttaccgattacgcaaagttcagccccatacttgccgtcggcggaagttggatagcaaacaaagagctgataaaagcgcaggattggggcgaaattaccaaaagagccaaagaggcaaaagagatttggaaatccgcccgttcttga

SEQ ID NO: 15274 - protein, 153 aa, Unknown
  Obtained from environmental sample
  DOMAIN (1)...(140): KDPG and KHG aldolase
  misc_feature (1)..(153): Xaa is any amino acid
MFFGVGTIFEAGQRAAVQKKPGVHFGVSPGIIPQIVKEAAKAKLPFAPGIATPSELEQAISLGCRVVKFFPAEGMGGXSYLKNINAPYNHLGIKYIPLGGVTVNNLTDYAKFSPILAVGGSWIANKELIKAQDWGEITKRAKEAKEIWKSARS

SEQ ID NO: 15275 - DNA, 909 bp, Unknown
  Obtained from environmental sample
  misc_feature (1)..(909): n is a, c, g, or t
ttgattggccgcgctgactggaacgattgtttgaaccttaactgcttttccaaaacgccgggcgaatcattccaaactactgccaattttgaaagcggcgttgctgaatcagttttaattgcggcgatttttgtgtttaacggcccggaatatatcgagatctgccgccgaacgaaccgtacggaagaagccgcatacgcaactaaggcaattgcttcaatgaccgagaaaatcaaagcgcacggctgggacgggaactggttcctgcgggcttatgatgcgtatggtcataaaattggcagccatgaatgtgaagacggtcaaatatatatcgaatccaacggatttgcggtgatggcgggaatagggcttgatgacggacacgctttgaaagcgctcgactcggtgaaggaacggctggacacaaagtacggcattgtgcttcaacagcctgcatacaaggaataccaccttgagcttggcgaagtctcgtcctacccgcctggctataaggagaacgccggcatcttctgccataacaatccctggattacaatagccgagaccaggcttggccggggtacacgtgcgtttgaaacctacacgaaaatttgcccggcttaccgcgaagacgacagcgatctgcgccgtatggaaccgtatgtttacgcacagatggtcgccggaaaggatgcgccgcgtttcggcgaagcgaaaaattcctggctcaccggaactgccgcatggacatttgtcagtatttctcagtacattctgggtgtgcgccctgtatttgacggcttgctcctagatccctgtataccttncagcatgaaaggtttctccgttattcgccatttccaaaatgcggtgtaccgaattgccgtagataatagcgctggcgtttga

SEQ ID NO: 15276 - protein, 302 aa, Unknown
  Obtained from environmental sample
  misc_feature (1)..(302): Xaa is any amino acid
MIGRADWNDCLNLNCFSKTPGESFQTTANFESGVAESVLIAAIFVFNGPEYIEICRRTNRTEEAAYATKAIASMTEKIKAHGWDGNWFLRAYDAYGHKIGSHECEDGQIYIESNGFAVMAGIGLDDGHALKALDSVKERLDTKYGIVLQQPAYKEYHLELGEVSSYPPGYKENAGIFCHNNPWITIAETRLGRGTRAFETYTKICPAYREDDSDLRRMEPYVYAQMVAGKDAPRFGEAKNSWLTGTAAWTFVSISQYILGVRPVFDGLLLDPCIPXSMKGFSVIRHFQNAVYRIAVDNSAGV

SEQ ID NO: 15277 - DNA, 351 bp, Unknown
  Obtained from environmental sample
  misc_feature (1)..(351): n is a, c, g, or t
ttgacgcttaaattacagaatgtaacagttatctaccccgataaaacaaaggcaattgacgatgtcagctttacgcttaacgaaggcgggaatatagctttgcttggcgggaacggcgcgggtaaaacaacgcttctgctcgcgatagccggcgtacttgaattggcggacggctcggtggaaataggcgggatacggcttaccaaaaagacggttaatgaagcgagaaaacagattgggctgttattccagaatcccgatgaccagttgtttatgcccttcatattcgatgatgtcgcttttggctgccgtaattacggtttgccggaggaagaggttaaacgagggtag

SEQ ID NO: 15278 - protein, 116 aa, Unknown
  Obtained from environmental sample
  misc_feature (1)..(116): Xaa is any amino acid
MTLKLQNVTVIYPDKTKAIDDVSFTLNEGGNIALLGGNGAGKTTLLLAIAGVLELADGSVEIGGIRLTKKTVNEARKQIGLLFQNPDDQLFMPFIFDDVAFGCRNYGLPEEEVKRG

SEQ ID NO: 15279 - DNA, 375 bp, Unknown
  Obtained from environmental sample
  misc_feature (1)..(375): n is a, c, g, or t
atgcgccggttaaaaataccgcatatttttgttattgtgtttgaaatgacataccgttatatcggcgttttgcttgaagaggtgttttccatgtataccgcatatacgctgagaaatcccggcgcgaaaggaatccgtatgagggatatgggctgctttacaggccagcttctcgtccgcagcgttgaccgcgcggaccgcgtctatatcgccatgaaatgcaggggctacacgctccaaaccatgtcaaaaaacgggagaaaaccaacggcggcggaccttgtttttcttgtcattaactgttttttctgcgcgctgctgcgccttgtcaatatcaatatcttatttgcccgaatattcggagggcatatttga

SEQ ID NO: 15280 - protein, 124 aa, Unknown
  Obtained from environmental sample
  misc_feature (1)..(124): Xaa is any amino acid
MRRLKIPHIFVIVFEMTYRYIGVLLEEVFSMYTAYTLRNPGAKGIRMRDMGCFTGQLLVRSVDRADRVYIAMKCRGYTLQTMSKNGRKPTAADLVFLVINCFFCALLRLVNINILFARIFGGHI

SEQ ID NO: 15281 - DNA, 459 bp, Unknown
  Obtained from environmental sample
  misc_feature (1)..(459): n is a, c, g, or t
ttgtttatgccgctgatatatgacgatgttgcttttggctgccgtaatcatggaatgccggaagatcaaattagaatacgggtagatgaaacgctaaaacaattaaatataagccatcttcgcggccgttcatcgctgaggctgtccggcggcgagaaacgcctggccgcaatagcgtcgattttggcaatggagccttctattttgatgtttgacgagcctaccgccttccttgacccgaaggcgaaacgctctcttcttgaaaccttaaaaaaattaaaccatacgaagataatagcgacacatgatataacctttgcggctaaggtatgcggccgcgtgttattattgaaaaatgggcgaattgccgcagacggaatgacggacatactgtatgacaaagaattgatggcgcattgcgaacttgaggcaattgaaggaaggaattgtaatttatga

SEQ ID NO: 15282 - protein, 152 aa, Unknown
  Obtained from environmental sample
  DOMAIN (1)...(120): ABC transporter
  misc_feature (1)..(152): Xaa is any amino acid
MFMPLIYDDVAFGCRNHGMPEDQIRIRVDETLKQLNISHLRGRSSLRLSGGEKRLAAIASILAMEPSILMFDEPTAFLDPKAKRSLLETLKKLNHTKIIATHDITFAAKVCGRVLLLKNGRIAADGMTDILYDKELMAHCELEAIEGRNCNL

SEQ ID NO: 15283 - DNA, 366 bp, Unknown
  Obtained from environmental sample
  misc_feature (1)..(366): n is a, c, g, or t
atgaacaaacaggaaaccttaaatttattaaaaaaaattcaggaaggtacggttactcccgaagaagcgttatcaggattatgtacggaaccatttgaagacttgggttacgcgaaactagaccaccaccgcgaattgcggaaaggcgttcccgaagtgatatacggggaagggaaaacgccggaacagataacaggtattataaccgccatgcgggataaggggcagcggttaataatgataacccgacttcaggcggaaacggccgaaaccgttaataaaaaaattcccgtgcaatactatcaaacagcgcgaattgngattataggcgttatgctcaaaccggacggcatggaaaaatcctag

SEQ ID NO: 15284 - protein, 121 aa, Unknown
  Obtained from environmental sample
  misc_feature (1)..(121): Xaa is any amino acid
MNKQETLNLLKKIQEGTVTPEEALSGLCTEPFEDLGYAKLDHHRELRKGVPEVIYGEGKTPEQITGIITAMRDKGQRLIMITRLQAETAETVNKKIPVQYYQTARIXIIGVMLKPDGMEKS

SEQ ID NO: 15285 - DNA, 669 bp, Unknown
  Obtained from environmental sample
  misc_feature (1)..(669): n is a, c, g, or t
ttgcgtatgcaggaaataattttcaaaacctccgctcaagtctatgaaacaatccccgctaactggaaagacaaaggaactccttatgccatgctcgggcaaattttccgtttagtagaacgctatctagaatccggtgaaataattttagaaccgccgctttttatgcaggatgacgatcctcttaaaagaaaagtaatgtatatgctgaacatgaataagatagtacagcatctctggaaatttattgaatgtcagatgaccaaacggatagtaccgttgtttaaccccaacagcaaagtccgctctacaacagatatgccgacatggtggactgtaaaacaccgagaacccctgaaaaaatctcatatcagccatgttgtctatgacagcacatgggaagccaccgaagcctacaagctggagaaaaacactcatgtaaccgcctttgccaaaaatgaccatcttggctttggcgttcaatacacttttaatggcgtatctcgtacatattaccctgatttccttgtaaaacttgacaacggtaaaactttggtactggaaacaaaaggccaagacagtccgcaagtacaggcaaaacaagccgctctcgccgaatgggtagaagcgcgtaaactcattaaaagaatacggcgaatggtgcagtga

SEQ ID NO: 15286 - protein, 222 aa, Unknown
  Obtained from environmental sample
  misc_feature (1)..(222): Xaa is any amino acid
MRMQEIIFKTSAQVYETIPANWKDKGTPYAMLGQIFRLVERYLESGEIILEPPLFMQDDDPLKRKVMYMLNMNKIVQHLWKFIECQMTKRIVPLFNPNSKVRSTTDMPTWWTVKHREPLKKSHISHVVYDSTWEATEAYKLEKNTHVTAFAKNDHLGFGVQYTFNGVSRTYYPDFLVKLDNGKTLVLETKGQDSPQVQAKQAALAEWVEARKLIKRIRRMVQ

SEQ ID NO: 15287 - DNA, 486 bp, Unknown
  Obtained from environmental sample
  misc_feature (1)..(486): n is a, c, g, or t
ttgggtaatagccctattgactgtaccggccttgtagccatagacagtgttgttttaccttccaatttaattgaaatcgggggagacgcctttaagtatcagccgcttacttctatctctttccctgcttcggttcggacaattggagaagcctcctttttgggcaacaaattcacctccgttgttatacccaacggcgtaaaacttgttggacagttcgcttttacggacagcgccacattaactaccgtgacaatccccgcttcgctgacagcttatgctgaatttagtagtaattatcctacacctacggcgggtttcgctaatgcttttcgttatggcgatggcgcggttacccgcatcaccttgccggccaatgttgatcctagcaacctccgctcaacagccctccgcgatgcctatgttggcaatggcagaaaggccggaacctacgtctggacaggtcgcatttggcgcgttgaatga

SEQ ID NO: 15288 - protein, 161 aa, Unknown
  Obtained from environmental sample
  misc_feature (1)..(161): Xaa is any amino acid
MGNSPIDCTGLVAIDSVVLPSNLIEIGGDAFKYQPLTSISFPASVRTIGEASFLGNKFTSVVIPNGVKLVGQFAFTDSATLTTVTIPASLTAYAEFSSNYPTPTAGFANAFRYGDGAVTRITLPANVDPSNLRSTALRDAYVGNGRKAGTYVWTGRIWRVE

SEQ ID NO: 15289 - DNA, 555 bp, Unknown
  Obtained from environmental sample
  misc_feature (1)..(555): n is a, c, g, or t
atgtaccggacggtttactggcacaggcaggtacgctccgctacttccatgatcaaaaaagccctgcttgaaggcatggaaaaaaggacaatagccggtgaagagctgtacaaccttgacgatcagagcctgtttttcctgttgaaagagaaaaaaccaagcagggagcttgcgcaggcggtatggaacggcaagctctatttcactgccgcagaaatcccttttaaccaacaggatcacgcccctctgaaggacattgccaaaagatccctccacgaggaacggcttgccggggaattccgccgcgccggcgtcccgcttggcgataacgatcttatcattgacgtgcctgagccggtctcattcgagacaggccttttcgtgctggacgaaaacagcagctttgcggaaagttccagcgccttcaagacaacgacgctgaattcctttgtaaaaacactgtatactatcaggatatttattaatccggattttcacgaaaaggtagagacattaccggaactatctgctatactaaatacaggggagttatga

SEQ ID NO: 15290 - protein, 184 aa, Unknown
  Obtained from environmental sample
  misc_feature (1)..(184): Xaa is any amino acid
MYRTVYWHRQVRSATSMIKKALLEGMEKRTIAGEELYNLDDQSLFFLLKEKKPSRELAQAVWNGKLYFTAAEIPFNQQDHAPLKDIAKRSLHEERLAGEFRRAGVPLGDNDLIIDVPEPVSFETGLFVLDENSSFAESSSAFKTTTLNSFVKTLYTIRIFINPDFHEKVETLPELSAILNTGEL

SEQ ID NO: 15291 - DNA, 303 bp, Unknown
  Obtained from environmental sample
  misc_feature (1)..(303): n is a, c, g, or t
atgggaggtttaattatggatatacataatatttcagaagacaatgtaatccaggcagtgcaggatatttttgaagctgtaaaaaaacaaggtaactcggagaaattgtgtctttgtgaacagtgtanactggatacaatttgttatacgcttaaccgcattgaaccgaggtacatcgtttccaacaggggccttacccgcgttgaacgggacggttcggaacggcatcaggcgcacgccgacattaccgccctggcttacagggactgcagcaggttaatcataatctgcgcccaccgctaa

SEQ ID NO: 15292 - protein, 100 aa, Unknown
  Obtained from environmental sample
  misc_feature (1)..(100): Xaa is any amino acid
MGGLIMDIHNISEDNVIQAVQDIFEAVKKQGNSEKLCLCEQCXLDTICYTLNRIEPRYIVSNRGLTRVERDGSERHQAHADITALAYRDCSRLIIICAHR

SEQ ID NO: 15293 - DNA, 612 bp, Unknown
  Obtained from environmental sample
  misc_feature (1)..(612): n is a, c, g, or t
gtggcttcgccgggcggagccgatgaatatggcaatcaaagcagctctggcagagggggcggcggagtgcaaagagagaggcaatccgccagaagcatctttgtccccaaaggcaccaagctgtccgttttgctctccgaagagatcagcaccaaaacgcacaaggctggcgaagcctggaatggcagcctcgcaaaggacgtggtgattgacggcgcggttatgtggaaggccggcaccaaggtcgcgggcgtcatacagcaaagcaccccgaccgggcgcctggccaatggcgagggcatgcttgccatcagcctgaccaagatagacggggcgaagatagacggcggcacatacgccacaaagggggactccaaaggcgcaaggaacgccaaagtaatcgggacgacggcggcgctgggggccatcgccgggattctgtcggacaagaagaaccagaaagaccacgcgctcggcggcgcggccgccggagcggcccttggcgcagcagtcgcgggcgcgacgggcgacactacgatcaaaatctccgcttccagcgccgtccagttttcagtgccatccgacgaaacagtgacgccgaagaagaaatga

SEQ ID NO: 15294 - protein, 203 aa, Unknown
  Obtained from environmental sample
  misc_feature (1)..(203): Xaa is any amino acid
MASPGGADEYGNQSSSGRGGGGVQRERQSARSIFVPKGTKLSVLLSEEISTKTHKAGEAWNGSLAKDVVIDGAVMWKAGTKVAGVIQQSTPTGRLANGEGMLAISLTKIDGAKIDGGTYATKGDSKGARNAKVIGTTAALGAIAGILSDKKNQKDHALGGAAAGAALGAAVAGATGDTTIKISASSAVQFSVPSDETVTPKKK

SEQ ID NO: 15295 - DNA, 615 bp, Unknown
  Obtained from environmental sample
  misc_feature (1)..(615): n is a, c, g, or t
atgaaacagaaaggattttttgatgaagccgacaggctaaggaagttaagcgaacagggagattcgttggaaaaactcaatgaacatataagatgggaagattttcaaaaaccgttaagcaaagcttttaaaaaagaagcgcagggacccggcggacgtccaccgtttgattatgtaatgatgttcaagatattgatattacaaaagatatataacataagtgacgaccagacggaataccaaataaacgacagactaagttttcaacggtttataggaatacggttatatgatatagtacccgactcgaaaacaatatggcattttcgggaagtattgaaagaagctgatgtaatagatgaaatatttaagatgtttacagataaactggagcggaaagggataataacgcatagcgggtccatagtggacgcgacatttgtggaagcgccgaggcaaagaaacacgaaagaagagaacaaagaaataaaagaagggaagataccgcaagaatggcagacagaagaaaacaaacataaaatagcgcaaaaagacaccgacgcgcggtggatgactaaaaacaaggaacggcattacgggtataaagatcattaa

SEQ ID NO: 15296 - protein, 204 aa, Unknown
  Obtained from environmental sample
  misc_feature (1)..(204): Xaa is any amino acid
MKQKGFFDEADRLRKLSEQGDSLEKLNEHIRWEDFQKPLSKAFKKEAQGPGGRPPFDYVMMFKILILQKIYNISDDQTEYQINDRLSFQRFIGIRLYDIVPDSKTIWHFREVLKEADVIDEIFKMFTDKLERKGIITHSGSIVDATFVEAPRQRNTKEENKEIKEGKIPQEWQTEENKHKIAQKDTDARWMTKNKERHYGYKDH

SEQ ID NO: 15297 - DNA, 591 bp, Unknown
  Obtained from environmental sample
  misc_feature (1)..(591): n is a, c, g, or t
atgtcttcacagtatggaaagaggctaagaatatcgatcttcgggcaatcgcattctccggcgattggcgtgagcattgacggcttaccggcggggatcaaaattgctacggatgaactgcggacattccttaaacgaagggccccgggacaaaacgacatttccacggcgcgcgcggaagaagacgttcctgaaattttgtcgggtctggtagaaggtgtcacatgcggcgcgccgcttgcgataatcatccgcaatgaagacgcccgatcggttgattaccgcgaactgcgggatattccgcgtccgtcacacgccgattacgcggcgcacataaagtacggcgggtttcaggacgtggcgggcggcgggcatttttccggcaggctgaccgcgccattgtgcgccgccggcgggatatgtttgcaaatattacgcggcacgggagtcttcgtcggagctcatatattgcggatcggcaacgcggaggacactccgtttgaccctgtggctgtatcaaacngcggacttcgaggcggttctcgaaaacccagctgcccgtactcaaccgtgaagcgggcgaatccataa

SEQ ID NO: 15298 - protein, 196 aa, Unknown
  Obtained from environmental sample
  DOMAIN (9)...(196): Chorismate synthase
  misc_feature (1)..(196): Xaa is any amino acid
MSSQYGKRLRISIFGQSHSPAIGVSIDGLPAGIKIATDELRTFLKRRAPGQNDISTARAEEDVPEILSGLVEGVTCGAPLAIIIRNEDARSVDYRELRDIPRPSHADYAAHIKYGGFQDVAGGGHFSGRLTAPLCAAGGICLQILRGTGVFVGAHILRIGNAEDTPFDPVAVSNXGLRGGSRKPSCPYSTVKRANP

SEQ ID NO: 15299 - DNA, 564 bp, Unknown
  Obtained from environmental sample
  misc_feature (1)..(564): n is a, c, g, or t
gtgaaaagtgcaacagccacgctgcgtttttccgagctgctgcttgcgttgctcaaagggaaaaccggccttcttgacgcgctaggcatactcgcccgggaaggcatagaaaagccggtaagggaaagcgcttattccctgcttaagataatgaaaaaagggaaagggttatccgagagcttgcgaattatcggcaaggaaaatgtattttttgaacccctgtacatcacgctgattgccgccgctgaattaacaggaagcatagaagccgtgcttggaaggattgtttcagatttgcagagaaagaagcgggcgaaagagaatttattgaacatattgatttacccgtcaacaattgtgtttcttgctatagcggggactattgggatcatcctgaagggtatgccgctgtttatttctgcagggcttctttcggcaacaattgtggaagccgcgaaaaccggcattggcctggcggctcttgttttgctgtttggcggcggtaccctcttttttgtgtattttagaatttttagcgatgactcgcctanctcggccatctga

SEQ ID NO: 15300 - protein, 187 aa, Unknown
  Obtained from environmental sample
  DOMAIN (10)...(136): Bacterial type II secretion system protein F domain
  misc_feature (1)..(187): Xaa is any amino acid
MKSATATLRFSELLLALLKGKTGLLDALGILAREGIEKPVRESAYSLLKIMKKGKGLSESLRIIGKENVFFEPLYITLIAAAELTGSIEAVLGRIVSDLQRKKRAKENLLNILIYPSTIVFLAIAGTIGIILKGMPLFISAGLLSATIVEAAKTGIGLAALVLLFGGGTLFFVYFRIFSDDSPXSAI

SEQ ID NO: 15301 - DNA, 327 bp, Unknown
  Obtained from environmental sample
  misc_feature (1)..(327): n is a, c, g, or t
atgggtataccgcattacatggtagcggcagtgcttaaagcggtaatagcccagcgcctgatcagaaaagtatgcctatcttgcaagggagaaggctgcagttgctgttcaaacacgggctacatgggaagaaccgcaatcgcggagtttatatccgtagacctcacactgcaagacatgattgccgcaggagccgtaattgaacaactgcgatcgcgcctgaataatatgcgctttaaaacgctttacgacgacgcagaagaaaaagtctcgtctgccctgacaactgaggctgaaatcaggcgcgagctgggagggcggctgtga

SEQ ID NO: 15302 - protein, 108 aa, Unknown
  Obtained from environmental sample
  misc_feature (1)..(108): Xaa is any amino acid
MGIPHYMVAAVLKAVIAQRLIRKVCLSCKGEGCSCCSNTGYMGRTAIAEFISVDLTLQDMIAAGAVIEQLRSRLNNMRFKTLYDDAEEKVSSALTTEAEIRRELGGRL

SEQ ID NO: 15303 - DNA, 612 bp, Unknown
  Obtained from environmental sample
  misc_feature (1)..(612): n is a, c, g, or t
atgcagcactgcgcttcgcttgtatccaggctgcagactgtccatgaccggcggtcatgtgcggccggaatatgccatttatggaggcatcttatgaacaatctcaacagcattcttattgagggaaacatggtgcgcgaaccgcagtaccgcacgactcaaaaggggacgccgctctgtactttcagcctggcttctaaccgttacttcaggcaggataccggctttgaaaaggaagtgtccttttttgatgttgaaacatggtcgaagctggcggacatctgcaacaaccagggcaaaaaggggcgcggcgtaagggttgtgggccgtctgaaacaggacaggtggacgggtacggatggcaagccgcgttcgcgtgttgccattgtcgcagagcatgttgaattccgtcctgaattcaaaaaagaatcaagccatgataatggcagcgctgagagggacaaagattccgtttacagcaatagccttgccgaagaagccgcggcttcagaggaagccgttgaaacggcgcaggactacgacgatgcggcgttaacgcctgaatatgaggaaacccaggtaatggcgggagtcgccgagccggtgttttag

SEQ ID NO: 15304 - protein, 203 aa, Unknown
  Obtained from environmental sample
  DOMAIN (35)...(137): Single-strand binding protein family
  misc_feature (1)..(203): Xaa is any amino acid
MQHCASLVSRLQTVHDRRSCAAGICHLWRHLMNNLNSILIEGNMVREPQYRTTQKGTPLCTFSLASNRYFRQDTGFEKEVSFFDVETWSKLADICNNQGKKGRGVRVVGRLKQDRWTGTDGKPRSRVAIVAEHVEFRPEFKKESSHDNGSAERDKDSVYSNSLAEEAAASEEAVETAQDYDDAALTPEYEETQVMAGVAEPVF

SEQ ID NO: 15305 - DNA, 321 bp, Unknown
  Obtained from environmental sample
  misc_feature (1)..(321): n is a, c, g, or t
ttgcgttatcagctgggcggcaacgatctcggtgttccaaaatatgcnccggttgttcttgacgaagcgtttgataaagcggacaacgaattcaccacactggtaatgaatattttcaaaaatttcgggttccaaatgatagtggcaactccgctcaagtccgtaatgacgctcgaaccttttatcggaggcgcctgttttgttgacatcaacgacaggtgtatatcaagcgtcctgattatcgagtacgacaatgagcaacaacggttgaatcttccgaatcaaaccgacaacagggaggctgatgttgaagcttcctga

SEQ ID NO: 15306 - protein, 106 aa, Unknown
  Obtained from environmental sample
  misc_feature (1)..(106): Xaa is any amino acid
MRYQLGGNDLGVPKYAPVVLDEAFDKADNEFTTLVMNIFKNFGFQMIVATPLKSVMTLEPFIGGACFVDINDRCISSVLIIEYDNEQQRLNLPNQTDNREADVEAS

SEQ ID NO: 15307 - DNA, 513 bp, Unknown
  Obtained from environmental sample
  misc_feature (1)..(513): n is a, c, g, or t
gtgcctctggacgtaattttggacataaatgacataaaaagcgacaatatcagggctggggagacgctttttatccccggcgcaaggatgaatgacattgacctaagaatgagtttaggcgagacattcatgtacccgcttcatcagaaatttatcacaagttcttacggaatgcgaaaagatccgataaacggggcattaagtttccataccggccttgatttaagggcaaatacaggcacggctgttctggcttccctggacggggttgtttcctttgtaggcgaaaattggctttacggaaaacatatcattgtaagtcacagcaacggctacaaaaccatgtatggtcatttaaacgctttttccgtaaagcaaggtgacagggtgacaaggggcagaaaaatagcggaatcgggcaataccggctacagtaccgggccccatctgcattttggaatatacgacaagaacaataaattggttaatcctcttgaattgttaaataaataa

SEQ ID NO: 15308 - protein, 170 aa, Unknown
  Obtained from environmental sample
  DOMAIN (68)...(164): Peptidase family M23
  misc_feature (1)..(170): Xaa is any amino acid
MPLDVILDINDIKSDNIRAGETLFIPGARMNDIDLRMSLGETFMYPLHQKFITSSYGMRKDPINGALSFHTGLDLRANTGTAVLASLDGVVSFVGENWLYGKHIIVSHSNGYKTMYGHLNAFSVKQGDRVTRGRKIAESGNTGYSTGPHLHFGIYDKNNKLVNPLELLNK

SEQ ID NO: 15309 - DNA, 612 bp, Unknown
  Obtained from environmental sample
  misc_feature (1)..(612): n is a, c, g, or t
atgactttnagcgagaatcccgatttcattgcccttggcggcactatcgcagatctggttctggaaaaaggctatacagaacccaacgacgggcttaacggccttgtttcagacctggcgtcaaaaatccgcgaaaacatgagccttaagcgcatcaaaaccgttaaggcaaacgcgggcgaatacctgaccagctacattcatggcgacggggcaataggcgttgtggtgaaattcggagcggataaagacggggcgttcaacaacgaagaggttaaagcgttcgcctttacgattgcccttcatgtggcagcttttaacccctacgccctggaccaaacaaaaatagaccaggggtggctaaaggagcaggaagaaattttccggaagcaaacagagcaggacgaaaagatgcagggcaagcccgcgaacgttatagaaaatatccttaaaggcaaggtaagcaaattcctcaaagaaatctgccttatggatcagggctatgtaaaggacgaaaaaatgacagtagcgcaggctttggccgacgcgggcaagcgttttggtttcaagctaagcgttcaggattatgtctactttaaggtaggcgattaa

SEQ ID NO: 15310 - protein, 203 aa, Unknown
  Obtained from environmental sample
  DOMAIN (2)...(203): Elongation factor TS
  misc_feature (1)..(203): Xaa is any amino acid
MTXSENPDFIALGGTIADLVLEKGYTEPNDGLNGLVSDLASKIRENMSLKRIKTVKANAGEYLTSYIHGDGAIGVVVKFGADKDGAFNNEEVKAFAFTIALHVAAFNPYALDQTKIDQGWLKEQEEIFRKQTEQDEKMQGKPANVIENILKGKVSKFLKEICLMDQGYVKDEKMTVAQALADAGKRFGFKLSVQDYVYFKVGD

SEQ ID NO: 15311 - DNA, 549 bp, Unknown
  Obtained from environmental sample
  misc_feature (1)..(549): n is a, c, g, or t
gtggggatggcaaacaagaagcggggtatgggcggatgtcgggaaaggatgaaaggcggtccggatggtgtgcgtggaagcgtggaggggggggcatctggtgggttggcgggagaaggctggggggaggtagcaaaggaaggaaaggagcttgcgagccagggtgaaaagagggcagacgatacggcgggggggatggaaggcatccaggcaggcacgggcgaaggcgtgggggtgatagacggagtgtcggagattagaaaaaaaataaagcagagggtggaagtaatttccaggcgggctgaccagcaagcaaaggcgagcagggagatagctaatagtgttgctcaggtgaacataggtgctgaacgtgttgccagtgccataggcgaggtggctaagggtagcaaagagatgtctcgcaatgccgaagctatagcgaaaaattcaatcagtgcgcagagcacggcacaaatcaacgagggtgcagatgcacttggaaaattgggtagcaatataaaaagcgttttgaaggattttaatatatag

SEQ ID NO: 15312 - protein, 182 aa, Unknown
  Obtained from environmental sample
  misc_feature (1)..(182): Xaa is any amino acid
MGMANKKRGMGGCRERMKGGPDGVRGSVEGGASGGLAGEGWGEVAKEGKELASQGEKRADDTAGGMEGIQAGTGEGVGVIDGVSEIRKKIKQRVEVISRRADQQAKASREIANSVAQVNIGAERVASAIGEVAKGSKEMSRNAEAIAKNSISAQSTAQINEGADALGKLGSNIKSVLKDFNI

SEQ ID NO: 15313 - DNA, 567 bp, Unknown
  Obtained from environmental sample
  misc_feature (1)..(567): n is a, c, g, or t
ttggtcgctaacggctccatgatgggttcaggcggcatgatagtaatggacgaagacgattgcgtagttgacgtgtcacgcttctatatggaattctgcgttgatgaaagctgcggcaaatgttcgccgtgccggattggaaccacgcaaattttaaaacttcttgataaaatagccgaaggcaagggagaggacgaggaccttgttaaacttgaatctatcggaaacgcgatgacgagggcgtctctttgcatgttaggctgtactgcggcaaacccgactacctccacgctgaagaatttccgcgatgaatacattgaacatatacatgataaaaaatgccgcgccggcaaatgcagaaaaatgatcacctataccattgacgctgataagtgcataggttgcggcgtgtgcgcgaagaaatgtcccggcgactgcattgtcgtagaggactcgtcaaggtatccgaataaaaaacgtccgccttacagaattatcagtgatgattgcgtaaagtgcggcgaatgtacagcttcatgtaaatttaacgcggtaacaaaggcttaa

SEQ ID NO: 15314 - protein, 188 aa, Unknown
  Obtained from environmental sample
  DOMAIN (163)...(186): 4Fe-4S binding domain
  misc_feature (1)..(188): Xaa is any amino acid
MVANGSMMGSGGMIVMDEDDCVVDVSRFYMEFCVDESCGKCSPCRIGTTQILKLLDKIAEGKGEDEDLVKLESIGNAMTRASLCMLGCTAANPTTSTLKNFRDEYIEHIHDKKCRAGKCRKMITYTIDADKCIGCGVCAKKCPGDCIVVEDSSRYPNKKRPPYRIISDDCVKCGECTASCKFNAVTKA

SEQ ID NO: 15315 - DNA, 576 bp, Unknown
  Obtained from environmental sample
  misc_feature (1)..(576): n is a, c, g, or t
atggtgattaacacgccggtaagctcctacttttccggcggcaattcggacgctgttgttaccgagcggattcgggcgacgcccaaaggcacgggctggattaaggcctgctccaattatgtgatggcggctctggcaaagcacgaggcccaggaagcgggctttatggagtgcgtgtttctggacgctgttcatcgcgaatatgtcgaggaaggctcgtcctgcaatatattcttttatttgaagtcaggcgaactggtaacgccggagttgggcgacacgattctgccgggcattacccgcgccagcatcatcgagcttgcccgcgaccggggcgtaaaggtaagcgagaggaagatcgccatccgggaagccctggaggaaacaaaggaatgttttgtcagcggaacagcagccggcgcaactcccctttcgtcgcttacgtggcaaggaaaaaagacggtctttaacaacggcaaggttggcgagttcaccgcggaaatccgtgatactatcaagggcatccagtacggtactttgccggacaccaagggctggatgacgccggttgtgtaa

SEQ ID NO: 15316 - protein, 191 aa, Unknown
  Obtained from environmental sample
  DOMAIN (1)...(173): Aminotransferase class IV
  misc_feature (1)..(191): Xaa is any amino acid
MVINTPVSSYFSGGNSDAVVTERIRATPKGTGWIKACSNYVMAALAKHEAQEAGFMECVFLDAVHREYVEEGSSCNIFFYLKSGELVTPELGDTILPGITRASIIELARDRGVKVSERKIAIREALEETKECFVSGTAAGATPLSSLTWQGKKTVFNNGKVGEFTAEIRDTIKGIQYGTLPDTKGWMTPVV

SEQ ID NO: 15317 - DNA, 465 bp, Unknown
  Obtained from environmental sample
  misc_feature (1)..(465): n is a, c, g, or t
gtgaaaaattatatggaatgtntaccggttcgtataatagaaatcattgcgggaagatatttatatggctttatttcaggaataacaaatctgataatttcaatagtattagcatatataatagcgatattctcaaaacaacaaattgaaactataactttgtttctgtctataaccttggctttttgttattatagttttgcggtaagtatttcataccccatttactataaattcggtttttccaaatcatttatatttataacaatgcctttgtacattataattcttcttattgtattcttgtctgaaagaacaaatttatatataactattgaacaagatttacaatatttctccaatcattatattctgtttttgctttatggctttattttttgtatacttattttggcaatttctgcaactatatcttatggaattattaaaaattcggaattataa

SEQ ID NO: 15318 - protein, 154 aa, Unknown
  Obtained from environmental sample
  misc_feature (1)..(154): Xaa is any amino acid
MKNYMECXPVRIIEIIAGRYLYGFISGITNLIISIVLAYIIAIFSKQQIETITLFLSITLAFCYYSFAVSISYPIYYKFGFSKSFIFITMPLYIIILLIVFLSERTNLYITIEQDLQYFSNHYILFLLYGFIFCILILAISATISYGIIKNSEL

SEQ ID NO: 15319 - DNA, 369 bp, Unknown
  Obtained from environmental sample
  misc_feature (1)..(369): n is a, c, g, or t
atgtttatggttggttttgatcacggtccggaaccagattctgataatgatattgatggtcgaatgttggcacaaagtgggccaaatttccgaaaagacatgacaacaataataaaagcgccaaatggcgaatatgcatgttttgccggaatgtggatcgacaaacaaaataactacgcgtatttggagccattagcgacagtacctgaataccggcgtatggggttggcaacgcttgcagtagttgaagcaataaaaaagacaaaaaggctgggtgctaaatattgctttggaggaacgggagaattttatagcagtattggttttaaggaaatttcaaaccgtgaactatggagaaaggaatggtga

SEQ ID NO: 15320 - protein, 122 aa, Unknown
  Obtained from environmental sample
  DOMAIN (37)...(110): Acetyltransferase (GNAT) family
  misc_feature (1)..(122): Xaa is any amino acid
MFMVGFDHGPEPDSDNDIDGRMLAQSGPNFRKDMTTIIKAPNGEYACFAGMWIDKQNNYAYLEPLATVPEYRRMGLATLAVVEAIKKTKRLGAKYCFGGTGEFYSSIGFKEISNRELWRKEW

SEQ ID NO: 15321 - DNA, 903 bp, Unknown
  Obtained from environmental sample
  misc_feature (1)..(903): n is a, c, g, or t
atggccgagtacagggacgcccaagcggatacggtgttaagcgagcctgctataaaaagattatatgcctgctgcgcgcctgttaaattgtgggaaaccgaatttttcaccgcacgctgcgctcattacagtccggagattatcaatagcgagattaacgaaggccgactggtttggtacggcgcgggtaaggaaaagatagggttttgccgtccggatgatctggaactggtaagtatgaatattgttaagaaatttaagcaaaagataaattcggaggatgggattcctggagaagacatgtctccgggggaacttataaaaaaagccttcgtgcagttaattaataatggtttttttgaccggccccgggatttctgggaaataaaggacgcgattaacgcaagtacgcaacagagcgtcaacagtaaagactgcgctgaggctttttggcatgaggtctggaaggggaggctgtcatcagactcctttgaaccgcttcgccggggtattcaattcggtttcacgataaagggtacggaaactgttgagctacaacccctgtcaagtttaggctctccgcgtatgccccgtatcccgcgttccctgcgggatcgctggcgtgacggagcgccggtatctggcaggtggttttcgattgttcttaatgacattgagaacacagagcaggaccaatggtgggatgctccgctaaatgaggaagaccgaaaccgggacagggtacgcctgctgctggcgcgctggggtattctttgccgtccgctcctggagaaagcttcctccggaaactcagcttccagaggagctctgcttccagcgatccctcgccctttacctggtcggggcttttaccaccatgcgcagaatggaactctcacgtga

SEQ ID NO: 15322 - protein, 300 aa, Unknown
  Obtained from environmental sample
  misc_feature (1)..(300): Xaa is any amino acid
MAEYRDAQADTVLSEPAIKRLYACCAPVKLWETEFFTARCAHYSPEIINSEINEGRLVWYGAGKEKIGFCRPDDLELVSMNIVKKFKQKINSEDGIPGEDMSPGELIKKAFVQLINNGFFDRPRDFWEIKDAINASTQQSVNSKDCAEAFWHEVWKGRLSSDSFEPLRRGIQFGFTIKGTETVELQPLSSLGSPRMPRIPRSLRDRWRDGAPVSGRWFSIVLNDIENTEQDQWWDAPLNEEDRNRDRVRLLLARWGILCRPLLEKASSGNSASRGALLPAIPRPLPGRGFYHHAQNGTLT

SEQ ID NO: 15323 - DNA, 891 bp, Unknown
  Obtained from environmental sample
  misc_feature (1)..(891): n is a, c, g, or t
atgatcagatggccgagaattgatccgctattatttcacgacaaaagaacctttggcacgtttgaggtgtttcgcggaaatgaatcgatatttaagtgctatacctgcgaagacaccgttcgcggagatggaaaccctgatactgtggcaaaatggaaaattgcggaagaatcagccataccttacggcaaatatatctgttcgttcacccccagcacacgatatccgcccaaaaagtgggagattaccaacgtgcgagaatttgacggggtaagaatacatgtgggtaataccgaggctgacaccaagggttgtttactgctcggagagtacgtcgcctctgattattctatgatatgtgcttccgataaaacggtgaaaaaatttgaaaaccttatggcggattatggcaatcaagattttgagttggaaataacaaatgaatcgaaaaccaaagcgaataaatcggacaaatcgaaatcggtggagacagcggccgcgccgacggcaaagactacgtctgcgggtagcgcgcaaaaagcgtcggttgtgggagtgaccggaccgcaagacgcatcagttggacagaaagtagagtatcaagcaatctttaatatagaaaacgttagcgatgttgatcgcaaaaaagtcacatgggctgtgagtttccccggaatatggccggttaatgactataaattggttgaacaaggcgataaacttattcttgaaatgaaacagaagtggcatcgcgaagacattcttgtatacgcgcggatgaaaatgtttgagcaaaaggtatgccaacgaacgtcgatagatcctgatcttaaacagctcacgcgaatcgggcaaaggtttgcgcaacgtgtacgtttcagtcggagatag

SEQ ID NO: 15324 - protein, 296 aa, Unknown
  Obtained from environmental sample
  misc_feature (1)..(296): Xaa is any amino acid
MIRWPRIDPLLFHDKRTFGTFEVFRGNESIFKCYTCEDTVRGDGNPDTVAKWKIAEESAIPYGKYICSFTPSTRYPPKKWEITNVREFDGVRIHVGNTEADTKGCLLLGEYVASDYSMICASDKTVKKFENLMADYGNQDFELEITNESKTKANKSDKSKSVETAAAPTAKTTSAGSAQKASVVGVTGPQDASVGQKVEYQAIFNIENVSDVDRKKVTWAVSFPGIWPVNDYKLVEQGDKLILEMKQKWHREDILVYARMKMFEQKVCQRTSIDPDLKQLTRIGQRFAQRVRFSRR

SEQ ID NO: 15325 - DNA, 735 bp, Unknown
  Obtained from environmental sample
  misc_feature (1)..(735): n is a, c, g, or t
gtgccgcctaccctggtctcattcgccgtttccacggcaaaaatagaaaatattatcacgcctgagtttaaaaaggcggacagctatgtctatttgttaaaaccgccgttttctatttacgaaaaacatgattttaccgcccttcgcgaatattttgactccgtagaaaaattaattaaaaacggaaaaatactttccgtatgggctgccggcagtggcggtacggcggaagctgtcgtgaaaatgtgcatgggcaacaagattggctttacggcggaaaacgaactctttacaggaaacggtttttgcggttttatagttgaaacggatgcgccattacagacggacgcggtacttttaggacgtacgacaacagattatatacttaaaacaaaaacttatgaaattacaatggataaattacagaacgcatgggaaaaaacacttgagcctgtttatccatatctgattaaacaggaaggtaaagttgaaaattttatttggcatcatagtaaatcatcacaagaaatattaaaaaagaataaaaaaagaaggggcggttcatttgcaaaaccgaattttcttatacctgtttttcccggtactaacagcgaatatgacagcgcgagggctgttgaaaaagcgggaggaagagcgataatttttgttatacgcaatttatcatccgcctgcatcgcgcaaagtgttgatggttttgaaaaagnccgcgcgtaa

SEQ ID NO: 15326 - protein, 244 aa, Unknown
  Obtained from environmental sample
  misc_feature (1)..(244): Xaa is any amino acid
MPPTLVSFAVSTAKIENIITPEFKKADSYVYLLKPPFSIYEKHDFTALREYFDSVEKLIKNGKILSVWAAGSGGTAEAVVKMCMGNKIGFTAENELFTGNGFCGFIVETDAPLQTDAVLLGRTTTDYILKTKTYEITMDKLQNAWEKTLEPVYPYLIKQEGKVENFIWHHSKSSQEILKKNKKRRGGSFAKPNFLIPVFPGTNSEYDSARAVEKAGGRAIIFVIRNLSSACIAQSVDGFEKXRA

SEQ ID NO: 15327 - DNA, 498 bp, Unknown
  Obtained from environmental sample
  misc_feature (1)..(498): n is a, c, g, or t
ttggatattccgttaactcttacgcgaaatttatccgctccttgcgatgttccggttattgaaggttttatatcccttgaaatttcagaacttaaaaagttatgcgcagatttaaatcttgccatggatttgcaggatttattattctgccagaaatatttttacaatgaagaaaaaagagacccgaccgtaaccgagatacgccttcttgacacatactggtcggatcactgccgtcacacgacatttttaacggaacttaatgaaatacaaattgacgacgaggcggtaaatgaaagctataaaaattaccttgctcttcgcgcgtattgcggacgcgctgacaaaccggttactctgatggacatggctactatcggggcgaaggcgcttaaactgaaaggacttctttccgatctggacgaatcggaggaaataaacgcctgttcagtaaaggtaaagttgacgttgacggcaaagaacgtgattggtttttaa

SEQ ID NO: 15328 - protein, 165 aa, Unknown
  Obtained from environmental sample
  misc_feature (1)..(165): Xaa is any amino acid
MDIPLTLTRNLSAPCDVPVIEGFISLEISELKKLCADLNLAMDLQDLLFCQKYFYNEEKRDPTVTEIRLLDTYWSDHCRHTTFLTELNEIQIDDEAVNESYKNYLALRAYCGRADKPVTLMDMATIGAKALKLKGLLSDLDESEEINACSVKVKLTLTAKNVIGF

SEQ ID NO: 15329 - DNA, 339 bp, Unknown
  Obtained from environmental sample
  misc_feature (1)..(339): n is a, c, g, or t
ttgctgacggcattgttggagagggaagccctgatgtcacaggtgttggcggcggcatcgcgncttccccaccccaggaacccgcttgccggagcggagagcgaacagtttgtagccctcgcttttttggaaacaccggtggactggaattccctggacggtcagaaggtagatactttgctgctcattatttcctgtacggcaaagcagcaccttcaaaccctttcggagataactttcttttgccgccagaaggatttttgccggcttttgaaagaccgcgctccgctggaagagctgctatgctttatcagggaagccgagaaaaactggaaataa

SEQ ID NO: 15330 - protein, 112 aa, Unknown
  Obtained from environmental sample
  misc_feature (1)..(112): Xaa is any amino acid
MLTALLEREALMSQVLAAASRLPHPRNPLAGAESEQFVALAFLETPVDWNSLDGQKVDTLLLIISCTAKQHLQTLSEITFFCRQKDFCRLLKDRAPLEELLCFIREAEKNWK

SEQ ID NO: 15331 - DNA, 435 bp, Unknown
  Obtained from environmental sample
  misc_feature (1)..(435): n is a, c, g, or t
atggataaaaacgctttgacacaagtcgcgctttctgtacgctcactggcgatggacgcgattcaaaaggcgaattcgggacaccccggcgttgtgcttggcgccgccgaattgggggcgatactttacggggaaatactccgccacgatccttccgactccaggtggcccgaccgcgatcgttttgtgctttcggcgggtcacggttccatgtttctttattccctgctgtatctttccggctactccggcatgacaatggacgcgattaaatcgttccgccaggtcggctcggcggcggcggggcatcccgagtacggtgccgctgaaggcattgaaatgaccaccggcccgctggggcaggggttcgctaccgcggtaggtatggccgtcgcggaaacatgcttgccgcgcgcttcatacgcccgcgcgtaa

SEQ ID NO: 15332 - protein, 144 aa, Unknown
  Obtained from environmental sample
  DOMAIN (5)...(144): Transketolase, thiamine diphosphate binding domain
  misc_feature (1)..(144): Xaa is any amino acid
MDKNALTQVALSVRSLAMDAIQKANSGHPGVVLGAAELGAILYGEILRHDPSDSRWPDRDRFVLSAGHGSMFLYSLLYLSGYSGMTMDAIKSFRQVGSAAAGHPEYGAAEGIEMTTGPLGQGFATAVGMAVAETCLPRASYARA

SEQ ID NO: 15333 - DNA, 549 bp, Unknown
  Obtained from environmental sample
  misc_feature (1)..(549): n is a, c, g, or t
atggccgggagcgagcagcggcacaaattcctaaatgtatttagagatgccatatatggaatgtctttcagcgatgccagagaaacgctgcttggagattcggtagccgctacaacttatttgcatacaacaacttacaacggtttgcagagatcttttgctccaattataagagaacctttaaatttgctcaacccaaataaattttggaaaccacttgtttccgattacaaatcttttgcgagcagatatttaagcgtaaagaacaacctcaattctaattatctcctgagtgcagcccttggaaattcatccctgccaagtctgccatacgaaaataatagtttaccggatgacctttccacatatctagcggaatatgcaacgggcaaggctttggatggtttgtttttgatggttggtaagcaagaaacccagttgagggcagatccatggggaacagtcaaagcacttggcggttttgttacagataccgtcggcgatttgctaagtgatatttttggcagggctaagaacggtttgctctaa

SEQ ID NO: 15334 - protein, 182 aa, Unknown
  Obtained from environmental sample
  misc_feature (1)..(182): Xaa is any amino acid
MAGSEQRHKFLNVFRDAIYGMSFSDARETLLGDSVAATTYLHTTTYNGLQRSFAPIIREPLNLLNPNKFWKPLVSDYKSFASRYLSVKNNLNSNYLLSAALGNSSLPSLPYENNSLPDDLSTYLAEYATGKALDGLFLMVGKQETQLRADPWGTVKALGGFVTDTVGDLLSDIFGRAKNGLL

SEQ ID NO: 15335 - DNA, 303 bp, Unknown
  Obtained from environmental sample
  misc_feature (1)..(303): n is a, c, g, or t
ttgcagctagttaaggaggcttgtgattatattgggctgggtccttggaaaccaactgggacaaaggaaaatttgagcgaaatactgggcgaggctggaataaaaaaggtcttgggtttgcatttgaaaatccctgttatagtaataggcggtataactgcctccgatgttcccaaaatactatcgcttggggttcacggcattgccatcagttctggcattgttgccgccaaaaatataaaagctgcatttaaagaatatttagagcaaaccgttcttagccctgccaaaaatatcacttag

SEQ ID NO: 15336 - protein, 100 aa, Unknown
  Obtained from environmental sample
  misc_feature (1)..(100): Xaa is any amino acid
MQLVKEACDYIGLGPWKPTGTKENLSEILGEAGIKKVLGLHLKIPVIVIGGITASDVPKILSLGVHGIAISSGIVAAKNIKAAFKEYLEQTVLSPAKNIT

SEQ ID NO: 15337 - DNA, 558 bp, Unknown
  Obtained from environmental sample
  misc_feature (1)..(558): n is a, c, g, or t
atgactaacacatttaccgaccctagggatggcagggtatataaaaccgccaagataggtgagcagacttggatggcagagaatttggcttatgccgaagaaggcagcaagttctacaatgacgacgaagccactggcgaaaagtacggcaggctgtacgactttgaaacggcaaaaaaggcttgccccgcaggttggcatttgccaagtgccgcggaatggcaggaacttatggatttcgcaagcagcgatgatgcgggtgatgaatatgatggagaaaaactaaaagcgaaaaaagaatggaataaggacaagaacaagctaggcgacaagctcggcacagatgactacaactttgccgccttaccgggcggaagctgcaaaccagatggcacttttgaaggtcttggcgaacaaggcgcatggtggagtagcacggaatacgatgaaagcaaagcttacaattggttcatatacaactacgatggcgacgtagttagtcatatcaacgagaagaagatgctatgcagcgttcgttgcgtaaaggatgaagtctag

SEQ ID NO: 15338 - protein, 185 aa, Unknown
  Obtained from environmental sample
  misc_feature (1)..(185): Xaa is any amino acid
MTNTFTDPRDGRVYKTAKIGEQTWMAENLAYAEEGSKFYNDDEATGEKYGRLYDFETAKKACPAGWHLPSAAEWQELMDFASSDDAGDEYDGEKLKAKKEWNKDKNKLGDKLGTDDYNFAALPGGSCKPDGTFEGLGEQGAWWSSTEYDESKAYNWFIYNYDGDVVSHINEKKMLCSVRCVKDEV

SEQ ID NO: 15339 - DNA, 525 bp, Unknown
  Obtained from environmental sample
  misc_feature (1)..(525): n is a, c, g, or t
atgggctgttcacccgtatcatcatccgagtccagattaatgccaagatcatcaaaatcaaagtctatttcttcaggagccgcgtcttcttcggaagacggggcttcatcctgttctgacagattattgatcgcttcgttctgttctgacagccttttaagcgccgcttcgtcctcttccctcaagggatcaaatggaagggtttcctcacttgataaatcggctgaactgaatatgttttccatttcatcgccggtcagggcgactcttccgtcatcatcttcggaaaaaaagccgcttttgtgtttctcggcttcgctggaaccgccctcagcgcggatgcccgtaaattctttctttaaggtggtaagctcggtcctgattgatgaaagctcgtcggcgattttcatcaataattgggtaggtatatcttcctgggcgttcttttcaaaactgccgccagcctcatcaatcacgtccgccggctcatcaaacgtttcatatccagtttcctcaacatcctga

SEQ ID NO: 15340 - protein, 174 aa, Unknown
  Obtained from environmental sample
  misc_feature (1)..(174): Xaa is any amino acid
MGCSPVSSSESRLMPRSSKSKSISSGAASSSEDGASSCSDRLLIASFCSDSLLSAASSSSLKGSNGRVSSLDKSAELNMFSISSPVRATLPSSSSEKKPLLCFSASLEPPSARMPVNSFFKVVSSVLIDESSSAIFINNWVGISSWAFFSKLPPASSITSAGSSNVSYPVSSTS

SEQ ID NO: 15341 - DNA, 615 bp, Unknown
  Obtained from environmental sample
  misc_feature (1)..(615): n is a, c, g, or t
gtgatcagatggccgagtactagatcatttccaagattatctgttgtcttttcaatcaacatgctcatggatattcttgagaacatggaagaacagtttgacgtgcttgttgaagaaataaagaaagccggttctccctttatgcgtcatattgacatattaaccagcatgtcaggaatttcggtaattaccgctcttgccattatagcggacattattgacgtttccaggttcaaaaactcaaagcatttcacgtcgtatttacgcagcgcgccgcgggttgaaagttccaatgaaaaaacagtcataaaatcgacgacaaaagccggcaggaagctgtcaattacgcttctatcgcaatctttaaatcatttccgtgatggaaacaaaaagcttaaccgctggtataaccacataatatcatataaaaagaaaggaataatcaggatggcgttgtgcaggaaagtgtttacagagatatttcagatgcttaagaaggaagaatatcattatttcaggaaccctgtcctgcatgggaagaaaatggcggagtacttaaaatttcttgaaaaagaacattgtgtttttcctcaagaatttattcttgccgcttga

SEQ ID NO: 15342 - protein, 204 aa, Unknown
  Obtained from environmental sample
  DOMAIN (26)...(135): Transposase IS116/IS110/IS902 family
  misc_feature (1)..(204): Xaa is any amino acid
MIRWPSTRSFPRLSVVFSINMLMDILENMEEQFDVLVEEIKKAGSPFMRHIDILTSMSGISVITALAIIADIIDVSRFKNSKHFTSYLRSAPRVESSNEKTVIKSTTKAGRKLSITLLSQSLNHFRDGNKKLNRWYNHIISYKKKGIIRMALCRKVFTEIFQMLKKEEYHYFRNPVLHGKKMAEYLKFLEKEHCVFPQEFILAA

SEQ ID NO: 15343 - DNA, 399 bp, Unknown
  Obtained from environmental sample
  misc_feature (1)..(399): n is a, c, g, or t
ttgatcacgggcgaaatcatgcgctttatgaataatgccaatttgctcccgaaagacctttccatagatgcggataaatnatcggctctcataggttttgtcgcaggcggaaaaattaaccgcgccgcgtacaaagaaacaatcgaagccgtattcacgaacaatgttgatcccgaaaaatatatcgcggaaaaaggactgatgatggtcagcgacgacaacgccgtaattgaagcgataaagtcggtattggcggaaaactccgacgccgtagcttcctggcgcggcggcaagacgcaggttttcggcttccttatgggacaggttatgaaaaaacttggcaagggcggaaatcctgagatcgcgaaaaaggcgcttgaggaagcgctgaaagaataa

SEQ ID NO: 15344 - protein, 132 aa, Unknown
  Obtained from environmental sample
  DOMAIN (1)...(130): GatB/Yqey domain
  misc_feature (1)..(132): Xaa is any amino acid
MITGEIMRFMNNANLLPKDLSIDADKXSALIGFVAGGKINRAAYKETIEAVFTNNVDPEKYIAEKGLMMVSDDNAVIEAIKSVLAENSDAVASWRGGKTQVFGFLMGQVMKKLGKGGNPEIAKKALEEALKE

SEQ ID NO: 15345 - DNA, 453 bp, Unknown
  Obtained from environmental sample
  misc_feature (1)..(453): n is a, c, g, or t
atggaatatggcataaccaccctgaaaaagaggggggtaaatcaggatatatactattatgtaaactggtccccgctttccaaggcggacagatgggaaataaacgccaaagtcccggcagtagccggaatttttgaaatttactggatggacgatacaaaacacctgcggctttacaatgtagggcagactcattacggcggccttagaagcgaaatacgcaggcttacagacccggaattgtgcgatgacatgaaagcaagggaatttcttgaagacaaagagctttggtaccgttacgcccctacaaattccataggtgatatggcggacgttgtctggttttttatgaacacttattttcctgaaaaaacagttgtggaacattcaggacgctatgaaaatatctatataaaagagtccgaaccggacaaactgatttgggtgcagtga

SEQ ID NO: 15346 - protein, 150 aa, Unknown
  Obtained from environmental sample
  misc_feature (1)..(150): Xaa is any amino acid
MEYGITTLKKRGVNQDIYYYVNWSPLSKADRWEINAKVPAVAGIFEIYWMDDTKHLRLYNVGQTHYGGLRSEIRRLTDPELCDDMKAREFLEDKELWYRYAPTNSIGDMADVVWFFMNTYFPEKTVVEHSGRYENIYIKESEPDKLIWVQ

SEQ ID NO: 15347 - DNA, 855 bp, Unknown
  Obtained from environmental sample
  misc_feature (1)..(855): n is a, c, g, or t
gtgctgcgctccttcggcgttgtctcggctttcgtcacaccggtctccgtcaacaacatattctggggcttcgccctcctcgaagaccgccgcaacgaacgcttcttcgacgaagactgcgtagacattatgcgctcggcggcctttctatgcgccaataccgttatgcgcaccgagatggaacgcaccttagccaacaccaacgcgctgctcaaagtagcgctacgtaaagcgaccgaggcgagcaaggcgaagggcgagttcctctccaacatgagccacgaaatgcgcacacccctaaacgcgataaccggcatgaccgccatcggcaaaaaggcaaaagaacctgaacgcaaagactacgccttcagcaaaatacaagacgcctccacgcacctcctcggcgtaataaacgacgtgctggatatgtcgaaaatcgaggcgaatatgcttgagctctcccccatagaattcaacttcgaaaagatgctgcaaaaaatcgtagccgtactcaacttccgcatagacgaaagagggcagaagttcacagtccgcatagacggcgccatccccaaaacgctgatagccgacgatcaacggctcgcccaagtcgttacaaacctgatcagcaacgcgataaaatttaccccggagaacggcgttatcgctctcgaagcgtctttcatcggcgagaaagacggcgtctgcaccattcaaatttccgttagcgacaccggtatcggaataagcgaagagcagcaaagacacctcttncactccttccagcaagccgagagcagcacgacgcgcaagtacggcggcacgggacttgggttggccctcagcaaagcatag

SEQ ID NO: 15348 - protein, 284 aa, Unknown
  Obtained from environmental sample
  DOMAIN (196)...(284): Histidine kinase-, DNA gyrase B-, and HSP90-like ATPase
  misc_feature (1)..(284): Xaa is any amino acid
MLRSFGVVSAFVTPVSVNNIFWGFALLEDRRNERFFDEDCVDIMRSAAFLCANTVMRTEMERTLANTNALLKVALRKATEASKAKGEFLSNMSHEMRTPLNAITGMTAIGKKAKEPERKDYAFSKIQDASTHLLGVINDVLDMSKIEANMLELSPIEFNFEKMLQKIVAVLNFRIDERGQKFTVRIDGAIPKTLIADDQRLAQVVTNLISNAIKFTPENGVIALEASFIGEKDGVCTIQISVSDTGIGISEEQQRHLXHSFQQAESSTTRKYGGTGLGLALSKA

SEQ ID NO: 15349 - DNA, 495 bp, Unknown
  Obtained from environmental sample
  misc_feature (1)..(495): n is a, c, g, or t
gtgggaggaggggacgccgcctgcgaagaagcgcgctaccttcaaaatttaacggacaagattgtgctggttcacaggcgggataaattccgcgctcaggaagcccttgccgaaagggtaatgaacaacccgcatatagaggtacgttttaacacggtaataaaggaaataaaaggcgataaaaaagtaaaatcggttctgttaggcgaaacaacaagcgataaagtttacgaagaagagacggacgccgtttttatttttgtgggaacggttccgcagacatcgcttgtcgcgggcgatgatttaaaggccaaacttgacgagagcggctatattattacaaaccaaaaaatgtttaccagcatatcgggctttttcgccgcgggcgatatccgttccggcgctttccgtcaggttgtaacggccgccgccgacggcgcggttgccgctcacagcgcggcggcatacatagacgcgataaaagacaaaaaatga

SEQ ID NO: 15350 - protein, 164 aa, Unknown
  Obtained from environmental sample
  DOMAIN (1)...(89): Pyridine nucleotide-disulphide oxidoreductase
  misc_feature (1)..(164): Xaa is any amino acid
MGGGDAACEEARYLQNLTDKIVLVHRRDKFRAQEALAERVMNNPHIEVRFNTVIKEIKGDKKVKSVLLGETTSDKVYEEETDAVFIFVGTVPQTSLVAGDDLKAKLDESGYIITNQKMFTSISGFFAAGDIRSGAFRQVVTAAADGAVAAHSAAAYIDAIKDKK

SEQ ID NO: 15351 - DNA, 783 bp, Unknown
  Obtained from environmental sample
  misc_feature (1)..(783): n is a, c, g, or t
gtggcctgtcgcgtcttttgcgaaaagtgcaataaggacgaaactgaaattgaaagctgggacggcgattggggattaagttaccgctgtaactcatgcggtaacaaggaaaagcttgatattaagagcgcaaaaggaataaagctgtcgtggcgcgtagactggcctatgaggtgggaatacgaaaaagttgattttgagcctgccggcaaagatcatcacagtcaggggggaagttttgataccgcgcgtcatgtgtgcaaagacgtgtacggctgggaagcgcccgtttctttccgctacgattttatcggcacaaaaggaattgacggaaaaatgtcctcttcctccggcaacgtgatcaccataggggacatattgaagatctacacgccccaggtcgcgcgttatctttttgcgggaacaaggcccaatacggaatttgtaatttcttttgatcttgacgtcataaaaatatacgaggactacgataagaccgaacgaatcgcttggaagatggaaacggcaaaagacgaggccgtatatcaaaaagaaaaacgcatttatgaattatcgcagattagcgcagacgggaaaactccacgcgttgaagacatgcagacgccttatcaaattcctttccgccatttgtgcaatttgattcaaatagccgacggcgacattgaaaaagcgcttgccgatttaaccgccgtcgcgggaggccccaataaagaacaactgcccgcccttaaacaagggctgaatgcgccaaatactggatag

SEQ ID NO: 15352 - protein, 260 aa, Unknown
  Obtained from environmental sample
  DOMAIN (2)...(259): tRNA synthetases class I (K)
  misc_feature (1)..(260): Xaa is any amino acid
MACRVFCEKCNKDETEIESWDGDWGLSYRCNSCGNKEKLDIKSAKGIKLSWRVDWPMRWEYEKVDFEPAGKDHHSQGGSFDTARHVCKDVYGWEAPVSFRYDFIGTKGIDGKMSSSSGNVITIGDILKIYTPQVARYLFAGTRPNTEFVISFDLDVIKIYEDYDKTERIAWKMETAKDEAVYQKEKRIYELSQISADGKTPRVEDMQTPYQIPFRHLCNLIQIADGDIEKALADLTAVAGGPNKEQLPALKQGLNAPNTG

SEQ ID NO: 15353 - DNA, 621 bp, Unknown
  Obtained from environmental sample
  misc_feature (1)..(621): n is a, c, g, or t
atgggtcaaaaaacacatccaaacggtctgaggctgggaatcatcaaaacctgggattctcagtggtttgttgaaaagaaaaaggatttctcaaaattcattctcaacgatatgcaggttcgccgttatttatccaaaagatttgaaggtgcgcaaatttccaaaatagagattcgccgcacaaaaaataccgtagaggttttaattcacaccgctcgcccaggcgttataataggtcgcaaaggcgaggttgtggatggattgaaagaagaattgaaaatcgtgaccaaaaaagacgttcatattgagataatagaaatcaagcgcggcgaaacagatgccaagctggtggcagagaacatcgctcgccagttggaaaagcgcgtaacaggccgccgtgcaatgaaacgcgccattcaaaacgctatgcgttttggagttgaaggcattcgcattcaaattggcggtcgccttggcggagcggaaattgccagggtagaaaaatacgcagagggcagggttccgcttcacacccttcgcgcagatattgattatgcaactgcaacagcaaaaactctttacggcaccaatggcgtaaaagttggatactcggccatctga

SEQ ID NO: 15354 - protein, 206 aa, Unknown
  Obtained from environmental sample
  DOMAIN (64)...(118): KH domain
  misc_feature (1)..(206): Xaa is any amino acid
MGQKTHPNGLRLGIIKTWDSQWFVEKKKDFSKFILNDMQVRRYLSKRFEGAQISKIEIRRTKNTVEVLIHTARPGVIIGRKGEVVDGLKEELKIVTKKDVHIEIIEIKRGETDAKLVAENIARQLEKRVTGRRAMKRAIQNAMRFGVEGIRIQIGGRLGGAEIARVEKYAEGRVPLHTLRADIDYATATAKTLYGTNGVKVGYSAI

SEQ ID NO: 15355 - DNA, 807 bp, Unknown
  Obtained from environmental sample
  misc_feature (1)..(807): n is a, c, g, or t
atgcaagacaatctacccgagttgctttccccgaaagtggatatcatattcaaattgctgttcggagacgaacgttacaaggatttgactatcaacttcataagcgcagttttaggttacaaagacggcgaattggaagacatttccttttacgacactcacctgaaacgggagagcccaaacgataaattgggggttttggatataaaagccaaactgtcaaatggaaatgttataaacattgagatgcaggcacgtagcgttcccgaaatgaggagtaggacatcgtattacaagtcaaatctgctcaccgagcaaataggcgagggtggttcgtacttggagcttaagcctgtgaaatcaataatagtggcagattttgattttgtccctgaatcagagaaatgccatactgtttttcaaatgcttgaaagagacgaacatttcccgttcaacgatttggaggagatacacgttctatgtttgaaaaaattatctaaattaaataatgagagattgcgtgaatggctgaggttcattaactcggagaaaagagaggaatttatggagttggcaggaatagatccagtatttgtgaaagccgtagatgttttggctacgttcagtgcagacgactataatcgtatgctgtacgaggctcggttgaaggaatggcgcgataataagtctaggatagatggagcttgggctgatggctgggcggaatgtcggcaacaagcattggatttgtttcggcagggttattctctgagcgaagtggagaagctattgtctaaggctcaataa

SEQ ID NO: 15356 - protein, 268 aa, Unknown
  Obtained from environmental sample
  misc_feature (1)..(268): Xaa is any amino acid
MQDNLPELLSPKVDIIFKLLFGDERYKDLTINFISAVLGYKDGELEDISFYDTHLKRESPNDKLGVLDIKAKLSNGNVINIEMQARSVPEMRSRTSYYKSNLLTEQIGEGGSYLELKPVKSIIVADFDFVPESEKCHTVFQMLERDEHFPFNDLEEIHVLCLKKLSKLNNERLREWLRFINSEKREEFMELAGIDPVFVKAVDVLATFSADDYNRMLYEARLKEWRDNKSRIDGAWADGWAECRQQALDLFRQGYSLSEVEKLLSKAQ

SEQ ID NO: 15357 - DNA, 441 bp, Unknown
  Obtained from environmental sample
  misc_feature (1)..(441): n is a, c, g, or t
atggggcgcagggaggtggaagagctgcaatacatacaccagacgatcacgtttgtcagcacagaccaaaacatagcgggcagcgacatacccataggcgaatcgctggagcaggacgttgccgaggacgcgctggaggagtttgagagggaagccatcattgacaaattgaagttctggctggctaggctttccgagaaagaaaggcgcgtcttacagttgcattatggcatcggcgggggggagccgatgcccctcgaacaaattggcgctacctttgatccgccattggccagggaatctgtgagaaacatcgaaaggcgggccattgctaaaattcgcaaaaacaacagtgcgctgggcgccctgcgcgactatctggcggcgggccacgaatcgggcggcgtcttgcggactgcgcccaaaggggaagcgagatga

SEQ ID NO: 15358 - protein, 146 aa, Unknown
  Obtained from environmental sample
  DOMAIN (60)...(115): Sigma-70, region 4
  misc_feature (1)..(146): Xaa is any amino acid
MGRREVEELQYIHQTITFVSTDQNIAGSDIPIGESLEQDVAEDALEEFEREAIIDKLKFWLARLSEKERRVLQLHYGIGGGEPMPLEQIGATFDPPLARESVRNIERRAIAKIRKNNSALGALRDYLAAGHESGGVLRTAPKGEAR

SEQ ID NO: 15359 - DNA, 747 bp, Unknown
  Obtained from environmental sample
  misc_feature (1)..(747): n is a, c, g, or t
atgatcaatgttgacaatacccagcccgaaatattcctggacagtcccggagacggttcaatcaccgtaggcaatatttctgtaatgggccgcgtgctggatcccaatttgaaggaagtaagcatagagctaagaagcctggacggagttacaattccagccaatttaaggctaaggaaacttgagttaagttcattgataagggaaaacattgacattgcggcaatggcggacgggcagtacaatgtcgctattatcgccacggacagggccggaaacatgacccggctttcgcgtaacgtacagatggcgcggcagacttacaaaaactatatagaaatactttacccgcttgaaaatgaagaaacaagcggcgagtttaacctgtacggctatgccggaggcgcgaatcccgcgggaacggtaacattaagaataaacggaacggatgtagacacggttcatgttgacgattcaggctattacgtatttaagatggacagcgaaaaactcaattccggagtgaacgccattacggtaaacagcaatttcggagggccgactcttgtttcatcgcgggcttacaatttaatctacagggacggcggaccgtgggtaacaatagacagctttaagtttgccgaattcgcctatgaaaggccgtatctgttcgggcggacagggtatgttttatcggaacaagataaagaactccttgcggataaaaccgttgaaaaagccgcttaa

SEQ ID NO: 15360 - protein, 248 aa, Unknown
  Obtained from environmental sample
  misc_feature (1)..(248): Xaa is any amino acid
MINVDNTQPEIFLDSPGDGSITVGNISVMGRVLDPNLKEVSIELRSLDGVTIPANLRLRKLELSSLIRENIDIAAMADGQYNVAIIATDRAGNMTRLSRNVQMARQTYKNYIEILYPLENEETSGEFNLYGYAGGANPAGTVTLRINGTDVDTVHVDDSGYYVFKMDSEKLNSGVNAITVNSNFGGPTLVSSRAYNLIYRDGGPWVTIDSFKFAEFAYERPYLFGRTGYVLSEQDKELLADKTVEKAA

SEQ ID NO: 15361 - DNA, 828 bp, Unknown
  Obtained from environmental sample
  misc_feature (1)..(828): n is a, c, g, or t
ttgggaggcccaagcgggctaatcaacaataaggcaatagagttacnaggtgagataatagatgaataccggaacaccggcggcttcgacattatcggttcagggcgcaccaagatagaaacccccgaacagtttgcttcttctctggaaacggcaaaacaactaaacctcagcgcgctggtcgtcataggcggggacgattccaataccaacgcggccctgcttgcggaatacttcgccgaaaagggaacgcatattcaggtcatcggctgtccaaaaacaattgacggggatttaaagaatgaatacatcgaaacctcattcgggttcgatacggcatgcaagacctacagcgagctaatcgggaacattcaaagggatgcaaagagcgcaaaaaaatactggcactttataaaacttatgggccgctcggcaagccacattgcccttgaatgcgcccttcaaacccagccaaacatctgtttgatctcggaagaaatcgaagaaaaaaaaatatcccttgaccagattgtggaagatatctgcgcttccattgccaggagagccgaaaacagggagaacttcggtgtgattctgatacctgaagggctgattgaattcattcctgatattaaaaaactaattgaagagctgaacgatgtcattgccttgaacggcggagaaatttccaaattaacttcgctgatagatcagctctattggctgagccatgaaataacgcctgagtcatacaagcttcttcatagcctgcctccggatatttccagggaactgttaatgancagctcgtgccgatctgatccatga

SEQ ID NO: 15362 - protein, 275 aa, Unknown
  Obtained from environmental sample
  DOMAIN (1)...(256): Phosphofructokinase
  misc_feature (1)..(275): Xaa is any amino acid
MGGPSGLINNKAIELXGEIIDEYRNTGGFDIIGSGRTKIETPEQFASSLETAKQLNLSALVVIGGDDSNTNAALLAEYFAEKGTHIQVIGCPKTIDGDLKNEYIETSFGFDTACKTYSELIGNIQRDAKSAKKYWHFIKLMGRSASHIALECALQTQPNICLISEEIEEKKISLDQIVEDICASIARRAENRENFGVILIPEGLIEFIPDIKKLIEELNDVIALNGGEISKLTSLIDQLYWLSHEITPESYKLLHSLPPDISRELLMXSSCRSDP

SEQ ID NO: 15363 - DNA, 591 bp, Unknown
  Obtained from environmental sample
  misc_feature (1)..(591): n is a, c, g, or t
atgcaaacagactatcttagcgcatcggtggccgccgcaatcaagggcggcaaggtgctgctgcaatatttcaggaagctagacccagcgaccatcgaagaaaaatcaaaaaacgacctagtgacagaggccgaccgcgcctcagagcaaataatacgcgaagagctggctatgcgctttccctcccattcatttttgggcgaagagacgggcctgtcgggtacaagcgagatggtctggattgctgatcctttggatggcacgttgaactttgtccaaggcctgccgcaatggtgcatatcagtggccctctgggacgctgaaggacccatcatcggctgcgtctatgacccactgaggcgcgacctattcttggcgcaaaagggccttggcgcaaaatggcacaaagacgttgatgcaaataaagattacggagaagcctcttggccggatggccctagccaagcgcaggccatgaaagtttcaaagcatccggcactggacggagcatttttggccaccggctttgcataccaaatggcggacagattcccaaggtacataaaagcgcgtggagccaattttttatag

SEQ ID NO: 15364 - protein, 196 aa, Unknown
  Obtained from environmental sample
  DOMAIN (1)...(193): Inositol monophosphatase family
  misc_feature (1)..(196): Xaa is any amino acid
MQTDYLSASVAAAIKGGKVLLQYFRKLDPATIEEKSKNDLVTEADRASEQIIREELAMRFPSHSFLGEETGLSGTSEMVWIADPLDGTLNFVQGLPQWCISVALWDAEGPIIGCVYDPLRRDLFLAQKGLGAKWHKDVDANKDYGEASWPDGPSQAQAMKVSKHPALDGAFLATGFAYQMADRFPRYIKARGANFL

SEQ ID NO: 15365 - DNA, 474 bp, Unknown
  Obtained from environmental sample
  misc_feature (1)..(474): n is a, c, g, or t
ttgataactgccaggcccttgccgccngcttgtatcaaaaacggcttgacggtgctgacaggcggcacggacaaccatctgttcctggtcaacgtgcatgtgctgggcttaaccggacgccagtcagaaagcgccctccacgaatgtgcggttacgctgaaccgcaacagcatcccctttgatcccaacggcccctggtacacatccggcttgagaatcggcaccgccgcggtttcaactctgggcatgggaaaagcggaaatggacgagctgggaagtatcatcgcgctggtacttaaaaatacaagccaggcgcctgatgccagggacgtatcaaaaaagagcaaggccaaatacatcattaacgaaaaggccaaggccgaagccctggatcgtgtaaagaatcttcaagaccgtttcccggtgtacccggagctcgacctaaagttgcttaaagaagcgtttgtggagtaa

SEQ ID NO: 15366 - protein, 157 aa, Unknown
  Obtained from environmental sample
  misc_feature (1)..(157): Xaa is any amino acid
MITARPLPPACIKNGLTVLTGGTDNHLFLVNVHVLGLTGRQSESALHECAVTLNRNSIPFDPNGPWYTSGLRIGTAAVSTLGMGKAEMDELGSIIALVLKNTSQAPDARDVSKKSKAKYIINEKAKAEALDRVKNLQDRFPVYPELDLKLLKEAFVE

SEQ ID NO: 15367 - DNA, 342 bp, Unknown
  Obtained from environmental sample
  misc_feature (1)..(342): n is a, c, g, or t
atggtccgtggtgaaatatggtgggcggagcttccgcctcccagaggatcaagtcccgcaaagcgccgtcctgtgttaatcattcaaggcgacagttttaacagaagcagaataaacacggtaatctgcgctgtcattacttcaaatacagagttggcttcccttcccggaaatttactgcttgaaaaatcaatttccggtctagaaaaaacatcgacggttaattttacgcaaatttattctctcgataaacctgatttaattgaatatgtgacaatgcttccaaagttcatgcttgacaaagtagataacagtcttaagatggtgctggaaataaagtaa

SEQ ID NO: 15368 - protein, 113 aa, Unknown
  Obtained from environmental sample
  DOMAIN (2)...(111): PemK-like protein
  misc_feature (1)..(113): Xaa is any amino acid
MVRGEIWWAELPPPRGSSPAKRRPVLIIQGDSFNRSRINTVICAVITSNTELASLPGNLLLEKSISGLEKTSTVNFTQIYSLDKPDLIEYVTMLPKFMLDKVDNSLKMVLEIK

SEQ ID NO: 15369 - DNA, 384 bp, Unknown
  Obtained from environmental sample
  misc_feature (1)..(384): n is a, c, g, or t
atgagcgacacggcgcaaaatcgttacatgaacgggaacgcgccctcgtggtgccccggatgcagctacttcaccgtgctctccgccctcacggagtgcttcgacgagcgcggcgtcgcgccggacgagatatgcgtgatctccggaataggctgctcgtcgcggctgcccctgtttctgaacacgcacggcatgcacaccctgcacggcagaccgcttccggtcgccataggttcaaggctggcgcgccccgacatccctgtggtagtggcgacgggcgacggcgacctgctctccataggcgcggcgcacttcgtccacgccgcaagaaagaatttcgacatcacggtaatatgctttgacaacgcgcttgtaggccagtga

SEQ ID NO: 15370 - protein, 127 aa, Unknown
  Obtained from environmental sample
  DOMAIN (49)...(127): Thiamine pyrophosphate enzyme, C-terminal TPP binding domain
  misc_feature (1)..(127): Xaa is any amino acid
MSDTAQNRYMNGNAPSWCPGCSYFTVLSALTECFDERGVAPDEICVISGIGCSSRLPLFLNTHGMHTLHGRPLPVAIGSRLARPDIPVVVATGDGDLLSIGAAHFVHAARKNFDITVICFDNALVGQ

SEQ ID NO: 15371 - DNA, 300 bp, Unknown
  Obtained from environmental sample
  misc_feature (1)..(300): n is a, c, g, or t
ttgtcaaagcatattaccgtgatgtcgaaattctttcttgcggcgtggacgaagtgcgccgcgcctatggagagcaggtcgccgtcgcccgtcgccactaccacagggatgtcggggcgcgccagccttgaacctatggcgaccggaagcggtctgccgtgcagggtgtgcatgccgtgcgtgttcagaaacaggggcagccgcgacgagcagcctattccggagatcacgcatatctcgtccggcgcgacgccgcgctcgtcgaagcactccgtgagggcggagagcacggtgaagtag

SEQ ID NO: 15372 - protein, 99 aa, Unknown
  Obtained from environmental sample
  misc_feature (1)..(99): Xaa is any amino acid
MSKHITVMSKFFLAAWTKCAAPMESRSPSPVATTTGMSGRASLEPMATGSGLPCRVCMPCVFRNRGSRDEQPIPEITHISSGATPRSSKHSVRAESTVK

SEQ ID NO: 15373 - DNA, 417 bp, Unknown
  Obtained from environmental sample
  misc_feature (1)..(417): n is a, c, g, or t
atgcctaaatcgcggttttccgccagatttcaggacacgctccccaaagccgacctatgcgtcgtctcctggggcttcgacgcggctatgacgcgcatagcggtgtccgaaatgcgcaaacacggctttaaaatagcctgcctctacccgcgcctcctcttcccgttcgtcaacgggcattatatggagctgctgaatttttgcccgcgcatagccgttgtggagtcaaactacacggggcaattagcctctctgatacgtatgaataccgagatcaacccgatctccgtgaaaaaatacaacggcgagcctttcgccccggaagagatcgaggcggagctatgcggcatcattaatatggaaaaatttatatccgacatgagcaacgcaaacaacgacggagcggtgaaaacatga

SEQ ID NO: 15374 - protein, 138 aa, Unknown
  Obtained from environmental sample
  misc_feature (1)..(138): Xaa is any amino acid
MPKSRFSARFQDTLPKADLCVVSWGFDAAMTRIAVSEMRKHGFKIACLYPRLLFPFVNGHYMELLNFCPRIAVVESNYTGQLASLIRMNTEINPISVKKYNGEPFAPEEIEAELCGIINMEKFISDMSNANNDGAVKT

SEQ ID NO: 15375 - DNA, 765 bp, Unknown
  Obtained from environmental sample
  misc_feature (1)..(765): n is a, c, g, or t
gtgggaattcggagcgcgcttgaacaatttaaggcaaacgggaaaaaaatatgcgcgtacatttgcaatgccgacattgacgtttattgccttgcctccgtcgcggataaaattgtcatggacgatcttgggaacctgaacataatgggttatgccatcggcaggggatatgcgcgtcacgccctggataaacttggtataggcgtgcgggaattgcgttattttgagtataaatccgccggcgaaacttttacaagggattccatgtcggaagcggatcgcaggcagtacaatgattatcttgacgacacgtttaaccttacccgcgacaccttaaaaaaagcgcgtaactggacggatgaagaatttaactctgtcttaaacaacggttttctttactcggcaaggagcgcgcacgctgacggtcttgttgattttgtaggcggaaaagaagcggtatatcatgctgtctggcaagttgaggaaaatatcggcgtttctttcaaattgtacggaacgtcagattccagcataacgggcagcaaaaccgcgtattcgcttccgaaagcgcgtagtttcttcagaagagcaccgccggttgtcgccgtagtttacgcaaacggggaaacatccatgagacagggcatggaggcggtaaagcttgcgaaaattatcattgaattggggcaaaataaggaagttaaggcaatcgtaataaaagttatttcgccaggcggaagcgcggaagccgccgacccttgttga

SEQ ID NO: 15376 - protein, 254 aa, Unknown
  Obtained from environmental sample
  DOMAIN (9)...(165): Peptidase family S49
  misc_feature (1)..(254): Xaa is any amino acid
MGIRSALEQFKANGKKICAYICNADIDVYCLASVADKIVMDDLGNLNIMGYAIGRGYARHALDKLGIGVRELRYFEYKSAGETFTRDSMSEADRRQYNDYLDDTFNLTRDTLKKARNWTDEEFNSVLNNGFLYSARSAHADGLVDFVGGKEAVYHAVWQVEENIGVSFKLYGTSDSSITGSKTAYSLPKARSFFRRAPPVVAVVYANGETSMRQGMEAVKLAKIIIELGQNKEVKAIVIKVISPGGSAEAADPC

SEQ ID NO: 15377 - DNA, 408 bp, Unknown
  Obtained from environmental sample
  misc_feature (1)..(408): n is a, c, g, or t
ttggccgagaaattcggtaagaacataaatcttcttgccggagaaaaactcagtcttttactctctcttgcgccggttttagacgtagacggagctttttcccgtaaattaccccgtaaagaaaactttaattcgcatgaaaaactttccgctctgataaatcatttggatgatcttgctaagcctattatatggaaaaaaaactcaaaagagttgggatttttgggacttttcacggacggagacggaaattactggtttagggcttcacgcggtttctatacctgcttaaatgaaagcctttccagtcttgaatcattgattgacgagttaggcgaagaagtcgctcttgaacaaaagcatgttgtgaatcagtgttaccgcaggttatcggattatttggggtga

SEQ ID NO: 15378 - protein, 135 aa, Unknown
  Obtained from environmental sample
  misc_feature (1)..(135): Xaa is any amino acid
MAEKFGKNINLLAGEKLSLLLSLAPVLDVDGAFSRKLPRKENFNSHEKLSALINHLDDLAKPIIWKKNSKELGFLGLFTDGDGNYWFRASRGFYTCLNESLSSLESLIDELGEEVALEQKHVVNQCYRRLSDYLG

SEQ ID NO: 15379 - DNA, 432 bp, Unknown
  Obtained from environmental sample
  misc_feature (1)..(432): n is a, c, g, or t
ttggtagactactttatagccaatgatgcccccattgacggcgttggtttccagacccatataagcttcgatttcgatcctagtaacatttcaagggccattgacttggtgtatgcaaaaacaaggaaagatggaacgcatctgatgtcccaggtaaccgagctggatatgggtctttacaagaatgacaccgaaccagagctctcaggtgcagagttgagtaccaggttgacgaagcaggcaacattataccgccaactatttgacatatttaatgaaaagtatgacgcgggaaaactcgacatggtgttgctatggggtacagacgacggtcatagctgggttggcacctcgaaaggcagaaaaaattatccactactgtttgaccgaaattatcagccgaaagaagcgttcttggaactcgtgagatga

SEQ ID NO: 15380 - protein, 143 aa, Unknown
  Obtained from environmental sample
  misc_feature (1)..(143): Xaa is any amino acid
MVDYFIANDAPIDGVGFQTHISFDFDPSNISRAIDLVYAKTRKDGTHLMSQVTELDMGLYKNDTEPELSGAELSTRLTKQATLYRQLFDIFNEKYDAGKLDMVLLWGTDDGHSWVGTSKGRKNYPLLFDRNYQPKEAFLELVR

SEQ ID NO: 15381 - DNA, 342 bp, Unknown
  Obtained from environmental sample
  misc_feature (1)..(342): n is a, c, g, or t
atgaaaaactatacttacataaacccgctgatcgaggccataaagccgtccaacccgtatcggataatcctgttcggctcctacgccaacggaaccgcgacggaaaacagcgatatcgatatggtggtgatattggacaacgacgacgtagcgcgtacttatgatgaacggctgaggaaaaggctggacattaataagttggtaagagatataaattacaaagtggcgctcgatattttggtgtattcaagggcggagtacagaatcgtcaaagattgcggaaattatcttattgatgaaattgagaggaacggaaagatcgtatatgaaaaagacagttga

SEQ ID NO: 15382 - protein, 113 aa, Unknown
  Obtained from environmental sample
  DOMAIN (3)...(92): Nucleotidyltransferase domain
  misc_feature (1)..(113): Xaa is any amino acid
MKNYTYINPLIEAIKPSNPYRIILFGSYANGTATENSDIDMVVILDNDDVARTYDERLRKRLDINKLVRDINYKVALDILVYSRAEYRIVKDCGNYLIDEIERNGKIVYEKDS

SEQ ID NO: 15383 - DNA, 546 bp, Unknown
  Obtained from environmental sample
  misc_feature (1)..(546): n is a, c, g, or t
atgccgtttggcggaggcgcgacatatatggattttgactttggggtaagcctctttgacgataacgtaaaagtgcagggacaatacggattcatgactcaggacatatatgaatctcttggcggccagagcgcgatccgctacggaggagatgtaatcggagttaaaatacttgccaacgtttatactttgcctnttcgctctatattgggacctgactttgactggctattcgcttcattctccataggggcaaacttctcggcgtttaatttcacaaacaaggtaaatccgggttattcacctaattataagggggatactgtatattacactcagagcggaaaagccacatggctgagcgcgttattactgcaaattgaatttccaaaggtaaccattccaaagaagaaatttttaaggacgttcagcttgtttacggaagggcagctttggttcgtgcctaccgatgttaacgccgaacagatgggcatagaaacagtgatcccgcacataatgatgggtttaagagcttatatattttaa

SEQ ID NO: 15384 - protein, 181 aa, Unknown
  Obtained from environmental sample
  misc_feature (1)..(181): Xaa is any amino acid
MPFGGGATYMDFDFGVSLFDDNVKVQGQYGFMTQDIYESLGGQSAIRYGGDVIGVKILANVYTLPXRSILGPDFDWLFASFSIGANFSAFNFTNKVNPGYSPNYKGDTVYYTQSGKATWLSALLLQIEFPKVTIPKKKFLRTFSLFTEGQLWFVPTDVNAEQMGIETVIPHIMMGLRAYIF

SEQ ID NO: 15385 - DNA, 948 bp, Unknown
  Obtained from environmental sample
  misc_feature (1)..(948): n is a, c, g, or t
atgacagattcggccgaggctatcgattcatggtcatttatagtcgatcaggaaatggatattccgacagtgcagatagtccttcctgtggaagatgaagtaattacaaatgactttctggtatcaggggtaatgttcgacgacgacggggttaaacagtaccagtggagaatagattcagacccgtggcaagccaaggacgccgaatacggtttttacattcccatcgccctttcgacattggcggataacgaacatacggtaacggtaatcgccgaggatatatacggcgtaaaaagcaatcctgtaacgcggaaattccgcgtgtcgttaaaggaacctgccgcgacaatggacgcccctctttatgataccatattaaaagaaggaattgaacttaaagggacggcttccgacaggaacggcatcaaggatgtaaaagtttcttttgataacggcagctcgtttaacacagtaaaaggaagctatggaacggatgcggagacgatacagtggtcttatcagtttaacaccacgatattaaaagacggcgcgcatagcgtatttataagggtatgggacaggtatgaaataccggcgacttacgcgtttttgatcaatgttgacaatacccggcctgaaattatcatggatagcccgggagacggttcaattactgtgaataatatttcagtaatgggccgggtgctggatcccaatttgaatgaagtaaccctggagctcagaagcctggacggggttacaattcccgccaatctaagatcaagaaaacttgatgtaagctcaacgatcagggaaaatattgatatttcccgcatggccgacggacagtacaatgtcgcggttatcgctgtggacaaagccggaaacgtgacccggttgtcgcgtaacgtgcaaatggcgcggcagacgtacaaaactatatag

SEQ ID NO: 15386 - protein, 315 aa, Unknown
  Obtained from environmental sample
  misc_feature (1)..(315): Xaa is any amino acid
MTDSAEAIDSWSFIVDQEMDIPTVQIVLPVEDEVITNDFLVSGVMFDDDGVKQYQWRIDSDPWQAKDAEYGFYIPIALSTLADNEHTVTVIAEDIYGVKSNPVTRKFRVSLKEPAATMDAPLYDTILKEGIELKGTASDRNGIKDVKVSFDNGSSFNTVKGSYGTDAETIQWSYQFNTTILKDGAHSVFIRVWDRYEIPATYAFLINVDNTRPEIIMDSPGDGSITVNNISVMGRVLDPNLNEVTLELRSLDGVTIPANLRSRKLDVSSTIRENIDISRMADGQYNVAVIAVDKAGNVTRLSRNVQMARQTYKTI

SEQ ID NO: 15387 - DNA, 582 bp, Unknown
  Obtained from environmental sample
  misc_feature (1)..(582): n is a, c, g, or t
gtgggaggacagggattttctttcatggaggaaccatttttttgggcccgttcattttcccccccgggaacttcgggcaggtctggaggctcttccgttggagacgggaggancctcggcgtagtcaccttgatggggcgcacgttcatgcacgaatcgttagactgcccgttccgcttaggctttgcgccgattaacgaactgcgcgaacaaacaccgataatactcgtggacttccacgccgaagcgtcaagcgaaaaggcggcgctcgcccactacgtagacggtttggcaagcgccgtaatcggcacgcacacccacgtccaaacggcggatgaacggatactgcccaaaggaacggcgttcatcaccgacgccggaatgaccgggccggagaggtcgattatcgggatgaagcccgaaggggtaatcaaaaaatatctgttgcagacatacgtgcgatatgagccgagcgaggacggggcgatgatcaacggggtcatcatagaggttgacgacgggagcggaaaagcgttatcgataacgcgactgttcgaacatgtgacgcttatccaaagttaa

SEQ ID NO: 15388 - protein, 193 aa, Unknown
  Obtained from environmental sample
  misc_feature (1)..(193): Xaa is any amino acid
MGGQGFSFMEEPFFWARSFSPPGTSGRSGGSSVGDGRXLGVVTLMGRTFMHESLDCPFRLGFAPINELREQTPIILVDFHAEASSEKAALAHYVDGLASAVIGTHTHVQTADERILPKGTAFITDAGMTGPERSIIGMKPEGVIKKYLLQTYVRYEPSEDGAMINGVIIEVDDGSGKALSITRLFEHVTLIQS

SEQ ID NO: 15389 - DNA, 804 bp, Unknown
  Obtained from environmental sample
  misc_feature (1)..(804): n is a, c, g, or t
atggcgagggttttgagatgtttttcgaagcaccctttttcaggcggcttttcaattttcgccggactggaaactttgctggaaaaaatacaggctttttatttttccgacgacgacatcgcgtacctgcgaagcctcgggttttttgacgaagcctttctggaataccttgggaactttaagttttcaggcacaatctgggcgatggacgaagggacggtagtttttcccaacgagccgctaatcagggtttctggcggcctgcttgaatgtcagctcatcgaaggaatgctgcttaacactgtcaattttcaaagcctcatcgcgacaaaaaccgccagggtagcgcttgcctcaggcaaggcttccgtcgctgaattcggtctgcgccgggcccaggggccggacggcgctatgtcggcttccagggcggctttcataggcggagcctccagaacttcaaacgtccttgcgggaaaagagttcggcatccccgtcttcggaacaatggcccattcctgggttatggcctggccaacggaaatagaggccttcctggcctatgcggagctttacccggacaactccgtctttttaatagacacctacgataccctcaagagcggggcaaaaagcgcaatagaagcgggaaaagccctggcggcaaaaggaaaaaattttggcgtgcgcctggattcaggcgatatttattatctttctgtagaggtaaggaaaatgcttgacgcggctggtttgccaaacgcgacaatttcggtttcaacgacctggacgagtacgtcataa

SEQ ID NO: 15390 - protein, 267 aa, Unknown
  Obtained from environmental sample
  misc_feature (1)..(267): Xaa is any amino acid
MARVLRCFSKHPFSGGFSIFAGLETLLEKIQAFYFSDDDIAYLRSLGFFDEAFLEYLGNFKFSGTIWAMDEGTVVFPNEPLIRVSGGLLECQLIEGMLLNTVNFQSLIATKTARVALASGKASVAEFGLRRAQGPDGAMSASRAAFIGGASRTSNVLAGKEFGIPVFGTMAHSWVMAWPTEIEAFLAYAELYPDNSVFLIDTYDTLKSGAKSAIEAGKALAAKGKNFGVRLDSGDIYYLSVEVRKMLDAAGLPNATISVSTTWTSTS

SEQ ID NO: 15391 - DNA, 936 bp, Unknown
  Obtained from environmental sample
  misc_feature (1)..(936): n is a, c, g, or t
ttgataaaaagcgacgctgatgacagaaaagaaattacctgccagcccggatcaaaaatgaatcgggttgttggccacttcggctcccagaataactgtctggcagcggtcagggcaaacggtgaaaccctgtcgctttccgccaggcntgaggtaaactccactctggaaccggtctggattgacagtccggaaggcgaaagcatctaccgctgtaccctggctttcctgctcgcggcggcggcgggcaaagtgtttcccgataaaagcctatacatcggccattcgttgggaaacagctattactatacttttcttgaaggcgaagcgccggagaccgccgagataatgaagcttcaaagcaggatgaaagagctggttgaacaggatctgcccataaactgccgttacatggcctacgcggaagcaatggaaaccttcaccaaaaaccaccaggatgacactgcccttttgctaaacgaaaggagcgaagctaaggtaatggtaaacgaatgtgccggttttatcgatctttgcatatcgccgcttttaaaccgcaccgggcttcttgacatttttgagctaataccttacgagggcggctttctactgcgctttcccgccattggcagcggaaggcggcttgagccttttgaggacagcccgaaaattttttccgtatacaacgaatataaaaaatggggccgcatagtcggcgttcaatcggtaggaaggctgaaccgcctggtgtcggagcaggatatcagggaatacatccgtattgccgaagcctttcaggaaaaaaagctcgatgaaatcgccgggaaaatttacgaatgcaaagacacggtaaaggcgatccttatcgcgggcccgtcaagctccggaaaaacaaccaccgccaaaaggcttccatcgcccctcggccgattctga

SEQ ID NO: 15392 - protein, 311 aa, Unknown
  Obtained from environmental sample
  misc_feature (1)..(311): Xaa is any amino acid
MIKSDADDRKEITCQPGSKMNRVVGHFGSQNNCLAAVRANGETLSLSARXEVNSTLEPVWIDSPEGESIYRCTLAFLLAAAAGKVFPDKSLYIGHSLGNSYYYTFLEGEAPETAEIMKLQSRMKELVEQDLPINCRYMAYAEAMETFTKNHQDDTALLLNERSEAKVMVNECAGFIDLCISPLLNRTGLLDIFELIPYEGGFLLRFPAIGSGRRLEPFEDSPKIFSVYNEYKKWGRIVGVQSVGRLNRLVSEQDIREYIRIAEAFQEKKLDEIAGKIYECKDTVKAILIAGPSSSGKTTTAKRLPSPLGRF

SEQ ID NO: 15393 - DNA, 651 bp, Unknown
  Obtained from environmental sample
  misc_feature (1)..(651): n is a, c, g, or t
atggccgagtgtttgaggagtttgcaagacttcggcatacagtttgtgtttgttacggttcccgacccggcaagtgaagttggcatatccggcgcccaacaggctacctatgatatgatgccccgcttgattaaccagtacgggaaagacgctatatattttacaacaaataccgctctgcatgagccgatcataaagcgcgtgtatgagttgggcggtatgttccttaaccaggatgatatgtcgccgaatgtcggttatcccggagctctcgggctggaccttagcgcacaaatgggcgattggtggggcatgacacaggcaattgaaaaggttgttgtggccaatggacaaggcggaaaaatgggtacctgggcgtattcattcctttactgcggtaccacgggtcttttccagcttgcgaaggacatgattgaaggaaaaggttcaggtaatgttcaaaatgaccttttagcggcctatcaggctattacaccaggctgcaaatggctgccggagctctatacggatgccagtggtagaacgataaacaattactacctcctgtccatggaaacttacatctttggcaaaggctatacagacgttttgaatacggcaattcctgccaaatatttcaacattaagtaa

SEQ ID NO: 15394 - protein, 216 aa, Unknown
  Obtained from environmental sample
  misc_feature (1)..(216): Xaa is any amino acid
MAECLRSLQDFGIQFVFVTVPDPASEVGISGAQQATYDMMPRLINQYGKDAIYFTTNTALHEPIIKRVYELGGMFLNQDDMSPNVGYPGALGLDLSAQMGDWWGMTQAIEKVVVANGQGGKMGTWAYSFLYCGTTGLFQLAKDMIEGKGSGNVQNDLLAAYQAITPGCKWLPELYTDASGRTINNYYLLSMETYIFGKGYTDVLNTAIPAKYFNIK

SEQ ID NO: 15395 - DNA, 660 bp, Unknown
  Obtained from environmental sample
  misc_feature (1)..(660): n is a, c, g, or t
atgacaatgactgatattatcaataaaatcggctggcccaggcttattattggtatctttgtagtcgccctgtttattctttgccccattgtcggcatagattatcaattcgcgataaccgacacaataggacgtttcggcatgaatctggtgctgattttgtcgcttgtcccgatgatacaggccggctgcggcttgaactttggtattcctctcggcattgtgtcgggcgcgtttggtacagtctgcagcattgaacttcatgctaccggttttccgggcattcttgttgcggtcttgattggctgctcgtttgccgctgtggtcggcttgatatacggctttatcctaaacaggatcaagggcgatgaaatgatcatatcaacatatgtcggtatggcgtttatagcctttatgagccttggctggatcaagtttctcccgttcaagaacccgattctattgtatggcttcgggggtaacggatttaagccgcaaattactctgggccagaattggtcaagagttttagacaatatcctgcattttaaaatcggccctatcattgagattcctgttggcatgttgctattcggcgctctctgctgttttttgatgtgggtgtttntcagatccaagcttggtactcggccaatctga

SEQ ID NO: 15396 - protein, 219 aa, Unknown
  Obtained from environmental sample
  misc_feature (1)..(219): Xaa is any amino acid
MTMTDIINKIGWPRLIIGIFVVALFILCPIVGIDYQFAITDTIGRFGMNLVLILSLVPMIQAGCGLNFGIPLGIVSGAFGTVCSIELHATGFPGILVAVLIGCSFAAVVGLIYGFILNRIKGDEMIISTYVGMAFIAFMSLGWIKFLPFKNPILLYGFGGNGFKPQITLGQNWSRVLDNILHFKIGPIIEIPVGMLLFGALCCFLMWVFXRSKLGTRPI

SEQ ID NO: 15397 - DNA, 711 bp, Unknown
  Obtained from environmental sample
  misc_feature (1)..(711): n is a, c, g, or t
atggcggaacaattattgactgacaatgaattttccctgctgaggcttgtgccaacggtactgcgcgcccgcgattttcgcctgtataccaaaaacggacgcctggttgacctgtggcaaaacggcggcgcggcggtattgggccacacgccgccttccctgctgagggaattaaaaaatactgccagccggggactctatgccccctttccccattttttggaggggcgttaccttaaagccttgacccacgtttttcccggcaggcattttcatttttacgccgctcctccgccggaactgtatacgcttgccgctgaaggacgagctacactttggcggccttttcttgatccggcggctccgcttgccgcgccggaaaacgccccgccggttttgattcccgtagtgccgggcattcagggctggcgcggcggcttaccttacggactctgcgcgcttgccattaatcccgtgtttgaaaaaaccgcctcccttccccccggcgattttctttcgccggttctgttggcatgcgccgcgcggggcatatacgaccttatcgccgccgcgccgcagcgggcaaaccccgcatacccccgcatcacgcgggcgctcaaaagcaaccaatcaaacaccgttcaatggcagcgtcagggtttatatctgacaccgcgggaaaatcccctcgtgccgctcggccgaatctga

SEQ ID NO: 15398 - protein, 236 aa, Unknown
  Obtained from environmental sample
  misc_feature (1)..(236): Xaa is any amino acid
MAEQLLTDNEFSLLRLVPTVLRARDFRLYTKNGRLVDLWQNGGAAVLGHTPPSLLRELKNTASRGLYAPFPHFLEGRYLKALTHVFPGRHFHFYAAPPPELYTLAAEGRATLWRPFLDPAAPLAAPENAPPVLIPVVPGIQGWRGGLPYGLCALAINPVFEKTASLPPGDFLSPVLLACAARGIYDLIAAAPQRANPAYPRITRALKSNQSNTVQWQRQGLYLTPRENPLVPLGRI

SEQ ID NO: 15399 - DNA, 582 bp, Unknown
  Obtained from environmental sample
  misc_feature (1)..(582): n is a, c, g, or t
atgcgacagaaaaacataaatatcttcggcatagtctcattcaaaaaaacatcgaccgttgctgatgtattggagcgtattcgagtatgggcttccggcaacggggccgacgttatatatcatcccatacttgcggatcaacttccgttaagcgaacataccgaaacatcagaagcggtttttcttgacaagtgcgacgcaattgtctctgtcggcggggacgggacatttctctccgtggcgcggatgagcggattttccgaaaaacccatcgtgggaatgaatctcggcggacttggatttttgactgacatcggccctgaagatttagaagaacatcttggtaaaatcatgcgcggcgactacaccacaatcagccgcatggtattggaagcccgcgtaatacgcgataacacggaagttcaccgattcaaagcgttgaacgacgtatatgtaaacccgcgccaatatggccaaactgaacctctatctcccgcgggggggcggcgacgccctttatcacagatttctttccccgaaggaaaaaatggtcgccacgcccagggggcttttaaggggtaa

SEQ ID NO: 15400 - protein, 193 aa, Unknown
  Obtained from environmental sample
  DOMAIN (5)...(193): ATP-NAD kinase
  misc_feature (1)..(193): Xaa is any amino acid
MRQKNINIFGIVSFKKTSTVADVLERIRVWASGNGADVIYHPILADQLPLSEHTETSEAVFLDKCDAIVSVGGDGTFLSVARMSGFSEKPIVGMNLGGLGFLTDIGPEDLEEHLGKIMRGDYTTISRMVLEARVIRDNTEVHRFKALNDVYVNPRQYGQTEPLSPAGGRRRPLSQISFPEGKNGRHAQGAFKG

SEQ ID NO: 15401 - DNA, 849 bp, Unknown
  Obtained from environmental sample
  misc_feature (1)..(849): n is a, c, g, or t
ttgaggaacaggatgaaaaaccccgcgtacgcatcgttcaaagaaaagtacaaaagggagatggacgccatatccagtgagctggatcgtttctttgggcactacgagactgacagcgagacattccacgccgactaccagaagctgaagcaggctgagagcgtaagccgcgccgccaaggcggagctgacggtggccaacctgcgcttggtggtctccatagccaagaggtacacaaacaagggtctcttcttcttggacttgatccaggagggaaacataggtctgatgaaggcggtggacaagttcgagtacaagaggggcttcaagttcagcacgtacgccacttggtggattcgccaggccatcactagggccatatccgaccaagcgcgcaccatccgcatcccggtccacatgacggagaccatcaacaagatgacgcgcacgcagagggacttggtgcagaagttgggcagggagcctacctgcgaagagatagccaaggccatggaaatgccggtggccaaggtgcggaaagtgatgaaggtggcgcaggagcctatcagcctcgagacccccattggggaggaggaggacagccacttgggcgacttcatagaggacaagggcgtgctgtcccccatcgaccaggtgattcagcagcggatgaaggagagcgtgaacgatgtgctgaagacgctggccgagcgcgaggagaaggttctcaggatgcgcttcggtgtgggcgaggaggcaaaggagcacacgctagaagaggttgggagcgagttcgccgtcacccgcgagcgcatcaggcagatactcggccgatctgatcattgctaa

SEQ ID NO: 15402 - protein, 282 aa, Unknown
  Obtained from environmental sample
  DOMAIN (63)...(133): Sigma-70 region 2
  misc_feature (1)..(282): Xaa is any amino acid
MRNRMKNPAYASFKEKYKREMDAISSELDRFFGHYETDSETFHADYQKLKQAESVSRAAKAELTVANLRLVVSIAKRYTNKGLFFLDLIQEGNIGLMKAVDKFEYKRGFKFSTYATWWIRQAITRAISDQARTIRIPVHMTETINKMTRTQRDLVQKLGREPTCEEIAKAMEMPVAKVRKVMKVAQEPISLETPIGEEEDSHLGDFIEDKGVLSPIDQVIQQRMKESVNDVLKTLAEREEKVLRMRFGVGEEAKEHTLEEVGSEFAVTRERIRQILGRSDHC

SEQ ID NO: 15403 - DNA, 318 bp, Unknown
  Obtained from environmental sample
  misc_feature (1)..(318): n is a, c, g, or t
atggacttccgttatgcgctatccattgtttttgaagctcatatgccttatgtaagggaatcatgcaaagaaggtgatctgtctcaatccggcgaagaagaccgtttctttgaatatgttacggaaacaattcttccccttattgaagtgctggacaagcttgaaaatgatcatgtgcctttccacatggcgctggtaatttctccgattctatgccatctgctcaatgatgagcatctgcaaaaaaaatacctttattatattgacaagcagattgagttcggtaaacaggaactgaacgtactcaggccgaagtga

SEQ ID NO: 15404 - protein, 105 aa, Unknown
  Obtained from environmental sample
  misc_feature (1)..(105): Xaa is any amino acid
MDFRYALSIVFEAHMPYVRESCKEGDLSQSGEEDRFFEYVTETILPLIEVLDKLENDHVPFHMALVISPILCHLLNDEHLQKKYLYYIDKQIEFGKQELNVLRPK

SEQ ID NO: 15405 - DNA, 729 bp, Unknown
  Obtained from environmental sample
  misc_feature (1)..(729): n is a, c, g, or t
atgcattttttntacggcgctggttccatcctaagcccccttgccgcagggtacgttgcctccgccatgaattggcgcatgatatatctcttttcaatgccgctggtatttgtcttttttgttccgtcgatttttgcccgttttcccaaaactgagggggagaaaacaggactaaaaaaagccagtttctttaccgcccttaaaacgccgatggtctggatttttgccgccgtgctgggcctaatggtaggggtggaaatgtgttccccaaactgggcagggctttactttcaggatgtttataacctgagcgctgaaactaaaggggcggtttttgtttccaacttttatatcttttttactttgtcccgtcttttaagcggttttattatagaaaaaatcggatatatgcgctgtctttttattgctgcctctgcgacggttttagtttttattgttggttttattcttggcggcaagggtatttatgttcttccggttctgggtttttttattgcgatattctggcctacgcttttggcggcggctatgctctatttccgccaggattcggcggtaatgaccagcgcgattatcgttatcgcggggttaataaacggcggcatacaattcgttacgggtttgatcaaccgtttaatcgggccggcctggggctacaggagtggtgtcctttacgcggctttaattattgtcgcgcttttgttttaa

SEQ ID NO: 15406 - protein, 242 aa, Unknown
  Obtained from environmental sample
  SIGNAL (1)...(21)
  misc_feature (1)..(242): Xaa is any amino acid
MHFXYGAGSILSPLAAGYVASAMNWRMIYLFSMPLVFVFFVPSIFARFPKTEGEKTGLKKASFFTALKTPMVWIFAAVLGLMVGVEMCSPNWAGLYFQDVYNLSAETKGAVFVSNFYIFFTLSRLLSGFIIEKIGYMRCLFIAASATVLVFIVGFILGGKGIYVLPVLGFFIAIFWPTLLAAAMLYFRQDSAVMTSAIIVIAGLINGGIQFVTGLINRLIGPAWGYRSGVLYAALIIVALLF

SEQ ID NO: 15407 - DNA, 705 bp, Unknown
  Obtained from environmental sample
  misc_feature (1)..(705): n is a, c, g, or t
atgttaaaggctgttttcagaccaaatgagttggtaacgattggcgaaaagatcattattgacacgccgggttcatattccgaagtcgctcatttatccgccattgaggatgacgcggaagctcttgatgatgttgaggagtatacaggacctactgcggaagatctgcggcgcgaagcggaaatgtttaagactcaatgggaagaagaaaaagaacaaatgatttcttcggcaaaagcggaagccgaaaatattgttcaggcagctcagaacgcagcctttgcggaggttaaaagacagaccgatgaagctcaaatattaaaacagcaagcggaagatgaagcgcagaaaatacttgaagacgcaagattaaaagcaagtgaaatggaagccgatgtaaggcggtctttggacgctgaacgcaatgaggcaagagaaagcggcagaaaggaaggcaaggaagagggatacgccgaaggaaaagcggaagttgatcgccttatcgaaagaacccaagtagtgcttgaaagagcgcaggacaaaaggggagagatactaagcgattccgaaagagaaatagtttccttggtgcttttaattgcgcgtaaagttattaaagtgctttccgagaatcagcgcgacattatcatttccaatgtgattgaggctctgcgtaaagtaaaagcaaggggaatgtcatcataa

SEQ ID NO: 15408 - protein, 234 aa, Unknown
  Obtained from environmental sample
  misc_feature (1)..(234): Xaa is any amino acid
MLKAVFRPNELVTIGEKIIIDTPGSYSEVAHLSAIEDDAEALDDVEEYTGPTAEDLRREAEMFKTQWEEEKEQMISSAKAEAENIVQAAQNAAFAEVKRQTDEAQILKQQAEDEAQKILEDARLKASEMEADVRRSLDAERNEARESGRKEGKEEGYAEGKAEVDRLIERTQVVLERAQDKRGEILSDSEREIVSLVLLIARKVIKVLSENQRDIIISNVIEALRKVKARGMSS

SEQ ID NO: 15409 - DNA, 654 bp, Unknown
  Obtained from environmental sample
  misc_feature (1)..(654): n is a, c, g, or t
atgtcagatataagggttgaatatttttctaattcattaatgcgtccggttgcgtttgaaatgtatataccaaatgattttcgtactgatatacaaacgcaacataatccgtattatgacagaaaatgcaagacagtttttgtattacatggatttacaggttgggggaaaggttggaattatttatatgaactcgctgaaaagtttaattttgctttagtatttccttccggagaaaacagcttttatctcgactcggaagctaccaccggaaaatatggtactttcattggctcagagcttattaattatataagaaaaacctttgatctttgttgtgttaaagaagatacttttataagcggactttcaatgggaggttttggagctttgcatacaggacttgcttaccccgatactttcggtaaaattgttgctttatcatccgcattgattgtgcatggaatttccggtatgaagcccggtgaagataatggagtggcaaattattactattatcgtaatttttttggtgatcttgataacctaatcgaaagcgataataatcctgaaacactcgtaagaaaattgaatcagcaaaagaaagagattcctgaaatatacatggcttgcgggacagaagacttttattag

SEQ ID NO: 15410 - protein, 217 aa, Unknown
  Obtained from environmental sample
  DOMAIN (5)...(204): Putative esterase
  misc_feature (1)..(217): Xaa is any amino acid
MSDIRVEYFSNSLMRPVAFEMYIPNDFRTDIQTQHNPYYDRKCKTVFVLHGFTGWGKGWNYLYELAEKFNFALVFPSGENSFYLDSEATTGKYGTFIGSELINYIRKTFDLCCVKEDTFISGLSMGGFGALHTGLAYPDTFGKIVALSSALIVHGISGMKPGEDNGVANYYYYRNFFGDLDNLIESDNNPETLVRKLNQQKKEIPEIYMACGTEDFY

SEQ ID NO: 15411 - DNA, 318 bp, Unknown
  Obtained from environmental sample
  misc_feature (1)..(318): n is a, c, g, or t
atgttcggtcttcccgataaaacgataaatttaatcaatcaaatttttgaaaaatattcgggtatagaaaaggtattaatttacggttcgcgggcgagaggcgattaccgaaacggctcggatatcgacctgactataataggcgacgtttcgataaaagacagaatgcatatttcggagttgatttacgatttgcccattccgtatatgtgcgatttgtctatcctcaaaaacataaaaaacgagaatttggtcgagcatattgagcgcgttgggcaggttttttatgaaaaagataaggtttgtcaggtaaaataa

SEQ ID NO: 15412 - protein, 105 aa, Unknown
  Obtained from environmental sample
  DOMAIN (5)...(101): Nucleotidyltransferase domain
  misc_feature (1)..(105): Xaa is any amino acid
MFGLPDKTINLINQIFEKYSGIEKVLIYGSRARGDYRNGSDIDLTIIGDVSIKDRMHISELIYDLPIPYMCDLSILKNIKNENLVEHIERVGQVFYEKDKVCQVK

SEQ ID NO: 15413 - DNA, 324 bp, Unknown
  Obtained from environmental sample
  misc_feature (1)..(324): n is a, c, g, or t
ttgaccgaagcggaaaaaatgggtttaattaaatcgtttgaattttcgtttgaattggcttggaaattgatgaaggactttttagtttcaaaaggatttgttgaaataatcggctcaaaagattcaattaggcaagcgttttccgaaggtatcatcgaaaacggcgaaatctggatgaatatgattgaaagtagaaacgagacatcccacagttatgacgaagaagttgcggctaaggtaatcgccgatgtttccggttcttatgtagaggaactgaaaaaatttgccgcaactatgaaaaaatacagaacggagcgggaataa

SEQ ID NO: 15414 - protein, 107 aa, Unknown
  Obtained from environmental sample
  misc_feature (1)..(107): Xaa is any amino acid
MTEAEKMGLIKSFEFSFELAWKLMKDFLVSKGFVEIIGSKDSIRQAFSEGIIENGEIWMNMIESRNETSHSYDEEVAAKVIADVSGSYVEELKKFAATMKKYRTERE

SEQ ID NO: 15415 - DNA, 783 bp, Unknown
  Obtained from environmental sample
  misc_feature (1)..(783): n is a, c, g, or t
ttgggcggacttgaggatgctcaaaacgaggcaaacgccgttggagtgcgtttataccccggaatcgagataagtatcaactggaaaaaaggcgtgggcgtctgcggccttggccgcggcggggagatgcaccttttggggctgggcattaaaaccccaagccccgcttttctgaccgggatagctgaactgtcccgccgtcgtgaagagcgaaaccgtgaaattctggacaatatgaacgcgctgggtatagaggcaagctggaatgatattcttgccgaagcgggcttatctttggataatcccgccggcgctcccgtcaactcactttccataggaaggccgcattttgccaattttcttgtaaagaggagaatcgtcagaaaccgggatcaggcctttgcccgttatctaaagccgggtaaacccctgtacgtacccaaggcaggactcccctttgagcaagccgccgtccttatccgtgaatccggaggtatccctgtccttgcccatcccctgtcactttacgttgcctggggctgccttcccgatctggtgaaagtattgaaaagccaggggctgatgggcattgaggcatggcaccctattgccaaggcaagggcgtgccaccgccttgaagaaatgggcagaaagctcggcctgtatataaccgaaggcagcgattttcacgggagtacccgccttggccgttatctgggcatttccaacaagggccgggagataagcgacagcgtacttgaggggattccggaactggcgtaa

SEQ ID NO: 15416 - protein, 260 aa, Unknown
  Obtained from environmental sample
  misc_feature (1)..(260): Xaa is any amino acid
MGGLEDAQNEANAVGVRLYPGIEISINWKKGVGVCGLGRGGEMHLLGLGIKTPSPAFLTGIAELSRRREERNREILDNMNALGIEASWNDILAEAGLSLDNPAGAPVNSLSIGRPHFANFLVKRRIVRNRDQAFARYLKPGKPLYVPKAGLPFEQAAVLIRESGGIPVLAHPLSLYVAWGCLPDLVKVLKSQGLMGIEAWHPIAKARACHRLEEMGRKLGLYITEGSDFHGSTRLGRYLGISNKGREISDSVLEGIPELA

SEQ ID NO: 15417 - DNA, 381 bp, Unknown
  Obtained from environmental sample
  misc_feature (1)..(381): n is a, c, g, or t
ttgaaaaatgcccaaaaagggggggggggccccccccccccccccgggcaaacccaaaaaaatatcggaaaagggccgccccccccggtttttaaaaattttttctgggggagaaggccaagggctctcccacaaattaaaaaaaaaaagggagggccccccccccccaaaagagggggggggttacaaacccccccccccaaaaaaaacaacccccccgcgccccacaaaaaaagttgcccccgcgggcccccccccgagggaattttttcttgggggaggggggcggggcccgccctctcccctttcttctcccctttaataaaaaaaaaaaaaaaagggggggggggggggggaggaaaaaaaaaacaatttttttaa

SEQ ID NO: 15418 - protein, 126 aa, Unknown
  Obtained from environmental sample
  misc_feature (1)..(126): Xaa is any amino acid
MKNAQKGGGGPPPPPGQTQKNIGKGPPPPVFKNFFWGRRPRALPQIKKKKGGPPPPKRGGGLQTPPPKKNNPPAPHKKSCPRGPPPEGIFSWGRGAGPALSPFFSPLIKKKKKGGGGGGGKKKQFF

SEQ ID NO: 15419 - DNA, 315 bp, Unknown
  Obtained from environmental sample
  misc_feature (1)..(315): n is a, c, g, or t
atgcccaaaaagggggggggggccccccccccccccccgggcaaacccaaaaaaatatcggaaaagggccgccccccccggtttttaaaaattttttctgggggagaaggccaagggctctcccacaaattaaaaaaaaaaagggagggccccccccccccaaaagagggggggggttacaaacccccccccccaaaaaaaacaacccccccgcgccccacaaaaaaagttgcccccgcgggcccccccccgagggaattttttcttgggggaggggggcggggcccgccctctcccctttcttctcccctttaa

SEQ ID NO: 15420 - protein, 104 aa, Unknown
  Obtained from environmental sample
  misc_feature (1)..(104): Xaa is any amino acid
MPKKGGGAPPPPPGKPKKISEKGRPPRFLKIFSGGEGQGLSHKLKKKREGPPPPKEGGGYKPPPPKKTTPPRPTKKVAPAGPPPREFFLGGGGRGPPSPLSSPL

SEQ ID NO: 15421 - DNA, 549 bp, Unknown
  Obtained from environmental sample
  misc_feature (1)..(549): n is a, c, g, or t
atgttctggtgggggggctttccgccgggccacggtcgctttctgggggcggcaagcggcgttgtttttaccgcagcgctggcatttgcctttaccggcctgttcaaaatccacggcgcggtgcggccctttaccgagagcctgctcttttccggttacggccacctcaacctggcgcacctgtttatcgcggggatttttatcgccgcttccggcgcaatgatggaccttgcaatggacgttgccgccgcgatggacgaaatcaaaaaacagcaaccggcccttacccgcatgggccttatgcgttccggttttaccgtggcgcggcaggccgccggaaccatgtccacgaccctgctgcttgcctattccgccgaatacaccgcgatgattatgacctttatcgcccagggcgtccccctggaaaacgtaatcaacatggtgtgggtttcctccgaagtggtacacaccttggttggctgtttcggcctgatgctggtcgccccgcttaccgtatttgccgggggaatgttgttaagtaacaggtaa

SEQ ID NO: 15422 - protein, 182 aa, Unknown
  Obtained from environmental sample
  DOMAIN (12)...(178): YibE/F-like protein
  misc_feature (1)..(182): Xaa is any amino acid
MFWWGGFPPGHGRFLGAASGVVFTAALAFAFTGLFKIHGAVRPFTESLLFSGYGHLNLAHLFIAGIFIAASGAMMDLAMDVAAAMDEIKKQQPALTRMGLMRSGFTVARQAAGTMSTTLLLAYSAEYTAMIMTFIAQGVPLENVINMVWVSSEVVHTLVGCFGLMLVAPLTVFAGGMLLSNR

SEQ ID NO: 15423 - DNA, 984 bp, Unknown
  Obtained from environmental sample
  misc_feature (1)..(984): n is a, c, g, or t
ttgggggataccggaagcccggatcagcgcatcgtgaaatggccgcaattgccctgtccttattcatcgcaaaaaaacccttctgggacggcctggacaagaccgacaagagtggctttacgcctgcttttcacccattcaggagcaagaactgccgccgaccaattggcactttttagaatactggtctgtcttgcctttcgcgagctcggtcgtcccgttaacaaacaggctgaggaagaatcatttaatattatagagtcctgttataaagatgaaggctggtatgctgacggagtggatggcgcttatgatttatacaacccgatgggtttccatttttacggactcgtttacgtcgggctcgccagaaaccagaaccctgaacgggcggctcgttacgttgaacgggctaagctcttcgcaccccgctttgcccggtggttccgcgacgacggttcagttgttccgtacggacgcagcctgtgctaccgtttcgcggctcagtcttttttttccgcatgtgcctttgccggggtagaggctcttccctggggtacaatgaagcgcatcgttctccaggctttacggtactggttttccaggcccatattggacaacgggggaatcctctcggtcggttatgggtatccgaacttaatcatggcggatcactataattcgcccggttccccttattggggcctcaaggcgtttcttgttctcgccctggacgagaatcatcctttctggcaggcggaggaaacgcccttgccaaaccagcagcaaataacggcggataaaattcccggctttgttgtttcgcgtaacgccgatgacgtacagctcttttgcgcaggccgtatgccccctttcgagatgaaccatgccgcccagaagtactgcaagttcgcttattccgcccgcttcggtttttgcgtatcgcacggcaacgcaagcctgaacaggctcggccgaatctga

SEQ ID NO: 15424 - protein, 327 aa, Unknown
  Obtained from environmental sample
  misc_feature (1)..(327): Xaa is any amino acid
MGDTGSPDQRIVKWPQLPCPYSSQKNPSGTAWTRPTRVALRLLFTHSGARTAADQLALFRILVCLAFRELGRPVNKQAEEESFNIIESCYKDEGWYADGVDGAYDLYNPMGFHFYGLVYVGLARNQNPERAARYVERAKLFAPRFARWFRDDGSVVPYGRSLCYRFAAQSFFSACAFAGVEALPWGTMKRIVLQALRYWFSRPILDNGGILSVGYGYPNLIMADHYNSPGSPYWGLKAFLVLALDENHPFWQAEETPLPNQQQITADKIPGFVVSRNADDVQLFCAGRMPPFEMNHAAQKYCKFAYSARFGFCVSHGNASLNRLGRI

SEQ ID NO: 15425 - DNA, 540 bp, Unknown
  Obtained from environmental sample
  misc_feature (1)..(540): n is a, c, g, or t
atgaacggcaagcttgaccttacccgcgccgaatcggtaatggaactggtttccgcaagaacggacaaaggccgcggtaacgcgattaaccggctttccggcgtattggaaaaagagatcagcgcgataaagaaaacgctggtggaagttctgtccggcgcggagatttttcttgattattccgatgatgaaataagcgctgacgctgaggagatagccggccggcttcccggcgaaaagcccgcgcgggaggcgcttgcccgcctgcaaaaactcgcgcagtcatggcagttggaacgtatctatcaggaggggattctagcggtaatcgcgggacggcccaattcgggcaagtccagtctgttcaatttattgctaaaagaagaacgttctattgttacagaggttcccggcacgacccgcgactggattgaggcgtgggtttccattgaaggcataccggtgcgccttaccgacacagccggcctaagggaatcttccgatagggttgagaggaatcggcgtggaacgcagccgtga

SEQ ID NO: 15426 - protein, 179 aa, Unknown
  Obtained from environmental sample
  DOMAIN (106)...(178): GTPase of unknown function
  misc_feature (1)..(179): Xaa is any amino acid
MNGKLDLTRAESVMELVSARTDKGRGNAINRLSGVLEKEISAIKKTLVEVLSGAEIFLDYSDDEISADAEEIAGRLPGEKPAREALARLQKLAQSWQLERIYQEGILAVIAGRPNSGKSSLFNLLLKEERSIVTEVPGTTRDWIEAWVSIEGIPVRLTDTAGLRESSDRVERNRRGTQP

SEQ ID NO: 15427 - DNA, 423 bp, Unknown
  Obtained from environmental sample
  misc_feature (1)..(423): n is a, c, g, or t
ttgagcattcctgtgggtgcgcttgaactctatgaacgtatgggagcaatccccggacctgagtacaaaaaatggacaaaagatttttttaaggagataaatataaaaccttttgcaaaaagagaatcctattttgttggcggaacgtctgttgcgcttggaatgcttgttaaagaaatgcaaacttttgatgcaaatgccttagaaggagaatcggtttttgttgccgatattgaacgggttataatacatttaagcggtttgtcaaaagagttgagaaattcaatgcccggtttggagaagggcaggggagatattattatatgcggactttattggataaggtcactttgcgaaaaattgaaaatagattccataaaaatttcaacactgggtttaaggttcgggcttttgtgtgactaa

SEQ ID NO: 15428 - protein, 140 aa, Unknown
  Obtained from environmental sample
  misc_feature (1)..(140): Xaa is any amino acid
MSIPVGALELYERMGAIPGPEYKKWTKDFFKEINIKPFAKRESYFVGGTSVALGMLVKEMQTFDANALEGESVFVADIERVIIHLSGLSKELRNSMPGLEKGRGDIIICGLYWIRSLCEKLKIDSIKISTLGLRFGLLCD

SEQ ID NO: 15429 - DNA, 693 bp, Unknown
  Obtained from environmental sample
  misc_feature (1)..(693): n is a, c, g, or t
atgagtgaatattttacatcgtccgaagatgtttttaattggttatcaaaatttatcaatttagagagagggcagactccgaaaagttttaggattgatcggatggaatttttgacatgtcttgcgggggagcctcacaagcttatgccttccattcatatcgccggatctaaggggaaggggtctgtaacggggatgttagcttccatgttggcggctgcggggtaccgtgttgggcgttatatgtcgcctcatgttgttgatattcgtgagagaatttgttttaacgattcttattttagcgaagatgtttactgtgcggcgggtgacgaactgcgggatattgcggaaaaactgcctttggcggcaaacccgctttttgacccatcaacccccgacgggtgcgagcctacttattttgaacttttaacgctctttttcttcctgtgcgccaagcatgggaactgcaacgtaatggttgtggagacgggcatgggggggcggctggattctaccaatgtgcttgatccgctgttaagcgtaataacattaattgaattggaacatacgggcttcttgggcgatactatcgcgaagaatagcgcggagaaagcgggcatagttaaacagggcaagccgctggtttttgcgaagcagagcggagaggctcttgagatttttcaaaaaccgtaa

SEQ ID NO: 15430 - protein, 230 aa, Unknown
  Obtained from environmental sample
  misc_feature (1)..(230): Xaa is any amino acid
MSEYFTSSEDVFNWLSKFINLERGQTPKSFRIDRMEFLTCLAGEPHKLMPSIHIAGSKGKGSVTGMLASMLAAAGYRVGRYMSPHVVDIRERICFNDSYFSEDVYCAAGDELRDIAEKLPLAANPLFDPSTPDGCEPTYFELLTLFFFLCAKHGNCNVMVVETGMGGRLDSTNVLDPLLSVITLIELEHTGFLGDTIAKNSAEKAGIVKQGKPLVFAKQSGEALEIFQKP

SEQ ID NO: 15431 - DNA, 759 bp, Unknown
  Obtained from environmental sample
  misc_feature (1)..(759): n is a, c, g, or t
atgattataaagggcgagaactgcaccggcgtgtattcggctaacgagtacttgacaagaagcaatttgatgaaggcgtatatcgacgatccgtcaacgcctataatgaaaagcaagcgtgtcgtaacggtcggcggcgggaacgtggcaatggactccgcccgcacggcgctgcgcctcggggcggaaaagtcaatgatcgtataccgcaggagcgaagccgaaatgccggcgcgcgccgcggagattcatcacgcgaaggaggagggcatagaatttaacctcctctgcaatcccgtcgagataatcgcgggggagaacggcgcggtaacgggcgtaaagtgcgtgcgtatggaactcggcgagcccgacgcctcgggacgccgccgtccggtggaggtcaagggcagcgagtttgcgattgattgcgacgtggttgttatagccatcggcaacagccccaacccgctcatcccgaacacaacgccggggcttaaggttaacgagaagcgcgggacgataatcgcaaacgaagccgacgggcgcacgttgaaacggggagtgtacgctggcggggacatagtaacgggagcggccacggtgatcctcgcgatgggcgcggggaagacggcggcggagagtatcgcgttagacttgacgccggatcccggccttgaagatttgccgccgtatttgcggcgcgttaattattcaggtccttcgtttgatgggaatgtaggtggatcaaaaagattttga

SEQ ID NO: 15432 - protein, 252 aa, Unknown
  Obtained from environmental sample
  DOMAIN (40)...(151): Pyridine nucleotide-disulphide oxidoreductase
  misc_feature (1)..(252): Xaa is any amino acid
MIIKGENCTGVYSANEYLTRSNLMKAYIDDPSTPIMKSKRVVTVGGGNVAMDSARTALRLGAEKSMIVYRRSEAEMPARAAEIHHAKEEGIEFNLLCNPVEIIAGENGAVTGVKCVRMELGEPDASGRRRPVEVKGSEFAIDCDVVVIAIGNSPNPLIPNTTPGLKVNEKRGTIIANEADGRTLKRGVYAGGDIVTGAATVILAMGAGKTAAESIALDLTPDPGLEDLPPYLRRVNYSGPSFDGNVGGSKRF

SEQ ID NO: 15433 - DNA, 954 bp, Unknown
  Obtained from environmental sample
  misc_feature (1)..(954): n is a, c, g, or t
atgacagattcggccgagggctacgacatacccggaatcggcttcgacgccgagagctgcggggtgctgatatcggtgcaccgccagtcgccggacatcgctcagggcgtgaacgtggggcaggggcttcacaaggagcagggcgccggcgaccaggggatcatgttcggatacgcctgcaacgagaccaaggtctacatgccgctggccatctactacgcccaccggttggtcgaagagctcacggcgctgcgggagaagggcaagataccctacctgcgccccgacgccaagtcgcaggtcaccgttgagtacgaaggcttcaagcccaagcgcatagacaccgtcgtcctctccacccagcacgacgaagaggccaagcacgccaccataaagaaagacatgatagagaaggtcattaagaaagtcattccggcgaagcttttggacgcaaagaccacctaccacatcaacccgaccggcaagttcgtggtcggcggcccccacggggacacgggggtgacggggcgtaagattatagtggacacctacggcggctacggcgcccacggcggcggggctttctccggcaaggacccctccaaggtggacagaagcgccgcctacgcggcccgctgggtggccaagaacttggtggcggcgggcgtggcgacgcgctgcttgatccagctctcctacgccataggcgtggccaagccgatctcgatccacgtggacacctacggcacgggcaaaatcgccgacactgagatagtgcggatcataaacaaactgttcgacctgaccncctccggcataatcaagcgcctgaacctaaagcgcccgatttacagggagacggcgaggaacgggcacttcggccgcgaactgccggagttcacctgggaggcgctggatatggcggacaagattaggaaagaagcgaaactgtag

SEQ ID NO: 15434 - protein, 317 aa, Unknown
  Obtained from environmental sample
  DOMAIN (45)...(163): S-adenosylmethionine synthetase, central domain
  misc_feature (1)..(317): Xaa is any amino acid
MTDSAEGYDIPGIGFDAESCGVLISVHRQSPDIAQGVNVGQGLHKEQGAGDQGIMFGYACNETKVYMPLAIYYAHRLVEELTALREKGKIPYLRPDAKSQVTVEYEGFKPKRIDTVVLSTQHDEEAKHATIKKDMIEKVIKKVIPAKLLDAKTTYHINPTGKFVVGGPHGDTGVTGRKIIVDTYGGYGAHGGGAFSGKDPSKVDRSAAYAARWVAKNLVAAGVATRCLIQLSYAIGVAKPISIHVDTYGTGKIADTEIVRIINKLFDLTXSGIIKRLNLKRPIYRETARNGHFGRELPEFTWEALDMADKIRKEAKL

SEQ ID NO: 15435 - DNA, 789 bp, Unknown
  Obtained from environmental sample
  misc_feature (1)..(789): n is a, c, g, or t
atgagcaagcgcaagctgctggaactggtaaaaacaaatgccgtaacaggctgggacgacccgcgtatgccaaccatttgcggaatgcgtcgtcgtggttacacgcccgaaagcatccgtatgtttgccgaaaaagtaggcgtggccaagcgcgacaatactattgacttgtcgctcctcgaatggtgcgtgcgcgaagaccttaacaaacgcgccaaccgctatatggcagtgctcaatccggtgaaagtagtgattacaaactaccccgaaggacaggtggaaatgatgcacgccgtaaacaatcccgaagacgaaagcgccggcaaacgtgaagtgcctttctctcgcgagctttacattgaacacgacgatttcatggaaaacccgccgaaaaaatatttccgtctttcgccgggtaacgaagtgcgcctgaagtatgcgtatatcattaaatgcgaagaagtgattaaggacgaacagggcaatgtgaaagaactgcgttgtacttatgaccccgaaactcgtagcggaagtggcagtacccgccaggtgaaaggtaccattcactgggtatcggctgcgcaggccgtgcctgccgaagtgcgcctgttcgaccgcctgttcaccgagccgcacatggacnatatccccgatgacaaagattataagggatacctcaacccacagtcgttacaggtagttaaggcatacctcgaacctgcgttgaaaagctttgcaccccgcgacaatgtgcaattcgagcgtctgggttactttgntccctga

SEQ ID NO: 15436 - protein, 262 aa, Unknown
  Obtained from environmental sample
  DOMAIN (72)...(261): tRNA synthetases class I (E and Q), anti-codon binding domain
  misc_feature (1)..(262): Xaa is any amino acid
MSKRKLLELVKTNAVTGWDDPRMPTICGMRRRGYTPESIRMFAEKVGVAKRDNTIDLSLLEWCVREDLNKRANRYMAVLNPVKVVITNYPEGQVEMMHAVNNPEDESAGKREVPFSRELYIEHDDFMENPPKKYFRLSPGNEVRLKYAYIIKCEEVIKDEQGNVKELRCTYDPETRSGSGSTRQVKGTIHWVSAAQAVPAEVRLFDRLFTEPHMDXIPDDKDYKGYLNPQSLQVVKAYLEPALKSFAPRDNVQFERLGYFXP

SEQ ID NO: 15437 - DNA, 888 bp, Unknown
  Obtained from environmental sample
  misc_feature (1)..(888): n is a, c, g, or t
atggaaaaattcggtaaaaacggcgaagtgctgctggattattcggtttacgatgccttgcgaggcggctttgacagagtggtgtttatcatcagaaaggatctggaaaaggactttagcgaggccgtgctggcccgcatgaaagggaaggtaaattacaagcttgcctatcaggagctgggcagccttattccgccggatatttttgaaagagcgaaaaaggcaggcaggagcaagccctggggaacagcccatgccctgttgtgcgcagcggagcaaattgactcgccttttgcggtgatcaacgccgatgatttttacgggcgggaagcttttgccgtaatgggcaaattccttgcggaaagcggggataaagagggcgcgatagtgccgtacgtgctggaacccactttaagcaagacgggaaccgttgccaggggagtctgcaaaatatcagacggctacatcgtctctattgatgagctaaccgcgattgaaaaaaaggaaggcgtgatttttaacactggacctgatggcacaaaacaagcgctctattctgacactccggtctccatgaattttctggcttatcccgacagcatactcccaaggttcaagcaatactttgatgattttatttctacgtccggcggagagttaaaaagtgaatgttaccttcccaaagcgtcggactggtttatcaaaaacggttacctaagaatgcgcgttcttaacgcggactcggagtggttcggcgtaacttataaggaagacaaagacatggctatcaaacgccttacggagcttaccagtcagggcgtttaccccgattcgctgtggagccaggaaattatcatgaagaagaacagtaaaagcaaatcagcgtaa

SEQ ID NO: 15438 - protein, 295 aa, Unknown
  Obtained from environmental sample
  misc_feature (1)..(295): Xaa is any amino acid
MEKFGKNGEVLLDYSVYDALRGGFDRVVFIIRKDLEKDFSEAVLARMKGKVNYKLAYQELGSLIPPDIFERAKKAGRSKPWGTAHALLCAAEQIDSPFAVINADDFYGREAFAVMGKFLAESGDKEGAIVPYVLEPTLSKTGTVARGVCKISDGYIVSIDELTAIEKKEGVIFNTGPDGTKQALYSDTPVSMNFLAYPDSILPRFKQYFDDFISTSGGELKSECYLPKASDWFIKNGYLRMRVLNADSEWFGVTYKEDKDMAIKRLTELTSQGVYPDSLWSQEIIMKKNSKSKSA

SEQ ID NO: 15439 - DNA, 393 bp, Unknown
  Obtained from environmental sample
  misc_feature (1)..(393): n is a, c, g, or t
ttgagatttttttccactatccctaaaaaaaaattcccttggcagccgcgattagagcctctggctaaggctctgctaaaaaaagaaaaaaagaatagcattgtaaacattgttctttgcgatgattctatgcaaagaaagctgaaccgagattaccgcaaacttgaccgcgtaaccgatgtactttcttttgcttgggaagatccgaattttttaggtgaaatatatatagccgaaggtcaggttaaaaagcaggctcccctctatggcaattcctattacagagaattaaaacgagtacttgtacacgggcttttacacttgtgcggctatgatcatcacagtaaagcggagcgtaaaattatgagggaaaaggagaatttttgggtatag

SEQ ID NO: 15440 - protein, 130 aa, Unknown
  Obtained from environmental sample
  DOMAIN (40)...(126): Uncharacterized protein family UPF0054
  misc_feature (1)..(130): Xaa is any amino acid
MRFFSTIPKKKFPWQPRLEPLAKALLKKEKKNSIVNIVLCDDSMQRKLNRDYRKLDRVTDVLSFAWEDPNFLGEIYIAEGQVKKQAPLYGNSYYRELKRVLVHGLLHLCGYDHHSKAERKIMREKENFWV

SEQ ID NO: 15441 - DNA, 732 bp, Unknown
  Obtained from environmental sample
  misc_feature (1)..(732): n is a, c, g, or t
atgtttaaaaaattcacttggttatttgtttattnngctatttcctctttgacttgggctcaggaagccaggccggttatacgctttactccctttgtctcccaggtaagcattgaagagacccgttttattgaatctttgatccagtcttatatctcggatacgggcgagctgatctttagttacgacgacattccccctgacgcgtatctgtcaggcggaggttttttacccggttcctggaacaaaacccccgattatgtcctttcggggagcatctaccttgaacggaaaatccggatttttacactggaaattcgaaatacccatactaatgaaattaccaaaaccaccacggaacacaaaacagccggggatcttgttttaaaatcccgttcgctggtcgaaagtatcatcaagtttccggtactttccgaaatggaatcggcggcgataaacgaaaccggacgggaaatcccgcgaattattaccgaaaacagcatagccggaacatggcggggagaaccggggatagagattatccgccttcaaagcggagggcggggaacggccttcttttcctcgggagtacagatgaacctaagatacgctatcgaaggcaatacccttaaaatttggcaaaactcgcccaatgccgaacgcttttattatccaaatccgcctgaaatcgctaaactgcttccgaactcggccgatctgatcattggttaa

SEQ ID NO: 15442 - protein, 243 aa, Unknown
  Obtained from environmental sample
  SIGNAL (1)...(20)
  misc_feature (1)..(243): Xaa is any amino acid
MFKKFTWLFVYXAISSLTWAQEARPVIRFTPFVSQVSIEETRFIESLIQSYISDTGELIFSYDDIPPDAYLSGGGFLPGSWNKTPDYVLSGSIYLERKIRIFTLEIRNTHTNEITKTTTEHKTAGDLVLKSRSLVESIIKFPVLSEMESAAINETGREIPRIITENSIAGTWRGEPGIEIIRLQSGGRGTAFFSSGVQMNLRYAIEGNTLKIWQNSPNAERFYYPNPPEIAKLLPNSADLIIG

SEQ ID NO: 15443 - DNA, 918 bp, Unknown
  Obtained from environmental sample
  misc_feature (1)..(918): n is a, c, g, or t
ttggactatgtattaatcgaagacatcccaactacaactattcactacttactacccactatattctggcggaagcttcgtttgcccgcgtactacaaaaccgatacngaatataaaatcgtatggcgcaaaaaaggagcggaacttaaaggcattcaatacgagccgttgttcccttacttcaaagacgctcctaacgcgttccgcactttcctcggcgattttgttacaaccgaagacggcacaggcatagtgcataccgcgccgggattcggcgaagacgacgcccgcgtactcaaggggacgggtattcccgttatctgcccggtagacgaagaatgtaaatttaccgccgaagtttccgattacgcgggattgtttgttaaagacgcggacaaggcgatcatggaaaggcttaaggcagaaggaaaacttgtaaagcgcgatcagatacttcactcttatccgcattgctggcggtgcaaaagcccgctgatttaccgcgccgtaggttcatggtttgtcaatgtggaaaaaataaaacaggatatgttagacgcaaacagccaaatctactgggttcccgaacacatcaaggagggcaggttcggcaaatggctggaaggcgcgcgcgattgggcaatcagccgtaaccgctattggggcaaccccattcccatttggcgttgtcccgactgcggcaaaatcatctgcgtaggaagccgcgccgaattaaaagaactttccggcgtataccccgaagacctccataaacattttgttgatgacattaccattccatgctcctgcggcgcgaaaatgaagcgcgtcccggaagttttagactgctggtttgaatccggcgccatgacttacgcccagaatcattacccgttgagaacactcggccgaatctga

SEQ ID NO: 15444 - protein, 305 aa, Unknown
  Obtained from environmental sample
  DOMAIN (2)...(305): tRNA synthetases class I (I, L, M and V)
  misc_feature (1)..(305): Xaa is any amino acid
MDYVLIEDIPTTTIHYLLPTIFWRKLRLPAYYKTDTEYKIVWRKKGAELKGIQYEPLFPYFKDAPNAFRTFLGDFVTTEDGTGIVHTAPGFGEDDARVLKGTGIPVICPVDEECKFTAEVSDYAGLFVKDADKAIMERLKAEGKLVKRDQILHSYPHCWRCKSPLIYRAVGSWFVNVEKIKQDMLDANSQIYWVPEHIKEGRFGKWLEGARDWAISRNRYWGNPIPIWRCPDCGKIICVGSRAELKELSGVYPEDLHKHFVDDITIPCSCGAKMKRVPEVLDCWFESGAMTYAQNHYPLRTLGRI

SEQ ID NO: 15445 - DNA, 432 bp, Unknown
  Obtained from environmental sample
  misc_feature (1)..(432): n is a, c, g, or t
atgaaaaacactgtgatttttgaccggaaatttttcaagtttattctggtcggaataatcaacactattatcggctcggtgataatgtttttattgtataacgcagcgcatctgaattactggctttcttctgcctgtaattattttttttccagtgttttaagttttttcctgaacaagtattttactttcaatgtccggtattggtcggcgtttatggttattgcatttgttatgacgattgtaatttcatatttaatttcttacggcatatcanaacccgctatgaattatttgttaaaggacagcccgcanaanatccgtgaaaataccgcgctttttaccggaatgtgtttatttacgggaataaattatctgggacagcgtttgattgtttttaaaaacaaagaggtagtaaaaagtaatgaataa

SEQ ID NO: 15446 - protein, 143 aa, Unknown
  Obtained from environmental sample
  DOMAIN (13)...(133): GtrA-like protein
  misc_feature (1)..(143): Xaa is any amino acid
MKNTVIFDRKFFKFILVGIINTIIGSVIMFLLYNAAHLNYWLSSACNYFFSSVLSFFLNKYFTFNVRYWSAFMVIAFVMTIVISYLISYGISXPAMNYLLKDSPXXIRENTALFTGMCLFTGINYLGQRLIVFKNKEVVKSNE

SEQ ID NO: 15447 - DNA, 321 bp, Unknown
  Obtained from environmental sample
  misc_feature (1)..(321): n is a, c, g, or t
ttgggaagaatgatacaattcgcctttcaaggtattacttcattttcaataaagccattacgcttgataacccttctgggcgttttactntttgccgtcagtattgcgatgattgcgtatttttttatcaggtatttttccggtcatacaatatccggctgggcaagtatcgcctgttccctttggggaataggcgggctgatccttttttccatcggtattgtcggtgaatatattgggaagatatatctggaggcaaaacgccgtcccagataccatgtagagcaatttttattcccgaggggaaaaaatgaagaataa

SEQ ID NO: 15448 - protein, 106 aa, Unknown
  Obtained from environmental sample
  misc_feature (1)..(106): Xaa is any amino acid
MGRMIQFAFQGITSFSIKPLRLITLLGVLLFAVSIAMIAYFFIRYFSGHTISGWASIACSLWGIGGLILFSIGIVGEYIGKIYLEAKRRPRYHVEQFLFPRGKNEE

SEQ ID NO: 15449 - DNA, 567 bp, Unknown
  Obtained from environmental sample
  misc_feature (1)..(567): n is a, c, g, or t
gtgggtaccggcgttaccccggctatatacgaaataaccgggcatggggaataccccatttcggcgtatggaatgcaggatgtggtggaaagggaaaatttcactctgaaatcactgaacctccttgttgaggcaattccatccgacgcttccgctctgattctgcttaatcctctaagggatctggcggcttccgaagcggagaaaatcctggactaccttgggcggggaggccgtcttctgataatagcgaattatcaaataagggaactcacctgccttaacgaagtgttggcaagctacggactcgcttttacatacggaattgttcatgagacagacccatattatatagccgttgatgatagcaccgaatggccggatttatcggatcatgaaattaccatgcccctcgcggacaagacaaaaacaccggtggttctggttgaagcaatggcgctttcattactggataccaaacggcggtctgttgaaaatacgccgctaatgacttcgtctcgcgccgcttttctccgtaccaatctggatgaaaaatcaaacgtttaa

SEQ ID NO: 15450 - protein, 188 aa, Unknown
  Obtained from environmental sample
  misc_feature (1)..(188): Xaa is any amino acid
MGTGVTPAIYEITGHGEYPISAYGMQDVVERENFTLKSLNLLVEAIPSDASALILLNPLRDLAASEAEKILDYLGRGGRLLIIANYQIRELTCLNEVLASYGLAFTYGIVHETDPYYIAVDDSTEWPDLSDHEITMPLADKTKTPVVLVEAMALSLLDTKRRSVENTPLMTSSRAAFLRTNLDEKSNV

SEQ ID NO: 15451 - DNA, 300 bp, Unknown
  Obtained from environmental sample
  misc_feature (1)..(300): n is a, c, g, or t
ttgggacaccggctgaccctccctggactggacggggatctggaatttgagacgcccaagggcacgcaaagcggggcggtgttccgcctgcccggcaagggactgccctatccgggccagaaccgggtgggcgatctgctcattgagatcacggtcgctaccccaacgaatctggatgcccggcaggaagccctgctgcgcgaattcgctgaactggaagacagcaagcccctgaaaaacgtcaaaaaaatgatgcgcaagctgggcaaggccatgggcatggaaggcgtggaaagctga

SEQ ID NO: 15452 - protein, 99 aa, Unknown
  Obtained from environmental sample
  DOMAIN (2)...(70): DnaJ C terminal region
  misc_feature (1)..(99): Xaa is any amino acid
MGHRLTLPGLDGDLEFETPKGTQSGAVFRLPGKGLPYPGQNRVGDLLIEITVATPTNLDARQEALLREFAELEDSKPLKNVKKMMRKLGKAMGMEGVES

SEQ ID NO: 15453 - DNA, 411 bp, Unknown
  Obtained from environmental sample
  misc_feature (1)..(411): n is a, c, g, or t
gtggttttatcgtatgatatggatatgactattagcaaacgcataagacacgtacgacagacactcaatatgtcgcaggtggaatttgcgaaagcgatccatataagcaacgggtatatagctgagcttgaatgtgagcatcgaaaggtcaacgaccgtattatccatctgatttcgctgactttcggcgttaatgaaaaatggctaaaaaccggcgaaggcgacatgttttttaaaaccctgggggaaaagctccagcgcatggtaatcctgttcaacgagttacccccaaaattccaggactatgtaatgcagcaaatcgaacagcttttgaatgtaacaagcaaagaacccgtgaattctgcggaaataccgccggaaataccgaatgatccctctgtacaagcttga

SEQ ID NO: 15454 - protein, 136 aa, Unknown
  Obtained from environmental sample
  DOMAIN (15)...(69): Helix-turn-helix
  misc_feature (1)..(136): Xaa is any amino acid
MVLSYDMDMTISKRIRHVRQTLNMSQVEFAKAIHISNGYIAELECEHRKVNDRIIHLISLTFGVNEKWLKTGEGDMFFKTLGEKLQRMVILFNELPPKFQDYVMQQIEQLLNVTSKEPVNSAEIPPEIPNDPSVQA

SEQ ID NO: 15455 - DNA, 696 bp, Unknown
  Obtained from environmental sample
  misc_feature (1)..(696): n is a, c, g, or t
ttgctcgtgcaattaacccgcatgatacaagggaaacaatttccccttaaatccgaagattttctaacagaaaataaaggtcaagtcgccggtctcggtggcggcaaccttaaaaaaattcttaacgaacacggcattactcaaattctcgcctccgagggaggtcgtactagtcgtggtaatatgggcttgatgataaagtatatagagtttttgaatgactggaacaaagatgaaacaatagaatttaagacggttgagcagttttgggctgagcaagtattggaatattttagaaatcaaccgtttactttaagcaccgacgcatcacgaacaatagccgcaagtcttgatgaactctttgaacaagtacgaaaacgacaaaagcaaaatcctggaacgcaatatttagggattatgttacagcaccttgtggccgctaaattgtctatcattttaccgccggaaaagatagaaatccacggtgcctcagtcgctgattcacctacggaacgaagtggtgattttgttatcaataacactattatacattgcacaacagcaccaggcgattctcttattcaaaagtgtaaattaaacataagagccggttgttttccggtgattataactatttttgaccgtgtaaaaaacgcttatgacttagccgccgacgcggaaatttcggcagagtaa

SEQ ID NO: 15456 - protein, 231 aa, Unknown
  Obtained from environmental sample
  misc_feature (1)..(231): Xaa is any amino acid
MLVQLTRMIQGKQFPLKSEDFLTENKGQVAGLGGGNLKKILNEHGITQILASEGGRTSRGNMGLMIKYIEFLNDWNKDETIEFKTVEQFWAEQVLEYFRNQPFTLSTDASRTIAASLDELFEQVRKRQKQNPGTQYLGIMLQHLVAAKLSIILPPEKIEIHGASVADSPTERSGDFVINNTIIHCTTAPGDSLIQKCKLNIRAGCFPVIITIFDRVKNAYDLAADAEISAE

SEQ ID NO: 15457 - DNA, 477 bp, Unknown
  Obtained from environmental sample
  misc_feature (1)..(477): n is a, c, g, or t
atgttgaatttatcaactattgcggaaacatgcggcaaagacgttaagaccattggcgcatggctgtctgttttggaatcttgcgggcttgtttatttattggaaccctactataacaatttcaacaaaaggctaattaaaacgccgaaactctattttttagacacaggtctcgcctgttggcttttaggctggaatactcccgaacagcttgtaaacggggctatgtgggggcatatttttgaaacttttgttttcggagaaattttaaaaagctattacaacgacggcatcgttaaaccgccgctgtattattatcgcgacaaagataaaaacgaaatagacctcttgattaacaacggcgattttttgtgtccgattgaaataaaaacaacaagcgaccccacaaaatcaatggtacgcgcttttcaccttgttaataacattcccgaaaaaaacatgaaacgggagctctga

SEQ ID NO: 15458 - protein, 158 aa, Unknown
  Obtained from environmental sample
  misc_feature (1)..(158): Xaa is any amino acid
MLNLSTIAETCGKDVKTIGAWLSVLESCGLVYLLEPYYNNFNKRLIKTPKLYFLDTGLACWLLGWNTPEQLVNGAMWGHIFETFVFGEILKSYYNDGIVKPPLYYYRDKDKNEIDLLINNGDFLCPIEIKTTSDPTKSMVRAFHLVNNIPEKNMKREL

SEQ ID NO: 15459 - DNA, 327 bp, Unknown
  Obtained from environmental sample
  misc_feature (1)..(327): n is a, c, g, or t
atggcatatagcattgattttattaaaagggcagtggcttacagacaagaaggacatacctttgcgcaattgcgcgaggcatttgatgtctcctccgcaacatattacgactgggaagctaagctaaataacgggcattttgatgcaatagtcaagcgcgagcgccatcggaaaatagacaaagaggcgcttataaaggcagtagcggaaaaacccgacgctttccttaaggaatatgcggaacaattcaattgcacggcgactgccgtcttctacgcccttgaaaaactccatataacgcgaaaaaaagacctttacctattctga

SEQ ID NO: 15460 - protein, 108 aa, Unknown
  Obtained from environmental sample
  DOMAIN (1)...(108): Transposase
  misc_feature (1)..(108): Xaa is any amino acid
MAYSIDFIKRAVAYRQEGHTFAQLREAFDVSSATYYDWEAKLNNGHFDAIVKRERHRKIDKEALIKAVAEKPDAFLKEYAEQFNCTATAVFYALEKLHITRKKDLYLF

SEQ ID NO: 15461 - DNA, 807 bp, Unknown
  Obtained from environmental sample
  misc_feature (1)..(807): n is a, c, g, or t
atgggccgcgccggggatgaaattttcaaccaggcgtcaaagtgccagtcgatgtcggcgggtcttttgaaaatgccccttgtagtacgggtttcggtcggtaataaatacggcgcgcagcacagccaggactggagcgccatgacagcccacattcccggcctgaagtcttatttccccgccacgccctacgatgcgaaaggaatgttaaatctggcgctgcgcggaaccgatccggtaatcttctttgaaagccagcttctctacgatataggcgaacagtttgaaaaaagcggagttcccgaaggttattacgaggttccggaaggcgaaccagctatccgcagacagggtaatgacctgaccatcgccactgtcggggcagccctctacatagccatgaacgcggcgaaaaaacttgaaaaccaattcggcctttcaacggaagtaattgatctccgtttcatcaacccgttgaattacgaaaaaataattgagtcggtaaagaaaaccggaaagctcctgctggccagcgatgccgccgaacggggctcattcctgcatacagttgcgagtaacgttcagactatggcctttgattatctggacgcgcctgtggcggtaacgggaagccgcaactggatcacaccggcggctgaaatggaacatttgtacttcccccaggttgattggatcattgacgcggttcacgagcgtatcctgcccctgccaggttacaaccctgttacagtgcaaactaccggtgatatgatgcnggagaaaccggctgggactcggccgatctga

SEQ ID NO: 15462 - protein, 268 aa, Unknown
  Obtained from environmental sample
  DOMAIN (110)...(232): Transketolase, C-terminal domain
  misc_feature (1)..(268): Xaa is any amino acid
MGRAGDEIFNQASKCQSMSAGLLKMPLVVRVSVGNKYGAQHSQDWSAMTAHIPGLKSYFPATPYDAKGMLNLALRGTDPVIFFESQLLYDIGEQFEKSGVPEGYYEVPEGEPAIRRQGNDLTIATVGAALYIAMNAAKKLENQFGLSTEVIDLRFINPLNYEKIIESVKKTGKLLLASDAAERGSFLHTVASNVQTMAFDYLDAPVAVTGSRNWITPAAEMEHLYFPQVDWIIDAVHERILPLPGYNPVTVQTTGDMMXEKPAGTRPI

SEQ ID NO: 15463 - DNA, 648 bp, Unknown
  Obtained from environmental sample
  misc_feature (1)..(648): n is a, c, g, or t
gtggcgacatcaacgggccagcagcagtgcgtcttggtcagcgcccacggcaaggccatccgcttccccgaagagggtgtccgcgctatggggcgcactgcgactggggtgcgcggcatgaagctgggcccgggcgacaaaatagttgacatggaagttatagacccactgcccgacttgccggagggccaagaggccgatgaggccaccgcagaatatggcatgctgctcaccgtcaccgaaaaggggtacggcaagagaagcctgttgcaagactaccgcctgcagagcaggggaggcactggcgtgataaacatccgcgctggggtccgcaacggcctagtcgctggctccgtcttggtcaagcctggcgaaggctgcctgctcataagccatgaaggcatggtcatcaggttcgccatagacgaagtgagaaagacgggcagggcggcccagggcgtccgtctgctcaacttggccagcgaccaggacaaagtggttgccatagcaaaaatagacgccgccgcccaagccttggacgaagaagaggaggccgattcagtcgccgcccaagaacctgcggccacaccgaccgatgaagccgcgcagccatctcttccttcgcagccaggcctagggctggagtga

SEQ ID NO: 15464 - protein, 215 aa, Unknown
  Obtained from environmental sample
  DOMAIN (73)...(123): DNA gyrase C-terminal domain, beta-propeller
  misc_feature (1)..(215): Xaa is any amino acid
MATSTGQQQCVLVSAHGKAIRFPEEGVRAMGRTATGVRGMKLGPGDKIVDMEVIDPLPDLPEGQEADEATAEYGMLLTVTEKGYGKRSLLQDYRLQSRGGTGVINIRAGVRNGLVAGSVLVKPGEGCLLISHEGMVIRFAIDEVRKTGRAAQGVRLLNLASDQDKVVAIAKIDAAAQALDEEEEADSVAAQEPAATPTDEAAQPSLPSQPGLGLE

SEQ ID NO: 15465 - DNA, 369 bp, Unknown
  Obtained from environmental sample
  misc_feature (1)..(369): n is a, c, g, or t
atggatacagataaagctattgagcggattttatccattgggccccgtctggttatagctacactgggtccggatggcgctctggccctgctccggcgtcatgacggaaatacaatcaaagtcagcgctccggccgtaaatattccccttgcggataccataggagcgggggataccttccacggggcttttctttcatggcttgaaataaaagggaagatgtcccgttccgccctggcaaatatgaacaataccgaactctatgaggctctcttttttgccaacaaagcggcggctatagtctgttcccgcaggggcgcggagcctcccgctctgaaggaagtggaagaattgaaaataccggcatag

SEQ ID NO: 15466 - protein, 122 aa, Unknown
  Obtained from environmental sample
  misc_feature (1)..(122): Xaa is any amino acid
MDTDKAIERILSIGPRLVIATLGPDGALALLRRHDGNTIKVSAPAVNIPLADTIGAGDTFHGAFLSWLEIKGKMSRSALANMNNTELYEALFFANKAAAIVCSRRGAEPPALKEVEELKIPA

SEQ ID NO: 15467 - DNA, 552 bp, Unknown
  Obtained from environmental sample
  misc_feature (1)..(552): n is a, c, g, or t
atgaggccccgtgttcttgacgacataatcgnccaggatcacatcgtagccccgggtcggcttcttagaagggcgattcaggcggacaggctttcgtcggtcattttntacggcccgccgggaacaggcaaaaccagcctcgcgaaggtaatcgcaaacaccacccgcagcgtttttgaaagcctcaacgccgttttaacgggaattaaagacatcagggaagtcattgaccgctcagacgaaaggcgcaggctttacggcagaaggacaatcctgtttgtggacgaagtccaccgctggaacaaagcccagcaggatgccctgcttccatgggttgaaaacggaacagttattctcattggcgcaacaaccgaaaatccattttttgaagttaaccgcgccctggtttcgcgtagccgcatcttccaattaaaacctttgggagcacaggatcttatgaaagccgcaatgcgtaccctctcggacaaggaaaacggctatggcaagtggaaagttaccttgaagaaggcgcactggctcggccgaatctga

SEQ ID NO: 15468 - protein, 183 aa, Unknown
  Obtained from environmental sample
  DOMAIN (33)...(181): ATPase family associated with various cellular activities (AAA)
  misc_feature (1)..(183): Xaa is any amino acid
MRPRVLDDIIXQDHIVAPGRLLRRAIQADRLSSVIXYGPPGTGKTSLAKVIANTTRSVFESLNAVLTGIKDIREVIDRSDERRRLYGRRTILFVDEVHRWNKAQQDALLPWVENGTVILIGATTENPFFEVNRALVSRSRIFQLKPLGAQDLMKAAMRTLSDKENGYGKWKVTLKKAHWLGRI

SEQ ID NO: 15469 - DNA, 783 bp, Unknown
  Obtained from environmental sample
  misc_feature (1)..(783): n is a, c, g, or t
atgctttttacctgcgtcgagcgcgagggcacaatgtccggccttgatattgttccggcgctaagattgcgcgagttagtctcatgtaaagtnaccgtcgcgggcggcgtttcaaccttagctgaagtgnaagaaatcgccgctataggctgtgatatacagctgggcatggcgctttacaccggaaaaataaatctggcggacgcctttgtcctgtctcttaattgggagaaagatcaaaattccctcctccccgtaatagttcaatccactgacgggcaggtaatgatgacaggctttaccgacaggcaggcgttagccgaaacttttaaacgcggcaatgtctgtttccacagccgcacccgcaacagactctggatgaaaggcgagaattcaggcaatgtgttaaaacttgtcaagataagggcggactgcgacagggacgcgctattagtcacggcggaaccggcgggtcccgtctgccacaccggcgcgtggtcatgttttgcgactaacagggattacacattgcgatttttgcaaaacataataaaggatcgttttctcaatcccgtgcccggttcgtatacggctacccttgacgacgaacttgtccgcgagaaagttattgaagaggcgacagaactgtgcggggcaaaaaaccgcgctgaaattatctgggaagccgcagatctattctatttttctactgtgctgatgacaagggcgggagtcactattcaggaaattcttgacgaactggacaagaggcacaaaaaataa

SEQ ID NO: 15470 - protein, 260 aa, Unknown
  Obtained from environmental sample
  DOMAIN (177)...(259): Phosphoribosyl-ATP pyrophosphohydrolase
  misc_feature (1)..(260): Xaa is any amino acid
MLFTCVEREGTMSGLDIVPALRLRELVSCKVTVAGGVSTLAEVXEIAAIGCDIQLGMALYTGKINLADAFVLSLNWEKDQNSLLPVIVQSTDGQVMMTGFTDRQALAETFKRGNVCFHSRTRNRLWMKGENSGNVLKLVKIRADCDRDALLVTAEPAGPVCHTGAWSCFATNRDYTLRFLQNIIKDRFLNPVPGSYTATLDDELVREKVIEEATELCGAKNRAEIIWEAADLFYFSTVLMTRAGVTIQEILDELDKRHKK

SEQ ID NO: 15471 - DNA, 810 bp, Unknown
  Obtained from environmental sample
  misc_feature (1)..(810): n is a, c, g, or t
ttgatggccgagggggcacgaggccattacggcggcaagctccccgcgcccgagtatatcatacaccccatatacaagaacaacgaccacttcgcgatcgctctccagcagggcaagctcgacgcctcgcagacctttatgccgcgtatatggctgaagaagaaggacggggtgagcacgtggtacgacgaggccccctactttgttccgggcgcgatgcccatgctgctgataaacacgaccaaagcgccgctgaatgacccgcagtaccgccgcgccatggccgccgccatcagctacgccgatatcaaggagctggccgtctccggctacgcccccgacgtgcagcccggcctcatcatgaatcaggggctcgaaggcaagtactttaacgacggggacgcgaaggagttcggcgttacctacgatcccgcgaaggcaaagaagattctggccgacgccggttacaaatccgtatacaagagaggcgacaaagacagcacgctcgattacatgaccgacaaggccgggaacaagttgcccgttttgtcgatcaccgtcccggccggctggtccgactgggaggccatggttcagatcgcggtgaagggtttgcgcgccgccggcatggacgtgcgcgaagggcctgtcgacgccagcctctattggccggcgctgccctccggcaacttcgacctgatcatgcacaaacccgcggcgtcggtcacgccgtcgctcccgtggaaccgcttcgagtcggtcatgtcctccccgcaactgggtggcccgtgggcggcgaccacaagatga

SEQ ID NO: 15472 - protein, 269 aa, Unknown
  Obtained from environmental sample
  misc_feature (1)..(269): Xaa is any amino acid
MMAEGARGHYGGKLPAPEYIIHPIYKNNDHFAIALQQGKLDASQTFMPRIWLKKKDGVSTWYDEAPYFVPGAMPMLLINTTKAPLNDPQYRRAMAAAISYADIKELAVSGYAPDVQPGLIMNQGLEGKYFNDGDAKEFGVTYDPAKAKKILADAGYKSVYKRGDKDSTLDYMTDKAGNKLPVLSITVPAGWSDWEAMVQIAVKGLRAAGMDVREGPVDASLYWPALPSGNFDLIMHKPAASVTPSLPWNRFESVMSSPQLGGPWAATTR

SEQ ID NO: 15473 - DNA, 573 bp, Unknown
  Obtained from environmental sample
  misc_feature (1)..(573): n is a, c, g, or t
atgggtcagaattcggcacgagatgtacggcaagatatgcaccaaaagcacgcgcaacgtattgtcgccgttcaattttgcaagcgatatgtgatccttgctcttgagcgccgccgactgggccctcacggcgcgggcgctccacgtccaagtcgtcatgccgatgatcaccccgataagggtgagcgaccgcccctcgctgaaactcgcgcttataaggataagcacgacgaacgagggtatgacgacgaaaaggttcgtcaccatgttgaggatgtcgtccacaacgccgcccctgaaaccgccgtagatgcctatcagggtgccgatggtagtggctatgacacccgccaaaaagccgacgaagagcgacgacctgagccccaaaagcaacagcgaaacgtagtcgcgcccgaggtcgtccatccccaagataaacttggcggtgggagcgtcgtactgggcgcccacgcgggccgtcgttatcttgtaaaagaacgggccgacaagcgcgataagcaacgtcagcaaaaagatcgacgcgcctattacaaacatcggagacttcaataa

SEQ ID NO: 15474 - protein, 190 aa, Unknown
  Obtained from environmental sample
  misc_feature (1)..(190): Xaa is any amino acid
MGQNSARDVRQDMHQKHAQRIVAVQFCKRYVILALERRRLGPHGAGAPRPSRHADDHPDKGERPPLAETRAYKDKHDERGYDDEKVRHHVEDVVHNAAPETAVDAYQGADGSGYDTRQKADEERRPEPQKQQRNVVAPEVVHPQDKLGGGSVVLGAHAGRRYLVKERADKRDKQRQQKDRRAYYKHRRLQ

SEQ ID NO: 15475 - DNA, 753 bp, Unknown
  Obtained from environmental sample
  misc_feature (1)..(753): n is a, c, g, or t
atgcttcttcacggcataagcacggggcagttgaaaaaaggcaagacgattttggattccacgagcggcaacaccggcatcgcatacgctatgttcggcgcggcgctgggttacgaagtggagctgtttatgccgtcaaacgccagcgcggaacgcaaaaagatcatcaaggcctacggcgccaaggtcgtagaaaccgacccgctcgaaggctccgacggcgcgtacagggcggtcattgaaagggcggtgggcgatccggagaagttcttctttccgaatcagtacgacaactttgaaaacgcgcgggcgcactatgagaccaccggcgtcgaactctataaacagtgcaagccgacgcactttgtggcgggaacgggcacgtcgggaacctttatgggcacctccaagaggctcaaagagtacgacccgtccatacatatcaccctaatgcagcctaactccccgtttcacgggctggaggggatgaagcacatgggcgcgaccataaagcccaagatattcgacgaaagcgtcgccgacagccgcgttgagattggaaccgaagaggcctacaagacggcgcggaggctcgccgccgaggagggcatattcgtaggtgtaagttccggcgcanacgtcttcgccgcgctgaaattagccgaaacgttgccgaaaggctcgcgtgtcgccactatactgtgcgacaacggctatagatacatgaccgaaccgttatggagggatatataa

SEQ ID NO: 15476 - protein, 250 aa, Unknown
  Obtained from environmental sample
  DOMAIN (1)...(237): Pyridoxal-phosphate dependent enzyme
  misc_feature (1)..(250): Xaa is any amino acid
MLLHGISTGQLKKGKTILDSTSGNTGIAYAMFGAALGYEVELFMPSNASAERKKIIKAYGAKVVETDPLEGSDGAYRAVIERAVGDPEKFFFPNQYDNFENARAHYETTGVELYKQCKPTHFVAGTGTSGTFMGTSKRLKEYDPSIHITLMQPNSPFHGLEGMKHMGATIKPKIFDESVADSRVEIGTEEAYKTARRLAAEEGIFVGVSSGAXVFAALKLAETLPKGSRVATILCDNGYRYMTEPLWRDI

SEQ ID NO: 15477 - DNA, 654 bp, Unknown
  Obtained from environmental sample
  misc_feature (1)..(654): n is a, c, g, or t
gtgccaaaaaaagctccgttcgatctgtaccatgtggactaccaccccggcgtaaagctctacgtaaagcgggtgtttatcaccgatgacgacaaagagctaatgcccacctggcttcgctttatccgcggggttatcgattcggaagacctcccgctcaatgttagccgcgagattctccagcaaaacaaaatactgctcaacattaaaaacgcttctgttaaaaaactgctttcggaatttaaatctctggcggacaagactgccgcaggagacgaagaggcgaagaaaagctgggaaactttcgtcagccagtttaaccggcctttgaaagaagggctgtaccaggactatgctaaccgcgaggcgattcaggatctggtcaggttcaaaagctcatccgtggaaggctggaccagttttgcagactatgtctcccggatgaaaagcgatcaaaagaacatctactacattaccggcggggatgaaaaaaccctcaaagcctcgccgcttttggaagcctacacagccaagggcatcgaagtgctaatcatggacgatgagattgacgatcttgtgatacccaccctgcatagctacaaaaaagaaattcccggcgtggacggcaaaacgaaacacagacctgggagctaa

SEQ ID NO: 15478 - protein, 217 aa, Unknown
  Obtained from environmental sample
  DOMAIN (1)...(216): Hsp90 protein
  misc_feature (1)..(217): Xaa is any amino acid
MPKKAPFDLYHVDYHPGVKLYVKRVFITDDDKELMPTWLRFIRGVIDSEDLPLNVSREILQQNKILLNIKNASVKKLLSEFKSLADKTAAGDEEAKKSWETFVSQFNRPLKEGLYQDYANREAIQDLVRFKSSSVEGWTSFADYVSRMKSDQKNIYYITGGDEKTLKASPLLEAYTAKGIEVLIMDDEIDDLVIPTLHSYKKEIPGVDGKTKHRPGS

SEQ ID NO: 15479 - DNA, 588 bp, Unknown
  Obtained from environmental sample
  misc_feature (1)..(588): n is a, c, g, or t
atgaaacttaactctccatttttgaataacttaggctttatagccctggtgttcttcgcttgttccgcgttttctgcgcctgcttccctttacgggagcaacaacctgtactccaacaacctgtacacagacaaaaaaggcaaaaaagccggggatgtggtgacaatcctgattatggaagccgcaaaggcagatagcaagacccaaacccaaactgggaaaaagaacgacataagcgtgtcgcagcaagcatcggtaggcagcaagatttttagctggttgcctggttttggagttaaaggctcggcagatatcaattacgatggcaaaggaaacaccgctcgcaacggagaattgaaagcaaccctaacggcgcgcataacagaagtcttggacaacggaaatctgctaattgaaggttctaaactcgtntgcataaacaacgaagaggaaattctggaaagtagcggcacaataagagcagacgatattaatcccgancatacagtatatagctataaaatagccgaagcggttattcgctactctggaagcggaacgatgccgatgcggcaaaacctggactaa

SEQ ID NO: 15480 - protein, 195 aa, Unknown
  Obtained from environmental sample
  SIGNAL (1)...(25)
  DOMAIN (21)...(189): Flagellar L-ring protein
  misc_feature (1)..(195): Xaa is any amino acid
MKLNSPFLNNLGFIALVFFACSAFSAPASLYGSNNLYSNNLYTDKKGKKAGDVVTILIMEAAKADSKTQTQTGKKNDISVSQQASVGSKIFSWLPGFGVKGSADINYDGKGNTARNGELKATLTARITEVLDNGNLLIEGSKLVCINNEEEILESSGTIRADDINPXHTVYSYKIAEAVIRYSGSGTMPMRQNLD

SEQ ID NO: 15481 - DNA, 426 bp, Unknown
  Obtained from environmental sample
  misc_feature (1)..(426): n is a, c, g, or t
atgatttcccaaggaaatgagcaagcggtagttgatgggaacggtagagtttccctgcccgcctcttttagaaaactcattccatcggaaaaagaattttacatatcgcccggcctagataacactttgcacctgcgtagggaggttgattacaacgcttgggcggaaaaattgaaggaacttgaaccgacaaaaaaaaattatgatttccgcagaaaagtactctccagtacccgccaagttattttggacgaaaagcaaagccgttttcttttgccaaaagagctaaaggaatacgcttgcatagacaaagacgttgtgtttgctggcaatggagacgtgattattatttccaattctgagaaggcagcaccttatattttaaacaaagaagataactttgaaggctacgagtggatgttatga

SEQ ID NO: 15482 - protein, 141 aa, Unknown
  Obtained from environmental sample
  DOMAIN (1)...(71): MraZ protein
  misc_feature (1)..(141): Xaa is any amino acid
MISQGNEQAVVDGNGRVSLPASFRKLIPSEKEFYISPGLDNTLHLRREVDYNAWAEKLKELEPTKKNYDFRRKVLSSTRQVILDEKQSRFLLPKELKEYACIDKDVVFAGNGDVIIISNSEKAAPYILNKEDNFEGYEWML

SEQ ID NO: 15483 - DNA, 648 bp, Unknown
  Obtained from environmental sample
  misc_feature (1)..(648): n is a, c, g, or t
gtgggtagcataaccctggttgattccgacactgtcagcattacagacttcaaccgccagattcaggctataagcgggaacatgggtcggaagaaaaccgaggcattaaaagagcgcttcaatagcattaatccgtcctgcgaggttgtctcttttccccattttttttcaaaagagaatgtgaggcttcttaacttttcagaagcggattatgtaattgacgccattgatacccttgaaagtaagctagaccttatcgaaattgcagcagccgcagggaagcgttttttttcctcgatgggaatggcctggaaacttgacccgacccaaatcagaacggcggatatttgggaaacctccggctgcccccttgccaggctcgtgcggcaggggctgaaaaagcgggggttttccggccattttaccgtggtttacagcgctgaaaagccaggccggggggagaaggagagcttaagcctgaatgagggagacgttaaaaacagcgcggcaggcggcaggaaaaaagcggctttaggcagcgccatgccggtaaccgccactgccgggatggttttggcaagcctggtgattcgggacatttgcggggaattctctgactgcgacacaaaaggaaacgaagcatcgtga

SEQ ID NO: 15484 - protein, 215 aa, Unknown
  Obtained from environmental sample
  DOMAIN (2)...(111): ThiF family
  misc_feature (1)..(215): Xaa is any amino acid
MGSITLVDSDTVSITDFNRQIQAISGNMGRKKTEALKERFNSINPSCEVVSFPHFFSKENVRLLNFSEADYVIDAIDTLESKLDLIEIAAAAGKRFFSSMGMAWKLDPTQIRTADIWETSGCPLARLVRQGLKKRGFSGHFTVVYSAEKPGRGEKESLSLNEGDVKNSAAGGRKKAALGSAMPVTATAGMVLASLVIRDICGEFSDCDTKGNEAS

SEQ ID NO: 15485 - DNA, 846 bp, Unknown
  Obtained from environmental sample
  misc_feature (1)..(846): n is a, c, g, or t
gtgctgttgaatcttcaggggcatgcctactggaaccttgagaaatacaaaaaagccgccaaagcctattgcgctgcatttgaaaatgacagggaaaacgggatcttcgcgaaaaatgccgcaaacgtttacgacgtgatgggcagcaaaaaagaagccataaaaaaatacatcgaagctggtaaggcttttttgcaaacaggcaactacaacgacctggggctaatcgttcccaaactgctctcactgggcgaggataattgggaggcgcgaagcctggcgggcaaatgggcttttgccgtggaagactggaagatggcaaaagaagaattcgccctggctgaaagccttcgaagcgccatgcagccaaaaccacgcaaaaatggagcccaggtttttcttgaggccctgctgctcattatggacggaaaacgaagggaagccctgcctctgcttgaggaagcagccgctttagagaaaaattatgccctcttccacttccgcctggctgaaaatatttttttattaaacgatgactgcgatgatccccaaatgctgaaggaaatggaaacagccctgtcccttagccagaaggaaaattttaacgatgaaaaaaacgccgacnaagaaaacgaaggcctttccggctggatacacaatttcgctgcccagatagctataaaaaaaggaaattttgatgtggcggcaaggcatcttgaaaaagcctcattagtattgggggatgtgccagcggtacgtgtaaatcaggncgttctattttatttgcagggctcgctgngaaaaagccttgaaattttgtcagtcgataaaaaagatgatccctga

SEQ ID NO: 15486 - protein, 281 aa, Unknown
  Obtained from environmental sample
  misc_feature (1)..(281): Xaa is any amino acid
MLLNLQGHAYWNLEKYKKAAKAYCAAFENDRENGIFAKNAANVYDVMGSKKEAIKKYIEAGKAFLQTGNYNDLGLIVPKLLSLGEDNWEARSLAGKWAFAVEDWKMAKEEFALAESLRSAMQPKPRKNGAQVFLEALLLIMDGKRREALPLLEEAAALEKNYALFHFRLAENIFLLNDDCDDPQMLKEMETALSLSQKENFNDEKNADXENEGLSGWIHNFAAQIAIKKGNFDVAARHLEKASLVLGDVPAVRVNQXVLFYLQGSLXKSLEILSVDKKDDP

SEQ ID NO: 15487 - DNA, 909 bp, Unknown
  Obtained from environmental sample
  misc_feature (1)..(909): n is a, c, g, or t
atgacagatcggccgagtggggcgcttgaagagcgcggcataacgccctgtcttgcggtaattctggctggcgaaaaccccgcaagcctttcctatgttaaaagcaagcaaaaagcccttgttcaggccggcatggaaggcagggacatacgccttcccgaaactgtcggcgaaaaggaacttctttcccttattgcggcccttaacgccgataaaaaggtacacggtattctggttcagctcccgcttccggcgcatatcaaccaattgtccgtaatgaacgcgctggatccccgaaaggatgtggacggttttcatccttattcaatgggaatgctttttctgggacagccgactttcgttccatgcactccgaagggggttgtcgtcttactggaaaagtacaatatcccggtttccggcaaacacgttgtggtggtaggccgctccaacattgttggcaagcccctttcggcgatgttttcccagcgcgagctgaacgccacggttactctctgccataccggaaccgccgaccctccttgcacacgcnggcagctgatattcttattcgcgcgccggcaaacccggtctaatcctcgcgatatggtaaacccgggcgcggctgtcatcgatgtgggcataaacccggttcccacgccttcgaagagggctaccgcattactgcaactgaattacaaccaaattcccccccccgccggctggataaccctgtttccgggggaaataaccccccagaacaaacgcctgtccatgccaaaaatccctggaacccccaaaagggctggatccccccggaaaaaaaaatgggaccggttttttgcgcggccttttcaaaaaaaaactttgcggaaaaaaaaaaaagggtctttgcttataaccccgtaa

SEQ ID NO: 15488 - protein, 302 aa, Unknown
  Obtained from environmental sample
  DOMAIN (106)...(246): Tetrahydrofolate dehydrogenase/cyclohydrolase, NAD(P)-binding domain
  misc_feature (1)..(302): Xaa is any amino acid
MTDRPSGALEERGITPCLAVILAGENPASLSYVKSKQKALVQAGMEGRDIRLPETVGEKELLSLIAALNADKKVHGILVQLPLPAHINQLSVMNALDPRKDVDGFHPYSMGMLFLGQPTFVPCTPKGVVVLLEKYNIPVSGKHVVVVGRSNIVGKPLSAMFSQRELNATVTLCHTGTADPPCTRXQLIFLFARRQTRSNPRDMVNPGAAVIDVGINPVPTPSKRATALLQLNYNQIPPPAGWITLFPGEITPQNKRLSMPKIPGTPKRAGSPRKKKWDRFFARPFQKKTLRKKKKGSLLITP

SEQ ID NO: 15489 - DNA, 849 bp, Unknown
  Obtained from environmental sample
  misc_feature (1)..(849): n is a, c, g, or t
ttgcctattttatgcaaatactcggcatggatcgattctacatttaagaagtcaaacggactgtataaaacgccgcttggagccggcggaatgacaaacactccccgaggagacgcctattaccccatggacttcaataccatgatggcgattaatatgctctatatttccgccctcgcggacattttaaacgataaggaaacaagctttcagtataagaggctgtatttctcccttaaaaccagaatcaatacattgatgtacaacgcgacggacggcttttactacgatatcaacaaaaacgaaaaacaagtccctattaaaacaatcgccgggtattggcctctccttgcggaaattcccaatggagaaaaagctgagcgtattatcgaaaaactttccgacccgaaatatttcggcacggctcacccgtttccgtctctcgcgctgtccgaaaaagaatttgacgagacaggacgcgggttcagaggatcggtttttccttatctgaccttcatggttataaaaggacttgagcgttatcaacgctgggatttggcgcgcgagtgcgcgataaggcatgtgtactttatgcttgattcaatgagtccggacgggaatcatcacaagggaaatttgtgggaagcgtatttgcccacaaaggaaggtcccgcanaatggacaggtaaacccgctttcccgcgtccgcagtatttaacttacgacgcgctttcaactatctgtcttatcatcgaaaatattgtcgggctttcaatttcgcttccgcgcaaaacagtggaatgggtcattccaagtctggaaattatgggcgtagaaaatcttgcctga

SEQ ID NO: 15490 - protein, 282 aa, Unknown
  Obtained from environmental sample
  misc_feature (1)..(282): Xaa is any amino acid
MPILCKYSAWIDSTFKKSNGLYKTPLGAGGMTNTPRGDAYYPMDFNTMMAINMLYISALADILNDKETSFQYKRLYFSLKTRINTLMYNATDGFYYDINKNEKQVPIKTIAGYWPLLAEIPNGEKAERIIEKLSDPKYFGTAHPFPSLALSEKEFDETGRGFRGSVFPYLTFMVIKGLERYQRWDLARECAIRHVYFMLDSMSPDGNHHKGNLWEAYLPTKEGPAXWTGKPAFPRPQYLTYDALSTICLIIENIVGLSISLPRKTVEWVIPSLEIMGVENLA

SEQ ID NO: 15491 - DNA, 417 bp, Unknown
  Obtained from environmental sample
  misc_feature (1)..(417): n is a, c, g, or t
atgggaatgaaacaaatttcggtttttcttgaaaacacgacggggcgtctttgcgaagtgacaaaaacgcttgccaaagcggggctcaacctcagggcgatcaatatcgccgacaccgccgattttggcatcctcaggattattgttgacaatacggtggaagccgccaatgttctggaagcggcggggtttaccataaagctgaccacggtcgcggccgtggaaatcgatgataaaccgggcagccttgacaagctgattatgcagatccagaagtcgggaatcaatattgagtacctgtacgcctcccttggaggcggcagcggcaaagcggtggtgattttcaaactggaagatcacgacaaaggctttgccatgcttgaaaagagcggccttgtgttagcggaaaaattataa

SEQ ID NO: 15492 - protein, 138 aa, Unknown
  Obtained from environmental sample
  DOMAIN (4)...(74): ACT domain
  misc_feature (1)..(138): Xaa is any amino acid
MGMKQISVFLENTTGRLCEVTKTLAKAGLNLRAINIADTADFGILRIIVDNTVEAANVLEAAGFTIKLTTVAAVEIDDKPGSLDKLIMQIQKSGINIEYLYASLGGGSGKAVVIFKLEDHDKGFAMLEKSGLVLAEKL

SEQ ID NO: 15493 - DNA, 483 bp, Unknown
  Obtained from environmental sample
  misc_feature (1)..(483): n is a, c, g, or t
ttgttatcgcgggagaagcacgagcgctacattccttacatcatcgaaacttcagccggccttacccgcaatttattgatgatcctctgtgacgcctacgatgaggaacaaatcgcttccgataaagaaggaggtgaagaggattcgcggacggtactgcgcttccacccaagcctcgcgccaattaccgttgccatcctgcccttgatgaagaaagacggcctcgcggagcttgcccaggacatccgaaaggaactgaaggaagacttctccaccgattatgaccaatccggagccattggccgccgttaccgccgtcaggacgaggcggggacgcccttctgcgttaccgtcgactacgaatccaaagacaacggtaccgttaccctgcgtttccgggactcaatggaacaggttcgggtgaacaaagcggaactggcagcgcgcttgcggaaggaaataaaggaatacaagagggtttaa

SEQ ID NO: 15494 - protein, 160 aa, Unknown
  Obtained from environmental sample
  DOMAIN (63)...(153): Anticodon binding domain
  misc_feature (1)..(160): Xaa is any amino acid
MLSREKHERYIPYIIETSAGLTRNLLMILCDAYDEEQIASDKEGGEEDSRTVLRFHPSLAPITVAILPLMKKDGLAELAQDIRKELKEDFSTDYDQSGAIGRRYRRQDEAGTPFCVTVDYESKDNGTVTLRFRDSMEQVRVNKAELAARLRKEIKEYKRV

SEQ ID NO: 15495 - DNA, 405 bp, Unknown
  Obtained from environmental sample
  misc_feature (1)..(405): n is a, c, g, or t
gtggtagttaatgaaattatgacaaaaaatgtgtttacaatccatgagactaccagccttatggaagcgtccatgtttttggagcgggtcgatcttacggcctgtccggttgttgataaggacggcaatgtttctgggtttataagccttcgggatattatgaaaggccgtaagcacggaaaaatgcaggcgcctgtaaaggcatatatgtccgcgccggtaatttcagccgggggcaaagtaacacttagggaaatagaaaggatattctataaaaataagataggccatattcctatattggaagaagggaagcttctgggtattgtaacccgctgggattacctgcaattccataagcgaagcggactggattcaactgaattgactgaagggttaaattaa

SEQ ID NO: 15496 - protein, 134 aa, Unknown
  Obtained from environmental sample
  DOMAIN (5)...(120): CBS domain pair
  misc_feature (1)..(134): Xaa is any amino acid
MVVNEIMTKNVFTIHETTSLMEASMFLERVDLTACPVVDKDGNVSGFISLRDIMKGRKHGKMQAPVKAYMSAPVISAGGKVTLREIERIFYKNKIGHIPILEEGKLLGIVTRWDYLQFHKRSGLDSTELTEGLN

SEQ ID NO: 15497 - DNA, 405 bp, Unknown
  Obtained from environmental sample
  misc_feature (1)..(405): n is a, c, g, or t
atgtggcttcatatcggcgccaacatggatcatcggacgcaggtgtttatcgggactatgaccgcgaaaggtcttggaatccgaaacgtcgccgacgatacatttatttccctgtccgcgccggacaacgccaaccgcgccattggaacccttgatgtcgcgctcaaaagagttaacaagcaacgggctgatctgggagcctaccagaaccgccttgaacacgcgatccgcggcattaacatcggcgccgaaaacatgcaagccgccgaatcccggattagggacgccgacatggcttttgaaacagtaaattacaccaagaatatgatactcacccagtccgggacagctatgctggctcangcaaatcaaaaaggacagacggtgctgcagctcttgcagtaa

SEQ ID NO: 15498 - protein, 134 aa, Unknown
  Obtained from environmental sample
  DOMAIN (41)...(112): Bacterial flagellin C-terminus
  misc_feature (1)..(134): Xaa is any amino acid
MWLHIGANMDHRTQVFIGTMTAKGLGIRNVADDTFISLSAPDNANRAIGTLDVALKRVNKQRADLGAYQNRLEHAIRGINIGAENMQAAESRIRDADMAFETVNYTKNMILTQSGTAMLAXANQKGQTVLQLLQ

SEQ ID NO: 15499 - DNA, 864 bp, Unknown
  Obtained from environmental sample
  misc_feature (1)..(864): n is a, c, g, or t
atgtggcttcggacgctttcgaacgacccgggggtcatcaccgcgcgagaggaccacatcgcccatcttctcaataatccgaacgtccttcgcgacctttcgggactttgcgcgcggacgccggacgtgggacgggcgctgtcgcgccttgggtcgggccggggaatgccgcgcgaccttttgtgcgtcctgaatttccttcggattctttcggcttttaaggtcgcgggcgcccagcttgacgacgtgcttgcggaaaggttcaaggcggcggacacgttcgacggccttggggcggaattgttcctggcgctttcggaaaatatgccggcgtttttcagggacggcggggtcgtcaaaaggggattcgacccgacccttgacgcgcttcgcgaccttacggccgactctaaatcggtcatcgcgcggcttcaaagcgaatactcggataagacaaaggcgaacgtcaagataaaattcaacaacgtcatcggatatttcatagaggtggcgtcaaaaaacgcggacaaattcatgggcccggacacgggattcatccaccgccagacgatgaacgacaacctccggttcacaacggcggaactttcgaaactggatacggaaatcaagaacgcgacggacagggcgcttgcgacagagcagacgataatcgcgacgcttttggaaaagatagggattgaggccgacgccataataaagacggcggagcttttggccgaaacggacgttttttgcgcccttgccagggttgcggaggaatggggctgggttcgcccgaaaatcgcaaaagaaccggttttcgacgttgtcgggggccggcatccggtgtcgagaagttcctag

SEQ ID NO: 15500 - protein, 287 aa, Unknown
  Obtained from environmental sample
  DOMAIN (3)...(260): MutS domain III
  misc_feature (1)..(287): Xaa is any amino acid
MWLRTLSNDPGVITAREDHIAHLLNNPNVLRDLSGLCARTPDVGRALSRLGSGRGMPRDLLCVLNFLRILSAFKVAGAQLDDVLAERFKAADTFDGLGAELFLALSENMPAFFRDGGVVKRGFDPTLDALRDLTADSKSVIARLQSEYSDKTKANVKIKFNNVIGYFIEVASKNADKFMGPDTGFIHRQTMNDNLRFTTAELSKLDTEIKNATDRALATEQTIIATLLEKIGIEADAIIKTAELLAETDVFCALARVAEEWGWVRPKIAKEPVFDVVGGRHPVSRSS

SEQ ID NO: 15501 - DNA, 348 bp, Unknown
  Obtained from environmental sample
  misc_feature (1)..(348): n is a, c, g, or t
atgcttaaaacaaagaaattgattgttgttgactatctcaaaacagaagaagaaattgaagcctatcttaatgctttttttgacgacgacgattataagtatcttccccttgctttagccgacattgctcgcgctcgtaaagctatgaccactgtcgcaaaggctgccggtgtatctcgaaccagtctatatcaatctctctccgaagacggacatccggcttttgaaaccattgcaaaagtcgccaaatctctcggctatcgactttctttggttcctgtatctaagctgtcgagtaaaaagacaaaaaagcgtataaagactaaaaaaactaaaatgagcgtatag

SEQ ID NO: 15502 - protein, 115 aa, Unknown
  Obtained from environmental sample
  DOMAIN (42)...(92): Helix-turn-helix
  misc_feature (1)..(115): Xaa is any amino acid
MLKTKKLIVVDYLKTEEEIEAYLNAFFDDDDYKYLPLALADIARARKAMTTVAKAAGVSRTSLYQSLSEDGHPAFETIAKVAKSLGYRLSLVPVSKLSSKKTKKRIKTKKTKMSV

SEQ ID NO: 15503 - DNA, 780 bp, Unknown
  Obtained from environmental sample
  misc_feature (1)..(780): n is a, c, g, or t
atgcccgtgcgagcgggctccgaggcgcagagggaagaggggggaaagagttgttgtgtgtcagattatcatagtacttctggatttaacatgtccaacaaaaatctgtcgaacaacaaccctttcccttcttcctttgcgctctttgcgcctttgcgtctttgcgtgaggtctttttggaacagtttaaacgcggaagggctttttatcacagggctgttaatggcgttgatttttatgtttaaccattccatggaaatacgcatagcgcaatttctgtttttttgtctgcttgtattcatttccggaaaaaaaatcaacctgattgcgacgctgctttttatgagtagtataatttttttccatctgcttgcccctttcggaaaagtgcttgccattgtcggccctttgcgtataacgcagggcggcctgtcagccggaattgacaaggcgataaccatttcaggccttgtgattctttcccgcgcctttatcaaaaacgatctcaggctgcccggaacaataggttcgcttctcggcgaatccctgcgtatgcttgagttactgcgcgaaagaaggggcatgattaagctaaaacaggtaataagcgggctggacaggataatgctggaaatggaaacaatagctcttgatgatacggcaaatacacaagaaaaaaaacagggaataaatgttcaaagtattctattattaatttcgatggtactaataacagccggaatgaaccctgataaannatacattaaacattacaggtaa

SEQ ID NO: 15504 - protein, 259 aa, Unknown
  Obtained from environmental sample
  misc_feature (1)..(259): Xaa is any amino acid
MPVRAGSEAQREEGGKSCCVSDYHSTSGFNMSNKNLSNNNPFPSSFALFAPLRLCVRSFWNSLNAEGLFITGLLMALIFMFNHSMEIRIAQFLFFCLLVFISGKKINLIATLLFMSSIIFFHLLAPFGKVLAIVGPLRITQGGLSAGIDKAITISGLVILSRAFIKNDLRLPGTIGSLLGESLRMLELLRERRGMIKLKQVISGLDRIMLEMETIALDDTANTQEKKQGINVQSILLLISMVLITAGMNPDKXYIKHYR

SEQ ID NO: 15505 - DNA, 855 bp, Unknown
  Obtained from environmental sample
  misc_feature (1)..(855): n is a, c, g, or t
atggtacagcagttgaaaaaaacccgtattgtggccaccctcggcccggcctccaactcgccggagaagattcgcgcgctcctcaaggacggcgtaaacgtgttccgcttcaacttctcgcacagcgaccacgataaacacatagccaacctgaagacggtgtacgacgtgtcgcgggagatcggcgtctacccggcgcttttggccgatttgcaggggccgaaaatccgtaccggcaagacggcgggcgacgcgccgatcacgcttaaaaccggggctaaggtagtccttaccgcgggagacgaggtctgtacggacagcgttatttcgattgaccaccatacgctggcccaagagattgacgcggggcaggagatagccataaacgacgggcttataaggcttgtggccaaggaagtcgaccgcgataaaaaattgataacctgcgaggttacggacggcggggtgtattcctcaagaaaaggggtcaacctacccaacgtgcacctgagcattccctccgtaacggacaaagacaaggctgatttggagtttatcctcacccagccgttccagttcatcgccttgtcgtttgtaagggccgccaaagatttaaaggaactgaaaaaccttatgaaaggacggcgcccggatataaagatcatcgccaaaatcgaanaaccggaagccgcgcantacatcgaatccatcctcagagagtgcgacggcataatggtcgcccgcggggactgggcgtcgagcccatacatacgagtgcccgtcatacagaaagacctgatccacaaggcgaacttggccgcggagagcgtcattgtcgccacgcagatgctttga

SEQ ID NO: 15506 - protein, 284 aa, Unknown
  Obtained from environmental sample
  DOMAIN (5)...(284): Pyruvate kinase, barrel domain
  misc_feature (1)..(284): Xaa is any amino acid
MVQQLKKTRIVATLGPASNSPEKIRALLKDGVNVFRFNFSHSDHDKHIANLKTVYDVSREIGVYPALLADLQGPKIRTGKTAGDAPITLKTGAKVVLTAGDEVCTDSVISIDHHTLAQEIDAGQEIAINDGLIRLVAKEVDRDKKLITCEVTDGGVYSSRKGVNLPNVHLSIPSVTDKDKADLEFILTQPFQFIALSFVRAAKDLKELKNLMKGRRPDIKIIAKIEXPEAAXYIESILRECDGIMVARGDWASSPYIRVPVIQKDLIHKANLAAESVIVATQML

SEQ ID NO: 15507 - DNA, 504 bp, Unknown
  Obtained from environmental sample
  misc_feature (1)..(504): n is a, c, g, or t
gtgccgtcggcgctgacaaagggaaaatttacagttaaaaaagtttcaaaacccaaagcggcggccgaagcaaaagctgaaaaagttaaagccgtaaaaacaaagtctgacacaaaaaaagcaactccaacccagaaagcagcggcggtacaggtaaaatcaacggctgtaccttcaaagatgaccgcgagatatgcggtagttgttcagaatgaattattccataacggcaatgttgaagcgtggaagaggattgttgcaagttataaagcaaagcatcccgatttagaggtctttatttattatgaaggcgagaggatacttgatataaactctctgtttaaatggggtaaggttaaacatggcagcgcaattgaatttgccgttgccggtaatgaaattcaggatgtggcaaaattgcagcgttatcttgcgcagggggccagtaaacaatttgaagcgtttctgcacggacctgttaataccgtgcttaaattgttttaa

SEQ ID NO: 15508 - protein, 167 aa, Unknown
  Obtained from environmental sample
  misc_feature (1)..(167): Xaa is any amino acid
MPSALTKGKFTVKKVSKPKAAAEAKAEKVKAVKTKSDTKKATPTQKAAAVQVKSTAVPSKMTARYAVVVQNELFHNGNVEAWKRIVASYKAKHPDLEVFIYYEGERILDINSLFKWGKVKHGSAIEFAVAGNEIQDVAKLQRYLAQGASKQFEAFLHGPVNTVLKLF

SEQ ID NO: 15509 - DNA, 360 bp, Unknown
  Obtained from environmental sample
  misc_feature (1)..(360): n is a, c, g, or t
atggacaaaagaatacactttttcagccaaaacaatgtaatttcctcaaaaataaaaccggaattactgggtattcgcggacgccaggctaatgaatttgcggaattggaatttccaattctgccgggatttattctggatgctgacattgcctcggaaatagagccgaaagttatcaagaatgatatcgcagaccttttggganaatgcgagaaacttgtaaacaagaaatacggcgatgttgataatcccatgctttntaaaattgttatttcatcaaaactgggcatttctacataccctacgctgcataactttggtcttgttagcccggtatcgaaggtttttcaagatgggtag

SEQ ID NO: 15510 - protein, 119 aa, Unknown
  Obtained from environmental sample
  misc_feature (1)..(119): Xaa is any amino acid
MDKRIHFFSQNNVISSKIKPELLGIRGRQANEFAELEFPILPGFILDADIASEIEPKVIKNDIADLLGXCEKLVNKKYGDVDNPMLXKIVISSKLGISTYPTLHNFGLVSPVSKVFQDG

SEQ ID NO: 15511 - DNA, 387 bp, Unknown
  Obtained from environmental sample
  misc_feature (1)..(387): n is a, c, g, or t
atggctacagatgtcaaaacactaggcgaccaaattgttgccctcacgcttttagaagcaaaagcattggctgattaccttaaagagactcatggtcttgaagctgccagcggcggcgcagttgttatggctgctcctgcggcaggtggtggcggtgccgctgctgaagaaaaaacagagtttgatgttgtgttggtagatggcggagcacagaaactaaatgtgattaaagttctacgcgctgctgttccaggtcttggactcaaggaagcaaaagatttggtagacaaaggtaactcgcctgtgaaagaaggcgttgccaaagctgaagctgaaaagctgaagaaagagctagaagacgccggagcaaaggtcacgctgaaataa

SEQ ID NO: 15512 - protein, 128 aa, Unknown
  Obtained from environmental sample
  DOMAIN (60)...(128): Ribosomal protein L7/L12 C-terminal domain
  misc_feature (1)..(128): Xaa is any amino acid
MATDVKTLGDQIVALTLLEAKALADYLKETHGLEAASGGAVVMAAPAAGGGGAAAEEKTEFDVVLVDGGAQKLNVIKVLRAAVPGLGLKEAKDLVDKGNSPVKEGVAKAEAEKLKKELEDAGAKVTLK

SEQ ID NO: 15513 - DNA, 891 bp, Unknown
  Obtained from environmental sample
  misc_feature (1)..(891): n is a, c, g, or t
gtgatcgcgaggggttttgcgcgctctgcgatgaatactatacctataacttttaacgaaaacctccccgcttataccgcggtgggaggcaatgagcgaagggcttccacggggctttcggctgttatcctgaacaggggaggcaggtatccccgctacactttttttgaagagctggagaagcttggatttgactatgtcctttctatagaaagctccgccgccaattacgatttggaatcactctcatccggttttccttttgtccgctttattcttccccaggggcagatcaaccggggggaagagatcaaccttgccgcttccgaattgtccagccccctgttttttgtcctctggaacgatctgaagtttctccgaagcggcggggccgatcgtatggcggagcgcctccttacggcggagcgggtagaaaaaaatacctataaaaggctttgcaccacgcccttaatccaggacgcgcgttctgaaaccatgcccacccttattgcccccgcaattatttccgaaaaaaaaaccggaaagtccataaaaacaattccgttcattccgcggaaggaagggcaactaaccctgtaccctttcgacggcgtcggtatttacgacagggagcggtttatccgcctgaacggattcgatccttacataaaaaacttccactggcagttaatggactttggttttcgttccagcctttggggggaagaaatcgccgcgacccagttgataaaactttcgtacgaagcccatgtccccgaggaggatattacggcaggtcaagggtttcttaggttttacctgaaaaacctggcgccggttttcaagggcgaccacgcgcacatccccttgcgggggttccccgatacctga

SEQ ID NO: 15514 - protein, 296 aa, Unknown
  Obtained from environmental sample
  misc_feature (1)..(296): Xaa is any amino acid
MIARGFARSAMNTIPITFNENLPAYTAVGGNERRASTGLSAVILNRGGRYPRYTFFEELEKLGFDYVLSIESSAANYDLESLSSGFPFVRFILPQGQINRGEEINLAASELSSPLFFVLWNDLKFLRSGGADRMAERLLTAERVEKNTYKRLCTTPLIQDARSETMPTLIAPAIISEKKTGKSIKTIPFIPRKEGQLTLYPFDGVGIYDRERFIRLNGFDPYIKNFHWQLMDFGFRSSLWGEEIAATQLIKLSYEAHVPEEDITAGQGFLRFYLKNLAPVFKGDHAHIPLRGFPDT

SEQ ID NO: 15515 - DNA, 525 bp, Unknown
  Obtained from environmental sample
  misc_feature (1)..(525): n is a, c, g, or t
gtggtcttttccaaactggatgcggacctaaaggttcccattgtggtggttcagcatatgcccgccggttttaccaatgaattcgcaaaaagcctggatcgtgtctgccctctggacgtaaaagaagccgaagacggggatgccatacagccaggccgtattcttattgcccagggaaataaacacctggaagtggaaaagaaattttccagcgcggtagcccgtctttccgacgcgccccaggtatcgggccaccggccttcggcggatgttcttttcgcttcggtagctatggcctataccaaccacgccctgggggtaatcatgaccggcatggggcgggacggcgcccagcagcttggaacgatttacaaagaaggcgggatgactctgggccaggacgaaaaaagcgcggtggtctacggtatgccgagggtggcctatgaactggggcatgttatggaacaggtttccctggaaaacatggcccggcgtatctgcgatgtagccaaaaccgaccgctga

SEQ ID NO: 15516 - protein, 174 aa, Unknown
  Obtained from environmental sample
  DOMAIN (1)...(169): CheB methylesterase
  misc_feature (1)..(174): Xaa is any amino acid
MVFSKLDADLKVPIVVVQHMPAGFTNEFAKSLDRVCPLDVKEAEDGDAIQPGRILIAQGNKHLEVEKKFSSAVARLSDAPQVSGHRPSADVLFASVAMAYTNHALGVIMTGMGRDGAQQLGTIYKEGGMTLGQDEKSAVVYGMPRVAYELGHVMEQVSLENMARRICDVAKTDR

SEQ ID NO: 15517 - DNA, 714 bp, Unknown
  Obtained from environmental sample
  misc_feature (1)..(714): n is a, c, g, or t
ttggatgacggaggtgtaccataccaacagttcaagcgacgccgacaagtggccggaggccttggatgtaaagattttaaagaatttgattttattatttattatctcacaacccccaccaacatcaacaccctgcatttaaaaccgtctttatcctttaacatacccttcataagatacgtacctctcgcaacacctcttgtgtcccatgcgccgatttttcctatgccgtggtccctgagcgaagtcgaaaaggggctgaaaccttcctactcttttgggggaaacacatattttttttccaaaggagggtttttaaaaaaaaaacaaagcgggtttttgccccccccccataattttttttttttttttttcccccccccccccacaaaaaaaaaaaaaaaaaccctctctttttttcctttcccccccccccaaaagaggaagggaggggggggggggggggggggggggnaaaaaaaaaaaaaccccccccccggggggggggggggggccccccccccccccccccgcggggnggggggggggggaaaaaaaaaaaaaaaaaaanntntttcccccccccaccacccacacggggggggggggggggggtgtgttttttttttttttattttttcaaacacaacaaaaaacaacggggacngggggggggggggggggggggggggggggggtttaattataaaataa

SEQ ID NO: 15518 - protein, 237 aa, Unknown
  Obtained from environmental sample
  misc_feature (1)..(237): Xaa is any amino acid
MDDGGVPYQQFKRRRQVAGGLGCKDFKEFDFIIYYLTTPTNINTLHLKPSLSFNIPFIRYVPLATPLVSHAPIFPMPWSLSEVEKGLKPSYSFGGNTYFFSKGGFLKKKQSGFLPPPHNFFFFFFPPPPTKKKKKTLSFFPFPPPQKRKGGGGGGGGGXKKKNPPPGGGGGAPPPPPRGXGGGGKKKKKKXXSPPHHPHGGGGGGCVFFFFIFSNTTKNNGDXGGGGGGGGGGLIIK

SEQ ID NO: 15519 - DNA, 372 bp, Unknown
  Obtained from environmental sample
  misc_feature (1)..(372): n is a, c, g, or t
gtgggtggtgggggggggaaananntttttttttttttttttttccccccccccccnccccgcggggggggggggggggggccccccccccccccccggggggggggtttttttttttttncccccccccccccccccccccccctcccttcctcttttgggggggggggaaaggaaaaaaagagagggtttttttttttttttttgtgggggggggggggaaaaaaaaaaaaaaaaaattatggggggggggcaaaaacccgctttgttttttttttaaaaaccctcctttggaaaaaaaatatgtgtttcccccaaaagagtaggaaggtttcagccccttttcgacttcgctcagggaccacggcatag

SEQ ID NO: 15520 - protein, 123 aa, Unknown
  Obtained from environmental sample
  misc_feature (1)..(123): Xaa is any amino acid
MGGGGGKXXFFFFFFPPPPPRGGGGGGPPPPPRGGGFFFFXPPPPPPPLPSSFGGGGKEKKRGFFFFFLWGGGGKKKKKNYGGGAKTRFVFFLKTLLWKKNMCFPQKSRKVSAPFRLRSGTTA

SEQ ID NO: 15521 - DNA, 633 bp, Unknown
  Obtained from environmental sample
  misc_feature (1)..(633): n is a, c, g, or t
ttgngntnnntngnnggngccccgncgcccgcgcccggcgcggtgtggttngttttgtgnntttttntttntntnttnnnnnngnnngnnggnnggggggggggggagagaaagaaaaaananannnnnntnnnntnttnnnnnnncnnnnccccccccccccccccccccnctgttgtggttttggtttattttataattaaacccccccccccccccccccccccccccccccngtccccgttgttttttgttgtgtttgaaaaaataaaaaaaaaaaaaacacaccccccccccccccccccgtgtgggtggtgggggggggaaananntttttttttttttttttttccccccccccccnccccgcggggggggggggggggggccccccccccccccccggggggggggtttttttttttttncccccccccccccccccccccccctcccttcctcttttgggggggggggaaaggaaaaaaagagagggtttttttttttttttttgtgggggggggggggaaaaaaaaaaaaaaaaaattatggggggggggcaaaaacccgctttgttttttttttaaaaaccctcctttggaaaaaaaatatgtgtttcccccaaaagagtag

SEQ ID NO: 15522 - protein, 210 aa, Unknown
  Obtained from environmental sample
  misc_feature (1)..(210): Xaa is any amino acid
MXXXXGAPXPAPGAVWXVLXXFXXXXXXXXGXGGGERKKKXXXXXXXXXXXPPPPPPXVVVLVYFIIKPPPPPPPPPPXSPLFFVVFEKIKKKKTHPPPPPPCGWWGGEXXFFFFFFPPPPXPRGGGGGAPPPPPGGGFFFFXPPPPPPPPPFLFWGGGKGKKERVFFFFFVGGGGKKKKKKLWGGGKNPLCFFFKNPPLEKKYVFPPKE

SEQ ID NO: 15523 - DNA, 531 bp, Unknown
  Obtained from environmental sample
  misc_feature (1)..(531): n is a, c, g, or t
atgggacaaaacctgtattttggaaggattgggcggggcccaaaaaattaccgggggcgggccctttctgggccccgccttttactcgtcagcgcccaaggtggcccttncaaacgacaccgccgcaacgccggacgcccgcctgcggggcctgccccttgcggacggtttgacgcccatgtacggcatggacacagcggccccacggccagcctgcgatccgtggccaagatcagccaagcccgcgcgcccaacggcgtcatcatcaatcaaaggctgaccggcagcctgttccgctcgccccagggacgggaaaaactgccgcatctgctgcgcagctttgtggatatgggcagttttcagtggcagttcaacatcgtcgacaacgaaacattgctcagggcgcagcaatttccggacgaataccgggacttggtggttcgggtggcgggctacagcgccatcttcgtcgaactgtcggcaaaggcgcaaaattccatcatcgcccgccatgcggccgacatagcctga

SEQ ID NO: 15524 - protein, 176 aa, Unknown
  Obtained from environmental sample
  DOMAIN (57)...(157): Glycine radical
  misc_feature (1)..(176): Xaa is any amino acid
MGQNLYFGRIGRGPKNYRGRALSGPRLLLVSAQGGPXKRHRRNAGRPPAGPAPCGRFDAHVRHGHSGPTASLRSVAKISQARAPNGVIINQRLTGSLFRSPQGREKLPHLLRSFVDMGSFQWQFNIVDNETLLRAQQFPDEYRDLVVRVAGYSAIFVELSAKAQNSIIARHAADIA

SEQ ID NO: 15525 - DNA, 561 bp, Unknown
  Obtained from environmental sample
  misc_feature (1)..(561): n is a, c, g, or t
ttgtttatattgcctgttgagatgaaatatccaatagactatagtattaacagaatgaaggaactaacaaaagaaaaggtgctggaaataataaaacgctacgctaatgatccccagcaactcattgccatactgctggacattcaggcagcttcgaacagaaactatgttgaccagcgatgggcagaactggcctcgtctgtcttaaatatacctctttccaaaatctacgacgtactgactttttacgccatgttcagcacaaaagcgcgcggtgaattcgtaattgaaatctgtaaaagcacgccctgccattttacaggggccgaagaagtaacacgctggtttgaagcggctgccggaattaacattggcgaaaccacaaaagacggaaaaatctccctttttcgcaccagctgtatcggcgcttgcgacatcgggcccgcagtaaaaatcggcgaacacatattcggaaacttatcggaggaaaaagtcaaaactcttataagatgctgcaaggaagggaaagcgaaggagctggaatcattatgtcagaactag

SEQ ID NO: 15526 - protein, 186 aa, Unknown
  Obtained from environmental sample
  DOMAIN (21)...(173): Respiratory-chain NADH dehydrogenase 24 Kd subunit
  misc_feature (1)..(186): Xaa is any amino acid
MFILPVEMKYPIDYSINRMKELTKEKVLEIIKRYANDPQQLIAILLDIQAASNRNYVDQRWAELASSVLNIPLSKIYDVLTFYAMFSTKARGEFVIEICKSTPCHFTGAEEVTRWFEAAAGINIGETTKDGKISLFRTSCIGACDIGPAVKIGEHIFGNLSEEKVKTLIRCCKEGKAKELESLCQN

SEQ ID NO: 15527 - DNA, 510 bp, Unknown
  Obtained from environmental sample
  misc_feature (1)..(510): n is a, c, g, or t
ttgcttgcggagctgaacagcataaaaccagttattgtagaaattggagtgcaaagcgcaaacaacaaaaccttggaaaacataaacagaaaccataccgcagagtgtactcgcgtagccgccttgctctgcaaaaattcaaaactcttaataactgctcatataataataggattgccaaatgaagatataaacgattttgcaagcaccgcgaaactggttagggactgtgaattttctgctgttaaaattcaccctttgcatatagtaaagggaacccgatttgcagaggaacatacgcagaataaaatagagcttttgtctatgggcgactattgcaaagcagttgcggaagttattcgcattgtgcagcctactgtagccatagaaagggtgagtgcggaatcacctgcggatatgcttgttgcaccagcttggtgcgggcagagggaaaaaatttgggagggcattaatgtccaactgcttgcggcaggtttgccgattcagtag

SEQ ID NO: 15528 - protein, 169 aa, Unknown
  Obtained from environmental sample
  misc_feature (1)..(169): Xaa is any amino acid
MLAELNSIKPVIVEIGVQSANNKTLENINRNHTAECTRVAALLCKNSKLLITAHIIIGLPNEDINDFASTAKLVRDCEFSAVKIHPLHIVKGTRFAEEHTQNKIELLSMGDYCKAVAEVIRIVQPTVAIERVSAESPADMLVAPAWCGQREKIWEGINVQLLAAGLPIQ

SEQ ID NO: 15529 - DNA, 783 bp, Unknown
  Obtained from environmental sample
  misc_feature (1)..(783): n is a, c, g, or t
gtggctcaactttttgaattagtagacgatgaaaaatgcgaaagaaaggcattggagcaaattgtttccagcgacccagttttagccgcaaggcttttgaaaaccaccaatgcgggcagcgagtctgttactggtattcacagcgcaataagcaagctgggttttgagcaggtaaaagacataagcctagaaatatcgatgtccagagcttttgagcttaaaaattccgctgtagatttgcaaaaattctgggaccattgcagcgcggttggcattgttgctcgcattgttgctagtgaatacgaacccaatttggcaagcgatgctttcacggcaggtcttttgcacgatattggaaaaatagttcttttgcaatatatgaacaaagaatttgagcaaacaataaatatgagcaaaagccgctcctcagaattgtacttggcagaaaaagagcttttaggtgtggatcacgggcaaataggctcttggcttgccgaaaactggaggcttccacgtgccataaacgaagttatgcaatatcatcaccatttggaaagggcgcaaataaacaagcctttagtgacccttgtgagctttgcagacattctgtgcagaattttaggagctggagacggcggaaattacgcgccccctgtatttacgccagagcttgcaggcgaactcggcaaatggcatataaatttggaattaagtgccttgcaaccccttatgcttttgtgcatagacgaattgaacaagaggaattttacgcagtatgggtaa

SEQ ID NO: 15530 - protein, 260 aa, Unknown
  Obtained from environmental sample
  DOMAIN (83)...(206): HD domain
  misc_feature (1)..(260): Xaa is any amino acid
MAQLFELVDDEKCERKALEQIVSSDPVLAARLLKTTNAGSESVTGIHSAISKLGFEQVKDISLEISMSRAFELKNSAVDLQKFWDHCSAVGIVARIVASEYEPNLASDAFTAGLLHDIGKIVLLQYMNKEFEQTINMSKSRSSELYLAEKELLGVDHGQIGSWLAENWRLPRAINEVMQYHHHLERAQINKPLVTLVSFADILCRILGAGDGGNYAPPVFTPELAGELGKWHINLELSALQPLMLLCIDELNKRNFTQYG

SEQ ID NO: 15531 - DNA, 909 bp, Unknown
  Obtained from environmental sample
  misc_feature (1)..(909): n is a, c, g, or t
atgatcngcgaaagcaaggtcggccgttcttcgctttatcttttggacacaaatattgatgaaaactctccggactttagaaatattaccgcttctctttacggcggcgacaaagaaaccagaatgcagcaggaaatccttttaggcataggcggcatccgcgctttacgcgcattgggaatcaatcccgcggctacccacatgaacgaaggacacgcggcgtttttgggccttgagcgaatccgcgaaataatggaagagaaaggatttacttttgaggaagcgcgcgaggctgtttggccgtcaaatatttttacgacccacactcctgttccggccggaaacgagcgttttgaaattcctatgatggaaaaatatttccgctcatggccgcaggttttgggaatttcatggaaagacttcctgggcctcggcaggatttacccgggcgacgagcgcgaaactttctgtatgaccgttctcgctcttaagatggcggcttacgccaacggcgtagcgaaattgcacggagtagtttcccgcgacatgtggaagggaatatggccgggattgccgttaaatgaaattccgattgggcacgtaacaaacggcgtacactcaagaacgtggatttccagcggcatgattgatcttttagacagatacttcggccccagtttcctggacaggcctaccgatttgaaaatttgggagcgcatggaccgcatctcagacgaagagctgtggcgcacccatgaacgccgccgtgaaaaacttgtcgcctttgtgcgagagcgcattaacgcgcagtatgtgcgcacaggcgccgcgcggcttaagcaggcggaagacgcccctttccccctacgcgctcaccctttgtttcgcccgcgggtttgccacttataa

SEQ ID NO: 15532 - protein, 302 aa, Unknown
  Obtained from environmental sample
  misc_feature (1)..(302): Xaa is any amino acid
MIXESKVGRSSLYLLDTNIDENSPDFRNITASLYGGDKETRMQQEILLGIGGIRALRALGINPAATHMNEGHAAFLGLERIREIMEEKGFTFEEAREAVWPSNIFTTHTPVPAGNERFEIPMMEKYFRSWPQVLGISWKDFLGLGRIYPGDERETFCMTVLALKMAAYANGVAKLHGVVSRDMWKGIWPGLPLNEIPIGHVTNGVHSRTWISSGMIDLLDRYFGPSFLDRPTDLKIWERMDRISDEELWRTHERRREKLVAFVRERINAQYVRTGAARLKQAEDAPFPLRAHPLFRPRVCHL

SEQ ID NO: 15533 - DNA, 441 bp, Unknown
  Obtained from environmental sample
  misc_feature (1)..(441): n is a, c, g, or t
gtggcgataggcggttctgcggtaaagcatccccaggtaatgaaggccagaattgggaccaggatcggagaacttattgaacagtgcggcggttttgttgacaagcccataagggtagccacaggatccccgctttccggaagggcggtaatggaccttgacgagccggtaacaaaaaactgctcctcggtatttgccgtgcgtaaaacccgcattgcggctcattgggaacaaaactgcattaactgcggggaatgcagggcggtatgccccctgggacttgatcctgaggatatctacaaacaaatcatcaccgcgggtattattaataaagatatctcaggctgtcatggctgcggatgctgcaaggtggtatgcccttcggccctgcctttgtcagagcttatactaaaggaaaaattgggggtaccgcgtgcctga

SEQ ID NO: 15534 - protein, 146 aa, Unknown
  Obtained from environmental sample
  misc_feature (1)..(146): Xaa is any amino acid
MAIGGSAVKHPQVMKARIGTRIGELIEQCGGFVDKPIRVATGSPLSGRAVMDLDEPVTKNCSSVFAVRKTRIAAHWEQNCINCGECRAVCPLGLDPEDIYKQIITAGIINKDISGCHGCGCCKVVCPSALPLSELILKEKLGVPRA

SEQ ID NO: 15535 - DNA, 432 bp, Unknown
  Obtained from environmental sample
  misc_feature (1)..(432): n is a, c, g, or t
gtgcccctccctgtaaccggcgggatccctgttacaagcattacggagaacgagcagtacagcggagccgtaacatggtcgccgacggtatcaggaacctttgccgcctcaacccagtacaccgctgtcattacccttacgcccaaaatcggctactcattgcaaggggtgtcggctaacttctttacggttgcgggggcgacatcggttaggaacaatgccaattcaggcgttattactgcggtatttccgtcaacccctgccaacgatgatttcaacatcagcggaaccggaacatttatctatgatcgtaacactaaagttgtaaccataacgcccaaagcaggaaaatcaaccggggcagtgaccgtcaagtacaatggcaatacagttgcccccttcttcagtcggaaactacacggttacctttga

SEQ ID NO: 15536 - protein, 143 aa, Unknown
  Obtained from environmental sample
  misc_feature (1)..(143): Xaa is any amino acid
MPLPVTGGIPVTSITENEQYSGAVTWSPTVSGTFAASTQYTAVITLTPKIGYSLQGVSANFFTVAGATSVRNNANSGVITAVFPSTPANDDFNISGTGTFIYDRNTKVVTITPKAGKSTGAVTVKYNGNTVAPFFSRKLHGYL

SEQ ID NO: 15537 - DNA, 465 bp, Unknown
  Obtained from environmental sample
  misc_feature (1)..(465): n is a, c, g, or t
atgacagatcggccgagtaccaggcgcattgagggaaaacacgttattcccgtaccgtccatagaaataaagaaaagctatccgaatatattttttaacgccataaaaattttaagaagaaaaaaagggccggtaggttttggagctactcccagcgtccatgaaaaatcagttgtacgcccagaatattcaaaacaggggaaggtaataatatcacaggcggcgctcagtcagatggtaattcactgcatagatgaatacaacaaaaatatcaggataaaaaaaatcgtcgtaaaagacgatgaaatgggataccggctggttattacaattgacgtaccgtttggcactcaactgggaggaaatatacacgaattacagcgatacctgatcgataatatagggcgttataccggaattctaattgaagaggtaaatataataattgacaagatcacgcaataa

SEQ ID NO: 15538 - protein, 154 aa, Unknown
  Obtained from environmental sample
  misc_feature (1)..(154): Xaa is any amino acid
MTDRPSTRRIEGKHVIPVPSIEIKKSYPNIFFNAIKILRRKKGPVGFGATPSVHEKSVVRPEYSKQGKVIISQAALSQMVIHCIDEYNKNIRIKKIVVKDDEMGYRLVITIDVPFGTQLGGNIHELQRYLIDNIGRYTGILIEEVNIIIDKITQ

SEQ ID NO: 15539 - DNA, 729 bp, Unknown
  Obtained from environmental sample
  misc_feature (1)..(729): n is a, c, g, or t
gtgcatgcccatgaactgcgccccctgacatttgaggatgcggcgctttttcttgacagggcggtgcaggtaaaacagcgccggacagccgcgtattttctagccgccgcggagaaaaccggatctgccgccagaatccccgcgtctgccgccgaatatgccaggggttctgacagtgtcgccgcaatgatcaatggggttgccacggtaatagtcgataaaggcataaaaattgagcgcggcgtgggttacgcggacaaggttttgggatccgctttttttatcgattcaaccggcctgttaataacaaattaccatgtaatcgcaagcgaggtagaccccaagtatgaagggtattcccgtatgtatatcaggatgggtgacagttcaagcccccgtttcccggcgcgggtaatcggctatgataaggcgctggaccttgcgttgattaaaactgagtataaaagcgaattcattttttccatagtggataaggtcgttccccaggtgggcgatacggttattgctattgggtcgccggtaggtcttgagaaaacagtcacatccggtattgtatcgtcgcttagccgccgcctcctgcaaatcggggatgtgtaccagatagacgccgcggtcaaccccggcaattccggcggcccggtcctggacgcgtcgggcaggcttgtgggcattgtttttgccggcgcagatcagttccagggggcttaa

SEQ ID NO: 15540 - protein, 242 aa, Unknown
  Obtained from environmental sample
  DOMAIN (63)...(240): Trypsin
  misc_feature (1)..(242): Xaa is any amino acid
MHAHELRPLTFEDAALFLDRAVQVKQRRTAAYFLAAAEKTGSAARIPASAAEYARGSDSVAAMINGVATVIVDKGIKIERGVGYADKVLGSAFFIDSTGLLITNYHVIASEVDPKYEGYSRMYIRMGDSSSPRFPARVIGYDKALDLALIKTEYKSEFIFSIVDKVVPQVGDTVIAIGSPVGLEKTVTSGIVSSLSRRLLQIGDVYQIDAAVNPGNSGGPVLDASGRLVGIVFAGADQFQGA

SEQ ID NO: 15541 - DNA, 981 bp, Unknown
  Obtained from environmental sample
  misc_feature (1)..(981): n is a, c, g, or t
ttgcagcccaagatagaccggctgttgaaagccaaccccatgctggggcaccggggatgccgtcttgccattacctatcctgaaatttacgatatgcaggtgagggctattgcccacggggcggtggaatgcgtcaaacagaatattccggtacatcccgagataatgatccccattgttattaccgcccgcgaacttaaactgctccgtcccaacgcggagaaaattctcgagaaagtctttggcgacgcgaaagtaaaggttccggtcaagatcggtacgatgatcgaagtgccgcgcgcggcgattcgttccgctcatatcgcgcattatgcggacttcttcagctttggaaccaacgatcttactcaaatgaccttcgcgttcagccgcgacgacgtcgcttcattcctgccggtatatctggagaagaatgtgcttgatgtggatccgtttaagaccattgatgaagacggcgttggcggtttgatgcgcgttggtattaccatgggacgcgctgtaaagccggatcttaaaataggtatctgtggagagcacggcggcgatcctgctactattgacttttgttatagagcggggttaagctatgtttcatgttcaccattccgggtgccgctggcacgtcttgccggcgcacaagcggttataaataattccggaaagaatgttaagggaggggaaacagcgaaagctgctaaacccgcatctgccaaggtgaagggcagaaaaaaacctggaagggaggagaagaaaatggcagaaggaactgtcaagaagaccgcggcaaagaagcccgcggcgaagaaacccgccgcgaagaagaccgcggcgaagaaacccgcagcaaagaaaactgcggcgaagaaacccgcagcaaagaaaactgcggcgaagaaacccgcagcgaagaaaactgcggcaaagaaacccgcagcgaagaaaactctcggccgattctga

SEQ ID NO: 15542 - protein, 326 aa, Unknown
  Obtained from environmental sample
  DOMAIN (1)...(223): PEP-utilising enzyme, TIM barrel domain
  misc_feature (1)..(326): Xaa is any amino acid
MQPKIDRLLKANPMLGHRGCRLAITYPEIYDMQVRAIAHGAVECVKQNIPVHPEIMIPIVITARELKLLRPNAEKILEKVFGDAKVKVPVKIGTMIEVPRAAIRSAHIAHYADFFSFGTNDLTQMTFAFSRDDVASFLPVYLEKNVLDVDPFKTIDEDGVGGLMRVGITMGRAVKPDLKIGICGEHGGDPATIDFCYRAGLSYVSCSPFRVPLARLAGAQAVINNSGKNVKGGETAKAAKPASAKVKGRKKPGREEKKMAEGTVKKTAAKKPAAKKPAAKKTAAKKPAAKKTAAKKPAAKKTAAKKPAAKKTAAKKPAAKKTLGRF

SEQ ID NO: 15543 - DNA, 540 bp, Unknown
  Obtained from environmental sample
  misc_feature (1)..(540): n is a, c, g, or t
gtgtcgttcgtagtcaataatcttttgattttaaggtttttggccttgttttctatatatattttaggaatcatgcagactacagacaccccgatttacggtattcaccctgtggaagagcttctttccgcccgccgtcaggacgttgagcacgtctattttgacaaggataagcggagccaggcgcttttcgagcttctgcgtatttgccggcgggagcggatgtcttacaatttggtgccggaggttaagctcgacgccttggcggggacgcggcggcatcagggggttgtggctttttgcagcgtgcggccttacgacggggcggaggtcattgacggcatcgtttcggcgaaggcggcgccgcttttcgtggtcgcggcgtctatagaggatccgggggatttgggggcgataattcgttcttgcgtttgtttgggggccgacgcgttgttattggagcggaagaacaccgttcccgttgacgcggcggtggccaagagttcggcggggatgtttgagcatatccgtatccgttag

SEQ ID NO: 15544 - protein, 179 aa, Unknown
  Obtained from environmental sample
  DOMAIN (31)...(107): RNA 2'-O ribose methyltransferase substrate binding
  misc_feature (1)..(179): Xaa is any amino acid
MSFVVNNLLILRFLALFSIYILGIMQTTDTPIYGIHPVEELLSARRQDVEHVYFDKDKRSQALFELLRICRRERMSYNLVPEVKLDALAGTRRHQGVVAFCSVRPYDGAEVIDGIVSAKAAPLFVVAASIEDPGDLGAIIRSCVCLGADALLLERKNTVPVDAAVAKSSAGMFEHIRIR

SEQ ID NO: 15545 - DNA, 882 bp, Unknown
  Obtained from environmental sample
  misc_feature (1)..(882): n is a, c, g, or t
ttggcgggcggcgccgttgcgtccgtcgtatgggcgttcatcgtcttgggaaagcggcgcgccgtcaaagcgcagaaggccgagaaagagcagatcatgacctccataggggagacgctcgcggaggccgacgccatcgagacgaatttcagaagcggcgcgctggcttccgaggctttccgccgcggactgggcgaccgcgtgaacgcaattatgcgtctgctgcgtaccaacatgcacatcctcgacgcgtttttcgtgaagtacgccgagcacgaggcgcgcgagtacctccgcataatagataacccggagcgccgcaagcatgacgagcagcggctcccggccgcgtccattccgggcgccgtcgataaagccgacatgtacgaaccgcccgctcccgtgccggaagcggtgccggtcgccatcgacacccccgataggtacgaactgccggtcgcggcgcccgcgccgatatctagcgacgttgtcacggtcggtgaattcgaaccgccgataaccgccgccgaacaagaagaatcgccgcacgtcgccctcgcgcctatagccgaagacgacgacgagattgccgaagccgccgccgcggctgacggcttggaaccgccgatcgcccagcaagaaccgagcgccgccgtccggcacgaaccgccccccgccgcgcccgcgccgatagccgctgttgcagttgactccgccgatgatttcgaaccgccgttcgccccgcccgcgttgcctgacgccgccggtacggtcgaaccgcatgaacccgccctccgcacccccgggggccgggcggccgccgagacgaccacccctgtacaaagtgggcgcccgccccccccatcagggaagaggaattag

SEQ ID NO: 15546 - protein, 293 aa, Unknown
  Obtained from environmental sample
  misc_feature (1)..(293): Xaa is any amino acid
MAGGAVASVVWAFIVLGKRRAVKAQKAEKEQIMTSIGETLAEADAIETNFRSGALASEAFRRGLGDRVNAIMRLLRTNMHILDAFFVKYAEHEAREYLRIIDNPERRKHDEQRLPAASIPGAVDKADMYEPPAPVPEAVPVAIDTPDRYELPVAAPAPISSDVVTVGEFEPPITAAEQEESPHVALAPIAEDDDEIAEAAAAADGLEPPIAQQEPSAAVRHEPPPAAPAPIAAVAVDSADDFEPPFAPPALPDAAGTVEPHEPALRTPGGRAAAETTTPVQSGRPPPPSGKRN

SEQ ID NO: 15547 - DNA, 723 bp, Unknown
  Obtained from environmental sample
  misc_feature (1)..(723): n is a, c, g, or t
gtggaatccgatcctatttatgtacagataacaataacaaacaacagtccttatccgtacagattcaaacttgccgacgacagggtattttcggttgattttgacataaggtcaatgcaaaacagaactctcccgcaggcggattctcttgtccgaaagcggactcagtacaaccagatttttttccgtgaaatagccatagaaagcggagagtctttttcatttatagaagacctgcgtgattatgtaaacttccaaaacagcggttctttcagggtgtccgcaaaagtctacccggaattgtacaaatcgacaatagctgcggcaatggaatccaattttttaaatctgacactgcgtcccgcttccgttcaaggaccggacggtattccgctggaaatggatgtcgctacgggagcggttcttgtacggcagcagcttcccccggacgaagttgtcgcgtatatgctgacagcaagacagcaatcccaatgggaaagattcttcctttatcttgaccttgaagccatgatgtcgcgggacgcggtgcagaaacgcagatggcttgccgagaacgaagaaggaagaagacgcatgatatcggaataccgcatgaacctgcaaaatgccttaattgacggagatatcagcgttatccccacatcctttgaaattttaaggactgtatacaacaataacgaaggaacggtaaccgcaatttaa

SEQ ID NO: 15548 - protein, 240 aa, Unknown
  Obtained from environmental sample
  misc_feature (1)..(240): Xaa is any amino acid
MESDPIYVQITITNNSPYPYRFKLADDRVFSVDFDIRSMQNRTLPQADSLVRKRTQYNQIFFREIAIESGESFSFIEDLRDYVNFQNSGSFRVSAKVYPELYKSTIAAAMESNFLNLTLRPASVQGPDGIPLEMDVATGAVLVRQQLPPDEVVAYMLTARQQSQWERFFLYLDLEAMMSRDAVQKRRWLAENEEGRRRMISEYRMNLQNALIDGDISVIPTSFEILRTVYNNNEGTVTAI

SEQ ID NO: 15549 - DNA, 570 bp, Unknown
  Obtained from environmental sample
  misc_feature (1)..(570): n is a, c, g, or t
atgagaaaagacatttataattgcattaaaaagaaaggatacaatggcggaagaacccagttctataaatactgtgaacatttggcagaaattgaaatggtggagcctgcggggaacctgagaatcgatgaactccgtgatgagcaaacgaagttaaaataccattatgttaccagaaaccagatatttcactatatctggaatggtgaagctgaaagtgatattggcaaggaagacatcgaatatataaaaaacttgtttccggttgtccagatcctcgcaaaatgcctttgtcagtttcggaacatttttgtaaaaaagagcagggaagttcttttggaatacatagcaacatataagaattgcgaattggaaccgataaaaaggaacgcggaaagcatgcaaaaagatattgatccggtcactaatgccgttactgaagaatacagtaacggttttgttgaaggaaccaacaataaactaaaagtaataaagagagtaggctatggtcgctgtaaattaccactgttaaaatctaaagttgtgctacctgcctttttttggctatag

SEQ ID NO: 15550 - protein, 189 aa, Unknown
  Obtained from environmental sample
  misc_feature (1)..(189): Xaa is any amino acid
MRKDIYNCIKKKGYNGGRTQFYKYCEHLAEIEMVEPAGNLRIDELRDEQTKLKYHYVTRNQIFHYIWNGEAESDIGKEDIEYIKNLFPVVQILAKCLCQFRNIFVKKSREVLLEYIATYKNCELEPIKRNAESMQKDIDPVTNAVTEEYSNGFVEGTNNKLKVIKRVGYGRCKLPLLKSKVVLPAFFWL

SEQ ID NO: 15551 - DNA, 888 bp, Unknown
  Obtained from environmental sample
  misc_feature (1)..(888): n is a, c, g, or t
gtggagatgctggacaagcgaagactgtttcacaaagctttcaacccaacggacggcgttaatgtgcagcgttgctacgatatgcctttcactcagaaagcaagcggtgcttttgagtttgacagtgatagcttgatgaatagaaataaccgattggtaggcggattttttcctgagatattgacgaatagaactggcgctgattacagcgattgcccaaactgcgatgcaaagagacccgcagggtgttttgctccgctggtaaaacaagtaagtgccagtacatttgataattacgaagctaaaaatggcgacttctcagatggcgacactccatcaagaggagcttttggagctacgccagccacagaaagtatttggaattgggctatcccaaatgatgcgccagatggcaaaacaactagggataacatgaattggtatttgcacggaaccacggcaataaagggagagaatatggctccagccaatctgttcttctgctttgaaagccacgcagatttcgtatacgaccctgagcaggaattcttcttccgcggcgatgatgatatttggatttacataaacaatcagcttgtgatagacttgggcggcacacatttggcggctccgggtcacataaagctaagcacaataaggccagctctagtgccgggcgaaacctaccccatagacatattcttctgcgaccgccgctcaaccatgagcaacgtgcgcataaacaccaatatgtatatcaagcaagcagccagcttctggagtgagccttctaaacgagaacagcccatgtgcgcagaaataagcggtggcaacgactgcgctagcagaatgggagtgggcggcggagggtgcggagaagccctttaa

SEQ ID NO: 15552 - protein, 295 aa, Unknown
  Obtained from environmental sample
  misc_feature (1)..(295): Xaa is any amino acid
MEMLDKRRLFHKAFNPTDGVNVQRCYDMPFTQKASGAFEFDSDSLMNRNNRLVGGFFPEILTNRTGADYSDCPNCDAKRPAGCFAPLVKQVSASTFDNYEAKNGDFSDGDTPSRGAFGATPATESIWNWAIPNDAPDGKTTRDNMNWYLHGTTAIKGENMAPANLFFCFESHADFVYDPEQEFFFRGDDDIWIYINNQLVIDLGGTHLAAPGHIKLSTIRPALVPGETYPIDIFFCDRRSTMSNVRINTNMYIKQAASFWSEPSKREQPMCAEISGGNDCASRMGVGGGGCGEAL

SEQ ID NO: 15553 - DNA, 321 bp, Unknown
  Obtained from environmental sample
  misc_feature (1)..(321): n is a, c, g, or t
atgattacncgcgccaaagaagatacggttcataacaggcggattgtttcaagccgtttgtataacgagggtattgtagcgaaactttttacggttatcgcgcctagaatgaaagaccgcaacggcgggtacacccgtattatcaaacttggagagcgcaaaggcgatgccgccgaagttgtcattctggaactggttgattataaattggataccaccgagaaaaagaaagcgaaaaaaggcgaagaaaagcctgccgccaagagcgataagcccgccaagaacagtaaacccgtcaaagacggcaagaaggggaaataa

SEQ ID NO: 15554 - protein, 106 aa, Unknown
  Obtained from environmental sample
  DOMAIN (1)...(66): Ribosomal protein L17
  misc_feature (1)..(106): Xaa is any amino acid
MITRAKEDTVHNRRIVSSRLYNEGIVAKLFTVIAPRMKDRNGGYTRIIKLGERKGDAAEVVILELVDYKLDTTEKKKAKKGEEKPAAKSDKPAKNSKPVKDGKKGK

SEQ ID NO: 15555 - DNA, 735 bp, Unknown
  Obtained from environmental sample
  misc_feature (1)..(735): n is a, c, g, or t
ttgaacatcttgaaggcttttcttcaggctgttctggacctgccggcggaagaatacggccgcctggtcatagttgaccctcatttgcacagggaatccccggatgacaagctcggggtgctggacgtaaaaatccacaccaccacgggccaggtcattgacgtggaaatacaagtcaaaccccatcgccgtatttgggaacgaatcttgttctacgccgcccgcctgaccacggaacagatgaaagccggtctctcttataaggaaatcaagaaagccgtaagcataataattgtggatggggacataaccccgcaagacccggagcattaccaccaccgcttccggctgttcgatgaacggacgggttatcgcttcccggacctgtttgagataaataccctggaactgccaaaactgcccggtgaacctgatgggaccatgttgttcaactggcttaagatgtttacggccaagaccaaggaggaatttagtatggtagccaagaccagcccggatatagccaaagccgtgggcgtcatcatggaattgagcgaggatgaaaggacgcgccttttggccgaagcgcgggaaaaataccgccgggacgaggaagcccggcgggaagatgcctatgaggacgggaaagtggaagggcggcaggaagggcggcaggaagggcggcaggaaggtgagcgcaataaggcgatagttattccaaaagcctcttgctga

SEQ ID NO: 15556 - protein, 244 aa, Unknown
  Obtained from environmental sample
  misc_feature (1)..(244): Xaa is any amino acid
MNILKAFLQAVLDLPAEEYGRLVIVDPHLHRESPDDKLGVLDVKIHTTTGQVIDVEIQVKPHRRIWERILFYAARLTTEQMKAGLSYKEIKKAVSIIIVDGDITPQDPEHYHHRFRLFDERTGYRFPDLFEINTLELPKLPGEPDGTMLFNWLKMFTAKTKEEFSMVAKTSPDIAKAVGVIMELSEDERTRLLAEAREKYRRDEEARREDAYEDGKVEGRQEGRQEGRQEGERNKAIVIPKASC

SEQ ID NO: 15557 - DNA, 300 bp, Unknown
  Obtained from environmental sample
  misc_feature (1)..(300): n is a, c, g, or t
atgtcaccgataaggacaaaaccagtgttccctccaaggcagacggcggcgttaaaggcgacgttggctccaaaaaagacggcgcctccaaaagcgacgttggcgcaaaagcagatggcgcctcctctggaggcgaaggctcaaaaaatgacgcaactcccaaaggagacggcgcctccaagggaaacgacgcttcctccggaggcggcgcctccaagggaggcgggacaaaaggcaaggcaaagcctgctgcctaaaccgagcgaaattgaacaagaaaccgcgttttttttgcgataa

SEQ ID NO: 15558 - protein, 99 aa, Unknown
  Obtained from environmental sample
  misc_feature (1)..(99): Xaa is any amino acid
MSPIRTKPVFPPRQTAALKATLAPKKTAPPKATLAQKQMAPPLEAKAQKMTQLPKETAPPRETTLPPEAAPPREAGQKARQSLLPKPSEIEQETAFFLR

SEQ ID NO: 15559 - DNA, 312 bp, Unknown
  Obtained from environmental sample
  misc_feature (1)..(312): n is a, c, g, or t
ttgaacaagaaaccgcgttttttttgcgataactgcggcagcgaagtcggccagaacgaaaaatcctgccggaaatgcggaaggtattttgcctccgtgcgctgcccttcctgcggacacattggagacgaaagctctttcggcaacggctgcccttcctgcggttattcagccgcgccgggaaaaccggccgcgaaaaaatccgaaacacagcggatggttcccgccggaaaactccctttatgggtttatatcatttcaatctgcgctttcatcgccgtatgcgcggctttaatattcaggtttaggtaa

SEQ ID NO: 15560 - protein, 103 aa, Unknown
  Obtained from environmental sample
  misc_feature (1)..(103): Xaa is any amino acid
MNKKPRFFCDNCGSEVGQNEKSCRKCGRYFASVRCPSCGHIGDESSFGNGCPSCGYSAAPGKPAAKKSETQRMVPAGKLPLWVYIISICAFIAVCAALIFRFR

SEQ ID NO: 15561 - DNA, 573 bp, Unknown
  Obtained from environmental sample
  misc_feature (1)..(573): n is a, c, g, or t
gtggccctgtccctcgctttcgccgtctacgtcggggtctggcacggcgccgaacacgcctccctcttcctggccggctattttctggaaaaatcgctctccgtggacaacctctttgtgatcatggccatattcagttctttcgcggtcaaggacgccttccagcaccgggtgctttactacggcatcatcggcgccctggtcctgcgcctggtcttcatcgccctgggcagttccctggtgatgatgttcggtccttatgccttggcggccttcggcctcttcgtcctctggtcggcctggaaaatgtggcggaacctggaccatgaagacgaggaactcgaagactattccaaccattgggcggtggccgccacccgccgcttcttcccggtccaaaatatgatgaacggccataatttcttcaccaaggttcgggaaagactccaaaacccggtcgggaaagccccccccgctttttcctggtgcctgggcggtcggtggaagaatttcaaaaacctcatgtttcccccttcgaaattccgtttccgggcgggtccatccgccccttga

SEQ ID NO: 15562 - protein, 190 aa, Unknown
  Obtained from environmental sample
  DOMAIN (22)...(145): Integral membrane protein TerC family
  misc_feature (1)..(190): Xaa is any amino acid
MALSLAFAVYVGVWHGAEHASLFLAGYFLEKSLSVDNLFVIMAIFSSFAVKDAFQHRVLYYGIIGALVLRLVFIALGSSLVMMFGPYALAAFGLFVLWSAWKMWRNLDHEDEELEDYSNHWAVAATRRFFPVQNMMNGHNFFTKVRERLQNPVGKAPPAFSWCLGGRWKNFKNLMFPPSKFRFRAGPSAP

SEQ ID NO: 15563 - DNA, 351 bp, Unknown
  Obtained from environmental sample
  misc_feature (1)..(351): n is a, c, g, or t
atgatcagatggcacgagcgttcacctgacccggcgtcgaacccgtaccttgcgctttcattaatcattgccgcggggctggacggaattgaaaacaggatgacgctgccgcccgccgtagacgccgacctttacacagccgacggtaacgtgacaaaaccgcttgaacggctgccgggcagccttgacgcggctattgccctcgctgaaaactcacaattcgtaaaaagcgtacttggggaagagcttgtttcaaagtacgtcgccgtcaagaaaaccgaggcgggtgatttcgccgccgccgaaaacaaagaggttttttacaaagaccggtactttagcgttatataa

SEQ ID NO: 15564 - protein, 116 aa, Unknown
  Obtained from environmental sample
  misc_feature (1)..(116): Xaa is any amino acid
MIRWHERSPDPASNPYLALSLIIAAGLDGIENRMTLPPAVDADLYTADGNVTKPLERLPGSLDAAIALAENSQFVKSVLGEELVSKYVAVKKTEAGDFAAAENKEVFYKDRYFSVI

SEQ ID NO: 15565 - DNA, 552 bp, Unknown
  Obtained from environmental sample
  misc_feature (1)..(552): n is a, c, g, or t
atggaaagcgctttgatagtttcaaactcggaaaaagacaccgccttttttacagagatgttacgggccgcttccgttcatcacattacctccattatgtccgttgataacgcgcggcggcttgtgttaaaacaggatttcgatttggtaattgtcaacgcgccgctccgggatgaatccggcgaaagtttttccaggcataccgcttccaagggcgtgtcgcaggtgatcctcctggtaaaaagcgaattttttaattccgtatccgccgtctgtgaggaggacggggtacttaccatttcaaaacccgttgacaaaactattttttgggcttcgctgtcgctggccaaatcggcccaaagcaggataaggcggatacaggctgaaaacgcgcagctaaagcaaaaaatagaggacatccgcgtcattaaccgcgcaaaatgcgtattaatatctttcatgaacatgagcgaacaggaagctcaccgctacatagaaaaacagcgatggatatgcgttcgtcacggagaatgggtgcggaaaggatattga

SEQ ID NO: 15566 - protein, 183 aa, Unknown
  Obtained from environmental sample
  misc_feature (1)..(183): Xaa is any amino acid
MESALIVSNSEKDTAFFTEMLRAASVHHITSIMSVDNARRLVLKQDFDLVIVNAPLRDESGESFSRHTASKGVSQVILLVKSEFFNSVSAVCEEDGVLTISKPVDKTIFWASLSLAKSAQSRIRRIQAENAQLKQKIEDIRVINRAKCVLISFMNMSEQEAHRYIEKQRWICVRHGEWVRKGY

SEQ ID NO: 15567 - DNA, 312 bp, Unknown
  Obtained from environmental sample
  misc_feature (1)..(312): n is a, c, g, or t
atgaaaaataaaataattttagttggcggatattgtgctactggaaaatcagttttctctaataaattagcaaatttatttaatattccatgttttaataaagatgttattaaggaagttcttggagatggatttggttctgaaaataatatggtagaattaaagggtagtgctgctacatttttgcttatgttgcatatagccgaaaaaatattacaagcccataatatatgtgtattggaaagtaattttaaacaaaagaaatggatcaaattaagatattattggaaaaatataattgtgaatgtttaa

SEQ ID NO: 15568 - protein, 103 aa, Unknown
  Obtained from environmental sample
  misc_feature (1)..(103): Xaa is any amino acid
MKNKIILVGGYCATGKSVFSNKLANLFNIPCFNKDVIKEVLGDGFGSENNMVELKGSAATFLLMLHIAEKILQAHNICVLESNFKQKKWIKLRYYWKNIIVNV

SEQ ID NO: 15569 - DNA, 531 bp, Unknown
  Obtained from environmental sample
  misc_feature (1)..(531): n is a, c, g, or t
atgctgttacaatttattggaaaacagggacgggctcatcctggggatttgcacggtttccaggccttgatcaaactggggctggttccttacggcgcttaccgcagggcggaggagtccatgcccacccttacctttaaccgcgttggccgtcatgtttcccgtatggttcgcacgcttgtaatgccggcttcttccccctggcttgcgttggaaaatttcggctcagttcatgtgctgccggtaagccacggcgagggacgcctcgttatcggcaaagcggaaggagaagcgttattcaaaaacgcgcaggttccattttgttatgccgacgaaaacggccggccaaccatgcgggaaccggacaatcccaacggatcggattttgccattgaagggctgtgcagtcccgacggcaggatactcggcaagatggcgcattctgaacgccggggcgaatacgtccatattaatatacccggcgataaaaggcagaatatttttgaagccggggtccggtattttagttaa

SEQ ID NO: 15570 - protein, 176 aa, Unknown
  Obtained from environmental sample
  misc_feature (1)..(176): Xaa is any amino acid
MLLQFIGKQGRAHPGDLHGFQALIKLGLVPYGAYRRAEESMPTLTFNRVGRHVSRMVRTLVMPASSPWLALENFGSVHVLPVSHGEGRLVIGKAEGEALFKNAQVPFCYADENGRPTMREPDNPNGSDFAIEGLCSPDGRILGKMAHSERRGEYVHINIPGDKRQNIFEAGVRYFS

SEQ ID NO: 15571 - DNA, 471 bp, Unknown
  Obtained from environmental sample
  misc_feature (1)..(471): n is a, c, g, or t
atgctacttgatgagaaaatagaaaatgatattattactaccaacagtccacatataagtgatggtctgcttagaatcatagcttttagtgttatttcacagaattatgatttccctattctatcatataatgagcaacatggtggtttaattttacttgatgagattgaaaatggtatcaatccatatttaactgaaaaaattattgatttattacgtgtcaccataaaaaaatcaggacggcagataattgttactacccacagcccggtaatattaaatgattttaaacaggaagaaattatatttttgtggaaagaggataatggttctgttcattcaaaaaaattctttgatactgaagaaatgaaatcgcttctggaagctcttaatcctggtgaagtttggataaatttagagaagaaagatattttaaaaagactttcctccaagaaagaagggaaagaatga

SEQ ID NO: 15572 - protein, 156 aa, Unknown
  Obtained from environmental sample
  misc_feature (1)..(156): Xaa is any amino acid
MLLDEKIENDIITTNSPHISDGLLRIIAFSVISQNYDFPILSYNEQHGGLILLDEIENGINPYLTEKIIDLLRVTIKKSGRQIIVTTHSPVILNDFKQEEIIFLWKEDNGSVHSKKFFDTEEMKSLLEALNPGEVWINLEKKDILKRLSSKKEGKE

SEQ ID NO: 15573 - DNA, 729 bp, Unknown
  Obtained from environmental sample
  misc_feature (1)..(729): n is a, c, g, or t
atgctggacgcncaatacattggcagcctggtagtggagacaaacagctcaagaccaaaaggggaaccgtcaattgagatgatcatttccgcagacaaagacggaaatattaacgcggaagcctatgatcttgactctgggccaaacggagaacgccataccctgaatgtctcgctgcaaaacatagatacgctggccgatttagacaatacccaggactttgcatttaatagccggtcgtacaaatataatagtaaaaagaataccgggaatgagcggaaattcccctggcttatcctggtcattgccgcgctgtttatcgccctggcgattgtggcgctatggttcttcttccttggcggcagggatgccttttcgacaagctcatcgtccgaaacaaagcccggttatgaatattccgcgccgccgccttcggcccgccaggaaacacagccgatacaggagcaagcgcctgtaattcagccaccggcaccgccgcctccgtcggcaccgccgcctccgcctccgacccgggctgcggaaccggaaccacctgttatcagagcgccggcatcccctgtccagcccaagccggtggtcaagcgtgtccgccctccggcgcccgttatgtcattcaaagtaccggctgtcattccaaggaatggcgtggtataccagatacaatggggcgatacccttgggatattcagccgcctcgtgccgatctga

SEQ ID NO: 15574 - protein, 242 aa, Unknown
  Obtained from environmental sample
  misc_feature (1)..(242): Xaa is any amino acid
MLDAQYIGSLVVETNSSRPKGEPSIEMIISADKDGNINAEAYDLDSGPNGERHTLNVSLQNIDTLADLDNTQDFAFNSRSYKYNSKKNTGNERKFPWLILVIAALFIALAIVALWFFFLGGRDAFSTSSSSETKPGYEYSAPPPSARQETQPIQEQAPVIQPPAPPPPSAPPPPPPTRAAEPEPPVIRAPASPVQPKPVVKRVRPPAPVMSFKVPAVIPRNGVVYQIQWGDTLGIFSRLVPI

SEQ ID NO: 15575 - DNA, 456 bp, Unknown
  Obtained from environmental sample
  misc_feature (1)..(456): n is a, c, g, or t
ttgatcgacgacgccgtggcgcgcgttgtaaagggcgaaggcggttttttatgggcgtgcaaaaattacgacggcgacgttcaaagcgacatgatcgcgagcgccgcgggaagcctcgcgatgatgacgagcgtccttgtctccccttccggcgtttttgaatacgaagcggcccacggcaccgtacagcagcactactaccgctggcaaaaaggcgaaaaaaccagcaccaaccccaccgcccttattttcgcgtggtcaggcgctctcgcaaaacgcgcggaattggacggcttaaaagacttggcggatttcgcaaaacgccttgaagcggcagtgttaaacgttatagaagacggaataatgacgggggacttggcgaaactttccgacccgccgcccgaaaaagtccttaactcatgggactttatcgacgctatagcggacaggttgtaa

SEQ ID NO: 15576 - protein, 151 aa, Unknown
  Obtained from environmental sample
  misc_feature (1)..(151): Xaa is any amino acid
MIDDAVARVVKGEGGFLWACKNYDGDVQSDMIASAAGSLAMMTSVLVSPSGVFEYEAAHGTVQQHYYRWQKGEKTSTNPTALIFAWSGALAKRAELDGLKDLADFAKRLEAAVLNVIEDGIMTGDLAKLSDPPPEKVLNSWDFIDAIADRL

SEQ ID NO: 15577 - DNA, 654 bp, Unknown
  Obtained from environmental sample
  misc_feature (1)..(654): n is a, c, g, or t
ttgatatccctgtcatcgggggggaacgtcgtgacccgtgaaggaaccaggcgctttattgaagccggcgctgacgcggtaaaggtgggcataggccccggctcaatttgtacgacccgcgtgttcgccggtgccgggatgccacagttcaccgctgtttgggactgcgccgaggaggcggtcagggacgggatacccgtcatcgctgacggaggcatcaagtactccggggacatccccaaggccataggcgccggggccgacgtggtaatgatcggcaatcttttcgccggtctgaaggaagcccctggcgaggagatcctttttgacggcaggatatacaaggagtaccgcggcatgggcagtattggcgcgatccacgacggctccgcggatcgctaccaggccagcaaagacgaaacccctgtgccggaaggcattgaagggcggcttccctacagaggcgagcttaaggaattcgtttaccagttgattacagggctcagaaagggcatgggttactgcggctgcaagaacctggcggaactaaagaaataccgcaagttcgtcaggatcaccacggcgggtatcagagaaagccacccgcacgatatcatcattacccaggatgcacctaactattccggagcttaa

SEQ ID NO: 15578 - protein, 217 aa, Unknown
  Obtained from environmental sample
  DOMAIN (1)...(203): IMP dehydrogenase / GMP reductase domain
  misc_feature (1)..(217): Xaa is any amino acid
MISLSSGGNVVTREGTRRFIEAGADAVKVGIGPGSICTTRVFAGAGMPQFTAVWDCAEEAVRDGIPVIADGGIKYSGDIPKAIGAGADVVMIGNLFAGLKEAPGEEILFDGRIYKEYRGMGSIGAIHDGSADRYQASKDETPVPEGIEGRLPYRGELKEFVYQLITGLRKGMGYCGCKNLAELKKYRKFVRITTAGIRESHPHDIIITQDAPNYSGA

SEQ ID NO: 15579 - DNA, 426 bp, Unknown
  Obtained from environmental sample
  misc_feature (1)..(426): n is a, c, g, or t
atgccgcggtactccttgtatatcctgccgtcaaaaaggatctcctcgccaggggcttccttcagaccggcgaaaagattgccgatcattaccacgtcggccccggcgcctatggccttggggatgtccccggagtacttgatgcctccgtcagcgatgacgggtatcccgtccctgaccgcctcctcggcgcagtcccaaacagcggtgaactgtggcatcccggcaccggcgaacacgcgggtcgtacaaattgagccggggcctatgcccacctttaccgcgtcagcgccggcttcaataaagcgcctggttccttcacgggtcacgacgttcccccccgatgacagggatatcaaaagattttttaatgtcctttatcccttccctcagttttttgaaatcgccggggggcgtggtccataa

SEQ ID NO: 15580 - protein, 141 aa, Unknown
  Obtained from environmental sample
  misc_feature (1)..(141): Xaa is any amino acid
MPRYSLYILPSKRISSPGASFRPAKRLPIITTSAPAPMALGMSPEYLMPPSAMTGIPSLTASSAQSQTAVNCGIPAPANTRVVQIEPGPMPTFTASAPASIKRLVPSRVTTFPPDDRDIKRFFNVLYPFPQFFEIAGGRGP

SEQ ID NO: 15581 - DNA, 795 bp, Unknown
  Obtained from environmental sample
  misc_feature (1)..(795): n is a, c, g, or t
atgcagttccacgtactgagggataacagccaaaagaatacaggtatcctttgggggctaaaatccgaaaaaagcgcgagcgtgatccctgtttctgactgccctgtcgccgatcccggaatcaggaggctgttacgcgaagaaaaaaaatcgccgttaacgcctttgcaaaaagaccgcttcaccgtatacgcccgcggcggcctgttcctcagcgaaggcggcattagccgcgggaaaacgcgaattctggagcgggagctaagcctggacgcgtcgttatttttccagagcaacggcgctatgcttgaaaaactgatcggggatttgcttgttgtcgccgctgaagcggatcactccatgccgatggccgacctgttctgcggcgtgggcacgtttgccgcgtttctgggaaagctgttcccccaactggctttggttgaggaaaacaaagccgccatagcccttgcccgcgtgaacgttaacgcgccggcggattttttcgcccagcgcggtgaagactgggtaaaacacaacgaccctaaggattttggttttattattattgaccctccgcggcagggcataaaccaaagccttgctctccggcttgcctcggaaggcccccccatgcttgcctatgtttcatgcgatcccgcgacgctggcaagggacagtaagatactgacggcgggcaattatacgctgaaagcgctgcatttctacgatttttatccgcaaaccgcccacattgaaagctttgcgctgtttataattaggaataaaggaaattag

SEQ ID NO: 15582 - protein, 264 aa, Unknown
  Obtained from environmental sample
  misc_feature (1)..(264): Xaa is any amino acid
MQFHVLRDNSQKNTGILWGLKSEKSASVIPVSDCPVADPGIRRLLREEKKSPLTPLQKDRFTVYARGGLFLSEGGISRGKTRILERELSLDASLFFQSNGAMLEKLIGDLLVVAAEADHSMPMADLFCGVGTFAAFLGKLFPQLALVEENKAAIALARVNVNAPADFFAQRGEDWVKHNDPKDFGFIIIDPPRQGINQSLALRLASEGPPMLAYVSCDPATLARDSKILTAGNYTLKALHFYDFYPQTAHIESFALFIIRNKGN

SEQ ID NO: 15583 - DNA, 600 bp, Unknown
  Obtained from environmental sample
  misc_feature (1)..(600): n is a, c, g, or t
atgcgggcggcgcggatcgccggcttaaaggaagtgccggttgtgctgcggaggtactccgatgaaaagcggatggtggtctcgctaatcgaaaacatccagcgggcgaaccttaaccccattgaagaagcgcaggcgtacaagcaactggcggaacttgaaagcctttcccaggaagacgtcgccgcccgcgtaggcaagaaccgcgcaactgttgccaacgccttaaggctcttaaagcttccggcactgatgcaggaaagcataaagaaaaacgagctgtcccccggccacgcgcgggcggtactttcggtttccgacgaaaaagcgcgggaagccctttatcaggaaatccttaaaaaaggcctttccgtgcgggaggccgagaaacgcgccgccgccattgggcaggagaacaaaaagcccaaaaaagcctcagagccggaaagcagaaacccggaacttaacgctatgcaggataagtttatgctccgcatgggcacgaaggtaatcatcaagggagacctcaacaagggaacaattatgatcgattactactcaatgcaggatttagacaggctctacgggattctgggttaa

SEQ ID NO: 15584 - protein, 199 aa, Unknown
  Obtained from environmental sample
  misc_feature (1)..(199): Xaa is any amino acid
MRAARIAGLKEVPVVLRRYSDEKRMVVSLIENIQRANLNPIEEAQAYKQLAELESLSQEDVAARVGKNRATVANALRLLKLPALMQESIKKNELSPGHARAVLSVSDEKAREALYQEILKKGLSVREAEKRAAAIGQENKKPKKASEPESRNPELNAMQDKFMLRMGTKVIIKGDLNKGTIMIDYYSMQDLDRLYGILG

SEQ ID NO: 15585 - DNA, 405 bp, Unknown
  Obtained from environmental sample
  misc_feature (1)..(405): n is a, c, g, or t
atgttccccgatcagcactgcatcaaagcgccagaactgctgcgggcgggtggcgtaagcgaagaatcgatccgcgccgtatgctcccacggttacggccttaccagcgtggatgccaagcctgaacatctcatggaaaaaatcctctacgccgcggacgagcttacgggccttatctgggcggtcgcgattatacggccttcaaaaagcgttatggacatggaagtaaaatccgtgaagaaaaaattcaaaaccccggcttttgccgcgggctgttcccgcccggttatcgaaaaaggcgcggaagttctgggctgggaactggatacccttatcgagaaaacgatactcgccatgcgttcctgtgaagccgaagtgaacgccgcgctggcggatttaaaataa

SEQ ID NO: 15586 - protein, 134 aa, Unknown
  Obtained from environmental sample
  misc_feature (1)..(134): Xaa is any amino acid
MFPDQHCIKAPELLRAGGVSEESIRAVCSHGYGLTSVDAKPEHLMEKILYAADELTGLIWAVAIIRPSKSVMDMEVKSVKKKFKTPAFAAGCSRPVIEKGAEVLGWELDTLIEKTILAMRSCEAEVNAALADLK

SEQ ID NO: 15587 - DNA, 393 bp, Unknown
  Obtained from environmental sample
  misc_feature (1)..(393): n is a, c, g, or t
ttggattacgattgtattgttataggcgggggccacgcggggattgaagcgtcccttgcggtatcccggcttggtttttcagctctcctcattacccagaaccccgaccgcataggcgcgctttcctgcaacccggctattggcgggctttccaaaggcaacattgtccgcgagattgacgcgctaggcggcgaaatggcaaaactgaccgacgccacaatgatacagtaccgcgtgttaaaccgttccagaggcccggccgtacaggccccgcgggctcaggccgacaaacaacagtaccagcaagcggcccgcgccgtccttgaaaagcaaaaaaaacttttcaatttttatggatacggtaacagatctgataataagaaacgcgaatga

SEQ ID NO: 15588 - protein, 130 aa, Unknown
  Obtained from environmental sample
  DOMAIN (4)...(130): Glucose inhibited division protein A
  misc_feature (1)..(130): Xaa is any amino acid
MDYDCIVIGGGHAGIEASLAVSRLGFSALLITQNPDRIGALSCNPAIGGLSKGNIVREIDALGGEMAKLTDATMIQYRVLNRSRGPAVQAPRAQADKQQYQQAARAVLEKQKKLFNFYGYGNRSDNKKRE

SEQ ID NO: 15589 - DNA, 897 bp, Unknown
  Obtained from environmental sample
  misc_feature (1)..(897): n is a, c, g, or t
ttgcggatatcaaaatatgcgcggtgtcacaattccggcggcatcggtattaacacaaccggtacggcgccggttaacgttccggcgataaaagagagttgcctatctatagtagacacattgaaatcctcctccgccccaatccttcgcgagcttgcgcaacgcggcgagatcagagccggaggcggggcctctctcatcggccttgtcagggaggcggtgtcgtctcttgacgaggcgttgcggccgcttgtccgctccgaacgtccggtcccgccggagttttacgagcgtgtggccaccgggcaccggatcagcgcggaggcgaagaacgcgctcttctcgcagatcgggtcggcgcaggcgctgatacggggcgcggtggaatccgttgagagagttaattccggtatcagcgcgagtattaaacccgttgtcagtccgagcgtgagttcgggcgtcaatacaaacgtcggcgcaggtattaatcccaatattaataccgttgtgagcgtcaatccaagtattaataccggcgtcggtatcaattccggtatcagtgcaaatgtcaaccccaatgttaatatgggtgtcaattcgggtattaatccgggtataaatacaaataccaataccggcgttaatcccaatattaaccgaaacctgagcgccaacgcgaatgtcaatcacggtattaatgccgatattaatccggttgccggtaccaatgttaattccggcgctaatccaccatcaatagagacgctaatcccaatgttaacacgggtgttaatgtcaatgtcagtgttaatgcccatgcggatatccattctggtatcaatgccaacggtaatccgacggtcaaccccagcgccggtaccaatggtacactattga

SEQ ID NO: 15590 - protein, 298 aa, Unknown
  Obtained from environmental sample
  misc_feature (1)..(298): Xaa is any amino acid
MRISKYARCHNSGGIGINTTGTAPVNVPAIKESCLSIVDTLKSSSAPILRELAQRGEIRAGGGASLIGLVREAVSSLDEALRPLVRSERPVPPEFYERVATGHRISAEAKNALFSQIGSAQALIRGAVESVERVNSGISASIKPVVSPSVSSGVNTNVGAGINPNINTVVSVNPSINTGVGINSGISANVNPNVNMGVNSGINPGINTNTNTGVNPNINRNLSANANVNHGINADINPVAGTNVNSGANPPSIETLIPMLTRVLMSMSVLMPMRISILVSMPTVIRRSTPAPVPMVHY

SEQ ID NO: 15591 - DNA, 681 bp, Unknown
  Obtained from environmental sample
  misc_feature (1)..(681): n is a, c, g, or t
ttgctgcttgcggcggcgtttgttttgaccaataaatatatcggtttcgccgacatcggcgtcggcagcatagttatcgcgattctggcattggcgtttattgtgcaatgtttagcccgtttccatatcgcgcccatagtaattccccttgcggttttgtattttttcttccatcggcctttaggtctgcctccaatacagacatggaaactgattgccgccaccgcgctcgcattcataggcttgagcatcctgcttccacgcgggcggcgttcctgtaatcaatgcggcaactccggcggctcaaaagatcaacagcggaatatccccaaggaaagcaataatgacaacaacccgtacatcaatgtgaatttcagcgccgtcagccgctctttgaccgcggacagccttgaaaccgtgcggctgtcctgcaacttcggcgccattgaggttttctttaaccaggcccaacttagccccaacggggctaacgctttcattaattgcagctttggcggcattcaattgttcataccaagacactggcagattattgacaacatgaactgcacattggcaggcgtggatatcaaatcctttgccgctcccgcggaaaacgcgccacggctgacacttaacggaagcgtttcccttggcgggattgaggtaaaatacatttaa

SEQ ID NO: 15592 - protein, 226 aa, Unknown
  Obtained from environmental sample
  misc_feature (1)..(226): Xaa is any amino acid
MLLAAAFVLTNKYIGFADIGVGSIVIAILALAFIVQCLARFHIAPIVIPLAVLYFFFHRPLGLPPIQTWKLIAATALAFIGLSILLPRGRRSCNQCGNSGGSKDQQRNIPKESNNDNNPYINVNFSAVSRSLTADSLETVRLSCNFGAIEVFFNQAQLSPNGANAFINCSFGGIQLFIPRHWQIIDNMNCTLAGVDIKSFAAPAENAPRLTLNGSVSLGGIEVKYI

SEQ ID NO: 15593 - DNA, 795 bp, Unknown
  Obtained from environmental sample
  misc_feature (1)..(795): n is a, c, g, or t
atgacagaacccagtgggcgtcagaaagggattgtgggggagcttactctgatgcaaagcaggctgagtatggaaaacgcccgctatagccttagcgcggcgcagtccgcatacgccacaaagatgggggactttcttgtccagctcggcattgcccaggatgcggatgcggagcttgaaggaaaaatagaaatagtgaagatcgaggttaacgcggatcagctcataaaagacaacctttccaggcggccagacatcgtcagcaggcggcaggaaatcgagcgcctggaaaacgcccaaaagcaggctgcatggtcaagcagagcaccttcgctcaggctggaggcaaactggaacagcaggaactttgacccttttgccgacactctcggcggaagcgccacgctcaatattcccattgatccctggataccgggaacgagcagaagccagtccgtactcaacgcaaaaaacgcagtcgacaaggcgcggctcgatctgcaaagcgccgaaaatgccgcggcatcccaaatacggtctctcgcggcaaatttgcggaattcatgggacagcattgagattgcccgtctcagcctgagtatcgccgagcgtagccatgaattaacccaggaggctttcagatacggaactgtcgattcgctgaaactggaagacgcccgaaacaacatggccgcggcccggcagcgcttattgcagagcgagcttgcgtactttaatatgatacttgatatttcagcggcgttaaacatcggatggaaagatttaatgaaatga

SEQ ID NO: 15594 - protein, 264 aa, Unknown
  Obtained from environmental sample
  DOMAIN (72)...(256): Outer membrane efflux protein
  misc_feature (1)..(264): Xaa is any amino acid
MTEPSGRQKGIVGELTLMQSRLSMENARYSLSAAQSAYATKMGDFLVQLGIAQDADAELEGKIEIVKIEVNADQLIKDNLSRRPDIVSRRQEIERLENAQKQAAWSSRAPSLRLEANWNSRNFDPFADTLGGSATLNIPIDPWIPGTSRSQSVLNAKNAVDKARLDLQSAENAAASQIRSLAANLRNSWDSIEIARLSLSIAERSHELTQEAFRYGTVDSLKLEDARNNMAAARQRLLQSELAYFNMILDISAALNIGWKDLMK

SEQ ID NO: 15595 - DNA, 651 bp, Unknown
  Obtained from environmental sample
  misc_feature (1)..(651): n is a, c, g, or t
atgaaaggaataattttagccggaggagccggtacaagactctatcctctgacaaaagcaatatccaagcagatacttcctctctatgacaaaccaatgatctattaccccctttcggtgttaatgcttgcgggaataagggatgttcttattatttcaacgccacgggatatttccctgttcaaagaattattttcagacggcgtatggttaggtatgcggtttgattacgccgtacagaaaagtccccgcggacttgcggacgcgtttattttaggagaaaattttattggcggggatagttgcgcgcttgtattgggtgacaatattttttacggaacaggttttactgactgtcttaaaaacgctatttcaaaaataacccaatcaaaaggcgggcttgtttttgcttattatgtaaaagatccgagcgcttacggtgtcgttgaattctccggaagcggccaggtgctttccatcgaagaaaaaccagtgaaaccaaaatcgcattatgccatacccggtctttatttttatgataacaatgtaattgggattgcaaaaaacataaaaccatcggcaagaggagaaattgaaataactgccgttaacaatacctatctgaacaggggaatcttcagtgaattctga

SEQ ID NO: 15596 - protein, 216 aa, Unknown
  Obtained from environmental sample
  DOMAIN (2)...(216): Nucleotidyl transferase
  misc_feature (1)..(216): Xaa is any amino acid
MKGIILAGGAGTRLYPLTKAISKQILPLYDKPMIYYPLSVLMLAGIRDVLIISTPRDISLFKELFSDGVWLGMRFDYAVQKSPRGLADAFILGENFIGGDSCALVLGDNIFYGTGFTDCLKNAISKITQSKGGLVFAYYVKDPSAYGVVEFSGSGQVLSIEEKPVKPKSHYAIPGLYFYDNNVIGIAKNIKPSARGEIEITAVNNTYLNRGIFSEF

SEQ ID NO: 15597 - DNA, 792 bp, Unknown
  Obtained from environmental sample
  misc_feature (1)..(792): n is a, c, g, or t
atggcgagggcgccatcccgatttttccgcgaccagggccttgatgtcatgctgctttttgactcggtgacccgtttcgcgcgcgccatacgcgagatcggccttgcctcaggtgaaccttccgctaccaggggttatacgccgagcatgttcgattccatgcccaaactgctggaaagatcgggcacttcggataacggcagcatcaccggtttttacacgatccttgttgacgcggatgacatggacgagccggtgtcggatacggtgcgcggtattcttgacgggcatatctggctctcccgccgccttgcccaggcctaccattatccggcgattgacgtactgcaaagcatttcccgtcttgccccggtggtgtccggaccttctgttaccaaagcggcgggcgcgatacgccggagcatggccgtgtacgccgaggccgaggaactgatcaacgtgggcgcgtaccgcgccggctccaatcccgccattgacgaggcgattgcgaagcaccagcccatcgaggaatttttgatccaggaagtcacggatcgttcttcgattgaggatacatattcgggaatggaacaactctccggcatacccatacctgctgaggagatatcaggcagccaggatgcggagcaatcaacgggaacggtttccaaaggtaaaatcccggtaggcggcagcgagagcggccaaagcgcggcggcgaactggcagggaaacagcgtcgcgtccctgttcgcgagccgattaactcccgaaggcgattctgatcagtga

SEQ ID NO: 15598 - protein, 263 aa, Unknown
  Obtained from environmental sample
  DOMAIN (1)...(120): ATP synthase alpha/beta family, nucleotide-binding domain
  misc_feature (1)..(263): Xaa is any amino acid
MARAPSRFFRDQGLDVMLLFDSVTRFARAIREIGLASGEPSATRGYTPSMFDSMPKLLERSGTSDNGSITGFYTILVDADDMDEPVSDTVRGILDGHIWLSRRLAQAYHYPAIDVLQSISRLAPVVSGPSVTKAAGAIRRSMAVYAEAEELINVGAYRAGSNPAIDEAIAKHQPIEEFLIQEVTDRSSIEDTYSGMEQLSGIPIPAEEISGSQDAEQSTGTVSKGKIPVGGSESGQSAAANWQGNSVASLFASRLTPEGDSDQ

SEQ ID NO: 15599 - DNA, 417 bp, Unknown
  Obtained from environmental sample
  misc_feature (1)..(417): n is a, c, g, or t
atgtccaggcttgttaatgtagtactaaacggcaattataacgctccgctggcaatggtaatatgcgcaaatacgtcaaacattccctgggaaggcaatggatggatgattgattgcagcgccgctgtggaaaatatgcttatagcggcggcggcaatgggtttgggttcagtatggattggttcgtataaagaagacgatttgcgtaaattgttaaacattcccgctcacatcaaaataatgaatactgtgtattttggatatcccgctcctgatgcagccgtaccggccggaacccgatacgcggatgacgctgtctattggggaaaatacgatccaaaccgtaaaaggaaaatgagaactatggaaatgattggagatcgttctgttaaggaaccttctctttatggaaaatga

SEQ ID NO: 15600 - protein, 138 aa, Unknown
  Obtained from environmental sample
  DOMAIN (1)...(88): Nitroreductase family
  misc_feature (1)..(138): Xaa is any amino acid
MSRLVNVVLNGNYNAPLAMVICANTSNIPWEGNGWMIDCSAAVENMLIAAAAMGLGSVWIGSYKEDDLRKLLNIPAHIKIMNTVYFGYPAPDAAVPAGTRYADDAVYWGKYDPNRKRKMRTMEMIGDRSVKEPSLYGK

SEQ ID NO: 15601 - DNA, 927 bp, Unknown
  Obtained from environmental sample
  misc_feature (1)..(927): n is a, c, g, or t
atgctccttaaggctataagagaaaattgcgctattcacacagcctataaaagcatcccaatgatggtcgcaggagaaaaatcagaaaccgccgcggagccaatggtttcactcattcaggaatgtcttaaggcggaaaaagagcaggatattgaagcagtctcgcttcttntgggctatccctgggcagacgacgagcataacgcagtctccgtattggtgagtttttccggggaaacaagtgagaaagccgaaaaaatcacctgtgatctcgcagcttccttttggaaacgcagaaaagaattttcattccgcaccgaattctacgatacggaggaagccctggccgcggcctatgcttatgtagaaaaaggtgagcggcctgtttttatttcagattcaggggacaatcccacggcgggcgcggccggagactcgacggatctccttgaagcaatcctgaaaaccattgacagcgccgacaggctgcccacgccattcctttattcgggttttttcgacgcgcctgccgccgcggcgtgcgtaaaagccggagaaggagccgaactggacattgctctgggcggaaactgggacacggtgaacgggaaaaagatccctctaaagattacggtaaagaagatccacagaaactacggctcctataagtcggatcttatccttgtttcacacagaaacctcttaatcagcgtaacctcaaaacacatcggtttcggcgatgaaggactcctttccgccctcggaataaaccccgccgattattgtcttgtagtggtaaaacttggctaccttgagccttgcttcaggagcatcgcaaagcgggccattatggctactacaagaggttgttcaaatgaagttctggaaaacattccctacaagaaagtgcgcnctcggccgatctga

SEQ ID NO: 15602 - protein, 308 aa, Unknown
  Obtained from environmental sample
  DOMAIN (130)...(303): MlrC C-terminus
  misc_feature (1)..(308): Xaa is any amino acid
MLLKAIRENCAIHTAYKSIPMMVAGEKSETAAEPMVSLIQECLKAEKEQDIEAVSLLXGYPWADDEHNAVSVLVSFSGETSEKAEKITCDLAASFWKRRKEFSFRTEFYDTEEALAAAYAYVEKGERPVFISDSGDNPTAGAAGDSTDLLEAILKTIDSADRLPTPFLYSGFFDAPAAAACVKAGEGAELDIALGGNWDTVNGKKIPLKITVKKIHRNYGSYKSDLILVSHRNLLISVTSKHIGFGDEGLLSALGINPADYCLVVVKLGYLEPCFRSIAKRAIMATTRGCSNEVLENIPYKKVRXRPI

SEQ ID NO: 15603 - DNA, 573 bp, Unknown
  Obtained from environmental sample
  misc_feature (1)..(573): n is a, c, g, or t
atgaaaaaatcaatctcaatatcaaacggtttttgcccccaaacgctgttcctgtatgggacatacaaagaggacaatactccgaatttcggattgttttgctggtttagttattactatgacaaagaaatgggagtaatggcttgtattggagagaaaaaacttaccaaagatcggatacaggcgaataaagttttttccgcaaatcttgttacagaggaaatattacccatagcggattatttcggcaataaaaggggttatgacaatgacaaaatgaatgttgatattgaaacagaaaaaggacaggttcttaatgttcctgtgctttcaaaaagtccagtagtttttgaattagaagtcgatcaaactataactatgggaaatagcgatctatacttgtgtaaaattaggaattttctggtcgatgaatatttgtgtgatgaaaccataagcgttgagaagcgaataaagaccatccgtcctattcatactacagtacaaaaatatttttcatgggatggaaatgaaatttgcgattgggggaaagcaatgaagggaatgaaaaaataa

SEQ ID NO: 15604 - protein, 190 aa, Unknown
  Obtained from environmental sample
  misc_feature (1)..(190): Xaa is any amino acid
MKKSISISNGFCPQTLFLYGTYKEDNTPNFGLFCWFSYYYDKEMGVMACIGEKKLTKDRIQANKVFSANLVTEEILPIADYFGNKRGYDNDKMNVDIETEKGQVLNVPVLSKSPVVFELEVDQTITMGNSDLYLCKIRNFLVDEYLCDETISVEKRIKTIRPIHTTVQKYFSWDGNEICDWGKAMKGMKK

SEQ ID NO: 15605 - DNA, 897 bp, Unknown
  Obtained from environmental sample
  misc_feature (1)..(897): n is a, c, g, or t
atgatcatcaacataggcagcttggtggggcgtttcgtcagcttcggcgtaaggcggtcccctggcttcgaccttagctccatttttctggtgagcctggttgccgccgccgtggcgtttttccttgtgatgtttctgtaccgcgacccagactacgaaatgggcgtgacggagagaaagccccagaagtcggtcggcgcgattctggcgggaatccccaaagtcctgacgaacctgcgcttcgccatgttcctgctcgtctccagcgggttctatctgatctacaaccaagtctataatctgctgccgctctacacaaaaaagaccgtcgagctggagcccgcgatggacatctacacagcggccaatccattcgtcatagtgacgtgccagttgctgataacaagcatcttcggcaagctgccgcccatcaagagcatcttcataggcatagcgatcatcgccgtgtccatgctgatcaacatagtccccctgtacatgtctggaggcgtgacgcaggtggtgggcagcatcataccgcttggcagcctcttcgtggtgatgaccgtggccctgatagccttcggcgagctgttcaacagcagcagactctatgaatacataggctccctgtccccaaagggtcaggagggtctcttccaaggttacgccaacctgccaatggcaatcggcagcgtgataggcggacccgccggggcgtggctcttcaacgaggtcatgtgcaaaggctccgtggtactgcccagcggactccttgaacttgaccccgggcaggcaacgctgggctgggtgatactggcctgttgcgggtttgccagtgccatcagcatgtacgtgtaccactggtggatacagagacagaccgagaccgcctga

SEQ ID NO: 15606 - protein, 298 aa, Unknown
  Obtained from environmental sample
  misc_feature (1)..(298): Xaa is any amino acid
MIINIGSLVGRFVSFGVRRSPGFDLSSIFLVSLVAAAVAFFLVMFLYRDPDYEMGVTERKPQKSVGAILAGIPKVLTNLRFAMFLLVSSGFYLIYNQVYNLLPLYTKKTVELEPAMDIYTAANPFVIVTCQLLITSIFGKLPPIKSIFIGIAIIAVSMLINIVPLYMSGGVTQVVGSIIPLGSLFVVMTVALIAFGELFNSSRLYEYIGSLSPKGQEGLFQGYANLPMAIGSVIGGPAGAWLFNEVMCKGSVVLPSGLLELDPGQATLGWVILACCGFASAISMYVYHWWIQRQTETA

SEQ ID NO: 15607 - DNA, 729 bp, Unknown
  Obtained from environmental sample
  misc_feature (1)..(729): n is a, c, g, or t
gtgcttgcccgtatggggactaaagtccattgggaattggcgttccaggacccggacagccttataccgcaggatatttttgaaaaggcgcagaagcagggaaggacaaagccctgggggaccgcccacgcgctactctgcgcggcggacaagctcgacgcgcccttcgccgttattaacgccgatgatttttacgggcgcgaggccttcgatgtccttggcaaatacctccgcggtcccagtgcgggcgagccggccatagtcccgtaccggttggataaaactttaagcccccaggggactgtcgcgcgggggttatgcgaaattaaagacggttaccttgtaacggttgaggagcttaccgccatagccgaaaaagacggcgccgttttcaatacaaatcccgacggttccgtaaggcggcttgccgccgacagcccggtatcaatgaatttctggggtttccccccggctatccttccagaattcaaaaaatattttgacgaatttcttaaaacatttaccgccgatattccggcgcagattaaaagcgagtgttttatccccaaagcggcggatcattttatcaagctgggcatcgcgaagataaaagccctgaaggcggattctgactggttcggcgtaacttacaaggaagaccgcgaagcggcggtcaggaaactcgccgagctgaacaagaccggcgtttatcccgaaacgctctggtaa

SEQ ID NO: 15608 - protein, 242 aa, Unknown
  Obtained from environmental sample
  misc_feature (1)..(242): Xaa is any amino acid
MLARMGTKVHWELAFQDPDSLIPQDIFEKAQKQGRTKPWGTAHALLCAADKLDAPFAVINADDFYGREAFDVLGKYLRGPSAGEPAIVPYRLDKTLSPQGTVARGLCEIKDGYLVTVEELTAIAEKDGAVFNTNPDGSVRRLAADSPVSMNFWGFPPAILPEFKKYFDEFLKTFTADIPAQIKSECFIPKAADHFIKLGIAKIKALKADSDWFGVTYKEDREAAVRKLAELNKTGVYPETLW

SEQ ID NO: 15609 - DNA, 867 bp, Unknown
  Obtained from environmental sample
  misc_feature (1)..(867): n is a, c, g, or t
ttgagaattggagcaataaacgaggccatcaagagcaaaacgggcgagtttgaccagatagagaaaaagaacaagaagcttagggatcaattagagaaaaatatgggagaattgcgggacgacatcaaaaagaccataaacagcgttaccccggcgcgtgtggcactggaacccattgtaacaaacgagatattaaaatcggccggccgatatcagcaggaagacgagtttgcggactataagagaagaagcgagaatatcggtaatttctgtaaaacggtcaagccaaaacccgcctccgatttggtcgattacctggtcaagagggttcaacaagagaggccggcgtatacgcataacgagatagtcaacatatacacatgcatcgttcagggattcctcaccattttctccggtaaacccggcaccggaaagacctccatgtgcaacataatcgccgatagcctggggttgacaccccaagcctcaaccgtagacgattcccgctacgtcccgatctccgtggagaggggctggtcgtcaaagagggatttaatcgggtactacaatccgcttacaaggcggtatgataagagcaatatgggaatttacgacgctcttatgacgctgaacaccgagcgtgaaaattcgccgttgcccttcgtaatcctgctcgacgaggcaaaccttagccccatagagtattattggtcgaatttcatggcggcgacggagatagacaagtctcacaacaagccagtctggatagacataggcacggaggagcagatatatatcccggaaacactaaagttcatagcgacaataaacaacgacgagacgacggaaaatctctcgcccagataa

SEQ ID NO: 15610 - protein, 288 aa, Unknown
  Obtained from environmental sample
  misc_feature (1)..(288): Xaa is any amino acid
MRIGAINEAIKSKTGEFDQIEKKNKKLRDQLEKNMGELRDDIKKTINSVTPARVALEPIVTNEILKSAGRYQQEDEFADYKRRSENIGNFCKTVKPKPASDLVDYLVKRVQQERPAYTHNEIVNIYTCIVQGFLTIFSGKPGTGKTSMCNIIADSLGLTPQASTVDDSRYVPISVERGWSSKRDLIGYYNPLTRRYDKSNMGIYDALMTLNTERENSPLPFVILLDEANLSPIEYYWSNFMAATEIDKSHNKPVWIDIGTEEQIYIPETLKFIATINNDETTENLSPR

SEQ ID NO: 15611 - DNA, 708 bp, Unknown
  Obtained from environmental sample
  misc_feature (1)..(708): n is a, c, g, or t
atgaaactgcgtcttttgtcgtnatcgtcattagcgttactatgtctactcatcaccgtttgccctactcaagcggccttcaccatcgaacccgccgtgataactttcttcgccgacagaggcgaaaggactgcgatggttgagctagttcacacgggcggcgaccctgccgcgatacagctcagtgtgttcgagcgtaagttggatgccgacggaaagcttatcgaagagggattgtctaaaaactccgatttcatagtgcatcccgcccaagtcatactataccccagggaacgcgccaccgttcaagttcagtacaagggtaagggcaaggtggcagtggacaaagcgtatgtgcttttttcgcaggaggtgccggtagatgtggggcatgatgatgaagggggtgtcaaaatggcggtgaagatgctaacgaattactacaccgtcatatctatagagacaggaaagcccggaaagctcgtctttgtgtcgtccaaggcgataggcggcggcaagattgaggttttggcggagaacaagggcgccggccgcgtgggtaaggaacgccttaaactcattgtaggcagtaaatcaattatgaattttaccggtaagagcaattcaataatgcccggtcagacccgtcgtttcaccttcgagtggccgagggcggtgacggagaaggaggttagatttgtttactga

SEQ ID NO: 15612 - protein, 235 aa, Unknown
  Obtained from environmental sample
  SIGNAL (1)...(25)
  misc_feature (1)..(235): Xaa is any amino acid
MKLRLLSXSSLALLCLLITVCPTQAAFTIEPAVITFFADRGERTAMVELVHTGGDPAAIQLSVFERKLDADGKLIEEGLSKNSDFIVHPAQVILYPRERATVQVQYKGKGKVAVDKAYVLFSQEVPVDVGHDDEGGVKMAVKMLTNYYTVISIETGKPGKLVFVSSKAIGGGKIEVLAENKGAGRVGKERLKLIVGSKSIMNFTGKSNSIMPGQTRRFTFEWPRAVTEKEVRFVY

SEQ ID NO: 15613 - DNA, 870 bp, Unknown
  Obtained from environmental sample
  misc_feature (1)..(870): n is a, c, g, or t
atggcgtaccgaaagaagcgactgggaaaccaaagacaaggcttcggagaggaacgaaagaaagaccttgaaacctttgccgcaaagcttgacgcctccaaaaagcaaattgaagatttctccgtgcgggcaaataaaattgtcagttcacaggaagccctgcttattaaagctgccgaggaaatgaagcagaaagccctggaaaccagcgccgccaagctggaagaataccgccgcgcccaggacattgaattcaaacggcttgaggcccttgccgacgattccagaaaactggacgcggagcttcgccattatatacaggatttaatcggacggcttaaagaggaattttcaggctaccagaacgaagccgaagagttgcggaaagccgaaacggaaaaattctcctcaaccgcaacgcgccttgacgagaagatgacggaaattgaagaagggcttgcggccctgaaatcggccgcacatgaaaatattaagggagaattaagatctcttgaaaatgaattcctggccgaacttaccaaacgcagtaatgatataggtttgcgcattgaggagtggcagggcggccttgataagcggctttccgctatcggcgagaattccgaaactgttttgcgcgggctggaacacaaccgggaagaagaaaccaagaaaaccttgtccgcaatgggcacacgccttgtatcggagcttgaacgcctgaaatcgcagacaggcacttttgaagcgggaatacagggccagatgaaagccgccgacgatgctgttgcctcctttaaggaacagcatgaagaaaaaacaaagaaaaccttgtccgcaatgggcgcacgccttctcgtgccgatctga

SEQ ID NO: 15614 - protein, 289 aa, Unknown
  Obtained from environmental sample
  misc_feature (1)..(289): Xaa is any amino acid
MAYRKKRLGNQRQGFGEERKKDLETFAAKLDASKKQIEDFSVRANKIVSSQEALLIKAAEEMKQKALETSAAKLEEYRRAQDIEFKRLEALADDSRKLDAELRHYIQDLIGRLKEEFSGYQNEAEELRKAETEKFSSTATRLDEKMTEIEEGLAALKSAAHENIKGELRSLENEFLAELTKRSNDIGLRIEEWQGGLDKRLSAIGENSETVLRGLEHNREEETKKTLSAMGTRLVSELERLKSQTGTFEAGIQGQMKAADDAVASFKEQHEEKTKKTLSAMGARLLVPI

SEQ ID NO: 15615 - DNA, 300 bp, Unknown
  Obtained from environmental sample
  misc_feature (1)..(300): n is a, c, g, or t
atggcgcaaggcacagtcaagtggtacaacgcggaaaaggggtacggcttcattgccccagacgatggcggcgaagatgtctttctctaccacaaaatggtacagtggacacagagtttccgcgtcctatgtgagggtcagagggtcagctttgaagtaaccgaggggcagaagggaccaatggccgctaaagtgacgctggaggggtattcgcaggaaaacagtgggggcggtcctgggatcgattggggtggagtgctgcaccgcgggtgggaaatcctcaaggacctcaatgactaa

SEQ ID NO: 15616 - protein, 99 aa, Unknown
  Obtained from environmental sample
  DOMAIN (1)...(68): Cold-shock' DNA-binding domain
  misc_feature (1)..(99): Xaa is any amino acid
MAQGTVKWYNAEKGYGFIAPDDGGEDVFLYHKMVQWTQSFRVLCEGQRVSFEVTEGQKGPMAAKVTLEGYSQENSGGGPGIDWGGVLHRGWEILKDLND

SEQ ID NO: 15617 - DNA, 453 bp, Unknown
  Obtained from environmental sample
  misc_feature (1)..(453): n is a, c, g, or t
gtgtttgacaagctggacgcccgcatcgcttcggcaatactttccctaggggcggccaaagcgatagaattcggcgcgggctttgccgtcagcaaaggctcaggctctgaactaaacgacatcccggtttcgcccgattcagaaatcccctaccctcattcatcaagcctcccccacggggtaccgccggtttcatttcggacaaacaacgcgggagggattctgggcggcctctccaccggcgcggacatcagttttaccgtggcttttaaaccgatctcttcgattacggggccgcaggaaaccatcaaccgccggggagaaaagacggaacttctgataaaaggacgccacgatgtctgtgtggcacccagggcggtgccggtggtggaagccatgactgccctcgtgctggcggattttattctgcttcagagaagcgcccggatttag

SEQ ID NO: 15618 - protein, 150 aa, Unknown
  Obtained from environmental sample
  DOMAIN (1)...(146): Chorismate synthase
  misc_feature (1)..(150): Xaa is any amino acid
MFDKLDARIASAILSLGAAKAIEFGAGFAVSKGSGSELNDIPVSPDSEIPYPHSSSLPHGVPPVSFRTNNAGGILGGLSTGADISFTVAFKPISSITGPQETINRRGEKTELLIKGRHDVCVAPRAVPVVEAMTALVLADFILLQRSARI

SEQ ID NO: 15619 - DNA, 933 bp, Unknown
  Obtained from environmental sample
  misc_feature (1)..(933): n is a, c, g, or t
ttgattgatatggtatggacgcagtttcccggtctgggcagaggttttatccctttgcccgggggaagtccatataataccgctgttgccattagcaggctaggagtaccggtaaaattccttggacgattttcaactgatttttttggagaaattctgataaaaagactccgtgataaccgggtcggagacgatctgataatccgttccgggcaaaattcaaccctggcttttgtaaagctcgataagggcaaggaaccgcagtacgttttctatacagagggaacggcggacagttctctccaggtgtcggatttgcctccaaaactgccggccgatacgaagtgcattctttttggttccatttcaatgaccatggaaccgctcgcgtccgccatcgaagccctgatcctccgtgaaggtaccaggaaaagcgccgatcaaatggacggcgcgccggtaatttcctttgatcccaatataaggccgtttatgatcaaagatcggaacgcctatattacaaagttcgaaaaatgggtggccgcatccaccatcgcgaagatttccgccgcggactttgaatttctctatcccaaacttgggcaggagcaggcgctccagaaaattcttgccatgngaccccgtgtggcgatctgtacccagggcccanaaggcgccctggcgctgctccgcagaaatgacgggagcgtgcttaaagtaagcgctccggttgttgatcttccngtggtggatactatcggcgcangagacgcttttcancgagctttcctctctggctggagattaagggaaaatgtcccgntccaccctggtcacatgagcgagacgatctctatgacgccctctctttgcaatagagcgcttcatcgtttgctcgcgcggggcgccgaaccgccctccaaaggnaagtga

SEQ ID NO: 15620 - protein, 310 aa, Unknown
  Obtained from environmental sample
  DOMAIN (1)...(308): pfkB family carbohydrate kinase
  misc_feature (1)..(310): Xaa is any amino acid
MIDMVWTQFPGLGRGFIPLPGGSPYNTAVAISRLGVPVKFLGRFSTDFFGEILIKRLRDNRVGDDLIIRSGQNSTLAFVKLDKGKEPQYVFYTEGTADSSLQVSDLPPKLPADTKCILFGSISMTMEPLASAIEALILREGTRKSADQMDGAPVISFDPNIRPFMIKDRNAYITKFEKWVAASTIAKISAADFEFLYPKLGQEQALQKILAMXPRVAICTQGPXGALALLRRNDGSVLKVSAPVVDLPVVDTIGAXDAFXRAFLSGWRLRENVPXHPGHMSETISMTPSLCNRALHRLLARGAEPPSKGK

SEQ ID NO: 15621 - DNA, 765 bp, Unknown
  Obtained from environmental sample
  misc_feature (1)..(765): n is a, c, g, or t
atgataactgttacggatttaagcctgtcattcggcgagcgcactctttttaaggacgttaaccttaaattcactcccggcaactgttacgggataatcggcgcaaacggggccggaaagtccactttcctgaaaattctgtccggcgaaatagaacacgacaagggagaaatttccacaggtaaaaaccagcgcattgccgtcctaaaacaggaccactttgcgtttgaaaaatatcccgcgctggaaaccgtagttatgggttacccgaagctttacgccgttcaaaaagaacgcgaagcgatttacgcaaaagaaaacttcagcgaagcggacggaatgagggcaagcgagcttgaggcggactttgcggaactgggcggatgggaagccgaggctcaggcgggacagcttctttcaggccttggtcttgacgaggaagatcacggaaaattaatggcggaacttgacgaatccaaaaaagttcgcgtacttttggcgcaggccctattcggcagccctgacattctgctccttgacgaacctaccaacggtttagacctggaatctatctcatggctggaggactttcttatagacttccccaacacggtaattgtcgtctcgcacgaccgccatttcttaaacgcggtctgcacaaacgtatgcgacatagacttcggcaaaatcaccccgtattcgggcaattacgatttctggtaccagatgagccagatactgcaaaggcaggcgcgggatcagtaa

SEQ ID NO: 15622 - protein, 254 aa, Unknown
  Obtained from environmental sample
  DOMAIN (27)...(228): ABC transporter
  misc_feature (1)..(254): Xaa is any amino acid
MITVTDLSLSFGERTLFKDVNLKFTPGNCYGIIGANGAGKSTFLKILSGEIEHDKGEISTGKNQRIAVLKQDHFAFEKYPALETVVMGYPKLYAVQKEREAIYAKENFSEADGMRASELEADFAELGGWEAEAQAGQLLSGLGLDEEDHGKLMAELDESKKVRVLLAQALFGSPDILLLDEPTNGLDLESISWLEDFLIDFPNTVIVVSHDRHFLNAVCTNVCDIDFGKITPYSGNYDFWYQMSQILQRQARDQ

SEQ ID NO: 15623 - DNA, 864 bp, Unknown
  Obtained from environmental sample
  misc_feature (1)..(864): n is a, c, g, or t
gtgtttattgatgtcctgccattgcatcatacatatcctactacctgctcttttatcgcgccgtttgcggtcggcattccgactgtaattaccgaaaaaatagtcggtaaagttgttatagatgatataagagacggagaagtttcattccttattgcggttcctctgctttacgataaagtgatggcggctatagaagccggttatcaaaaaatttctcctatagtgcgcgcgcctttggatgttttgcgtaagattgctcttgcaaaagcaaagaaaggcaatcctgaatggggacggagagttttcaggtttatccgtaaaaaggcgaaccttcattcaataaaaataatggtcgccggcggcggcgcgttaagtattaagacagcggatttttttgattcattcgggtttaacattattcatggttacggcatgagcgagaactctccgcttatcagtgtaaatactcctcatcataaacgcaatgaatcagtagggcttcccgtcagttacacggaagtaaagattgtaaatccgggaccggacggcattggcgagattgcgtgtaagtcgccttctataatgctgggttattttgaaaacgaagaagcgacaaaagaaattattacggaagacggctggcttttaacaggcgaccttggcttccgtgatgaagacggatttatctatattcgcggaacggagaaaaatcttattgtcggttccggcgggaaaaatgtataccccgaagaaagtcgagcgcattttgccggtttgcgttcaattgccgaaatacttatcgtcggcagaaaaacatccggcggaagaaattatttacgccgttatagttccccattatga

SEQ ID NO: 15624 - protein, 287 aa, Unknown
  Obtained from environmental sample
  DOMAIN (1)...(268): AMP-binding enzyme
  misc_feature (1)..(287): Xaa is any amino acid
MFIDVLPLHHTYPTTCSFIAPFAVGIPTVITEKIVGKVVIDDIRDGEVSFLIAVPLLYDKVMAAIEAGYQKISPIVRAPLDVLRKIALAKAKKGNPEWGRRVFRFIRKKANLHSIKIMVAGGGALSIKTADFFDSFGFNIIHGYGMSENSPLISVNTPHHKRNESVGLPVSYTEVKIVNPGPDGIGEIACKSPSIMLGYFENEEATKEIITEDGWLLTGDLGFRDEDGFIYIRGTEKNLIVGSGGKNVYPEESRAHFAGLRSIAEILIVGRKTSGGRNYLRRYSSPL

SEQ ID NO: 15625 - DNA, 777 bp, Unknown
  Obtained from environmental sample
  misc_feature (1)..(777): n is a, c, g, or t
ttgcaccacctttacggttttacccttggtctcctgttgcctttgagcctcgggattcccatacgcagcgtgccgcccctgccgacggtcgtggctgcccggatgcgccccggggattgggtggtgagcattcccctgctctggtcgcgtctggttgagatgaaacactggcggacactccgctcggatgccgggcgggatattaccctgtgtaccggaacagcccccatcccgcccgaggtgatgcacgccttacggcataacgcattccacacgatggaatttttcggctcgtcggaaatgggcaccgtgtgccggcgggaaaatccggatgagcctttttgtctcctgccgcatgtggaacgcggcaagggagaacatgaaaacaccttggaacgtcttttgccggacggcacgctgatgcgctatcccgtgttggacaacatcatctgggtcggcgatcgcgccctgcgccccggcgggcgtcttgacgaggccgtgcaagtcgcgggggtgaacgtgcatcccgcgcatgtggcttcggtactggaaacgcacgagggcgtgaaccaatgcgtggtgcgcctgatgcgcccggacgaaggatacaggctcaaggccttcatcgtgcccgaaccgggccgggacgaacaggcgctgcgcgcatcgttggcgctttttgcccgcaagcatctaagcgatgctgagcgccccgtgcactattctttcggagaggatatcccgcgcggcccgctgggcaagccgacggactggtga

SEQ ID NO: 15626 - protein, 258 aa, Unknown
  Obtained from environmental sample
  misc_feature (1)..(258): Xaa is any amino acid
MHHLYGFTLGLLLPLSLGIPIRSVPPLPTVVAARMRPGDWVVSIPLLWSRLVEMKHWRTLRSDAGRDITLCTGTAPIPPEVMHALRHNAFHTMEFFGSSEMGTVCRRENPDEPFCLLPHVERGKGEHENTLERLLPDGTLMRYPVLDNIIWVGDRALRPGGRLDEAVQVAGVNVHPAHVASVLETHEGVNQCVVRLMRPDEGYRLKAFIVPEPGRDEQALRASLALFARKHLSDAERPVHYSFGEDIPRGPLGKPTDW

SEQ ID NO: 15627 - DNA, 402 bp, Unknown
  Obtained from environmental sample
  misc_feature (1)..(402): n is a, c, g, or t
gtgcagcgcggcttgggcgatgtgttgctggcgtgggagaacgaggcatttttgatgaacaaggaggttggcgaaggcaagtttgatataattaccccaagtctcagcatactcgcagaaccctccgttacttatgttgacggcatagtgaataaacgcggtacaaaaaccgaagccattgcctatttggaatacttgtattcggatgctgcgcaacggcttatcggcaagcattattaccgtccttccaatccggcaatcgctaaggaattttcgtacttcgtaaaccttaaattggtgacaattgataaggatttcggagggtggcaggcggcgcataaattgcattttgcagacaacgggctatttgaccagataatggcagaattgaaaaagaaatga

SEQ ID NO: 15628 - protein, 133 aa, Unknown
  Obtained from environmental sample
  misc_feature (1)..(133): Xaa is any amino acid
MQRGLGDVLLAWENEAFLMNKEVGEGKFDIITPSLSILAEPSVTYVDGIVNKRGTKTEAIAYLEYLYSDAAQRLIGKHYYRPSNPAIAKEFSYFVNLKLVTIDKDFGGWQAAHKLHFADNGLFDQIMAELKKK

SEQ ID NO: 15629 - DNA, 420 bp, Unknown
  Obtained from environmental sample
  misc_feature (1)..(420): n is a, c, g, or t
atgaggtttcctgtgaaagtgaaaagcggcagaggaaaaataccaggttttggattaagtttaggactaagcctaagctacatatctttccttatacttatacccatatctgcccttatcatttacgcggcaaaaattccgccagcggaatatttcaaaattatttcggatgaacgagttattgccgcgttcaaggtttcgttttcctcggctatagctgccgcactgctgaatttcgtattcggttttattatcgcatggattttggcacggcataatttttttggaaagaaaatagttgatgcctgcatagatttgccttttgccatccccactgccgtagctggtatttctcttgctatggtattctcgtccaacggttttatgggaaatttctttcattgttcaatatttcgctag

SEQ ID NO: 15630 - protein, 139 aa, Unknown
  Obtained from environmental sample
  misc_feature (1)..(139): Xaa is any amino acid
MRFPVKVKSGRGKIPGFGLSLGLSLSYISFLILIPISALIIYAAKIPPAEYFKIISDERVIAAFKVSFSSAIAAALLNFVFGFIIAWILARHNFFGKKIVDACIDLPFAIPTAVAGISLAMVFSSNGFMGNFFHCSIFR

SEQ ID NO: 15631 - DNA, 567 bp, Unknown
  Obtained from environmental sample
  misc_feature (1)..(567): n is a, c, g, or t
gtgggatttgtatttcagcattacgctcttttcaagcacatgaacatatttgagaacatcgcttttgggcttcgtgtacgccctcggaaaatacgccctgataaaaaagctatacatgaaaatgttatgcgtctcgtttcccttgttcagcttgagagttttgtgaaccgcttcccttcggagctttctggcgggcagaggcagcgcgttgcgcttgctagagcacttgccgtggaacctaccgtgttgctgctagacgaaccattcggtgctcttgatgccaaagtccgcaaagaactgaggcattggcttcgccgcctgcacgatgaaattcacgtcacaagcatttttgtaacgcacgaccaagacgaggctcttgaagtttcggactcaatagccattttgaacaaagggaaagttgagcagataggaagcccggaagcggtatgcgactacccagcaaatccatttgtcaccgaatttttaagcgatgtgaacagacctctagtaaaagataaaaagaaaaaattgttcgatgtgataaatgacggtcggcaagggatttaa

SEQ ID NO: 15632 - protein, 188 aa, Unknown
  Obtained from environmental sample
  DOMAIN (1)...(138): ABC transporter
  misc_feature (1)..(188): Xaa is any amino acid
MGFVFQHYALFKHMNIFENIAFGLRVRPRKIRPDKKAIHENVMRLVSLVQLESFVNRFPSELSGGQRQRVALARALAVEPTVLLLDEPFGALDAKVRKELRHWLRRLHDEIHVTSIFVTHDQDEALEVSDSIAILNKGKVEQIGSPEAVCDYPANPFVTEFLSDVNRPLVKDKKKKLFDVINDGRQGI

SEQ ID NO: 15633 - DNA, 384 bp, Unknown
  Obtained from environmental sample
  misc_feature (1)..(384): n is a, c, g, or t
atggtggcaagccgtttggaaaaggtgaatatgctccacgccatagacaaattgcccagcgaactcagcggcggaatgaagaagcgggctgctcttgcacgtgccattgcccttgacccggagcttcttttttgcgatgagccgagcgcggggctagaccccgtgacgagccgctccctagacgaccttttgctttttttgagggagtccttgaagctatccgttttgatagtcacccacgaattggattccatcaaaacaatagcggataaaattctatttctaaaaaccggagaggtgcttttggactgcactttaaaagagggattggagagcgaaattgaagacgctaaggagtttttttctcgctccgcgaagcattga

SEQ ID NO: 15634 - protein, 127 aa, Unknown
  Obtained from environmental sample
  DOMAIN (3)...(98): ABC transporter
  misc_feature (1)..(127): Xaa is any amino acid
MVASRLEKVNMLHAIDKLPSELSGGMKKRAALARAIALDPELLFCDEPSAGLDPVTSRSLDDLLLFLRESLKLSVLIVTHELDSIKTIADKILFLKTGEVLLDCTLKEGLESEIEDAKEFFSRSAKH

SEQ ID NO: 15635 - DNA, 741 bp, Unknown
  Obtained from environmental sample
  misc_feature (1)..(741): n is a, c, g, or t
atgataggcatcatcggaggcagtggtcttgataaccctgaaatttttcgcaacagcagggatgaaaatgtatcaacggtttacggcgagccgtcttccgctcttaaacacggagacatagacggcgttcaggtagttcttttggcccgccacggaagggagcacacgattcctccttcacaggtaaattacagggccaacatttcagccttaaaaaaagccggatgcagtcacataatagcgactaccgcagttggttcccttaaggatgaaattcgccgcggagacctggtaattgtcgatcaatttattgactttacaaaacagcggaagatgagcttttacgaatcttttgagcctcataacccggtacacacatcaatggccgatccattcgacagccgtttgcggaaaattcttattgacgagtgcaaagcgctgaattacccattccatgaaaaaggaacggtaataaccattgaagggcccaggttttcgagccgtgcggagtccttcatgttccgcacctggggagccgacataatcaatatgtcaattgccacagaaacggtcttggcgaatgaggcaggaattccctatgccgcggtagccatgagtacggattacgattgctggaaaaccggcgaagaaagcgtaacatgggaagccgtcctaaaagtttttgccgacaatgccagcaaggtgacaaccctcttaaaaaatataattccgaaaatatag

SEQ ID NO: 15636 - protein, 246 aa, Unknown
  Obtained from environmental sample
  DOMAIN (1)...(244): Phosphorylase family 2
  misc_feature (1)..(246): Xaa is any amino acid
MIGIIGGSGLDNPEIFRNSRDENVSTVYGEPSSALKHGDIDGVQVVLLARHGREHTIPPSQVNYRANISALKKAGCSHIIATTAVGSLKDEIRRGDLVIVDQFIDFTKQRKMSFYESFEPHNPVHTSMADPFDSRLRKILIDECKALNYPFHEKGTVITIEGPRFSSRAESFMFRTWGADIINMSIATETVLANEAGIPYAAVAMSTDYDCWKTGEESVTWEAVLKVFADNASKVTTLLKNIIPKI

SEQ ID NO: 15637 - DNA, 642 bp, Unknown
  Obtained from environmental sample
  misc_feature (1)..(642): n is a, c, g, or t
atgagcagcagcggaagagcaggcaatggccgcgctgacaggaaaaagcagttcaaacgacgggataatgacacctggcaggagggagattattctggccgggcttccggcggggaacctcgttcaggccgtggacagtctggggctcatgtaaagggaaataacaactataaaaaaggcggcgaggttcgcggggacagggtttcgtttgtggaaaggcccaaatggattcccccaaaggcaaacacggagccgctgccagtatctgaatgtctgtggtgcggtaaacccatccgggatatttcatcggcaattgctgacaaagacacaggcgctccggttcattttgactgtgtagcaacaaggattgcctttggagaaaaacttgaaaagggcgatacaattgcttacattggggcaggccggtttggcatagtcagttttggaagctcaggagcgccttcgcgcttttcacccgacgattcatcccatgattccggcaagtcagaaaattcctctgaagctcacaaccatcccgccgcaaatcgtggttttataataaaaaaaattatcgaatgggaaaacaaggataaaagagcagaatggcgctcggtaatttgtaatcattattcggttacttga

SEQ ID NO: 15638 - protein, 213 aa, Unknown
  Obtained from environmental sample
  misc_feature (1)..(213): Xaa is any amino acid
MSSSGRAGNGRADRKKQFKRRDNDTWQEGDYSGRASGGEPRSGRGQSGAHVKGNNNYKKGGEVRGDRVSFVERPKWIPPKANTEPLPVSECLWCGKPIRDISSAIADKDTGAPVHFDCVATRIAFGEKLEKGDTIAYIGAGRFGIVSFGSSGAPSRFSPDDSSHDSGKSENSSEAHNHPAANRGFIIKKIIEWENKDKRAEWRSVICNHYSVT

SEQ ID NO: 15639 - DNA, 303 bp, Unknown
  Obtained from environmental sample
  misc_feature (1)..(303): n is a, c, g, or t
ttgattttcatcgtcagcaatcccccgtacatatcatcaccccaaatgaaatctctcgacaaaagcgtatcatcctacgaaccgcatctcgccctttacggcggagaggacgggcttgattattatcgtataatttccgcncgcgccaaaatgtatcttaaagatacggggcggatctacctggaaataggattcgatcagggcgcaagcgtcccgaacatcctatataatgacggctggaaagatgtatcggtggtaaaagatttggcagggcgcgacagggttgcggttgcgactaactga

SEQ ID NO: 15640 - protein, 100 aa, Unknown
  Obtained from environmental sample
  misc_feature (1)..(100): Xaa is any amino acid
MIFIVSNPPYISSPQMKSLDKSVSSYEPHLALYGGEDGLDYYRIISARAKMYLKDTGRIYLEIGFDQGASVPNILYNDGWKDVSVVKDLAGRDRVAVATN

SEQ ID NO: 15641 - DNA, 777 bp, Unknown
  Obtained from environmental sample
  misc_feature (1)..(777): n is a, c, g, or t
atgtcccccgttgcggcatcatatcacggttttccggcggaaagccttgtccttgccggggttaccggcacggaagggaaaagtaccaccgtttacctgatttggcagcttctgcttcttgcgggcaaaaaggcgggtttcatttccaccgtccagtacagtgacggcggtgaggcgctgtggaatcccgaacatcagaccacgccggaggcgacggctatacatcttcgtctggcggaaatggcaaagaacggcgcggaatacgcggtaatcgaggcaagttcccacggcctttcccggcgaaccaaccggctgggggatgttgcttttgacgcggcggtgatgaccaacgtagcccatgaacacctggaattccacgggacatgggagcagtaccgggatgacaaggcgatgctttttcgatccctggacaacagggcccgcctgacgggccgtgcttcaaaaactatccgcccctttggggtaactaacgcggatgacaaaagcgcttcctattttaaagaggcgacagggcaaaaaaccttttcgttcagtaccgccggtaacgcggcggatgtacggcttttgtcaatcaaaagcgacgccgggggaaaccgctatgaggtacaccacgccgcaagcggtaaaacgcttgtaatggaagaccggcttcccggcgcctttaacgcangcaatgttttggcgtctctcctggtcgtttcgggattgctggacaagccggttgaagaacttgttcccctggttccttcactntaa

SEQ ID NO: 15642 - protein, 258 aa, Unknown
  Obtained from environmental sample
  DOMAIN (19)...(240): Mur ligase middle domain
  misc_feature (1)..(258): Xaa is any amino acid
MSPVAASYHGFPAESLVLAGVTGTEGKSTTVYLIWQLLLLAGKKAGFISTVQYSDGGEALWNPEHQTTPEATAIHLRLAEMAKNGAEYAVIEASSHGLSRRTNRLGDVAFDAAVMTNVAHEHLEFHGTWEQYRDDKAMLFRSLDNRARLTGRASKTIRPFGVTNADDKSASYFKEATGQKTFSFSTAGNAADVRLLSIKSDAGGNRYEVHHAASGKTLVMEDRLPGAFNAXNVLASLLVVSGLLDKPVEELVPLVPSL

SEQ ID NO: 15643 - DNA, 501 bp, Unknown
  Obtained from environmental sample
  misc_feature (1)..(501): n is a, c, g, or t
gtgtacgcggtggaaacaatacttgtgcataaagacgcactttccgcgcttatgcctaaaatggcggccgcgcttgcaggcaaatgcgaactgcgctgcgacggcgcgtcaaaagccgccatcggcgcactgccttccgcccttgtcattaaagacgctgttgaggaagactgggctactgagtttcttgattacattctcgcggtaaagacggtttcctcatgcgatgaggcaatcgcgcatatcaacaagtacgggactaaacattcggaagcaattctcacaaacgatttaagggcggcggatgaattccgttcaagagtggacgcggcgtgcgtgtatgtcaacgcgtccacgcgttttacggacggcgggcaattcggtttcggcgcggagttgggaatcagcactcagaaatttcacgcaaggggaccgatgggtcttgaggcccttacgacaataaaataccttataaacggcagcggacaaatacggagttaa

SEQ ID NO: 15644 - protein, 166 aa, Unknown
  Obtained from environmental sample
  misc_feature (1)..(166): Xaa is any amino acid
MYAVETILVHKDALSALMPKMAAALAGKCELRCDGASKAAIGALPSALVIKDAVEEDWATEFLDYILAVKTVSSCDEAIAHINKYGTKHSEAILTNDLRAADEFRSRVDAACVYVNASTRFTDGGQFGFGAELGISTQKFHARGPMGLEALTTIKYLINGSGQIRS

SEQ ID NO: 15645 - DNA, 324 bp, Unknown
  Obtained from environmental sample
  misc_feature (1)..(324): n is a, c, g, or t
atgatttctaaacttatcgctgactcgcgaaaaataatcatcaaaattggatcaaacacgcttgccggcagtaacgggaaaatcaactccgcatttctcgcggagttcgcggaacagacggcggctcttatgaaaaaaggcaagcagattgccattgtctcctcgggcgcgcaggtagcggggctttccacgatggacaagtgggcgcggaagaaggacattcactacaggcaggcgttatgcgcggtcgggcaggtagaccttatgggagcgtggagcaaggcgtttgaacacacggactgcacatcgcgcagatacttttaa

SEQ ID NO: 15646 - protein, 107 aa, Unknown
  Obtained from environmental sample
  misc_feature (1)..(107): Xaa is any amino acid
MISKLIADSRKIIIKIGSNTLAGSNGKINSAFLAEFAEQTAALMKKGKQIAIVSSGAQVAGLSTMDKWARKKDIHYRQALCAVGQVDLMGAWSKAFEHTDCTSRRYF

SEQ ID NO: 15647 - DNA, 546 bp, Unknown
  Obtained from environmental sample
  misc_feature (1)..(546): n is a, c, g, or t
atgattaaacagcccgatgtgctgatgtttttgtttttgcacagccgggaattctccgaagaaattaaacgggtaaattatgaattttacgaacctcgtaccagccatgagtcttcgctttcgccgtcgatacattccatacttgcatctgaaattggaaaaccggctgacgctttccgtttttttgcctttgccacgaggatggatctggacaactacaatcgcaatacagccgaagggctgcacaccacgagcattgccgccgcatggatgaacatagtgtacggcttcggcggccttcgcagcgacagcgcgcccgacggtgaaagcgaggggctcattctcaaccccagccttccgcggcaatggacagagtacgaattcagaattttctaccgcggcgcgcatatccgcatcagcgtatccgccggggaagtagcattgtctaccgacgatcgggtaagcgaagcgataccttttgtgatatacggcaagccctataagtttgattcaaacggcctgaggatacctttgtgtaccgcctga

SEQ ID NO: 15648 - protein, 181 aa, Unknown
  Obtained from environmental sample
  DOMAIN (117)...(171): Glycosyl hydrolase family 65, C-terminal domain
  misc_feature (1)..(181): Xaa is any amino acid
MIKQPDVLMFLFLHSREFSEEIKRVNYEFYEPRTSHESSLSPSIHSILASEIGKPADAFRFFAFATRMDLDNYNRNTAEGLHTTSIAAAWMNIVYGFGGLRSDSAPDGESEGLILNPSLPRQWTEYEFRIFYRGAHIRISVSAGEVALSTDDRVSEAIPFVIYGKPYKFDSNGLRIPLCTA

SEQ ID NO: 15649 - DNA, 603 bp, Unknown
  Obtained from environmental sample
  misc_feature (1)..(603): n is a, c, g, or t
gtggtgcttggcgcgggcgttgtcggcgcaaacgctgcaaaaatcgccgtaggctccggtgcccatgtcacggttgtggatattgacgttgacaagctggaatacctcgaagatatctacggttcaaaaattaccacgctctattcaacgccggaaaacatctatgaaattctgcccaaggcggatttggttatcggcgcggttcttattcccggttcctccacgcccaagctcatccaaaacaaacatctgcccaatatgaaaaaaggctcggttatcgtggatgtcgcaatagatcagggcggttgcactgaggcaagccgtgttacttatcataacgaaccgatctatgagcagaacggcgtaatgttttattgcgtaggcaatatgcccggcgcggtagcctatacttcgacaaacgccctgggcaattccactctccgctacggtctttccatagcgaaacatggagcggaagcggcgctgaaaaaggactcagggcttttggaagggctaaacgtttataagggccttgttacctacccgggcgttgcggaagcgcatggactgaaactaactccggcatctgaggtgattaagtaa

SEQ ID NO: 15650 - protein, 200 aa, Unknown
  Obtained from environmental sample
  DOMAIN (1)...(132): Alanine dehydrogenase/PNT, C-terminal domain
  misc_feature (1)..(200): Xaa is any amino acid
MVLGAGVVGANAAKIAVGSGAHVTVVDIDVDKLEYLEDIYGSKITTLYSTPENIYEILPKADLVIGAVLIPGSSTPKLIQNKHLPNMKKGSVIVDVAIDQGGCTEASRVTYHNEPIYEQNGVMFYCVGNMPGAVAYTSTNALGNSTLRYGLSIAKHGAEAALKKDSGLLEGLNVYKGLVTYPGVAEAHGLKLTPASEVIK

SEQ ID NO: 15651 - DNA, 705 bp, Unknown
  Obtained from environmental sample
  misc_feature (1)..(705): n is a, c, g, or t
ttgcggcgcatgaaagacgacggccaatacccgcatccctttggttcgggggacgccgcgcctataatcggcaaacttggcaccggggttgagcttaacgagctttttgtcagttttgagcagggcgcgctcaaggaaacccaaagcgattttgacattgcgctggatggtaagggttttcttgccgtcagcactccctggggcgagcgctataccagaaacggttcatttcagcttggaaaagaaggctttcttgaaacaaaagaaggctaccccgtaatgggcgagaacgggccaatccgggttaaagcaaataattttcagatagacaagttagggcggatttggattaacgccgaatatgacgacgatcccaatgtccttgtatcaagggaaggcaacagctggtctgaccctgtcttgctggatatccttaaagtggttgattttgacattgacagatatttgaagaaacaaggttccagtctttattacgaaactgaaacatccgggcctgccatgatcatggaagaagaagacaggcccaaagtaatacagggctttgtggaagcggccaatgtggaacctgtccgcgaaatggtgcagatgatcgaagtaaaccgcgcctacgaggcaaatcaaaaagtaatacaaacccacgatactatgcttggtgttctgatcaatcangtagccaaagtttaa

SEQ ID NO: 15652 - protein, 234 aa, Unknown
  Obtained from environmental sample
  DOMAIN (192)...(230): Domain of unknown function (DUF1078)
  misc_feature (1)..(234): Xaa is any amino acid
MRRMKDDGQYPHPFGSGDAAPIIGKLGTGVELNELFVSFEQGALKETQSDFDIALDGKGFLAVSTPWGERYTRNGSFQLGKEGFLETKEGYPVMGENGPIRVKANNFQIDKLGRIWINAEYDDDPNVLVSREGNSWSDPVLLDILKVVDFDIDRYLKKQGSSLYYETETSGPAMIMEEEDRPKVIQGFVEAANVEPVREMVQMIEVNRAYEANQKVIQTHDTMLGVLINXVAKV

SEQ ID NO: 15653 - DNA, 354 bp, Unknown
  Obtained from environmental sample
  misc_feature (1)..(354): n is a, c, g, or t
atgtcgtctaacgcaattttatttccaatgtctaatcctacgcctgaaataatgccggatgcggctcttgccgccggagccgcagtagtgggaacgggcaggagcgattttgccaatcaaattaacaacgtccttgcttttcccggcattttccgaggagcgttggacgtgcgcgcaagcgacattaacgacgaaatgaaaattgcgtcggcttacgcgcttgccaatcttgtcagtgagaacgaattacgcggcgattacattattccggcggcttttgatccgagagtaaaagacgcagtggctgacgcggcggcgcaggcggcaaaaaaaagcggcgtggcaagagcgtaa

SEQ ID NO: 15654 - protein, 117 aa, Unknown
  Obtained from environmental sample
  DOMAIN (1)...(110): Malic enzyme, NAD binding domain
  misc_feature (1)..(117): Xaa is any amino acid
MSSNAILFPMSNPTPEIMPDAALAAGAAVVGTGRSDFANQINNVLAFPGIFRGALDVRASDINDEMKIASAYALANLVSENELRGDYIIPAAFDPRVKDAVADAAAQAAKKSGVARA

SEQ ID NO: 15655 - DNA, 468 bp, Unknown
  Obtained from environmental sample
  misc_feature (1)..(468): n is a, c, g, or t
ttgggatggtgttttgaaagcggcagcggaatagatcaagatattgaaaaagctgtcgcgtgctaccaaaaatcggcggaacagggttatgctccggctcagggcaacttaggtttttgttgtgaaaacggcaacggcgtgcccaaagacgagaaaaaagcttttgaatggtataagttagctgcaaatcaaggaaatgtttttgctcaatataatttaggcgcgtgttatgaatttggcaaaggcatagaagcggatataggaaaagcgatagaatggtatcgtaaatcggcggaacacggatatgcgccggctcaaaactgcttgggtgtctgctatgaacacggcaacggcgtaaccagaaatccgcttgttgcgtttgaatggtataattacgcggcggctcaaggatattcagcggcgcaaaaaaatctggatcatattaaaaatgctcttaagaaaaaataa

SEQ ID NO: 15656 - protein, 155 aa, Unknown
  Obtained from environmental sample
  DOMAIN (103)...(138): Sel1 repeat
  misc_feature (1)..(155): Xaa is any amino acid
MGWCFESGSGIDQDIEKAVACYQKSAEQGYAPAQGNLGFCCENGNGVPKDEKKAFEWYKLAANQGNVFAQYNLGACYEFGKGIEADIGKAIEWYRKSAEHGYAPAQNCLGVCYEHGNGVTRNPLVAFEWYNYAAAQGYSAAQKNLDHIKNALKKK

SEQ ID NO: 15657 - DNA, 657 bp, Unknown
  Obtained from environmental sample
  misc_feature (1)..(657): n is a, c, g, or t
gtgaagggcattttcactcgggctcttgcggggaaaaagccggacgcgagggaaacggaatcatggaaaaccttttgccttaattttttcggagaagaatacgcgaaccgcggctgggcaatgcagatacacgtatcggcgattcgcagcgccaacagcgccatgcttgccgcagtcggtcctgacacgggctttgacgcggtggcggattatcctgcagctgaaaaactcgcccgttttctggaccttctggattcccggggcaagctgcccaagaccatcctctacagccttaacttcaaggacctgtacccaatggcgacgatcatgggcagtttccaaggccacccatctgaagaatccatacccggcaagatgcagcttggctcgggctggtggttcctcgatcacatagacggcatggaagcgcagatgaggctgctggggaataccggtttgctgtcacgttttgtgggtatgcttaccgattcgcgcagtttcctgtcctatccacggcatgagtatttccgccgcgtactctgcaatatattgngaacatgggctgagaacggtgaaatccccaatgactttgaactgcttggaggcatggtaagggacatttcgttcaggaacgcgcggcggtattttttaaaataa

SEQ ID NO: 15658 - protein, 218 aa, Unknown
  Obtained from environmental sample
  DOMAIN (1)...(218): Glucuronate isomerase
  misc_feature (1)..(218): Xaa is any amino acid
MKGIFTRALAGKKPDARETESWKTFCLNFFGEEYANRGWAMQIHVSAIRSANSAMLAAVGPDTGFDAVADYPAAEKLARFLDLLDSRGKLPKTILYSLNFKDLYPMATIMGSFQGHPSEESIPGKMQLGSGWWFLDHIDGMEAQMRLLGNTGLLSRFVGMLTDSRSFLSYPRHEYFRRVLCNILXTWAENGEIPNDFELLGGMVRDISFRNARRYFLK

SEQ ID NO: 15659 - DNA, 699 bp, Unknown
  Obtained from environmental sample
  misc_feature (1)..(699): n is a, c, g, or t
ttgatccgccttcagacaggaaatggaaaaaggaaattccgccgaagcccccggcgagaggatcaccagggttctggaaaattatttcggtgcgggcgaggtagtagtactccgctcagatntatgtcggctcacngtttttccaagaacctcaccgatcaggcggggattttgataggctttaccctgcttttggtactggcttacgcgtccattcggtttaagccgcaatacgcaattggcgcggtactcggcattatccatgacagccttgtcataatatcctttgtagtctggacaagaatggaattcaacaccaccaccatagccgcaattctcacgatactcggttattcgatcaacaacaccattgttatttttgacaggatgagggaaagccgccgtctttaccccgatgaagtttttgtaaccatacttaaccgttctttgacagagactctgagcagaacagttataactacgtttacaacaatgctggcagtcctttcactgtttatctttacaactggttccatgaaggactttgctctggccctgcttgtcggccttgtatcaggcgtttacacgacgactttcattgccaccggctttgtgtatttctgggataaagagaaggtaaaacgggataagaagaaagccattaccccgcaaaccaagggtgcgcttgcaaaagcgtaa

SEQ ID NO: 15660 - protein, 232 aa, Unknown
  Obtained from environmental sample
  DOMAIN (24)...(211): Protein export membrane protein
  misc_feature (1)..(232): Xaa is any amino acid
MIRLQTGNGKRKFRRSPRREDHQGSGKLFRCGRGSSTPLRXMSAHXFSKNLTDQAGILIGFTLLLVLAYASIRFKPQYAIGAVLGIIHDSLVIISFVVWTRMEFNTTTIAAILTILGYSINNTIVIFDRMRESRRLYPDEVFVTILNRSLTETLSRTVITTFTTMLAVLSLFIFTTGSMKDFALALLVGLVSGVYTTTFIATGFVYFWDKEKVKRDKKKAITPQTKGALAKA

SEQ ID NO: 15661 - DNA, 852 bp, Unknown
  Obtained from environmental sample
  misc_feature (1)..(852): n is a, c, g, or t
ttgattattcagaagtttttctccggcacggtaaaggataggttgtcgctgatattgcaagcggaagattttatccttggtgtggatgatggtaaaaatcgctatcttcgcgaggtatcgcttttggggcaagcctacgcgcttgcgaagccagaccaagccacttttgaaaatgctgaagagatagcgttcttccaagcagtcaaggctagattgatgaaattcgagacgggcggcgcgggcattgacggtggctacgattcggttatacgcaatatcgtgaattctgcaatcgtatacgatcaagtagtggacatcttcagcgcggcagggcttgagaaaccggagttatctatactttcggaggaattccttaaagaaattgaggggatgaaacacagaaacatcgccattgaacttttgaaaaaactacttacagacgaaataaagatacgctctaaacgcaatctcgcaatgtcaaggtcgctttttgagatacttgacggagcaataaaacggtatcagaataacctgctgaccaccgcagaggttattgaagaacttatcagcattgcccgcgagatcaatgccgccgacagacgcggcgaagatattggtctttcggaggatgaactggcgttctacgatgctctcgaaacgaacgacagtgctgtaaacgtgcttggcgatgacctactgcgggcaatcgcaagggagattgcggataaggtaaggagaaatgcaaccatagatttcacaatcaaggaaacgacccgcgcccgtattatggtcatagttcgtagaatcctcacaaatacggatatccaccggacaaacagcccaacgcgatag

SEQ ID NO: 15662 - protein, 283 aa, Unknown
  Obtained from environmental sample
  misc_feature (1)..(283): Xaa is any amino acid
MIIQKFFSGTVKDRLSLILQAEDFILGVDDGKNRYLREVSLLGQAYALAKPDQATFENAEEIAFFQAVKARLMKFETGGAGIDGGYDSVIRNIVNSAIVYDQVVDIFSAAGLEKPELSILSEEFLKEIEGMKHRNIAIELLKKLLTDEIKIRSKRNLAMSRSLFEILDGAIKRYQNNLLTTAEVIEELISIAREINAADRRGEDIGLSEDELAFYDALETNDSAVNVLGDDLLRAIAREIADKVRRNATIDFTIKETTRARIMVIVRRILTNTDIHRTNSPTR

SEQ ID NO: 15663 - DNA, 639 bp, Unknown
  Obtained from environmental sample
  misc_feature (1)..(639): n is a, c, g, or t
gtggtctttgccagggaaagagaaacccacaaagccctgtccgccgcctttgagtcccggcaggtgaaaaagacctacatcgccgtgattcacgggaggcctttatggcccgaaggcaggacaacctgcgatcttcccctggtacccgatggcagcaaaaagcacctcaccgtcatcgacaagtaccggggtaaacattctcttacggcatttaccctgctcttttccgccggaaattacagtgtagtggaagcctgtccggcaacgggaagaacccaccagatacgggtgcatctttccggcatggggtaccccattgtctgcgatcccctctacggcaggcccggcggcagactttcttacaaacatgggatttatctttcgtcgtttaagcggggttggcagggcgatacctttgaggaacggcctctccttgaacggctgggtctgcacgctgcccggcttgaactaaaccgttcattgttccccgctccaggagccgcangcacttccggtacagttgatacttccggcgttttcgcgctggaagcgcccctttccagggatatggcggcgctcataaaacaaatggaaaaatgcggcttacgccaaacgctggccatgaacagatacctatga

SEQ ID NO: 15664 - protein, 212 aa, Unknown
  Obtained from environmental sample
  DOMAIN (1)...(101): RNA pseudouridylate synthase
  misc_feature (1)..(212): Xaa is any amino acid
MVFARERETHKALSAAFESRQVKKTYIAVIHGRPLWPEGRTTCDLPLVPDGSKKHLTVIDKYRGKHSLTAFTLLFSAGNYSVVEACPATGRTHQIRVHLSGMGYPIVCDPLYGRPGGRLSYKHGIYLSSFKRGWQGDTFEERPLLERLGLHAARLELNRSLFPAPGAAXTSGTVDTSGVFALEAPLSRDMAALIKQMEKCGLRQTLAMNRYL

SEQ ID NO: 15665 - DNA, 828 bp, Unknown
  Obtained from environmental sample
  misc_feature (1)..(828): n is a, c, g, or t
atgatggccgaggctgtttcgggcggcgcggactctatggctatgcttgccgctctttgcgcccttattcccaaagacagaatattttgccttcacgttgaacacggtcttcgtccggcgcgggaaagccggggcgatgcggaacatgtccgtaatttttgcgaaaagaacggaattgactgcctcgttgagtctgtcgcgccgggcaaaattgaggccttcgcgaaacgcaaggggacgggcattgaagccgcggcaaggcatttcaggcgaaggcttttattccgtcacgccgcgcgccttgatcgggaaagcggcttaaagacgcgcgttttaatcgcccacacaaaagacgacgcccttgaactggcgcttatgcgcgtcctgcgcggagcgggacccgcggggcttgccgccatgcctgtcagccgcggacgcctcctgcgccccatgctggacataagccgcgaagatgttatcaagtacctgacagagaaaaaaatcacatggcgcgaagattcaacaaataccgatgaaaagtttctgcgtaaccgcgtaaggaggcggctaatcccgctccttaatgaatcttttccggaatggaaaaacggcctttgcgcccttgcggctacacagtcgcttatagccgagtatttttcaaaggacgcgcaaaaaagcgttgcctgggagcgcgcggcgggcggtcttgttaccggcgaggaaaactttttttccgtaagtgaaataatccgcgaagaggcaatttttcgcggaaaaacaaattgtcttcccgggagattcaagctcattcaattaagcgctcggtaa

SEQ ID NO: 15666 - protein, 275 aa, Unknown
  Obtained from environmental sample
  DOMAIN (1)...(211): PP-loop family
  misc_feature (1)..(275): Xaa is any amino acid
MMAEAVSGGADSMAMLAALCALIPKDRIFCLHVEHGLRPARESRGDAEHVRNFCEKNGIDCLVESVAPGKIEAFAKRKGTGIEAAARHFRRRLLFRHAARLDRESGLKTRVLIAHTKDDALELALMRVLRGAGPAGLAAMPVSRGRLLRPMLDISREDVIKYLTEKKITWREDSTNTDEKFLRNRVRRRLIPLLNESFPEWKNGLCALAATQSLIAEYFSKDAQKSVAWERAAGGLVTGEENFFSVSEIIREEAIFRGKTNCLPGRFKLIQLSAR

SEQ ID NO: 15667 - DNA, 699 bp, Unknown
  Obtained from environmental sample
  misc_feature (1)..(699): n is a, c, g, or t
ttgtatatgggcaaagtagtgctgcaggcgaaaaatcgccaaaaagaaggttccgccgaatcccgcaggattaggaaaagcggccgcatacccgcggtgctgtacggaagatcgggaaaagcggtctctatagaattggacgcttctgaatttattaaaggtacaaaaggtatctccgaaagtacaatcgtaaatatcaatgtagacggtaaagcctatgacgcgtttgtaaaagacactcagcggaatatcctggacgggaatattcttcatatagatttttatgaggtggaaagcggcgttgtcttaagggcgaaggtttcccttgttttgcacggaaaccccataggcgtgcgcgaaggcggtatgcttgaaacgccgttacacgaaattgaggttgaatgtcttcccaaggatcttcccgaaagaatcgaaattgacattgccggacttaaagccaaccattcgattcacgtcagggacatcccgctcgctcagggcgtcaggcttctttccaacccggatcaggttgtggccttggtgaaattcgccaaaatcgaagttgtcgccgctcccgaagctgaagccgccgcggccggtgaagccggcgccgctcccgcagccggtgctgccgccgctcccggcgccgctcccgcagtcgtcgctgccggtccgggcgccgctcctcgcgcatgctag

SEQ ID NO: 15668 - protein, 232 aa, Unknown
  Obtained from environmental sample
  DOMAIN (8)...(94): Ribosomal L25p family
  misc_feature (1)..(232): Xaa is any amino acid
MYMGKVVLQAKNRQKEGSAESRRIRKSGRIPAVLYGRSGKAVSIELDASEFIKGTKGISESTIVNINVDGKAYDAFVKDTQRNILDGNILHIDFYEVESGVVLRAKVSLVLHGNPIGVREGGMLETPLHEIEVECLPKDLPERIEIDIAGLKANHSIHVRDIPLAQGVRLLSNPDQVVALVKFAKIEVVAAPEAEAAAAGEAGAAPAAGAAAAPGAAPAVVAAGPGAAPRAC

SEQ ID NO: 15669 - DNA, 444 bp, Unknown
  Obtained from environmental sample
  misc_feature (1)..(444): n is a, c, g, or t
ttgggcaatgtaatggaggggctgctggcgcggaaaacacctaagccggaagcaaagcgcatcgcgaaagaggcgctggataaagtcggcctttccgaccgttacgactactaccccgcccagctttccggcggccagcagcagcgcgtaggaatagcccgcgcccttgcgcccaagcccgaccttattctctttgacgaaccgacttccgcgttagaccccgaacttataggcgaggttctgtccgtcatgaaactacttgcaagcgagggcgttaccatggtggtggttacccatgaactgggtttcgcgcgcgacgccgcaaaccgcgtaattttcatggaaaaaggcctaattgtggaagacgcgccttccaaacaatttttcgacaatccacggcatgaaagaatccggctttttttaaataaaactgataaccaatag

SEQ ID NO: 15670 - protein, 147 aa, Unknown
  Obtained from environmental sample
  DOMAIN (1)...(117): ABC transporter
  misc_feature (1)..(147): Xaa is any amino acid
MGNVMEGLLARKTPKPEAKRIAKEALDKVGLSDRYDYYPAQLSGGQQQRVGIARALAPKPDLILFDEPTSALDPELIGEVLSVMKLLASEGVTMVVVTHELGFARDAANRVIFMEKGLIVEDAPSKQFFDNPRHERIRLFLNKTDNQ

SEQ ID NO: 15671 - DNA, 348 bp, Unknown
  Obtained from environmental sample
  misc_feature (1)..(348): n is a, c, g, or t
gtgttattcaacaaagaaaaaagtctgctcattaaatatccgaaaaataaaaaagaaacagattatgcggttcccaatggtgtacttgaaattactcncaatgcatnttacagttgcgaacggctggtaaatatcgttcttccggaaaacattaggtttattcacgtagacacgttcgcgagttgtaaagagcttaaatccgtcaccctccccatgagtcttcagtatatagcggggtacgcttttgaaggttgctcaaatcttgaaaccgttacgctttcaagaaaaacaagaatcgggtatgaggtttttaaggggtttaagggggaatttgtttacagggattaa

SEQ ID NO: 15672 - protein, 115 aa, Unknown
  Obtained from environmental sample
  misc_feature (1)..(115): Xaa is any amino acid
MLFNKEKSLLIKYPKNKKETDYAVPNGVLEITXNAXYSCERLVNIVLPENIRFIHVDTFASCKELKSVTLPMSLQYIAGYAFEGCSNLETVTLSRKTRIGYEVFKGFKGEFVYRD

SEQ ID NO: 15673 - DNA, 753 bp, Unknown
  Obtained from environmental sample
  misc_feature (1)..(753): n is a, c, g, or t
gtgcctccagaccagccccccccgcatcccgacgggccaccccatagacagtctaggccacccaggccanatagacagactaggccccaaaaactaacnccggccgtgcgccttggttgggccattcaagcgggagccttttccaaagtagaaaacgctgtgcggctgtccgacaacctgaaccgccaagggctggacgcaacgtattttagggattccgataggctgtacaaggtgaggttcggcaattttacaagcaggaactcggcgatggaaagggccgagtcactgaagtccagaagagtcctcgacgcctactacttggttgcgccagacaccttggccggttacaggattggcgacatcagagcagaaacgggcatcagaaggtcattggtctctacggctgaaagttatttaggcgtgccgtacctttggggcggcacatcggctagcacgggcttcgactgcagcggcctgactcaggcagtctataaattaaacggtctgtcaataccgcgcacgtccagggatcagtacgcgaagggcaacaacatatcgaggaacatgctcaggggcggcgacttgctatttttctctggcagcaagggcaaaaatgtaacgcacgttgcaatctacattgaaaatggaactttcatccacgccccaagctccggccaagtcatacgcagggacagcctgaactcaccaacttggtctaaccaattcatcggggcaaagtcgtacttgtaa

SEQ ID NO: 15674 - protein, 250 aa, Unknown
  Obtained from environmental sample
  DOMAIN (36)...(109): Sporulation related domain
  misc_feature (1)..(250): Xaa is any amino acid
MPPDQPPPHPDGPPHRQSRPPRPXRQTRPQKLTPAVRLGWAIQAGAFSKVENAVRLSDNLNRQGLDATYFRDSDRLYKVRFGNFTSRNSAMERAESLKSRRVLDAYYLVAPDTLAGYRIGDIRAETGIRRSLVSTAESYLGVPYLWGGTSASTGFDCSGLTQAVYKLNGLSIPRTSRDQYAKGNNISRNMLRGGDLLFFSGSKGKNVTHVAIYIENGTFIHAPSSGQVIRRDSLNSPTWSNQFIGAKSYL

SEQ ID NO: 15675 - DNA, 828 bp, Unknown
  Obtained from environmental sample
  misc_feature (1)..(828): n is a, c, g, or t
ttgcgcgtatcgcctgagtcggcgggtgaaatgttctgtcgtaataagtatgacatggtaatacttatggcaggcctagattttgacacgccccttgagcttgccggaaaaatgaaagcgcatgatcccaatgttcctgttctgcttcttgtaatgaacaactcaagccttgcggggcttgatccttccaggcccgaatgtaaagcggtcattgacaaaatatttgtctggaacggttattccaaactgtttgtcgccatgatcaagtatatcgaagacctgcataatgttgataatgacacgcagatcggaatggttcaggtaattcttcttatagaggattccatccgctattactcgcgctatctgccggaactttactctgtggtcttgaaccaaaccaaacttcttttggaggaagaacgttctgtcgaaacaaacaagataataagaatgagatggcggcccaaaattcttttggccgccagttacgaagaagccctggatttgttcaaacgttatgagccttatttgttgacggtaatttcagatatacgctacccggttaatggcgttgatgatcccgaagccggatttaaattcctaactgaagtcaaggcaagaaggcccgaaacccccattctattgcaatccagcgaagatgaaaaccgaaacaaagcttacgcaaatggggccgcgtttgtcgataaaaattcaaacacccttggccatgacatgattgtattttttcaaaccatctgggttttggcccgtttgttttcagaatgccggatggcangaaactgtcgcgngcccgcacatggatga

SEQ ID NO: 15676 - protein, 275 aa, Unknown
  Obtained from environmental sample
  misc_feature (1)..(275): Xaa is any amino acid
MRVSPESAGEMFCRNKYDMVILMAGLDFDTPLELAGKMKAHDPNVPVLLLVMNNSSLAGLDPSRPECKAVIDKIFVWNGYSKLFVAMIKYIEDLHNVDNDTQIGMVQVILLIEDSIRYYSRYLPELYSVVLNQTKLLLEEERSVETNKIIRMRWRPKILLAASYEEALDLFKRYEPYLLTVISDIRYPVNGVDDPEAGFKFLTEVKARRPETPILLQSSEDENRNKAYANGAAFVDKNSNTLGHDMIVFFQTIWVLARLFSECRMAXNCRXPAHG

SEQ ID NO: 15677 - DNA, 702 bp, Unknown
  Obtained from environmental sample
  misc_feature (1)..(702): n is a, c, g, or t
gtgattgaaatnttagacacgccacaaagcgtcaaggacagccccgcggctaaatcaatcggacaggtaaaagggcaaattacttttgagaatgtcagtttttcctatattcagggcgtccctgttcttgaagacgtatcatttgaagttaaaccggggcagatggccgcgctggtaggggctacaggcgtaggaaaaaccacattaagcaaacttatatcaaggttttatgatccgacaggcggaagggtatgcctagacgggcacgatctgagggaaattaccctggaaagcctgagaagcaatatttctttggttttacaggatacatttttgtttaacggaactatcgaagaaaatatcgcgtttgcaaggccggacgcttcgatagaagagattaaatccgcggcgcagaccgcgaggatacatgatgacataacgcggatgcccgaagcctatcagacgcagataggggagcgcggcgttaagttgtcgggcggccaaaaacagcgcatagcgatagcgagggcggtactgtgccgggctccggtgcttattctcgatgaagctaccgcgtctgtggacgtacacaccgaagaacagatacagcaggcgataaacgatatagccggaagccgcacaatcgtaaccatcgcgcaccgtctttctaccatccgcaacgcggatgtatctatgttttga

SEQ ID NO: 15678 - protein, 233 aa, Unknown
  Obtained from environmental sample
  DOMAIN (53)...(233): ABC transporter
  misc_feature (1)..(233): Xaa is any amino acid
MIEXLDTPQSVKDSPAAKSIGQVKGQITFENVSFSYIQGVPVLEDVSFEVKPGQMAALVGATGVGKTTLSKLISRFYDPTGGRVCLDGHDLREITLESLRSNISLVLQDTFLFNGTIEENIAFARPDASIEEIKSAAQTARIHDDITRMPEAYQTQIGERGVKLSGGQKQRIAIARAVLCRAPVLILDEATASVDVHTEEQIQQAINDIAGSRTIVTIAHRLSTIRNADVSMF

SEQ ID NO: 15679 - DNA, 750 bp, Unknown
  Obtained from environmental sample
  misc_feature (1)..(750): n is a, c, g, or t
atgcagtgggttgcggaagagcaattcttaaaagccgttggcgagcttaatgagctaggtgtccgcttaaaaggcgatataccaattttaataaatgaagacagtgcagatgtttggcactcccctcaattctttagccttgaaaatcgcgcaggcgctcctccagatatgttctgctatagcggtcagaattgggcgtttcctacctacaaatgggataaccttgaaaaagagaattttggctggtggcgcgatagggttaagcacgccgcaaaattttaccacgcttaccgcatagatcatgttttaggatttttccgtatatgggttgtgccagaagtggagcatactggtatattagggcattttgttccatctgttccaatttacatgaatgaaattttgcaggctgggattccaaaggaaactgtgcattatttaaccactccgaattttggcgaagagcagctcaggcattggtttggttttgccacggaagatgttaagcaaaaatattttgaacatctgcgagatgaccgctatcttttgcgttctgaataccgttccgagcgagagataatatctttgaaagaagagcaacacattaaagatgccttgttgaacgtttattgggatagggtatttgtgccgagcagcaccgaagaaactctttggccctactggtactggtataatgctcccgtactgcttacattgccgggaacacgagagaaataccctcggccataa

SEQ ID NO: 15680 - protein, 249 aa, Unknown
  Obtained from environmental sample
  DOMAIN (1)...(246): 4-alpha-glucanotransferase
  misc_feature (1)..(249): Xaa is any amino acid
MQWVAEEQFLKAVGELNELGVRLKGDIPILINEDSADVWHSPQFFSLENRAGAPPDMFCYSGQNWAFPTYKWDNLEKENFGWWRDRVKHAAKFYHAYRIDHVLGFFRIWVVPEVEHTGILGHFVPSVPIYMNEILQAGIPKETVHYLTTPNFGEEQLRHWFGFATEDVKQKYFEHLRDDRYLLRSEYRSEREIISLKEEQHIKDALLNVYWDRVFVPSSTEETLWPYWYWYNAPVLLTLPGTREKYPRP

SEQ ID NO: 15681 - DNA, 696 bp, Unknown
  Obtained from environmental sample
  misc_feature (1)..(696): n is a, c, g, or t
ttgtttttcggtttagaaatttatggaagtatcaatgaagtaaaaaaatatttgcctgaagatttgcaaaagaaaatacaatatcaaccctgctccacgactattatcggtcttcttgggcaggaaacatttgaaaaccctttaggagaaataaacagaattgccatcgttgtcgcgtttaataaaataaaatataggtataataatatagaatttattttagaacagttaataaattacggaaaatatatgcgggaaaacggttttgatgtcattttcttcggccatcatttatttgatacttatggaaaatatgcgaaatatattaaaaagcatggtttccgtatattgtctttatataaaaatacaaaaaatatatacaaattatacaaacaaaataagctgattgtttccatgagagggcatggattaatgataccgtttggtttgtcactgccggtcgtctcattaacaacacaagacaaacaaaaatggtttttggaaactattgggcatattgactggaatattgacgtaaacggcaatttctatattgaactcatacaaaagacatttgaaataataaataattatggagaaatacggcgagatcttattataaaaaaagagtataatcaaaaaacaaccaaaataaatatggaattcattatatcaaaattagggcatgggatataa

SEQ ID NO: 15682 - protein, 231 aa, Unknown
  Obtained from environmental sample
  misc_feature (1)..(231): Xaa is any amino acid
MFFGLEIYGSINEVKKYLPEDLQKKIQYQPCSTTIIGLLGQETFENPLGEINRIAIVVAFNKIKYRYNNIEFILEQLINYGKYMRENGFDVIFFGHHLFDTYGKYAKYIKKHGFRILSLYKNTKNIYKLYKQNKLIVSMRGHGLMIPFGLSLPVVSLTTQDKQKWFLETIGHIDWNIDVNGNFYIELIQKTFEIINNYGEIRRDLIIKKEYNQKTTKINMEFIISKLGHGI

SEQ ID NO: 15683 - DNA, 807 bp, Unknown
  Obtained from environmental sample
  misc_feature (1)..(807): n is a, c, g, or t
ttggaaaagtatcttataaccggaatttcgggatttgtcgcgccttattttgtagagtatcttgactcgctggacgatagaaatatcgaagtgctcggaatttccgcgcacaaattagattcgggatttgcaaataatcttaaaaacgtccgttttaacgccattgaattgaaccttatggaaattgataaattacgaatagcgatttcttcgttttcaccggattatatcgttcatttggcggcgttcagcagcgtgggaagcagttggctcgacccgtcgaacgcgtttgtgaacaacacgaatatttttttgaatatcgcggaaatcgttcgctcgcaaaacataaaatgcagaatattgtcggtaggttcttccgaaatttacggggacgtttcgcaggataaaattccgctgaaagaaacgactgacccaaacccgaaaagtccgtacgctatagcccgtctttcgcaggaaatgctgtcgaaatgttatgcggattactacaaaacggacatcgtaatcacccgttcttttaaccatatcggaccgcgccaaaaggaatcgtttgtaatttcgtcgtttataaaacaggcgattgaagcgaagaaaacgtcaaacaaaataaagttaaaaacaggcgatatttcaattgtccgcgattttatcgacgtgcgtgacgtagcaagggcgtattatttacttttgaaaagaggagcgtcgggcgaaattacaatatttgttcgggagaggggaagccttgtcgcaattatagcgcanatgcaaaaattttgggagtcaaaatag

SEQ ID NO: 15684 - protein, 268 aa, Unknown
  Obtained from environmental sample
  DOMAIN (4)...(247): NAD dependent epimerase/dehydratase family
  misc_feature (1)..(268): Xaa is any amino acid
MEKYLITGISGFVAPYFVEYLDSLDDRNIEVLGISAHKLDSGFANNLKNVRFNAIELNLMEIDKLRIAISSFSPDYIVHLAAFSSVGSSWLDPSNAFVNNTNIFLNIAEIVRSQNIKCRILSVGSSEIYGDVSQDKIPLKETTDPNPKSPYAIARLSQEMLSKCYADYYKTDIVITRSFNHIGPRQKESFVISSFIKQAIEAKKTSNKIKLKTGDISIVRDFIDVRDVARAYYLLLKRGASGEITIFVRERGSLVAIIAXMQKFWESK

SEQ ID NO: 15685 - DNA, 492 bp, Unknown
  Obtained from environmental sample
  misc_feature (1)..(492): n is a, c, g, or t
ttggcgggagaagggaagggcgatatactttcacacgaggcgcttcttatttcttcaacttatgtggaaattgataaaagcgcaattcccacaggcaaactatttcccgtagacggaaccgcttttgatttcagaaggcggcggaaaattcgctccgacgcttcattttttaaaccttttaaaggatatgatcattgttttaccgtagacggtgaaatcggtaaaatgcgtccctgcgcggaagtgaacgagccgggttcaggccgttacatgaaagtttttacgacacagcctggcgttcaattctatacgggaaatcatcttaaaaaagttgacggcaaacagggcggcgtctatacaaaatattccggcttttgccttgaaacccagcattacccggacacccccaaccgaattaattttccatcgtgtatcgcagtaccgggaaaagattatcacgaagaagcgatgttcgcgttttcgtttaattaa

SEQ ID NO: 15686 - protein, 163 aa, Unknown
  Obtained from environmental sample
  misc_feature (1)..(163): Xaa is any amino acid
MAGEGKGDILSHEALLISSTYVEIDKSAIPTGKLFPVDGTAFDFRRRRKIRSDASFFKPFKGYDHCFTVDGEIGKMRPCAEVNEPGSGRYMKVFTTQPGVQFYTGNHLKKVDGKQGGVYTKYSGFCLETQHYPDTPNRINFPSCIAVPGKDYHEEAMFAFSFN

SEQ ID NO: 15687 - DNA, 900 bp, Unknown
  Obtained from environmental sample
  misc_feature (1)..(900): n is a, c, g, or t
atggtagccggagcaatattaagtatggcttgtgtttcttattcaaagataataaatgaatcctaccaaaagctggaaaattacaatgtgagaacatttggtacagaatacggtcttgtgagttttcttgatgaaggaaatggtgaagcaatttttatctcgcacggaatctttggaggttatgatcagggatatgaacatctgaatgatatttttggagataattacagaaaaatcgctgtttcgcgatttggctatcccggatcaagtttgccttccggatcggccccaggtattcaggtaaaagtatttttggaattgctcgataaattgcagattgacaaggtgtttttactggccgcgtccgcgggcggttccgccggaatcaggtttgcgatttattatccggaaaggttaaaagggttgatactgctatcgtccggcgtcccatcaataccaatgataaaaaaggagattggaagaacagggcctccaaaatttatccttaatgacaagtttatgctgttttcaatcagaaattttaaatggattttttattccatgtttggttcaaaaaatgtcgatgagaaagtatttagcggtttattgccggtaaaaccccggagagaaggaataattaacgactccgagattaacaatattgatatgtcagttaattattatgactatcctgttgaaaaaatggaaatacccatattggttgttcacgcaaaagatgatccgatggttaaatatgaaaacattgaactatttttgaagcgtgttaatgccgagacactgatatttcccgatggaggtcatcttatagtagggcatgatataagcgagggaataataggtttcattgataggcatagtaagggctctcggccgatctga

SEQ ID NO: 15688 - protein, 299 aa, Unknown
  Obtained from environmental sample
  DOMAIN (76)...(290): alpha/beta hydrolase fold
  misc_feature (1)..(299): Xaa is any amino acid
MVAGAILSMACVSYSKIINESYQKLENYNVRTFGTEYGLVSFLDEGNGEAIFISHGIFGGYDQGYEHLNDIFGDNYRKIAVSRFGYPGSSLPSGSAPGIQVKVFLELLDKLQIDKVFLLAASAGGSAGIRFAIYYPERLKGLILLSSGVPSIPMIKKEIGRTGPPKFILNDKFMLFSIRNFKWIFYSMFGSKNVDEKVFSGLLPVKPRREGIINDSEINNIDMSVNYYDYPVEKMEIPILVVHAKDDPMVKYENIELFLKRVNAETLIFPDGGHLIVGHDISEGIIGFIDRHSKGSRPI

SEQ ID NO: 15689 - DNA, 831 bp, Unknown
  Obtained from environmental sample
  misc_feature (1)..(831): n is a, c, g, or t
atgcttgaagacggaagctggaaagggaaaaaattcagatcgtataacgttaaaacgcctcctgcaagattgactccgggaaggagcaatccatacgcaaaatttcttgaaaacgtaaaagataaacttgtatccctggggtttgaggaatttgacggtccgttagttgaaaccgagttctggaattcagacgctctttttatgccgcagtttcattcggcgagggatattcacgatgtttacagcattgcagattcgtcttccaaagacggatttgccagagcgaagtcaattgacgaaccgtggctttccaatattgcgggcgctcatgaaaacggcggcaaaacaggcagccgggggtggaattataattttgatcgtgagtttacaaagaggctgattcttcgctcccaggggactgtactttcggctaaaacactgccgactgcgaaaatccccggtaaatatttcggcattgtgcgctgtttccgctatgaccgtgtagacgccactcatctgcctgacttttatcagactgagggcatcgtgttaggtgaagatgtcaatcttcgcacgcttttgggaatactggaaatgtttgcccgtgaagttgccggagcgaaagaagtaaaatatgttcccggctattttccgtttacggaaccttcggtggaagtgcatatcaagcatccggtgcttggctggtttgagcttggcggctcaggcattttccgccccgaagtgacgganagccttggagtaaacgtgcctgtcgctgcctggggtataggaattgatcgtatggcgctgatggcgctgggggttaaatga

SEQ ID NO: 15690 - protein, 276 aa, Unknown
  Obtained from environmental sample
  DOMAIN (14)...(276): tRNA synthetases class II core domain (F)
  misc_feature (1)..(276): Xaa is any amino acid
MLEDGSWKGKKFRSYNVKTPPARLTPGRSNPYAKFLENVKDKLVSLGFEEFDGPLVETEFWNSDALFMPQFHSARDIHDVYSIADSSSKDGFARAKSIDEPWLSNIAGAHENGGKTGSRGWNYNFDREFTKRLILRSQGTVLSAKTLPTAKIPGKYFGIVRCFRYDRVDATHLPDFYQTEGIVLGEDVNLRTLLGILEMFAREVAGAKEVKYVPGYFPFTEPSVEVHIKHPVLGWFELGGSGIFRPEVTXSLGVNVPVAAWGIGIDRMALMALGVK

SEQ ID NO: 15691 - DNA, 738 bp, Unknown
  Obtained from environmental sample
  misc_feature (1)..(738): n is a, c, g, or t
atgattgaaccaaaagtactaaagggcttcagagactttttaccgcaggcggaaatggtgcgccgcaatcttagcgaaagaatagaggcgaccttccggtctttcgggtttgcgccgattgacaccccggcgcttgaatacgcggatatacttctgggcaagggcggcggcgaaaccgagaaacagatctaccgctttacggataacggcgggcgcgatgtcgcgctccgttttgatcttaccgttccctttgcccgctttaccgcgcttcaccagcaggaactcaattttcccttcaagcgttaccatataggtaaggtctggcgcggggaaaacacccagcgggggcgctacagggaattcacccaatgcgattttgacattataggcggcgacagccccgctgccgatttcgaaattattttattaatccgaagcgtgctggcggatctcggcctgggcgtggaaataaaaatcaaccacaggggcctgttcaaccgcttcctctcccatatagggcagttggaaaattccgttgaaatactccgcgcggtggacaaaatttccaaagtcggcattgatgaaacagcgaaaaccctcgccggtatcgccggagacgcgaaggggcaaaagataattgaatttatcggcgcgggagaaggctccgcggattttgaacagacgtttaatcgcataacggaactttcaggtgggccttccccgaatcggatcgtctaa

SEQ ID NO: 15692 - protein, 245 aa, Unknown
  Obtained from environmental sample
  DOMAIN (20)...(181): tRNA synthetase class II core domain (G, H, P, S and T)
  misc_feature (1)..(245): Xaa is any amino acid
MIEPKVLKGFRDFLPQAEMVRRNLSERIEATFRSFGFAPIDTPALEYADILLGKGGGETEKQIYRFTDNGGRDVALRFDLTVPFARFTALHQQELNFPFKRYHIGKVWRGENTQRGRYREFTQCDFDIIGGDSPAADFEIILLIRSVLADLGLGVEIKINHRGLFNRFLSHIGQLENSVEILRAVDKISKVGIDETAKTLAGIAGDAKGQKIIEFIGAGEGSADFEQTFNRITELSGGPSPNRIV

SEQ ID NO: 15693 - DNA, 621 bp, Unknown
  Obtained from environmental sample
  misc_feature (1)..(621): n is a, c, g, or t
atgggcgaagatcgttccagccctatgctggatcagtaccgcaggataaaacgcgatcatcagggagacgtgctgtttttccgtctcggcgacttttacgaaatgtttgccgaagacgcgattgaaatttccgcgctgttaaatttgacgcttaccagccgcaatgggctgcccatgtgcggtattccctaccatgccgcgcgttcctacattgcgcggcttttaaaacacggaaaaaaaatcgcgatttgtgaacagctttccgaaccgggtaaaggccaaaaaattattgaccggcaggtggtggaggttattacaccgggaaccaccgtggacgaagattaccttgaccggggaagctccaactacctcgccgccctggccgcgacaggcgcatccgcatcagacgcgcttgtgccaagcggctttgtgtcattcgcctatatcgatctttcagccggcggtttttacgcaacttcctttccccttgccagttccggcgagcgcctgagccaggaacttgagcgccctgcagcgcgggaaatgctggtgcangaatcgctgctggaagaaattctgacattgcccgcggtctgtcccggcgcgcgcgctggtgattaa

SEQ ID NO: 15694 - protein, 206 aa, Unknown
  Obtained from environmental sample
  DOMAIN (7)...(114): MutS domain I
  misc_feature (1)..(206): Xaa is any amino acid
MGEDRSSPMLDQYRRIKRDHQGDVLFFRLGDFYEMFAEDAIEISALLNLTLTSRNGLPMCGIPYHAARSYIARLLKHGKKIAICEQLSEPGKGQKIIDRQVVEVITPGTTVDEDYLDRGSSNYLAALAATGASASDALVPSGFVSFAYIDLSAGGFYATSFPLASSGERLSQELERPAAREMLVXESLLEEILTLPAVCPGARAGD

SEQ ID NO: 15695 - DNA, 618 bp, Unknown
  Obtained from environmental sample
  misc_feature (1)..(618): n is a, c, g, or t
ttgcctggcggcagatacgaagaacgcttccagtttgtcggcgaatacggcaactggtggagtgctacggagacggagggctatgctaactacgccaacatccagtacatacacaaaggctgtagcggctgcgatgctcctgtgaatatgggcaacggcactaaggccactggattatattcagtccgttgtctccatggtcctgctcccgtgccaagcagttccagcgttgtgctgagtagctcaagcagtgtgccaagcagttcaagcgtattagtatcaagcagttccattccatctgaaattgtttacggtactgtaacatataatggtaaggtttacaaaacagttgtaattggtactcaaacttggatggcggagaatttgaattatgctgttgatggcagcaaatgcggcgataaaggctatactacagatgaaaacactactacttgcgatacctacggtagattgtataattgggaaacggctaaaacattatgttcctctatctcaggttggcacttgccaagcaacgaggattggagcaaactgtaccgctatgtagatggtacaagtggcacggatagtttatatgctagccgaaacggcaggtaa

SEQ ID NO: 15696 - protein, 205 aa, Unknown
  Obtained from environmental sample
  misc_feature (1)..(205): Xaa is any amino acid
MPGGRYEERFQFVGEYGNWWSATETEGYANYANIQYIHKGCSGCDAPVNMGNGTKATGLYSVRCLHGPAPVPSSSSVVLSSSSSVPSSSSVLVSSSSIPSEIVYGTVTYNGKVYKTVVIGTQTWMAENLNYAVDGSKCGDKGYTTDENTTTCDTYGRLYNWETAKTLCSSISGWHLPSNEDWSKLYRYVDGTSGTDSLYASRNGR

SEQ ID NO: 15697 - DNA, 819 bp, Unknown
  Obtained from environmental sample
  misc_feature (1)..(819): n is a, c, g, or t
gtgctgttgtttttgatagcaggttctgttatacaccctgtgcacagcaatagcttagaagaaatgggtggtcttcgcaaaaaaatgccttttgcttatttctcgtgcttgatagcctgccttgcaatagcaggtattccaccattttcgggtttttggagcaaagatgaaattttgctttctgcctgggcagctggcaattatgctgtattctttgctgggcttttcacaggtggcttaaccgcgttttatatgttccgcttgttctttttagcattccacggcaaagcgaggagcgagcacgttgctcacgcccacgaagacccgtggatgactttccccattgttgttttggcaattcctgcggctgccattggttttgtttcgcataagttttttgcggcatttgttgaaactccgcctctttttgaaggctcccctatcttggaacatatttcacactcgcatccagaatggctgccttttgcggctagtttagctggagtttttggtatctccgttgcgtggcttttttatgctcgcaaaggagcaaatgcagaagcggctttggaaacggatattcgctcgcctttgtataaaactatttacaacaaattttactttgacgaaatgtattacgcttttacccgtagctttttaattaaagttgtggcgggtttcttaaagggatttgaccattatgttatagatgccatggggggattgcataggcagcgttttgcactggctgggcaaaggagtacgccctcacgcagaaacggttcggtttgccgatataatccctcgntggtttattaa

SEQ ID NO: 15698 - protein, 272 aa, Unknown
  Obtained from environmental sample
  misc_feature (1)..(272): Xaa is any amino acid
MLLFLIAGSVIHPVHSNSLEEMGGLRKKMPFAYFSCLIACLAIAGIPPFSGFWSKDEILLSAWAAGNYAVFFAGLFTGGLTAFYMFRLFFLAFHGKARSEHVAHAHEDPWMTFPIVVLAIPAAAIGFVSHKFFAAFVETPPLFEGSPILEHISHSHPEWLPFAASLAGVFGISVAWLFYARKGANAEAALETDIRSPLYKTIYNKFYFDEMYYAFTRSFLIKVVAGFLKGFDHYVIDAMGGLHRQRFALAGQRSTPSRRNGSVCRYNPSXVY

SEQ ID NO: 15699 - DNA, 741 bp, Unknown
  Obtained from environmental sample
  misc_feature (1)..(741): n is a, c, g, or t
atggcaacgggcgcgccgcaaaaaactgtaaacagcgacggcactgtaacccttgtgtacacgctgcgcggcggccttaaatggtcggacggttccccacttggcgcggaggattttgtttattcctggcagcgccttgtcgatcccgaaaccgcagccgattacagttacatgatcgatatgattgaaaacgccaatgaaatcatggaaggtgaaaaggacaagggcgcgttaggcgtaagggcgcttaatggcacaaccctggaaataaagcttacttatgactgtcccttcttcgacgagatcatggccttccccgccacattccccgtgaagaaaagcgttattgaaaaagcgggcgaccaatggacttttaacccctcaacctacgtgagcaacggcccttaccgcatgaaggaatgggttcacaactcatacattcttcttgagaagaaccccaattattacacggatgtgaacggccccgaattcatccgttttgttttaatggacgatgaaaacgccatgctcgccggtttccgctcaggcgatcttgattttatcgagtctttcccagccgatgaaattcagtcccttttgaaatcaggcgaactgcaggtttccgattatcttggcacatactttgtcagcctgaacacccaanagccgccgtttaccgacgcccgtgtccgcaaggctttcgccctcgcgatagaccggaatatattngtaaccagataa

SEQ ID NO: 15700 - protein, 246 aa, Unknown
  Obtained from environmental sample
  DOMAIN (5)...(246): Bacterial extracellular solute-binding proteins, family 5 Middle
  misc_feature (1)..(246): Xaa is any amino acid
MATGAPQKTVNSDGTVTLVYTLRGGLKWSDGSPLGAEDFVYSWQRLVDPETAADYSYMIDMIENANEIMEGEKDKGALGVRALNGTTLEIKLTYDCPFFDEIMAFPATFPVKKSVIEKAGDQWTFNPSTYVSNGPYRMKEWVHNSYILLEKNPNYYTDVNGPEFIRFVLMDDENAMLAGFRSGDLDFIESFPADEIQSLLKSGELQVSDYLGTYFVSLNTQXPPFTDARVRKAFALAIDRNIXVTR

SEQ ID NO: 15701 - DNA, 669 bp, Unknown
  Obtained from environmental sample
  misc_feature (1)..(669): n is a, c, g, or t
gtgatcgagctggcggtcaaccgcacgctcgtgtgggcggccaggtgccgcgagcaccacaacaaactgcacctcctgcacggctacccgcagcacctcttcggcatagtacagggcggcgtgatcaagccgcttagagagcgctgcgcccgcgagctcgtggcgatggactttccggggtacgccgtgggcgggctcgccgtcggggagagcgtggagtctatgtacgatatagcgaactacacggcgcgcctcctgccggaggagaaaccgcgctacctcatgggcgtagggacgcccgccgacatcttggagtgcatctcggccggaatggacatgttcgactgcgtcctgcccacgcgcaacgcccgcaacggatcggctttcacaagctccggcaaactcaatatccgcaactccatgcacaccaaagacttcgtcaacccgctggacaaaaaatgcacctgttacgcctgcagcaatttctcgcgcgcctacatcaggcacctctacatggccggagaaatcttggccatacggctaatgacgcttcacaacatccacttctacatggagctggtaagaaacgcaagggagcacatcatcgccggaactttcggggagtggaagaaagagatgatcgccaacatggccggagacgaggtttga

SEQ ID NO: 15702 - protein, 222 aa, Unknown
  Obtained from environmental sample
  DOMAIN (1)...(215): Queuine tRNA-ribosyltransferase
  misc_feature (1)..(222): Xaa is any amino acid
MIELAVNRTLVWAARCREHHNKLHLLHGYPQHLFGIVQGGVIKPLRERCARELVAMDFPGYAVGGLAVGESVESMYDIANYTARLLPEEKPRYLMGVGTPADILECISAGMDMFDCVLPTRNARNGSAFTSSGKLNIRNSMHTKDFVNPLDKKCTCYACSNFSRAYIRHLYMAGEILAIRLMTLHNIHFYMELVRNAREHIIAGTFGEWKKEMIANMAGDEV

SEQ ID NO: 15703 - DNA, 762 bp, Unknown
  Obtained from environmental sample
  misc_feature (1)..(762): n is a, c, g, or t
atgcacaatgcaaaattcatagttccaaacgcttttaccagcctgaattttttactcggagtggcttctatatgctggtctgctggcttgcttgtgagccaaaacgaaccaggcgtggttatgggggcacatttcataatttattgcgcattattagacaaattagacggctttgccgcccgtgcttttaacgcaagctcggaatttggagcgcagttcgacagccttgcagatttaatagcatttggaatagcacccgcctttatgataatgtttgcctataaagatatattaccaaactggtatgaggcacataaactagccttgtttgctggagctgcggtttatatggtatgcgctgctatgcggcttgccaaatacaacgcaatggatagcgattcctaccccgattatttctctggaatgccatccacttttgctggaattgttaatgctctggttataattttgctctgtaaatataaattctttgattcttgccccgatattctctacattcctttagttattatgctatttaccagcatacttatggttagccctctgtttcttgcaaaacttaaaaaaagagaaagcaatattataaacgcattccaagtgataaatatagctggagcttatatcgcgggctttgccatgattttgcctgaatatctaatggctttggtgctcatatatcttataataggttttacgcacggaataataaaccgccacaaaatcatagcaaaggagccttaa

SEQ ID NO: 15704 - protein, 253 aa, Unknown
  Obtained from environmental sample
  SIGNAL (1)...(27)
  DOMAIN (43)...(192): CDP-alcohol phosphatidyltransferase
  misc_feature (1)..(253): Xaa is any amino acid
MHNAKFIVPNAFTSLNFLLGVASICWSAGLLVSQNEPGVVMGAHFIIYCALLDKLDGFAARAFNASSEFGAQFDSLADLIAFGIAPAFMIMFAYKDILPNWYEAHKLALFAGAAVYMVCAAMRLAKYNAMDSDSYPDYFSGMPSTFAGIVNALVIILLCKYKFFDSCPDILYIPLVIMLFTSILMVSPLFLAKLKKRESNIINAFQVINIAGAYIAGFAMILPEYLMALVLIYLIIGFTHGIINRHKIIAKEP

SEQ ID NO: 15705 - DNA, 420 bp, Unknown
  Obtained from environmental sample
  misc_feature (1)..(420): n is a, c, g, or t
ttgaacaacaacgcaagggcgctcgccttcgcacgggaactctatgaaaaggatacttcaaaaaatgaatatgccgccgtatatatttcggcgttaattgataacggcagaaaagaagaagcgtccagattattggaaagccgcattgccgccgcaaacacaggtgtcgataaaggccggtatttttttctgcgcagcagaattcaaaccaatgaagaggcggcgctgagcgatcttcgttccagcctttttgaagatccgcgcaatcttgacgcgttaatcgccatgtttgaaatctaccaccgccgccgcgaagaacgccgcgcggttcactatctaaggcaggccctcgctctttctcccgacaacccgcgcctaaaacgctacgagacggaatactcggctttgttgaagaactag

SEQ ID NO: 15706 - protein, 139 aa, Unknown
  Obtained from environmental sample
  misc_feature (1)..(139): Xaa is any amino acid
MNNNARALAFARELYEKDTSKNEYAAVYISALIDNGRKEEASRLLESRIAAANTGVDKGRYFFLRSRIQTNEEAALSDLRSSLFEDPRNLDALIAMFEIYHRRREERRAVHYLRQALALSPDNPRLKRYETEYSALLKN

SEQ ID NO: 15707 - DNA, 897 bp, Unknown
  Obtained from environmental sample
  misc_feature (1)..(897): n is a, c, g, or t
atggacgagttgttttccgcaaaaaacgataaatcatcacaaagccctcttgcggacagaatgcgcccgcgtgtattggaagacattatcggacaggaccacattgtagggccgggaaggcttntgcgccgagcgattcaggccgaccgtctttcctcaataatactctacggcccgcccggaacgggaaaaacaagccttgccgccgttatcgcgaacacgacgcgcgccgcatttgaaaaccttaacgcggttctttccggcgttaaagacatacgcgaagtaattgaccgcgccgacgaacgtttcaggctttacggaaaaagaacgattctttttgtagacgaagtccaccgctggaacaaggcgcagcaggacgctcttctgccgtgggtggaaaacggaaccgtaatccttgtaggagccacgacagaaaacccattcttcgaggtaaaccgcgcccttgtaagccgcagccgcattttccagcttaaagcgcttgattcgcgggacatgatggaagccgcccgacgcgccgtcgcggacactgaacgcggttatggaaaatggaatatcgcttttgaggaaggcgctcttgaacaccttgtagaaattgccggcggagacgcgcgcactttgcttaacgcgcttgagcttgctgttgagacaagcgaagggtggccatctttgcccggcgccgaaatacggatttcactgtccgcggcggaagaaagcatacagcgccgcgccctgctctacgaccgcgacggcgattatcattttgacactataagcgcttttattaaaagcgtaaggggnncagncgatcccgacgnncggctttgtactgngctcgctaagatggtacgcgccggggaagaccctcggccgatctga

SEQ ID NO: 15708 - protein, 298 aa, Unknown
  Obtained from environmental sample
  DOMAIN (53)...(173): ATPase family associated with various cellular activities (AAA)
  misc_feature (1)..(298): Xaa is any amino acid
MDELFSAKNDKSSQSPLADRMRPRVLEDIIGQDHIVGPGRLXRRAIQADRLSSIILYGPPGTGKTSLAAVIANTTRAAFENLNAVLSGVKDIREVIDRADERFRLYGKRTILFVDEVHRWNKAQQDALLPWVENGTVILVGATTENPFFEVNRALVSRSRIFQLKALDSRDMMEAARRAVADTERGYGKWNIAFEEGALEHLVEIAGGDARTLLNALELAVETSEGWPSLPGAEIRISLSAAEESIQRRALLYDRDGDYHFDTISAFIKSVRGXXDPDXRLCTXLAKMVRAGEDPRPI

SEQ ID NO: 15709 - DNA, 672 bp, Unknown
  Obtained from environmental sample
  misc_feature (1)..(672): n is a, c, g, or t
atgatcttaaggatgataaaaatggccgaactccgggacccgaaggaaacgggaacccacgttaaccgggtagcgggctatgcggtggaaatttatgatcgttgggcttaccaccatggagtctctgaaggagaaagggaacactttaaggatatcctgaaaattgcatccatgcttcacgatgtaggaaaagtggcgatctccgacgttattctgaaaaagcccgcaaaatttactccggaagaatacacgatcatgcagaaccataccttgtacagcgcccagctttttgaagatccccaatcttcgctggatataatagcccgggatgtagcgctgaaccatcatgagaactgggacggctcaggttatcccggctgggtcgatcccattacacaaaaggtgattaagacaaacgccgaaggaaaaccgctggggaaaaagggagaagaaataccccttacgggccgtatcgtcgccctggcggatgtgtacgatgccctttgttcccggcgggtttacaaggaaccctggaccgaagaggatgttttgcaggaaatgaagaaactttccggcaccaagtttgatccggagttattaactattttctttgagattcttcccagcatcaaacagatccaaagcctttaccccgaacacggagcggcttaa

SEQ ID NO: 15710 - protein, 223 aa, Unknown
  Obtained from environmental sample
  DOMAIN (17)...(168): HD domain
  misc_feature (1)..(223): Xaa is any amino acid
MILRMIKMAELRDPKETGTHVNRVAGYAVEIYDRWAYHHGVSEGEREHFKDILKIASMLHDVGKVAISDVILKKPAKFTPEEYTIMQNHTLYSAQLFEDPQSSLDIIARDVALNHHENWDGSGYPGWVDPITQKVIKTNAEGKPLGKKGEEIPLTGRIVALADVYDALCSRRVYKEPWTEEDVLQEMKKLSGTKFDPELLTIFFEILPSIKQIQSLYPEHGAA

SEQ ID NO: 15711 - DNA, 771 bp, Unknown
  Obtained from environmental sample
  misc_feature (1)..(771): n is a, c, g, or t
atggcagaactgtacaaactggaaaatacggtaaaacactacagttggggttcgccggatatgattcctgccctaacgggaatggccaatccttccggagagccttgggcagaactgtggatgggtatccaccctgagggtccttcaaaaattgttgtgcagggcaaaacaacgccgctgccggaactggcggaactttcttttttactcaaattcctggcggcggaaaaacccctttccattcaggcccatcctaaccttgtccaggcccaggccggttttgaaagggaaaacaaggcgggcatttccctttccgccacggaacgaaactaccgggatccaaaccacaagccggaaatagtctgcgcccttactccgtttaccgccatggcgggctttcgggaaagggcggaaacagaatggctgctttccatggtgccagacaccgggcatctgatatcctttctaaagaaagggtaccagccctttctttccgtcctcttcggcctaaacgaagaggaacggaaaacactgcatgattcggtgtgtctggctgcttctgcaaatccggctgcggttgacaaaaacggtccggcccttttccggctttgcggagaactggcccagatctatcccaacgatccggggatcctatcgcccctgtacctcaacgtaatcgaactgaaaccatgcgaagcaatttttattcccgcaggaatactccatgcctatgtccaccgtttttgccctggagtgtatgaccaaatctga

SEQ ID NO: 15712 - protein, 256 aa, Unknown
  Obtained from environmental sample
  DOMAIN (4)...(255): Phosphomannose isomerase type I
  misc_feature (1)..(256): Xaa is any amino acid
MAELYKLENTVKHYSWGSPDMIPALTGMANPSGEPWAELWMGIHPEGPSKIVVQGKTTPLPELAELSFLLKFLAAEKPLSIQAHPNLVQAQAGFERENKAGISLSATERNYRDPNHKPEIVCALTPFTAMAGFRERAETEWLLSMVPDTGHLISFLKKGYQPFLSVLFGLNEEERKTLHDSVCLAASANPAAVDKNGPALFRLCGELAQIYPNDPGILSPLYLNVIELKPCEAIFIPAGILHAYVHRFCPGVYDQI

SEQ ID NO: 15713 - DNA, 690 bp, Unknown
  Obtained from environmental sample
  misc_feature (1)..(690): n is a, c, g, or t
ttggaaacaattcaaagttttgccaaaagcgaagacttaaatcttttttcgcctgttatggaagcccaccagcgcaacccaggagggaacgggaaaatcctctattacctttcggaaacctaccgttacccgaaagattttgtttcccttgtttacatctcgcaggtcttgcagatggaaagcatacagaccggggtggatcactggcgacgaaaccgtggacgctgcatgggggccatttactggcagttgaacgactgctggcccgtttgttcctgggcaagcatagattactacggccgttggaaagcccttcattacggagcccggcggtttttcgcacccttgcgggctacgctgtttatcgacgaaactgtgcgggtctttgttcacaacgacacattaaaggcggctaagggcaagataaagctgtaccttcgcgacaagagttttaacatcctggcggaagaaaccattgacgcggagctgccgccaatggccgctggggaaatccttgtccgcgactaccgtgatctggtgaataccgttgagcttgagcgttcctgctttgttacggcggaacttttgatagcaacatcggtttcaggagaaaccttggtttctcaagaaacggtattgtttgttccgcccaagcatttctcttttgcaaagccnggaatacagcgttga

SEQ ID NO: 15714 - protein, 229 aa, Unknown
  Obtained from environmental sample
  misc_feature (1)..(229): Xaa is any amino acid
METIQSFAKSEDLNLFSPVMEAHQRNPGGNGKILYYLSETYRYPKDFVSLVYISQVLQMESIQTGVDHWRRNRGRCMGAIYWQLNDCWPVCSWASIDYYGRWKALHYGARRFFAPLRATLFIDETVRVFVHNDTLKAAKGKIKLYLRDKSFNILAEETIDAELPPMAAGEILVRDYRDLVNTVELERSCFVTAELLIATSVSGETLVSQETVLFVPPKHFSFAKPGIQR

SEQ ID NO: 15715 - DNA, 588 bp, Unknown
  Obtained from environmental sample
  misc_feature (1)..(588): n is a, c, g, or t
gtgtgtatccgttatattctaaaaccttttggaataaaaaacatactggacgcgcgcaatccgcacaaacgttttattatagaaagcagggcttatgcgttctcaattaagaaccattgcctgtccattatcgggcatacgcaccgcccgctgtttgaatcattggggcgctttgattatatcaaatttgaaattgaaaggctctgccgcgattatccttcaagcaaggacgaggataaaaaccgtatcaaaaacgaggttaatgcgctcaggaaagagcttggcaaactcaaacgaaaagagcgtcaggacgttctaaggcagagcctttacggagacgagcttcccgttccctgtctttttaattcaggctgtactttgggcaagaaaggaataaacgctattgaaataacaaacgaggatatcgccctcgtttactggtttatcgaggggaaaagcaaaaaattcattaaacgcggaggctatgacatttattcaattccaaacagcccgtaccgcagggcggttcttaatcaaaataaactcgattacatcctcgccaagatacagcttttagggaacagttaa

SEQ ID NO: 15716 - protein, 195 aa, Unknown
  Obtained from environmental sample
  misc_feature (1)..(195): Xaa is any amino acid
MCIRYILKPFGIKNILDARNPHKRFIIESRAYAFSIKNHCLSIIGHTHRPLFESLGRFDYIKFEIERLCRDYPSSKDEDKNRIKNEVNALRKELGKLKRKERQDVLRQSLYGDELPVPCLFNSGCTLGKKGINAIEITNEDIALVYWFIEGKSKKFIKRGGYDIYSIPNSPYRRAVLNQNKLDYILAKIQLLGNS

SEQ ID NO: 15717 - DNA, 405 bp, Unknown
  Obtained from environmental sample
  misc_feature (1)..(405): n is a, c, g, or t
atgtggggattcaaggcaacggtttcggcgcgcccgccgccgggcagcagcagtaccagcagccggccgccaaaccgcagcagtatcaaccgggcgccgcgccgcaacagtaccagccggctcaaacgcctcaacaataccaaccggctcagacgccgcaacagtaccagccggcccaaacgccgcagcaataccagccgacccagccgacccaagcgcctcaacccgccgctaagccgcagcaaccggctcctgcgccgcaacaacagtaccagccggctccggccccggccccccaacaggcacgcgctccagcgcctcaaccagccgccgcgaaggcggatcagcagccgcccaaaacaagtaccatccaggcgctcatcaacttcgtcgccgctgacgtaa

SEQ ID NO: 15718 - protein, 134 aa, Unknown
  Obtained from environmental sample
  misc_feature (1)..(134): Xaa is any amino acid
MWGFKATVSARPPPGSSSTSSRPPNRSSINRAPRRNSTSRLKRLNNTNRLRRRNSTSRPKRRSNTSRPSRPKRLNPPLSRSNRLLRRNNSTSRLRPRPPNRHALQRLNQPPRRRISSRPKQVPSRRSSTSSPLT

SEQ ID NO: 15719 - DNA, 519 bp, Unknown
  Obtained from environmental sample
  misc_feature (1)..(519): n is a, c, g, or t
gtggggattcaaggcaacggtttcggcgcgcccgccgccgggcagcagcagtaccagcagccggccgccaaaccgcagcagtatcaaccgggcgccgcgccgcaacagtaccagccggctcaaacgcctcaacaataccaaccggctcagacgccgcaacagtaccagccggcccaaacgccgcagcaataccagccgacccagccgacccaagcgcctcaacccgccgctaagccgcagcaaccggctcctgcgccgcaacaacagtaccagccggctccggccccggccccccaacaggcacgcgctccagcgcctcaaccagccgccgcgaaggcggatcagcagccgcccaaaacaagtaccatccaggcgctcatcaacttcgtcgccgctgacgtaactgctgtgtaccggagcgggcgcctctatgagccacatgataaaaaattagctctgctgcaatcaccttcacaagttccgacaagggcagccaaattatcacgcgaagccgtctag

SEQ ID NO: 15720 - protein, 172 aa, Unknown
  Obtained from environmental sample
  misc_feature (1)..(172): Xaa is any amino acid
MGIQGNGFGAPAAGQQQYQQPAAKPQQYQPGAAPQQYQPAQTPQQYQPAQTPQQYQPAQTPQQYQPTQPTQAPQPAAKPQQPAPAPQQQYQPAPAPAPQQARAPAPQPAAAKADQQPPKTSTIQALINFVAADVTAVYRSGRLYEPHDKKLALLQSPSQVPTRAAKLSREAV

SEQ ID NO: 15721 - DNA, 447 bp, Unknown
  Obtained from environmental sample
  misc_feature (1)..(447): n is a, c, g, or t
atgggtgagggcaagccctttttggtcaaattgacgcccctggtctcggacataaccaccgtggcgcgggcggccgaagcggccggggccacggccgtggccctcatcaacaccctccccggcctggtggtggacctggcccgccgccggccccgcctgggcggcggcctggggggcctgtcgggcccggcggtcaagcccctggccctgcgccaggtctggctctgcgcccaggccctgaaaattccggtggtgggcctgggcggcatcgccacggccgaggacgctttggaattcatcctggccggcgcccacgccgtggaagtgggcacggccaccctcatcgaccctcgggccccattgatcatcctggaagggctcaaagactggctgcgccgggagggcctccaggacctcggccagttccggggcactctcaaaatatga

SEQ ID NO: 15722 - protein, 148 aa, Unknown
  Obtained from environmental sample
  DOMAIN (1)...(131): Dihydroorotate dehydrogenase
  misc_feature (1)..(148): Xaa is any amino acid
MGEGKPFLVKLTPLVSDITTVARAAEAAGATAVALINTLPGLVVDLARRRPRLGGGLGGLSGPAVKPLALRQVWLCAQALKIPVVGLGGIATAEDALEFILAGAHAVEVGTATLIDPRAPLIILEGLKDWLRREGLQDLGQFRGTLKI

SEQ ID NO: 15723 - DNA, 399 bp, Unknown
  Obtained from environmental sample
  misc_feature (1)..(399): n is a, c, g, or t
atgcaactaaacggcttagtcgtcgcggccattgtcgttctcgccattatcgccttggtcattttcttctacatcagttcggctatcaagctgtggatgcagtcgatattctcaggttgccgcgtggggcttctgagcatcatcttcatgcgtttgcgcaaagtgccgcccgtggaaatggtggaggccaagatcacctccgtgaaggcggggatcgacctgtcgaccgacgagctagagtcgcacttcttggcgggcggcaacgtgacgcgcgtcgtgctggcgctgatagccgccgacaaggcggggattccgctctccttncagcgggccgcggccatagaccttgccgggcgcaacgtcttggaggccgtgcnaatgagcgtcaacccaaggtga

SEQ ID NO: 15724 - protein, 132 aa, Unknown
  Obtained from environmental sample
  SIGNAL (1)...(27)
  DOMAIN (1)...(132): Protein of unknown function (DUF1432)
  misc_feature (1)..(132): Xaa is any amino acid
MQLNGLVVAAIVVLAIIALVIFFYISSAIKLWMQSIFSGCRVGLLSIIFMRLRKVPPVEMVEAKITSVKAGIDLSTDELESHFLAGGNVTRVVLALIAADKAGIPLSXQRAAAIDLAGRNVLEAVXMSVNPR

SEQ ID NO: 15725 - DNA, 549 bp, Unknown
  Obtained from environmental sample
  misc_feature (1)..(549): n is a, c, g, or t
ttgttaaaaaaaagaaatgctgcaataatcagttgtgatatagaaactgaacgcggtgactctgcttttgggcaatataccccaatagccgattttgcaaaaataaatatcattccgttaaaacatgaatatcttttaccttttgatgataaaacatttgatgtagtgttaagttttggtgttttagagcatgtgccaaatgaaaggcaatcattaattgaaataaacagaatattgaagccaaatggtttatttttttgtttttggttgccatataaatattcatggaaacaaaaacgtgaatatttaaaaggcaattattatcatgatcggttatatactattaacaaaataaaacaattacttgaagaaaataaatatatattattggattattggtatagagatttattaccgaaacgttatgcgccttcattttatagaaatattgaaaaattagacaattggctttgttggaatacatttgtaaaatatttagcctcaaatattgaatttgttgcaaataaaaaagttgataaaaaaatctga

SEQ ID NO: 15726 - protein, 182 aa, Unknown
  Obtained from environmental sample
  DOMAIN (2)...(87): Methyltransferase domain
  misc_feature (1)..(182): Xaa is any amino acid
MLKKRNAAIISCDIETERGDSAFGQYTPIADFAKINIIPLKHEYLLPFDDKTFDVVLSFGVLEHVPNERQSLIEINRILKPNGLFFCFWLPYKYSWKQKREYLKGNYYHDRLYTINKIKQLLEENKYILLDYWYRDLLPKRYAPSFYRNIEKLDNWLCWNTFVKYLASNIEFVANKKVDKKI

SEQ ID NO: 15727 - DNA, 741 bp, Unknown
  Obtained from environmental sample
  misc_feature (1)..(741): n is a, c, g, or t
atgctgctctttgactcggtgacccgcttcgcccgagctatacgcgagataggccttgcctccggcgagctttccgctaccaggggttatacgcccagcatgttcgattccatgcccaagctgctggaaagatcgggcacttcggactcaggcagcatcaccggtttttacacgatccttgttgacgcggatgatatggacgagcctgtgtcggatacggtgcgcggtattcttgacgggcatgtaaccctctcccgcaaactcgcccaggcgtaccattatccggcgattgacgtgctgcaaagcatttcccgtcttgcccccgcggtgtctgtgccggcagtcaccaaagccgctggcgtgatacgacggagcatggcggtgtacgccgaagccgaggaactgatcaacgtgggcgcgtaccgcgccggctccaatcccgccattgacgaggcgatagcaaaacaccagcccattgaggaattcctgatccaggaagtcacggatcgttcttcgcttgcggatacatgcttgagaatggaacaactttccggcattcccatacctgtagaggaggggcctgagagccaggcggcgataacatccgccaaagataaaatccccgtaggcggcagcgtcagcggccagagcgccgcggcgaattggcagggaaacagcgtcgcgtcacttttcgcgagccgtataaactccgaaggcgattctgaaagtgaaacggtttaa

SEQ ID NO: 15728 - protein, 246 aa, Unknown
  Obtained from environmental sample
  DOMAIN (1)...(104): ATP synthase alpha/beta family, nucleotide-binding domain
  misc_feature (1)..(246): Xaa is any amino acid
MLLFDSVTRFARAIREIGLASGELSATRGYTPSMFDSMPKLLERSGTSDSGSITGFYTILVDADDMDEPVSDTVRGILDGHVTLSRKLAQAYHYPAIDVLQSISRLAPAVSVPAVTKAAGVIRRSMAVYAEAEELINVGAYRAGSNPAIDEAIAKHQPIEEFLIQEVTDRSSLADTCLRMEQLSGIPIPVEEGPESQAAITSAKDKIPVGGSVSGQSAAANWQGNSVASLFASRINSEGDSESETV

SEQ ID NO: 15729 - DNA, 678 bp, Unknown
  Obtained from environmental sample
  misc_feature (1)..(678): n is a, c, g, or t
gtgcaagttaatcgctcctgccctgtntgcggcgcggatacgcctttgcgcagtctggcgcgttttaatgatcgcacttacaggcgttgtacaaaatgcggtgtaatatacatggacagaatttgtcctccgcccatcgaatacgaaagggagtatttttttgaagcgtacaaaaggcaatacggaaaaacctatctggaggactttcccaatcttatcgcaatggcaaaacgccggcttggaattatttccatgttatcctgcaaagacgcaaagaaggaaaaaaacgtctgttcccctgccctccttgacatcggctgcgcttacggtccgtttcttgccgcagcaaaagaagaaggcttttcgccgtttggaattgatcccgcacaggacgccgtgcgttatgtgcaagaaacactcggtataccggccgtccacggtttttttccgaactgtaagctcccgcattcccggcaatacgatgtcataaccctttggtatgttatcgaacacttcacagactgtcttgccgtattagccgaaattaaaaaacttttaaaacccacaggcattctggcattttcaactccctcgttttcaggcatcagcggtcgtaaatctcttcataagtttttggaaaaaagnccccgccgaccattttacaatctggtcgcctga

SEQ ID NO: 15730 - protein, 225 aa, Unknown
  Obtained from environmental sample
  DOMAIN (103)...(194): Methyltransferase domain
  misc_feature (1)..(225): Xaa is any amino acid
MQVNRSCPVCGADTPLRSLARFNDRTYRRCTKCGVIYMDRICPPPIEYEREYFFEAYKRQYGKTYLEDFPNLIAMAKRRLGIISMLSCKDAKKEKNVCSPALLDIGCAYGPFLAAAKEEGFSPFGIDPAQDAVRYVQETLGIPAVHGFFPNCKLPHSRQYDVITLWYVIEHFTDCLAVLAEIKKLLKPTGILAFSTPSFSGISGRKSLHKFLEKXPRRPFYNLVA

SEQ ID NO: 15731 - DNA, 633 bp, Unknown
  Obtained from environmental sample
  misc_feature (1)..(633): n is a, c, g, or t
ttggccaatgccgcgagtatttatccggccaccatggcagggcttctggaattcctggaacacatagagttagatcgggctatggaggaaaaaaccgaagggacagacatggttacccttatcacccttcacaataccaagggcctggaattccgcaaagtaattatgacaggggtggaacaggggatctttccccgggaagataagaacggggatgatcttgaagaagagcggcggcttttctatgtcggggccaccagggcaatggacgaactctatttctgttcctgccgtatgcgccgtatgtacggcagtacctctccaatggagccgtcggtttttctccgggaaattgaccgtgacagccttagaatagtcggcaatccccctcgcggatttgaggttccgggaaaggggggcggtaaaaggcaggccgtaaaagccgcttcttccgacggatattggcaaaaaggcgataaggtataccatgataattatgggtatggagaggtgagggaaattcgggacagcgaagacggccctgtagtccgagtcttttttgaacacggcggggaagtccgtttccttagcaatcatcagggccgcaattttaccaggatccggggtgaatga

SEQ ID NO: 15732 - protein, 210 aa, Unknown
  Obtained from environmental sample
  misc_feature (1)..(210): Xaa is any amino acid
MANAASIYPATMAGLLEFLEHIELDRAMEEKTEGTDMVTLITLHNTKGLEFRKVIMTGVEQGIFPREDKNGDDLEEERRLFYVGATRAMDELYFCSCRMRRMYGSTSPMEPSVFLREIDRDSLRIVGNPPRGFEVPGKGGGKRQAVKAASSDGYWQKGDKVYHDNYGYGEVREIRDSEDGPVVRVFFEHGGEVRFLSNHQGRNFTRIRGE

SEQ ID NO: 15733 - DNA, 672 bp, Unknown
  Obtained from environmental sample
  misc_feature (1)..(672): n is a, c, g, or t
ttggggagagggattaatatggcaagtttccagggaatgaagataaacccgaaaaaattcgatgtgtcccagttaaaattttatatggtgatagtccctatcgcggtatttatgacattgccgattatttatataataaatcaggcctttaaacctctggatgaaattttccgttttcctcctacttttattgtgcgccgccctacccttctaaatttccgtataattttgtatcttacatccaatactggcattcccatatcccgtttcctcattaacacaattattattacaattttaactgttgttttatcaatttttattaccgctatgtcggcgtatgctttttccaagaaaaaattccgcgctaaagaatggctgttcaggttaaatcaggctgcactgatgtttgtacctgcggcggtgagtatcccaaggtatttgattatcgttaatttggggcttaacaataattttctggtgcatattttacccatcattgccatgccggtaggcttgtttctggttaagcaattcgtggatcaagtgccggattctttaatagaatctgcaagaatagacggagcgggtgaattgacagtgatgtttaagattgtattccctctgataaaacccgctcttgccacagtgggtattctctgctccaaatag

SEQ ID NO: 15734 - protein, 223 aa, Unknown
  Obtained from environmental sample
  misc_feature (1)..(223): Xaa is any amino acid
MGRGINMASFQGMKINPKKFDVSQLKFYMVIVPIAVFMTLPIIYIINQAFKPLDEIFRFPPTFIVRRPTLLNFRIILYLTSNTGIPISRFLINTIIITILTVVLSIFITAMSAYAFSKKKFRAKEWLFRLNQAALMFVPAAVSIPRYLIIVNLGLNNNFLVHILPIIAMPVGLFLVKQFVDQVPDSLIESARIDGAGELTVMFKIVFPLIKPALATVGILCSK

SEQ ID NO: 15735 - DNA, 813 bp, Unknown
  Obtained from environmental sample
  misc_feature (1)..(813): n is a, c, g, or t
atgagtttttatatgccgattgcctcaggcgtcggttataaatggtattaccaaacatcgccgcttatttaccagaacaacggttttctttaccgccccgacggtttaggagcggcaataaacgaagccaacgccgtaagggcgcttacttttctgggcgatttatttacaacttatgctgtcgcagagcaagttcccgtttttttcaattctttccgtcttggccaaaccccggttggcattatcgaaccggaaacctatatccttttaagcaacggagcgccagaattgctaggtcagtggagtcttgcgccctatcccggtactttgcaagaagatggaagtatttcccgatggtttatcaccaacggcgccggaggcagcattatcttcgagaacacaaaacaggcggataattgctggaaatttcttaaatggtatttaagcgaggaaacgcagacaaatttcgctttttctctttatacaaattacaggatattgcatttgtcttccaatttaaacgccctgcggaatctacctattgaagacaaagacttacggattattttggattcagttcaatggctaagagacgtaccgcgaagtcctggtcaatatttactggaaagaggtctttctgatatttggaatactatggtgtttgacggaactccggctcaagtcgctattgacaggcaagtgatagaaatacaacgggaatttaaaaagaaaatgacggagtttgggtatcttaacaatatggggcagcaggtaaaaccttatgtagttcatgaagtggactggattatttga

SEQ ID NO: 15736 - protein, 270 aa, Unknown
  Obtained from environmental sample
  misc_feature (1)..(270): Xaa is any amino acid
MSFYMPIASGVGYKWYYQTSPLIYQNNGFLYRPDGLGAAINEANAVRALTFLGDLFTTYAVAEQVPVFFNSFRLGQTPVGIIEPETYILLSNGAPELLGQWSLAPYPGTLQEDGSISRWFITNGAGGSIIFENTKQADNCWKFLKWYLSEETQTNFAFSLYTNYRILHLSSNLNALRNLPIEDKDLRIILDSVQWLRDVPRSPGQYLLERGLSDIWNTMVFDGTPAQVAIDRQVIEIQREFKKKMTEFGYLNNMGQQVKPYVVHEVDWII

SEQ ID NO: 15737 - DNA, 738 bp, Unknown
  Obtained from environmental sample
  misc_feature (1)..(738): n is a, c, g, or t
atgaaattgttgaaattcttttctgctattttggtgtcgctttttgtggtggcttgttcgtccagaaagaagaacgccactattgaggatcttcatgaggtagaagctacggcagaggctgctctgaaactagcgaagtcagattctttgcgggtagctgccgctttgttccagttggatttcatatcaaggcagatagatatagtggatagcactttttccataatgcctattgccaaaatagatgaaaatcagttgcaaatagctcttttaagggaagaagtcgcgtttttgcgcagatttttggaaaatcaaaatcaggttccgctggtaaacccaagccgcgagcaggctcctagcgttccgagcggtttgcctgcggaatacgaacaggctcaatacctatttgtacaaaagaattacgaagccgccgcaagggcttttgaaagcgttacggttctttacccaaagagcaaatgggcaagcgatgcttggtattggataggcgaagctagaatggagcttggcaattatgctcaggcaatttccgcttttgaaaaggtgtttttttatagagattccattaaacagccagatgcgcagtttcaaatagggatgtgtttgcagaaaattggaaacgcggaagcagcaaaggtggttttccgcanagtccaagagttctacccaaaaagcccacgggctttgcaagcgcagtcagaattaaaaaaaatgaactag

SEQ ID NO: 15738 - protein, 245 aa, Unknown
  Obtained from environmental sample
  SIGNAL (1)...(18)
  DOMAIN (162)...(195): Tetratricopeptide repeat
  misc_feature (1)..(245): Xaa is any amino acid
MKLLKFFSAILVSLFVVACSSRKKNATIEDLHEVEATAEAALKLAKSDSLRVAAALFQLDFISRQIDIVDSTFSIMPIAKIDENQLQIALLREEVAFLRRFLENQNQVPLVNPSREQAPSVPSGLPAEYEQAQYLFVQKNYEAAARAFESVTVLYPKSKWASDAWYWIGEARMELGNYAQAISAFEKVFFYRDSIKQPDAQFQIGMCLQKIGNAEAAKVVFRXVQEFYPKSPRALQAQSELKKMN

SEQ ID NO: 15739 - DNA, 450 bp, Unknown
  Obtained from environmental sample
  misc_feature (1)..(450): n is a, c, g, or t
ttgtccaccgcaatctgcacgactacatcgcgtgacaacggtaaatcgccgccctcgcctgaaacagaaacttcagattcaacaggaacttcagactcaacagaaacttcaagaggggaaccttcgccctccgggctcggttcaggttccggctcaacagaaacttcggattcaacgggaacttcgagctcaacagaaacttccggttcaacagaaacttcaagaggggaaccttcgccctccgggctcggttcaggttccggctcaacagaaacttcgggttcaacagaaacttcgggttcaacaggaacttcaataggggaactttcgccctccaagctcggttcaggttcaataagggaatcttcgccctccaagctcggttcaggttcaataagggaatcttcaccttccaggctcggttcaggttccggctcaacaggagcataa

SEQ ID NO: 15740 - protein, 149 aa, Unknown
  Obtained from environmental sample
  misc_feature (1)..(149): Xaa is any amino acid
MSTAICTTTSRDNGKSPPSPETETSDSTGTSDSTETSRGEPSPSGLGSGSGSTETSDSTGTSSSTETSGSTETSRGEPSPSGLGSGSGSTETSGSTETSGSTGTSIGELSPSKLGSGSIRESSPSKLGSGSIRESSPSRLGSGSGSTGA

SEQ ID NO: 15741 - DNA, 399 bp, Unknown
  Obtained from environmental sample
  misc_feature (1)..(399): n is a, c, g, or t
gtgaacagcacccacntaaatggttccagaatgatgaacggcattggcggctctggtgattttgctcgcaactgtttgctgggattctttatgaccccaagcactgcaaaaggcggaaaaatcagcgcgatagttcctatggtgagccacacagaccataccgagcacgatactatgatttttgtatccgagcagggacttgcggatttaagaggtcttgcacccattaagagggcgcgcttgattattgaaaaatgcgctcatccaacctataaaccgcttttgcaggaatacttggagtatggcataaagcattccgcattgcacaccccgcactctctagacaaagcttttgatttccacaaaaggctgatagaaaagggaagcatgattggataa

SEQ ID NO: 15742 - protein, 132 aa, Unknown
  Obtained from environmental sample
  misc_feature (1)..(132): Xaa is any amino acid
MNSTHXNGSRMMNGIGGSGDFARNCLLGFFMTPSTAKGGKISAIVPMVSHTDHTEHDTMIFVSEQGLADLRGLAPIKRARLIIEKCAHPTYKPLLQEYLEYGIKHSALHTPHSLDKAFDFHKRLIEKGSMIG

SEQ ID NO: 15743 - DNA, 393 bp, Unknown
  Obtained from environmental sample
  misc_feature (1)..(393): n is a, c, g, or t
ttgataaggatccgcggacttaaaaatgaatgggaattgaatcataaacttaaaaatgatccgagaataacaggtatcggcaggttattacggagaacaagttttgatgaactgccccagattataaatatactaagaggcgaaatgtcgcttgtaggcccgcgtccgattgtagacgaagaagtaaaaaaatacggagaagactataaccgggtattttcaaataaaccggggttaacgggtctttggcagatatccggaagatcaaacacaaaatatcatgacagaatagcgtatgacacatattacctacagaattggtctatatggcttgatttatggataatttataagacattcggcgttgtattttcgggaaaaggcgcatattag

SEQ ID NO: 15744 - protein, 130 aa, Unknown
  Obtained from environmental sample
  DOMAIN (1)...(130): Bacterial sugar transferase
  misc_feature (1)..(130): Xaa is any amino acid
MIRIRGLKNEWELNHKLKNDPRITGIGRLLRRTSFDELPQIINILRGEMSLVGPRPIVDEEVKKYGEDYNRVFSNKPGLTGLWQISGRSNTKYHDRIAYDTYYLQNWSIWLDLWIIYKTFGVVFSGKGAY

SEQ ID NO: 15745 - DNA, 333 bp, Unknown
  Obtained from environmental sample
  misc_feature (1)..(333): n is a, c, g, or t
ttgaaaaagaaaccgcgttttttttgtgatcattgcggaaacgaggtaggggacgaagttaaaaaatgcccctattgcgggcgtattttcgcttccataagatgtccggcttgcggttattccggtaatgacagaatgttcaaaaacggctgtccgatgtgcggctattcagcccccccgccctcaaaacaacccaaaatccgccaaaaaaagcccaaaaaagtaaggggggaacaccatgttgctgaacctttacctttctggacttatgcggtcgcttttatcgcgctttttgccgcgattttgttgctttcgcatcttattacgaagtaa

SEQ ID NO: 15746 - protein, 110 aa, Unknown
  Obtained from environmental sample
  misc_feature (1)..(110): Xaa is any amino acid
MKKKPRFFCDHCGNEVGDEVKKCPYCGRIFASIRCPACGYSGNDRMFKNGCPMCGYSAPPPSKQPKIRQKKPKKVRGEHHVAEPLPFWTYAVAFIALFAAILLLSHLITK

SEQ ID NO: 15747 - DNA, 579 bp, Unknown
  Obtained from environmental sample
  misc_feature (1)..(579): n is a, c, g, or t
atgacaatggaggccgcgattgaaagaatgtccgaagagattcaacggttgaccgtccaaaacgaaaagacatccgaggaagtcaaaaagacatccgaggaagtccggagagtaacgaaaaacntaaatgaaagttatggccgaataagccaacggctaggcaatttgacggaactngtcgtcgttccaaaaatacgccaagatatgaacgcgcaaggccataattttgattgcgcggaggtagatacgttgatccgtggcgttgttaacggcagaaaagaagatatcgccgaagtggatatgtttctgtacggcctagaggaggtaatggccgttgagataaaaacacgcttaagagaatccaacgtaatgtatcatatcggtaaattacaggatttacgcgatcacgaagaggaagccgatattaagggcaagaaactcttcggcgcggtggtcggtatcgtcgtggatgaaaaggcgagggaacttgcgaagaaatacggattgtacgttgtggagatacgcgaggaagaggagaaactgaagatagataaaccggagcaatgccggatttggtaa

SEQ ID NO: 15748 - protein, 192 aa, Unknown
  Obtained from environmental sample
  misc_feature (1)..(192): Xaa is any amino acid
MTMEAAIERMSEEIQRLTVQNEKTSEEVKKTSEEVRRVTKNXNESYGRISQRLGNLTELVVVPKIRQDMNAQGHNFDCAEVDTLIRGVVNGRKEDIAEVDMFLYGLEEVMAVEIKTRLRESNVMYHIGKLQDLRDHEEEADIKGKKLFGAVVGIVVDEKARELAKKYGLYVVEIREEEEKLKIDKPEQCRIW

SEQ ID NO: 15749 - DNA, 372 bp, Unknown
  Obtained from environmental sample
  misc_feature (1)..(372): n is a, c, g, or t
ttgccggccctgtcaacggcttcggtaaggagtttttcgattcgttcctcgtcccgcgacagtctctctacccgcccgcgttccagtttgttaaccgcttcccggtattcttccactttccggctgatggtttgggcttcggcttccatatcaaggattgcagatttggcggcggaaacggactcttcaaccgctttttcaagagccgtggcgttctcccgttcaaaatcagcttctattgacgccagtttttcgccaagagaatcaatctcgttctcggccgcgtcaaatttttcgttgatttccctgacctttttctcgacatcttcaacatacgcggattcttcacggagcctgttaaggttatcctga

SEQ ID NO: 15750 - protein, 123 aa, Unknown
  Obtained from environmental sample
  misc_feature (1)..(123): Xaa is any amino acid
MPALSTASVRSFSIRSSSRDSLSTRPRSSLLTASRYSSTFRLMVWASASISRIADLAAETDSSTAFSRAVAFSRSKSASIDASFSPRESISFSAASNFSLISLTFFSTSSTYADSSRSLLRLS

SEQ ID NO: 15751 - DNA, 798 bp, Unknown
  Obtained from environmental sample
  misc_feature (1)..(798): n is a, c, g, or t
ttggagaacgtaattgacgtaaaggaaactgaaaaaattaaagatcctgcggatattttgcaaaaatttggctggcagatattgaaaaaagttgttaaatttactataaatgactttgagtacctaatttcccgcggcaggcttcaatatgttgcggcaggtggtgatattaacggggcggtggaatttatgtttccgtatttggaagctttagattcagaaattgaccgcgatgacagtatcacacgaattgccgatatttttaaaattgagcggagcgcggtactgaaggaatattcaaactggaaattgacgggtcacagagacttttctgaaaagccggctgaagtcaggcaaaaacttcagataacggtaaatgacgaacttaggcttttaacgaatgttgcgttgaatcaggaattgtatcctgaattccgcgcggcgctggagattaaagatgtaaatgatcctgcggcaaaagagcttttcatctcattggaggaatgttttaaacatgatgaaaatggcgttgattttttgcttgaaaggattaaagacgaagcgttacgtgattttatcgcgaaaaagggaacttcaggcgaattcaagggtgattcgcgcaaatttatggaggacggaataaagcagatcaggaaaaaattacttgagaaaagacttactgagataaatgcgcagatgcgcgaaggggagcggacttcaacagacgcggatattgacattttgcttgcggagaaaaaagaaattgattcgcaaattagaaaacttgagggaagataa

SEQ ID NO: 15752 - protein, 265 aa, Unknown
  Obtained from environmental sample
  misc_feature (1)..(265): Xaa is any amino acid
MENVIDVKETEKIKDPADILQKFGWQILKKVVKFTINDFEYLISRGRLQYVAAGGDINGAVEFMFPYLEALDSEIDRDDSITRIADIFKIERSAVLKEYSNWKLTGHRDFSEKPAEVRQKLQITVNDELRLLTNVALNQELYPEFRAALEIKDVNDPAAKELFISLEECFKHDENGVDFLLERIKDEALRDFIAKKGTSGEFKGDSRKFMEDGIKQIRKKLLEKRLTEINAQMREGERTSTDADIDILLAEKKEIDSQIRKLEGR

SEQ ID NO: 15753 - DNA, 432 bp, Unknown
  Obtained from environmental sample
  misc_feature (1)..(432): n is a, c, g, or t
gtgctgcaaccccatccccggcgacgctatagtcggcttctgaccaaagggcggggcatatccgtccaccgcgccgactgcccccacgcaaaactcttcgaaaacgacagcgagcgcaaggtggaggtcaactgggacgacggcgagcacaaaaaacactacatctccataagcatactcggctccgaccgcgtcgggctgcttcaagaggtcgccaaaaccttcgcggaatcggacgccaacgtgagcagcggagcccaaagatccttcaacggcaaggccgacctctcgttccagctggagatccgcaacctcgcccagctcaaacaaatttttaggcaactgcaaaaaattaaaggaattgagaaagtcgcccgtgtaaaagattatatttcttatcctagggacatacgggacgaagtcccggaatga

SEQ ID NO: 15754 - protein, 143 aa, Unknown
  Obtained from environmental sample
  DOMAIN (55)...(127): ACT domain
  misc_feature (1)..(143): Xaa is any amino acid
MLQPHPRRRYSRLLTKGRGISVHRADCPHAKLFENDSERKVEVNWDDGEHKKHYISISILGSDRVGLLQEVAKTFAESDANVSSGAQRSFNGKADLSFQLEIRNLAQLKQIFRQLQKIKGIEKVARVKDYISYPRDIRDEVPE

SEQ ID NO: 15755 - DNA, 558 bp, Unknown
  Obtained from environmental sample
  misc_feature (1)..(558): n is a, c, g, or t
gtggacgccaaccgcgtgcagcgcgtgcgcgcgatactggagagccaactcggcatgaatctgggcgatcaggacagctttgtcaatgtcaccggcggactggagatcaatgagcctgccgtagaactcgcgatcgcggcggcgatctacggcagcgcgcgcggactctgcccggactccagactcattgtcgccggagaactcggcctgctcggcgatctccggcgtatcccgcaggcggtgaaacgcgcggcgcaagcccgcaaattcggtatggaggcgtgtcttctgccggaggcaaatgccggtgagttcccgcgcgctgaagaaggcaaagatatgtctgtcctgttcgcggccccgcattctccgccatccacaccactcgcagactcgggtgctttggctatgcgggacgctcacgtcctgttcgcggccccgcattctccgccatccacaccactcgcaggctcgggtgctttggctatgcgggacgctcacgtcctgttcgcggccaacttacgtgacgcgcttgcgattatttttcctgaaaattaa

SEQ ID NO: 15756 - protein, 185 aa, Unknown
  Obtained from environmental sample
  misc_feature (1)..(185): Xaa is any amino acid
MDANRVQRVRAILESQLGMNLGDQDSFVNVTGGLEINEPAVELAIAAAIYGSARGLCPDSRLIVAGELGLLGDLRRIPQAVKRAAQARKFGMEACLLPEANAGEFPRAEEGKDMSVLFAAPHSPPSTPLADSGALAMRDAHVLFAAPHSPPSTPLAGSGALAMRDAHVLFAANLRDALAIIFPEN

SEQ ID NO: 15757 - DNA, 780 bp, Unknown
  Obtained from environmental sample
  misc_feature (1)..(780): n is a, c, g, or t
ttggcgaagattctgaacgacggaaaacaaaagctgtcgggtattgtggacatttatccggcggtaaaccctctggggatcgactccgttaccaggggtttccctatgttcgatttggacatgaaccgcatatttcccggttcgtcgtcgggatctcttgctgaagtcgcggcgtacgatgttatccgtgacattgaaggcgccgatatgtgcatagacatacactccagcaacatctttttgcgcgagatacctcaggtgcgggtgagcgaacagaacgaagacgcgcttttaccttacgctgtgatgctcaacgtcgatctcgtgtggattcacgcgtcggcgaccgtactggaatcgacgctggcgcactcgcttaacatacgcggcgtgaagacgctggtggttgagatgggcgtaggaatgcgcataacggaaaaattctgcgctcagcttgtggacggaatattgaacctgctgagcgaactcggcatgtggagcggagcgtccgggcggacgcggccgcctcttgtctcaaaggatcacagcgtcggctttttaaactcggacgccggcgggatatttattccgcgcgcagtgcacggcaaccacattaacgccggcgactgcataggcaatgttatagatccgctcacgggaaccgtcgtcgaagaaacgatagcgccctgcgacggcctgctgtttacgcttagggagtatccggttgtattcggcggctcgcttttggcgcggatcatggaggactcaaaaaatggttaa

SEQ ID NO: 15758 - protein, 259 aa, Unknown
  Obtained from environmental sample
  DOMAIN (7)...(255): Succinylglutamate desuccinylase / Aspartoacylase family
  misc_feature (1)..(259): Xaa is any amino acid
MAKILNDGKQKLSGIVDIYPAVNPLGIDSVTRGFPMFDLDMNRIFPGSSSGSLAEVAAYDVIRDIEGADMCIDIHSSNIFLREIPQVRVSEQNEDALLPYAVMLNVDLVWIHASATVLESTLAHSLNIRGVKTLVVEMGVGMRITEKFCAQLVDGILNLLSELGMWSGASGRTRPPLVSKDHSVGFLNSDAGGIFIPRAVHGNHINAGDCIGNVIDPLTGTVVEETIAPCDGLLFTLREYPVVFGGSLLARIMEDSKNG

SEQ ID NO: 15759 - DNA, 426 bp, Unknown
  Obtained from environmental sample
  misc_feature (1)..(426): n is a, c, g, or t
atgtgttatggttgggaacccgatgatatagtccaaataattgttgacataaaaaaatacaacggagaagccttggaaacaattaataaagctttagaaaaaacagcattagaattgggtaaaagatatagggataaagattatccaaatattaatttatcgaattttatatctcgtttttatacaaaggacagtgaagacgtaaaattattacaaaacaaacctaatgaaaaactaatggaaacaagaaaatgcaaaatatttgaaatattcaaggaattgaaacaaacagacattggattccaatataaatgtagacaggattattttataataaaaggatacaataaatcatatagccttaaaatagaaaagtgccttatgaaaggtgacaattgctgtattcatcattattttgaggaataa

SEQ ID NO: 15760 - protein, 141 aa, Unknown
  Obtained from environmental sample
  misc_feature (1)..(141): Xaa is any amino acid
MCYGWEPDDIVQIIVDIKKYNGEALETINKALEKTALELGKRYRDKDYPNINLSNFISRFYTKDSEDVKLLQNKPNEKLMETRKCKIFEIFKELKQTDIGFQYKCRQDYFIIKGYNKSYSLKIEKCLMKGDNCCIHHYFEE

SEQ ID NO: 15761 - DNA, 423 bp, Unknown
  Obtained from environmental sample
  misc_feature (1)..(423): n is a, c, g, or t
atgatatttatcgggatcggcggcactttgatttttgtcgggcagtcatttgttcagcttttaatgttgatgttcctcgccgactctgtggactacggccattggaaactcggcaagcgcaacgacagcatcactttctcgcttcagccgcttatcaataaaatgggaggcgcgattgcaggcggcatagtttcggcggtaattattgtgtccggcattaaagaagcggaaacagccgccgaggtaacaaagggcgggcttttaatgatgaagcttgccatgttgatcttcccgctggtgtgcattgcggcaagttatttcatctgccgctttaagtacaagatcgacagccgcttctacgaacagattctttccgaccttcgcgcaagaggggaattaaaaagcgatgctgagtcttcatag

SEQ ID NO: 15762 - protein, 140 aa, Unknown
  Obtained from environmental sample
  misc_feature (1)..(140): Xaa is any amino acid
MIFIGIGGTLIFVGQSFVQLLMLMFLADSVDYGHWKLGKRNDSITFSLQPLINKMGGAIAGGIVSAVIIVSGIKEAETAAEVTKGGLLMMKLAMLIFPLVCIAASYFICRFKYKIDSRFYEQILSDLRARGELKSDAESS

SEQ ID NO: 15763 - DNA, 696 bp, Unknown
  Obtained from environmental sample
  misc_feature (1)..(696): n is a, c, g, or t
ttgaataagatggacgatccggacggaaagatggcggaacacgccggaaatctcttgcgcgacgcgggaaacgcgaaagcggcaaaatacttttcagcaaagcgggaaaagatgctggttgaatggtctcaatttattcaggaaggactgcaattaaaaggggaaaaagcgtcggtaacgataggcgtttttgacggggttcaccgcggacataaggcgttgatagagcgggtggtttcgcataacggtgataatgtgcctgttgttattacttttcgggaaaaccataagacaattaataatgagcaattaacaatgagcaatgaacagagggatattcaaacatttgagcagagggtgaatacgttagaaaaattggggatacagataattattgttgttgatttttcggaggcgttcaggcggttgggggggattgagtttttggagatactgttaaaacgctgtaatattgggttttttacggttgggagcgcttttcgctgcggataccggcttgatacgaacgcggcggctattcaagaatttttcgcctcgcgcgatattcccgcggaaattgttccggaagttatggaagattcactgcctgtcagttcaagccgtatacgcgcggcaatcgccgccggggaccttcggcttgcggaatcaatgctgggacggccgttagaggagtga

SEQ ID NO: 15764 - protein, 231 aa, Unknown
  Obtained from environmental sample
  DOMAIN (59)...(212): Cytidylyltransferase
  misc_feature (1)..(231): Xaa is any amino acid
MNKMDDPDGKMAEHAGNLLRDAGNAKAAKYFSAKREKMLVEWSQFIQEGLQLKGEKASVTIGVFDGVHRGHKALIERVVSHNGDNVPVVITFRENHKTINNEQLTMSNEQRDIQTFEQRVNTLEKLGIQIIIVVDFSEAFRRLGGIEFLEILLKRCNIGFFTVGSAFRCGYRLDTNAAAIQEFFASRDIPAEIVPEVMEDSLPVSSSRIRAAIAAGDLRLAESMLGRPLEE

SEQ ID NO: 15765 - DNA, 654 bp, Unknown
  Obtained from environmental sample
  misc_feature (1)..(654): n is a, c, g, or t
ttgatacccgccactcagcgtattctggatcgctgggattcggaaaatcggacattcgccaaagtaacctctaaaaatcgttgggaaaaggaacgggtaaatactatcgccctgcgggaagcggttataaacgcgattgtccacaatgactatataaaaggcgtgcctctggtggaaatattttctgacaggattgtgataacctcttgcggcgggctggttgaaggattgagcgagtatgacttttttaagtgccgttccatgccccgtaatcgggagcttatgcgtgttttccgcgatatggaattggtggaacaaatcggttccggcatgagccgtatcctcaaggcttatgatccgtctgtttttgagcttacgcccagttttacaattgtaacatttccatttgagagagcttttatatcttcaaatgataagacggatgataatcaaaaaagcgatacaaaaacaacgcttgatgtgataaaagatgacccggctgcaactattaaacatatctcggagttaacaggaaaatccccaaggacaattgcccgtgaattgaaagaatatcaggataccggattgttgcgccatgagggagcgaggaagaatggaaaatgggtgattagttcaggcgggtctatgagataa

SEQ ID NO: 15766 - protein, 217 aa, Unknown
  Obtained from environmental sample
  misc_feature (1)..(217): Xaa is any amino acid
MIPATQRILDRWDSENRTFAKVTSKNRWEKERVNTIALREAVINAIVHNDYIKGVPLVEIFSDRIVITSCGGLVEGLSEYDFFKCRSMPRNRELMRVFRDMELVEQIGSGMSRILKAYDPSVFELTPSFTIVTFPFERAFISSNDKTDDNQKSDTKTTLDVIKDDPAATIKHISELTGKSPRTIARELKEYQDTGLLRHEGARKNGKWVISSGGSMR

SEQ ID NO: 15767 - DNA, 882 bp, Unknown
  Obtained from environmental sample
  misc_feature (1)..(882): n is a, c, g, or t
ttgtcggcaaaggaaattgacgccctggaaacggtatgggattccctatcagggggagttntggtttgcgacacttcacataagctgatcctggcaaacaaggctgccagaagatacctttccatagtttcttacgaacagggccgggaaaccatctggagcgtgatccccgaagaatcggttgccgaatttctcgcccagaccctcctctctaccgacgtagtggaggaaagggaattttacgttgatgccaacgggatacggagactgcttgccgtgagcgtgatgcctgtggttcaggatcgccagataacaggctctgtgattctaatcgaggatataacggaaaggaggaaccgcgaggccatgctgcggcgcatggagagcctggcgagtcttaccaccctggctgcgggagtagctcacgaaatcaagaatccccttggcgcgctttcaatccatgtgcagttattacagaaagcaaaagacgcccaagaaaaactgtgctccgctcttaaatcttctgaaaacgaatgcgagccgaacaaatatttccaccaaattgacaaatacattaaagttttaaatgaggaaatagaccgccttaacagaattatcgtggattttcttttcgcggtaaggccgatgaacgtggaaccaaggcggggcaacattaacgaattcatcaaggaactggcgggctttgtttcttttgagcttaaagaagcccgcatagaatgtgttcttaaccttgaagaaaatttaaccgccgttgattttgacgcgtcccttatgaagcaggctttcctcaaccttattaaaaacgccctccgccgctatgagcgggggaggcactctgaccattgccaccgaggatgctga

SEQ ID NO: 15768 - protein, 293 aa, Unknown
  Obtained from environmental sample
  DOMAIN (13)...(119): PAS fold
  misc_feature (1)..(293): Xaa is any amino acid
MSAKEIDALETVWDSLSGGVXVCDTSHKLILANKAARRYLSIVSYEQGRETIWSVIPEESVAEFLAQTLLSTDVVEEREFYVDANGIRRLLAVSVMPVVQDRQITGSVILIEDITERRNREAMLRRMESLASLTTLAAGVAHEIKNPLGALSIHVQLLQKAKDAQEKLCSALKSSENECEPNKYFHQIDKYIKVLNEEIDRLNRIIVDFLFAVRPMNVEPRRGNINEFIKELAGFVSFELKEARIECVLNLEENLTAVDFDASLMKQAFLNLIKNALRRYERGRHSDHCHRGC

SEQ ID NO: 15769 - DNA, 342 bp, Unknown
  Obtained from environmental sample
  misc_feature (1)..(342): n is a, c, g, or t
gtgacgaatttcccttccgtcccggcgaaaggtgagtcgttggggatgaaattcatggatatggtgggcgggtcgatctctatcggcggcaacgggttcggattgttaggatcggtgaatgtaacgcccaccgtcacctcgtccatacccgccacggccactatgttccccaccgacgcgatgtccgtgggcactttctgcacgccctcaaaggcgaataccttggtgatgcgggcgggaaccatgctgccgtcgcgcatgcataccgatatttccttgttgacgttgagcgttccggcggtgattttgcctattcccaagcgccccatgtattgggagtag

SEQ ID NO: 15770 - protein, 113 aa, Unknown
  Obtained from environmental sample
  misc_feature (1)..(113): Xaa is any amino acid
MTNFPSVPAKGESLGMKFMDMVGGSISIGGNGFGLLGSVNVTPTVTSSIPATATMFPTDAMSVGTFCTPSKANTLVMRAGTMLPSRMHTDISLLTLSVPAVILPIPKRPMYWE

SEQ ID NO: 15771 - DNA, 795 bp, Unknown
  Obtained from environmental sample
  misc_feature (1)..(795): n is a, c, g, or t
atgtacatcgtacgatttaaatggggcgatggcatagaaattgagcatgaacgggcggtacaaaacaagtggcctttcataacccacctttgcgagggttttgatgaagaatcaatgcacggcatccaggcgcttgaaaaattgaaagtactggacagccactgccttcttattcactgtatcgctttcagcgacgccgacataaaaacagtggcaaaggccggggcaagcgtttcgtggtgcggtttttcaaatatgtttatgttcaatgtcaccgcgaaagtccgcaagatgatcaaggccggggtgaatgtcactatcgggacggactcgtcggcaagcggctcggcaaacctgctcgctgaacttaaatacgacagggaactgtaccgttccatgtacggcgaggatctgccggcaaaaacaatattcgatatggttacgtataacgcggcgaaggctttctggatgggggacaggattggaacgctggatgagggcaagttaggtgacattctggtgctgaaagccaggcatgacgatccttacgaaaaccttgtaaacgcctccatgaaggacattgagcttctggtattggcgggcgagcccatttacggcgaaacgcgttttatggatatttttggcggcgctttgccctccgggtattcacaaattaaagtaagcagccgggctatgtttgtaaaaggcgatcctgccggtttgtacgccaatatccgcggcaaggtcggctttaagaaaaagctggattatctgccttttgaccctgatttataa

SEQ ID NO: 15772 - protein, 264 aa, Unknown
  Obtained from environmental sample
  misc_feature (1)..(264): Xaa is any amino acid
MYIVRFKWGDGIEIEHERAVQNKWPFITHLCEGFDEESMHGIQALEKLKVLDSHCLLIHCIAFSDADIKTVAKAGASVSWCGFSNMFMFNVTAKVRKMIKAGVNVTIGTDSSASGSANLLAELKYDRELYRSMYGEDLPAKTIFDMVTYNAAKAFWMGDRIGTLDEGKLGDILVLKARHDDPYENLVNASMKDIELLVLAGEPIYGETRFMDIFGGALPSGYSQIKVSSRAMFVKGDPAGLYANIRGKVGFKKKLDYLPFDPDL

SEQ ID NO: 15773 - DNA, 474 bp, Unknown
  Obtained from environmental sample
  misc_feature (1)..(474): n is a, c, g, or t
ttgcgactttcgccggagttcatagtggccgacgaaccggtnagcgctctcgacgtatccatacaggcgcagataatcaacttatgccaagacttacagcggcgatacagtcagacgatgctctttatatcgcacgacttggccgtggtgcggcacatcgccaatcggattgcggtcatgtaccgcggaaagataatggagatgggagacaacgaggccattttctcctcgcacgcccatccgtacacggagttattattaaagagcgtacctaccgtgggaacgggagttaccgctaatgataccgccgcgcctaaggcgtcaactataagcgacgacaaggatgcgtcaacgacgagcggcggttgcgccttctatccgcgttgcccgaggcgttgcgacaagtgcgccgatgagacgccggaactcaaggacatgggcggcggacacttcgcggcttgcttttgcgtttga

SEQ ID NO: 15774 - protein, 157 aa, Unknown
  Obtained from environmental sample
  DOMAIN (66)...(136): Oligopeptide/dipeptide transporter, C-terminal region
  misc_feature (1)..(157): Xaa is any amino acid
MRLSPEFIVADEPVSALDVSIQAQIINLCQDLQRRYSQTMLFISHDLAVVRHIANRIAVMYRGKIMEMGDNEAIFSSHAHPYTELLLKSVPTVGTGVTANDTAAPKASTISDDKDASTTSGGCAFYPRCPRRCDKCADETPELKDMGGGHFAACFCV

SEQ ID NO: 15775 - DNA, 576 bp, Unknown
  Obtained from environmental sample
  misc_feature (1)..(576): n is a, c, g, or t
atgctgttcgccgctttagctctagccgcccacatagccatcgcttcccaagaggcactgccggcacagcctgtttccgctgtcggttactgggaaggctccatcaacctgccaggcatggccctgccgatacagataaatctgacgcgggagaacggcggcgaattgcagggcagcatctctattccgctccagggcctcaaaggcggcaagctgggcaaagttgcctcttctggccaagatatatccttcagcatagctggcatcccaggagaccctaccttcaaaggacgcttggagaatggagtgatcaaaggcgacttcacgcaaggtgggcagtcattcccgttcgagctgaagcgcaccggagacgcaaagccaatgaccattgaagccacgctgccaaagaggctcacagagaggagcgtcacggtggggacttcgccatgggagctgcccggcacactgacactgccaccaggcaaagggcctttcccagccgtggtactggtgcacggcagcgggccccaagacagggacgagcgcataggcgaaagccgcccttccgcgacatag

SEQ ID NO: 15776 - protein, 191 aa, Unknown
  Obtained from environmental sample
  SIGNAL (1)...(15)
  misc_feature (1)..(191): Xaa is any amino acid
MLFAALALAAHIAIASQEALPAQPVSAVGYWEGSINLPGMALPIQINLTRENGGELQGSISIPLQGLKGGKLGKVASSGQDISFSIAGIPGDPTFKGRLENGVIKGDFTQGGQSFPFELKRTGDAKPMTIEATLPKRLTERSVTVGTSPWELPGTLTLPPGKGPFPAVVLVHGSGPQDRDERIGESRPSAT

SEQ ID NO: 15777 - DNA, 648 bp, Unknown
  Obtained from environmental sample
  misc_feature (1)..(648): n is a, c, g, or t
gtggttcttgtttccattctggtcgccctgcccgtcggaatagcgaccgctattttcctgaacgagtattcgggcaattcctcgctaataagaattctgcgccttgcgatagaaacgcttgcgggaatcccatcaattatatacggacttttcggacttcttatgttctgccgcctcttgggattcgggcaatcaataatcgcgggagcttttacattgagcataatgatacttccggttattatccgcacgacggaagaatcgctaaagtcgattcccgtctcttttcgggaaggctctcttgcgttaggcgcaacaaaactacaaacgattttccacgtggtgcttccgtccgcgcttcccggaattgtaacttcggtgattctcgcgattggacgcgtaataggcgaatccgcgcccgtattgctcactgtcgggcttaccaaaaatatgccgcgtaccatctttgaatccggcagaacgcttaccattcacctgtactacctgacaaacgaagcggtgcgtccggaggacttcggcattgcgtttgctaccgcgtcagtgcttgtaattcttgttgtggtaataaattccgcaacaaaaattttaaccgataactttagaaaaaaacttggaggaacgctatga

SEQ ID NO: 15778 - protein, 215 aa, Unknown
  Obtained from environmental sample
  DOMAIN (1)...(213): Binding-protein-dependent transport system inner membrane component
  misc_feature (1)..(215): Xaa is any amino acid
MVLVSILVALPVGIATAIFLNEYSGNSSLIRILRLAIETLAGIPSIIYGLFGLLMFCRLLGFGQSIIAGAFTLSIMILPVIIRTTEESLKSIPVSFREGSLALGATKLQTIFHVVLPSALPGIVTSVILAIGRVIGESAPVLLTVGLTKNMPRTIFESGRTLTIHLYYLTNEAVRPEDFGIAFATASVLVILVVVINSATKILTDNFRKKLGGTL

SEQ ID NO: 15779 - DNA, 624 bp, Unknown
  Obtained from environmental sample
  misc_feature (1)..(624): n is a, c, g, or t
ttggccgagctttacgaggtgcggcggcagatgcaaatatcaaatgaagaaaataccggaaacggtcaatccggcgcggcggcggtcggtatcggtaaaaagatgtactactcgataagcgaggtgtgctctttgaccggcattgaaccgcacatcctgcgctattgggagaaggagttctcactgctgcgcccaaagaagaacagcgggggaaaacgcgcgtacaaggagaaggatatcgaggctattgtcaagataaaacgtatgttggaggaagagaattatacgttgcacggagccaaagacaaactgttggacgagcgtcgtgaacggcggggagttgagggaaacacctcctctttgaaacgtaggaaatctgacgcggcgagcgttgtgaaagagtcggattcaactacgttggaatcggccgcatcgtcaacatcaataccgacggataccgttcctaaattgacaaagcgtaaatctgtttctaaggataatcgcggccgccgtgttagtaacggcgaagataacaatggccacggcaacggcagcggtaatgacagcgcgttgatttcaagcgtgcgggacgaactcttaggggtgctgaagttgcttgaatag

SEQ ID NO: 15780 - protein, 207 aa, Unknown
  Obtained from environmental sample
  DOMAIN (38)...(75): MerR family regulatory protein
  misc_feature (1)..(207): Xaa is any amino acid
MAELYEVRRQMQISNEENTGNGQSGAAAVGIGKKMYYSISEVCSLTGIEPHILRYWEKEFSLLRPKKNSGGKRAYKEKDIEAIVKIKRMLEEENYTLHGAKDKLLDERRERRGVEGNTSSLKRRKSDAASVVKESDSTTLESAASSTSIPTDTVPKLTKRKSVSKDNRGRRVSNGEDNNGHGNGSGNDSALISSVRDELLGVLKLLE

SEQ ID NO: 15781 - DNA, 429 bp, Unknown
  Obtained from environmental sample
  misc_feature (1)..(429): n is a, c, g, or t
atggataagttgacgtttgtcgcgaccaaagaaggcggttatgaggctaaacagggaaataaccagataagcggcgcggtggtcattcccgctaccttcgccggcaagcccgtgactggtatcgccgcgtcggggtttgcggggaacgttaatattaccggcgtaaccatccccaacagtgtgactactatcggggggtcggcgttctggggctgcaaaggcctgaccagctttaccatccccgcaaacgtgacaacaatcaacaagaacgccttcgccggttgcacaaatcttaacagtgttactttccaggggaaagttggcagcatcgacaacaacgcattccccggcgatttagctctcaagcacctggacgggggccggggaacctacacgcggccggcaggaaaaaacaactgggcgaagtaa

SEQ ID NO: 15782 - protein, 142 aa, Unknown
  Obtained from environmental sample
  misc_feature (1)..(142): Xaa is any amino acid
MDKLTFVATKEGGYEAKQGNNQISGAVVIPATFAGKPVTGIAASGFAGNVNITGVTIPNSVTTIGGSAFWGCKGLTSFTIPANVTTINKNAFAGCTNLNSVTFQGKVGSIDNNAFPGDLALKHLDGGRGTYTRPAGKNNWAK

SEQ ID NO: 15783 - DNA, 429 bp, Unknown
  Obtained from environmental sample
  misc_feature (1)..(429): n is a, c, g, or t
atgacccccatttacgaagatgcagaggtggaaatcaaccctgcggatttgcgagtggatacttaccgctccagcggagcgggcggtcaatacataaacaaaaccgattctgccgtgcgcataacgcataacccaacaggcatagtggttagctgccaaacggagcgcagccaaattcaaaaccgcgacacagcaatgaaaatgctaagagccgagttggttcaatattacaaagatgaagaagaggcaaagcgaaatgaacgagctgcggaaaagcgtaaaattgagtggggcagccaaattcgctcttatgttttggacgatcgccgcgttaaagacacccgcacaggtcacgaaacctcaaataccgaagctgtgcttaacggggatataaaaccatttgtgaaagcatttttgctatctcaatga

SEQ ID NO: 15784 - protein, 142 aa, Unknown
  Obtained from environmental sample
  DOMAIN (3)...(115): Peptidyl-tRNA hydrolase domain
  misc_feature (1)..(142): Xaa is any amino acid
MTPIYEDAEVEINPADLRVDTYRSSGAGGQYINKTDSAVRITHNPTGIVVSCQTERSQIQNRDTAMKMLRAELVQYYKDEEEAKRNERAAEKRKIEWGSQIRSYVLDDRRVKDTRTGHETSNTEAVLNGDIKPFVKAFLLSQ

SEQ ID NO: 15785 - DNA, 513 bp, Unknown
  Obtained from environmental sample
  misc_feature (1)..(513): n is a, c, g, or t
ttggccgagcggcaatttgaggtttgcatgggcgcaattttaacccaaaacactgcctggactcaagtggaaaaagccttaacaaatctctttgccgcaaaaataaacacccccgaaaaaatccttgaaacagataacgaaatcatcgcaactctaataattccagcaggttacagaaaccagaaaaccaaatatcttaaaaatatagcagaatggttcataaataactctcaactctcaactctcaactctcaactagaatcaactcgcaacaacttacttcaagtaaagggcgttggcagggaaaccgcagattccattttactttacgcttttcatttgccaacttttgtcatagacacatacacaaaaaggactctcgccgctttaaaaatctttgacgaaaaaactccttacgaaactttacgaatgtggtttatggataatctagagttatctgtgccgttatttcaagaatatcacgctttatttgtggaacatggcaagcgttaa

SEQ ID NO: 15786 - protein, 170 aa, Unknown
  Obtained from environmental sample
  DOMAIN (81)...(110): Helix-hairpin-helix motif
  misc_feature (1)..(170): Xaa is any amino acid
MAERQFEVCMGAILTQNTAWTQVEKALTNLFAAKINTPEKILETDNEIIATLIIPAGYRNQKTKYLKNIAEWFINNSQLSTLNSQLESTRNNLLQVKGVGRETADSILLYAFHLPTFVIDTYTKRTLAALKIFDEKTPYETLRMWFMDNLELSVPLFQEYHALFVEHGKR

SEQ ID NO: 15787 - DNA, 720 bp, Unknown
  Obtained from environmental sample
  misc_feature (1)..(720): n is a, c, g, or t
atgaaactaataatccctttcacccgctcatatgcggaaatcaagcgtcgggccagggaagatgcctcgcaagccaagccccttagccccataatcgacattgtctttaaaaatctcttctcgggcaaggacgaggattcccgggaagccctcaggctcctgctatccagttgcatccaccgccaggttcaggatctcaggctccagaacaccgaaatactcccggacttcctacttggaaaagtgttccggctggacgttcatgttacctttaacgacggcgagcaggccgacatcgaaatgcaggtgaaacgtagcgacgacgacctcaaagcccgttccctcctgtacgcaagccgcctgcttgaaagccagctgaggaggggagaacgctttaaagacgcaaaacgggtatacatcatcttttttctggactttgtcctgtttccccaaagcgacaaggttccccgtcgttatgtttttatggaggaaacggaacacgaccgcctgaacgagcttctcgaagtcgtttactacgagatgccgaaaacggcggatgcggtaagggaatactttgaggggaaggaaacgctaaaaaccttgccagctgagcaaaaatggtgtatatacttcaaatatcgtgtaaaagaggggatggagccccttatagacgagttacgccgtggagaggaagggattatgagggcagacagggcttga

SEQ ID NO: 15788 - protein, 239 aa, Unknown
  Obtained from environmental sample
  misc_feature (1)..(239): Xaa is any amino acid
MKLIIPFTRSYAEIKRRAREDASQAKPLSPIIDIVFKNLFSGKDEDSREALRLLLSSCIHRQVQDLRLQNTEILPDFLLGKVFRLDVHVTFNDGEQADIEMQVKRSDDDLKARSLLYASRLLESQLRRGERFKDAKRVYIIFFLDFVLFPQSDKVPRRYVFMEETEHDRLNELLEVVYYEMPKTADAVREYFEGKETLKTLPAEQKWCIYFKYRVKEGMEPLIDELRRGEEGIMRADRA

SEQ ID NO: 15789 - DNA, 387 bp, Unknown
  Obtained from environmental sample
  misc_feature (1)..(387): n is a, c, g, or t
atgagtttgggcgcgggcttttcctgcgtttatagcgggactttcccacaattgacccaaaccctttatgagctggaaatgntagacggaatcaccaaccgctggcaggaactttggtttattacgctccccaatatgaaaggaatgctaatgtcgggggcggttatggcaataacccaatcattcggcgtagcggatgtaactatcgcgctcgcgggattcccaagtacggattacgcggtacatacggttgttaatcacctgattgattatggctcaatccgttntgagatgggttatgcttccgcaattgcgacgatactgtttttcaccatgataatctgcaataccgttatccaaaaatttcttaagcgtgtaggaacctaa

SEQ ID NO: 15790 - protein, 128 aa, Unknown
  Obtained from environmental sample
  misc_feature (1)..(128): Xaa is any amino acid
MSLGAGFSCVYSGTFPQLTQTLYELEMXDGITNRWQELWFITLPNMKGMLMSGAVMAITQSFGVADVTIALAGFPSTDYAVHTVVNHLIDYGSIRXEMGYASAIATILFFTMIICNTVIQKFLKRVGT

SEQ ID NO: 15791 - DNA, 363 bp, Unknown
  Obtained from environmental sample
  misc_feature (1)..(363): n is a, c, g, or t
gtggccaacaagaaagcggactacggcaaggtcgaggaactgccgcttgtcagcttcaccgaaggcagcccgtggcgggaagccaccgagcagtctctggagcgggcggggcgcttgtattatttttcctatatcagcgcttcctacgaaaacgcgtgcagcgccatcaccgccgggtttgggctggggacgctgccgttcagcgacgtgagcgagaagcatgtggcgctcggcccggaagacgggttgccggaattgccgcatatccgcgtggccatgaaagttaagacgcagagcccggtcattttgcaattctgcgaaataatttgcaaactgccgatgtttgcacgacgtggagagtag

SEQ ID NO: 15792 - protein, 120 aa, Unknown
  Obtained from environmental sample
  misc_feature (1)..(120): Xaa is any amino acid
MANKKADYGKVEELPLVSFTEGSPWREATEQSLERAGRLYYFSYISASYENACSAITAGFGLGTLPFSDVSEKHVALGPEDGLPELPHIRVAMKVKTQSPVILQFCEIICKLPMFARRGE

SEQ ID NO: 15793 - DNA, 519 bp, Unknown
  Obtained from environmental sample
  misc_feature (1)..(519): n is a, c, g, or t
gtgcccgtcactgaaacgcagggcggcatccacacatcgnccgcaaccgtgcccgtcatgcccgaagccgagaaagtggacgtgaacatccggcccgacgacntgcgcgttgacgtctaccgggccggcggcgcgggcggccagcacgtcaacaaaaccgaatccgccgtgcgcgtcacccacattcctaccggcatcgtggccatctgccaggatgaaaaatcccaacacaaaaacaaggctcaagccatgaaggtcatcgccgcgcgcatcctccaggccgaacgcgatcggcaggacgcggccatggctgacgcccggcgcgcccttgtcggctctggcgatcgctccgagcgcatccgcacctacaattttcctcaaggccgcgtgaccgaccaccgcatcggcctgacgctctacgcgctcgatcgggtcatggaaggcgaaatccagcctctgctggacggtctgtcagcccatgcgcaagccgaagccctgcgagccgacgctgtggcgtag

SEQ ID NO: 15794 - protein, 172 aa, Unknown
  Obtained from environmental sample
  DOMAIN (21)...(134): Peptidyl-tRNA hydrolase domain
  misc_feature (1)..(172): Xaa is any amino acid
MPVTETQGGIHTSXATVPVMPEAEKVDVNIRPDDXRVDVYRAGGAGGQHVNKTESAVRVTHIPTGIVAICQDEKSQHKNKAQAMKVIAARILQAERDRQDAAMADARRALVGSGDRSERIRTYNFPQGRVTDHRIGLTLYALDRVMEGEIQPLLDGLSAHAQAEALRADAVA

SEQ ID NO: 15795 - DNA, 348 bp, Unknown
  Obtained from environmental sample
  misc_feature (1)..(348): n is a, c, g, or t
ttggcaggaagaaacagtccccggcggaacggtaacggttgtgggatgttaatgcctgacgaagaaaaatggtctttggtaataaaacccaagcggaaactccttgatctgcaaattcgcgaagtactccattatcgggatttaattttcctctttgtcaaacgggactttgtaacccagtataaacaaacagtattgggaccattgtggtttgttatcggtccgcttatctctacggtaatttatacctttgtctttggccgtcttgcaaatgtcgggacagacggtattccctatacgcttttttattcgcaggcgggtttaataccccgccctttagggcgttaa

SEQ ID NO: 15796 - protein, 115 aa, Unknown
  Obtained from environmental sample
  misc_feature (1)..(115): Xaa is any amino acid
MAGRNSPRRNGNGCGMLMPDEEKWSLVIKPKRKLLDLQIREVLHYRDLIFLFVKRDFVTQYKQTVLGPLWFVIGPLISTVIYTFVFGRLANVGTDGIPYTLFYSQAGLIPRPLGR

SEQ ID NO: 15797 - DNA, 498 bp, Unknown
  Obtained from environmental sample
  misc_feature (1)..(498): n is a, c, g, or t
gtggaaacattgcgccctcgcctgataatgaatatggtggacgacccgaaaaacgcggatgtcgcgatgaagatacggcgttcatgcgaagaataccttgatttaaagattgaacacttaggcatcatctaccgcgatatgattcaggataccgcccttgcctccagattaccggtaacgctgtataaaccccaatctattctttctcaggcaatttaccgtattgccgacaaaattctgcaaagtccggaagattcgtacactccgaacgacaagcagatagatgaaagttttcaggaagcggaacttgaggcggaaatcgactttgacagcaagatggattatgttgaagacctgcttcattcaggcgcaatgagccacggcgatttaatcgaaacggtcaaatcacagcagcttgaaatttccaaactcagaaaagaactaaactttattaagcaaaagctgactcgcgccgccgcgcagggatataaggtgtaa

SEQ ID NO: 15798 - protein, 165 aa, Unknown
  Obtained from environmental sample
  misc_feature (1)..(165): Xaa is any amino acid
METLRPRLIMNMVDDPKNADVAMKIRRSCEEYLDLKIEHLGIIYRDMIQDTALASRLPVTLYKPQSILSQAIYRIADKILQSPEDSYTPNDKQIDESFQEAELEAEIDFDSKMDYVEDLLHSGAMSHGDLIETVKSQQLEISKLRKELNFIKQKLTRAAAQGYKV

SEQ ID NO: 15799 - DNA, 528 bp, Unknown
  Obtained from environmental sample
  misc_feature (1)..(528): n is a, c, g, or t
gtgagaaagacaaactcaaacggcggcaaggcgggtttaagacagcatattgtttcggttctggtggaaaacagggccggaactctaagcagggtatccggtcttttcagccgccgcggatttaatattgacagccttaccgtaggcgaaacggaagatccttccatctccagaatgaccatcgccgtaacaggcgaggagagggtattggaacaaattgttaaacagcttgaaaaactgattgacgtaatcgccgtgcgtgaattagaaccatccgcgtgtcttcgccgggaaatcattttgataaaaataggcgcagatgagaaagttcggcctgcggttttgggaatcgcaggcattttccgcgcccgcatagtagacgtttcccagactacaattacagtagaagccaccggcaatatggaaaaactcaacggcctgttactgctcttacgcccatacggaatccttgagcttgcgcgaaccggccttgagcccttgagcgcggcgctagtgtgttgtcggtaa

SEQ ID NO: 15800 - protein, 175 aa, Unknown
  Obtained from environmental sample
  DOMAIN (16)...(89): ACT domain
  misc_feature (1)..(175): Xaa is any amino acid
MRKTNSNGGKAGLRQHIVSVLVENRAGTLSRVSGLFSRRGFNIDSLTVGETEDPSISRMTIAVTGEERVLEQIVKQLEKLIDVIAVRELEPSACLRREIILIKIGADEKVRPAVLGIAGIFRARIVDVSQTTITVEATGNMEKLNGLLLLLRPYGILELARTGLEPLSAALVCCR

SEQ ID NO: 15801 - DNA, 837 bp, Unknown
  Obtained from environmental sample
  misc_feature (1)..(837): n is a, c, g, or t
gtgtcccacagcttttccagcgaattcgagatgatcccgaatatcgtcgaggataccctggaagttattaacaacctcaagcagatgcgggtgaagctgcctgacgagactgagacggacaccctgttatacgaattttccggcagacaggaaataaaaagcggaatgtttgacaggccggggcaggttgaggttgtaaacaaagaccttcacatcatgacgctgatggacgacgcgaagatagagcttgaagtccagattgacctgggcaggggttatgtgccatccgaagtaaacgaacgctttatcgacgtgatcggaaccatagtgctggacgcgatttattcgcccgttaaaaaggtgaaattcgccgtggaacccacgcgcgtggggcagcgcagcgattatgacaagctggtgcttgagatttggactgacggcacgataaagcccgatgacgcccttgccgaggcggcgaaaatagccaaggatcactttaccgtgttcatcaattttgacgagagcaatttcggctttgaagaggaaagtgacgaggataacgagcggatcaggaacatactcaatactccggtggaggagttggagctttcggtacgttcctcaaactgccttaaaaacgcggatataaaaacaatcggggagttgacccgcaaaaccgaagatgatatagccaagaccaggaatttcggcaagaagtccctccaggaaataaaagagaaactgaaagagtggaatttaagcctggggataaccgagagcgccctgaagaacgcggttcaaaaaatgcccaaaaaggaagcagccgatgaaacatag

SEQ ID NO: 15802 - protein, 278 aa, Unknown
  Obtained from environmental sample
  DOMAIN (5)...(171): RNA polymerase Rpb3/Rpb11 dimerisation domain
  misc_feature (1)..(278): Xaa is any amino acid
MSHSFSSEFEMIPNIVEDTLEVINNLKQMRVKLPDETETDTLLYEFSGRQEIKSGMFDRPGQVEVVNKDLHIMTLMDDAKIELEVQIDLGRGYVPSEVNERFIDVIGTIVLDAIYSPVKKVKFAVEPTRVGQRSDYDKLVLEIWTDGTIKPDDALAEAAKIAKDHFTVFINFDESNFGFEEESDEDNERIRNILNTPVEELELSVRSSNCLKNADIKTIGELTRKTEDDIAKTRNFGKKSLQEIKEKLKEWNLSLGITESALKNAVQKMPKKEAADET

SEQ ID NO: 15803 - DNA, 729 bp, Unknown
  Obtained from environmental sample
  misc_feature (1)..(729): n is a, c, g, or t
ttgaaagacattgttctaacgacaattaacgccaaatggacgcacccctcgctggcgctgcgcctgctcaaagcaaatctcggttctcttgaaccccaatgcgaaataatcgaattcgcccttcgccaaccgttacgcgaaaagacagaacccatacttgtcatacgtccgcgaattttaggtgtctcagtatcaatttggaatcatcttgcgacaatagaactttttgaagctctggaaaaagaatggtcagcgcacggtaaaagacccattatcgttcttggcggtcctgaaatttcgtatttatcagatgacgcaaaaatatttgagtatgcggattatatcattcgtggagaaggggaaacagttttttccgcactgtgtaagagtatcttgcaaaatgaaaataaaatgatcggtggatgtacgcaaagccttgatggcgacatatggctggatcgccaatgcagccacgccaaagcgtgcgtcaattcatgtcagccatccggagccagcagggctttgcgtacacccaccaaagaattaattttcaatatgacagataacttagcggagataaaaacagcctatcacctctacacagacgaagacatagcgcaaaaattaatctatgtggaatcaacccgcggctgtccgtttgaatgtgaattttgcctcagcgcggtaaatcagagggcagaacagcgcggtgagggaatttcctcttga

SEQ ID NO: 15804 - protein, 242 aa, Unknown
  Obtained from environmental sample
  misc_feature (1)..(242): Xaa is any amino acid
MKDIVLTTINAKWTHPSLALRLLKANLGSLEPQCEIIEFALRQPLREKTEPILVIRPRILGVSVSIWNHLATIELFEALEKEWSAHGKRPIIVLGGPEISYLSDDAKIFEYADYIIRGEGETVFSALCKSILQNENKMIGGCTQSLDGDIWLDRQCSHAKACVNSCQPSGASRALRTPTKELIFNMTDNLAEIKTAYHLYTDEDIAQKLIYVESTRGCPFECEFCLSAVNQRAEQRGEGISS

SEQ ID NO: 15805 - DNA, 708 bp, Unknown
  Obtained from environmental sample
  misc_feature (1)..(708): n is a, c, g, or t
atgtttctggggctgccctatgacactccctttgaactggagccggtaaaaagcgagacagattttatttcctttaatgtgcaggaattgatttccaaagccgcttccggcagaccggacattcaggaattgcggtacagcatactgttactgcaaagcgcccgtaaaacgcagtttaattcgctgctgccggctttaacgttaagctggaacaccacgcccgcctttatcggcgatccttttaaggacaaggacaagtggagcgacagcgatatgtggaaaagatccggttcctttactgtttcactggggctgcggctgaacagtctttttccgttcagcgtggattatcagggagtcaaaaatatggatgaccagattgtcggcgccaatatcggtttggcccagatgattcagggtacggaaattgaaatttacaacactgtattagcgctggaaaaaacgcggaccagtgtggaagcccaaacgcagacgataaggcttgccgaacgttcctaccgcctgagcgaacaggcttaccgcgccggtttgcaggaccttttacaggtgcgaaacgctgaacttgatttaaagcaggcgagagtttcgatgctagagcagcagtttaactatcttaacggtttgcttgatcttgaatacgctattggagttccgtttgggactttgagttcaaaggagataaaataa

SEQ ID NO: 15806 - protein, 235 aa, Unknown
  Obtained from environmental sample
  DOMAIN (27)...(223): Outer membrane efflux protein
  misc_feature (1)..(235): Xaa is any amino acid
MFLGLPYDTPFELEPVKSETDFISFNVQELISKAASGRPDIQELRYSILLLQSARKTQFNSLLPALTLSWNTTPAFIGDPFKDKDKWSDSDMWKRSGSFTVSLGLRLNSLFPFSVDYQGVKNMDDQIVGANIGLAQMIQGTEIEIYNTVLALEKTRTSVEAQTQTIRLAERSYRLSEQAYRAGLQDLLQVRNAELDLKQARVSMLEQQFNYLNGLLDLEYAIGVPFGTLSSKEIK

SEQ ID NO: 15807 - DNA, 867 bp, Unknown
  Obtained from environmental sample
  misc_feature (1)..(867): n is a, c, g, or t
atgatgctgctgcggggccagaaccttcttggctacaggcactacgcggacgatgtggtcgccaagtttgtagaatacgccgccaaagacggggtggatgtcttccgcatttttgacgctgtaaacgaccccaggaattttgaagccgccaccaaagcggccaagaaaaccggcaagcatattcaggctaccatttcctatgcggtaactcccttccatacaatcgaaaagtacgcggaattcgccaaacagcttgtgaacataggcgcggattctatatgtataaaagatatggccggtcttcttaaaccatacgaaggctacgatctcgtaaaagcgattaagaaagtcacagatattcccatagaaattcatactcacgcgactaccggtatgtcggtagccacccttaccaagtgcgccgaagcaggcgctgagatcctggacacaaccatttcttccatgtctatgggtaccagccacagccccaccgaaaccatggtggaaatcttcaggggcaccgaatacgacaccggccttgacatcaacctgcttttggaaattgccgcctacttccgcgatgttcgcaagaactacaagaagttcgagtccagtttcctcggtgcggacacccgtatcctcctttcccaggtaccgggcggtatgctcagcaacctggaaagccagctcaaagagcagaacgctggtaacaaaatcgacgatgttctaaaagaaatcgctatagtccagaaggatgccggttatccgccattggttacgcctacaagccagattgttggaacccaggcggtattcaacgtactcttgggccgctataacaggctttccgggaatttcaggaattaa

SEQ ID NO: 15808 - protein, 288 aa, Unknown
  Obtained from environmental sample
  DOMAIN (213)...(288): Conserved carboxylase domain
  misc_feature (1)..(288): Xaa is any amino acid
MMLLRGQNLLGYRHYADDVVAKFVEYAAKDGVDVFRIFDAVNDPRNFEAATKAAKKTGKHIQATISYAVTPFHTIEKYAEFAKQLVNIGADSICIKDMAGLLKPYEGYDLVKAIKKVTDIPIEIHTHATTGMSVATLTKCAEAGAEILDTTISSMSMGTSHSPTETMVEIFRGTEYDTGLDINLLLEIAAYFRDVRKNYKKFESSFLGADTRILLSQVPGGMLSNLESQLKEQNAGNKIDDVLKEIAIVQKDAGYPPLVTPTSQIVGTQAVFNVLLGRYNRLSGNFRN

SEQ ID NO: 15809 - DNA, 621 bp, Unknown
  Obtained from environmental sample
  misc_feature (1)..(621): n is a, c, g, or t
ttggcaggttcagaatcggccgagaatatccgcaccgcggtagtcttgttgttcaccatgccaatcgccatctcgtcggcaatgatcgccgaaatggtggcggcgctcgtgtcgccgggcagggcgatcatgtccaggccgacggagcaaaccgaggtcatcacctcaagcttgtcaagactgatcgcgcccttcctcaccgcgttaaccatgccttcgtcttcggagacggggataaacgccccggaaaaaccgcccacatgggtggacgccattatgccgcctttttttatcatgtcggttaacatggcaagggccgccgttgtgccgtgtgttccggcggtttcaagtcccatctcctcaagtatgcgggcaaccgaatcgcctacctcgggagtcggcgcaagtgaaagatccaatatgccgaaaggcacgcccagccgccgcgcagcttccattcccacaagctgtcccatgcgggtaatcttgaaggcggttttttttatcgcgtccgcaagctcgtcaaagctcgccccccgcagattttccagcgcggccttaaccacgccggggcctgacacccccacgttaaggcagctttccccctcgccgacgccgtga

SEQ ID NO: 15810 - protein, 206 aa, Unknown
  Obtained from environmental sample
  misc_feature (1)..(206): Xaa is any amino acid
MAGSESAENIRTAVVLLFTMPIAISSAMIAEMVAALVSPGRAIMSRPTEQTEVITSSLSRLIAPFLTALTMPSSSETGINAPEKPPTWVDAIMPPFFIMSVNMARAAVVPCVPAVSSPISSSMRATESPTSGVGASERSNMPKGTPSRRAASIPTSCPMRVILKAVFFIASASSSKLAPRRFSSAALTTPGPDTPTLRQLSPSPTP

SEQ ID NO: 15811 - DNA, 447 bp, Unknown
  Obtained from environmental sample
  misc_feature (1)..(447): n is a, c, g, or t
gtgcgcgggcgtcctgtgtgccctgatcgggcacttcggaggagggcagttgtggctgaaaagaaattcacttgggcgacaggccggagaaaaaattcagttgcgcgggttcggatgataagcggaaccggcagaattgaaatcaacgggcataaattggaagaatattttactatccccactcatcgcgcgatggtagcgcgtcccatgatgctcaccgggactcaggcgagcatcgacgtatatgtgaacgtctcgggcggtggtgtcagcggtcaggcaggcgcgatccgccacgggattgcccgcgcgctgaatgctctcgataacaataaccgcatggctctcaagaccaacgggctcttaacccgcgatccccggatggttgaacgcaaaaaatacgggcatcccggcgcgcgcaagcggttccagttctccaagcgctaa

SEQ ID NO: 15812 - protein, 148 aa, Unknown
  Obtained from environmental sample
  DOMAIN (28)...(148): Ribosomal protein S9/S16
  misc_feature (1)..(148): Xaa is any amino acid
MRGRPVCPDRALRRRAVVAEKKFTWATGRRKNSVARVRMISGTGRIEINGHKLEEYFTIPTHRAMVARPMMLTGTQASIDVYVNVSGGGVSGQAGAIRHGIARALNALDNNNRMALKTNGLLTRDPRMVERKKYGHPGARKRFQFSKR

SEQ ID NO: 15813 - DNA, 528 bp, Unknown
  Obtained from environmental sample
  misc_feature (1)..(528): n is a, c, g, or t
ttgggttgtatggccgagaacagntactccgcgcaggatatgcagtatatcgaccaggacaataacaacgaacgctacattccctttatcattgagacttcggcgggtcttacgcgtaacgtgctgatgatcctctgcgacgcctacgatgaggagcaggtcgccgataaaggcaatgacgacgattggaggactgtactgcgcttccatccgagcctcgcccccgtcactgtcgcggttctgcccctgatgaaaaaagacggccttgcggaacttgcccaggacatacgccgcgaattaaaagaagattttgcgaccgattacgatcaggccggggccatcggtcgccgctaccgccggcaggacgaggcgggtacgcctttctgcgtaaccgttgactaccagtccaaagacgacggtactgtcaccctgaggttccgggattccatggaacaggtcagggtgccgaaatcggaactctcaacgcggctgcgccgggagataaaagaatacaagagggttaagtaa

SEQ ID NO: 15814 - protein, 175 aa, Unknown
  Obtained from environmental sample
  DOMAIN (77)...(167): Anticodon binding domain
  misc_feature (1)..(175): Xaa is any amino acid
MGCMAENXYSAQDMQYIDQDNNNERYIPFIIETSAGLTRNVLMILCDAYDEEQVADKGNDDDWRTVLRFHPSLAPVTVAVLPLMKKDGLAELAQDIRRELKEDFATDYDQAGAIGRRYRRQDEAGTPFCVTVDYQSKDDGTVTLRFRDSMEQVRVPKSELSTRLRREIKEYKRVK

SEQ ID NO: 15815 - DNA, 735 bp, Unknown
  Obtained from environmental sample
  misc_feature (1)..(735): n is a, c, g, or t
ttggagggtacgggtcttgggctttccattactaaaaaccttgtcaagctgatgaatggttccattaagtttgaaagcgaataccgcaaaggctcgtcctttaccgttgagttctaccaggatgtcgtaaatgacgatgtaatcggcgaagaagccgcggaacatctgtcgcggttccgtttctcggcacagcgccgtagccgtaaccagaggcttctgcgggccgacatgtcttacgcaaccgttctcatcgtggacgacgtagtctccaacctggacgtggccaggggaatgttgaaaccgtacaagataggggtagaatgtgttacgtcgggcaaggaagcgataaaccgcgttcttgacgggaaggttcgctatgacgcaatttttatggatcacatgatgcccggaatggacggcattcaaacaacgagaatcattcgcgaggagatcagcaacgaatacgcaaaaacggttcccattatcgcgcttaccgccaacgcccttctgggcaacgactctctgttccttgaaaacggtttccaggcttatctgtccaaacctattgatattatcaggctggatcaaattttaaatcaatgggtacgggataaaaagaaggaaaaagagctgcagaataaaatacaggatatgacggaaggaccgattaaaaacaagcaaataaaaaaatacacgattcccggagtcaataccgcggaagcgctgaacgcttga

SEQ ID NO: 15816 - protein, 244 aa, Unknown
  Obtained from environmental sample
  DOMAIN (80)...(199): Response regulator receiver domain
  misc_feature (1)..(244): Xaa is any amino acid
MEGTGLGLSITKNLVKLMNGSIKFESEYRKGSSFTVEFYQDVVNDDVIGEEAAEHLSRFRFSAQRRSRNQRLLRADMSYATVLIVDDVVSNLDVARGMLKPYKIGVECVTSGKEAINRVLDGKVRYDAIFMDHMMPGMDGIQTTRIIREEISNEYAKTVPIIALTANALLGNDSLFLENGFQAYLSKPIDIIRLDQILNQWVRDKKKEKELQNKIQDMTEGPIKNKQIKKYTIPGVNTAEALNA

SEQ ID NO: 15817 - DNA, 663 bp, Unknown
  Obtained from environmental sample
  misc_feature (1)..(663): n is a, c, g, or t
ttgaaacatgtcccggaaaaatataagacggctgagctgcttaacgccgctctcaaagatgacggaagcgcccttgaatttgtcccggaggaatacaaaagccggaaggtctgccttgcggcgataaaaaatgactggcagggaatagcgatcaagtatgtacccgcgcgtctattgactaaaaagttctacagaaaagccttttcattaaacgccagtgtgtttgagcacataccaaaagagtttatcacaaggcggatgtgcgaaaaagcgattcgggaaagtgaatatacctttagggacgttcccgccgaattccgcactaaaaaatttatttccaaaataattaaaaatctggggctttttctgagtgacattgacgaaagtcaaaaaacggaacagctttgcctttcggcggtaaagaaccacggcggagcgcttaaatatgtaccctatcagttacgcactccggaattatgccttgaggcggttaagaactatggctgggctttagagtttgtacccggcaaattaaaaacaaaggagctttgttttaccgccgttaataaggccggcgaagcgcttacgtttgtagatgccggtatactcaccaaagaagaatatgatgaattatatcggcttgcgttagagaagaggcggtaa

SEQ ID NO: 15818 - protein, 220 aa, Unknown
  Obtained from environmental sample
  misc_feature (1)..(220): Xaa is any amino acid
MKHVPEKYKTAELLNAALKDDGSALEFVPEEYKSRKVCLAAIKNDWQGIAIKYVPARLLTKKFYRKAFSLNASVFEHIPKEFITRRMCEKAIRESEYTFRDVPAEFRTKKFISKIIKNLGLFLSDIDESQKTEQLCLSAVKNHGGALKYVPYQLRTPELCLEAVKNYGWALEFVPGKLKTKELCFTAVNKAGEALTFVDAGILTKEEYDELYRLALEKRR

SEQ ID NO: 15819 - DNA, 783 bp, Unknown
  Obtained from environmental sample
  misc_feature (1)..(783): n is a, c, g, or t
atgttagcgccaaccgacaaagatgtatttatggacgttttgccacttcatcatacatatcctactacatgttcttttattgcgccatttgcggtaggcattcctactgtaattgccgaaaaaatagtcggtaaggttgttgtagatgacataagagacggggaagtttcgtaccttattgcggttccccttctttatgataaagtaatgaccgcgataaacgccggttatcagaaactttctcctataatccgcggtcctttgaatattttacgtaaaattgctttagcaaaagcaaaaaaaggcaattttgaatggggacgaaaagtttttagatttttccgtaaaaaagccaaccttcaatcaatttttataatggttgcgggcggcggagcgttgagcattaagacggcggatttctttgattcatttggttttaacattgttcatggttatggtatgagcgagaactccccacttatctccgtgagtactccccatcataaacgcaatgaatcggtagggcttccggtcagttacacggaagtaaagattatcgatcagggacctgacggtattggcgaaatcgcgtgtaaatcaccttctgtaatgttgggttattttgagaacgaggcggctacaaaagaagttattacggaagacggctggcttttaacaggcgaccttgggcgcattgatgaagacggatatatccatatcagcggacggaagaaaaatcttattgtcggggccggcggtaaaaatattatcccgaagaagtga

SEQ ID NO: 15820 - protein, 260 aa, Unknown
  Obtained from environmental sample
  DOMAIN (1)...(260): AMP-binding enzyme
  misc_feature (1)..(260): Xaa is any amino acid
MLAPTDKDVFMDVLPLHHTYPTTCSFIAPFAVGIPTVIAEKIVGKVVVDDIRDGEVSYLIAVPLLYDKVMTAINAGYQKLSPIIRGPLNILRKIALAKAKKGNFEWGRKVFRFFRKKANLQSIFIMVAGGGALSIKTADFFDSFGFNIVHGYGMSENSPLISVSTPHHKRNESVGLPVSYTEVKIIDQGPDGIGEIACKSPSVMLGYFENEAATKEVITEDGWLLTGDLGRIDEDGYIHISGRKKNLIVGAGGKNIIPKK

SEQ ID NO: 15821 - DNA, 627 bp, Unknown
  Obtained from environmental sample
  misc_feature (1)..(627): n is a, c, g, or t
gtgccgcaagactcaaaaaaagcggtttcntggtacaccaaagctgccgaacagggtatcgcgcctgcgcagtataatcttggttattgctatgctaacggacagggcgtaccgaaagacttgaataaggcggtttcctggtacactaaagccgcagagcagggtattgcggaagcccagtataatcttggcctttgttataaacacggagagggtgtgccgaaagacttgaataaggcggtttcctggtacaccaaagctgcggagcagggttatgcgggagcgcagaataatcttggtgtttgttataaacacggagagggtgtgccgaaagacttgaataaggcggcttcctggtataccaaagctgcagagcagggtcatccggaagcccagaatagtcttggcaaatgttataataacggagagggtgtgccaaaagatgtgcaaaaggcggtttcctggttcatcaaagccgctaatcagggttacgcacctgcgcaatataatcttggcctttgttatgctaacggagtgggcgtaccaaaagatatgcaaaaggcggtttactggtacaccaaagccgcggagcagggtcatgcggaagcgcagaatattctcaagtaa

SEQ ID NO: 15822 - protein, 208 aa, Unknown
  Obtained from environmental sample
  DOMAIN (129)...(164): Sel1 repeat
  misc_feature (1)..(208): Xaa is any amino acid
MPQDSKKAVSWYTKAAEQGIAPAQYNLGYCYANGQGVPKDLNKAVSWYTKAAEQGIAEAQYNLGLCYKHGEGVPKDLNKAVSWYTKAAEQGYAGAQNNLGVCYKHGEGVPKDLNKAASWYTKAAEQGHPEAQNSLGKCYNNGEGVPKDVQKAVSWFIKAANQGYAPAQYNLGLCYANGVGVPKDMQKAVYWYTKAAEQGHAEAQNILK

SEQ ID NO: 15823 - DNA, 705 bp, Unknown
  Obtained from environmental sample
  misc_feature (1)..(705): n is a, c, g, or t
ttgcagacagacccgaaagaaggtgaaatccttttacttaaatcggctattctgctggaacagggacaatattcgcaatcaaacgccgcgctggatagttacgcgtcgattaattcaaataacagaacgtatctttttttacgcgcaagaatacaagccgaaggaaaccgcaaccgcgattcggcgttgaattatcttcgctcgattttacgcgttaatgaagacgacgcggaagcccttgtttatgccgccggtttgcttatggaatctcagcgcgcggaagatcaaaccgagggcagggaaatgcttgaacgtcttaagaagacaagcagttcttccgtggaagtgttaagtttgagcgtaaaggacgcaatacagagggaaagatggcaggaagcgcaggggtatttgaatcgaatacttgccgtccgccgcacagcccaggatttaacggacgcgtacaatgttgagcgcggacttggaaacaacgcaagggctcttacctttgcccgcgaattatatgatcgtgataattccaatcacgaatacgcggcgatttatatttccgctctgataaattccggcagaaaagacgaagcctcccgtattttggaaaccgcattatttcggcggcaagcggtcaaattaaaagcaaatattattatctgcgcagccgtttacagacnaatcaggaagacattctag

SEQ ID NO: 15824 - protein, 234 aa, Unknown
  Obtained from environmental sample
  misc_feature (1)..(234): Xaa is any amino acid
MQTDPKEGEILLLKSAILLEQGQYSQSNAALDSYASINSNNRTYLFLRARIQAEGNRNRDSALNYLRSILRVNEDDAEALVYAAGLLMESQRAEDQTEGREMLERLKKTSSSSVEVLSLSVKDAIQRERWQEAQGYLNRILAVRRTAQDLTDAYNVERGLGNNARALTFARELYDRDNSNHEYAAIYISALINSGRKDEASRILETALFRRQAVKLKANIIICAAVYRXIRKTF

SEQ ID NO: 15825 - DNA, 825 bp, Unknown
  Obtained from environmental sample
  misc_feature (1)..(825): n is a, c, g, or t
atgatggaatgtaaaaacgccctggtggaatgtgacggggattttgccaaggctgaaaaactcttaaaagaaaaaggccttgcggcgctggaaaaacgagccgaccgggctactaaacaaggcaaggtttttattaaggtcaagagtgacgataccgtagcggtcctggtggaaatggtcgcggaaacggattttgtagccaggaaccctgaatttatcgccctgggcggaacgattgcggaaagggtccttgataaaggctacaaaaatgaagaactggctccggaaggaaaagttcataatgaactgaacgccatggtgactgacttagccaccaagatccgggaaaacatgagccttaaacgggtcaaagtgatcagcgcggcccagggtgaatacctcagcacctatattcacggagaagacgcaatcggggtagtggtaaaatgtaaggccgataaaccggaagtctggcaaaaagaagaggccaaaacttttgtacataatcttgccctgcatattgcggcttttaatcccatggccctcgacaagaccaagatcgatcccgattacatgaaagagcaggaagaaattttccgcaagcaaatggaacaggatgaacagtacaagggcaaacccgagaaaatgattgaaaatatactaaaaggtaaaataactaagtacctttcgagtatctgcttacttgaacagggctatgtgaaggatgaaaaactcacagttacccaagccctggcggatataagtaagcagttgggcgcctctatttctgtgaccgactatgtgtatcttaagggtagggtataa

SEQ ID NO: 15826 - protein, 274 aa, Unknown
  Obtained from environmental sample
  DOMAIN (38)...(273): Elongation factor TS
  misc_feature (1)..(274): Xaa is any amino acid
MMECKNALVECDGDFAKAEKLLKEKGLAALEKRADRATKQGKVFIKVKSDDTVAVLVEMVAETDFVARNPEFIALGGTIAERVLDKGYKNEELAPEGKVHNELNAMVTDLATKIRENMSLKRVKVISAAQGEYLSTYIHGEDAIGVVVKCKADKPEVWQKEEAKTFVHNLALHIAAFNPMALDKTKIDPDYMKEQEEIFRKQMEQDEQYKGKPEKMIENILKGKITKYLSSICLLEQGYVKDEKLTVTQALADISKQLGASISVTDYVYLKGRV

SEQ ID NO: 15827 - DNA, 435 bp, Unknown
  Obtained from environmental sample
  misc_feature (1)..(435): n is a, c, g, or t
atgaaaaaaaccctccagcggctccttattttttttgtaggcatccctgttcttatcaccctggtcgttttactgcctgggtataatcatctctgccttaatcttctcacggttctggtttcttctctgggggccatggaatttcagaatatcctcaaacaaaaaaaattctttattccccctcctgaagccgctattttgggaggacttataccggccctcgcgacagcggtagtgagcctcaatttcagcaaattgggaatcgccatgatctttatgctgggtatttcctggttcttcctgtcccggatcctttcttctaaggaggaacaggagctttttataaatcgaattgccgcggggttttcgataattatttatccggggctttttttatcctggctcattccaatggccctgctgccaaaaccctga

SEQ ID NO: 15828 - protein, 144 aa, Unknown
  Obtained from environmental sample
  misc_feature (1)..(144): Xaa is any amino acid
MKKTLQRLLIFFVGIPVLITLVVLLPGYNHLCLNLLTVLVSSLGAMEFQNILKQKKFFIPPPEAAILGGLIPALATAVVSLNFSKLGIAMIFMLGISWFFLSRILSSKEEQELFINRIAAGFSIIIYPGLFLSWLIPMALLPKP

SEQ ID NO: 15829 - DNA, 381 bp, Unknown
  Obtained from environmental sample
  misc_feature (1)..(381): n is a, c, g, or t
ttggcctgtgaagagacccgggatttttcggggctcgaggtgattcttgcccttaactacggcggccgggacgagatagtccgggcaataaagcggatggccggaaatgggcttctggggcccggcgctattgcgggccttacagagggcctcatcagcgcgcacatggataattctgatgtgccggatccggatctcatcatcaggaccgcgggggaattcaggataagcaattttctgctctgggagggcgcgtattcggaatattatatttccgataaactgtggcctgattgggaagccggggatctcctccgggctattaatgactatggaagccgaaaccgccgtttcggcggcttaggggaaaaggttcaatga

SEQ ID NO: 15830 - protein, 126 aa, Unknown
  Obtained from environmental sample
  DOMAIN (1)...(120): Putative undecaprenyl diphosphate synthase
  misc_feature (1)..(126): Xaa is any amino acid
MACEETRDFSGLEVILALNYGGRDEIVRAIKRMAGNGLLGPGAIAGLTEGLISAHMDNSDVPDPDLIIRTAGEFRISNFLLWEGAYSEYYISDKLWPDWEAGDLLRAINDYGSRNRRFGGLGEKVQ

SEQ ID NO: 15831 - DNA, 612 bp, Unknown
  Obtained from environmental sample
  misc_feature (1)..(612): n is a, c, g, or t
atgaacggtgatagatcggacttaaaacatgaaattaagcgtgttttcggaatacaaaatgatgagataacagaattcagagaactaaatggttcaaatttggtatactcattttttgttaaagggcaaaaatatgttgtaaagaaattaaaagatgcgtctataataaactgggaacaggaaaaagccgcttataattctttaaggccgttaaatattacggataaattagtcagttataataacggcattaaaataactgaatttcttgatggcagcgaaacgttaagttacagtaaatctgatattacagaatccctggatttaattcgcacaatccatgaaagcggactctcaataaattttgattacaacataattgaaaatatggacaagtatatttcgcgttgtaaagaaaaatcaaaagagttgagcgtgttaacaaaatgccgggatagaataaacgcaattcaggcaatagttgacaggttgaatgtcccgaaagttctttgtcacggcgacgcgtgtacggcaaatttttttcggctgcccgataaaagtataaaaataattgattgggaacaagcntggtatggcagacccgatacttga

SEQ ID NO: 15832 - protein, 203 aa, Unknown
  Obtained from environmental sample
  DOMAIN (41)...(202): Choline/ethanolamine kinase
  misc_feature (1)..(203): Xaa is any amino acid
MNGDRSDLKHEIKRVFGIQNDEITEFRELNGSNLVYSFFVKGQKYVVKKLKDASIINWEQEKAAYNSLRPLNITDKLVSYNNGIKITEFLDGSETLSYSKSDITESLDLIRTIHESGLSINFDYNIIENMDKYISRCKEKSKELSVLTKCRDRINAIQAIVDRLNVPKVLCHGDACTANFFRLPDKSIKIIDWEQAWYGRPDT

SEQ ID NO: 15833 - DNA, 537 bp, Unknown
  Obtained from environmental sample
  misc_feature (1)..(537): n is a, c, g, or t
atgctgcaggccgccagcgccgtagccaacgatggcattctggttcctgtaaaaaccgtttcgcgtattgtttcagcggacggcaaaaccgtgaacaatttccagtcaggcgctccccggcgggttttcagcgcagcgacggcaagaatgatgcgctcctacatgatggacgtaacttccagcattggaaccggctggcgcgccaacgttgaagatctttcactggcggtaaagaccggcaccgcccagatcatcgattcaaataccggcgcttattcttccacggatttcatagcgagctgcatagcaatgctcccggctgaacacccttccctcgtgctttatattgttatttacaaaccccagggcgcatcttaccttggcggtaggattgcggcgccgcccatcagggaagccgctgaagccctgatcaactacctggggcatcccgcggggcagaaacccgcagataagccattcgggcgctctttcaatccccgccctcccctacccgggggtagacaaaaccgtccctga

SEQ ID NO: 15834 - protein, 178 aa, Unknown
  Obtained from environmental sample
  misc_feature (1)..(178): Xaa is any amino acid
MLQAASAVANDGILVPVKTVSRIVSADGKTVNNFQSGAPRRVFSAATARMMRSYMMDVTSSIGTGWRANVEDLSLAVKTGTAQIIDSNTGAYSSTDFIASCIAMLPAEHPSLVLYIVIYKPQGASYLGGRIAAPPIREAAEALINYLGHPAGQKPADKPFGRSFNPRPPLPGGRQNRP

SEQ ID NO: 15835 - DNA, 456 bp, Unknown
  Obtained from environmental sample
  misc_feature (1)..(456): n is a, c, g, or t
ttggggaataacgctgcattctataagagtcttcggggggttattgtactggatgaaaactataccctgcttgaaggagaaaaactaaagctcatcctttctcttgccccggcctttgaaattgaaggggcactgaaccgcaaatggtcngctaaaaagagtttcaattcctattcaaatccggatacgctattggctgtcctccccaatctggtaaagccggggcttgtaaaagcggacagacagcgcgggaaaagagaactcggctttctctgcctctacaccgacggcgaagggaactattggaccaaatgctcccgccgtttccacacaagccttaacgagagcctcgccagcgtagaaaccctaatcgacgagcttgccggccatgtggacgccgaaaaaaaacgcctcgtaaaccagtgctaccggagattgtcagattacctggggtga

SEQ ID NO: 15836 - protein, 151 aa, Unknown
  Obtained from environmental sample
  misc_feature (1)..(151): Xaa is any amino acid
MGNNAAFYKSLRGVIVLDENYTLLEGEKLKLILSLAPAFEIEGALNRKWSAKKSFNSYSNPDTLLAVLPNLVKPGLVKADRQRGKRELGFLCLYTDGEGNYWTKCSRRFHTSLNESLASVETLIDELAGHVDAEKKRLVNQCYRRLSDYLG

SEQ ID NO: 15837 - DNA, 579 bp, Unknown
  Obtained from environmental sample
  misc_feature (1)..(579): n is a, c, g, or t
ttgnnnnnnttgattatggccgagggctgtgaaatggtcgccgcgcgaaggaaagaaagccattggcgtaatttaataaatgaaacaaagaaattttatacgggccctcttatatataacgccaaccacggcagcgaagacaatgtacactggtttgacgccgttgattatatcggaaccagcgcttattatcctgtggcgaaaatccccggtgaaaccgaagaaaatatgtataaagcctggcagccaataaagaaacgcgtaaaggctttaagcgcaaaatggaaaaagaaagtaatatttatcgaaatcggctgccgcagcgcgaaaggctgcgccatgatgccctgggattttacccatgttgaatttccctacgatgaaaacgaacaggccaatttttatcagtcatgccttcggaccttttttgacgagccctggtttgcgggtttcttttggtgggactggagcacaaaaatatacaacgcctccaaagcaaagggcaatacgggctttaacatccacggcaaaaaagccgaacgcgtgctgagggaatggtattccaagccaagggaatag

SEQ ID NO: 15838 - protein, 192 aa, Unknown
  Obtained from environmental sample
  misc_feature (1)..(192): Xaa is any amino acid
MXXLIMAEGCEMVAARRKESHWRNLINETKKFYTGPLIYNANHGSEDNVHWFDAVDYIGTSAYYPVAKIPGETEENMYKAWQPIKKRVKALSAKWKKKVIFIEIGCRSAKGCAMMPWDFTHVEFPYDENEQANFYQSCLRTFFDEPWFAGFFWWDWSTKIYNASKAKGNTGFNIHGKKAERVLREWYSKPRE

SEQ ID NO: 15839 - DNA, 738 bp, Unknown
  Obtained from environmental sample
  misc_feature (1)..(738): n is a, c, g, or t
ttgggcgatgttgtttttatatgtagangtagttttttctatagaaaatttatctatttaagggagggaaatatggcatttccagaaaactttttatggggcggggcaatagccgcgcaccaggccgaaggcgcttacctgnaagacggcaaagggctttcaacctgcgatgtcatgcacgcgggtaaagaaagatttgccgaaatcaataacccaaaagcaatacgcgcgaacatccaaaacccgcaagggtattttccggagcatatagcggttgatttttaccaccactacaaagaagacatagcgctttttgcggaaatgggctttaaaacctttcgcacgtctatctcctgggcaagaattttcccaaacggcgatgatccgcagccaaatgaaaaaggccttcttttttatgacagccttttcgatgaatgtttaaaatacggcatagagccgctcgtgaccctttcccattgggaaatgccaatacacctcacgaaaaagtacaacggctgggcaagcagggaacttatcccgctttttgagaaatacgctaaaacagttttcgcccgttacaaaaacaaagtgaaatactggcttatttttaacgaaataaacatgacattccacgcgccctttttgggcgcgggcgcgcttgtggatgatccttcgaaaaaagaagaaacagcttacaccgcctgccacaaccagcttgtagcaagcgccctgcagtaa

SEQ ID NO: 15840 - protein, 245 aa, Unknown
  Obtained from environmental sample
  DOMAIN (23)...(244): Glycosyl hydrolase family 1
  misc_feature (1)..(245): Xaa is any amino acid
MGDVVFICRXSFFYRKFIYLREGNMAFPENFLWGGAIAAHQAEGAYLXDGKGLSTCDVMHAGKERFAEINNPKAIRANIQNPQGYFPEHIAVDFYHHYKEDIALFAEMGFKTFRTSISWARIFPNGDDPQPNEKGLLFYDSLFDECLKYGIEPLVTLSHWEMPIHLTKKYNGWASRELIPLFEKYAKTVFARYKNKVKYWLIFNEINMTFHAPFLGAGALVDDPSKKEETAYTACHNQLVASALQ

SEQ ID NO: 15841 - DNA, 525 bp, Unknown
  Obtained from environmental sample
  misc_feature (1)..(525): n is a, c, g, or t
gtgtcccccgataccggcgcggtggacaggaataaattttacgctacggctctgaaaaagccgctggcgcttttgtataaagaaagggattattctttggtgtcaaccgacgccgttaagaacaatatttccgaaatgaaaatgctgggagatgtaagcggcaaaaacgttttaatggccgacgatatgctgggtacaggcggtactctgttaaaagcgatggcattcctgaaagatcagggagccggaaaagtaatctgcgccataagccttcctcttttttccggtgaagccataaaatattttgacgaagcctacaaaaacgggcttttttatcgaatcatcggaacaaacgcggtgtatcatgaagaagtcctcaagcgggaatggtacattagcgttaatattacaagactttttgccaaaacaatctcccggctccatagagggctttcattaagctcaattttggataaccgtgatataatcgtgaaacacttccaggaaaaccccgacaagtcttag

SEQ ID NO: 15842 - protein, 174 aa, Unknown
  Obtained from environmental sample
  DOMAIN (1)...(112): Phosphoribosyl transferase domain
  misc_feature (1)..(174): Xaa is any amino acid
MSPDTGAVDRNKFYATALKKPLALLYKERDYSLVSTDAVKNNISEMKMLGDVSGKNVLMADDMLGTGGTLLKAMAFLKDQGAGKVICAISLPLFSGEAIKYFDEAYKNGLFYRIIGTNAVYHEEVLKREWYISVNITRLFAKTISRLHRGLSLSSILDNRDIIVKHFQENPDKS

SEQ ID NO: 15843 - DNA, 678 bp, Unknown
  Obtained from environmental sample
  misc_feature (1)..(678): n is a, c, g, or t
ttgtttatcctcaaaaatttccttatcgggaaaagcgatgtttccaaaataaggatagacaaaaacaatttcataagtatttatagcaaatggttggaggctgtgaagcctacgatagcatttaattgggatgcagcgaaaaaaaaggggattttcagcgggcatttttacattgcggatttgataagcgataaaaacacatcgctaaaagaaaatttgatgattgttctgcgtgcaacccgctatgagatgaaccgccataaagatgaattcggagctttcaattccagcgaagtccatttcaacgacaaacaacgtgctcacaatgctttttgggcaatctatgaacgcccacccaaagaagattattgggattatatcattgaacgccaagacctgcttgtgccgcaagatgtgcgagaacgcaagggcagtttcttcacaccgcagatttgggttgagctttcacagaaatacatagcggaagttctaggtgaagattggcaggatgagtattatgtgtgggactgcgcagcaggcacgggaaatctcttggcagggctaacaaacaaatacaatatttgggcatccacgcttgacaaagcagacgtgaacgttatgcacgataggatagaaaagcggggcgaatttactgaaagagcattgttttcaatttga

SEQ ID NO: 15844 - protein, 225 aa, Unknown
  Obtained from environmental sample
  misc_feature (1)..(225): Xaa is any amino acid
MFILKNFLIGKSDVSKIRIDKNNFISIYSKWLEAVKPTIAFNWDAAKKKGIFSGHFYIADLISDKNTSLKENLMIVLRATRYEMNRHKDEFGAFNSSEVHFNDKQRAHNAFWAIYERPPKEDYWDYIIERQDLLVPQDVRERKGSFFTPQIWVELSQKYIAEVLGEDWQDEYYVWDCAAGTGNLLAGLTNKYNIWASTLDKADVNVMHDRIEKRGEFTERALFSI

SEQ ID NO: 15845 - DNA, 828 bp, Unknown
  Obtained from environmental sample
  misc_feature (1)..(828): n is a, c, g, or t
ttggccggccaagtgctttcagtcgccctcgcgctgatcctgtttgtgtttcacgaaatgaacacgctgacaacgcgcaccataataatacccctggcagtcgagacaaattccgtattggcgcccggcagcgcctatcccaggaccgtgagagtaaggctgaggggcgaaagcgaaggcgtcaagtcaatccttgacagcgacattgaagcgtatcttgatttcagcaagtatgaagccgagggacagtaccgcgccccggtgcaaatccgcaaaaaaggaagcgcccttgtccccgagcctctggaaattacagttaaccccctggaagtctccgtcaaccttgacacgcgggtaaataaaaacatcccgctcgccgcgagcatacagggaaacgccgccgacggttttgaactggtatcctggtcggtcttgcccgatgaagtcgcgataaccggacctttgcggatcatggaaacgatcaacgatatcaaaaccgacccgattgatcttgagggaaggaaaagcgatttcaacgtaatggtaaatatcgccaatcccaatcccctcctgctttccataagaggggaagtctacgcggaattccgctgcgtcatccggccttccgtcccggtacgcaatatcgacggcatccctatagacataatcggcctggacgaaaatcttgaaaccgatctgggcggaagatccggaagcgtcaggctggaagcaagacagtcactgctggacaacttcagcccggaacccggtttcctcagcgtggactgttcaacattacggaccgggagactatatcctggcggttaa

SEQ ID NO: 15846 - protein, 275 aa, Unknown
  Obtained from environmental sample
  DOMAIN (30)...(115): YbbR-like protein
  misc_feature (1)..(275): Xaa is any amino acid
MAGQVLSVALALILFVFHEMNTLTTRTIIIPLAVETNSVLAPGSAYPRTVRVRLRGESEGVKSILDSDIEAYLDFSKYEAEGQYRAPVQIRKKGSALVPEPLEITVNPLEVSVNLDTRVNKNIPLAASIQGNAADGFELVSWSVLPDEVAITGPLRIMETINDIKTDPIDLEGRKSDFNVMVNIANPNPLLLSIRGEVYAEFRCVIRPSVPVRNIDGIPIDIIGLDENLETDLGGRSGSVRLEARQSLLDNFSPEPGFLSVDCSTLRTGRLYPGG

SEQ ID NO: 15847 - DNA, 927 bp, Unknown
  Obtained from environmental sample
  misc_feature (1)..(927): n is a, c, g, or t
gtgaaaagggcggaaagacgggctttcgaggctcatgatacggtgaaagtgacatattcgtccggactgacgctcggcggcgtacccttgtcgccggcggcttacgcgtggaaaaacccgactgccgcgttgaacgcgggtaacggccagcttgtagacgcggtttacaccgacccgagcggcaactacaaaccgatagagggaaagattccggtgaacgtggcaaaagcccccgccgccggcttaaccgcaaccccgcggaaaatacagatttccagcgatagcaccaaactcacggcctttccgctatcctccatcaccctgaccccaaacgatcacggaacattgagttacgcgttgggagcgttcacaaataccggcgcagtcttagacgccgagccgacgctttccggatcgaccatgtcctataagggcgccggcaagactaccggtacggcgacgcaggttatcactatcacaagccaaaactacgccgacataacagtcgccattacctttgaggctatatcaggaaccacttatgccgttacggtaaacggcggcaccggcggcggcaattacacggtgggcgcatccgtaaaaatcgacgccaacgccccagcgttgggcaaaacctttgccaagtggacgaatatcacaagcggcgtgactattgcggacagtttaaaggcgtcggcggcctttgttatgcccgccaaagcggtgacggtcacggcgacgtacagggacagcacttataaaataacgtacgcatataccggcggagaggtggcgaccaccaatcgcgcaagttatacgatagcgaccgagacctttaagctgactaatccgacaagaagaggttacacattcgcgggtggacgggatccaacggagcgacgccgatacatcctcgtgccgatctga

SEQ ID NO: 15848 - protein, 308 aa, Unknown
  Obtained from environmental sample
  misc_feature (1)..(308): Xaa is any amino acid
MKRAERRAFEAHDTVKVTYSSGLTLGGVPLSPAAYAWKNPTAALNAGNGQLVDAVYTDPSGNYKPIEGKIPVNVAKAPAAGLTATPRKIQISSDSTKLTAFPLSSITLTPNDHGTLSYALGAFTNTGAVLDAEPTLSGSTMSYKGAGKTTGTATQVITITSQNYADITVAITFEAISGTTYAVTVNGGTGGGNYTVGASVKIDANAPALGKTFAKWTNITSGVTIADSLKASAAFVMPAKAVTVTATYRDSTYKITYAYTGGEVATTNRASYTIATETFKLTNPTRRGYTFAGGRDPTERRRYILVPI

SEQ ID NO: 15849 - DNA, 354 bp, Unknown
  Obtained from environmental sample
  misc_feature (1)..(354): n is a, c, g, or t
atgctagtccgcgaagtagccgaaggtctcgccgttgaagcagacgaaaactacaccatagccttggatttgaaaataacgccagaactacgtcaaagctgcatagcgagagagctggtgaatcgcatacaaaaccgccgcaaggaaatggatttgcagattacggacaagataaagatagcgttgaaagggctgggtgcttacgcggatttgcaagccgcggtggagaagcacaggggttatattttggaggagacgcaggggcttgagatttccacgagcggtgaagcgagtggggagtgggttgcggttagtgtggaaggatgtgaggtggaggtttgtgtttgcgtttaa

SEQ ID NO: 15850 - protein, 117 aa, Unknown
  Obtained from environmental sample
  misc_feature (1)..(117): Xaa is any amino acid
MLVREVAEGLAVEADENYTIALDLKITPELRQSCIARELVNRIQNRRKEMDLQITDKIKIALKGLGAYADLQAAVEKHRGYILEETQGLEISTSGEASGEWVAVSVEGCEVEVCVCV

SEQ ID NO: 15851 - DNA, 894 bp, Unknown
  Obtained from environmental sample
  misc_feature (1)..(894): n is a, c, g, or t
atgccccctgctcaggaattggttgttgatgaagccaaggtaaagaaggctgttcagtcagggattccgctcacaataactacttttacgcttccccatgaaattgaagtctacattgagcaaattatttcagtttttttaaaacagctggaacaggagaaactcagggattatgtcgtttactgtgtccaggaattggcagtaaacgccaaaaaggcaaataccaaacgggtgtactttatggagcgcgggttggatcttgccaaccctgacgactacaagctgggaatggcagggtttaaggaaaataccctgagcaatatcgcccactacctgcagcttcagaaagagaaagggctatacatcaaactaattctacagataaaaaacaatatcatttatgtggaaatcagaaacaacgtttcggtaacaaaaaccgagcttatccgtatccatgacaagcttgcgcgttccaggcagtataataaccttgaagaagccatgtcccaggttttggatgattcggaaggtgccgggcttgggcttgtcatactggttctgatgctaaaaaaaatgggccttgatgaagattgcttcgatatacttggaaccgacaaggaaaccatcgcccgcctggttatccccctggatcagacccgccttgaaaaccttacggcgctttccaccaccattgtgaatagcatcacaagcctgccgcagttcccggaaaatatacttatggtgcagaagcttataaacgatcctaaatcggagatggccgatattgcgcggcagctctcaatggatcctgcccttacggcggatcttctgaagatcgtcaattccgctcaatatatgctttccaagaagttgatagtatcggcgacgcggtaa

SEQ ID NO: 15852 - protein, 297 aa, Unknown
  Obtained from environmental sample
  misc_feature (1)..(297): Xaa is any amino acid
MPPAQELVVDEAKVKKAVQSGIPLTITTFTLPHEIEVYIEQIISVFLKQLEQEKLRDYVVYCVQELAVNAKKANTKRVYFMERGLDLANPDDYKLGMAGFKENTLSNIAHYLQLQKEKGLYIKLILQIKNNIIYVEIRNNVSVTKTELIRIHDKLARSRQYNNLEEAMSQVLDDSEGAGLGLVILVLMLKKMGLDEDCFDILGTDKETIARLVIPLDQTRLENLTALSTTIVNSITSLPQFPENILMVQKLINDPKSEMADIARQLSMDPALTADLLKIVNSAQYMLSKKLIVSATR

SEQ ID NO: 15853 - DNA, 492 bp, Unknown
  Obtained from environmental sample
  misc_feature (1)..(492): n is a, c, g, or t
gtgatccgcatccccatccacatgctgaacacgataaaaaaatgctattatgtcgccaaacaactcacccaggatctcggcagggatccaagcgaagaagagctgtcagaatacctaagaatccccgtttcaaaggtaaaggacattatcaaactctcgcaggaaactaccagcctgaacgccattgtagacgacggaaaccttacaaggcttgccgatcttatcaaggacgaatcaacggcggaaccgtttgaaatggttttttcaatgacattgcaggaaaccatgagggacattctctcacagctctcggagcgtgaaatgaagataatccagctccgttacggcctcgccggcgaaggccctctcaccctggaagaaacaggaaagatgctcgggataacccgcgagcgtgtgcgccagatccaggaaaaagccaccttcaaactgcggaatattagggcgctgagtgagttaaaagaaacatgttaa

SEQ ID NO: 15854 - protein, 163 aa, Unknown
  Obtained from environmental sample
  DOMAIN (5)...(87): Sigma-70 region 3
  misc_feature (1)..(163): Xaa is any amino acid
MIRIPIHMLNTIKKCYYVAKQLTQDLGRDPSEEELSEYLRIPVSKVKDIIKLSQETTSLNAIVDDGNLTRLADLIKDESTAEPFEMVFSMTLQETMRDILSQLSEREMKIIQLRYGLAGEGPLTLEETGKMLGITRERVRQIQEKATFKLRNIRALSELKETC

SEQ ID NO: 15855 - DNA, 540 bp, Unknown
  Obtained from environmental sample
  misc_feature (1)..(540): n is a, c, g, or t
atgatcatgcgtcaagaatttgataaaagtggtcgttctgatgaatttaagattgaacgccttgtcccaataaaatcctgtagcgactttagctgttctatcgcagaatatagcgattatctggtaaatgacgcgttacgctccatgaacgatcatatcgcccttacatggcttcttacagaacgtgccaccggcagaatagcggcgtatatgtccctcgttatggatgcaataaaactgtcgtttaccgaaaaagaactccatcatctcaattatcccttccgtaccatacccgccatgaaaatcgccaagttggcggttgatcaatctttctcagaaaagtacaaaggcataggatcttttatgattgataccgcggaacggcttgcttgggcctgtaacaaagactattgcgcttgtcgttttcttacggtagatgccgacctggaacatgacgaatatgtcattgttttttatgaaaaaaatggcttcctaaaaaatatgaactctancacaaanacccgtaaactatcagcatga

SEQ ID NO: 15856 - protein, 179 aa, Unknown
  Obtained from environmental sample
  misc_feature (1)..(179): Xaa is any amino acid
MIMRQEFDKSGRSDEFKIERLVPIKSCSDFSCSIAEYSDYLVNDALRSMNDHIALTWLLTERATGRIAAYMSLVMDAIKLSFTEKELHHLNYPFRTIPAMKIAKLAVDQSFSEKYKGIGSFMIDTAERLAWACNKDYCACRFLTVDADLEHDEYVIVFYEKNGFLKNMNSXTXTRKLSA

SEQ ID NO: 15857 - DNA, 687 bp, Unknown
  Obtained from environmental sample
  misc_feature (1)..(687): n is a, c, g, or t
atggtcgagggagtattttacctcggcgaccggtcccttggcgctttaatgatgcacagatcggaaatacaatggcttgatattaacgcccctccccaggacatacgcgcgaaggttctggagttccgagcccagcgctgttttccggtcgcggacggagcccttgacgcaattattggcgcggcatatctggaagatataattcttaacctggcctccgaccggccgcttggtctccgttcaattatgaaaaaggccctcttcgcccccgaaaccatgccggctctgaaagcgtttgaaacattcagacgcggggaaacgggttatatttttgttatggatgaatacggtggttttgccggcatggtttggctgcaggatttaatggaagaaattgtcggggaactgactgcccctgttaatgaagaaaagcaggcggttcaactggaagacggctcatggctgattgacggcattatgaatacggacaacgcggcaagtcttctttccctgcctggcctcgcggattctggcgattaccacactcttgcaggttttgtgctttccctcgccggtgaactgccccgcgccggagacagcttcaattactgcggctgccgcttcacagttctggacatggacgggaacaggattgataaaataggagttaagaaagagggttcgtaa

SEQ ID NO: 15858 - protein, 228 aa, Unknown
  Obtained from environmental sample
  DOMAIN (17)...(133): CBS domain pair
  misc_feature (1)..(228): Xaa is any amino acid
MVEGVFYLGDRSLGALMMHRSEIQWLDINAPPQDIRAKVLEFRAQRCFPVADGALDAIIGAAYLEDIILNLASDRPLGLRSIMKKALFAPETMPALKAFETFRRGETGYIFVMDEYGGFAGMVWLQDLMEEIVGELTAPVNEEKQAVQLEDGSWLIDGIMNTDNAASLLSLPGLADSGDYHTLAGFVLSLAGELPRAGDSFNYCGCRFTVLDMDGNRIDKIGVKKEGS

SEQ ID NO: 15859 - DNA, 759 bp, Unknown
  Obtained from environmental sample
  misc_feature (1)..(759): n is a, c, g, or t
ttgtctgccttgttgattgccgctccatattgcaaagaaccgctggaaataattgtggatggcgaattgatatccagaccttatgtgtatatgacaattcgcttaatggaaaaatttggaataaaagcggagaataacgactataaaagtttcaaggtggaaaagggagtttataaagcccagactcttgaaatagagggcgatgcctcgtctgcgagttatttttgggcggcaaaggcaataacaaaaggaaacgtggttgtgaaaggagttgagaaaaacggtttgcaaggcgatgtgaaatttttggaagtattggaaaaaatgggcgaagacttagatggcataaccgtggatgcaactcttttcccagatgcagcaatgacaatttgcccccttgcctgctacgcaaaaggcaaaacaaaaatcacaggcatagcaagctggaaggtaaaggaaacagataggatttccgctatggcaaacgaacttcgtaaggttggcgcagaagtaacaacaggagatgattttatagaaataaccccacccaaagaaattctgcctgcaacaatagaaacatataatgaccacagaatggctatgtgctttagcttgctctccttgaattcgccaaataaaaacggggcagagataacgatattgaatccagaatgcgtgagtaaaacttttcctggttattttgaggatttaagagattatctgcaactttgcaatagcaattacggcgactttttctaa

SEQ ID NO: 15860 - protein, 252 aa, Unknown
  Obtained from environmental sample
  DOMAIN (1)...(237): EPSP synthase (3-phosphoshikimate 1-carboxyvinyltransferase)
  misc_feature (1)..(252): Xaa is any amino acid
MSALLIAAPYCKEPLEIIVDGELISRPYVYMTIRLMEKFGIKAENNDYKSFKVEKGVYKAQTLEIEGDASSASYFWAAKAITKGNVVVKGVEKNGLQGDVKFLEVLEKMGEDLDGITVDATLFPDAAMTICPLACYAKGKTKITGIASWKVKETDRISAMANELRKVGAEVTTGDDFIEITPPKEILPATIETYNDHRMAMCFSLLSLNSPNKNGAEITILNPECVSKTFPGYFEDLRDYLQLCNSNYGDFF

SEQ ID NO: 15861 - DNA, 549 bp, Unknown
  Obtained from environmental sample
  misc_feature (1)..(549): n is a, c, g, or t
ttgttaggcgatattccgtttatcggcggcttgttttttagaaatgcgtatatcaccacttttatcggttttattatacttggtatttcagccgctgttctttacaagacgcgttttggactccgtttgcgctcctgcggggagcatccgcaagccgctgactccgccggaataaacgtgtataatatgcgttatgccggagtaatgatttcaggcgcgcttgccggtcttggaggacttgtgtttatcattccaacgtcaactcaatttaatgcggaagtttcaggttacggctttttggcgctggcggttttaatattcggtcaatggaaacccgggcgtattctttcaaccgctttcttctttggacttatgaaagcaatatcttccgcgtcttccggcatacatttcctgagcgcaatttcaattccaagcgtcatctataaaataattccctatgtaaccacgcttgtagttctggcgttcagttcaaaatcttcgcaggctcccagagccgaggggattccttatgataaagggaggagataa

SEQ ID NO: 15862 - protein, 182 aa, Unknown
  Obtained from environmental sample
  misc_feature (1)..(182): Xaa is any amino acid
MLGDIPFIGGLFFRNAYITTFIGFIILGISAAVLYKTRFGLRLRSCGEHPQAADSAGINVYNMRYAGVMISGALAGLGGLVFIIPTSTQFNAEVSGYGFLALAVLIFGQWKPGRILSTAFFFGLMKAISSASSGIHFLSAISIPSVIYKIIPYVTTLVVLAFSSKSSQAPRAEGIPYDKGRR

SEQ ID NO: 15863 - DNA, 885 bp, Unknown
  Obtained from environmental sample
  misc_feature (1)..(885): n is a, c, g, or t
atggttacctcggatatgctgccgatttgcgacaagcttgataaagccgggtttttcgcgctggaagcatggggaggcgctacattcgactcctgtatcaggtttttaaacgaagacccctgggagaggcttaaaaatcttaaaaagaaattgcctaatacaaagataatgatgcttcttcgcggccagaatcttcttggctacaggcactatgccgacgatgttgtggcgaaattcgttgaatacgccgcaaaagacggcattgacatcttccgcattttcgacgcggtaaacgatccgcgcaactttaaaaaggcgactgaagctgccaagaaaacaggcaagcacattcaggcgacaatttcttacgccgtaactcctttccatacaatagaaaaatacgccgaatttgccaaacagcttgtggacataggcgcggactcgatttgtattaaagacatggcgggccttcttaaaccttatgaaggatacgaacttgtaaaagctattaaaaaagttaccgatttgccgattgaaatccacacacacgccacgacgggaatgtccgtggcgactcttaccaagtgcgccgaagcgggagcggaaatcctcgacaccacgatttcctcaatgtcgatgggcacgagccatagccccactgaaactatggtagaaattttcagaggaaccgagtacgacaccggacttgacacaagcctgttactcgaaattgccgcctacttccgcgaagtgcgcaagaattataaaaaattcgagtccagcttccttggagcggatacccgtattctggcaagtcaggttcccggcggtatgctgagtaaccttgaaagccagctaaaagagcagggcgcttccgacaaatag

SEQ ID NO: 15864 - protein, 294 aa, Unknown
  Obtained from environmental sample
  DOMAIN (3)...(254): HMGL-like
  misc_feature (1)..(294): Xaa is any amino acid
MVTSDMLPICDKLDKAGFFALEAWGGATFDSCIRFLNEDPWERLKNLKKKLPNTKIMMLLRGQNLLGYRHYADDVVAKFVEYAAKDGIDIFRIFDAVNDPRNFKKATEAAKKTGKHIQATISYAVTPFHTIEKYAEFAKQLVDIGADSICIKDMAGLLKPYEGYELVKAIKKVTDLPIEIHTHATTGMSVATLTKCAEAGAEILDTTISSMSMGTSHSPTETMVEIFRGTEYDTGLDTSLLLEIAAYFREVRKNYKKFESSFLGADTRILASQVPGGMLSNLESQLKEQGASDK

SEQ ID NO: 15865 - DNA, 855 bp, Unknown
  Obtained from environmental sample
  misc_feature (1)..(855): n is a, c, g, or t
gtgggaaacagattttttaccgcacgctacactcattacagtcctgaaataattaatagtgagattaatgaagggcgactggtctggtacggtgcgggtaaggaaaaaataggtttgtgccggcctgatgatctggaattggtgaatgtgaatactgttcataaatcaaggcaaaaaacacaagaaacagagcatccttcggaaattatagcgcagttaatcgacaatggcttttttgatcgcccacgggatttttgggaaataaaggacgcaattaacgcaagtgcgaagaagaatatcaccagcaaagactgcgccgaagccctttggcaggaggcgtggcaaggaaggctgtcgtcagattcttttgagccgcttcgacgcggcattcaattcgggttcgcaattaagaacgcggaagctgttgagcagccgccccggtcaagtttaggctctccgcgtatgccccgtatccctcgttctttgcgggatcgctggcgggacggagcgccggtatcgggcaggtggttttcgattgttcttaatgatgttgagaacacagatcagagccaatggtgggatgatcctcttgaggaagaaggccgaaatcgggaaagggttcgcctgctgctggcgcgttggggtgttctctgccgtcctctcatggaaaaaatttccaaaggaagctcagcttctggtgatccctcgccttttacctggtcggggcttttgccgaccatgcgccgcatggaactttctggcgagcttgttgccggccgtttctttgccgggattaattccttacaatttgcctcgcccgcaatagcacatgagctgaaaacgccgaggctgtga

SEQ ID NO: 15866 - protein, 284 aa, Unknown
  Obtained from environmental sample
  misc_feature (1)..(284): Xaa is any amino acid
MGNRFFTARYTHYSPEIINSEINEGRLVWYGAGKEKIGLCRPDDLELVNVNTVHKSRQKTQETEHPSEIIAQLIDNGFFDRPRDFWEIKDAINASAKKNITSKDCAEALWQEAWQGRLSSDSFEPLRRGIQFGFAIKNAEAVEQPPRSSLGSPRMPRIPRSLRDRWRDGAPVSGRWFSIVLNDVENTDQSQWWDDPLEEEGRNRERVRLLLARWGVLCRPLMEKISKGSSASGDPSPFTWSGLLPTMRRMELSGELVAGRFFAGINSLQFASPAIAHELKTPRL

SEQ ID NO: 15867 - DNA, 765 bp, Unknown
  Obtained from environmental sample
  misc_feature (1)..(765): n is a, c, g, or t
atggcaaagatacttggttttaggattcgcaattttagaaccttgcgtgatgttacgctgggccgtctatggaacgggaaaagttccgttgagttgacgccgatgaccgtagtaatcggtaaaaacggttcgggaaagagtacgctttttgatgcatttggatttttatcagattgcttaaaattaggagttgaggaagcctgcgatgcaaagggacgtggaggatttgggcggataatatcacaaggtgttaataaaccgattatgtttgagatttattatcaggaaaccaataccgaatttccaattacttaccaagtagaatttgccgttgatgatcacaaccatccatacgtcaacagcgaacgtttacggcagcatggtgaaggacagaaaccatctgacgagccattgacgttttttgttcttattaatggtctgggtgttgtatgtaaagaaaaatatctaggaatagaaaatcaaccaggggggcttactatggaaagcctcaagaaattaataagcgaaaaatcaaacgaaatggaaattgttgaattggatgataatcgtagattgggtattgcctcacttggcgcattaaaacagcatcccagaatttccatgttcaggcaattcatagaaggctggtatatttcttatttcagacctgactcagcccgcgaactaccgttatcaggagctcagaagcatttaaatatacatggcaataatattggaaatgttgtacagtttatgaaacngtga

SEQ ID NO: 15868 - protein, 254 aa, Unknown
  Obtained from environmental sample
  misc_feature (1)..(254): Xaa is any amino acid
MAKILGFRIRNFRTLRDVTLGRLWNGKSSVELTPMTVVIGKNGSGKSTLFDAFGFLSDCLKLGVEEACDAKGRGGFGRIISQGVNKPIMFEIYYQETNTEFPITYQVEFAVDDHNHPYVNSERLRQHGEGQKPSDEPLTFFVLINGLGVVCKEKYLGIENQPGGLTMESLKKLISEKSNEMEIVELDDNRRLGIASLGALKQHPRISMFRQFIEGWYISYFRPDSARELPLSGAQKHLNIHGNNIGNVVQFMKX

SEQ ID NO: 15869 - DNA, 711 bp, Unknown
  Obtained from environmental sample
  misc_feature (1)..(711): n is a, c, g, or t
ttgtacatcataataggccccctgcataagcgcctgatacgcggcattgacttcagcaccataaaaggaaaaatactgcgtaacctttgggcggtggtttttactctgggaacggtggcgattgtccttgtccccatttccctgctggtttcaatatttttccggcaaatcgcggagttggggcgcagtgcccgcgacttgttaaatgaaaggccggaatatctgcatgagttttttataaaaatatcggatgtggttcgtgatgtttccgccggacaggtcgccataaacgccgatactattgaatcgcagataaaaacgcttattaccaatgaaatgcagcgtatgtttttttggggcagtaatattgtccgcaacatcggcggattttccgtaaatatattgataatgacattttcaatgtatttcttttatgttgacggcccttacctttcccgcctggtgctgcgttccattccgataaaaagcgaatatatcagcacccttacggcaaaatttatggatataacgcgcaaccttttctttggttacattatagtcgctttactgcaatcggttgtggcatatattatttttactattttcaatattaaaggttcgatggttctttcggccctgactttcctcctcgtgttttttcccctggttggggcaacgctggtttatatacctctgggtattcttaaatag

SEQ ID NO: 15870 - protein, 236 aa, Unknown
  Obtained from environmental sample
  misc_feature (1)..(236): Xaa is any amino acid
MYIIIGPLHKRLIRGIDFSTIKGKILRNLWAVVFTLGTVAIVLVPISLLVSIFFRQIAELGRSARDLLNERPEYLHEFFIKISDVVRDVSAGQVAINADTIESQIKTLITNEMQRMFFWGSNIVRNIGGFSVNILIMTFSMYFFYVDGPYLSRLVLRSIPIKSEYISTLTAKFMDITRNLFFGYIIVALLQSVVAYIIFTIFNIKGSMVLSALTFLLVFFPLVGATLVYIPLGILK

SEQ ID NO: 15871 - DNA, 894 bp, Unknown
  Obtained from environmental sample
  misc_feature (1)..(894): n is a, c, g, or t
ttgcttcgctgccatcggcgcttggtcaaaacggaaagggtatgcgcttcggtaaatgtagcggccaccaagagcggcattaacatggacgcggtaaagctgatgggcggggtgatcaaacagattgcggaaaaaaccgcttcccatgacggtattggctgcgcgaagctcgtggtgttntgcaacgcgccggaagacaatccttttatggcgggggcctttcacggcgttggcgaagcggaaagctgtttgaacgtgggagtctccggccccggcgtgataaaagccgcgctggaaaacctgagcggcgccagtttcgatgagcttgccgacgctattaaaaaaacagcctttaaaattacccgcatggggcagcttgtgggaatggaagccgcgcggcggctgggcgtacctttcggcattttggatttgtcccttgcgccgactccggcggtaggcgattcagtcgcccgcattcttgaagaaatgggccttgaagccgccgggactcacggcactaccgccgcgctcgccatgttaactgacatggtaaaaaaaggcggcattatggcatcaactcatgtcggcggtttttccggcgcttttatccccgtctccgaagatgagggcatggtcgcttcggtaaaaaaaggcgctatcagtctggacaaactggaggcaatgacatcggtgtgttctgtcggtctggacatgatcgccctgcccggcgacaccaacgcctccgccatttccgcgattatcgccgatgaaatggcaatcggcatggtgaacaataaaaccaccgccgtgcgcgttattcccgtgccgggtaaaaagccggcgactgggccgagttcggcggccttttgggaggcgcgccggtcatggcggtaa

SEQ ID NO: 15872 - protein, 297 aa, Unknown
  Obtained from environmental sample
  DOMAIN (1)...(294): Uncharacterized ACR (DUF711)
  misc_feature (1)..(297): Xaa is any amino acid
MLRCHRRLVKTERVCASVNVAATKSGINMDAVKLMGGVIKQIAEKTASHDGIGCAKLVVXCNAPEDNPFMAGAFHGVGEAESCLNVGVSGPGVIKAALENLSGASFDELADAIKKTAFKITRMGQLVGMEAARRLGVPFGILDLSLAPTPAVGDSVARILEEMGLEAAGTHGTTAALAMLTDMVKKGGIMASTHVGGFSGAFIPVSEDEGMVASVKKGAISLDKLEAMTSVCSVGLDMIALPGDTNASAISAIIADEMAIGMVNNKTTAVRVIPVPGKKPATGPSSAAFWEARRSWR

SEQ ID NO: 15873 - DNA, 789 bp, Unknown
  Obtained from environmental sample
  misc_feature (1)..(789): n is a, c, g, or t
gtgtattgtgtcctaaattggtttgtaaatatgatattgacattaattcaaaaaaagattataaattgtaaaggttgtgaaaatatgaataaatctatgtataatataatagaaaattatatgtacgaatgtatgaaagatgccgcacatgatccagagcatatttttagggtattatatctgtcattaagcattgcctcaaaaataactgaaaaaataaattttgacatattaattgcctcatgtttattgcatgatattggaagggaagaacagtatagaaatcaagatatatgccacgccgaaataggcggaataatggctaaagagtttttgttaaaaaatggctggtctgaaaaagactcagatcatgtaaaaaattgcatttcgacccatagatttagaggaaataatattccggagacaatagaggcaaaaatattatttgattcagataaattagatgcagtaggttgtttaggtatttccagaactttaatgtatatgggcattgtaggtattaatttatatgaattaaagaacgataaaatatgtttgggtgaaagtaaaaacgacaaagaaacttttctgaaggaatataatttcaaactaaaaaatatttacgataacttttacacanaagaagcaatggaaatggctaanaaccaaaaagaagtagcacaattatcttataataagttagtagatcanataaacggaatatatcagtcaaaagaaatcataatcgatatcttcacacataattggcaaaaattccttgaaatataa

SEQ ID NO: 15874 - protein, 262 aa, Unknown
  Obtained from environmental sample
  DOMAIN (51)...(157): HD domain
  misc_feature (1)..(262): Xaa is any amino acid
MYCVLNWFVNMILTLIQKKIINCKGCENMNKSMYNIIENYMYECMKDAAHDPEHIFRVLYLSLSIASKITEKINFDILIASCLLHDIGREEQYRNQDICHAEIGGIMAKEFLLKNGWSEKDSDHVKNCISTHRFRGNNIPETIEAKILFDSDKLDAVGCLGISRTLMYMGIVGINLYELKNDKICLGESKNDKETFLKEYNFKLKNIYDNFYTXEAMEMAXNQKEVAQLSYNKLVDXINGIYQSKEIIIDIFTHNWQKFLEI

SEQ ID NO: 15875 - DNA, 858 bp, Unknown
  Obtained from environmental sample
  misc_feature (1)..(858): n is a, c, g, or t
atgcgccaactgttgcgccaggggcatctggatgaccgggacgtggaacttgaggtgcgcgaaaccccgacccagatcggcgtgctgaacatccccggcatggagcagatcggcggccagctcaaggacgccttcggcaagatgtttccgcagcgcgtccagcgccggacgatgaaggtgggagcggcctttcgccatcttcttgaagatgagtcctccaagctggtggacgaggacaagctgactgaggacgcccggcaaagggtggaacagatgggcattgtcttcattgacgaaattgacaaggtggcgagttcggcggaatacaaatcgtcggacgtgtcgcgggagggggtgcagcgcgatctcctgcccattgtggaaggcagcgcggtcaataccaagtacggcatggtgaacacggatcacatcctgttcatcgcggccggggcgtttcacatgagcaagccatcggatttgctgcccgaactccaggggcgttttcccctgcgggccgaactccaggccttgggcaaggaagaattttaccgcatcctgacggagccggacaacgccctgacccggcagtacatggcgcttttgggcacagaagacgtggcggtgagcttcaccgaggacgggctgcgcgagatcgccctttttgcggaagaggtgaacgcccaggcggaaaacatcggagcgcggcggctgcacaccatcatggagaaaatcctttcggacatatcctttgaagcgccggagcggagcggaaccaccatcgtcgtggacaaagccttcgtcgtcgcgcatctggaagatgtgcgccaggacaaggatctgcggcgctatatcctgtag

SEQ ID NO: 15876 - protein, 285 aa, Unknown
  Obtained from environmental sample
  DOMAIN (12)...(171): ATPase family associated with various cellular activities (AAA)
  misc_feature (1)..(285): Xaa is any amino acid
MRQLLRQGHLDDRDVELEVRETPTQIGVLNIPGMEQIGGQLKDAFGKMFPQRVQRRTMKVGAAFRHLLEDESSKLVDEDKLTEDARQRVEQMGIVFIDEIDKVASSAEYKSSDVSREGVQRDLLPIVEGSAVNTKYGMVNTDHILFIAAGAFHMSKPSDLLPELQGRFPLRAELQALGKEEFYRILTEPDNALTRQYMALLGTEDVAVSFTEDGLREIALFAEEVNAQAENIGARRLHTIMEKILSDISFEAPERSGTTIVVDKAFVVAHLEDVRQDKDLRRYIL

SEQ ID NO: 15877 - DNA, 846 bp, Unknown
  Obtained from environmental sample
  misc_feature (1)..(846): n is a, c, g, or t
ttgctggagcaggacccgggcattaccgacagaccggaagtaatcgataaatacggcgatgtgttttcacccaaaaaagaaaactgggaacccattaagggcgatgttgaattccgtgacgtgacattccgttacccggacggtcatgaaaatgtgcttgaacattttaatcttcatgtctcggcgggaacatacgttgccattgtaggtgaaaccggagcgggtaaatcgacaatcgtgaatcttgtctgccgtttttttgaacctacttcgggggaaatactcgtggacggaagggactaccgtgagcgcagtcagctttggcttcacagcgcgttcggttatgtactgcaaagccctcatcttttttcgggcactatcagggaaaacatccgctacggacggctggacgcaaccgacgaggaagttgaaagagccgcaaagattgttcacgccgacagcgttatctgcaaacttgaaaaaggttttgacacggaagcgggagaaggcggagacaggctttccacaggcgagaagcagcttatttcatttgcgcgggcggttctcgcagaccctaaaatctttattcttgacgaagcgacaagctcgattgatacggaaatggaaatgatgttacaggaagcgattcacacgcttttggaagggcgaacgagtttcgtcatcgcacacaggctttccacaatccgcaacgccgatgtaattcttgtaatccatgaaggcaaagtgattgagcgtggcactcactcgcagcttatagcgcataacggccactactgcgagctttacaatcgtcagtttgaggaagaaattgaagagaaactttga

SEQ ID NO: 15878 - protein, 281 aa, Unknown
  Obtained from environmental sample
  DOMAIN (63)...(247): ABC transporter
  misc_feature (1)..(281): Xaa is any amino acid
MLEQDPGITDRPEVIDKYGDVFSPKKENWEPIKGDVEFRDVTFRYPDGHENVLEHFNLHVSAGTYVAIVGETGAGKSTIVNLVCRFFEPTSGEILVDGRDYRERSQLWLHSAFGYVLQSPHLFSGTIRENIRYGRLDATDEEVERAAKIVHADSVICKLEKGFDTEAGEGGDRLSTGEKQLISFARAVLADPKIFILDEATSSIDTEMEMMLQEAIHTLLEGRTSFVIAHRLSTIRNADVILVIHEGKVIERGTHSQLIAHNGHYCELYNRQFEEEIEEKL

SEQ ID NO: 15879 - DNA, 435 bp, Unknown
  Obtained from environmental sample
  misc_feature (1)..(435): n is a, c, g, or t
ttggccgagtacagaaaaatcgcgaattctattgggttttctattatagattcttttgcaggctgtgcggcaggtgcaggtgcttcgggtgctggcgcaacaggtgcgggagtagctgcaacggtatcggcaggtgcaggtgcgactggttccgcaacaggaacagcagtgctatctgctaaaggtactggtgcggcaactgtgctgtctgctacgggtgctggcgcaggagcggcaacgggtgctggcacaggagcagcaacgggtgctggtgcaggagcagcaacgggtgctgtcgtaggagcagcaacgggtgctggcgcaggagcggcaacgggtgctggcgcaggagcagcaacgggtgctggcgcagcaggagcaactttaggtgctggtgcagctttaggtgctggagccgcaggtgcaggggtttga

SEQ ID NO: 15880 - protein, 144 aa, Unknown
  Obtained from environmental sample
  SIGNAL (1)...(30)
  misc_feature (1)..(144): Xaa is any amino acid
MAEYRKIANSIGFSIIDSFAGCAAGAGASGAGATGAGVAATVSAGAGATGSATGTAVLSAKGTGAATVLSATGAGAGAATGAGTGAATGAGAGAATGAVVGAATGAGAGAATGAGAGAATGAGAAGATLGAGAALGAGAAGAGV

SEQ ID NO: 15881 - DNA, 483 bp, Unknown
  Obtained from environmental sample
  misc_feature (1)..(483): n is a, c, g, or t
gtggatttctggggtattttaaggaaaaaggctggaggaattggggagaagacgctgtattatgaatatgagggagaatacaagccacttcgtttttgtgtgctacggaaaacaaaagaagcggaacaggccggccttgaagcgttgcggaagacacagatgagaaaatacgggaacaaagaattgagcaaggcacaaatggcatataaccgctatgtgataatcgtgacgtcaataacggatgtggctgctgagttgatccttgacttgtaccggcagcggtggcagatagagctggcattcaaacggttaaagtcgttatttaaataccatgagataccggttcatgttgaacagagtgcactggcatggttttacgggaaattgttattggcggctctttgtgaaacctgggttaacaaagggcgtttttccccctgtgcaggaaagcgatcccgaacaagagtggtctctgtggtgtga

SEQ ID NO: 15882 - protein, 160 aa, Unknown
  Obtained from environmental sample
  misc_feature (1)..(160): Xaa is any amino acid
MDFWGILRKKAGGIGEKTLYYEYEGEYKPLRFCVLRKTKEAEQAGLEALRKTQMRKYGNKELSKAQMAYNRYVIIVTSITDVAAELILDLYRQRWQIELAFKRLKSLFKYHEIPVHVEQSALAWFYGKLLLAALCETWVNKGRFSPCAGKRSRTRVVSVV

SEQ ID NO: 15883 - DNA, 804 bp, Unknown
  Obtained from environmental sample
  misc_feature (1)..(804): n is a, c, g, or t
gtgcttgctctggcgattttggtatttgtagtttttatgataggtaaaaatcaacgttggtttgtaaatgacaatcagtataagacctattttacgtccgcttcggggatcagccctaatatggcggttctgcataaagggtttaccatcggtcacgttaaaaaactctcgctttctgaagatgatcgcgtggaaataatttttactatatttgaggaatacgcgcacagggttacggaaggctccgtagttgaagtgcaggaaagcccgataggtcttggaagctcatttgttttttatcccggcaagggggaagaaataattccggatggaaacgttattcccgaagtaaactcccccgaggcaaaaccgtatatggcaaggggcttgaccgaaatcccaagagcaaacgacagcataggcaatattgtaaatcaggttaactcgatactcgaatctgttaacagagcgcttgtaggcgaaaacggcgaagactctattggacaaattgtcagcgatgtacaaggagttaccggaaacctgaatacaatgactactgaaattaccaatcagttaaagccgttgatagccaatcttgaaacgtttacggcgcaaatttccgatccaaaaggtccgttgtatgaagctcttacttctcttgccggaataattgaaaaccttaacaaaacaagcgaatttattcccgcccagcttcctcaaatcgccgtggctgtaaatgagcttaatatagttcttagacaagttcaggatgtattaacgtcgattgccaataatccgctttaa

SEQ ID NO: 15884 - protein, 267 aa, Unknown
  Obtained from environmental sample
  DOMAIN (23)...(102): mce related protein
  misc_feature (1)..(267): Xaa is any amino acid
MLALAILVFVVFMIGKNQRWFVNDNQYKTYFTSASGISPNMAVLHKGFTIGHVKKLSLSEDDRVEIIFTIFEEYAHRVTEGSVVEVQESPIGLGSSFVFYPGKGEEIIPDGNVIPEVNSPEAKPYMARGLTEIPRANDSIGNIVNQVNSILESVNRALVGENGEDSIGQIVSDVQGVTGNLNTMTTEITNQLKPLIANLETFTAQISDPKGPLYEALTSLAGIIENLNKTSEFIPAQLPQIAVAVNELNIVLRQVQDVLTSIANNPL

SEQ ID NO: 15885 - DNA, 354 bp, Unknown
  Obtained from environmental sample
  misc_feature (1)..(354): n is a, c, g, or t
atggcgctgtctataggccgtcgcgactacgtgacggcggccaaggcgctgggcgccggccacctgcggataattacgcgccacatactgcctcagacgatgtcctacgccatcgtgtcggcgacgctgtctgtgccggcgtacatacttggagagtcggcgctcagcctcatcgggcttggaatacaagacccgcacgcgtcttggggaaatcttctgagcgcggccatgaatctgtcgcagatacaactgcatccctggatattgctgcccggcgtgtttattttcctgacgattgtggcgtttaattttgtgggggatgggttgcgggacgctctggatccgaataggtaa

SEQ ID NO: 15886 - protein, 117 aa, Unknown
  Obtained from environmental sample
  misc_feature (1)..(117): Xaa is any amino acid
MALSIGRRDYVTAAKALGAGHLRIITRHILPQTMSYAIVSATLSVPAYILGESALSLIGLGIQDPHASWGNLLSAAMNLSQIQLHPWILLPGVFIFLTIVAFNFVGDGLRDALDPNR

SEQ ID NO: 15887 - DNA, 351 bp, Unknown
  Obtained from environmental sample
  misc_feature (1)..(351): n is a, c, g, or t
ttgagcgtttttcacttccgattcgtcacggcgagggaaagtttttacgccggacaaaaaactgtggaacgaatagaggcgcttggatgcgtcccatgccgttatgcaaatccgtcaacaggcgaggcgacgcaggagtttccctggaatccaaacggggctttgaacgccatcgccggactgtgtgatcccacgggccgcatcttcggcctgatgccgcatccggaagcctgcctatacccggaaaatcatccgcaatgggatttactaaagatgcgcggcgaactgccgaaagaaggtcaaggcctccttatgttccgcaacgccgtcgagcatctgcgcggaatctga

SEQ ID NO: 15888 - protein, 116 aa, Unknown
  Obtained from environmental sample
  misc_feature (1)..(116): Xaa is any amino acid
MSVFHFRFVTARESFYAGQKTVERIEALGCVPCRYANPSTGEATQEFPWNPNGALNAIAGLCDPTGRIFGLMPHPEACLYPENHPQWDLLKMRGELPKEGQGLLMFRNAVEHLRGI

SEQ ID NO: 15889 - DNA, 711 bp, Unknown
  Obtained from environmental sample
  misc_feature (1)..(711): n is a, c, g, or t
atgatggccgagcctggtttagggctgttttatgatatgccgagattttcggaagatatggatttttctctgttgcaagccgataaaaactttgacttgcaaaattactttccattcataagggaagagtttttgtctgtgggaaaaaccattgagattaccaaaaaagagaaacagcaaaatacgaatattgaatcggcttttttgaaagatacctctttgttttacgatgttaaatttcagatggaaagacaggtgaaaatcaaaattgaagtggataccttgccaccgctggattttgaaaccgaaaataaactgcttttgcagcctttttcctttaacactcgttgctttacattgccgtgcttgttcgcaggcaaggttcatgcgtttttgttcaggagttggaaaaagagagttaaagggcgagattggtttgattttgaatggtatgttaaaaataaaattccaatggatttaaagcattttttggcaagggcaaagcaatttggcgaccctgatggaaaaataaaaaatgaaaaaagtttgaaactagctcttgcgaaaagaataaaatccgttgatataaaagctgttaaaagcgatgttatgccttttttgaaaaatcctcaagatacagaaatttggagtgagaattattttttggagttggtggggcgggttttgtggaggttaggtgggtcaatatga

SEQ ID NO: 15890 - protein, 236 aa, Unknown
  Obtained from environmental sample
  misc_feature (1)..(236): Xaa is any amino acid
MMAEPGLGLFYDMPRFSEDMDFSLLQADKNFDLQNYFPFIREEFLSVGKTIEITKKEKQQNTNIESAFLKDTSLFYDVKFQMERQVKIKIEVDTLPPLDFETENKLLLQPFSFNTRCFTLPCLFAGKVHAFLFRSWKKRVKGRDWFDFEWYVKNKIPMDLKHFLARAKQFGDPDGKIKNEKSLKLALAKRIKSVDIKAVKSDVMPFLKNPQDTEIWSENYFLELVGRVLWRLGGSI

SEQ ID NO: 15891 - DNA, 603 bp, Unknown
  Obtained from environmental sample
  misc_feature (1)..(603): n is a, c, g, or t
gtggaccatggccaggccaaaggcacatttcatgcgggagctcgcggggctcgcggacgcggacctgaagcgggtggacgcggagggcctggcgacgaagctgaaggcgatctccgccgccgcgacggaccccctggccacggtcgcagggtcatgaaggtcacggcgcagaccatcctgcgctgggtcgccgagtacaggcaggggggcctggacgccctcaggccgaagccgaagaggccgaggccctcgaagctggacgccgcgcagaaggcggccgtgatcgcgtggctggagggggggcggaccgccgccggcgagcacgtccactggacgctggggcggctcagcgccgcggtgagggaggagttcggggtcgggatcagcggcaacgccctctgggtgtggctccgcaaggagggctggaggcagctggcccccaggccgaggcgccaccaggcggacgctgcggcgcagggggacttcaaaaaaaacgccggggatagcggccgccggccccggcgcggacgtgttcttcttcgacgaggcccgccctcggcaggaggtgggcgaggcgcggcgggcgccaggtggcggttgtga

SEQ ID NO: 15892 - protein, 200 aa, Unknown
  Obtained from environmental sample
  misc_feature (1)..(200): Xaa is any amino acid
MDHGQAKGTFHAGARGARGRGPEAGGRGGPGDEAEGDLRRRDGPPGHGRRVMKVTAQTILRWVAEYRQGGLDALRPKPKRPRPSKLDAAQKAAVIAWLEGGRTAAGEHVHWTLGRLSAAVREEFGVGISGNALWVWLRKEGWRQLAPRPRRHQADAAAQGDFKKNAGDSGRRPRRGRVLLRRGPPSAGGGRGAAGARWRL

SEQ ID NO: 15893 - DNA, 831 bp, Unknown
  Obtained from environmental sample
  misc_feature (1)..(831): n is a, c, g, or t
atgatcagggcgaccctgaaccaggtgtataacaacgcctggcagggcggtttattggccatgctcatcctgttgatattccttaggaatataaggggaaccattataatagggctttcagtccccatttccatactgcttacccttatgttcatggctatattcgggtttacccttaacctcctgaccatgaccgggcttattatgggcatgggtatgacgatggacagttccatagtcatactggaaaacgtccacaaataccgggaacgcggggcaaaagccgccattgccgccatactgggaagccgggagatgatgcgggcgattatcgcttccgcggcgacaaccctgtgcgttttcataccgctgatcatctataaaaacgatctcaaggaaatgggccagctttttaacgaccttatctttaccgtagtaatttccctgaccgcatccttattagtcgccattaccctggtgccgagtctctgcggcgcgatactgcccctgcaaacgcgcgtgcaaaaaccgcttaaaaacaggctactccgtaaaatagacgacgcgatggaggggtttttcaaagcactggaaaacagatacagtgatgcgcttgattactgcctgtcccaccggctgttaattgtaactctggtcgtccttgtcctggttttctcgctgctgcaattcagcggcatcgggatgaatatgtatacccgaatgcgcgttgatgacaatgtcaatatcaatgtggcgatgcctcagggaaccgccattgatgttaccgaaaacatgctgttcagactggaagagattgtaaacgcgaggtaa

SEQ ID NO: 15894 - protein, 276 aa, Unknown
  Obtained from environmental sample
  misc_feature (1)..(276): Xaa is any amino acid
MIRATLNQVYNNAWQGGLLAMLILLIFLRNIRGTIIIGLSVPISILLTLMFMAIFGFTLNLLTMTGLIMGMGMTMDSSIVILENVHKYRERGAKAAIAAILGSREMMRAIIASAATTLCVFIPLIIYKNDLKEMGQLFNDLIFTVVISLTASLLVAITLVPSLCGAILPLQTRVQKPLKNRLLRKIDDAMEGFFKALENRYSDALDYCLSHRLLIVTLVVLVLVFSLLQFSGIGMNMYTRMRVDDNVNINVAMPQGTAIDVTENMLFRLEEIVNAR

SEQ ID NO: 15895 - DNA, 606 bp, Unknown
  Obtained from environmental sample
  misc_feature (1)..(606): n is a, c, g, or t
atgggcagggttatgacggtattgtcggcggcggccgtgttggtcgggtcggcggcggcgcagcagacggggacgttcaccgacggcagggacgggcagacgtacaagacggtgaagattggcgaacagacttggatggcgcagaacctcaattataatacacctaacggctcttggagttgcggttctcggtgtaatgataacagtctatcctattgcgaaaaatacggcagactgtacaattgggaaatagcgaagacagtctgtcccgccggatggaagttgccggatacggcggattggaatagattggttgcgacggcgggtggatggaagactgcggctaagacgttgaaatcaaaaagcgggtggatagaaaacggtaatggtacggacgattacggattttcggccttgccgggcggctaccgctccggtgacggttgcggcagtgctggcatctacggtagctggtggacggccacggagttcgagagcaactacgcctactaccgagatatgcactgcgaccgcgattatgtgaacgaactcaacaccttcaagggcttcgggcactctgtccgttgcgtcgccgaccccccatga

SEQ ID NO: 15896 - protein, 201 aa, Unknown
  Obtained from environmental sample
  SIGNAL (1)...(20)
  misc_feature (1)..(201): Xaa is any amino acid
MGRVMTVLSAAAVLVGSAAAQQTGTFTDGRDGQTYKTVKIGEQTWMAQNLNYNTPNGSWSCGSRCNDNSLSYCEKYGRLYNWEIAKTVCPAGWKLPDTADWNRLVATAGGWKTAAKTLKSKSGWIENGNGTDDYGFSALPGGYRSGDGCGSAGIYGSWWTATEFESNYAYYRDMHCDRDYVNELNTFKGFGHSVRCVADPP

SEQ ID NO: 15897 - DNA, 444 bp, Unknown
  Obtained from environmental sample
  misc_feature (1)..(444): n is a, c, g, or t
atgacggcggtagcccttttattcgccacctacatggtaaagcccagccccttctgtcttctggacgaaattgacgccgctcttgacgagcaaaacgtcggacgttttgtccatctccttagcgagttcagcgacacgagccaattcattattatcactcataacaaaaaaaccacatcgggggcgggaacacttatcggcgtaaccatgcaggaatccggcataacaaaagtaattacagcgcggcttaaaaaaggagaactggatattacggacggaccgccgccccaaagtgaactgtgggacgctgatggtgagtttgaagaagaggatgttcaaccggaaaaaggcagacagcttcccgtcggtgttaatgacccaaaaaaagttacagaagcgcagttaagaccgattaggtctcgcacgggtggcgcaagtttataa

SEQ ID NO: 15898 - protein, 147 aa, Unknown
  Obtained from environmental sample
  DOMAIN (1)...(77): RecF/RecN/SMC N terminal domain
  misc_feature (1)..(147): Xaa is any amino acid
MTAVALLFATYMVKPSPFCLLDEIDAALDEQNVGRFVHLLSEFSDTSQFIIITHNKKTTSGAGTLIGVTMQESGITKVITARLKKGELDITDGPPPQSELWDADGEFEEEDVQPEKGRQLPVGVNDPKKVTEAQLRPIRSRTGGASL

SEQ ID NO: 15899 - DNA, 924 bp, Unknown
  Obtained from environmental sample
  misc_feature (1)..(924): n is a, c, g, or t
gtgacgtgtttaaaaaatgcgattttgtcctttgctggcagcttgacaaagcgccgaacagcaatgtcgtatgggaaaaagaaaaacccattggtaaaacgcgtacaccgtaacatagatcgttatatagaatggcataacggcaaaattgtccatatccagcactcaattgacataaccgatttgattacggcaaaagaacaggcggaacagagcagccgtttcaagagccaattcctttcgcgcatgagccatgaagtgcgcactcccatgaacgcgattctgggcattaccgaaatacagcttcagaatgaaacgcttccggacgatttaagaaaagcccttgataaaattttcaattccggctatttgctgcttggtatcatcaacgacatattggacttgtcaaaaatagacgccggcaaactggaactctctttggcggattatgacctgcctaaccttattaatgatacagtacccatcaccgttatgtattacgagcataagccgattgtatttaaaattcatgtagacgaaaacactccgttaacgctgttcggcgatgaattgcgcatcaaacaaattttaaacaacctgctgtctaacgcgtttaagtatacggataaaggcgaggtttcgctgtccattaacaccgaatattcatcgcagcaatcgacgcaggtaacgcttgtgttaaacgtagccgatacagggcatggaatgacgggcgaacaggttgataaactgtttgatgaatactcgaggtttaatttagaagccagccatacaacagaaggcacaggacttggtatgagcattacaaaacacctggtgcgcatgatgaacggggatatttttgtaaaagcgagccgggaaaggttcggtatttaccgtgcgttgcctcaggctcggccaatctga

SEQ ID NO: 15900 - protein, 307 aa, Unknown
  Obtained from environmental sample
  DOMAIN (75)...(141): His Kinase A (phosphoacceptor) domain
  misc_feature (1)..(307): Xaa is any amino acid
MTCLKNAILSFAGSLTKRRTAMSYGKKKNPLVKRVHRNIDRYIEWHNGKIVHIQHSIDITDLITAKEQAEQSSRFKSQFLSRMSHEVRTPMNAILGITEIQLQNETLPDDLRKALDKIFNSGYLLLGIINDILDLSKIDAGKLELSLADYDLPNLINDTVPITVMYYEHKPIVFKIHVDENTPLTLFGDELRIKQILNNLLSNAFKYTDKGEVSLSINTEYSSQQSTQVTLVLNVADTGHGMTGEQVDKLFDEYSRFNLEASHTTEGTGLGMSITKHLVRMMNGDIFVKASRERFGIYRALPQARPI

SEQ ID NO: 15901 - DNA, 366 bp, Unknown
  Obtained from environmental sample
  misc_feature (1)..(366): n is a, c, g, or t
ttgacatccggtatacacaacacttggatgagggcagtttgcggacgacttgaaatgcgttaccgctactcaaaggatattgtgtacaacaattttatttggcctaatgcaacagatgagcaaaaagcaacgatagaaaaattggcacagggcgttttggatgcaagggcgaaattccccgaaagctcgcttgcagatttatacgacccgttggctatgccgccggagttgcttaaagcacacagggagcttgacaaggcggtgatgaagttgtatgggtttgggaaagatgttagcgaggcggagattgtggcggagttgatggggaggtatcaagttttacttaaaaaggaggatttaacatga

SEQ ID NO: 15902 - protein, 121 aa, Unknown
  Obtained from environmental sample
  misc_feature (1)..(121): Xaa is any amino acid
MTSGIHNTWMRAVCGRLEMRYRYSKDIVYNNFIWPNATDEQKATIEKLAQGVLDARAKFPESSLADLYDPLAMPPELLKAHRELDKAVMKLYGFGKDVSEAEIVAELMGRYQVLLKKEDLT

SEQ ID NO: 15903 - DNA, 933 bp, Unknown
  Obtained from environmental sample
  misc_feature (1)..(933): n is a, c, g, or t
ttggccgaggggcttatagaccaccagatgaatttggaagcatcggacttgttcggttgctattatgcccgtttgccgcttacacaaagtgcgaagattgtgtgtgggaatgctctgcgagtcgattgggagagcgttgtgccgaaaggcgaattgagttatatactgggcaatccgccgtttgtgggtgcaaggcttatgtcttctgaacaaaaggaagatatgctgaatatatttagaacaaagttcaacggggttgggaatttggattatgttactgcctggtataaaagagccgctgattatgcttttggtacagatataaaatgtgcttttgtttccacgaattcaatatcacagggcgagcaagttgctcttttgtggaaaccgctttttgaggactgcaatgtaaggataaattttgcctataaatcttttatttggaacaacgaggctaaaggaaaggcggcagttcattgcgtgattgtgggatttaacgctccgcctgcggcggcacaccccgtcagttgcttcgcaactgccacccctctgggagaggggaatttggaagaggtggggaattggaagaagtttaatttgagagagttgccttttaatcctaagttgaaatcttttgcaaaggataataggaaagctgggtggttgcacgaaagtgttttttgggaaagaataaaaggaaagcagatttgcgggctggattttcacaggcagcagataatagggaactacatagtggattatttctcgccgataggcgggatagtgatagagatagacgggaaaagccacgaaacgaaaattgaatacgaccaagcaagagaaaactacctgaattcactcggcttaatccgtatccatatttctgcaaaaagtgtcctggcaaaatttgaacgcaggcatagaaaattttaa

SEQ ID NO: 15904 - protein, 310 aa, Unknown
  Obtained from environmental sample
  DOMAIN (207)...(308): Protein of unknown function (DUF559)
  misc_feature (1)..(310): Xaa is any amino acid
MAEGLIDHQMNLEASDLFGCYYARLPLTQSAKIVCGNALRVDWESVVPKGELSYILGNPPFVGARLMSSEQKEDMLNIFRTKFNGVGNLDYVTAWYKRAADYAFGTDIKCAFVSTNSISQGEQVALLWKPLFEDCNVRINFAYKSFIWNNEAKGKAAVHCVIVGFNAPPAAAHPVSCFATATPLGEGNLEEVGNWKKFNLRELPFNPKLKSFAKDNRKAGWLHESVFWERIKGKQICGLDFHRQQIIGNYIVDYFSPIGGIVIEIDGKSHETKIEYDQARENYLNSLGLIRIHISAKSVLAKFERRHRKF

SEQ ID NO: 15905 - DNA, 372 bp, Unknown
  Obtained from environmental sample
  misc_feature (1)..(372): n is a, c, g, or t
gtgcagattgccgtttcagcgtggactgccgaggcgcttaaaaacacaatgcctgccggcgttttttcccgccctaccgaatgtaataatcaagacaaggtaagcatgggaactattgccgcccgcgactgcgcgcgtgtcaacaaactcgcctcgcaggtaacggccgctctgttgttgtctgtttttcaagctgtcgatctgcggctgaaaaaaggcgaactaaaaatgaacgacttaggacagacggaaacaacatacaaagaaatagccgcatatttcaaaccgctggaagatgaccgtccattagaagacgatctgcgtaaaacgttgaaattaatagaggaacggcactttagcctgaacccatga

SEQ ID NO: 15906 - protein, 123 aa, Unknown
  Obtained from environmental sample
  misc_feature (1)..(123): Xaa is any amino acid
MQIAVSAWTAEALKNTMPAGVFSRPTECNNQDKVSMGTIAARDCARVNKLASQVTAALLLSVFQAVDLRLKKGELKMNDLGQTETTYKEIAAYFKPLEDDRPLEDDLRKTLKLIEERHFSLNP

SEQ ID NO: 15907 - DNA, 411 bp, Unknown
  Obtained from environmental sample
  misc_feature (1)..(411): n is a, c, g, or t
atgaaaaagatttttttcgtagtttgcttagtattctttatcgcgggtttcgcagcggctcaagttggccccggcggaacattgtatgtgtcggttaaaaccacggacttaaagtcatcggcgggtaaaaaaatggcaaccttaaattacggtgacaaggttacggtgacacaggtagacggtaaaaatgtggaagttaagagcgccacggatgccacattaatcggctgggcgccggcggcaaattttaccgcaaggaaaattgttaccggaagcacgtccacgacaacggcgaaagaagtcgccctggctggaaaaggttttaatcaggagattgaaaatacctacagttcacagggacaggttgatttcgccgatgtggataaaattgaagcgataacggcggaatga

SEQ ID NO: 15908 - protein, 136 aa, Unknown
  Obtained from environmental sample
  SIGNAL (1)...(20)
  misc_feature (1)..(136): Xaa is any amino acid
MKKIFFVVCLVFFIAGFAAAQVGPGGTLYVSVKTTDLKSSAGKKMATLNYGDKVTVTQVDGKNVEVKSATDATLIGWAPAANFTARKIVTGSTSTTTAKEVALAGKGFNQEIENTYSSQGQVDFADVDKIEAITAE

SEQ ID NO: 15909 - DNA, 912 bp, Unknown
  Obtained from environmental sample
  misc_feature (1)..(912): n is a, c, g, or t
gtgaagtggatcaactacataggcaacctgtctttcggtggattcgtggaccacaccggcggcgcgctcgtatgtaagggcgacccttcgctcaaccgtatcaccaagtacatccagcagatgccttcctccgacttcaagggcgagactctgtatataaggataaagaaagagggcgcttacaaggtcttttcgcccttcttcgtgccgacgctcgacgggtacgactcctttgagtgccacgttgggctgggatacaacaagatcgtctcggtgttttacggcgtcaaaaccgagtgcacgatcttcatcccgcaggacgctcaggttgagatacgcgacatccgcgtgacaaacgtctccggagcgccgcttgagattgacgtcatcccggtgctggagtacacgcacccggacgcggtcaagcagttcacaaacgccgactgggtgccgcagaccatgcagtcgcgctgcttcaccaacagcgacggggtcaggacgctcgtccagtacccgttcatgttccgcgatataaaggtaaattacttcacctccaacgccgccgcttcctcctttgagaccgaccgccgggtatttttgggtgacaacgagtacggcacgtgggcggcgccgtgcgctttaaaggcagacgaactcggaaacaacgagatcctcaggggcgacaacatagccgcgctcatgcaccgcttggggacgcttgcgccccacgagagcaggcggatcatcacccaactgggccaaaaggagagtttggccgccgcgcagccggaaatagagcgctccngcaaccccgacgaggtagagaaagcctttcattcgctgaaagcgttttgggagcagtacctaaccgccctccagtccaaacgcccgacccggcgttcaacagcgtga

SEQ ID NO: 15910 - protein, 303 aa, Unknown
  Obtained from environmental sample
  DOMAIN (165)...(260): Glycosyltransferase 36 associated family
  misc_feature (1)..(303): Xaa is any amino acid
MKWINYIGNLSFGGFVDHTGGALVCKGDPSLNRITKYIQQMPSSDFKGETLYIRIKKEGAYKVFSPFFVPTLDGYDSFECHVGLGYNKIVSVFYGVKTECTIFIPQDAQVEIRDIRVTNVSGAPLEIDVIPVLEYTHPDAVKQFTNADWVPQTMQSRCFTNSDGVRTLVQYPFMFRDIKVNYFTSNAAASSFETDRRVFLGDNEYGTWAAPCALKADELGNNEILRGDNIAALMHRLGTLAPHESRRIITQLGQKESLAAAQPEIERSXNPDEVEKAFHSLKAFWEQYLTALQSKRPTRRSTA

SEQ ID NO: 15911 - DNA, 366 bp, Unknown
  Obtained from environmental sample
  misc_feature (1)..(366): n is a, c, g, or t
atgccccccacggcgtcctggaaaagaggtggaattcatcgacgcggcnttcggcatcatcggcctggagacggccctgcccctggccctgaactcacgcgttccgggctcataaccctctccaggctggcggaactcatgtcccttaacccggcccgcattctgggcgtgccgggcggcagtctggccccgggccggccggccgacataaccgtggtggatcccgacctccgcttcaccctggagccttccgaatccagatccctgagccgcaattcgcccttctggggtcggcccctgcaaggccgggctacccacaccatagtggacggccgggtggtctttgaactaaaacccggcgagtaa

SEQ ID NO: 15912 - protein, 121 aa, Unknown
  Obtained from environmental sample
  misc_feature (1)..(121): Xaa is any amino acid
MPPTASWKRGGIHRRGXRHHRPGDGPAPGPELTRSGLITLSRLAELMSLNPARILGVPGGSLAPGRPADITVVDPDLRFTLEPSESRSLSRNSPFWGRPLQGRATHTIVDGRVVFELKPGE

SEQ ID NO: 15913 - DNA, 798 bp, Unknown
  Obtained from environmental sample
  misc_feature (1)..(798): n is a, c, g, or t
ttgtgtgaactcttcccattgataaaagtcttcagtataatgcctcacatggattcacgaactacggctcattgggccgatgaaactgcggaaaaaatcattcgcgaaaaatcgctttctgatggcgcaaaggaacagtatacctgcgcgtcggggattactccgtcggggacggtgcatatcggcaacttcagggagatcatctcggttgatctggttgtccgcgctctgcgggatttgggcaaaaaggtgcgctttatttactcatgggacgattacgatgtatttcgcaaggttcccaaaaatatgccgaagcaggatgaacttgaaaaatatctgcgttttcccatcaccatggttcccgatccctgggagcgtgacgcaagttatgcccgtcatcatgaggttgatgtggaaagcaaactccccatcgtggggatttatcccgaatttctgtatcaggctgaacgttaccgctcttcgcgttacgcgcaaggaatacgcagggcgctggaacaccgtgacgcattgaaaaacatactcgataaattccgcgacgaagaacataaaattcagggcgagtggtggccggtcagcgtgttttgcggcgcgtgtaacaaagatgaaacggatgttgacggatgggacggcgaatggggattgcgataccattgtaacgcctgcggtcacgcggaaaccgcggacatacgcagtacgccgggtgttaagctcggctggcggattgactggcccatgcgctgggaatacgaaaaggttgattttgaaccggcggggtag

SEQ ID NO: 15914 - protein, 265 aa, Unknown
  Obtained from environmental sample
  DOMAIN (23)...(265): tRNA synthetases class I (K)
  misc_feature (1)..(265): Xaa is any amino acid
MCELFPLIKVFSIMPHMDSRTTAHWADETAEKIIREKSLSDGAKEQYTCASGITPSGTVHIGNFREIISVDLVVRALRDLGKKVRFIYSWDDYDVFRKVPKNMPKQDELEKYLRFPITMVPDPWERDASYARHHEVDVESKLPIVGIYPEFLYQAERYRSSRYAQGIRRALEHRDALKNILDKFRDEEHKIQGEWWPVSVFCGACNKDETDVDGWDGEWGLRYHCNACGHAETADIRSTPGVKLGWRIDWPMRWEYEKVDFEPAG

SEQ ID NO: 15915 - DNA, 348 bp, Unknown
  Obtained from environmental sample
  misc_feature (1)..(348): n is a, c, g, or t
ttggtttatttgtatctggaaaataacagtaaaaaagtattgaaagaagtatttgacagattttcaacggaaataccgggtgattttgacaaaaccatcgttcccataaatctggcaagcagcgatgatttggtatcgcgttcacaggcaaggcggattttaagcggtcttgaattgtttaaggaagtcataatggacttcaaggatattaaaagcataggacaggctttcgcggatgaaattttccgcgtttttcccaatatgaatccggataccgaaataatcgcaaaaaacgcaaatgatgaagttcaatatatgatcaatcgcgcaatttatacaaaattgtga

SEQ ID NO: 15916 - protein, 115 aa, Unknown
  Obtained from environmental sample
  misc_feature (1)..(115): Xaa is any amino acid
MVYLYLENNSKKVLKEVFDRFSTEIPGDFDKTIVPINLASSDDLVSRSQARRILSGLELFKEVIMDFKDIKSIGQAFADEIFRVFPNMNPDTEIIAKNANDEVQYMINRAIYTKL

SEQ ID NO: 15917 - DNA, 390 bp, Unknown
  Obtained from environmental sample
  misc_feature (1)..(390): n is a, c, g, or t
ttggccgagtccctaaaacgttctcacaaatttgaagcgattgattcaagcgtcacgactgtcgcgcaacaggaagaaaacatacgaaactcgatggaagaacagggtattggaagcaagcagatacttgaaggctccggcagattgaacgagataacccgtcaggtaaaagacggctccaatgaaatgcacgagggcgccaaggaagttatccgtgaaagcgaaagccttgacaaagctaccgctgaaattacattaggcatgaacgaaatggccgccggagcgaatcatatcaactcggcggtaaaccatgtcaacgagataagcggcaggaaccgcgaagccattaatgtcgtgataaaggaagtctcgcggtttaaggtagactga

SEQ ID NO: 15918 - protein, 129 aa, Unknown
  Obtained from environmental sample
  misc_feature (1)..(129): Xaa is any amino acid
MAESLKRSHKFEAIDSSVTTVAQQEENIRNSMEEQGIGSKQILEGSGRLNEITRQVKDGSNEMHEGAKEVIRESESLDKATAEITLGMNEMAAGANHINSAVNHVNEISGRNREAINVVIKEVSRFKVD

SEQ ID NO: 15919 - DNA, 555 bp, Unknown
  Obtained from environmental sample
  misc_feature (1)..(555): n is a, c, g, or t
atgggcgttttctcgcagcttcgaaagaggagggcttttccaccccagggcatagatccaccgaaagatgccgtccgttacgtgacacagaccctcggcatccccgcccagcaaagctattccccgactcccgactcccaactcccaactcacagctataatgtaatatccctctggtatgtcattgaacatttccgtgactgcgttcccgcgctggcggaaatacggaaactgcttaaacccggcggagtgttggcttttgcgacgccttcatttgccggggtttcaggccgcgcttctctgaaacgctttcttgaaaatagccctcaggatcactggactgtctggtctccggcggtaacccgaaaagccctggaaaaagcaggttttaaggtaaaaaaaatcattagcagcggacaccatcctgaacgcttcccgtttgtaggaaaattcgcgcatgacaagaattcgcttttgtacaggctgttgatggcggtaagcaggattttctcgctaggtgacacaattgaggtttacgccgtcagtctaccttaa

SEQ ID NO: 15920 - protein, 184 aa, Unknown
  Obtained from environmental sample
  misc_feature (1)..(184): Xaa is any amino acid
MGVFSQLRKRRAFPPQGIDPPKDAVRYVTQTLGIPAQQSYSPTPDSQLPTHSYNVISLWYVIEHFRDCVPALAEIRKLLKPGGVLAFATPSFAGVSGRASLKRFLENSPQDHWTVWSPAVTRKALEKAGFKVKKIISSGHHPERFPFVGKFAHDKNSLLYRLLMAVSRIFSLGDTIEVYAVSLP

SEQ ID NO: 15921 - DNA, 897 bp, Unknown
  Obtained from environmental sample
  misc_feature (1)..(897): n is a, c, g, or t
ttgtatgttgacagcaatcatgacgcaaacgccgaccgcgtcaaccgccgcatcgaccccataaagcgcgtacaactctccgcccgtatagcccagcagtttttggagtacgagtacaaccgccccagcgtctggagcgaggaggcggcgcggtgggggcggcacggtatcgacgcgaagtggctgtcggggaaggagtattttgagggacgcgagcacgaggcttggcagatggacttgtaccgccgggcaagcaagtgcctctcaacgagcgcgtcgccgcgatacaccacgttgccgcacctgtatagggacaagcgcaatgagtgcgccaaaaataagcgtccgtggtgcgacgctggttccaaccgtcaaataatcctcttcggcgtatctaagataagccacttccaccgcaacacgctggtcgagatatcgcagtcggcggggatagatatgcacgtattcttgacaaacccgtgcgccgaattctgggaggacgtggacacgagccgacggacgcgcgcgccgcgcagacggtggaggagcgactcgccgtcagaggtcgccgggataacgccggttaagccggaggattacgacaaggacagactcgacagattcgcggacgacgaagaccacgcgcttttgaagctgtggggggcggcgggaaaagaaaatatcttcttgtggtgcccgcaggcgcagtggaattttgaatattacgacgggatcgacgacnacgatacggggatttcaaacgcaacaaccgaacaaacacgacgctgctccacgcgatccaaaatctctgctgtcccgtacagcaaatggattcatcacacatcatcgcaaaaaataaagaccgctcactgcaaattttgggctgtcccgatctaa

SEQ ID NO: 15922 - protein, 298 aa, Unknown
  Obtained from environmental sample
  misc_feature (1)..(298): Xaa is any amino acid
MYVDSNHDANADRVNRRIDPIKRVQLSARIAQQFLEYEYNRPSVWSEEAARWGRHGIDAKWLSGKEYFEGREHEAWQMDLYRRASKCLSTSASPRYTTLPHLYRDKRNECAKNKRPWCDAGSNRQIILFGVSKISHFHRNTLVEISQSAGIDMHVFLTNPCAEFWEDVDTSRRTRAPRRRWRSDSPSEVAGITPVKPEDYDKDRLDRFADDEDHALLKLWGAAGKENIFLWCPQAQWNFEYYDGIDDXDTGISNATTEQTRRCSTRSKISAVPYSKWIHHTSSQKIKTAHCKFWAVPI

SEQ ID NO: 15923 - DNA, 747 bp, Unknown
  Obtained from environmental sample
  misc_feature (1)..(747): n is a, c, g, or t
ttgctgtattgcatggacacggactgtaaatttataaactgcaaccgcagttacgaggaatttacggggtttcgcgaaaggaatgtaatcgggaaaacggatcttgaaatctacgcgaatatacttgatcccgccactgcccagggctttatggaagtaaacaaaaaggtaatcagggaaataataaccgtaacgaaggaagaaacccatattcgcccggataaatccataattattcttaaggcgacaaagactcccctgttacaaaaaggaaaaattatagggctgctgggaatttccagggatattacggagtacagggcggcggaagaagccgccaaagccgcatccagggcaaaaagcggctttctcgcgaaaatgagccatgagatacgcacccccatgaacgcgataataggcatggcggaacttgccctgcgcacgaaagatataaacacggcccatgaacatttaataaccattaaacaggcgggggcaaacctcatctcaatcattaatgacatcctggacttttcaaaaatcgaaaccggaaaactggaaattgttccgggggattatttattttcatccatgattaacgacgtgatcaatattataaggatgagggtcattgatacgcangttcatttattggtaaatattgacagtaaaattcccgacgcgctgacaggcgatgaaatacgcgtccgccaggtattgctcaatattttggggcaatgccgttaa

SEQ ID NO: 15924 - protein, 248 aa, Unknown
  Obtained from environmental sample
  DOMAIN (11)...(106): PAS fold
  misc_feature (1)..(248): Xaa is any amino acid
MLYCMDTDCKFINCNRSYEEFTGFRERNVIGKTDLEIYANILDPATAQGFMEVNKKVIREIITVTKEETHIRPDKSIIILKATKTPLLQKGKIIGLLGISRDITEYRAAEEAAKAASRAKSGFLAKMSHEIRTPMNAIIGMAELALRTKDINTAHEHLITIKQAGANLISIINDILDFSKIETGKLEIVPGDYLFSSMINDVINIIRMRVIDTXVHLLVNIDSKIPDALTGDEIRVRQVLLNILGQCR

SEQ ID NO: 15925 - DNA, 597 bp, Unknown
  Obtained from environmental sample
  misc_feature (1)..(597): n is a, c, g, or t
atgagagggattttgcagataccccgcttttgggaaggaaaggaagtcgctgtgcttggggcggcaaatgtcgctatggatgccgctagggtatctgtgcgcttgggtgcaaaggtccgcataatttaccgcagaacagcaagagaaatgccagcaagggcagaggaaattcaccacgctatggaagaaggggttgagttttgctacctgcaaaaccccagcgaaattctaggcgatgaaaaaggttttgtgcacgctttgaagattgaacgctacgagctaggcgagccagatgataaaggcaggccacgccccgtgaagctggaaggggaatcttttgagcttccagtggacacggttttggttgccatagggaattcctccaatccgctcataagccaaggaatgcccgaattgaaggtgaataaaagaggcaatatagagcttttgaacccagagacaaatgccacttatgttgaaggggtttttgcaggcggcgatattgtgcttggagcggcaacggtgatactcgctatgggtgaaggcaggcgagccgctaagggaattttactatatttaaacaaacaacctaattag

SEQ ID NO: 15926 - protein, 198 aa, Unknown
  Obtained from environmental sample
  DOMAIN (15)...(125): Pyridine nucleotide-disulphide oxidoreductase
  misc_feature (1)..(198): Xaa is any amino acid
MRGILQIPRFWEGKEVAVLGAANVAMDAARVSVRLGAKVRIIYRRTAREMPARAEEIHHAMEEGVEFCYLQNPSEILGDEKGFVHALKIERYELGEPDDKGRPRPVKLEGESFELPVDTVLVAIGNSSNPLISQGMPELKVNKRGNIELLNPETNATYVEGVFAGGDIVLGAATVILAMGEGRRAAKGILLYLNKQPN

SEQ ID NO: 15927 - DNA, 795 bp, Unknown
  Obtained from environmental sample
  misc_feature (1)..(795): n is a, c, g, or t
atgtgggcaattattttattatccgcgtttattttaattctgattatttccaatgtcaggattgtatcccaatccaacgcgtttgtaattgagcgtcttggcgcttacaacgctacatggagtaccggcattcacgtgaaattgccgtttcttgaccgtatcgctagtaaggtttcgcttaaggaacaggttgccgatttcgcgccccagcccgtaattacaaaagacaatgttaccatgatgatcgacaccgtaatttatatgcagataacggatcccaaactgtacacttacggcgttataaaccccatgagcgccattgaaaaccttaccagcaccacattacgcaatataatcggagagttggaactggatgagacccttacaagccgcgacatgatcaatacgcgtatgcgtacggtacttgacgaggctaccgacccctggggtatcaaagtaaaccgcgtggaagttaaaaacatcgccccgcctaagagtattcaggaagcgatggaaaagcagatgagagccgaacgtgaaagaagggaatcaatcctgaaagccgaaggcgaaaaacagtccgccattcttgtcgccgaaggacagaaagcgtccgccattttaaaagccgaggcggaaaaagccgccgttatcctacaggcggaagccgcgaaagaagcgcaaatccgcgaagccgaaagagaggcgcaagctattctaaacgtgcagaaagccaccatggaaggtcttaatatgataaagagcgtaaaccgcgacgatcctcttataaactga

SEQ ID NO: 15928 - protein, 264 aa, Unknown
  Obtained from environmental sample
  SIGNAL (1)...(27)
  DOMAIN (18)...(192): SPFH domain / Band 7 family
  misc_feature (1)..(264): Xaa is any amino acid
MWAIILLSAFILILIISNVRIVSQSNAFVIERLGAYNATWSTGIHVKLPFLDRIASKVSLKEQVADFAPQPVITKDNVTMMIDTVIYMQITDPKLYTYGVINPMSAIENLTSTTLRNIIGELELDETLTSRDMINTRMRTVLDEATDPWGIKVNRVEVKNIAPPKSIQEAMEKQMRAERERRESILKAEGEKQSAILVAEGQKASAILKAEAEKAAVILQAEAAKEAQIREAEREAQAILNVQKATMEGLNMIKSVNRDDPLIN

SEQ ID NO: 15929 - DNA, 321 bp, Unknown
  Obtained from environmental sample
  misc_feature (1)..(321): n is a, c, g, or t
gtgaatttttccgccattgattttatttttgtcggattaatagggctttttatgatccgttgtttcctgaaaggctttgtaagcgaactattatccatggcggccgtggtgctcgggcttcttaccgcgttatttttacataaaaacggcggcgagtttttaagaaatcaattctggcacgggttaaaaataattcctgaaatcgcggcgtttattattctgtttgtatttgtttttttagtcgttaaaataatagaaaaaatgctggtaaatataattgaaagagtgagcctatcaggcgcggatgctcggccaatctga

SEQ ID NO: 15930 - protein, 106 aa, Unknown
  Obtained from environmental sample
  misc_feature (1)..(106): Xaa is any amino acid
MNFSAIDFIFVGLIGLFMIRCFLKGFVSELLSMAAVVLGLLTALFLHKNGGEFLRNQFWHGLKIIPEIAAFIILFVFVFLVVKIIEKMLVNIIERVSLSGADARPI

SEQ ID NO: 15931 - DNA, 546 bp, Unknown
  Obtained from environmental sample
  misc_feature (1)..(546): n is a, c, g, or t
ttgaagaaggcgggaggattctttctggttcttggaggcagtcaaggagccgtcgaaattaacgaacttattcgcgccgtcttgccggaactgactcaaatttacaccgttgtacatcaaacgggcccgaaccttacatgggatgttcccgaaagtaaaaggtacaaaccttttccgtacattaaagatgaaatgccgcacgtaatggcggcggcggagcttgttatgggtagaagcggcgccggtatttgggaatgggctgtacttggaaagccgatgttgttaattccgttaagaggttccggcacaaggggcgatcaggtacagaacgcggaatattttcaaaaaaagggagccgcacaggtgttaggtgaaaagacaacaccgtgggcgttaataaacgcggttaattctttagctctggacggggaaaaaagaaaaaacatgtccgccgcctccgctaaaataggcgagcgggacggcgctataattatcgcccgcgctcttgcggacgatatcgcgcggcgtttcggaggaatgaggtga

SEQ ID NO: 15932 - protein, 181 aa, Unknown
  Obtained from environmental sample
  SIGNAL (1)...(16)
  DOMAIN (7)...(165): Glycosyltransferase family 28 C-terminal domain
  misc_feature (1)..(181): Xaa is any amino acid
MKKAGGFFLVLGGSQGAVEINELIRAVLPELTQIYTVVHQTGPNLTWDVPESKRYKPFPYIKDEMPHVMAAAELVMGRSGAGIWEWAVLGKPMLLIPLRGSGTRGDQVQNAEYFQKKGAAQVLGEKTTPWALINAVNSLALDGEKRKNMSAASAKIGERDGAIIIARALADDIARRFGGMR

SEQ ID NO: 15933 - DNA, 786 bp, Unknown
  Obtained from environmental sample
  misc_feature (1)..(786): n is a, c, g, or t
atggtagaggacgcggaaaaaaacggaaagctggataaggatacggtaattatcgaaccgacttccggcaatacgggaataggattggcatttgtcgccgcttcgcgcgggtacaagcttatccttaccatgccggacaccatgagcgttgaaaggcgcaacttgttaaaagcgcttaacgcggagcttgtgcttactcccggcaaggacggtatgaagggcgcaatcagaaaagccgaggagctttcgctcttttttgaaaaatcttttatccctcagcagtttaacaatcccgctaacgcccgcgttcaccgcgagaccaccgccgttgaaatctggaacgatttggacggagagcttgacgtatttgtggctggcgtcggaacaggcggcactattacgggcgtcggcgaagttttaaaagaaaaaaatcccaagataaaaattgtagccgtggagccttttgactcccccgtactttctggcggcgttccgggaccgcacaagattcaaggcatcggcgcgggattcattccgaatgtactgaacacaaaagtaatagatgaagtatttaaagtaagaacggaacaagcctttgaaaccgcgcaggacttggcgaggacggaagggcttttagtcggcatatcttcggcggcggcggctttcgccggagcggagattgcaaaacgttcggaatacaaaggcaagaccgttgtggctctgctgcccgacacgggagaaagatacctttccaccccgttgtttgacagacccgcagcaatataa

SEQ ID NO: 15934 - protein, 261 aa, Unknown
  Obtained from environmental sample
  DOMAIN (1)...(245): Pyridoxal-phosphate dependent enzyme
  misc_feature (1)..(261): Xaa is any amino acid
MVEDAEKNGKLDKDTVIIEPTSGNTGIGLAFVAASRGYKLILTMPDTMSVERRNLLKALNAELVLTPGKDGMKGAIRKAEELSLFFEKSFIPQQFNNPANARVHRETTAVEIWNDLDGELDVFVAGVGTGGTITGVGEVLKEKNPKIKIVAVEPFDSPVLSGGVPGPHKIQGIGAGFIPNVLNTKVIDEVFKVRTEQAFETAQDLARTEGLLVGISSAAAAFAGAEIAKRSEYKGKTVVALLPDTGERYLSTPLFDRPAAI

SEQ ID NO: 15935 - DNA, 339 bp, Unknown
  Obtained from environmental sample
  misc_feature (1)..(339): n is a, c, g, or t
atggctatagcaaatgatattggctatgatgctgtgtttgaatttcagctgcgtggcaaaatgaaacagggcgatcttgtaattggaatttctggaagcggtaattctaccaatgttttgaatgcaattgaactagcaaaaaaagaaggaatttccacagccggattaacaggctatgatggtggcaaattgcgaaaacttgtggatattcccgtgcatgtgccaattatgagtatgcaagtgacagaagatattcatatgatttttgaccatttgatgatggcaattttttacaaggagctttgtggcaaaaatcacttgaaggagggatgtgcgtga

SEQ ID NO: 15936 - protein, 112 aa, Unknown
  Obtained from environmental sample
  misc_feature (1)..(112): Xaa is any amino acid
MAIANDIGYDAVFEFQLRGKMKQGDLVIGISGSGNSTNVLNAIELAKKEGISTAGLTGYDGGKLRKLVDIPVHVPIMSMQVTEDIHMIFDHLMMAIFYKELCGKNHLKEGCA

SEQ ID NO: 15937 - DNA, 567 bp, Unknown
  Obtained from environmental sample
  misc_feature (1)..(567): n is a, c, g, or t
ttgtggcaaaaatcacttgaaggagggatgtgcgtgataattgtgaaaacacctatgcgagtaagtttttgcggtgggggttcggatttgcccgtattttacgaaaaacacggcggttcggttctctctgcggggttgtctagatatatgtacttgtctatacacccgtattttcatccagataaattggtttgcaaatattcgcggaatgaaattgtgagcgagccttctcaacttgaacatcccatttttcgtgttttgctcgaacaatttggaataaatggagttgaaatcacttcaacggctgatgttccggctggaacagggcttggatcatctagttcttttacggtgtgtttgctccacacgctatatgcatatatgggcaagtatgtttctccgggcaaactcgcggcagaagcttgccacacggaaattaatctgctaggcgagcctataggcaagcaagaccaatatgcggcggcttatggcggtttacatgtttataatttaaaaaagacggtcatgtggatgttgaacctgttattatgtctaacgaggctatga

SEQ ID NO: 15938 - protein, 188 aa, Unknown
  Obtained from environmental sample
  DOMAIN (97)...(165): GHMP kinases N terminal domain
  misc_feature (1)..(188): Xaa is any amino acid
MWQKSLEGGMCVIIVKTPMRVSFCGGGSDLPVFYEKHGGSVLSAGLSRYMYLSIHPYFHPDKLVCKYSRNEIVSEPSQLEHPIFRVLLEQFGINGVEITSTADVPAGTGLGSSSSFTVCLLHTLYAYMGKYVSPGKLAAEACHTEINLLGEPIGKQDQYAAAYGGLHVYNLKKTVMWMLNLLLCLTRL

SEQ ID NO: 15939 - DNA, 474 bp, Unknown
  Obtained from environmental sample
  misc_feature (1)..(474): n is a, c, g, or t
ttgtatggcatcttcaaaatccaactgcgaatatatccgccggcggcttgccacgcaaactatcggtcccgacaaattaaaccaactgcgccacgcccgttttttaaagatacccgaggcgtaatggctcacatggaaaaacacgccgcaattctaaaaccgaaattccgtcttgtagccgaaactctgcgcaaagaattgggcggacttggtatcgccgaatggacagaaccggaaggcggctattttgtcagttttaacgctcccgacgggtgcgcgaaaagaattgtttctctctgcgctgaagccggcgtcgctctgactccggcgggagcgacataccccaacggaaaagatccaaatgacaaaaatatccgcatcgctcctacttgcccgcctattacggaacttgagaaggcgctggaaattttctgtaccgccgttaaacttgcggcggcggaaaaattgtcatag

SEQ ID NO: 15940 - protein, 157 aa, Unknown
  Obtained from environmental sample
  misc_feature (1)..(157): Xaa is any amino acid
MYGIFKIQLRIYPPAACHANYRSRQIKPTAPRPFFKDTRGVMAHMEKHAAILKPKFRLVAETLRKELGGLGIAEWTEPEGGYFVSFNAPDGCAKRIVSLCAEAGVALTPAGATYPNGKDPNDKNIRIAPTCPPITELEKALEIFCTAVKLAAAEKLS

SEQ ID NO: 15941 - DNA, 474 bp, Unknown
  Obtained from environmental sample
  misc_feature (1)..(474): n is a, c, g, or t
atgggcgacgagaccaacgccaacgccagacccgcgaccggcacntacgcgaaacgcctgccgtgggatcagtacttcatgcagatagccgtccaagtcgccacccgctccacctgcgacagaaagcacgtgggcgcggtcatagtccgcgataagaccatcctctccaccggctacaacggcagcgtgcgcggaatgccccactgcgacgacgtaggccatattatggaggactcccactgcatagccaccgtacacgccgaggccaacgccatcatacaggcggccaaaaacgggaccagaatagacggcgcagacatctacgtgacggcgtcgccctgctggaactgcttcaaactcatcgcgaacagcggtataaaacgcgttttctacttagaattctacagggacgagcgggtgctggaggtcgccgagacggcgggaattgaaatgagacaagtggctttgacttag

SEQ ID NO: 15942 - protein, 157 aa, Unknown
  Obtained from environmental sample
  DOMAIN (20)...(133): Cytidine and deoxycytidylate deaminase zinc-binding region
  misc_feature (1)..(157): Xaa is any amino acid
MGDETNANARPATGTYAKRLPWDQYFMQIAVQVATRSTCDRKHVGAVIVRDKTILSTGYNGSVRGMPHCDDVGHIMEDSHCIATVHAEANAIIQAAKNGTRIDGADIYVTASPCWNCFKLIANSGIKRVFYLEFYRDERVLEVAETAGIEMRQVALT

SEQ ID NO: 15943 - DNA, 792 bp, Unknown
  Obtained from environmental sample
  misc_feature (1)..(792): n is a, c, g, or t
ttgggagtgctgtattacaacatgggcgattatgccaaagcggaacgctattatcttgaggcgacagccatcagggaaaaggctctgggtaaggagcatcccgattatgcaatgtcgttaatcaatttgggagtgctgtattacaacatgggcgattatgccaaagcggaacgctattttcttgatgcgacagccatcagggaaaaggctctgggtaaggagcatcccgattatgcaatgtcgttaaacaatttgggagtgctgtattacaacatgggcgattatgccaaagcggaacgctattttcttgatgcgacagccatcagggaaaaggcgttaggtaaagagcatcccgattatgctgggtcgttaaacaacctaggaggactgtacgaacgtatcggcgattatgccagagcggaacgctattatcttgaggcgacagccatctttgaaaaggctctgggtaaggagcatcccaattatgcaatgtcgttaaacaatttgggatatctgtataacagcatgagcgattatgccaaagcggaacgctattatcttgaggcgacagccatcagggaaaaggctctgggaaaagagcatcccgattatgccacgtctctaaacaacatgggatttctgtattacagtatgggcgattatgcgaaagctgaacgctatatgctagaagcaaaagcaatcagggaaaaggcgcttggtaaagaacatccctactatgctttatcactggataatttatctaagctgtatttaagtaaaaaagaatactag

SEQ ID NO: 15944 - protein, 263 aa, Unknown
  Obtained from environmental sample
  DOMAIN (163)...(196): Tetratricopeptide repeat
  misc_feature (1)..(263): Xaa is any amino acid
MGVLYYNMGDYAKAERYYLEATAIREKALGKEHPDYAMSLINLGVLYYNMGDYAKAERYFLDATAIREKALGKEHPDYAMSLNNLGVLYYNMGDYAKAERYFLDATAIREKALGKEHPDYAGSLNNLGGLYERIGDYARAERYYLEATAIFEKALGKEHPNYAMSLNNLGYLYNSMSDYAKAERYYLEATAIREKALGKEHPDYATSLNNMGFLYYSMGDYAKAERYMLEAKAIREKALGKEHPYYALSLDNLSKLYLSKKEY

SEQ ID NO: 15945 - DNA, 810 bp, Unknown
  Obtained from environmental sample
  misc_feature (1)..(810): n is a, c, g, or t
atgaatgagctgaagaaaaatttcggcgcgattattgaggaacgctgttggaataccgatcgttttgtgcggggaatcaccgagcatgatcaagtagtgggtaagccggacgatccggaagccagcctttggctcaacccgcaaagctggtcaatcatcagcggatttgcctcacaaaagcgcggcgaggcgatcatggatctggtacaccaacagctcaacaccaaatacggagcgcggctcatggctccttcgtatcgccgccatgcctttgacggggcattggcgctattgttcaatccttctaccaaagaaaacggcgctatctttttgcagacccagggctggctgattttggctgaagccttgttaggccggggcgggcgggcttttgaatactatctggaaagctgccccgccgcgcagaaccctattgccgagacacgccttttggaaccctatgtgtattcccaatttaccgaaagcgttgacagcccctttgaaggccgcagccatgtgcattggctgaccggtacggcaagtaccgtcatggtcggctgtgtcgaagggatacttggattgcgccccgatattaacggcctgcgcctgtctccggcaattcccgcctcttggaaaaatttcaccatggaaaaaatattccgcggtaaaaaattgcgcatacaggtacagaatcctcaagggcgcgaaagcggctgccggaaattaatggtcaacggcgttgaaatgaaggataattacattccggcctcggtattaaaggcggacaatgaagttatgctggaaatgtaa

SEQ ID NO: 15946 - protein, 269 aa, Unknown
  Obtained from environmental sample
  misc_feature (1)..(269): Xaa is any amino acid
MNELKKNFGAIIEERCWNTDRFVRGITEHDQVVGKPDDPEASLWLNPQSWSIISGFASQKRGEAIMDLVHQQLNTKYGARLMAPSYRRHAFDGALALLFNPSTKENGAIFLQTQGWLILAEALLGRGGRAFEYYLESCPAAQNPIAETRLLEPYVYSQFTESVDSPFEGRSHVHWLTGTASTVMVGCVEGILGLRPDINGLRLSPAIPASWKNFTMEKIFRGKKLRIQVQNPQGRESGCRKLMVNGVEMKDNYIPASVLKADNEVMLEM

SEQ ID NO: 15947 - DNA, 891 bp, Unknown
  Obtained from environmental sample
  misc_feature (1)..(891): n is a, c, g, or t
ttggaaaatatcaaattaatgataggcgttgatatggtaggctggtataaaagaaaaggtagggttgaatatcaaggaagcggtacgatacaaaacggaaaagaacttattttaaatccagaaattattccatcaggactgaatgtggttgcaaaagattttgaacctattttaagcaataccgacacatggtctttcgcaatgaaaagaatcccaactttttttgcgcacacgggtaaggaaccagtttaccatacatacagagatgacgctgatttgatcgattatgacggtatggcattgataaccgaacatctgactaatttagtggaagttatttctcaggaagatagtttagaaccttcaggtaggttttcgcaaaaacacaagccacggcaactgatagaattgggagtttcggctaatgtgggatttgttaaccacccttttatttcaggcataaatgattacgaatcaggctggtcgtttggcgcgggctttataccgcagatcaattttggaattttcgctattcgtcccgaattggcttacgagcatatcctaatactgcatccatccggaacaatttccacaaataatataaccgttcctttaaaccttgttttacaaacccctganatgacatttttagggggagatatatttttcggaggatattattcgtgccgtttttacggtgaacagggcgggaaaacaatggattatgaaagcaccttcaatcgccatgagttcggattttattttggatttgatttattttttgagacatttaaatttgaatatgcatttcgaatacccttnacagattttgccccatcagccggatgttataatggaaatttacgaaatcgnctatgtatatttcattaa

SEQ ID NO: 15948 - protein, 296 aa, Unknown
  Obtained from environmental sample
  misc_feature (1)..(296): Xaa is any amino acid
MENIKLMIGVDMVGWYKRKGRVEYQGSGTIQNGKELILNPEIIPSGLNVVAKDFEPILSNTDTWSFAMKRIPTFFAHTGKEPVYHTYRDDADLIDYDGMALITEHLTNLVEVISQEDSLEPSGRFSQKHKPRQLIELGVSANVGFVNHPFISGINDYESGWSFGAGFIPQINFGIFAIRPELAYEHILILHPSGTISTNNITVPLNLVLQTPXMTFLGGDIFFGGYYSCRFYGEQGGKTMDYESTFNRHEFGFYFGFDLFFETFKFEYAFRIPXTDFAPSAGCYNGNLRNRLCIFH

SEQ ID NO: 15949 - DNA, 741 bp, Unknown
  Obtained from environmental sample
  misc_feature (1)..(741): n is a, c, g, or t
ttggcgccttgccgccaggaaataattatggtttacctttacgaaacacatctgcacaccagagaaggcagcagctgcggcgtttccagcgggcgggaatatatccaaaggtatctggatcttggctattcaggcattattatcacagatcatttttttaacgggaacacccgcgcgaatcgaaatcttccctggaaaaaatgggtgcaggaatattgccggggctatgaacttaccaaggacgaaggacttcgcaggggccttgatgtttttttcggttgggaagaaagtttggacggaaacgattatctgatttacggtcttgatatgcaatggctcctggcgcaccccgaagcagccgattggaagccgagagaacagtttgatgaagttacgcgcggcgggggctgcgtcgtcctggcgcatccttttaggtctgtgcaaaacataaatcgcatttctgattgcaacggatgttttcacgctgtggaagccgccaattcggggaacaaccaactctctgacgcgctggcctgggcatacgctaaaaaaataggagttcctgctaccgccggttccgatattcactacgccgctgatattcgatccgacacggcttttggcgtttatcttgacagaaaaatggaagcaataacagattacgttattgcggttctgaataacaatatagcgaagttaaaagtaccggccggacgttttgattttcacgatgactattag

SEQ ID NO: 15950 - protein, 246 aa, Unknown
  Obtained from environmental sample
  DOMAIN (14)...(199): PHP domain
  misc_feature (1)..(246): Xaa is any amino acid
MAPCRQEIIMVYLYETHLHTREGSSCGVSSGREYIQRYLDLGYSGIIITDHFFNGNTRANRNLPWKKWVQEYCRGYELTKDEGLRRGLDVFFGWEESLDGNDYLIYGLDMQWLLAHPEAADWKPREQFDEVTRGGGCVVLAHPFRSVQNINRISDCNGCFHAVEAANSGNNQLSDALAWAYAKKIGVPATAGSDIHYAADIRSDTAFGVYLDRKMEAITDYVIAVLNNNIAKLKVPAGRFDFHDDY

SEQ ID NO: 15951 - DNA, 507 bp, Unknown
  Obtained from environmental sample
  misc_feature (1)..(507): n is a, c, g, or t
ttgaagatagatattgcgaaaaatatggtctttgacccgaaaaaggcgatcagcttcgaaggcgacaccggcccgtatctgctgtacagctacgcgagggcgtcgtcgatactaaggaaagcggggcggtcgttgtcggttgatacttgtattgataataatcttgataataatgttgataaaccagtaggggcgaactgtgttcgcccgcccgttgacagatcgcaactgcccgagagctttgaggcggcggaggtcagattattaaaaaagattgcgttcttcccggaggcggtcggctttgcttataacagattatcgccgtcggttatcgcgaattacgcttttgatctggcgcagctgttcaacgagttctatcattcaagccaagtgatagggagcgggggagcggtggaaaagttcaggatcaacctcgtggcggcgttccggtcggtgattaggggttgcttggaattgatgggtatagaggcgattgaagagatgtaa

SEQ ID NO: 15952 - protein, 168 aa, Unknown
  Obtained from environmental sample
  DOMAIN (27)...(168): DALR anticodon binding domain
  misc_feature (1)..(168): Xaa is any amino acid
MKIDIAKNMVFDPKKAISFEGDTGPYLLYSYARASSILRKAGRSLSVDTCIDNNLDNNVDKPVGANCVRPPVDRSQLPESFEAAEVRLLKKIAFFPEAVGFAYNRLSPSVIANYAFDLAQLFNEFYHSSQVIGSGGAVEKFRINLVAAFRSVIRGCLELMGIEAIEEM

SEQ ID NO: 15953 - DNA, 651 bp, Unknown
  Obtained from environmental sample
  misc_feature (1)..(651): n is a, c, g, or t
atgttaaaaaaggacgcgcattcggaaaaaactgaacagaaaaatactcaaactgacgaggcttcggcggataattccgttgggaatcaagcggagacggaagtttcggggcaaagtgcggaaaaggacgcgacatctgccggtgaggcggctaaaacgcttacgccggaggaaaaaatcgccgaattggaggcgcaattggcggaaactcgtgaccagttactgcgaaaagcggcggattttgagaattttcgtaagcggatgaatcaggataagcaaaatgcgatagaatacgctaaccaaagtctgcttttggacataattcccgtaatcgatgactttgaacgcgctattcaatcgggggaaaagtccgccgatttaatcgcttttatcgaaggcgttaaaatgatcgaaaagcgactgacaaaccagcttgaaagcaaatgggggcttaaacgcttcagttccgcaggagagccttttgatccaaatatgcacgaggcccttatggtggaaaaatccccagatgtcaccgaagccgtggttcaggaggatttaattaggggctatcttttgaaagatagggtaattcgagcggcaaaggttaaggttttaatgccagaggcgacgcctacggtagctagtgaataa

SEQ ID NO: 15954 - protein, 216 aa, Unknown
  Obtained from environmental sample
  DOMAIN (44)...(206): GrpE
  misc_feature (1)..(216): Xaa is any amino acid
MLKKDAHSEKTEQKNTQTDEASADNSVGNQAETEVSGQSAEKDATSAGEAAKTLTPEEKIAELEAQLAETRDQLLRKAADFENFRKRMNQDKQNAIEYANQSLLLDIIPVIDDFERAIQSGEKSADLIAFIEGVKMIEKRLTNQLESKWGLKRFSSAGEPFDPNMHEALMVEKSPDVTEAVVQEDLIRGYLLKDRVIRAAKVKVLMPEATPTVASE

SEQ ID NO: 15955 - DNA, 825 bp, Unknown
  Obtained from environmental sample
  misc_feature (1)..(825): n is a, c, g, or t
atgcaggtaacagtgaagaaaattttgttttttgttttttgctttttgtttatttttttgccggttatggctcaggcgcaggagcaaagtcctcccccgccgcccgctccttttccttttaacccggcgcaggggacaacggcgctgcctacgccgccgccgccacctgccattccctttattgatttgaccgtgcgaaatccggcttcagggcaggaagtggctttctcccttcaactgctgttgctgctcaccgtgttgtcgcttgcgcccagcattatcatactgatgacgagttttctccgcatctccatcgtgctggacttcatcaaacgggcgctttcccttcaacaggttcccccgaaccaggtaatcatgggggtgtcgctgtttttgacggttcttataatgtggccgacattctcgacggtttacgaaaactccctgcgccctctctccgacgggcaaattaacgtggaaacagcctacaggaatgcggaaacccctttaaagatttttatgttcaaccagatgagaagcctcaggggagggctaagcagcggtgagagaaatatcgagatgtttatggcaatgcggggactgccaaggcccaataacctggcggagattcctacctatgtgctgatcccggcgtttatactgaacgaattaacggttgcgttcaaaataggaataatgctctttattccctttatcgtcattgacatggttgtggcaagcgcccttatgtctatgggtatgatcatgcttcccgcctgtatgatctcaatgccgtttaaattgatactatttattttgggttga

SEQ ID NO: 15956 - protein, 274 aa, Unknown
  Obtained from environmental sample
  SIGNAL (1)...(26)
  DOMAIN (83)...(273): FliP family
  misc_feature (1)..(274): Xaa is any amino acid
MQVTVKKILFFVFCFLFIFLPVMAQAQEQSPPPPPAPFPFNPAQGTTALPTPPPPPAIPFIDLTVRNPASGQEVAFSLQLLLLLTVLSLAPSIIILMTSFLRISIVLDFIKRALSLQQVPPNQVIMGVSLFLTVLIMWPTFSTVYENSLRPLSDGQINVETAYRNAETPLKIFMFNQMRSLRGGLSSGERNIEMFMAMRGLPRPNNLAEIPTYVLIPAFILNELTVAFKIGIMLFIPFIVIDMVVASALMSMGMIMLPACMISMPFKLILFILG

SEQ ID NO: 15957 - DNA, 522 bp, Unknown
  Obtained from environmental sample
  misc_feature (1)..(522): n is a, c, g, or t
atgatcagatcggccgaggatcttgcgtttgtgcggacagtgaggaatcctcggcaaaccgatgtcgtcgcaaggcgttggccccccatgatggaatacctcagcctgtttgccgccgccttcatcgcggccacgcttctgcccgcgcagtcggaactggcgctggccggcctgctggtgctgggcgaacagcccgcttgggcgctcatcgccgcggctacggcgggaaatgtgctggggtccggcacgaactggctgatcgggcgctattgcatgcgctttcaggacaaacgctggtttccggcgagcaaggcaagcctggacaaggcggctgcgtggtaccgcaaatacggacgctggtctttactcctgagttgggcgccggtcatcggcgacccgctgaccgtcattgcgggcgtattgcgcgaacccttcgcctcattttgctgtatcgtgcttgtcgccaaactgggccgctacctagtggtggcggctatcgccctgcaatggacaagccattag

SEQ ID NO: 15958 - protein, 173 aa, Unknown
  Obtained from environmental sample
  misc_feature (1)..(173): Xaa is any amino acid
MIRSAEDLAFVRTVRNPRQTDVVARRWPPMMEYLSLFAAAFIAATLLPAQSELALAGLLVLGEQPAWALIAAATAGNVLGSGTNWLIGRYCMRFQDKRWFPASKASLDKAAAWYRKYGRWSLLLSWAPVIGDPLTVIAGVLREPFASFCCIVLVAKLGRYLVVAAIALQWTSH

SEQ ID NO: 15959 - DNA, 414 bp, Unknown
  Obtained from environmental sample
  misc_feature (1)..(414): n is a, c, g, or t
gtgacgcgcggctacgccagtatggattatgatctgctcggccaccgccccgccgatctcgtgcgcctggatatccttcttaacggtgaagctgtggatgcgttggccgtcatcgtccaccgcgacaaggcgtattcctacgggcgcgcgctggcgctcaagctcaagcgcaccatttcgcgccagctttttgaaatcgccatccaggccgcgatcgggcaaaaggtcatcgcccgcgaaaccgtaaccgctttgcgcaaaaacgtaaccgccaaatgctatggcggcgacatcacccgcaagcgcaagctgctcgaaaagcaaaaggaaggcaaaaagcgcatgaagcgcatgggcaacgtggaattgccgcaggaagcctttttggccgcgttgcgggtgggggacgagtaa

SEQ ID NO: 15960 - protein, 137 aa, Unknown
  Obtained from environmental sample
  DOMAIN (27)...(135): GTP-binding protein LepA C-terminus
  misc_feature (1)..(137): Xaa is any amino acid
MTRGYASMDYDLLGHRPADLVRLDILLNGEAVDALAVIVHRDKAYSYGRALALKLKRTISRQLFEIAIQAAIGQKVIARETVTALRKNVTAKCYGGDITRKRKLLEKQKEGKKRMKRMGNVELPQEAFLAALRVGDE

SEQ ID NO: 15961 - DNA, 318 bp, Unknown
  Obtained from environmental sample
  misc_feature (1)..(318): n is a, c, g, or t
ttggtttccgctatcaaaaaaatcaggcaaaacaggcttcacggagcataccccatgtcattcgccctttacagggacgataaactggttgccggagaattcggagtaaaagttggaagggtctatacttcttattcggggtactatgatgaaaacaacgccggcacggttcagcttatacttgccgcccgctggctgcgggagaacggttttgacttttttgacctgggtatgcccatggattataaaaccgctcttggtgcaacggacattagcccggaagattttgtcgcattgttccgggcggctcagtattga

SEQ ID NO: 15962 - protein, 105 aa, Unknown
  Obtained from environmental sample
  DOMAIN (1)...(93): Leucyl/phenylalanyl-tRNA protein transferase
  misc_feature (1)..(105): Xaa is any amino acid
MVSAIKKIRQNRLHGAYPMSFALYRDDKLVAGEFGVKVGRVYTSYSGYYDENNAGTVQLILAARWLRENGFDFFDLGMPMDYKTALGATDISPEDFVALFRAAQY

SEQ ID NO: 15963 - DNA, 510 bp, Unknown
  Obtained from environmental sample
  misc_feature (1)..(510): n is a, c, g, or t
ttgataaaatacttaaagaggtataaaatggaaccggtacaagaattaatcaatctgataaaggctaatacaaaactcattcaaatagtgagttatgaaactttgcgaattcacgcgctattgcattatgccgcaaaagaattaaatagagagctttatatttgggatcgcgttaacgggattcgaaaatgggttgaacctgaagcggaagccagaggaaaatttattgatgaagaaaatgtctcagaaggtgagtttgcgcttgattttttcaaagaacaggaagatcttatatttcttttggaagattttcatccggatctggagaacaagactacaattagaaaacttagaaacattgcgttaaaggatgagcaaaataaaacattggtaatttctcagcctttcccgcttattccccgtgagttggaaaaagaaatgcacattttagaattgccttaccctgatactaaagctataaaagctatttatgagaaagtatgtaaatga

SEQ ID NO: 15964 - protein, 169 aa, Unknown
  Obtained from environmental sample
  misc_feature (1)..(169): Xaa is any amino acid
MIKYLKRYKMEPVQELINLIKANTKLIQIVSYETLRIHALLHYAAKELNRELYIWDRVNGIRKWVEPEAEARGKFIDEENVSEGEFALDFFKEQEDLIFLLEDFHPDLENKTTIRKLRNIALKDEQNKTLVISQPFPLIPRELEKEMHILELPYPDTKAIKAIYEKVCK

SEQ ID NO: 15965 - DNA, 516 bp, Unknown
  Obtained from environmental sample
  misc_feature (1)..(516): n is a, c, g, or t
gtggtacacaacggcgaaatatcctcttacgataccaaccgacgctcaattgaaatgtatggctataaatgctcgctccagaccgacaccgaagtaatcacctacataattgattatctgcacagaaaacatcagcttgccttcaaagaaatcgcttcggttatcgcggctccgttctggtcaactatcgggtgtatgaaaccggacgatctggagacccacgagtacctgcgcatcatgttcagcggacagctgattaccggcccgttttcaattcttgtgggctttgacggcggaatgatggcgttaaacgacaggcttaaactaaggagtatggtggtaggcgaaaaggacgagctggtttacatcgcaagcgaagaagcggctatccgcgtcattgaaccgaaccttgacacaatctgggcccccaggggcggccagcctgtgatcgtctttatgaatgggcgtgttccggattccggaccagccatatacagaggtgaagaatggcactga

SEQ ID NO: 15966 - protein, 171 aa, Unknown
  Obtained from environmental sample
  misc_feature (1)..(171): Xaa is any amino acid
MVHNGEISSYDTNRRSIEMYGYKCSLQTDTEVITYIIDYLHRKHQLAFKEIASVIAAPFWSTIGCMKPDDLETHEYLRIMFSGQLITGPFSILVGFDGGMMALNDRLKLRSMVVGEKDELVYIASEEAAIRVIEPNLDTIWAPRGGQPVIVFMNGRVPDSGPAIYRGEEWH

SEQ ID NO: 15967 - DNA, 591 bp, Unknown
  Obtained from environmental sample
  misc_feature (1)..(591): n is a, c, g, or t
atgttccgttccgccgacggctggtttggagataatacagactgcaccagtttttcgccggcaattctggcttcccttggcaaaaacaatcttaaatggaaaaaagttaccatcattggagcgggcggagtcgcgcgcgcggttgccgccgaagttttccgtttgggaggcaaagctcttattttgaaccgtaccattcacaaagccaaagacctcgcgtcacagtacgattttcgctgggggggactggacgaacacggaattgaattagtgtataaatattcggatattatcattcaggcaacagcggtcggaatgacaggatacgatgtttctgatcctttggaactctacagttttaccggaaaagagattgtgatggatttggtttattttcccgcgcagactccgtttttaacgcgcgccgaggcggccggatgcaaaaccatcaacggttacaatatggtaacgtatcaggcgtgccatcagtataaccaaataatggggagggatatttcccagcagcttttatcaagggttatcaatatagtgggagcaagttcatggaacaagattcgaacagaacaatga

SEQ ID NO: 15968 - protein, 196 aa, Unknown
  Obtained from environmental sample
  DOMAIN (22)...(139): Shikimate / quinate 5-dehydrogenase
  misc_feature (1)..(196): Xaa is any amino acid
MFRSADGWFGDNTDCTSFSPAILASLGKNNLKWKKVTIIGAGGVARAVAAEVFRLGGKALILNRTIHKAKDLASQYDFRWGGLDEHGIELVYKYSDIIIQATAVGMTGYDVSDPLELYSFTGKEIVMDLVYFPAQTPFLTRAEAAGCKTINGYNMVTYQACHQYNQIMGRDISQQLLSRVINIVGASSWNKIRTEQ

SEQ ID NO: 15969 - DNA, 819 bp, Unknown
  Obtained from environmental sample
  misc_feature (1)..(819): n is a, c, g, or t
atggacgagactcctgtacaggtcatttcggacataaagtcagcagaaattgaaagggaagacacgcatgaaagctatatgtggcttactctaggaggatcagccgaaaagaaagtagcatggtatgaatatcatcctacccgtgccggatatcacgcgaaggcgtttctggaaggatattcaggatatttacaaacagacgggtataaaggatatgacagcgcgttaaaagacatgcccggtataacccatgtaggatgtttcgctcatgcgagacggaagttttttgaagcggaaaaagcaaataagaattccaaatccgcgcaggaagggataaagcatattcgaaaactatatgatattgagaatgagttacgggataaaattgcggataacaatgacatgttcctatctgaacggaaagcccgcgccgggcctgtgcttgaaaagttcaaggcgtggcttgagaaacgaaaagaagaagtgcctccaagtttgctcttagggaaagcaatatactacagccttacccaatgggacaagatgacatcttatcttgaaagcccttatcttacgcctgacaacaacgcctgtgaaaacgcgatacgaccgtttgtgttaggccggaagaactggctgttttgtcagagtattggcggagttgaaagttcctgcggtatgtacacccttattgaaacggcaaaactaaacggtcttattccctttaattatctcatggctcttttcgaaaaggcaccgcttgcttcttcactcgatgactgggaaaagttgcttccttggaacatcttcactgcttaa

SEQ ID NO: 15970 - protein, 272 aa, Unknown
  Obtained from environmental sample
  misc_feature (1)..(272): Xaa is any amino acid
MDETPVQVISDIKSAEIEREDTHESYMWLTLGGSAEKKVAWYEYHPTRAGYHAKAFLEGYSGYLQTDGYKGYDSALKDMPGITHVGCFAHARRKFFEAEKANKNSKSAQEGIKHIRKLYDIENELRDKIADNNDMFLSERKARAGPVLEKFKAWLEKRKEEVPPSLLLGKAIYYSLTQWDKMTSYLESPYLTPDNNACENAIRPFVLGRKNWLFCQSIGGVESSCGMYTLIETAKLNGLIPFNYLMALFEKAPLASSLDDWEKLLPWNIFTA

SEQ ID NO: 15971 - DNA, 627 bp, Unknown
  Obtained from environmental sample
  misc_feature (1)..(627): n is a, c, g, or t
atgatcggagcttacggccacgacgaccgctgttgttcattccccgcgttgaaagcccttaacgcccttgcgcacgataaaacgccgccggagaaaaccgtgatttgttacctgtccgacaaggaagaaataggttccgccggaaacacgggcgcgcgctcttacaattttgaaaactttatctccctgttctgcggaagcgaagcggatttacggctttgttttcaacgctgcagtatgctgtccgccgacgttaacgccgcctttgaccccacctacgccggagtcttcgataaaaagaattcgtcgtttatgggcaagggattagtgcttacaaagtacacaggctcgggcggcaagtacggggcaagcgacgccaacgcggaattctgcgccaaggttcagtcaataatgaacaagaacaaggtacaatggcagttcggcgcgctgggtaaggtagacaagggcggcggcggaacaatcgcgctttacgccgccaatttgggaatggacgttcttgactgcggagttcccgtcctgtccatgcactctccgttcgaggttataagcaaggtcgatctttttacgacatacaagggatatatcgctttcttgaataacgcttaa

SEQ ID NO: 15972 - protein, 208 aa, Unknown
  Obtained from environmental sample
  DOMAIN (1)...(205): Aminopeptidase I zinc metalloprotease (M18)
  misc_feature (1)..(208): Xaa is any amino acid
MIGAYGHDDRCCSFPALKALNALAHDKTPPEKTVICYLSDKEEIGSAGNTGARSYNFENFISLFCGSEADLRLCFQRCSMLSADVNAAFDPTYAGVFDKKNSSFMGKGLVLTKYTGSGGKYGASDANAEFCAKVQSIMNKNKVQWQFGALGKVDKGGGGTIALYAANLGMDVLDCGVPVLSMHSPFEVISKVDLFTTYKGYIAFLNNA

SEQ ID NO: 15973 - DNA, 357 bp, Unknown
  Obtained from environmental sample
  misc_feature (1)..(357): n is a, c, g, or t
atgaagacccacaccacccgcggcaaagaaataatcggtgaatttggcgatgtaaatacatctatctatttaaaacattgtgaagatatctgctttggacaccatgaacgctgggacggcaagggttatccgcggcagttaaaggaagatgagataccgctgacagcacgccttgcagctgtagccgatgtatacgacgctcttgtctgcagccgggtctataaagatccgataccatacgacaaagcagtagatataatggcttccggaaaaggtacgcagttcgatcctatccttacagacgttatgctgcaaattcaggatcaatttaaggaaatttcgcaggagtataagtaa

SEQ ID NO: 15974 - protein, 118 aa, Unknown
  Obtained from environmental sample
  misc_feature (1)..(118): Xaa is any amino acid
MKTHTTRGKEIIGEFGDVNTSIYLKHCEDICFGHHERWDGKGYPRQLKEDEIPLTARLAAVADVYDALVCSRVYKDPIPYDKAVDIMASGKGTQFDPILTDVMLQIQDQFKEISQEYK

SEQ ID NO: 15975 - DNA, 402 bp, Unknown
  Obtained from environmental sample
  misc_feature (1)..(402): n is a, c, g, or t
atgagtgattatactgaaaagaaaaagatacttcttgtagatgatgatgaaatacagcacctaattattgaaaatatgctgaatgatgaatatgagatatttaaagcaaaatcaggaagtgaagcgttaaaatttttttataataacagcgttgtaattgatttggttttattggatatattaatgccggaaatagacggctgggaagtctttaacagaatgagggcattgagtttattaaaaaaagcgccaatggcttttattacctccataaatgaaccagcggaagaaaaaagggcctttgatatgggtgcggctgattttataaggaaaccgtacgaacgggaagattttgaaaacagaaataaaaatatatttgataaagcctccccggaagagtaa

SEQ ID NO: 15976 - protein, 133 aa, Unknown
  Obtained from environmental sample
  DOMAIN (8)...(123): Response regulator receiver domain
  misc_feature (1)..(133): Xaa is any amino acid
MSDYTEKKKILLVDDDEIQHLIIENMLNDEYEIFKAKSGSEALKFFYNNSVVIDLVLLDILMPEIDGWEVFNRMRALSLLKKAPMAFITSINEPAEEKRAFDMGAADFIRKPYEREDFENRNKNIFDKASPEE

SEQ ID NO: 15977 - DNA, 375 bp, Unknown
  Obtained from environmental sample
  misc_feature (1)..(375): n is a, c, g, or t
atgaccggggctgcggtagatcgccaggcgcttgttagccgcttccaaaccgatgacaatgttaaggcttttataatgactttaaagacagggggaatcggccttaaccttacagcggcggattacatttttataatggatccctggtggaacagcgccgccgaaaaccaggccattgaccgcgcccaccgtatcgggcagcagaaccccgtgttttgttatcggcttattgccagggatactatcgaggaacggatactggagcttcagaaacgaaagaccgatctggccggcgcgcttcttgccgatgatccgggggcacttaaggctttaagcccggaagatgtagcttaccttgttggagattctccgtga

SEQ ID NO: 15978 - protein, 124 aa, Unknown
  Obtained from environmental sample
  DOMAIN (1)...(66): Helicase conserved C-terminal domain
  misc_feature (1)..(124): Xaa is any amino acid
MTGAAVDRQALVSRFQTDDNVKAFIMTLKTGGIGLNLTAADYIFIMDPWWNSAAENQAIDRAHRIGQQNPVFCYRLIARDTIEERILELQKRKTDLAGALLADDPGALKALSPEDVAYLVGDSP

SEQ ID NO: 15979 - DNA, 834 bp, Unknown
  Obtained from environmental sample
  misc_feature (1)..(834): n is a, c, g, or t
ttggaagtcgcaaaagacggtcgtgtttttgacgccgataaactgacagaatacatcaaagtagacacaaagagattttctttttgcgaccctgattntgagagatccttaaaaataaaagctgatttgcttgatatagatggtgttgtctattcctgcgaggaatatgacgattttagggtatccggaatattgcgccatcatttgctggtaaaaccattatttaaagcatactgctatatttttgctgcgctaggcattttggaaattacacagcaaataccgccccttgtccttacaaaaacagcaaagcagtcgcccatttccccttacgattccctaaaaacaatccgcataacaaaattaggtctttggtgtctgggcctcgcttcagaaaaaccgcaaaaacctgttcacgaatatcaggcaattgccgacaaggagctgttcctggttacagttcagggagactctctggagcggacagtgtaccttaacaggataggcgttaaattgggtgaagatcgctggcgtataagcccggcttcctttatttcaggctgcgaatccaaaaagcagatagaggatcggattgccagatttaaggaactgatcgatccggcgccggccccccattggctagagctgtttgacagagcggttatccgggctggactgtttggctattaccgcaatgatgtgttggtgtacaatttaccagaagatcgaaaagtatcggaagagcttttattggattcgcagttaaaaggaatcgcttttcgggcagagggaggaatgcttatagttccttcaagaaaccaaaaaaggttttag

SEQ ID NO: 15980 - protein, 277 aa, Unknown
  Obtained from environmental sample
  misc_feature (1)..(277): Xaa is any amino acid
MEVAKDGRVFDADKLTEYIKVDTKRFSFCDPDXERSLKIKADLLDIDGVVYSCEEYDDFRVSGILRHHLLVKPLFKAYCYIFAALGILEITQQIPPLVLTKTAKQSPISPYDSLKTIRITKLGLWCLGLASEKPQKPVHEYQAIADKELFLVTVQGDSLERTVYLNRIGVKLGEDRWRISPASFISGCESKKQIEDRIARFKELIDPAPAPHWLELFDRAVIRAGLFGYYRNDVLVYNLPEDRKVSEELLLDSQLKGIAFRAEGGMLIVPSRNQKRF

SEQ ID NO: 15981 - DNA, 447 bp, Unknown
  Obtained from environmental sample
  misc_feature (1)..(447): n is a, c, g, or t
atggcggaaatcgacaaccagctccaaaggcgcagcgatctaattcccaattttgtaaacacagtcaaaggctacgccgcgcacgagcagcaggtttacagcgatattgcggacgcgcgttcccgccttgccggagcgaacacggtagaggaaaaagcggctggttacaatgatatgcagtccgcccttgcgcggttgttggtcgttgtagaacagtaccccgacctgaaggccaaccagaatttcatcgctctgcaggatgagctggccggcacagaaaaccgccttgctgtagcgcgcaaacgctacaacgacagcatcaccacctttaacgtgcgaatacgccagtttcccggctccattgtagcgggcaggatgggtttcgttccccatgcctattttgaaatagccgaaacagcgcgccaggttccgacggtacagttttag

SEQ ID NO: 15982 - protein, 148 aa, Unknown
  Obtained from environmental sample
  DOMAIN (1)...(148): LemA family
  misc_feature (1)..(148): Xaa is any amino acid
MAEIDNQLQRRSDLIPNFVNTVKGYAAHEQQVYSDIADARSRLAGANTVEEKAAGYNDMQSALARLLVVVEQYPDLKANQNFIALQDELAGTENRLAVARKRYNDSITTFNVRIRQFPGSIVAGRMGFVPHAYFEIAETARQVPTVQF

SEQ ID NO: 15983 - DNA, 507 bp, Unknown
  Obtained from environmental sample
  misc_feature (1)..(507): n is a, c, g, or t
gtgtttcgaactgaaatcgccgttgtttccgtccatgacttccctgtgaaccgcgccccgtggttcatatgggagggggcaaagtcataccttagcttgtgggaagggaatgaggaatttcaacggggtttgcggattgtacggaatggcggacagtatatttcaccgaaggttcaacgcctgattgaccattatgaggaatggcctgacacaaacagcgaaatgaccaaacggcagaaggaatgccttgtcatgctgtgctgcgggattatccctctccaaattggggaaatactgaatatatccaaaagaacggttgataaccatttgaacagcttatacagagcttttcatgtcggcagccgtgaagaaatggttgctcttgcatgggaaatggaactggtaactcccaaagatattcatttatacaacaggaaaaaagaacgcttgccgtttcctgaatgggcggaggtgaaacggaatatcgacaagttttatcttgattga

SEQ ID NO: 15984 - protein, 168 aa, Unknown
  Obtained from environmental sample
  DOMAIN (72)...(129): Bacterial regulatory proteins, luxR family
  misc_feature (1)..(168): Xaa is any amino acid
MFRTEIAVVSVHDFPVNRAPWFIWEGAKSYLSLWEGNEEFQRGLRIVRNGGQYISPKVQRLIDHYEEWPDTNSEMTKRQKECLVMLCCGIIPLQIGEILNISKRTVDNHLNSLYRAFHVGSREEMVALAWEMELVTPKDIHLYNRKKERLPFPEWAEVKRNIDKFYLD

SEQ ID NO: 15985 - DNA, 405 bp, Unknown
  Obtained from environmental sample
  misc_feature (1)..(405): n is a, c, g, or t
atgattatcgacaacacttctagcggtcagaccctgcgcgataacggcttaaaaataataggcactgttcttgaatcctccacccgttttgtcgcctctcattccgctcttgaaaacgaaatgaagcgcgatcgtattgaagaactcgcgatgctgtttcacgctgtccttcagggccgtgatcgtgtcatgctggaaatgaacatacctaaagattgctttaacgctgtggtgaacggccttccagcgatgcgaagcccgaccgtagcccctttgtttggcgatgaaggctacgccgttaaaatagcggtaaataaaaacgaagtttcaggcattatccctcgcctaaaaaaattgggcgctcttgatattctggaatatgacctcagaaaagtagtaccataa

SEQ ID NO: 15986 - protein, 134 aa, Unknown
  Obtained from environmental sample
  DOMAIN (58)...(132): HisG, C-terminal domain
  misc_feature (1)..(134): Xaa is any amino acid
MIIDNTSSGQTLRDNGLKIIGTVLESSTRFVASHSALENEMKRDRIEELAMLFHAVLQGRDRVMLEMNIPKDCFNAVVNGLPAMRSPTVAPLFGDEGYAVKIAVNKNEVSGIIPRLKKLGALDILEYDLRKVVP

SEQ ID NO: 15987 - DNA, 555 bp, Unknown
  Obtained from environmental sample
  misc_feature (1)..(555): n is a, c, g, or t
gtggacgtaaaaaattcgcttcttcccatcatcgttcagtctcccgacggccaggtactgatgacgggctttacagatgccgaagctttatcggaaacttttaaacggggcaatgtctgtttccatagccgtagccggaacaagctctggatgaagggggagacttccggaagcgttctgaagcttatcaggctgcgtgctgactgcgacagggacgcgcttttagccgtcgccgaacctgccggtcctgtttgccatacaggagcttggtcctgttttgaaatcggcaggaaattttcctgggaatttttacaggaaattattaaggaccgcttccgaaacccgccgcccggatcgtacaccgctactttggacgacaagcttgtacgcgaaaaactgatggaagaggcagaagaagtttgtaccgcaaaaacgcatgatgaagttgtctgggaagccgccgatgttctatattttttgtccgtactgattacccgcgaagggctcaccattcaggaagttttggacgagcttgaccgcaggcataaaaaataa

SEQ ID NO: 15988 - protein, 184 aa, Unknown
  Obtained from environmental sample
  DOMAIN (101)...(183): Phosphoribosyl-ATP pyrophosphohydrolase
  misc_feature (1)..(184): Xaa is any amino acid
MDVKNSLLPIIVQSPDGQVLMTGFTDAEALSETFKRGNVCFHSRSRNKLWMKGETSGSVLKLIRLRADCDRDALLAVAEPAGPVCHTGAWSCFEIGRKFSWEFLQEIIKDRFRNPPPGSYTATLDDKLVREKLMEEAEEVCTAKTHDEVVWEAADVLYFLSVLITREGLTIQEVLDELDRRHKK

SEQ ID NO: 15989 - DNA, 375 bp, Unknown
  Obtained from environmental sample
  misc_feature (1)..(375): n is a, c, g, or t
ttgcccgaacctatcgaaaagctggacgcgacccttaccgaagaaggctcgaacggctccaggctgaaagcttcccttttgcgcatagacagggatcccagccaggcgcgctatattgacaacataattgacggtgttaacgaagatgcgctggaacttattaacaaagcaacccagcatctaaccgttgtggaaaaacatctgaaaaacctgacggatgatatgcagaggaaacatcccgaattgatcataaactggaaagaattgggcaacgcctcaaagaatccactgtttgaggtaatggcggagaatcaccggaggatcaactgctttgtccagcttatgcggctctgcgcttcaataattccggtataa

SEQ ID NO: 15990 - protein, 124 aa, Unknown
  Obtained from environmental sample
  misc_feature (1)..(124): Xaa is any amino acid
MPEPIEKLDATLTEEGSNGSRLKASLLRIDRDPSQARYIDNIIDGVNEDALELINKATQHLTVVEKHLKNLTDDMQRKHPELIINWKELGNASKNPLFEVMAENHRRINCFVQLMRLCASIIPV

SEQ ID NO: 15991 - DNA, 396 bp, Unknown
  Obtained from environmental sample
  misc_feature (1)..(396): n is a, c, g, or t
atgctggggcagtacggttttcttgccgaagttttttccagctttgcccggtatcacatttcagtcgatatggtagctaccagtgaagtttcagtatcgcttacccttgacgcggcgcatgaccttgccgcccttaaaaaagaccttacccacattgccagcgtcgatattaaaaccggcaaggccatagttaccattgtcggcaatgttaaacattcttcggaaattcttgccgcggcttttagaacctgccattttatcggcgtgccggtgcagatggtttcccagggggcaagcaaggtaaacatcagttttattgtcaatgactccgaagcggtagaagtggtcaaggcgctgcacattgaattctttacggagcagaaaggtcaaaaatga

SEQ ID NO: 15992 - protein, 131 aa, Unknown
  Obtained from environmental sample
  misc_feature (1)..(131): Xaa is any amino acid
MLGQYGFLAEVFSSFARYHISVDMVATSEVSVSLTLDAAHDLAALKKDLTHIASVDIKTGKAIVTIVGNVKHSSEILAAAFRTCHFIGVPVQMVSQGASKVNISFIVNDSEAVEVVKALHIEFFTEQKGQK

SEQ ID NO: 15993 - DNA, 354 bp, Unknown
  Obtained from environmental sample
  misc_feature (1)..(354): n is a, c, g, or t
gtgctttcgggggctcttatgagaatgtgtttttttgactttgccgactttaccgattgcgactttaccaaatcggatctgcaatttatgtcgtttggcggcgcacaaatcaacaactgcaattttgaaggatcggaattaatacacttaaattttctgggcgcagccatttctaaagcctctttcagcaattctaatttatacaacagccgttttatcaacaccgatctggatgaagtaaaatttattgactgcaatgtaaagcgggttaattttgtcagcgcccgccagaaagacgttatttttaaatcctcaaataccgctgaagcgatttttgaattggaagaaacatga

SEQ ID NO: 15994 - protein, 117 aa, Unknown
  Obtained from environmental sample
  DOMAIN (10)...(49): Pentapeptide repeats (8 copies)
  misc_feature (1)..(117): Xaa is any amino acid
MLSGALMRMCFFDFADFTDCDFTKSDLQFMSFGGAQINNCNFEGSELIHLNFLGAAISKASFSNSNLYNSRFINTDLDEVKFIDCNVKRVNFVSARQKDVIFKSSNTAEAIFELEET

SEQ ID NO: 15995 - DNA, 822 bp, Unknown
  Obtained from environmental sample
  misc_feature (1)..(822): n is a, c, g, or t
atgtccggcgccctgcacatattcggcaggttcaccaaccgcgaaatcgccgtaaaagcgatgcgcggcgaaatcaagccgggcgggctgccgaagcacgccacggtctttttttccgacatacgcggctttacggcgatatcggaaaattttacgaaaacgttcggggacggggcctcggacaagatagtcttctggctcaacgagtactttaccggcatggtggagtgcatagagaagaccggcggcgcggtggacaagttcatcggcgacgcggtaatggcgcactgggggacggtttacagcgcgggcggcccgaaggaagacgcttacaactgcgtgaaggcggcccttatgatgcgccgcgcgctgatggcgttaaacaagggccggggcgccggcgacccgggcaacccgcccatccgcatcggctgcggcatcaacacgggcgtcgtcaccgccgggcagatcgggagcgacctgcgcatggagtacacggtgatcggcgacccggtgaacctcgcgtcccgcgtcgaagccctgaacaagccgctcggcacggatatccttattaccgaggacacctggaatcttgtcgggggcagtttcattacggaggagatgcccccggtgacggtaaaggggaaggcgaagcccgtgcggctgtttgccgtagtgaattttgccgcagcgggggagggcccccgcacccttgcggaggcccgtgaaatgctgggcgttgaggcgcccgacgtttcaaaggttgatcttgacgcggacgaaaagaaatacaaaatcagcggcggcggcggcggaaaatga

SEQ ID NO: 15996 - protein, 273 aa, Unknown
  Obtained from environmental sample
  DOMAIN (25)...(227): Adenylate and Guanylate cyclase catalytic domain
  misc_feature (1)..(273): Xaa is any amino acid
MSGALHIFGRFTNREIAVKAMRGEIKPGGLPKHATVFFSDIRGFTAISENFTKTFGDGASDKIVFWLNEYFTGMVECIEKTGGAVDKFIGDAVMAHWGTVYSAGGPKEDAYNCVKAALMMRRALMALNKGRGAGDPGNPPIRIGCGINTGVVTAGQIGSDLRMEYTVIGDPVNLASRVEALNKPLGTDILITEDTWNLVGGSFITEEMPPVTVKGKAKPVRLFAVVNFAAAGEGPRTLAEAREMLGVEAPDVSKVDLDADEKKYKISGGGGGK

SEQ ID NO: 15997 - DNA, 501 bp, Unknown
  Obtained from environmental sample
  misc_feature (1)..(501): n is a, c, g, or t
gtgcatagagaagaccggcggcgcggtggacaagttcatcggcgacgcggtaatggcgcactgggggacggtttacagcgcgggcggcccgaaggaagacgcttacaactgcgtgaaggcggcccttatgatgcgccgcgcgctgatggcgttaaacaagggccggggcgccggcgacccgggcaacccgcccatccgcatcggctgcggcatcaacacgggcgtcgtcaccgccgggcagatcgggagcgacctgcgcatggagtacacggtgatcggcgacccggtgaacctcgcgtcccgcgtcgaagccctgaacaagccgctcggcacggatatccttattaccgaggacacctggaatcttgtcgggggcagtttcattacggaggagatgcccccggtgacggtaaaggggaaggcgaagcccgtgcggctgtttgccgtagtgaattttgccgcagcgggggagggcccccgcacccttgcggaggcccgtga

SEQ ID NO: 15998 - protein, 166 aa, Unknown
  Obtained from environmental sample
  misc_feature (1)..(166): Xaa is any amino acid
MHREDRRRGGQVHRRRGNGALGDGLQRGRPEGRRLQLREGGPYDAPRADGVKQGPGRRRPGQPAHPHRLRHQHGRRHRRADRERPAHGVHGDRRPGEPRVPRRSPEQAARHGYPYYRGHLESCRGQFHYGGDAPGDGKGEGEARAAVCRSEFCRSGGGPPHPCGGP

SEQ ID NO: 15999 - DNA, 648 bp, Unknown
  Obtained from environmental sample
  misc_feature (1)..(648): n is a, c, g, or t
atgtacgcatcggccccatccaccggcagccatgaaaaatcaatccggcgttttgtccgtatatcttcaaacttgatccgttgcccatcggtaggcagaaggtttgtgactcccggcaaaagcacaggcagcggcggcggcgttaccggcggcggcgggcttgccggctgtgaccggctcgccgtctgtggctggtttgccggctgcgccgcaggcgctggccgtgccgcaggcgctggccgtgccgcaggggcctgcgccgcaggggccggctgcgctgcggacgctagctgcgcgggcgctggttgcgccgcaggctggggaacaatcggcggttcgggcgcggcgccgggcagcaccagtgttaccgaagaagaaatccgcgactcaacaggcgcggcggcagccgcagatgccgcggcaacagcaggagcggcagcagccgcagatgctgcggcaacagcaggcgcggcggcagcagtcacaggcgcggcggcagccgcaagcgcggcggcagtcacaggcgcggcggcagccgcatgcgcggcggctgcagccgcaggcgcgcccgcagcggcagcggcagttggagcggcagccgtaacaaccggctctgccatccgctctattgcgaaagacgcgatataa

SEQ ID NO: 16000 - protein, 215 aa, Unknown
  Obtained from environmental sample
  misc_feature (1)..(215): Xaa is any amino acid
MYASAPSTGSHEKSIRRFVRISSNLIRCPSVGRRFVTPGKSTGSGGGVTGGGGLAGCDRLAVCGWFAGCAAGAGRAAGAGRAAGACAAGAGCAADASCAGAGCAAGWGTIGGSGAAPGSTSVTEEEIRDSTGAAAAADAAATAGAAAAADAAATAGAAAAVTGAAAAASAAAVTGAAAAACAAAAAAGAPAAAAAVGAAAVTTGSAIRSIAKDAI

SEQ ID NO: 16001 - DNA, 444 bp, Unknown
  Obtained from environmental sample
  misc_feature (1)..(444): n is a, c, g, or t
ttgccggctgtgaccggctcgccgtctgtggctggtttgccggctgcgccgcaggcgctggccgtgccgcaggcgctggccgtgccgcaggggcctgcgccgcaggggccggctgcgctgcggacgctagctgcgcgggcgctggttgcgccgcaggctggggaacaatcggcggttcgggcgcggcgccgggcagcaccagtgttaccgaagaagaaatccgcgactcaacaggcgcggcggcagccgcagatgccgcggcaacagcaggagcggcagcagccgcagatgctgcggcaacagcaggcgcggcggcagcagtcacaggcgcggcggcagccgcaagcgcggcggcagtcacaggcgcggcggcagccgcatgcgcggcggctgcagccgcaggcgcgcccgcagcggcagcggcagttggagcggcagccgtaa

SEQ ID NO: 16002 - protein, 147 aa, Unknown
  Obtained from environmental sample
  SIGNAL (1)...(21)
  misc_feature (1)..(147): Xaa is any amino acid
MPAVTGSPSVAGLPAAPQALAVPQALAVPQGPAPQGPAALRTLAARALVAPQAGEQSAVRARRRAAPVLPKKKSATQQARRQPQMPRQQQERQQPQMLRQQQARRQQSQARRQPQARRQSQARRQPHARRLQPQARPQRQRQLERQP

SEQ ID NO: 16003 - DNA, 366 bp, Unknown
  Obtained from environmental sample
  misc_feature (1)..(366): n is a, c, g, or t
ttgcgccgcaggctggggaacaatcggcggttcgggcgcggcgccgggcagcaccagtgttaccgaagaagaaatccgcgactcaacaggcgcggcggcagccgcagatgccgcggcaacagcaggagcggcagcagccgcagatgctgcggcaacagcaggcgcggcggcagcagtcacaggcgcggcggcagccgcaagcgcggcggcagtcacaggcgcggcggcagccgcatgcgcggcggctgcagccgcaggcgcgcccgcagcggcagcggcagttggagcggcagccgtaacaaccggctctgccatccgctctattgcgaaagacgcgatataagacaaatccacggccccctctaa

SEQ ID NO: 16004 - protein, 121 aa, Unknown
  Obtained from environmental sample
  misc_feature (1)..(121): Xaa is any amino acid
MRRRLGNNRRFGRGAGQHQCYRRRNPRLNRRGGSRRCRGNSRSGSSRRCCGNSRRGGSSHRRGGSRKRGGSHRRGGSRMRGGCSRRRARSGSGSWSGSRNNRLCHPLYCERRDIRQIHGPL

SEQ ID NO: 16005 - DNA, 846 bp, Unknown
  Obtained from environmental sample
  misc_feature (1)..(846): n is a, c, g, or t
ttggataacgatgatctagatacggttttaggggaggggaatatggattggtttaggaaattaattgcccagatagggggcctctggggtaaatggtcaatgccccagaaaatcatacttatcgggattgtagtcgctgttttggcgggtatcgcggcccttataaccgtgtcgtccgcgcctaacctggtttctgttatcgatgcgccaattagggatgaagtagcgcgggacaggattgtgatgcgccttaaccaggagggcgtcagagtgacggtgagccctgcgggcgttgtccaggttgacgatcaggataccgccaggagaatgcgcggcatccttatacgtgaagatcttatcccgcagggtacggatccctgggctatttttgacagggaccgctggacaatcacggactttgagagaaacgtgaacctccgcagggccatcacccagatggttgccgatcatataagggcgcttgacgacgtggacaatgcgaatgtaacgattgtcgttccggaggatcgcttattcgcttccgagcaaaaccccgtgtccgccagcgtcattatcacccctaagccggggagcgatattcttcaaaatcgtaaaaagattgagggcattcaaaagctcctgaaattcgccattgaagggcttaaggacgaaaacatagttataacagatcagacagggttggtattgaacgactttgccggcctcgcggaatctgacaggcttacgctgatagaaaggcagaccaaaatgatccgccagctggaagcccaatacagggcgaagatcctttcccacctgcaaaaaactataccgaagacagggtaa

SEQ ID NO: 16006 - protein, 281 aa, Unknown
  Obtained from environmental sample
  DOMAIN (32)...(239): Secretory protein of YscJ/FliF family
  misc_feature (1)..(281): Xaa is any amino acid
MDNDDLDTVLGEGNMDWFRKLIAQIGGLWGKWSMPQKIILIGIVVAVLAGIAALITVSSAPNLVSVIDAPIRDEVARDRIVMRLNQEGVRVTVSPAGVVQVDDQDTARRMRGILIREDLIPQGTDPWAIFDRDRWTITDFERNVNLRRAITQMVADHIRALDDVDNANVTIVVPEDRLFASEQNPVSASVIITPKPGSDILQNRKKIEGIQKLLKFAIEGLKDENIVITDQTGLVLNDFAGLAESDRLTLIERQTKMIRQLEAQYRAKILSHLQKTIPKTG

SEQ ID NO: 16007 - DNA, 921 bp, Unknown
  Obtained from environmental sample
  misc_feature (1)..(921): n is a, c, g, or t
atgacaaatacaatagcgtttaatcctactacagaaaccaaaacatacggttccggcacatttacaaagacgctatcaaatacaggctcaggcacaggggcggtaacttatgcatcaggcgacaccagcatagcgacagtgaacgcaacctcaggattagtaacgttagttaaagccggaacagttgtaatcaccgcgacaaaagcggcgcaagggggttaccctgaagctaccgccagctacactctgactattaacaaagcgacaggcgggacagtctccgcgccgacaaagaattctgtaacatcaaccagcattaccgttaacgctgtaacggctccttctacagggcagaccgtacaatacgcatattcttcaaatactaccgcgccgggcagcacaagcaacctttggcaggatggtacgacaataagcggattaacagctaataccaattattacgtcttcgcgcgctcaaaggaaaacgacaattacaatgccggtacagcgtcatctgcaagcgcgcaaataaaaacggacgcggcgcctacagccacaaccacagtaattaactttgagtctgacgctttaaataaaacttatgactatacggaaggtgataatgcgccttcatcggtgaaagtcgtaaccgacccggtcaattccggaaagaaatcactgcagattacaaccaatggacccaacgacaagggctacaaccaggcggctgtcattccggttaaactgccctatactgtaaaggattatcagactgtatcattcaagttcagccttgaaagcggcaacaccggcacaaatctggactctaaacaaattcaggtttatatagcgaaagacaaagccacatttaagaaatggggctttggaaacggggcaagcgaatcaaatcaattgcggtaa

SEQ ID NO: 16008 - protein, 306 aa, Unknown
  Obtained from environmental sample
  DOMAIN (1)...(79): Bacterial Ig-like domain (group 2)
  misc_feature (1)..(306): Xaa is any amino acid
MTNTIAFNPTTETKTYGSGTFTKTLSNTGSGTGAVTYASGDTSIATVNATSGLVTLVKAGTVVITATKAAQGGYPEATASYTLTINKATGGTVSAPTKNSVTSTSITVNAVTAPSTGQTVQYAYSSNTTAPGSTSNLWQDGTTISGLTANTNYYVFARSKENDNYNAGTASSASAQIKTDAAPTATTTVINFESDALNKTYDYTEGDNAPSSVKVVTDPVNSGKKSLQITTNGPNDKGYNQAAVIPVKLPYTVKDYQTVSFKFSLESGNTGTNLDSKQIQVYIAKDKATFKKWGFGNGASESNQLR

SEQ ID NO: 16009 - DNA, 882 bp, Unknown
  Obtained from environmental sample
  misc_feature (1)..(882): n is a, c, g, or t
atgtccggtacgagcgcatccaactatatcaaaccggttgattacacaatcgccggtactatcacaaaagcggatggtgcgaataccagtagtagtacgaatggtactcccgcaatgtcttcaaaaacggcaacctctattacaagtacaacagtagccatatcgtccaccaatcccggcagtcaaaccattgaatacgcaattgcaacatcaacgactctgccgacaagcggctggcaggacggaacaactttcgataatttaacagccaataccgattattatatcttcgcgcgggcaaaagaaaacgccaattacaatgcgggagcggcaaagacaagcgcggcaataaagacagatcgccaggctaacatcatatcgtttaacgctccgcttgaggaaagcagagtttacggcactaactttacaaaagcgattgcatccggcagttcgggctctggagcggtaacctattcttccagcgacacaagcgtagcgacagtggcaagcggcggagtagtaacgcccgttaaagtgggaaccgctgtaatcacagcgaaaaaagcggcggacgcaacctacgcggaagccacagcatcctacacattgactatcaccaaagcgacaggcgggacgatcagcggcaacgtgacggtagcttccaaaacatcaaccagcataacagctactacggcaacaataacatcgcccaatacaggcaaacagaccgttgaatacgcggctgcgacagtaaataccagcacaccgacnagtggctggactgatagtacaacaatcaccggattaacaaccggcagtgagtattatatatacgcgcgtgcaaaggaaacgatnattacaatgcgggaactgcntaagtaa

SEQ ID NO: 16010 - protein, 293 aa, Unknown
  Obtained from environmental sample
  misc_feature (1)..(293): Xaa is any amino acid
MSGTSASNYIKPVDYTIAGTITKADGANTSSSTNGTPAMSSKTATSITSTTVAISSTNPGSQTIEYAIATSTTLPTSGWQDGTTFDNLTANTDYYIFARAKENANYNAGAAKTSAAIKTDRQANIISFNAPLEESRVYGTNFTKAIASGSSGSGAVTYSSSDTSVATVASGGVVTPVKVGTAVITAKKAADATYAEATASYTLTITKATGGTISGNVTVASKTSTSITATTATITSPNTGKQTVEYAAATVNTSTPTSGWTDSTTITGLTTGSEYYIYARAKETXITMRELXK

SEQ ID NO: 16011 - DNA, 504 bp, Unknown
  Obtained from environmental sample
  misc_feature (1)..(504): n is a, c, g, or t
atgggatgcactcaagaaaaacgagatagggctttccacgctggaaactcaaatacgaaaatttcttcatcaggaatcataaagatgacgcccaaacaggaaacaagaaaaaaagaatcttctatagtaactttcggaaagcagactaattttaacggtcatcttaaatttcaggaaacattgctggtgcaggggaaatttaagggaaccattgacgcggcgggagcgcttattgtagacaaggaagccgtcgtagacgccgaccgcatcacggtaagttccctgaccgtatacggaacggtgataggcgacattcatgccattgataaggtagacatgatgagcggagcgaaggttcagggtgatgttaccgccgcccggctccgtatagccgacggcgttttgtttgaaggccagtgcagcatgaccagtgtagacaaagaagtggaaattttttcccggcctgttgaagaaataaaagctgaactgctgcgggttggttaa

SEQ ID NO: 16012 - protein, 167 aa, Unknown
  Obtained from environmental sample
  DOMAIN (33)...(146): Protein of unknown function, DUF583
  misc_feature (1)..(167): Xaa is any amino acid
MGCTQEKRDRAFHAGNSNTKISSSGIIKMTPKQETRKKESSIVTFGKQTNFNGHLKFQETLLVQGKFKGTIDAAGALIVDKEAVVDADRITVSSLTVYGTVIGDIHAIDKVDMMSGAKVQGDVTAARLRIADGVLFEGQCSMTSVDKEVEIFSRPVEEIKAELLRVG

SEQ ID NO: 16013 - DNA, 645 bp, Unknown
  Obtained from environmental sample
  misc_feature (1)..(645): n is a, c, g, or t
ttgccaaccgatcttgacgcgtgggtaaagctgttcagggaattgtcggatgtggcgggggcgaaaattgaaaagccggctctgtacgacgctctgtattcaaaagcgcttgaaggggaggccgattgcgggggtctgttgtcttacaactattatgccggcgaacctattaccggttttgaacagggccgccctttgtttgtgcgttcccaggaaagcaattttaccctggcaaattttatgcgtaatataattttctctacgatggctaccctgaaacttggcatggatattttaactgaaaaagaacatatacgccttgacaacctgttaggccacggcggccttttcaaaactaaaggcgtggggcagaggcttatggccggagcgctcaatacgcctgtatccgtgatggaatcagcaggggagggcggggcctggggcattgctcttcttgcgtcttatatggcgcaggggccaaaggacatatcgcttgaaaaattccttgcggaaaaagtttttgcaaatgcaaccggagacagggtagagccggatcctctggatgtgcggggctttaaaaaattcatggaacgttattcggcgggtcttaaaatagaacgggccgctgtagagaatcttcaataa

SEQ ID NO: 16014 - protein, 214 aa, Unknown
  Obtained from environmental sample
  misc_feature (1)..(214): Xaa is any amino acid
MPTDLDAWVKLFRELSDVAGAKIEKPALYDALYSKALEGEADCGGLLSYNYYAGEPITGFEQGRPLFVRSQESNFTLANFMRNIIFSTMATLKLGMDILTEKEHIRLDNLLGHGGLFKTKGVGQRLMAGALNTPVSVMESAGEGGAWGIALLASYMAQGPKDISLEKFLAEKVFANATGDRVEPDPLDVRGFKKFMERYSAGLKIERAAVENLQ

SEQ ID NO: 16015 - DNA, 852 bp, Unknown
  Obtained from environmental sample
  misc_feature (1)..(852): n is a, c, g, or t
ttgacaaatactgaaggtgggcgtataagcagtacgcttggctttgaatctccacagaatatttctctttatatttatgataaccagaaaacatttcaaactaaaaaatatggctttattgtggcatttcttgggttagattggtatataggggataacaggggaacgaatgttttgttaacttcgcctgcaaatccgggtaaagtacatgattatggtaataataaatatgcttcaatacacgagattgtacatgcccataattatttgcttaataaaaatatgccaaaatgggtagatgagggtgtttgcttatatttaacaaatggaaatccgccgaatgatctttacagcaggcaaagaacgcctatgattaatgagataaggtcgaataatccggttaaatttgaaaagattggcggatacgattttgcgcatacatatatagaatatttggataatacctttggatggaataaagtattagtatttttaagagagaataactatgaaaatgtatttagacaaacaaaagtggagatatataataactgggtagaatatttaaaaaataattacagagcaatcgtaattacaagtgtacctgacggagcaatacttgtaacaacattttcaggaacaaatacacaaggacataatttcagtattaaggcatacgaatatacatttaacccggatgattattatcctacaggagaatttacaggcggttattatcagtatgaagcaggtaaaacatatattatttttgaccagaccggagaaggcaggcttgccattggaggtcaaacttacgatggaagaacccggtatgcggcttatgtagaataa

SEQ ID NO: 16016 - protein, 283 aa, Unknown
  Obtained from environmental sample
  misc_feature (1)..(283): Xaa is any amino acid
MTNTEGGRISSTLGFESPQNISLYIYDNQKTFQTKKYGFIVAFLGLDWYIGDNRGTNVLLTSPANPGKVHDYGNNKYASIHEIVHAHNYLLNKNMPKWVDEGVCLYLTNGNPPNDLYSRQRTPMINEIRSNNPVKFEKIGGYDFAHTYIEYLDNTFGWNKVLVFLRENNYENVFRQTKVEIYNNWVEYLKNNYRAIVITSVPDGAILVTTFSGTNTQGHNFSIKAYEYTFNPDDYYPTGEFTGGYYQYEAGKTYIIFDQTGEGRLAIGGQTYDGRTRYAAYVE

SEQ ID NO: 16017 - DNA, 624 bp, Unknown
  Obtained from environmental sample
  misc_feature (1)..(624): n is a, c, g, or t
atgcgggccattgaggagcgggaagacgaggaaaatgagacggtgcttgccgcgattgactaccttggaaaactcaaggttgtgtccgcggcccctgtttttaaagagcttcttgaaagcggggaaaaacggtttatgaacgccgccttccgcgcccttggccaagtaagcggaaatgaccgcgacgaggctgccgaataccttattgatttctacgaaaaccgcgacgcgggcagcgagaaccagcgcgaaataattgccgccgccggcgctacaggctcgccaaaggctgtgcccttccttgccggcctcgccggcgacaacgaaacgcggcctgtcctgcgaatggcggcgcttgaggctatagccaagatcggcgacccggtcggccttgacgcggtgcttgcctgcgtttcctcgaaggatcccaatatcagggccaccgcggttaccgcgctggggcctttttcgggtaaggcggttgacgacgcgattcttgacgcgttcagggattccttctataagacgcgcattgccgcggcgcaggcgagccgcgagcgtaaattcgccgacgccgttccctaccttaaattccgcgccgagcgcgatgaaatcccctggtaa

SEQ ID NO: 16018 - protein, 207 aa, Unknown
  Obtained from environmental sample
  misc_feature (1)..(207): Xaa is any amino acid
MRAIEEREDEENETVLAAIDYLGKLKVVSAAPVFKELLESGEKRFMNAAFRALGQVSGNDRDEAAEYLIDFYENRDAGSENQREIIAAAGATGSPKAVPFLAGLAGDNETRPVLRMAALEAIAKIGDPVGLDAVLACVSSKDPNIRATAVTALGPFSGKAVDDAILDAFRDSFYKTRIAAAQASRERKFADAVPYLKFRAERDEIPW

SEQ ID NO: 16019 - DNA, 516 bp, Unknown
  Obtained from environmental sample
  misc_feature (1)..(516): n is a, c, g, or t
ttgcaagagcgcggtctatatattgatgaaataaacagatgggacattgaaatgatcgctacatcggctcggttacatgatatggggaaaatttgtattcaggatacgattttaaacaagccggctaaattggacaatgaagaatacgagaagatgaaattacatactatagagggagcgcggatgatcaacaaaatgatcaagcaaacgggagaagaagaattcctgaataacgcaagactgttcgcggaatatcaccatgagcgatgggacggaaccggctatccgcatggccttatgggaccgagtatcccgcttcaggggcttataatggcgattgttgacgtatatgacgcgcttgtttccaaacggccatataaagaagcgcttactgttgaggatgctgttcaaattattacaaccagcgcgggcaaacattttgacccaaagattgtggaagtatttcttgaagtgcaggatcagctcagggcggtgagagaggctttatacaaataa

SEQ ID NO: 16020 - protein, 171 aa, Unknown
  Obtained from environmental sample
  DOMAIN (6)...(120): HD domain
  misc_feature (1)..(171): Xaa is any amino acid
MQERGLYIDEINRWDIEMIATSARLHDMGKICIQDTILNKPAKLDNEEYEKMKLHTIEGARMINKMIKQTGEEEFLNNARLFAEYHHERWDGTGYPHGLMGPSIPLQGLIMAIVDVYDALVSKRPYKEALTVEDAVQIITTSAGKHFDPKIVEVFLEVQDQLRAVREALYK

SEQ ID NO: 16021 - DNA, 924 bp, Unknown
  Obtained from environmental sample
  misc_feature (1)..(924): n is a, c, g, or t
atgctggaacatggcgggatcgatccgaaaggaaaaaaggttttagtgttgggcgacggcggctcggcgcggactgtgagggcggcgctggacgggctgggggcgcgcgagattgtgacgatctcccgccggggggaaaaccactacggcaacattgagcgacattatgacgcggagatcattataaataccactcccgtaggcatgtatcctgacaacggaagcagtccgttgcacctaacggaatttaggcaattaacgggcgtgggcgatttgatctataatcccacgcggaccaagctcctgcttgaagccgagaggcttggtattccctgcgtgaacggacttgcgatgcttgttgcccaggcggagaaggcaagtcggctgtttttggacggacccgctcgtcctgaactggtgaataaaattcacgacgcgattctcaaaagaacgcaaaacatagcgcttatcggtatgcccggctgtggaaaaagcactatcggcagggtactcgcccaaaagatggagcggccctttgcggacattgacgaacaaatcgaagcggccgccggtaaaaaaatcccgcaaattttcgccgatgacggtgaagaaacattccgacagttggaaacgcgcgtactcgccgaagaagcaaaaaaaagcggtatggtactggcgacgggcgggggcgttgtaacgcggcctgaaaatctcgatttgctcaagcagaacagtttaatagtgtatttaaaacgtgaactaagcgaccttattacagacggccggccgctttcgcagaatgttgggattcaggcccttgccgaaaaagcgctgcccttatacgaggcgtggagtgattacgcccgttcagtangagcgaacccggaacaaacggncgcgctgatagaggagggtatacaatga

SEQ ID NO: 16022 - protein, 307 aa, Unknown
  Obtained from environmental sample
  DOMAIN (2)...(102): Shikimate / quinate 5-dehydrogenase
  misc_feature (1)..(307): Xaa is any amino acid
MLEHGGIDPKGKKVLVLGDGGSARTVRAALDGLGAREIVTISRRGENHYGNIERHYDAEIIINTTPVGMYPDNGSSPLHLTEFRQLTGVGDLIYNPTRTKLLLEAERLGIPCVNGLAMLVAQAEKASRLFLDGPARPELVNKIHDAILKRTQNIALIGMPGCGKSTIGRVLAQKMERPFADIDEQIEAAAGKKIPQIFADDGEETFRQLETRVLAEEAKKSGMVLATGGGVVTRPENLDLLKQNSLIVYLKRELSDLITDGRPLSQNVGIQALAEKALPLYEAWSDYARSVXANPEQTXALIEEGIQ

SEQ ID NO: 16023 - DNA, 486 bp, Unknown
  Obtained from environmental sample
  misc_feature (1)..(486): n is a, c, g, or t
atgacgcttttgagggcgctggaaaaggancacggcatgatttcccgccagcgcatgatgctgaagaccgccgccattctacacgacataggcgcctttataaaaacctcgggccacaacaggcacggccagtacattgtttcccattcggaaatattcggcctgccccgcgacgagctggatataatcgcaaatgttatacgctaccaccacgggggtaaaccgacgcaggcggacattgaatatataagcctccagcgggaagagaggatcatggtattgaagatggcttccattctgcgggtcgccgacgcccttgacagggggcatacccagcacctgaaaaacctcagcgtagagcgccgcgccgagactctcgctctgcactctcaaggagcgtatgacatttcacaggaacttatcgcgctggaagaaaaagccgactacttccaggccgttttcgggtataaggtcgttttaaactag

SEQ ID NO: 16024 - protein, 161 aa, Unknown
  Obtained from environmental sample
  DOMAIN (2)...(109): HD domain
  misc_feature (1)..(161): Xaa is any amino acid
MTLLRALEKXHGMISRQRMMLKTAAILHDIGAFIKTSGHNRHGQYIVSHSEIFGLPRDELDIIANVIRYHHGGKPTQADIEYISLQREERIMVLKMASILRVADALDRGHTQHLKNLSVERRAETLALHSQGAYDISQELIALEEKADYFQAVFGYKVVLN

SEQ ID NO: 16025 - DNA, 912 bp, Unknown
  Obtained from environmental sample
  misc_feature (1)..(912): n is a, c, g, or t
gtggggcttaacgtcgcgtccgatccgtttataaacgccgctctcttaaaaataaatggcggccttgtcgtcgccgtcgcggatgatcccggaatgcacagttcccaaaatgagcaggattcacgtttttacgccgatttcgccatgattccctgtcttgagccgcgcagccagcaggaagcctatgacatggtccgcgaggcttttgacgtatcggaacgttttaacgtgccagtccttctgcgccttgttacccgcctggcccatgcccgcgcgggagtcgtaatagaaaagaaaaaaccgcagaataaattttctaagactaatgaaaaggccggttggcttcttcttcccgcctatgcgcgcagtaatttcaccaaacttcttgacaaacagattgaatttgaagaatgggcgtttaaacatcccgtaaataaattgacaggcaaaaaaagcgatcttggcataatcacagcgggtctcggctgtaattattatgaggaaaaccttgatgattttaacgccatgcggaaaaaacaggggaaaaagccgcatcttcatcttcatataggcgcgtatcccctgccctcaaaaaaaataaaacagttatgcgataacgttgacgaaataataatcattgaggaagggtataatttaatcgcgagaaaaattttcggcgttacaggcggttcttttacaaatataaagacacttattcagtgcggagagcttgaccctgataatgtaagaaccgctctcggacttgctccgcgaaaaaacgctttaagggctcccgcaaatctgccccaaaggccgcctcagctttgtcagggctgtccgcacgcagacagttacgaaacaatcaacaaagcggtaaacgctttagacccgcgctcgcaaaagcagatatag

SEQ ID NO: 16026 - protein, 303 aa, Unknown
  Obtained from environmental sample
  misc_feature (1)..(303): Xaa is any amino acid
MGLNVASDPFINAALLKINGGLVVAVADDPGMHSSQNEQDSRFYADFAMIPCLEPRSQQEAYDMVREAFDVSERFNVPVLLRLVTRLAHARAGVVIEKKKPQNKFSKTNEKAGWLLLPAYARSNFTKLLDKQIEFEEWAFKHPVNKLTGKKSDLGIITAGLGCNYYEENLDDFNAMRKKQGKKPHLHLHIGAYPLPSKKIKQLCDNVDEIIIIEEGYNLIARKIFGVTGGSFTNIKTLIQCGELDPDNVRTALGLAPRKNALRAPANLPQRPPQLCQGCPHADSYETINKAVNALDPRSQKQI

SEQ ID NO: 16027 - DNA, 357 bp, Unknown
  Obtained from environmental sample
  misc_feature (1)..(357): n is a, c, g, or t
gtgttatgcgctattgggttttctgtgcgccgtgcggtggaagctctggaaagccggggttttccggtaaaggcgatgagggtttcaggcggccagggaaaaaacgcgctgtggaaccagttaaaagcggatatttccggcgtctcgcttttgatcccggaaatttgcgacggggaattagccggaaacgccgtccttgccgcctgcgctctggaaaacccgtccgatggggattttgaacaggttctggacgccgcggcggacaggatgatccgctttcgggaggaataccggcctcatgcagagacagcgcaattttgggcagaacagtataagatggcaaatgatactgtataa

SEQ ID NO: 16028 - protein, 118 aa, Unknown
  Obtained from environmental sample
  misc_feature (1)..(118): Xaa is any amino acid
MLCAIGFSVRRAVEALESRGFPVKAMRVSGGQGKNALWNQLKADISGVSLLIPEICDGELAGNAVLAACALENPSDGDFEQVLDAAADRMIRFREEYRPHAETAQFWAEQYKMANDTV

SEQ ID NO: 16029 - DNA, 948 bp, Unknown
  Obtained from environmental sample
  misc_feature (1)..(948): n is a, c, g, or t
atgacagattcgcgaggcaaactccagcgcctcggactctccacagactcctcctaccgcttcgaacgcggcgtagacccggcgcagggtttggcggacgcattggaaagagcggcggaacttatgcttgaactcgccggcggcagcgtggccgacggggttatagacaccaacccgaacccattccccgacaaggtgataaccgtgcgcccgtcgcgaaccaagaggatattgggtgtcgagttcccggcggacaacatggtcttctcactaaacacgctggggatcaaaagcgtaaaagaatccgaagatatggtgacctgcaccgtgccgcactaccgccacgacatcacagaggagatcgacctgatcgaagaggtgggacgccagtacggttacgacaatatcccaaccgctgaaagcgccaccgtgaacctggtcaaacaaccctctacggcggaaactaaccgcgacacggcgcgcttcgcgctatgctacttcggattgaacgagatcatgaccaacagcatggtgtcggagtcaaaacgaaaactattgacgccgtccgcggaaccggtgaaaatcctcaacccgctgaaccccgatatggcggagatgcgcacatctatggcgctctccctattggacacggcggcctacaacctgaataggaagaacggcgacaataggctgttcgagatcggcaaggtgttcgagccggacgaaaaatcgggtttggctatcgagagagacattttggcgataatcatagagggagactatattccgcagtcttggggcaaccggaaagtagagaataacttcttcgntctgaaaggcgttntggaggcgttcgccgcgcattgcggctttgggacggcgaagttcgaacgccttgcgacgacctgtccgctctacggggcggagtgcgccnagataaaacgttaa

SEQ ID NO: 16030 - protein, 315 aa, Unknown
  Obtained from environmental sample
  DOMAIN (64)...(133): tRNA synthetase B5 domain
  misc_feature (1)..(315): Xaa is any amino acid
MTDSRGKLQRLGLSTDSSYRFERGVDPAQGLADALERAAELMLELAGGSVADGVIDTNPNPFPDKVITVRPSRTKRILGVEFPADNMVFSLNTLGIKSVKESEDMVTCTVPHYRHDITEEIDLIEEVGRQYGYDNIPTAESATVNLVKQPSTAETNRDTARFALCYFGLNEIMTNSMVSESKRKLLTPSAEPVKILNPLNPDMAEMRTSMALSLLDTAAYNLNRKNGDNRLFEIGKVFEPDEKSGLAIERDILAIIIEGDYIPQSWGNRKVENNFFXLKGVXEAFAAHCGFGTAKFERLATTCPLYGAECAXIKR

SEQ ID NO: 16031 - DNA, 684 bp, Unknown
  Obtained from environmental sample
  misc_feature (1)..(684): n is a, c, g, or t
atgcgcgaggaaggcgaccgcaagcaggcggcgcaattcgtactctggactgtgctgcgcgaaacgctcgtactcctgcatcccgtcatgccctttgtcagcgcggagatatggcaggccttgcccggcggcgcggggggggatatcgcgcgggaagctttcccgcccgtgcgtcccggttgccgcaagcccgaagaggcgggccgcatggaattcatccaggaggtcattgtggccgtgcgtaccatacgcgcggaactcggcatcccgcccgcgaagaagccggcctgcatcctgcgtccggcggacgccgcgcagggcgcgctgcttgagtacaatcgccggatgatcgaagtcttggcccgtcttgagaagctggatatcgggcaggagatcgcgatcccgaaaagttcggcttccggcgtggcgcagggctgtgaagtcgtcgtgccgcttgccggcgccgtggacccggcggcggaacttgcccggctggacaaggagcttgccgggatcgacaaggagcttgccgccgtgcaggcaaaactcgccaacccgtcctttgtcgaacgcgctcctgatgcggtggtgcaacgcgaacgcgaacgcagccgggaacttgccgatgccgggacaaaactcgaaaccctgcgccggcgctttctggatgccatgaacgcgtag

SEQ ID NO: 16032 - protein, 227 aa, Unknown
  Obtained from environmental sample
  DOMAIN (3)...(100): Anticodon-binding domain
  misc_feature (1)..(227): Xaa is any amino acid
MREEGDRKQAAQFVLWTVLRETLVLLHPVMPFVSAEIWQALPGGAGGDIAREAFPPVRPGCRKPEEAGRMEFIQEVIVAVRTIRAELGIPPAKKPACILRPADAAQGALLEYNRRMIEVLARLEKLDIGQEIAIPKSSASGVAQGCEVVVPLAGAVDPAAELARLDKELAGIDKELAAVQAKLANPSFVERAPDAVVQRERERSRELADAGTKLETLRRRFLDAMNA

SEQ ID NO: 16033 - DNA, 897 bp, Unknown
  Obtained from environmental sample
  misc_feature (1)..(897): n is a, c, g, or t
atgtccgttgtaactgcagaaaaagacgcgaaaaaaattattgagcttgccgatgccgaaaaccttgaagcggttgtaattgcggaagttactcttgaaaaacgccttgtaatgaactggaacggaaaaaccattgtaaatctttcaaggggattccttaacagcaacggcgctgaaaaacacgcaaaagctcgtatctcttcgctaatattaacttgtaaaaaaaacgaaccggacgcgccgcagttggaaaaattttcaggcggcttgaatatttgctcgcagaaagggcttgttgaccgttttgattcaagcgtgggaatggcgacagttatcgcgccttacggcggaaaatatcagcttacgcccgcgcaggcgatggcggcaaaaatacccgtccttaacggcgaaacaaaaacctgctcccttatgtcatggggatttgatcctgaaatatcttccttaagcccgtaccacggcgcggttttcgccgttactttttcgcttgcgaaaataatagcctcgggcggaagcagaaagcgctgctggctctcttttcaggaatattttgaaaggttacgcgacgatcctgtaaggtggggcaagcccgtatccgcgctcctgggcgctcttgacgcgcagcttgggctggaaatagcgggtatcggcggtaaggattcaatgtcaggctcctttacgttaaaaaacggcggcagcattgacgttccgccaaccttagtttcatttgccgtctcaaccgcgaagacagataaaataataacgccggaattcaaacgcgcgggaagttatgtttatcttttcaaacgccccgctctgtttttgaaaaacaggattttgccgccttgcgcggttattttgacgccgcggaaaaattaa

SEQ ID NO: 16034 - protein, 298 aa, Unknown
  Obtained from environmental sample
  misc_feature (1)..(298): Xaa is any amino acid
MSVVTAEKDAKKIIELADAENLEAVVIAEVTLEKRLVMNWNGKTIVNLSRGFLNSNGAEKHAKARISSLILTCKKNEPDAPQLEKFSGGLNICSQKGLVDRFDSSVGMATVIAPYGGKYQLTPAQAMAAKIPVLNGETKTCSLMSWGFDPEISSLSPYHGAVFAVTFSLAKIIASGGSRKRCWLSFQEYFERLRDDPVRWGKPVSALLGALDAQLGLEIAGIGGKDSMSGSFTLKNGGSIDVPPTLVSFAVSTAKTDKIITPEFKRAGSYVYLFKRPALFLKNRILPPCAVILTPRKN

SEQ ID NO: 16035 - DNA, 303 bp, Unknown
  Obtained from environmental sample
  misc_feature (1)..(303): n is a, c, g, or t
atggtttttccttgtataaaatgcgggctgtgttgtaaaatgctgcaacacatccccattttatcggagtatgataatggtaacggcgtttgccgttaccttgaaaataatttatgcagtatttatgaaaaccgccctttaatttgtaatactgatgaaatgtaccgttcatatttcagggaaataatgacagaaaaagaatttgttaccataaatatggaggcatgtattcaaattactgaacactttaacgatgaatctcttaaaaaagagataacagaattatacaatcacataaaataa

SEQ ID NO: 16036 - protein, 100 aa, Unknown
  Obtained from environmental sample
  DOMAIN (3)...(81): Uncharacterised protein family (UPF0153)
  misc_feature (1)..(100): Xaa is any amino acid
MVFPCIKCGLCCKMLQHIPILSEYDNGNGVCRYLENNLCSIYENRPLICNTDEMYRSYFREIMTEKEFVTINMEACIQITEHFNDESLKKEITELYNHIK

SEQ ID NO: 16037 - DNA, 492 bp, Unknown
  Obtained from environmental sample
  misc_feature (1)..(492): n is a, c, g, or t
gtgatcgcgagttgcggaatgcacccagccggagcagcttcattttacgccaacggttctagcgatgtcgtagctggctggagttcttctggcggtactaatgctttctataataccggaacaagaaccatcactttgggcgatgttatgtgcggtaccaccaaagtaacccttagcccagccatatcttgcggaagttttgaagttgtagcagcatccagcagctcaagtgctgtgttatccagcagcagtaccggaagcagttccagcacattgtcgtcatccagtagcagttccaatagcagtgatagcagctccagcagcgaagatggagagacccctattctccactctccactctccactctcaactccaaattagctacctattatacaataaaaggcgagcctcttggcaacgcaaaaccgcaaaaagcgggaatttatatagttaaacaaggacattcagttaaaaaaatcgcagtgaggtga

SEQ ID NO: 16038 - protein, 163 aa, Unknown
  Obtained from environmental sample
  misc_feature (1)..(163): Xaa is any amino acid
MIASCGMHPAGAASFYANGSSDVVAGWSSSGGTNAFYNTGTRTITLGDVMCGTTKVTLSPAISCGSFEVVAASSSSSAVLSSSSTGSSSSTLSSSSSSSNSSDSSSSSEDGETPILHSPLSTLNSKLATYYTIKGEPLGNAKPQKAGIYIVKQGHSVKKIAVR

SEQ ID NO: 16039 - DNA, 597 bp, Unknown
  Obtained from environmental sample
  misc_feature (1)..(597): n is a, c, g, or t
ttgctggcgttgtttggcacggaaatttttatgcaaaaaaatgatatttttatcgattctagggatgaaaaaaaatacagaaccgttaaaataggtactcaaacttggatggcggagaacttaaaccacaatgcaagtacttcaaaatgctacgataacaaacctgaaaactgcgataaatacggcagattgtatgattggagcacagcgaaagatgtttgtccaagcggttggcatttgccaagcaatgatgaatgggatgttctataccgctacgtagatggcacaagcggcacggaaagcccttatgaaagtgagaccgctggcaaatacttgaaatcaaaaaacgactggaaagattatgaagggagacctggcaacggggaagacaaattcggcttttctgctcttccgggcggtagcggttattcttatggcgtatattatgatattggctacgatggctactggtggagtgccaatgagcacactaactacaacgcttacagccggcgcatatactactacaacgaccacgccatctggtattatggcgataggaattttttgcacagcgttcgctgcattaagaattga

SEQ ID NO: 16040 - protein, 198 aa, Unknown
  Obtained from environmental sample
  misc_feature (1)..(198): Xaa is any amino acid
MLALFGTEIFMQKNDIFIDSRDEKKYRTVKIGTQTWMAENLNHNASTSKCYDNKPENCDKYGRLYDWSTAKDVCPSGWHLPSNDEWDVLYRYVDGTSGTESPYESETAGKYLKSKNDWKDYEGRPGNGEDKFGFSALPGGSGYSYGVYYDIGYDGYWWSANEHTNYNAYSRRIYYYNDHAIWYYGDRNFLHSVRCIKN

SEQ ID NO: 16041 - DNA, 555 bp, Unknown
  Obtained from environmental sample
  misc_feature (1)..(555): n is a, c, g, or t
atgcaaagcgtcatttcctcccacgaagaaaagatgaaaaaatcggtggtaagccttaaagaagggtttgcctctttaagaaccgggcgggcctccgccgcgctgtttgacaggctgcgggtggactgttacggcgaaaaatcgcctttgaatcaggttgcgaatatctccgtgccggaagcccgccttatcgtcattcagccgtgggataaaagccttataggggaaattgaaaaggcgatccgctcttccgaactttcccttaacccgtcaaacgacggcaaggtaatccgcatctccatccccccacttacggaggaacgccgcaaagagcttgtaaaactcgcgaaaaatcaggcggaacaatcaagggtctcaatacgcaacatacgcagggacggcaacgacgaactgaaaaaactcttaaaagactcaaagattacagaagatgaagaatcaaaagatacggcggaactgcaaaaattaaccgactcctacatcgcccaggttaatcaggttttggaagagaaagaaaaagaaattatggaagtgtaa

SEQ ID NO: 16042 - protein, 184 aa, Unknown
  Obtained from environmental sample
  DOMAIN (18)...(182): Ribosome recycling factor
  misc_feature (1)..(184): Xaa is any amino acid
MQSVISSHEEKMKKSVVSLKEGFASLRTGRASAALFDRLRVDCYGEKSPLNQVANISVPEARLIVIQPWDKSLIGEIEKAIRSSELSLNPSNDGKVIRISIPPLTEERRKELVKLAKNQAEQSRVSIRNIRRDGNDELKKLLKDSKITEDEESKDTAELQKLTDSYIAQVNQVLEEKEKEIMEV

SEQ ID NO: 16043 - DNA, 519 bp, Unknown
  Obtained from environmental sample
  misc_feature (1)..(519): n is a, c, g, or t
gtgctgcatggcagttttatcatcgggattcttctgactttgcagtcaatactggttcccctttttctgatgataaacgcggtgaacctatacaatacgaggctgggcgtgttgattccctacatcggcatagggcttcctatgggggtttacctcagtactgaatatatcaagagcatacccagctccctgattgaatcggcgaggcttgatggcgcgaagtacctgcgtgttttcaggagcatcatcatgccaatgtcggctcctgtggccgccacggtagcgattctggggataacggggacatggaacgagttcatgctgataaacatccttgtatccaggaatgagatgaaatcccttcccgtaggcgtaaatatgttttccggggcgttggcgtcggattacggcaagcagttcgccgcccttgttatcggcatgacgccaatggtgattttttatctggttttcagaaaacggatcaccaggggggtttccgccggagccgtaaaagattag

SEQ ID NO: 16044 - protein, 172 aa, Unknown
  Obtained from environmental sample
  misc_feature (1)..(172): Xaa is any amino acid
MLHGSFIIGILLTLQSILVPLFLMINAVNLYNTRLGVLIPYIGIGLPMGVYLSTEYIKSIPSSLIESARLDGAKYLRVFRSIIMPMSAPVAATVAILGITGTWNEFMLINILVSRNEMKSLPVGVNMFSGALASDYGKQFAALVIGMTPMVIFYLVFRKRITRGVSAGAVKD

SEQ ID NO: 16045 - DNA, 654 bp, Unknown
  Obtained from environmental sample
  misc_feature (1)..(654): n is a, c, g, or t
gtgaccggatatgtcagggccgcgcttgggcttgcacccagaaaaagcggtttaagagcaccagccaacctgccacaaaggccgccgcagctatgtcagggctgcccgcacgcggacagttatgaaacaatcaacaaagtggtggacgctcttgattcgcgtccgggaaagcccgacataggtattaactccgacatcggctgttattcgctgggcgctactccgccctattcggctatcgaaagcgttatctgcatgggcgcctgtatcggcatggcaaagggcgcgtcggacgcgggacttaagcactccattgccgtcatcggcgattccacatttatccattcagggataaccgcacttatcgacgcggtcgcctccgatactccgatgaccattattatattggacaattccagcgtcgcgatgacaggctgccagccgactatagtgccgtctgaaaaactggaaaacctgatcctcggctgcggggtaaaccgcgaacatcttttagtacttgaagcaaaaaagcaattattggaagaaaacgccgcaaagctgaaagccgaaattgaacaccgcggcctttccgtggttattttcaggcgcgaatgtcttgaagcgttcaggaaaaacaagaaggcgaatttttag

SEQ ID NO: 16046 - protein, 217 aa, Unknown
  Obtained from environmental sample
  DOMAIN (65)...(201): Thiamine pyrophosphate enzyme, C-terminal TPP binding domain
  misc_feature (1)..(217): Xaa is any amino acid
MTGYVRAALGLAPRKSGLRAPANLPQRPPQLCQGCPHADSYETINKVVDALDSRPGKPDIGINSDIGCYSLGATPPYSAIESVICMGACIGMAKGASDAGLKHSIAVIGDSTFIHSGITALIDAVASDTPMTIIILDNSSVAMTGCQPTIVPSEKLENLILGCGVNREHLLVLEAKKQLLEENAAKLKAEIEHRGLSVVIFRRECLEAFRKNKKANF

SEQ ID NO: 16047 - DNA, 798 bp, Unknown
  Obtained from environmental sample
  misc_feature (1)..(798): n is a, c, g, or t
ttgaccgcgctagacgtatcaaaaaacgctgcgctgatgacgctgtattgctccgacaacccgttgaccgcgctggacgtgtctaaaaatgtcgctctgacggagttatcctgttccgacaaccaactagccgcgctcgacatatctaagaataccgcgcttaagaagttgttttgccacaacaacaaattgaccgcgattgacgtatctaagagcgtggggcttacggagtttgagtgctccgacaaccaattgaccgcgctcgacgtaaccaaaaacaccgcgcttacggagttggagtgctgggacaaccaattggcgtggcttgacgtatcaaagaatatcgcgcttaaaaggttgaaatgccataaaaaccaattgaacgcgcttgatttgtcaagaaatacggcgcttatgtcgctggagtgcaaagtcaacaaattgacggtgctggacgtgtccaagaacaccgcgctgaccggattatcctgcgaagtcaaccaattgatctcgcttgacgtctccaaaaacaccgcgctgacggcgctgttttgttcaagtaacagtttaaccgcgctcgatgtgtccaagaataccgcgcttacacggctctcttgctcgggcaacaatttgaccgcgctcaacgtgtctaagaataccgcgcttaaagagctgtatgtatatgataattatttcataggcgagaacgaaatcgtcggcgcgaacaagttgaagctcaatatttttaaatttatcccgcagagagagaaaccggtagctccgtcggcggagaaataa

SEQ ID NO: 16048 - protein, 265 aa, Unknown
  Obtained from environmental sample
  misc_feature (1)..(265): Xaa is any amino acid
MTALDVSKNAALMTLYCSDNPLTALDVSKNVALTELSCSDNQLAALDISKNTALKKLFCHNNKLTAIDVSKSVGLTEFECSDNQLTALDVTKNTALTELECWDNQLAWLDVSKNIALKRLKCHKNQLNALDLSRNTALMSLECKVNKLTVLDVSKNTALTGLSCEVNQLISLDVSKNTALTALFCSSNSLTALDVSKNTALTRLSCSGNNLTALNVSKNTALKELYVYDNYFIGENEIVGANKLKLNIFKFIPQREKPVAPSAEK

SEQ ID NO: 16049 - DNA, 705 bp, Unknown
  Obtained from environmental sample
  misc_feature (1)..(705): n is a, c, g, or t
atgaaagccctttgtgtgttgtacggaggccgccttgaaccggaagcctttgaaaagattctaccttcggttctatgcccgggccgtgccggaaatgaaagcgcctttgcattggcagttgccgccgcccgcgcttttcccggtgtggaaaaaaccgtgcttttgggaacacagggctcaagtctagccgatcttccccataatcataatatcgaagttgaaaccgcgctcaagccttcctggactagaaccagtcttttagaggagatttccaggctctcagttggctgggattttacatattttgcctgggcggactgcccgcttttggatccggcgcttgcaggcgcgatggcggaacggcatctgcgctataaagccgagtactcctacgcggacggctggccctacggcctcgctcctgaaatcctggggccgggaacagcaggaatactcgcgaaactatccgattcaacaggctctgacgggcctgtggaaagggacgctctgtttcaggtaattcagaaggacataaacgcctttgatatcgagacggaaatttcccctgttgatttaagacctttcaggcttagcctgacggccgattccaaaaggaacctcctcctgctttcccgctttatgaaagagctacggcagtccgcttggcagggcaaatctctgccgctgatatctcggccgatctga

SEQ ID NO: 16050 - protein, 234 aa, Unknown
  Obtained from environmental sample
  misc_feature (1)..(234): Xaa is any amino acid
MKALCVLYGGRLEPEAFEKILPSVLCPGRAGNESAFALAVAAARAFPGVEKTVLLGTQGSSLADLPHNHNIEVETALKPSWTRTSLLEEISRLSVGWDFTYFAWADCPLLDPALAGAMAERHLRYKAEYSYADGWPYGLAPEILGPGTAGILAKLSDSTGSDGPVERDALFQVIQKDINAFDIETEISPVDLRPFRLSLTADSKRNLLLLSRFMKELRQSAWQGKSLPLISRPI

SEQ ID NO: 16051 - DNA, 711 bp, Unknown
  Obtained from environmental sample
  misc_feature (1)..(711): n is a, c, g, or t
ttgcccccctggcagttgaagttcctaaaagcggttcgcgctgccggtaaaaagatcgttctggtgcttacaggcggcagtccaatcgctttccctgaggatctcgctgacgcggttgtcttcgcgtggtatcccggagagcttggcggcaaggctgtagcggatattattttcggcgacacggttccatccggaaaattacccataacgttccccgcttccacggatcagcttccgccttacgaagactattcgatgaagggacgcacttaccgttacatgacggaaaagccccagtaccccttcgggttcggcctttcctacaccactttccgttttgattctattaagctatccgacgcgcgggcgggttatgttgtcaaggcttcggtaacgctgagcaacacaggcaaaagggacacggataatgtagtgcaaatatatgtttcaaaagaaaaacgcgccgaaaacgatcccatcgcctcgctgcgtgatttccgccgcgtgcatattaaggcgggtaaaagcgtaacggttgattttgagcttccgcgttcggcgtttgaaacagtgaacaacgaaggcgtgtcggagtatttgcccggctcctacacaataattgccgccgatgccgcgcctgtacccgtagcgaaggagaagggcgcgccggcttttgtttcggcaaattttaattttaaagcagataaataa

SEQ ID NO: 16052 - protein, 236 aa, Unknown
  Obtained from environmental sample
  DOMAIN (1)...(110): Glycosyl hydrolase family 3 C terminal domain
  misc_feature (1)..(236): Xaa is any amino acid
MPPWQLKFLKAVRAAGKKIVLVLTGGSPIAFPEDLADAVVFAWYPGELGGKAVADIIFGDTVPSGKLPITFPASTDQLPPYEDYSMKGRTYRYMTEKPQYPFGFGLSYTTFRFDSIKLSDARAGYVVKASVTLSNTGKRDTDNVVQIYVSKEKRAENDPIASLRDFRRVHIKAGKSVTVDFELPRSAFETVNNEGVSEYLPGSYTIIAADAAPVPVAKEKGAPAFVSANFNFKADK

SEQ ID NO: 16053 - DNA, 855 bp, Unknown
  Obtained from environmental sample
  misc_feature (1)..(855): n is a, c, g, or t
atgacttgggaacagcatctggctgccgcccttgccgcaagcgatatgcagtatacttttctatcgcaggatcaatttattcaagccggtctttcaggaacagacctttattttccgtgcataagcgaagatcagggaaaactgataaccgtttttccggtttcaatgtccgcgcaggcagtattggcgcaaaaaagttcatctcaggtttttatagaaataaaaaacgcgattaatgaagaaaacaaactttctgccgagagtataattaccgtttttcccgaaaaacctttttccgatccgcaggaagcgcaggaaaccgcgtggaaccgcttttttgaagagctttcgctttccaaagattttgttgaaactttactgccgtctaaagtaataagaacgaataaaaatcttaaaaaggcaagttttccgaattcatcgtcgttggaaaataatttttcgccgcgccgttttcttatagaacattgcgaggtaaacggcatatattcaaagatgatttttaccagtgtattaataaatcagttaaagggagacaaatacagaaagcagaacgcgagggaagaactttggaaagctcaagattcctgcttgtttactcccggaaacggatttttgcgtcacgaacttcgtaaagcggcgtacagttctcttttgcgcgcggaaaggctgtccagagaaaaaggaaggtttatttcatcgcttgttcagcatgattttgatcttgacggcgttaaggagtatttgtttcaggacgcgaggataaactgctacatccagcaaaaaggcgcgagtgtttttgacttgactatctgcccaaagattggaataccctga

SEQ ID NO: 16054 - protein, 284 aa, Unknown
  Obtained from environmental sample
  misc_feature (1)..(284): Xaa is any amino acid
MTWEQHLAAALAASDMQYTFLSQDQFIQAGLSGTDLYFPCISEDQGKLITVFPVSMSAQAVLAQKSSSQVFIEIKNAINEENKLSAESIITVFPEKPFSDPQEAQETAWNRFFEELSLSKDFVETLLPSKVIRTNKNLKKASFPNSSSLENNFSPRRFLIEHCEVNGIYSKMIFTSVLINQLKGDKYRKQNAREELWKAQDSCLFTPGNGFLRHELRKAAYSSLLRAERLSREKGRFISSLVQHDFDLDGVKEYLFQDARINCYIQQKGASVFDLTICPKIGIP

SEQ ID NO: 16055 - DNA, 696 bp, Unknown
  Obtained from environmental sample
  misc_feature (1)..(696): n is a, c, g, or t
atgcttcgcgaacttcgtataaaaaatctagcactgatagaaaacctgacactcgaattccgctccggcttcaccgtcttcacaggcgagaccggcgcgggcaagtccatcctcatcggcgctatcggactcttactcggagagcgggcctcctccgagatgatacgcagcggctgcgaagacgccgaagtcagcggatcgctcgacatagaaaacatccgccacaaactacgcgagtttctgcgggaagccggtatagacgccgaagacggcgggctcatcatccgccgcagcatctcaaaatccggcaaaaacaaaatacacgtcaaccaagtcccgttgccgttatcaaccctcaagactctcggcgacctgctgatagacctgcacggacagcacgaccaccagtcattattaaacgaggagacgcacgtcgatatagttgacgctctgccggaggcgtccgcagccaaagggagctacatatcctcctacaacgcctacaccgccgcggcgcaagagctgcgcgacgcgcaacgggcggcacgggagcttaccgacaagaaagacatgcttgaattccaatacaaagaactctccgccctcaacccgcaacggggcgaagaaacggcgcttgaacagaactctcgcttctgtcaccgccgccgagcgctccgatgcgtaacggcatactga

SEQ ID NO: 16056 - protein, 231 aa, Unknown
  Obtained from environmental sample
  DOMAIN (1)...(211): RecF/RecN/SMC N terminal domain
  misc_feature (1)..(231): Xaa is any amino acid
MLRELRIKNLALIENLTLEFRSGFTVFTGETGAGKSILIGAIGLLLGERASSEMIRSGCEDAEVSGSLDIENIRHKLREFLREAGIDAEDGGLIIRRSISKSGKNKIHVNQVPLPLSTLKTLGDLLIDLHGQHDHQSLLNEETHVDIVDALPEASAAKGSYISSYNAYTAAAQELRDAQRAARELTDKKDMLEFQYKELSALNPQRGEETALEQNSRFCHRRRALRCVTAY

SEQ ID NO: 16057 - DNA, 576 bp, Unknown
  Obtained from environmental sample
  misc_feature (1)..(576): n is a, c, g, or t
atgaacaacctagttcccaaaaggcttttgcagatagcagaggatattcgctccgaaggtgggcgggcttttttggttggtgggtttgtgcgagattctttgcttggcagtcgcgatgaaatacgggattttgatatagaggtttataaaattagccaagagaaattgctctccattctttcaaaacatggcaaacctaatttgatagggaaagcttttggcgttgtgcatctatcacggcaaaatattcattacgatttttcttttccaagaacagaaagtaaaataggaagcggacacagggcgtttgatgttcaaactaatcctaatttgagttttgaagaagcggcaaaacgccgagacttcacaatcaatgcaatgggcatggagcttcctcacttggagttggtagatccatataatggtagcaaagatttggaaggtaaaattttgcggcacgttagcgaggcttttgcagaagattcgctcagggtgctcagggcggttcagtttgcggcgcgttttgagcttanggcggcaaagaagactatgaactttgcaaaactctttctttga

SEQ ID NO: 16058 - protein, 191 aa, Unknown
  Obtained from environmental sample
  DOMAIN (87)...(191): Poly A polymerase family
  misc_feature (1)..(191): Xaa is any amino acid
MNNLVPKRLLQIAEDIRSEGGRAFLVGGFVRDSLLGSRDEIRDFDIEVYKISQEKLLSILSKHGKPNLIGKAFGVVHLSRQNIHYDFSFPRTESKIGSGHRAFDVQTNPNLSFEEAAKRRDFTINAMGMELPHLELVDPYNGSKDLEGKILRHVSEAFAEDSLRVLRAVQFAARFELXAAKKTMNFAKLFL

SEQ ID NO: 16059 - DNA, 540 bp, Unknown
  Obtained from environmental sample
  misc_feature (1)..(540): n is a, c, g, or t
atgacctatttggccatagatttgggggcaggaagcgggcgcgccattgttgggcgcattgaggggaatcgccttcaattagaagaaatactgcgctttgacaatacgcctgtgcgccttgggaataccatatattgggattttctctccctttttgcgaatgtcaaaaagggcatcgcccttgcggtaaaaaaaggccatgccctaaatggaataggcgtggatacgtggggcgtggattttggactgttggacagcttgggtaacttactgggcaaccctgtcacctaccgcgacagccgcacagaacacatgagtaatgaagccttcaaggccatatccaaaagcgagatgttccaagtgtctggcatccaactgatggagataaacacgctattccaattgttgagccttaaaaagcacaatgacccaacgctgcaagtggcagacaaactactgttcgttcccgacctcattaattacttcttggcgggaaaaagtacaaacgaatataccatcgcctccacctcgcaattgtga

SEQ ID NO: 16060 - protein, 179 aa, Unknown
  Obtained from environmental sample
  misc_feature (1)..(179): Xaa is any amino acid
MTYLAIDLGAGSGRAIVGRIEGNRLQLEEILRFDNTPVRLGNTIYWDFLSLFANVKKGIALAVKKGHALNGIGVDTWGVDFGLLDSLGNLLGNPVTYRDSRTEHMSNEAFKAISKSEMFQVSGIQLMEINTLFQLLSLKKHNDPTLQVADKLLFVPDLINYFLAGKSTNEYTIASTSQL

SEQ ID NO: 16061 - DNA, 396 bp, Unknown
  Obtained from environmental sample
  misc_feature (1)..(396): n is a, c, g, or t
ttgcgccagcgccaggacgtgaatgtggtgctgcacgttcagtcccaatacgcgactataatcgcctgcatgaaagaaaagcctgccgatttcaacgtgaccgcagaagtgccatgctattgcggtagggagataccagtaataccctacttccgccctggctcaccggaactagccaaagccgtcctagaagctatgcagagccacgactgcattttgctcagcaagcacggccaagtggtctgcggcaaagattttgacgatgctttccaaaaggccgtgttctttgagatggcttgtcacattatagttggcgcgggcaaaggcaactacctgacgctgtctaatgatgaactaaacgacttggacatttacgttctgggcaaaaagccatga

SEQ ID NO: 16062 - protein, 131 aa, Unknown
  Obtained from environmental sample
  DOMAIN (2)...(116): Class II Aldolase and Adducin N-terminal domain
  misc_feature (1)..(131): Xaa is any amino acid
MRQRQDVNVVLHVQSQYATIIACMKEKPADFNVTAEVPCYCGREIPVIPYFRPGSPELAKAVLEAMQSHDCILLSKHGQVVCGKDFDDAFQKAVFFEMACHIIVGAGKGNYLTLSNDELNDLDIYVLGKKP

SEQ ID NO: 16063 - DNA, 366 bp, Unknown
  Obtained from environmental sample
  misc_feature (1)..(366): n is a, c, g, or t
gtggcggatgtaataaagagcagggagcagggactgtcaccgattcggggaaatatgcgaaaagaaaacacgactaaaaattacttcacctattcactgaaaaaaattaaaatcgttataaccgaggaaaacaacgccataaccggtgtgttttttggcgcagaaataccggccggttttattaaaaccgaaactcagctgataaaaaaagcctcggcgcagatcgaagaataccttaacgggaaacgaaaaaaattctccctgccgctttccatgcgcggcacaccattccagatggatgtctggcgggccctgcaaaccataccctacggcgagacccgttcctacaaggaaattccgaactga

SEQ ID NO: 16064 - protein, 121 aa, Unknown
  Obtained from environmental sample
  misc_feature (1)..(121): Xaa is any amino acid
MADVIKSREQGLSPIRGNMRKENTTKNYFTYSLKKIKIVITEENNAITGVFFGAEIPAGFIKTETQLIKKASAQIEEYLNGKRKKFSLPLSMRGTPFQMDVWRALQTIPYGETRSYKEIPN

SEQ ID NO: 16065 - DNA, 816 bp, Unknown
  Obtained from environmental sample
  misc_feature (1)..(816): n is a, c, g, or t
atgaaacattgcntgaacgaaacaagccatcaaaaccggacgaggttattttattcagctccgattgtaatagccgctatgacggccatcaccgtaggctatattttaaatgcccttaaaaacggccatgaacccttctttctgatacatataataacaaatacggcatatctgtttttacttatctgttgttttttatttatgaaaatatggcctcttttaagggaaaagcgatttaattccattctgcatattgtgtgttttttatcgctgctttgggcgtctgtgttttgcgtttttgatcatagtatgatgaatattactatgggactttttatatattctatcttttttgcgataaaaccccgtatttttttatttattgaacttttggtattgctgcccttgttgatagcgctctcttttgcggggatgaaagaactggtattatttgaaaattacgtcaaaattctctttgtcggcgttttttcgggttacctgtcctttaaagtatattattccaccatggaagtcatcgccaacaaaaaaatagttgaaatggaaaccgaagcggcccgtgacgcgcttttacgttttagcacaatatggaactgggtggaatgcggcattgttattattaacgccaggacaaaggagatactggatataaaccctgtcgcggcgcgtatgttcggcggggatcgggattttattataggaaaatgctgtcatgagattttctgtcccgcggataaacattcctgcccgatcatcgactttcaccaggtagttgaccgttcggagcgcgtgttataa

SEQ ID NO: 16066 - protein, 271 aa, Unknown
  Obtained from environmental sample
  misc_feature (1)..(271): Xaa is any amino acid
MKHCXNETSHQNRTRLFYSAPIVIAAMTAITVGYILNALKNGHEPFFLIHIITNTAYLFLLICCFLFMKIWPLLREKRFNSILHIVCFLSLLWASVFCVFDHSMMNITMGLFIYSIFFAIKPRIFLFIELLVLLPLLIALSFAGMKELVLFENYVKILFVGVFSGYLSFKVYYSTMEVIANKKIVEMETEAARDALLRFSTIWNWVECGIVIINARTKEILDINPVAARMFGGDRDFIIGKCCHEIFCPADKHSCPIIDFHQVVDRSERVL

SEQ ID NO: 16067 - DNA, 354 bp, Unknown
  Obtained from environmental sample
  misc_feature (1)..(354): n is a, c, g, or t
atgaaaagaaaaagctatattgcaaaaaactattttaccatgagcgaaatagctacatacagccccgatggtgtggcaggtttttcagttttgatagaggacgaaacagtttggcttacgcaagcgcagatgacagctctttttcaaaaggataaatcggttatatcgaggcatataaaaaacatttatacggaaaaggagctgcaaagggaggcaactgttgcaaattttgcaacagttcaaaatgaaggagggcgagaggttgtccgaaacgttgagtgctataaccttgacgtcattatttctgttggataccgcgtaaagtcgcaacacggcacacagtttcgccagtag

SEQ ID NO: 16068 - protein, 117 aa, Unknown
  Obtained from environmental sample
  misc_feature (1)..(117): Xaa is any amino acid
MKRKSYIAKNYFTMSEIATYSPDGVAGFSVLIEDETVWLTQAQMTALFQKDKSVISRHIKNIYTEKELQREATVANFATVQNEGGREVVRNVECYNLDVIISVGYRVKSQHGTQFRQ

SEQ ID NO: 16069 - DNA, 378 bp, Unknown
  Obtained from environmental sample
  misc_feature (1)..(378): n is a, c, g, or t
atgtttttgagcggaggaaaaaataaaatggcaattttacccgtttttaaaagcacgtttaacttaatgatcccgatattttttgccgcctttggaggacttttccccgctcttgccggaagcttaaacatcgcccttgaaggattattgctttccggcgcgttttgttctttagccgtatttcacttttcaggcagcgtaaccgccgccgtaatgtcggctgttttaacggcaaccgctttgtccgcgttacacatgttagctgtttttaaacttaaagccgatttatttatttcaggtctggcgataaatttattttcaagcnggtttatgcgtagttctatccgaaaaaatattggtacaactcggccgatctga

SEQ ID NO: 16070 - protein, 125 aa, Unknown
  Obtained from environmental sample
  misc_feature (1)..(125): Xaa is any amino acid
MFLSGGKNKMAILPVFKSTFNLMIPIFFAAFGGLFPALAGSLNIALEGLLLSGAFCSLAVFHFSGSVTAAVMSAVLTATALSALHMLAVFKLKADLFISGLAINLFSSXFMRSSIRKNIGTTRPI

SEQ ID NO: 16071 - DNA, 582 bp, Unknown
  Obtained from environmental sample
  misc_feature (1)..(582): n is a, c, g, or t
atgccgatgtcaaattatctgtttacggggcctnttcttgaccctgaaacatcactcatatcgacaaaaaaaattgttgaaaatatgcggcttcctcaaattttaaaaccatcaagtttaagctcaggaatttttatcgctcttgtttttgtttttatagtctggtttttcctttacaaaacaaaaacaggctatgaattcagaatagccggaaaaaatgaaatgtttgcgcgttacggcgggatacatactaaactaaacaccgttatagcaatggcggctagcggcgcattatacgggcttgccggaagcatcgcggttcttggaacgcattatgccgtaattaaagaattttcctcaggattgggctggagcggcttaaccgtagcgttaatcgcaaatttttcccccatcgccgtgataccctgcgccctatttctcgcatggacggaaacaggcgcaaggatcgcaatgcaaaatacgggaataacctatgaaatctcatacataattcaggccgtgattttctttttttcaacaagtttagcggttaaaaatgtttttgagcggaggaaaaaataa

SEQ ID NO: 16072 - protein, 193 aa, Unknown
  Obtained from environmental sample
  DOMAIN (1)...(180): Branched-chain amino acid transport system / permease component
  misc_feature (1)..(193): Xaa is any amino acid
MPMSNYLFTGPXLDPETSLISTKKIVENMRLPQILKPSSLSSGIFIALVFVFIVWFFLYKTKTGYEFRIAGKNEMFARYGGIHTKLNTVIAMAASGALYGLAGSIAVLGTHYAVIKEFSSGLGWSGLTVALIANFSPIAVIPCALFLAWTETGARIAMQNTGITYEISYIIQAVIFFFSTSLAVKNVFERRKK

SEQ ID NO: 16073 - DNA, 582 bp, Unknown
  Obtained from environmental sample
  misc_feature (1)..(582): n is a, c, g, or t
atgcgaaacgaagcgtcgctgatattaagccgcgccgaggcctatattggcgttctggtggatgacctcaccaccttgggaaccaaagagccctaccgaatgttcaccagccgcgccgaacataggcttgtgctaagacatgacaccgccgatacccgccttactcccaaagccagagacctgggactaattgacgatgagcgctgggaaaggtttcaaaagaaaattgaggggttaaatcagatacaggagctgttaaaggcgaagaaagcttccagtcagaataatcccggtgcctcgcccgagttttcaccgtggcctgctgaatgggtcgagagggtatacctggacatcaagtacacgggttacatcgagaaagagaaacgcgccgtggagaaactggctaaaatggagggcgttaaaattccgggggatttggattattcttgcgttacagggctttcagcggaggcgaaggaaaagttaatcgcggtaaagccattgacgttgggacaagcggcgcgcatccccggcatacgccagggagatattgcgcttttaatgataatattgaagaaatag

SEQ ID NO: 16074 - protein, 193 aa, Unknown
  Obtained from environmental sample
  misc_feature (1)..(193): Xaa is any amino acid
MRNEASLILSRAEAYIGVLVDDLTTLGTKEPYRMFTSRAEHRLVLRHDTADTRLTPKARDLGLIDDERWERFQKKIEGLNQIQELLKAKKASSQNNPGASPEFSPWPAEWVERVYLDIKYTGYIEKEKRAVEKLAKMEGVKIPGDLDYSCVTGLSAEAKEKLIAVKPLTLGQAARIPGIRQGDIALLMIILKK

SEQ ID NO: 16075 - DNA, 567 bp, Unknown
  Obtained from environmental sample
  misc_feature (1)..(567): n is a, c, g, or t
ttgtttgtggtaaaatttttgatgctaattttaccagcggcggttttactgttttccgcctgtactgccaaagcccagagcgcggctacttcgggaacggtaaaagcctttgacgaagccggattacggcttttaagcagtaaggtatcgccaagggatttttcgcttcctttgctggaaggagaaaccaaaagccttagctcgtataagggcaaagtggtctttctgaatttctgggctacctggtgtggcccctgtcgggtagagatgccgtccatggaagcgctatacaacaagttcagtgataagggtttggagatactcgctgtaaacagcggcgaggatcaggctacagtccgttcttttttgaaaaatgaaggattctcttttcccgccatgctggacctggacggaagggtcagcgcaaactacggaatacaggcaattccaacgacctttcttatcgatcgggacggaatgataattttaaggcttgtgggaagcattgactgggacaccccaaaaatccacgccgcgctggaaagcctgttgagcaatggactttga

SEQ ID NO: 16076 - protein, 188 aa, Unknown
  Obtained from environmental sample
  SIGNAL (1)...(27)
  DOMAIN (48)...(178): AhpC/TSA family
  misc_feature (1)..(188): Xaa is any amino acid
MFVVKFLMLILPAAVLLFSACTAKAQSAATSGTVKAFDEAGLRLLSSKVSPRDFSLPLLEGETKSLSSYKGKVVFLNFWATWCGPCRVEMPSMEALYNKFSDKGLEILAVNSGEDQATVRSFLKNEGFSFPAMLDLDGRVSANYGIQAIPTTFLIDRDGMIILRLVGSIDWDTPKIHAALESLLSNGL

SEQ ID NO: 16077 - DNA, 366 bp, Unknown
  Obtained from environmental sample
  misc_feature (1)..(366): n is a, c, g, or t
atggactttgattgcattgtgattggcggcggccacgccggaatagaagcctctttggctgtcagccgccttggattcagctgcctgctcgtcacccaaaatcccgactccataggcgcaatgtcctgtaatccggctgtggggggtctttcaaaaggcaacctcgtcagggaagttgacgctctgggcggcgagatggctcgcctcatcgacaagacgatgatccagtatagggtgctcaacccgtcaggggggcggcggttcagtcaccaagggcacaggcggacaagaaagcgtaccaggcggcagccccgcaagcgggtgagggacaaaaggattgacgatttttatggataccgtgggtga

SEQ ID NO: 16078 - protein, 121 aa, Unknown
  Obtained from environmental sample
  DOMAIN (4)...(121): Glucose inhibited division protein A
  misc_feature (1)..(121): Xaa is any amino acid
MDFDCIVIGGGHAGIEASLAVSRLGFSCLLVTQNPDSIGAMSCNPAVGGLSKGNLVREVDALGGEMARLIDKTMIQYRVLNPSGGRRFSHQGHRRTRKRTRRQPRKRVRDKRIDDFYGYRG

SEQ ID NO: 16079 - DNA, 423 bp, Unknown
  Obtained from environmental sample
  misc_feature (1)..(423): n is a, c, g, or t
gtgatcattcgcgtgcttatcgttgtatttattttaatatcttcgtttatagcgattatacaatacaaaggcggagttaattttatcgcgcagcttatgggcatttcatggggcgcgcttgctggatctttccttgctcccttcctgtacgggctttattggaagcgcgtcacaaaacctgctgtttggtgcaactttattttcagcaccgcgcttatgacactaaatatatttttcagaagttctttcccgtcgattttacagtcgccgattaacgccggtgcgtttacaatgctcgccggttttataattgtgcctgtaataagcatattgaccaaagaacctgaaaaagtctcggtggaatattgtttctcctgttatgaagaaacagtcaacgtaaaaatccgcaacgaccttggttaa

SEQ ID NO: 16080 - protein, 140 aa, Unknown
  Obtained from environmental sample
  misc_feature (1)..(140): Xaa is any amino acid
MIIRVLIVVFILISSFIAIIQYKGGVNFIAQLMGISWGALAGSFLAPFLYGLYWKRVTKPAVWCNFIFSTALMTLNIFFRSSFPSILQSPINAGAFTMLAGFIIVPVISILTKEPEKVSVEYCFSCYEETVNVKIRNDLG

SEQ ID NO: 16081 - DNA, 444 bp, Unknown
  Obtained from environmental sample
  misc_feature (1)..(444): n is a, c, g, or t
gtgtcggaattttccgctgttaaaatcgaaaaaagcggcggtcaaaaattttcccgctgggaacggataatcaaggaagcgcggcagcaaagcggctcaggcacggcgacggtaatacggcagccgctgtccatagacggcctttttgcatactgggagcagataaaaatacaacagtttggcgttcttggcttgttttttcatcatttgccccttgcaaagctcagcctccacgggtatcttgataatagccccgaaatggttgtactgactattgggccggagggaggtttttcccccgccgaggcggaacggtttgtggccgccggatttaagccctttactatcggaggtacgatcctgcgcacggaaacagccgccctgtacgctcaggcggcggtacggatacttttatgggagaaagattcgtgggagatgaaataa

SEQ ID NO: 16082 - protein, 147 aa, Unknown
  Obtained from environmental sample
  DOMAIN (1)...(136): Protein of unknown function (DUF558)
  misc_feature (1)..(147): Xaa is any amino acid
MSEFSAVKIEKSGGQKFSRWERIIKEARQQSGSGTATVIRQPLSIDGLFAYWEQIKIQQFGVLGLFFHHLPLAKLSLHGYLDNSPEMVVLTIGPEGGFSPAEAERFVAAGFKPFTIGGTILRTETAALYAQAAVRILLWEKDSWEMK

SEQ ID NO: 16083 - DNA, 429 bp, Unknown
  Obtained from environmental sample
  misc_feature (1)..(429): n is a, c, g, or t
atgggagaaagattcgtgggagatgaaataacaccgggtctcgctgcgtctcaagatcaggccagagagcgggtaaccttccttaaaatacctatagatattgttgagccaaaccggcttggtcttttggcatttcaactgctgacagaaggaaaagaacaaaacatcgtcctgctttccctgtgggacctcctgcgcgcccggcggaatgccgaataccgggactatgtgaagaaggcggcgctggttattcccatttcaaaaagcattatccgcggcattcggtttttgctggggaaacaggccgtccgctatatgccctttgattttgtgatatgcctgttaagaacgctggaaagttacgaactttcaagttattttttgggcggtaaaaagcgcgttttacaaaagccgaaaaaacattcgtga

SEQ ID NO: 16084 - protein, 142 aa, Unknown
  Obtained from environmental sample
  misc_feature (1)..(142): Xaa is any amino acid
MGERFVGDEITPGLAASQDQARERVTFLKIPIDIVEPNRLGLLAFQLLTEGKEQNIVLLSLWDLLRARRNAEYRDYVKKAALVIPISKSIIRGIRFLLGKQAVRYMPFDFVICLLRTLESYELSSYFLGGKKRVLQKPKKHS

SEQ ID NO: 16085 - DNA, 327 bp, Unknown
  Obtained from environmental sample
  misc_feature (1)..(327): n is a, c, g, or t
ttgatgatgaaacgcggtgaagtttggtgggttgattntgagccggcatctggaagcgaaaccagaaaaacaaggccggctgtcattataagtaatgacgcttcaaatatggccctctcgcgtgtcgtggttgttccattcaccagtaatatatcccgaatttatccgggtaatgtattggtaaatgtaaatggaaagaccagcaaactaatggctgatcaaataatgactgctgataaaaaccgcttaaagaatcgcatcggcgtgttgaattctgatgatatggtaaaagtcgcagaaaccgttaggatgcatttagaattataa

SEQ ID NO: 16086 - protein, 108 aa, Unknown
  Obtained from environmental sample
  DOMAIN (4)...(107): PemK-like protein
  misc_feature (1)..(108): Xaa is any amino acid
MMMKRGEVWWVDXEPASGSETRKTRPAVIISNDASNMALSRVVVVPFTSNISRIYPGNVLVNVNGKTSKLMADQIMTADKNRLKNRIGVLNSDDMVKVAETVRMHLEL

SEQ ID NO: 16087 - DNA, 873 bp, Unknown
  Obtained from environmental sample
  misc_feature (1)..(873): n is a, c, g, or t
ttggaacttggctgggaattgtttttattaaaccgcgggaacaggaataatgaaataagcgcgaaagagcagcctgggaaactggttgaaataaactgcgacataagaacggacagcgtggagacgattcaccgcaagctcaagtccgtgtcgggcggacagcttttcgatgttgtcgcggattttatcgcgttcacgcccgatcatgttgaaaaggatttctctgtttttgagtatctttgcagacagtacgtctttataagctccgcctcggcgtaccaaaaacccctgtcttcatacctggttaccgaaagtacccccctggctaatccctattgggagtattcccgtaacaaaatcgcctgcgagaattttttaatggccgcgtaccgcaataagggttttcccataaccattgtacgtcccagccatacctatgatgaaagatccgtcccgctgggggttcacggggataaaggaagctggcaggtcgtaaaaaggatgctcgaaggcaaacccgtgatcatacacggggacggcaccagcctttggactatgacgcataacagcgattttgcctcggccttcaccggcctgatggggaacatacacgccattggcgaggctgtgcagataacctcggacgaaaccctggactggaaccagatttacagggcgattgcggacgccttgaatatagagctgaacgccgtgcatatttccagcgaatacctggcgagtaacagcccctacgattttaccggaagcctgatcggagacaaggcgaactccgtagtctttgacaataccaagctaaagcggcttgttcccggcttcttcgccaaagtgcgttttgaccagggatacggatga

SEQ ID NO: 16088 - protein, 290 aa, Unknown
  Obtained from environmental sample
  DOMAIN (3)...(213): NAD dependent epimerase/dehydratase family
  misc_feature (1)..(290): Xaa is any amino acid
MELGWELFLLNRGNRNNEISAKEQPGKLVEINCDIRTDSVETIHRKLKSVSGGQLFDVVADFIAFTPDHVEKDFSVFEYLCRQYVFISSASAYQKPLSSYLVTESTPLANPYWEYSRNKIACENFLMAAYRNKGFPITIVRPSHTYDERSVPLGVHGDKGSWQVVKRMLEGKPVIIHGDGTSLWTMTHNSDFASAFTGLMGNIHAIGEAVQITSDETLDWNQIYRAIADALNIELNAVHISSEYLASNSPYDFTGSLIGDKANSVVFDNTKLKRLVPGFFAKVRFDQGYG

SEQ ID NO: 16089 - DNA, 471 bp, Unknown
  Obtained from environmental sample
  misc_feature (1)..(471): n is a, c, g, or t
atgagattcaagttttcaagtttaatttggggcacgtttttattgcttgccgcggcgtttattgtgtttaatcaaattaacgggttcgcggatatcggcgtcggtagcatagtcgccgccgttttgtcgttggcggttattgtgcagtgcgtggcgagtctgcattttgccccgcttcctatccctatcgcgatattgtatatcatttttcaggcgccgttggagctgccttatataaaaacttgggcgttgatcttggcttccgttctggcgtctatgggtctggcggccttacttccgcgaaagagccgctataaccacgtcaaggataaggattactgccgaacaagcaaccgtcaccggcaagtccgtacggagagcggcgccaacgacaataatccgtccattaacgtgaatttcggggcggtcgccaggcatttacgcgccgattgccttgaaacagcgcggtaa

SEQ ID NO: 16090 - protein, 156 aa, Unknown
  Obtained from environmental sample
  SIGNAL (1)...(24)
  misc_feature (1)..(156): Xaa is any amino acid
MRFKFSSLIWGTFLLLAAAFIVFNQINGFADIGVGSIVAAVLSLAVIVQCVASLHFAPLPIPIAILYIIFQAPLELPYIKTWALILASVLASMGLAALLPRKSRYNHVKDKDYCRTSNRHRQVRTESGANDNNPSINVNFGAVARHLRADCLETAR

SEQ ID NO: 16091 - DNA, 354 bp, Unknown
  Obtained from environmental sample
  misc_feature (1)..(354): n is a, c, g, or t
gtgagcggcaactatgacaataatccgtctgttaatgtgagttttggaggagtcaattggcatttaagcgccgataatcttaaaaccgtcaaattgaattgcaattacggcgcgttgaacgttttttttaaccaggttgtgcccgatcccaacggcgtggaagtaattttggattgtcgtttcggcggcattgatttatttgtacccaaacattggcgcattatagacaaggtgagcagcagtttgggcggcgtaagcatagataaaaactttgccgcaacgcctgagaacgcgccgaaactgacgcttaccggaagcgtttcattgggcgggattgacgtacgttatatataa

SEQ ID NO: 16092 - protein, 117 aa, Unknown
  Obtained from environmental sample
  misc_feature (1)..(117): Xaa is any amino acid
MSGNYDNNPSVNVSFGGVNWHLSADNLKTVKLNCNYGALNVFFNQVVPDPNGVEVILDCRFGGIDLFVPKHWRIIDKVSSSLGGVSIDKNFAATPENAPKLTLTGSVSLGGIDVRYI

SEQ ID NO: 16093 - DNA, 912 bp, Unknown
  Obtained from environmental sample
  misc_feature (1)..(912): n is a, c, g, or t
ttgagcggctggtgttgcctaactcggcgacagcggctccgcgacctgagacctgctgtctttgcggaacacttccgtcaacttcgactcggcggaaaaatggacggcggggggttacgtgccaccacggttaataagcctcgcgccttgttgagcaccatcttttcagaagccgtagacgcggacatcattccatacaaccccattgagcgggtcaaagccctcaaagaagaaaagaccgaccctctcgtgttgacggaggagcaagcgcgtaaacttcatggtcttatgttgaaaatgccagatgtcgtgatgcgcgggttgtttttaacgttgttacataccggagcgcggacgggggaagcgcgggcgcttacgtggaatgatgttgacttcgacaagggggtcatcagcattagcaagagcgcagacgacaagaaccgggtcacgccgcctaagagcaagagtagcaaacgcgtaattaagatgccgccgtttttgttgaaatacctaccccaacacaaacgcgacgttcaactctatgcggcgggtcagggcacgttttggacggaaaacaaccttgttttccccaataatttgggcggtatcattaccaataccgtaccgggaatggaactgaggaaggtggttaaggggacggacttcccgaatacgcatccccacaccctccggcacacattcgcctcaattttgataagcaagggggcggacgtgaagacggttcagaccatactcggccatagcacggcggctatgactttggacagatacgcacacgcctttgcgaccgcgacggcngcggcggtggtgtcggtgggcgacgcantcgccggcggaggcaccgacgcgtctcagcactttttgcccgaccttgaattgaccgctgaatag

SEQ ID NO: 16094 - protein, 303 aa, Unknown
  Obtained from environmental sample
  DOMAIN (83)...(274): Phage integrase family
  misc_feature (1)..(303): Xaa is any amino acid
MSGWCCLTRRQRLRDLRPAVFAEHFRQLRLGGKMDGGGLRATTVNKPRALLSTIFSEAVDADIIPYNPIERVKALKEEKTDPLVLTEEQARKLHGLMLKMPDVVMRGLFLTLLHTGARTGEARALTWNDVDFDKGVISISKSADDKNRVTPPKSKSSKRVIKMPPFLLKYLPQHKRDVQLYAAGQGTFWTENNLVFPNNLGGIITNTVPGMELRKVVKGTDFPNTHPHTLRHTFASILISKGADVKTVQTILGHSTAAMTLDRYAHAFATATAAAVVSVGDAXAGGGTDASQHFLPDLELTAE

SEQ ID NO: 16095 - DNA, 453 bp, Unknown
  Obtained from environmental sample
  misc_feature (1)..(453): n is a, c, g, or t
atggaaaaagagctattttacgttaatggtctgaaattttcatgtaaacgttgttcttcctgctgccgttacgatcaagggtttgtgtatctttcaaaaaaagaccttaataaattgagttccgcgctgaaaatggacgaaaatgacgtaatcagcgaatattgcagatgggtaaaaaaccggaacggcgattctgttctttcgttaaaagaaaagtcaaattatgactgtattttatgggattccggttgttctgtttattcggcgcgcccgcttcaatgcgttacgtttccgttttgggaatcgataattgccgacgcgcaatgctgggaaagcgcggcaaagagctgtccgggtatgaattcaggagaactgcatacaatggcggaaatagaagaagccggaatgctgcggtcaagtgaaccgttaatttgtaagacagggggaaattga

SEQ ID NO: 16096 - protein, 150 aa, Unknown
  Obtained from environmental sample
  DOMAIN (13)...(122): Uncharacterised protein family (UPF0153)
  misc_feature (1)..(150): Xaa is any amino acid
MEKELFYVNGLKFSCKRCSSCCRYDQGFVYLSKKDLNKLSSALKMDENDVISEYCRWVKNRNGDSVLSLKEKSNYDCILWDSGCSVYSARPLQCVTFPFWESIIADAQCWESAAKSCPGMNSGELHTMAEIEEAGMLRSSEPLICKTGGN

SEQ ID NO: 16097 - DNA, 915 bp, Unknown
  Obtained from environmental sample
  misc_feature (1)..(915): n is a, c, g, or t
gtgatcgcgagctttcataagtgctggcgggcatcatacngggggctgaaagcaaagggccccattgtttacgggctgatgtcatttttaatgggcatttcagggctaattaaaaaaatatttaaggtaaacccgggcaaaaaaatgttcggctttattctggaaaaggccagccttacttcgatacggatctgcatctgcggcggcgggcctcttgcccccagcgttttcaaaaaatacaaccagcttggcatcgactttgtgcagggttacggcctgacggaaacttcccccatcattacgattaaccctgttgagcattacaaggaaaccagcgtaggcaggccctgtccccgcgctgatataaaaatactgaaccccggcgggcgcggcataggcgagataatcgtcaaaggccccatggtgatgacaggttactataacatgccggcggaaacctcggagacctttaccgctgacggctatcttaagacaggagaccttggttacatggacagcgaaaactacctgtaccttaccggcagggaaagaaacatgatcgttaccgagggcggtaaaaacgtctaccccgaagaaattgaaaacgagttccagctttttgatgagattgaacagatacttgtcaaggggtatacgccggacaagaaaacaatgtctgaaaacatagaagcctttgtatatcccaaccctgaattcaaagatgaaaccaacagtagaccttccggtgaaaagatgaaagcccgcattaacaatattatttccatagtgaaccagcggctcctcccctaccagcggattgaaaggacgaccatccttgaccagccaatggagatgaccacaaccaagaagataanacggggaaacttgcangatcaggcaacaggcaataagtaa

SEQ ID NO: 16098 - protein, 304 aa, Unknown
  Obtained from environmental sample
  DOMAIN (1)...(215): AMP-binding enzyme
  misc_feature (1)..(304): Xaa is any amino acid
MIASFHKCWRASYXGLKAKGPIVYGLMSFLMGISGLIKKIFKVNPGKKMFGFILEKASLTSIRICICGGGPLAPSVFKKYNQLGIDFVQGYGLTETSPIITINPVEHYKETSVGRPCPRADIKILNPGGRGIGEIIVKGPMVMTGYYNMPAETSETFTADGYLKTGDLGYMDSENYLYLTGRERNMIVTEGGKNVYPEEIENEFQLFDEIEQILVKGYTPDKKTMSENIEAFVYPNPEFKDETNSRPSGEKMKARINNIISIVNQRLLPYQRIERTTILDQPMEMTTTKKIXRGNLXDQATGNK

SEQ ID NO: 16099 - DNA, 390 bp, Unknown
  Obtained from environmental sample
  misc_feature (1)..(390): n is a, c, g, or t
atgaataataaaattatattgattggtggatattgtgctaccggaaaatctactttctcgcgtagattgtccgaatttttaaaaattccatgttttaataaagatactatcaaagaggctttaggtgatggatttggaccagaaaatgatatggtttgcaaaaaaggtaattttacaacatttgtacttatgttatatatacttgaacaatttttacaagttcagaaagcatgcatattagaaagtgattttacaaaaaaggaaagtgaacggattaaagaattactagataaatataattataaatgtcttacatttatttttaaaggtaactttgatgttttatttgacagatacatggaaagagacaaagtagaaaaacgtcattga

SEQ ID NO: 16100 - protein, 129 aa, Unknown
  Obtained from environmental sample
  misc_feature (1)..(129): Xaa is any amino acid
MNNKIILIGGYCATGKSTFSRRLSEFLKIPCFNKDTIKEALGDGFGPENDMVCKKGNFTTFVLMLYILEQFLQVQKACILESDFTKKESERIKELLDKYNYKCLTFIFKGNFDVLFDRYMERDKVEKRH

SEQ ID NO: 16101 - DNA, 951 bp, Unknown
  Obtained from environmental sample
  misc_feature (1)..(951): n is a, c, g, or t
atgnatatacaggtgcctcaggagaccccaatagcctatgatttcaatatttccggtctgctcgcgaacggcatggcttcgggaacgcttgtttgntcaatggaagacatgatcttttccattgtgggggatttaaccgctcatgataccgagatgggcgttaatgccggtgaaatggccgctgccaaagaaggccgaggtgctttcgcttccgagaatcaaaaagtatcggtaattacagacataaatgttagaacaggccggagggttgagtttctgtggcccagcgtggattttccggtaatccaggccaatgcggacatgggaacgggaatccatattacaagcgactctctggcaaagcgtttcacgctgaacggggacgtgaaactgagaagcggggagatcttctatctggagcgaaatttttatatcagggaaggtactctgttcttcagggaaaatgaggtagaatttgatccaaaaatatccgcaagggccgaaattcgggaccaggctgaaatcggcccggttacaatctccatgattatcgataatgcccctttgcggtcattttcaccgaggtttgtatcaactccgcccctctcacagctggaaatctactcccttctgggtcaggcttcccagggggagggagaaccgcggaatctggctatggcgacttcggtggtaatggacagcctggcccagtttacggttatcaaccggctccaaaggcaggtcaggaattttctcggcatggacatgctttccatgcgtacccagcttttacaaaatgtggtaatacaggcggcaagcggcaggttttttgacaacgcttcggacaggccttacaggattggtaactattttgacaataccactgtttttataggtaaatacatcagtacggatttatttggcgaagcccatgctttctttcaagtatga

SEQ ID NO: 16102 - protein, 316 aa, Unknown
  Obtained from environmental sample
  DOMAIN (1)...(314): Family of unknown function (DUF490)
  misc_feature (1)..(316): Xaa is any amino acid
MXIQVPQETPIAYDFNISGLLANGMASGTLVXSMEDMIFSIVGDLTAHDTEMGVNAGEMAAAKEGRGAFASENQKVSVITDINVRTGRRVEFLWPSVDFPVIQANADMGTGIHITSDSLAKRFTLNGDVKLRSGEIFYLERNFYIREGTLFFRENEVEFDPKISARAEIRDQAEIGPVTISMIIDNAPLRSFSPRFVSTPPLSQLEIYSLLGQASQGEGEPRNLAMATSVVMDSLAQFTVINRLQRQVRNFLGMDMLSMRTQLLQNVVIQAASGRFFDNASDRPYRIGNYFDNTTVFIGKYISTDLFGEAHAFFQV

SEQ ID NO: 16103 - DNA, 948 bp, Unknown
  Obtained from environmental sample
  misc_feature (1)..(948): n is a, c, g, or t
ttgattgcgagtggatgcggcattgtagaagaagcgggtatagaatttttcggcatcccttcaggaaaactcaggcgttatttttctgttaatacagccgtggattttttcagggttatcgccggttttttcgctgcaaaaaaaattcttaagaagcaaaaggcgcgcctgcttttttcaaagggcggttttgtcagcgtgcctccctgcgcggcggcgtcttccttaaaaattcctgtctttacgcatgagtcggattttagtccgggacttgcgacaaaaataaacgcgcgatttgtacttcgcacaaaagggaaattatttacagcttacgaaaataccgccggatttttcaaacaggcagtccgtgatcgcgtaatggttagcgggaatccggtacgcggtattttttacggcgcggacgcggcgaagggaagggcttttcttggggtaaaagactctacaaggataatacttgttcttggcggcagtcagggagcgcggcaaattaacgagcttcttcgcgccgcattgcccgagattacaaaaacgtacacggttgtacaccagacggggcctaaccagaagtgggatttgggcgtaactgaaacatacaaaccttttccgtttataagggaagaactgccgcatataatggcggcggctgaacttgtgcttgcaagaagcggcgcaggaatatgggaatgcgccgttttgggaaagcccctgctgttaattccgcttgcgggaaacgcctcaaggggcgatcaggcggaaaatgcccgctattttcaagaagcgggagccgcgcttgtgctgacaggggacaaagcgaatcctgaagcgctgttaagcgcaattaaatcattggaacaggatgacgtanagcgtatgtcaatggcggcagcttctctaaangatgaaagaaagacggcgctggttttatag

SEQ ID NO: 16104 - protein, 315 aa, Unknown
  Obtained from environmental sample
  DOMAIN (2)...(105): Glycosyltransferase family 28 N-terminal domain
  misc_feature (1)..(315): Xaa is any amino acid
MIASGCGIVEEAGIEFFGIPSGKLRRYFSVNTAVDFFRVIAGFFAAKKILKKQKARLLFSKGGFVSVPPCAAASSLKIPVFTHESDFSPGLATKINARFVLRTKGKLFTAYENTAGFFKQAVRDRVMVSGNPVRGIFYGADAAKGRAFLGVKDSTRIILVLGGSQGARQINELLRAALPEITKTYTVVHQTGPNQKWDLGVTETYKPFPFIREELPHIMAAAELVLARSGAGIWECAVLGKPLLLIPLAGNASRGDQAENARYFQEAGAALVLTGDKANPEALLSAIKSLEQDDVXRMSMAAASLXDERKTALVL

SEQ ID NO: 16105 - DNA, 309 bp, Unknown
  Obtained from environmental sample
  misc_feature (1)..(309): n is a, c, g, or t
atggctaagaaattttcagaacttgaagcaaaaatgagccctgagcgaaaggcaagaatagcagaagaagttaaaaaagctctagctgatatgccactgaatgaattgcgaaatgcccgcggtctttcccaaaaagtgcttgccgaggctctgcatatacagcagccggctattgcaaagatggaaaagcgtacagatatgtatatttccacactgcggagccatgttgaagctatgggcggagaacttgaagttattgcgcggtttcctgatggagatgtaagaatctccaatttctcacaaatttag

SEQ ID NO: 16106 - protein, 102 aa, Unknown
  Obtained from environmental sample
  DOMAIN (33)...(86): Helix-turn-helix
  misc_feature (1)..(102): Xaa is any amino acid
MAKKFSELEAKMSPERKARIAEEVKKALADMPLNELRNARGLSQKVLAEALHIQQPAIAKMEKRTDMYISTLRSHVEAMGGELEVIARFPDGDVRISNFSQI

SEQ ID NO: 16107 - DNA, 777 bp, Unknown
  Obtained from environmental sample
  misc_feature (1)..(777): n is a, c, g, or t
atggctatttcaaaaaacaacttaattcctgtnttagttgaaccaagcgaagaaaccttcaacattaatttaaccaaaaaagcaaaagccgttttaagtgtaaatttatacggcaggcaagcagaagttgctaaggaaaaaaatattctattaattgaagattgcgctcaaagcgcaggcataaaacccactggagatgctgcagccttcagtttttaccccactaaaaatttgggtgcgcttggagacgggggagcggttgtttccaacgacgaggaattgaataatattgttagggcacttgggaactatggttctcaaaaaaaatacatcaacgattatttagggtttaattcccgcctagacgaaattcaagcggcggctcttagcgtaaaattaccaaagctgaatgaagacaataaaagacgctgtgaaatagcaatgcgctatattgcagagataaaaaatcagggtattattttgccacaaaaagagggaaacaatgtttggcatttattcgttatccgttgcaaaaatagagatgccttgcaaaagcatttatttgaaaacggaatagaaacgataatacattatcccattcctcctcatttgcaaaaagcatacaaagacggaaatctgctctacgataaacttccaataacggaaaagcttgcaagtgaggttttgagcctgcccattcaccaagccatgacagaagaggaaatagaaaaagtcattaattgtttatccaagcctctccaaaaccagaaaccgtag

SEQ ID NO: 16108 - protein, 258 aa, Unknown
  Obtained from environmental sample
  DOMAIN (1)...(250): DegT/DnrJ/EryC1/StrS aminotransferase family
  misc_feature (1)..(258): Xaa is any amino acid
MAISKNNLIPVLVEPSEETFNINLTKKAKAVLSVNLYGRQAEVAKEKNILLIEDCAQSAGIKPTGDAAAFSFYPTKNLGALGDGGAVVSNDEELNNIVRALGNYGSQKKYINDYLGFNSRLDEIQAAALSVKLPKLNEDNKRRCEIAMRYIAEIKNQGIILPQKEGNNVWHLFVIRCKNRDALQKHLFENGIETIIHYPIPPHLQKAYKDGNLLYDKLPITEKLASEVLSLPIHQAMTEEEIEKVINCLSKPLQNQKP

SEQ ID NO: 16109 - DNA, 465 bp, Unknown
  Obtained from environmental sample
  misc_feature (1)..(465): n is a, c, g, or t
atgatgcgagttttccttacgattgctcatggcgcttccaaaaatcatccccgccgtagtttcctcttgaactttttcaagcgacattccataagcatcctcgccaagcaggatgagaacggaatgtggcatcaggtactggatatgccaagctcctatccggaaacatcctgcacggccatgtttatctgcgccttttgccggggcatccgctatggctggtatatacctgaggaggccgctaaccgtgattacggtaacgcggcggaaaaagcctggcgcactctggaaaactactcgatagacaaaaatggagctgttcacggcgtgtgcagaggctccgagttcgcgttcaacccccgctattacgccgagcatctcttgccaaggcttaacgacacccacggcatcggtattgtgcttcttgccggggtggagcttcttaaattacgggaggcattatga

SEQ ID NO: 16110 - protein, 154 aa, Unknown
  Obtained from environmental sample
  misc_feature (1)..(154): Xaa is any amino acid
MMRVFLTIAHGASKNHPRRSFLLNFFKRHSISILAKQDENGMWHQVLDMPSSYPETSCTAMFICAFCRGIRYGWYIPEEAANRDYGNAAEKAWRTLENYSIDKNGAVHGVCRGSEFAFNPRYYAEHLLPRLNDTHGIGIVLLAGVELLKLREAL

SEQ ID NO: 16111 - DNA, 936 bp, Unknown
  Obtained from environmental sample
  misc_feature (1)..(936): n is a, c, g, or t
ttggcggtaaccgaacagcgctactttccggcagactggaaggctttgcagatattcagggataaactcacatcaccctgggttttaaacgccctgcccagcaacgaaaacaatcaggacgccaagatagaagcggcggcggaggccgatgccttgccggacctggtaatggtgcgctcgacgatttatcaggatttgatcaagtccggtaaaatagctccggtggatgagctgtatcccctgatgcccacccggacgaagcaacagtatgatgccgacagcatatattataccacgatctacggcaaatcctacgggcttgcttctcccggaagcatcattaaaaacgagggccttttaatccgcaaagactggcttgataatctcggccttaaggttcctaccactaccgaggagcttttcacggtaatgaaggcctttaccgaaagagacccggacggcaacggactaaatgatacctggggctatggctatttcaatgaaatcttctccaatgaggaaggctttggccgacgcatggagcctattttcggagcattcggcgttgagggcacctggaacctgaacaaggccgaggccggccttaacgtgcgcaagcccgcgtattttgacgcgcttgcttatgtcaaacgtatggtagacgaaaaggtgatcgatccaaactggcttagctataccaaggacgatttcagggcggcatggaaacagggccgctttggggttatgagggaacagaacgccgctttcgccgcgcaaggcaactacgatcctttcgacaacaacttcccgaacggcgaatggatcgttattgatccgccaaagggccccaccggaaaatattcggtcggtgttatacccaaggctataggatatattgcgttcaacgaaagcaactcggccgctctgccgatctga

SEQ ID NO: 16112 - protein, 311 aa, Unknown
  Obtained from environmental sample
  misc_feature (1)..(311): Xaa is any amino acid
MAVTEQRYFPADWKALQIFRDKLTSPWVLNALPSNENNQDAKIEAAAEADALPDLVMVRSTIYQDLIKSGKIAPVDELYPLMPTRTKQQYDADSIYYTTIYGKSYGLASPGSIIKNEGLLIRKDWLDNLGLKVPTTTEELFTVMKAFTERDPDGNGLNDTWGYGYFNEIFSNEEGFGRRMEPIFGAFGVEGTWNLNKAEAGLNVRKPAYFDALAYVKRMVDEKVIDPNWLSYTKDDFRAAWKQGRFGVMREQNAAFAAQGNYDPFDNNFPNGEWIVIDPPKGPTGKYSVGVIPKAIGYIAFNESNSAALPI

SEQ ID NO: 16113 - DNA, 549 bp, Unknown
  Obtained from environmental sample
  misc_feature (1)..(549): n is a, c, g, or t
gtgttcataaaaataaaccgggctgtatttgaaaagaaaaacgatcttgtaatcgctgttgttacggctgaagggctcaataactcaatcaataataataaagtcgccgatttttataatgatgccgttacaaaacaaaaagaaaccctaaagggtcaggcggcaaagaatgtttatgactttgagcaataccacgccgccattagaagtttcggtattaacccctcgaaatatcaaatttcaattgaggccctgcttaaccgcgtttcaaaaagcgggaaccttgcttccattagccccgttgttgatttggcaaatgccgtatcgctgaaatacctcgtgccgttgggtgtgcatgatattgattccctggtggatgatcttgaaatacgtttttcaaacaacagtgacatatttggagattcggaagacaggccttccaacgaaggcgaagaactggtatatgcttcaggaaacaccattcgcacgagaaaatggatatggcgtcaaatgccctgtggcaagataagtgaaaaaacaacaacatag

SEQ ID NO: 16114 - protein, 182 aa, Unknown
  Obtained from environmental sample
  DOMAIN (62)...(182): B3/4 domain
  misc_feature (1)..(182): Xaa is any amino acid
MFIKINRAVFEKKNDLVIAVVTAEGLNNSINNNKVADFYNDAVTKQKETLKGQAAKNVYDFEQYHAAIRSFGINPSKYQISIEALLNRVSKSGNLASISPVVDLANAVSLKYLVPLGVHDIDSLVDDLEIRFSNNSDIFGDSEDRPSNEGEELVYASGNTIRTRKWIWRQMPCGKISEKTTT

SEQ ID NO: 16115 - DNA, 909 bp, Unknown
  Obtained from environmental sample
  misc_feature (1)..(909): n is a, c, g, or t
atgaaagataaaggcgccaagagcgacaagcggcttcttaaacgcatagaaattattgaaaatttccgcgattcaaaaaacaagccgcagtggatggtccttaccgttattccggttatcccgccggagctgcgtcccatggtgcagcttgaaggcgggcgtttcgccaccagcgatcttaacgacctgtaccgcagggtgatcaaccggaacaaccgcctcaagaggctgcaaaccctcaacgctcctgacatcattatccgcaacgaaaagcggatgctgcaggaagcggtggacgcgctgtttgacaattccaagaaaaagaaagtggtcaaaggctcttccaaccggcccctcaaatcgatcagtgatatgctgaaaggaaagcaggggcgcttccgccagaaccttttgggaaagcgggttgactattcgggccgctcggttattaccgtggggccggacctcaagatgtggcagtgcgggctgcccaccaaaatggcgctggaattgttcaagccctttatcatgaaaaaactcgttgataaagacgtggtgttcaatatcaagaaagccaagatgcttgttgagcaggaaacgccggaagtcttcgctatactggacgaagtggtaaaggaacacccggtgctgctgaaccgcgccccgacgctgcaccggctgggcattcaggcctttgaaccggtgctggtggaaggcaaggcaatcaaactgcatccgttggtctgccacgcctttaacgcggactttgacggcgaccagatggcggttcatgtgccccttacccaggcggcccagatggaatgttggactcttatgctctccgcgcgcaacctcctgaaccccgccaacggcaaaacgattggttccctcccagctcggccgatctga

SEQ ID NO: 16116 - protein, 302 aa, Unknown
  Obtained from environmental sample
  DOMAIN (1)...(137): RNA polymerase Rpb1, domain 1
  misc_feature (1)..(302): Xaa is any amino acid
MKDKGAKSDKRLLKRIEIIENFRDSKNKPQWMVLTVIPVIPPELRPMVQLEGGRFATSDLNDLYRRVINRNNRLKRLQTLNAPDIIIRNEKRMLQEAVDALFDNSKKKKVVKGSSNRPLKSISDMLKGKQGRFRQNLLGKRVDYSGRSVITVGPDLKMWQCGLPTKMALELFKPFIMKKLVDKDVVFNIKKAKMLVEQETPEVFAILDEVVKEHPVLLNRAPTLHRLGIQAFEPVLVEGKAIKLHPLVCHAFNADFDGDQMAVHVPLTQAAQMECWTLMLSARNLLNPANGKTIGSLPARPI

SEQ ID NO: 16117 - DNA, 798 bp, Unknown
  Obtained from environmental sample
  misc_feature (1)..(798): n is a, c, g, or t
atgatcggagaggcaatcctcgtcctgctcgagacccgccttatagaggtgagcgtggacaagctgaaccagatcggcataaagtgggatcaattcaacccggatctcccgtgggatttgggctcggtcgtccatatacccgaagcgcccctgaaaaacggcttggcgttcaacggcacgacccgcggcgaaatcaatttgaacgtggctttagacttaatggtgcaaaacggcgacgcgcgcctgctcatggactcaaaactcaccacgacgaacaacagggaggcctcgctgcacatcggcgaggtggttccatacaccatccaatcctacaacctgtcgtcgtcaggcggcgtgaaccagcagattgagaaggagaacgtcggcgtgctgctgaagatgacgccgcacatcaacgacaagaaccagatcaccctgacgctggcccccgaagtctcgaacatcaccggatggaaaggcgcgaactccgacattccggtagtgcgtgtgcgccggacaaacacaaccgtacgggttgaagacggccaaacggtaatcctcgccggactgctctccgaagagaaggcgacgacggtaagcaaattccctatactcggcgacatacccgttttgggtctgctcttccaaaacaagcgcgaagaggtgaagaagacaaacctgataatagaagtagtgccgcgcataatacaaaatccggcggatatatcaaagtacatgtcaataatgggccacggcaaaccgcccgtgggaaaggtaaaaaataatgggaaacaatga

SEQ ID NO: 16118 - protein, 265 aa, Unknown
  Obtained from environmental sample
  DOMAIN (9)...(237): Bacterial type II and III secretion system protein
  misc_feature (1)..(265): Xaa is any amino acid
MIGEAILVLLETRLIEVSVDKLNQIGIKWDQFNPDLPWDLGSVVHIPEAPLKNGLAFNGTTRGEINLNVALDLMVQNGDARLLMDSKLTTTNNREASLHIGEVVPYTIQSYNLSSSGGVNQQIEKENVGVLLKMTPHINDKNQITLTLAPEVSNITGWKGANSDIPVVRVRRTNTTVRVEDGQTVILAGLLSEEKATTVSKFPILGDIPVLGLLFQNKREEVKKTNLIIEVVPRIIQNPADISKYMSIMGHGKPPVGKVKNNGKQ

SEQ ID NO: 16119 - DNA, 891 bp, Unknown
  Obtained from environmental sample
  misc_feature (1)..(891): n is a, c, g, or t
atgtcaatatcggtattaacgtcgtcggcatcagtatcaatatcagtattgatatcacatcccgccgccgtcaggctctcgttttcgtctgggtcggcgtcaactatcaacgggcttttcggtcgtttcgacggaatgacggggacgatatcctcgtcctcttcttcaaccgccggctcgacttcgggcgtttccacggtaaggatttttatcggctcgctctttttccgtctgaactcgttcagctcttcctcaagccgcttcttggcctcttcttccggcgtcaacgtttcgggcggtttttcatcggcgttaaccgtttcgacattatcattttcacccgtcttgccggactgcgttacatcgttctcttgtatggacgtgtcaggcgataccgcttgttcaggcggcggcgcgccctgtcctttcgtatcaaccgtatcaacggcgggtgtcacagcgttaacatctgtttttgacgcttcttctttgaccgccttaccgccgccgtccgcctcttgccgcgccgccttcggacggatgtccggcgaattctttatgccggccttgatatccgaaacagccgacttgacccaatccgccgccgccgcgaaccactcggacaagacggcgaaaacgctctggggctttacccgcaacccgaccatcaccgttatagccataaccagcagtacaataaaatacggcccgaaaacgcggcctctaaagagcggcacgagcatattgacggcggccatcccgaccaaattgacgccgaccttatccatcaccttccaaaaaccgtcggcggcgctcaactgcggcatattgcttacggcaaacaagacgcacagttcaatcgccagaagtgcgcaccacaagagcaattga

SEQ ID NO: 16120 - protein, 296 aa, Unknown
  Obtained from environmental sample
  SIGNAL (1)...(24)
  misc_feature (1)..(296): Xaa is any amino acid
MSISVLTSSASVSISVLISHPAAVRLSFSSGSASTINGLFGRFDGMTGTISSSSSSTAGSTSGVSTVRIFIGSLFFRLNSFSSSSSRFLASSSGVNVSGGFSSALTVSTLSFSPVLPDCVTSFSCMDVSGDTACSGGGAPCPFVSTVSTAGVTALTSVFDASSLTALPPPSASCRAAFGRMSGEFFMPALISETADLTQSAAAANHSDKTAKTLWGFTRNPTITVIAITSSTIKYGPKTRPLKSGTSILTAAIPTKLTPTLSITFQKPSAALNCGILLTANKTHSSIARSAHHKSN

SEQ ID NO: 16121 - DNA, 735 bp, Unknown
  Obtained from environmental sample
  misc_feature (1)..(735): n is a, c, g, or t
atgaaatatattatcccaccaaatcaaaaagaaaatgaaagtgaaaattctatagacgatcaaaaggcttcttttggattttcatgggtttttcaacaagttggattggaaatatatggagaattgggaattgatgattttgtaccgcatgaatttcctaacggatatatgcgatatccgtttcatactatgctatatacaataggcttaaaaaaatctattcctatattgccatctcataaaattttcggagaaataatatttgaatggaattcattggaaatgtcacaggattttcaatttcaatggccttattcaccatattttcatcatcaaataattcatggatatacaaacaagggacaatggctgggagcgggaagcggatggggaggaaacagtcagtatcttggttttaaattttattatccaaagggtaattcatctttattcattcaccgcaataatccggataataattttctttacagcaaagcggtatttgattcagcagaagacggtgaaatgaataataaatatttttcaaactggaaagcgaatttttcaataggaatagatacatatttctttcttacaaatattattaatcttggcggaagttttatttataataaaataataaatccgttttattatttaaataaaacagattattgggcggatgattatattcacaatttctcaattaatatttcattaaaagtatttttatag

SEQ ID NO: 16122 - protein, 244 aa, Unknown
  Obtained from environmental sample
  misc_feature (1)..(244): Xaa is any amino acid
MKYIIPPNQKENESENSIDDQKASFGFSWVFQQVGLEIYGELGIDDFVPHEFPNGYMRYPFHTMLYTIGLKKSIPILPSHKIFGEIIFEWNSLEMSQDFQFQWPYSPYFHHQIIHGYTNKGQWLGAGSGWGGNSQYLGFKFYYPKGNSSLFIHRNNPDNNFLYSKAVFDSAEDGEMNNKYFSNWKANFSIGIDTYFFLTNIINLGGSFIYNKIINPFYYLNKTDYWADDYIHNFSINISLKVFL

SEQ ID NO: 16123 - DNA, 822 bp, Unknown
  Obtained from environmental sample
  misc_feature (1)..(822): n is a, c, g, or t
atggttagttccagcagtacaaatctgagcagttccgtggtagcaacaagttccagcagccgtgccacaagctccagcagccgtgccgcatctagcagttctgtggcagcaacagtaagctccagcagccgtgcaacatctagcagttctgtggcagccacaagttcaagtagccaagcatcttcagctattaccacaaggtcttggactaatgtcaattacgtgccgtccaccgccactgggaaaaagcacgaccgccaaagattagaccttacattgccgagttcggggaacggacctttcccgttgatattgtatgtccacggcgggggatttaccggcggggagtggaagttatctactaaccaaagaaacgggcttctttcagccgctacaggcaagggttatgccattgccagtgccggatacctcttgtacggtaacaatccccaaaatccgtctttcccgtatatggtggaggatattttggcggctatacgccatttaagagccaacgcagaaacataccatcttgacccaaataagttcgtcatatcgggttactcggcgggaggctacttgtctaatatagtttgcgccctttctggcaacacgacccacaattatgatataacctcgctcggcaacgctggtgtttccagtgatgttcaggcggcggcaagttcggcggggcttacggatttctccaagttggtagaacaatctggaagtacaatgcacaattctatggccggcggaccattggggggcagcttaacagacaatacgcaatccatgaaagatatctctcggccgatctga

SEQ ID NO: 16124 - protein, 273 aa, Unknown
  Obtained from environmental sample
  SIGNAL (1)...(29)
  DOMAIN (104)...(251): alpha/beta hydrolase fold
  misc_feature (1)..(273): Xaa is any amino acid
MVSSSSTNLSSSVVATSSSSRATSSSSRAASSSSVAATVSSSSRATSSSSVAATSSSSQASSAITTRSWTNVNYVPSTATGKKHDRQRLDLTLPSSGNGPFPLILYVHGGGFTGGEWKLSTNQRNGLLSAATGKGYAIASAGYLLYGNNPQNPSFPYMVEDILAAIRHLRANAETYHLDPNKFVISGYSAGGYLSNIVCALSGNTTHNYDITSLGNAGVSSDVQAAASSAGLTDFSKLVEQSGSTMHNSMAGGPLGGSLTDNTQSMKDISRPI

SEQ ID NO: 16125 - DNA, 759 bp, Unknown
  Obtained from environmental sample
  misc_feature (1)..(759): n is a, c, g, or t
gtgataacggtaattatatccgccagaaaccccgtccctgagtccacccttgagcggaacatccgcaaaacggtgggcgcgccgatagagttgtttatgatcaacaactccgaggggaagaacgggctggcctccgtgtacaactttggggcggcgcggtcgcgtggggacgttttggtctttatgcacgacgacgctttctttatgacggagggctgggggccgatattggagtcgctcttcgcgcaggatccgtatttgggggttgtgggggtggcgggtacgcagtacctcttcgcggacaactgctcgtggacggcggccggccggccgttcatcaaggggcgcatagtacacgacctgcagaacggggacttcttcgccatgctcttctcgccggatagggagagttgcgaggtggtggcgtgcagcggggtcttcttcgcggtgaggcggacgctgctcacgcagttcgggttcgacgagcagacgttcgactctttctactttcacgagatggacttctgcatgcaggcgcgcaagaattggagggtgatggtgacggcggacatcttggtgaagcaccgttcgatgggaacctatgacaagacgtggcagcgctacggtcaggtgttcctaaacaagtgggcggcgatgctgccggcaagctgcgcgagcggggtgcccgatcctgcccacagcgttccggcggccagggcgagtttaaagggtaaggtggatcagaggactatagcgtga

SEQ ID NO: 16126 - protein, 252 aa, Unknown
  Obtained from environmental sample
  misc_feature (1)..(252): Xaa is any amino acid
MITVIISARNPVPESTLERNIRKTVGAPIELFMINNSEGKNGLASVYNFGAARSRGDVLVFMHDDAFFMTEGWGPILESLFAQDPYLGVVGVAGTQYLFADNCSWTAAGRPFIKGRIVHDLQNGDFFAMLFSPDRESCEVVACSGVFFAVRRTLLTQFGFDEQTFDSFYFHEMDFCMQARKNWRVMVTADILVKHRSMGTYDKTWQRYGQVFLNKWAAMLPASCASGVPDPAHSVPAARASLKGKVDQRTIA

SEQ ID NO: 16127 - DNA, 912 bp, Unknown
  Obtained from environmental sample
  misc_feature (1)..(912): n is a, c, g, or t
gtgccgctttttgaggcggggctgagggagcagttcaagaagttngcngacgccgcgggcagcaacaaagtcctcaagggcaaggtgtccaagatagcggagttcggcctattcgttgaagtcggcgggcttgaggggcttgtgcatatctccgaggtctcttggcagcgcgcccaaaacttgagcgactcgtttaccgtcggccaagaggtggagttcgtggtgctgaaggtggagcgtaaagacacgttgcgcaactcaaagatatcgctctccataaagcaggcgttggaagacccgtggaacaaggtggccgaacaggtatccgtgggtgcggtgttgaacggcaaagtcatgcgtttggcggacttcggcgcgttcgttgaggtgattccgggcgtggaggggctaatccacgtatcggagatggcttggggcaggcgcgtccaccacccgtcggaggtagtggcgcccgggcaggtcgtaaaggtaaccgtcttggggatagaccaaagtaagcggtcgatttcactcacgctcaaggacgtggccgacgacccgtggaacggaatcgagggaaaacttgccgtgggggccgacgtgagcggcaccgtggcgaggaaggcgaagttcgggtacttcatagacctattcgagggcgtcaccggtttgctggtcttttcgaggatggccgccgacaaaaaggacacgcttaggccgggcgacacggtgacggttcaggtggagtctatcgacacggaggcgcggcgtgtggcgctctccatgggggtttccgacggcaacaaggagacggaggagaccaagcagtacctgaagaagcaggacgcgaagcaggagaaagattccggcggcgcgtcttcggacacggcgatgggtgctcggccgatctga

SEQ ID NO: 16128 - protein, 303 aa, Unknown
  Obtained from environmental sample
  DOMAIN (194)...(263): S1 RNA binding domain
  misc_feature (1)..(303): Xaa is any amino acid
MPLFEAGLREQFKKXADAAGSNKVLKGKVSKIAEFGLFVEVGGLEGLVHISEVSWQRAQNLSDSFTVGQEVEFVVLKVERKDTLRNSKISLSIKQALEDPWNKVAEQVSVGAVLNGKVMRLADFGAFVEVIPGVEGLIHVSEMAWGRRVHHPSEVVAPGQVVKVTVLGIDQSKRSISLTLKDVADDPWNGIEGKLAVGADVSGTVARKAKFGYFIDLFEGVTGLLVFSRMAADKKDTLRPGDTVTVQVESIDTEARRVALSMGVSDGNKETEETKQYLKKQDAKQEKDSGGASSDTAMGARPI

SEQ ID NO: 16129 - DNA, 657 bp, Unknown
  Obtained from environmental sample
  misc_feature (1)..(657): n is a, c, g, or t
ttgtttgccacgggtaatgcccacaaaaaaacggaactgtccgcaatcctgcaaccccacggagtcgattgccgtctgctcatcccaaaagacgcgggtctgattttngatccggaagaaacaggaaccagtttccatgaaaacgccctattaaaggccaacgaattatatgctctgttggagaaggcccgccctgctctttacagtcccggcgacccgataatcgccgatgattccggcatttgcgttgacgcgcttgacggcaggccggggatttattcggcgagatacatgggacgaaataaaaaagaagagggaaaagggaaaaaagaagagaaaatgggggcttctgagcgtaatgctttgctattggaggaattgggggatgccgccgacagacgggcgcgatttgtgtgcgctatggttttgatgtatagtccagaccgcttctttatagcccaggagactgtggagggggagatcgtcagggatatggaacacgcgaaaggaacgggaggctttggatacgatcccatcctttttattcctgaacttggcagaaccacggccgaactttcagatgaggaaaaaaacatgatcagccatagagggaaagcggggaaaataatcgctgaaatacttacaaaagaaaaatga

SEQ ID NO: 16130 - protein, 218 aa, Unknown
  Obtained from environmental sample
  DOMAIN (1)...(214): Ham1 family
  misc_feature (1)..(218): Xaa is any amino acid
MFATGNAHKKTELSAILQPHGVDCRLLIPKDAGLIXDPEETGTSFHENALLKANELYALLEKARPALYSPGDPIIADDSGICVDALDGRPGIYSARYMGRNKKEEGKGKKEEKMGASERNALLLEELGDAADRRARFVCAMVLMYSPDRFFIAQETVEGEIVRDMEHAKGTGGFGYDPILFIPELGRTTAELSDEEKNMISHRGKAGKIIAEILTKEK

SEQ ID NO: 16131 - DNA, 612 bp, Unknown
  Obtained from environmental sample
  misc_feature (1)..(612): n is a, c, g, or t
gtgccaaaagaactgcagtcccactgcacatgccccgactgggcgaacccgtgcaagcacgtggctgcggtgtgctacatcatggccgaagtgctggaccgcgacccatggatactttttgacctaagggggaagacccaagaggacatcatggccgccctccagtcagccgccccgcccccgccggcccaagagcaggcgcccaaaaaacgggggcgcccaaaaaaggtggcctccgtccaagacatagtcacccagaaaaaggactccccagccccttggcagcaaattccagaagaagactacgactcattgcccgcccccctgccgtcggtggccatccccaggtcaatttcccccgacccatcggtatttgtccagcttggcccgctcccccacgccaggattgaggccagcctttgcctggccgcgctcatgcaccggacggcccaagtcgtacaaaaacagatagaagacggcgtcggggccatagaagacgataacggggacgcagagaaccccagcccatttgaaagcccgctgccgctcaaagtctctcacagggcccgccgccactggaggcaaaaaaagcggcagcgctaccttggctga

SEQ ID NO: 16132 - protein, 203 aa, Unknown
  Obtained from environmental sample
  misc_feature (1)..(203): Xaa is any amino acid
MPKELQSHCTCPDWANPCKHVAAVCYIMAEVLDRDPWILFDLRGKTQEDIMAALQSAAPPPPAQEQAPKKRGRPKKVASVQDIVTQKKDSPAPWQQIPEEDYDSLPAPLPSVAIPRSISPDPSVFVQLGPLPHARIEASLCLAALMHRTAQVVQKQIEDGVGAIEDDNGDAENPSPFESPLPLKVSHRARRHWRQKKRQRYLG

SEQ ID NO: 16133 - DNA, 573 bp, Unknown
  Obtained from environmental sample
  misc_feature (1)..(573): n is a, c, g, or t
atgaaggcgctggaaacacattccggagtcgccgaagttgactatacgcggaacggggccgagaacagggcggaagttgtcatttcccgtccggacggagacggtctgggcattatctggccgcgggttcagtaccggactccccgtctttcaccgcccgcggctgtggcaaaaggaatatcagaaagctggaagactctggtcatttcactgcggagcctcagcctgctctttaagggcatagaacttaccgaagcggtttccggcccggttcgcataacctacatggtaggcgacattgccgccgaaggctttgggcagagttttggcgccggactgcgttccctggcggattttctcgccctgatttcaatagccctctgcgttatgaatctgctgccattgccggtattggacgggggcatgatcattctgttcattgtggagatgctgcggcgcaaaccgctccatccgcgggcaataaacgtgttccagacggtaggagtcgcgctcatctttggccttatgatttttgcggtctttggggatatactgtacctgtcgcgccggtag

SEQ ID NO: 16134 - protein, 190 aa, Unknown
  Obtained from environmental sample
  DOMAIN (53)...(183): Peptidase family M50
  misc_feature (1)..(190): Xaa is any amino acid
MKALETHSGVAEVDYTRNGAENRAEVVISRPDGDGLGIIWPRVQYRTPRLSPPAAVAKGISESWKTLVISLRSLSLLFKGIELTEAVSGPVRITYMVGDIAAEGFGQSFGAGLRSLADFLALISIALCVMNLLPLPVLDGGMIILFIVEMLRRKPLHPRAINVFQTVGVALIFGLMIFAVFGDILYLSRR

SEQ ID NO: 16135 - DNA, 447 bp, Unknown
  Obtained from environmental sample
  misc_feature (1)..(447): n is a, c, g, or t
atggtagtaggcaatatgggcgcagaaaagaaaatggattataccgtcatggggaacgcagtaaaccttgcatcgcgtattgaaggggtaaacaagcagtaccgtactggcggaatattgataagcgaatacaccagagcgaaaataggcgatgagtttttactgcgccctatcgaccgtgtaagggtagtggggataaacacacctctgcgcctgtatgagctgttaccagcggataccgaacagggtgcggtggaaatatgggagaaagcgcttgctttgtacgaacacagggaatttagaaaggcttttgctttgtttatttcgctcataaagcgttacccgcatgacaatgtagctctggtttacgcgcaccgatgcaagtcgcttatagagaccccgccgcctgaagactgggattccgttagaaacctgacaataaaatga

SEQ ID NO: 16136 - protein, 148 aa, Unknown
  Obtained from environmental sample
  misc_feature (1)..(148): Xaa is any amino acid
MVVGNMGAEKKMDYTVMGNAVNLASRIEGVNKQYRTGGILISEYTRAKIGDEFLLRPIDRVRVVGINTPLRLYELLPADTEQGAVEIWEKALALYEHREFRKAFALFISLIKRYPHDNVALVYAHRCKSLIETPPPEDWDSVRNLTIK

SEQ ID NO: 16137 - DNA, 435 bp, Unknown
  Obtained from environmental sample
  misc_feature (1)..(435): n is a, c, g, or t
gtggttgttgaaaattttagagatatgcttgtcgatggctgctgtaagctcataataccaggtgatcctgagcatataaaacatatggaagttattatccgtacttacctggggcatagcctaaccctttttaccagtcatccgtattttcttgaaataacgcctaaagatattgacaagggaaccgcgctggcaagagtggcggatattttgaaagtcaaacaggaacaaactatagccatcggtgattccatgaacgacgaagccatgatccgttgggcaggcataggagtggcaatgcaaaacggcgatgaacgcgttaaaagcatagccgatctggtaactgaacacacaaacgatgatgacggcgtagcggaagttatcgaaaaatattttccgatcaaaaatgaacagaaagaaggagatagccaatga

SEQ ID NO: 16138 - protein, 144 aa, Unknown
  Obtained from environmental sample
  DOMAIN (1)...(128): haloacid dehalogenase-like hydrolase
  misc_feature (1)..(144): Xaa is any amino acid
MVVENFRDMLVDGCCKLIIPGDPEHIKHMEVIIRTYLGHSLTLFTSHPYFLEITPKDIDKGTALARVADILKVKQEQTIAIGDSMNDEAMIRWAGIGVAMQNGDERVKSIADLVTEHTNDDDGVAEVIEKYFPIKNEQKEGDSQ

SEQ ID NO: 16139 - DNA, 384 bp, Unknown
  Obtained from environmental sample
  misc_feature (1)..(384): n is a, c, g, or t
atgagtgacagttccacttcttccgaagatattcccgtcagtactgttgattctccttcagtggtactggaacttatatatcagctgaagataaaggatgtaatgaagaacgcggtaatcaccgcaaaaaaaacagacaccatacgctacattaaggcagttatgcgggaaaattatattaacgcgcttcctatttcggagggaaaggaacttttgggcattgtatctattgaagacattatcaatgctcttgaaggcgggtatatcgaccaaccggcggaaggatacatgacaaaaaatgtcattgtgctgcaagacgatatgcctctttcctttgcgatttcatatcttaacaagtaccgttacggccgctttccggtttaa

SEQ ID NO: 16140 - protein, 127 aa, Unknown
  Obtained from environmental sample
  DOMAIN (33)...(127): CBS domain pair
  misc_feature (1)..(127): Xaa is any amino acid
MSDSSTSSEDIPVSTVDSPSVVLELIYQLKIKDVMKNAVITAKKTDTIRYIKAVMRENYINALPISEGKELLGIVSIEDIINALEGGYIDQPAEGYMTKNVIVLQDDMPLSFAISYLNKYRYGRFPV

SEQ ID NO: 16141 - DNA, 633 bp, Unknown
  Obtained from environmental sample
  misc_feature (1)..(633): n is a, c, g, or t
atgaaaaacagcaagtttgtttattgtttaaccgcgtgcgtttgttttataacatgtaaaaatcccattatgaaaacatggtgggtagaacctcagcctgagtcgaaagagccggaagttgaatatgtcccgatcatgaaaatgattccccaggtgacctacgagacaatcatacaacacgatataatctacgagcccgtctttgtgcatcttccgccggagattatccacgatactattatagaaacacagacaatctatgagactgttataaaagaggttcctgtgtatgtctacgagactatcacagaaacaaaatacgaaacgatctacgagacagttgagaaaattgttcacgatacggtaaccattactgcgcctcctaccgaggaggatattataaaatacataaaagataacactaaggaggttatagacatcataaaaaaagaggacaactgggaggaaatcttaaaggagatcataaaggatattccccctgatgaaataataaattatcttactgatgatcaggtcaaggatatcataaaccagcagcctccccagataatactccagaccatacagattatagatattgaatacattatctttgcgggcaacngcggataa

SEQ ID NO: 16142 - protein, 210 aa, Unknown
  Obtained from environmental sample
  misc_feature (1)..(210): Xaa is any amino acid
MKNSKFVYCLTACVCFITCKNPIMKTWWVEPQPESKEPEVEYVPIMKMIPQVTYETIIQHDIIYEPVFVHLPPEIIHDTIIETQTIYETVIKEVPVYVYETITETKYETIYETVEKIVHDTVTITAPPTEEDIIKYIKDNTKEVIDIIKKEDNWEEILKEIIKDIPPDEIINYLTDDQVKDIINQQPPQIILQTIQIIDIEYIIFAGNXG

SEQ ID NO: 16143 - DNA, 795 bp, Unknown
  Obtained from environmental sample
  misc_feature (1)..(795): n is a, c, g, or t
atgcggatatatcaagctatttactctcaaaaaacaaggatactttcagtcctaacggtccattcggctatatcgaaaaatctccagaaggcccgttcttttttaacggcattggctggcagccgccggacggctggcagccacaggnagcgtccctggtacaaagccgccctggcggccggcgacggcattgccgaaacactgccgtatatagatatagtaacaggcgaaattgttttatcatactcccgttgtatttttgacgatgacggcagccgtataggcgttgccgtcattgatgtaagagctgaccgtatagggaaaaaagttgttgataccgcttccgcgaaagacagcagttacggagtattggttggtcaggatttaacgctcattggccattccaacccggattatgtgggaaaaaaaatgaacgacccgataatccccctttcagttttaactgatgaattggtacgcacgggatacatttcagaaatcaagtggattaactggaaaggcgaaccggtcgtcggttttttcaggacgctccccaatggatggcgtttaggttttttcgcgcaaacaagtatatattatcaacccgtatacaatatggcgctggttctcgctttattgggcgctgcgcttgcgtcagtcttgataatcgttctgatcaccgttgacgcggcaaaaaacaaatccgatacagagagcaggcataagagtacattccttgccaacatgagccacgaaatacgaacgccgatgaacgcgaaatctcggccgatctga

SEQ ID NO: 16144 - protein, 264 aa, Unknown
  Obtained from environmental sample
  DOMAIN (67)...(147): Cache domain
  misc_feature (1)..(264): Xaa is any amino acid
MRIYQAIYSQKTRILSVLTVHSAISKNLQKARSFLTALAGSRRTAGSHRXRPWYKAALAAGDGIAETLPYIDIVTGEIVLSYSRCIFDDDGSRIGVAVIDVRADRIGKKVVDTASAKDSSYGVLVGQDLTLIGHSNPDYVGKKMNDPIIPLSVLTDELVRTGYISEIKWINWKGEPVVGFFRTLPNGWRLGFFAQTSIYYQPVYNMALVLALLGAALASVLIIVLITVDAAKNKSDTESRHKSTFLANMSHEIRTPMNAKSRPI

SEQ ID NO: 16145 - DNA, 495 bp, Unknown
  Obtained from environmental sample
  misc_feature (1)..(495): n is a, c, g, or t
atgggttatgaaaaacttaaaaccgtttgcgaaaatttttccgggaaaaaaattaaatcccggggttttgttttccccccctttttttgtcaacagagggccttttttaaaaggaggaaaaaattgtcgcgccttttattttttttttttctaaaaaaaggccacacccatccttcccgcagaaaaaaaatattttcccccgggggaggggggggggcaccacattttttttttttttttcctcccccccccaaaataaattttttttttctgggtggcgcggagatattttttttgggggggaagaggaaaaattttatttttttcgcgccctccttttgggggggggggggccccttctttttttttttttttttgggaaaagaaaaaaaaaataaaattttctttcttttttttttaaaaaaaaaaaaaaaggaggggggggggggtgttgtttttctcttcccccccccccccccacccaaaaaaaaataa

SEQ ID NO: 16146 - protein, 164 aa, Unknown
  Obtained from environmental sample
  misc_feature (1)..(164): Xaa is any amino acid
MGYEKLKTVCENFSGKKIKSRGFVFPPFFCQQRAFFKRRKKLSRLLFFFFLKKGHTHPSRRKKIFSPGGGGGAPHFFFFFPPPPKINFFFLGGAEIFFLGGKRKNFIFFAPSFWGGGGPFFFFFFLGKEKKNKIFFLFFLKKKKKEGGGGVVFLFPPPPPPKKK

SEQ ID NO: 16147 - DNA, 828 bp, Unknown
  Obtained from environmental sample
  misc_feature (1)..(828): n is a, c, g, or t
ttggcggatgatttaggctactttaaaaacgcgaatgtaaaaccaaaatacgccggtcttgtttcggcaggacagatgatacccgctctttctgcaggcgctcttgatgttataaacaggcatacgccgcttgtaatgtccgctgtcgaagaaggagctaatattaaaattttcgcagcggggagcaagtcaacaaagccaaacccccacatgaaatattttgtaaaatctgattcgcctattaatggaattaaggacatggaaggcaaaactttcggaatgaacagttttggcgcatgttctgaatttgttacaaaaaaagcgtttagggacaatgggttaaatccggcgacgatgttaatgatcatcgcgccggattcggaacaggaagttccccttttacgcggcattactgatgtggcaattatccatcctcttgcctcgggaagggcaagcgcaaataaaaaagatttccatatgctgctgtctgactgggatatagacggcggcatatcaggcatgtgtccttattccgtaaacggcgactttttggcaaaacaccccaaggcggtgacagaattaacagaaatactttccaaagccgcaaagtggaacaacgcccatcaggaagaggcccgcgagttaatggcaaagcgttttggatttaagctggaagaaaccgagatgtttgaattttatgaggatcagctcattccggttgaaaatatggaatactggttcgacgtatttaaattcgaaaagcttctgtcgccaaactcggctatagaaaattattatacaaatgattttaatcctgcnaacaagtaa

SEQ ID NO: 16148 - protein, 275 aa, Unknown
  Obtained from environmental sample
  misc_feature (1)..(275): Xaa is any amino acid
MADDLGYFKNANVKPKYAGLVSAGQMIPALSAGALDVINRHTPLVMSAVEEGANIKIFAAGSKSTKPNPHMKYFVKSDSPINGIKDMEGKTFGMNSFGACSEFVTKKAFRDNGLNPATMLMIIAPDSEQEVPLLRGITDVAIIHPLASGRASANKKDFHMLLSDWDIDGGISGMCPYSVNGDFLAKHPKAVTELTEILSKAAKWNNAHQEEARELMAKRFGFKLEETEMFEFYEDQLIPVENMEYWFDVFKFEKLLSPNSAIENYYTNDFNPANK

SEQ ID NO: 16149 - DNA, 915 bp, Unknown
  Obtained from environmental sample
  misc_feature (1)..(915): n is a, c, g, or t
atgacagattggccgagaaccgtgcggatatttaaacgaagttttaaaactgataattatcaggaaaggatcgacattgagaaatttgcgaaggttagtgaaagtatcagacggcgtgaagcgatgataaaaacggctcaatatattcaggaaataaatataacggctgatgatcttgacgttaatccgtggcttttgaatgtccgtaacggcactattgacgtagtaacgggggaatttagggaacacagacaggaagatatgattactaaacttgcaaatgctgaatatgatcctgccgccgactgtccgctttggaagcagtttatccgtgaaattatggactataagcctgaattgataaatttccttcaaaccgctattgggtgggctttgacgggggataatacggaacagactatgtttattctgtatggaagcggagctaacggaaaaacaacttttttaaatacgatacaatatttgttaggtgattacgccacttctacgcctacggaaagttttatgaaaaagaacaccgatcaatataccaacgatattgcccgattgcgtggtactcgttttgtgtctactacggaagcggaacaggggcggcggctctctgaaccgctgattaaaaagattacaggaaacgatcaaattacggctcgttttctgtacggggaatattttaattttactcccaatttcaagatttttatggcgactaatcataaacctgtaatcaagggtactgatcatggtatatggcggcgtattaaattaattcctttcactaccacgattgcacaggataaacaggataaaaacctagaggcaaaattgaaacaggaaacaagcggtattcttaattggcttttagagggacggctcgntggaaacgtgaggggttaa

SEQ ID NO: 16150 - protein, 304 aa, Unknown
  Obtained from environmental sample
  DOMAIN (66)...(304): Poxvirus D5 protein-like
  misc_feature (1)..(304): Xaa is any amino acid
MTDWPRTVRIFKRSFKTDNYQERIDIEKFAKVSESIRRREAMIKTAQYIQEINITADDLDVNPWLLNVRNGTIDVVTGEFREHRQEDMITKLANAEYDPAADCPLWKQFIREIMDYKPELINFLQTAIGWALTGDNTEQTMFILYGSGANGKTTFLNTIQYLLGDYATSTPTESFMKKNTDQYTNDIARLRGTRFVSTTEAEQGRRLSEPLIKKITGNDQITARFLYGEYFNFTPNFKIFMATNHKPVIKGTDHGIWRRIKLIPFTTTIAQDKQDKNLEAKLKQETSGILNWLLEGRLXGNVRG

SEQ ID NO: 16151 - DNA, 792 bp, Unknown
  Obtained from environmental sample
  misc_feature (1)..(792): n is a, c, g, or t
atgggcaggcctattttcccggggatttttaccccgataatgataggaaacccggtcgacgtcaaagtgatcgacgatgccgtagcaggcgacgcgatgataggtcttgtgatgctgcaaaacgagaccgaaactcccgctatcggggatctttacaaagtggggaccgccgcgaagatcgtcaagaaaatcaacctgcccgacggcggggtgaatatctttatatccacgcttaagcgtttcaaggttaaaaagaccctccacgccagcaacccaattgtggcggcggtggagtaccttaacgaggaagaggacgacaccagcgaggtaaaggctcttacaagggcgctcatctccgaaatgaagcagatctctgaaaacaaccccctgttttccgaggaaatgcgcctcaacatgattaacatagaccatcccggcaagatcgccgattttatcgccagcattctgaatattgacaaggcggagatgcagaagattctggagatactcaatgtgcgaaaacgcatggaacaggtactggtgttcatcaaaaaggagcaggagcttctgcggatccagaaaaagatacagaaagagataaacgaaaaaatagaaaaatcgcaaagagattatttccttaaagaggagctaaaggcgataaagggcgaactgggaatgacaaccgacgccaaaagctccgactaccagaggtttaaggacattattgactccttcaaatttgaaggcgaggtaaaggaagccgtagaacaggagcttgaaaaattcacctga

SEQ ID NO: 16152 - protein, 263 aa, Unknown
  Obtained from environmental sample
  DOMAIN (3)...(185): ATP-dependent protease La (LON) domain
  misc_feature (1)..(263): Xaa is any amino acid
MGRPIFPGIFTPIMIGNPVDVKVIDDAVAGDAMIGLVMLQNETETPAIGDLYKVGTAAKIVKKINLPDGGVNIFISTLKRFKVKKTLHASNPIVAAVEYLNEEEDDTSEVKALTRALISEMKQISENNPLFSEEMRLNMINIDHPGKIADFIASILNIDKAEMQKILEILNVRKRMEQVLVFIKKEQELLRIQKKIQKEINEKIEKSQRDYFLKEELKAIKGELGMTTDAKSSDYQRFKDIIDSFKFEGEVKEAVEQELEKFT

SEQ ID NO: 16153 - DNA, 927 bp, Unknown
  Obtained from environmental sample
  misc_feature (1)..(927): n is a, c, g, or t
ttgatcagatcggccgagagtaaagacaaagtaaaagttaaagaaaaaagacctaagcaatttgtggcatatacaaaattaaattccgcaaaagcggttgtaataacaagcgttgaatacggcaaagtatttgaaggttttaacgccgccataatgagtaatatttgtcttgcaaccgccgtattaatcatatcaataatttttatttggtttttctccagaacaatttctctccctcttagatcattggcatttgcggcaaacaaaattgaatatggaaattttgatcaaaatttacattccaaagcacttgatgaaattggcatgttaacttttaattttggaaaaatgtgttcggctttgaaagtttttggcaatttttcaaataaggaaattgccgtaaaaacgataagcggcgaaataaaaccgggcggtttggcaaaacacggcaccattttatttactgacatttctgattttacgacaaggtatgaaaactttatcagattttttggggcggaagcttccgataaaattgttttgtggctcaatgaatattttacgcaaatggttgactgcgtaaagaaaaccggcggcgctttagataaatttatcggacctgcggtaatggcccattggggtacggcatcatcatcaggcagtccgcgcaaggacgcttttaattccataaaagccgctcttatgatgcgtaaggttctttattatatgaacaaggagcgcaaatcgggagacgtttctaatccgttaatgcgtatcgggtgcggaatcagttcgggcgttgttacggcgggacaacttggcagcgatactcggttgggatatacggttttgggcgatcccgtcaatatggcgttacgcgttaaagcttttactaagccttttggncgcggatattcttgtctgtga

SEQ ID NO: 16154 - protein, 308 aa, Unknown
  Obtained from environmental sample
  DOMAIN (151)...(307): Adenylate and Guanylate cyclase catalytic domain
  misc_feature (1)..(308): Xaa is any amino acid
MIRSAESKDKVKVKEKRPKQFVAYTKLNSAKAVVITSVEYGKVFEGFNAAIMSNICLATAVLIISIIFIWFFSRTISLPLRSLAFAANKIEYGNFDQNLHSKALDEIGMLTFNFGKMCSALKVFGNFSNKEIAVKTISGEIKPGGLAKHGTILFTDISDFTTRYENFIRFFGAEASDKIVLWLNEYFTQMVDCVKKTGGALDKFIGPAVMAHWGTASSSGSPRKDAFNSIKAALMMRKVLYYMNKERKSGDVSNPLMRIGCGISSGVVTAGQLGSDTRLGYTVLGDPVNMALRVKAFTKPFGRGYSCL

SEQ ID NO: 16155 - DNA, 573 bp, Unknown
  Obtained from environmental sample
  misc_feature (1)..(573): n is a, c, g, or t
ttgatatacaaagtaatagaagctcttggacttgagttcactgaagaagaagcgtctttgcttcttttcggtatttgcatggacacaggtttcttcaggcatcttacggaaaataacgccgtaatttttgaatatgtcgcaaaattaatctcttgcggcgcaagtccgaaaaaaacattttataaaacaaacggcggaaaaagccttagttccagaatattattaggaaatattttatcaaggacggaatctttctttgacggaaagcttttactcagttatgagacattagaagaatctgaaaaattcggttttgagggcagagactctgacagtttaaatcaaatgctgttaaccgtaaaaaatgtagaggcggttgtaataatccgccaggagttggcagacaattgtactgtgagtttcagatcgctggataaaattgatgtgtcgcanatagccgcatccttcggcggaggcggacataaaaatgcgtcgggtctctctatgaaaggggaaattccgtttgtaaagcaaaaagtattggaagcgtttaaaaatattttcaataattaa

SEQ ID NO: 16156 - protein, 190 aa, Unknown
  Obtained from environmental sample
  DOMAIN (124)...(182): DHHA1 domain
  misc_feature (1)..(190): Xaa is any amino acid
MIYKVIEALGLEFTEEEASLLLFGICMDTGFFRHLTENNAVIFEYVAKLISCGASPKKTFYKTNGGKSLSSRILLGNILSRTESFFDGKLLLSYETLEESEKFGFEGRDSDSLNQMLLTVKNVEAVVIIRQELADNCTVSFRSLDKIDVSXIAASFGGGGHKNASGLSMKGEIPFVKQKVLEAFKNIFNN

SEQ ID NO: 16157 - DNA, 810 bp, Unknown
  Obtained from environmental sample
  misc_feature (1)..(810): n is a, c, g, or t
atggttgtctttttatcgtttttcctttcctccttaatatccaaacccattcaaaaattgacggaagaagtggtaaacatcggagccggtcatttggacgcaaggatagaaggcagttataatgacgagtttgacaaaatcaaagacgctgtgaactctatgtctgcggaaataaaaacatacatggaagaaaaactgcaaacagaacgcaaacttgccgaaagccgtatctctataatgctttcccagatacaaccgcattttttatacaacgctcttgctgtcatatcaagcttgtgcgaaaaaaatcctgccgaagcaaaaaaagcgacagttaatttttccaattacctcaggggaaatatgaatcttttggaacgcacagaaccaatcccgtttgaaaatgaaattaaccacaccataagttttttgaatttggaaaaagccatgtacggcgaagcgttaaaaataatatttgacatacaaacaaaaaattttaagcttccggctctcaccatgcagcctattgttgaaaacgcaatcaagcacggcataggcaaaaaagaaggaggcggcgctgttaccatttcaacaaaagaaacagtcagaagttatatgataattgttacagatgacggcgtgggttttgaacaggataaaattaacgatgacggacaacagcacatcggaattaataacgtccgcctcaggctgtccgcacaatgcggcggatcgcttgaaatacaaagcaaaccgggcgaagggacaaccgctaaaattataattccgaanaagacgcangctgactga

SEQ ID NO: 16158 - protein, 269 aa, Unknown
  Obtained from environmental sample
  DOMAIN (1)...(60): HAMP domain
  misc_feature (1)..(269): Xaa is any amino acid
MVVFLSFFLSSLISKPIQKLTEEVVNIGAGHLDARIEGSYNDEFDKIKDAVNSMSAEIKTYMEEKLQTERKLAESRISIMLSQIQPHFLYNALAVISSLCEKNPAEAKKATVNFSNYLRGNMNLLERTEPIPFENEINHTISFLNLEKAMYGEALKIIFDIQTKNFKLPALTMQPIVENAIKHGIGKKEGGGAVTISTKETVRSYMIIVTDDGVGFEQDKINDDGQQHIGINNVRLRLSAQCGGSLEIQSKPGEGTTAKIIIPXKTXAD

SEQ ID NO: 16159 - DNA, 927 bp, Unknown
  Obtained from environmental sample
  misc_feature (1)..(927): n is a, c, g, or t
ttggangaacggcggcggacaataatccgcatgaaaataaaagggtacagtactaaagaaataacggagataatcggatgttccaggattaccgtatacttgttatggcgtaaatggaagaaagctaaagggaagaaagagaaaggaaatgttattgcagtaaagaaaacaggaaggaaaaccgggtttggcaggactttaactgaaaaacaggaaaaccttattataagaacgatagtaaagaaatatcctgaccagctcaagttaaattacgcgttatggacgcgggaaggcatacaacaattaatacaaaagatatttggtataaccatgccgatacgaaccgtaggcgaatacttgaagcggtggaatttcaccccgcagaaaccgaaaaaatacgcgtatgaaagggatgaagaaaaagtgaaagaatggattgaaaaagaatatccccgtataaaaaagcgtgcaaaaagacaaaaagcggaaatttattggggtgatgaaaccggcataacaacaactgacgtaagaggccggggatatgcgccggaaggaaaaacgcctgtagtacaacaacgggggaagaaagaatccatgagtatgatttcagcgataacaaaccaaggcaaaatatattggaaactgtttgacgaaagtattaacagtgagaagtttctggaatttgtgaaacggctgattctgaataagaaaagaaagatatttctgatagtggataatgccaaaccgcatcacagtcttatattgaaagattggttggaaaaaaataaaaagaagatagaactgtattatctgccctcgtacagccctgatttaaacccggatgaacatgttaatgcggatataaagtacggtatggatcaaaggcgcctaaagcacaaaaaactctcngatctgtcatggtaa

SEQ ID NO: 16160 - protein, 308 aa, Unknown
  Obtained from environmental sample
  misc_feature (1)..(308): Xaa is any amino acid
MXERRRTIIRMKIKGYSTKEITEIIGCSRITVYLLWRKWKKAKGKKEKGNVIAVKKTGRKTGFGRTLTEKQENLIIRTIVKKYPDQLKLNYALWTREGIQQLIQKIFGITMPIRTVGEYLKRWNFTPQKPKKYAYERDEEKVKEWIEKEYPRIKKRAKRQKAEIYWGDETGITTTDVRGRGYAPEGKTPVVQQRGKKESMSMISAITNQGKIYWKLFDESINSEKFLEFVKRLILNKKRKIFLIVDNAKPHHSLILKDWLEKNKKKIELYYLPSYSPDLNPDEHVNADIKYGMDQRRLKHKKLSDLSW

SEQ ID NO: 16161 - DNA, 438 bp, Unknown
  Obtained from environmental sample
  misc_feature (1)..(438): n is a, c, g, or t
gtgtcagaagaaatcaaagaagaaaaagcagctccggcaactgaagccgcagctcccgaagaggttaaggttaaaaaaagcaaaaagcgcatagatgtgcagggaattgcacacatttacgcttcttttaacaataccataatttccataacggattccaaaggcaatttggtttctggcaattcccctgggcgttctggctacaaaggcagcaaaaaaagcacgccttatgcagcgcaagttgccgcagaggcagccgctttgcaggcatttgcccttggaatgcgcaaggttctggttcgcataaaaggtgcgggtccggctagggaatcggcagttcgcgccataaaaaacgcgggcttggaagtgttgcaaatattggacgtgacgggcattccccacaatgggtgtcgcccaaagaagagaagaagaatttaa

SEQ ID NO: 16162 - protein, 145 aa, Unknown
  Obtained from environmental sample
  DOMAIN (35)...(144): Ribosomal protein S11
  misc_feature (1)..(145): Xaa is any amino acid
MSEEIKEEKAAPATEAAAPEEVKVKKSKKRIDVQGIAHIYASFNNTIISITDSKGNLVSGNSPGRSGYKGSKKSTPYAAQVAAEAAALQAFALGMRKVLVRIKGAGPARESAVRAIKNAGLEVLQILDVTGIPHNGCRPKKRRRI

SEQ ID NO: 16163 - DNA, 369 bp, Unknown
  Obtained from environmental sample
  misc_feature (1)..(369): n is a, c, g, or t
atggctagaattgctggtatagatttgcccaagaacaagagcgttgaatatggcttaaccgctatttttggcgtgggcttgcacacttcccgcgaagtttgcgataaacttgggatagacaaaaacaaaaaggtggaaaccctttcagaagaagaacaaggcaaaatacgccgtatgctcgaagaagagtataaggtggaaggccagttaagggcagagataaccttgaacatcaagcgtttgcaagacattggttgctatcgcggctctaggcaccgcaaaggtttgcctgcaaggggccagcgcacacgcacaaatgctcgtactcgcaagggtccaaagaaaaccgtggctaacaagaagaagtaa

SEQ ID NO: 16164 - protein, 122 aa, Unknown
  Obtained from environmental sample
  DOMAIN (3)...(109): Ribosomal protein S13/S18
  misc_feature (1)..(122): Xaa is any amino acid
MARIAGIDLPKNKSVEYGLTAIFGVGLHTSREVCDKLGIDKNKKVETLSEEEQGKIRRMLEEEYKVEGQLRAEITLNIKRLQDIGCYRGSRHRKGLPARGQRTRTNARTRKGPKKTVANKKK

SEQ ID NO: 16165 - DNA, 720 bp, Unknown
  Obtained from environmental sample
  misc_feature (1)..(720): n is a, c, g, or t
atggagaaatattcgcagctttggaaagaaatggggaatgattcttcgttatcattttctgtttacaaatcggattatttcctgattttcaaaaaagtttacggcgttgaatttaccgacgaatggaaaaaattcagcgcgagttttgctttggacgggatagaaaacaatgaagacgaattatcttcaagaaagttccgttattttgctgaaagagaatattttatcgccggtttaacagcaagaggagacaatctttactttattgaaagctccgaatcgaaaataggagtttataatactcaaaccggaaagacgaaaactattaatgcggcctcaggcgtttataatattgatgtttccgcggacggaaagactatgttgttgtccggttataaatatattgaggatagagcttttgccgttgtaagcgaacacagaacagataacgggcgaaaaacaggaaaggattacaaaggtctttacaaggcgcgttattttcgcgacggagttatcgggcttcgttcggaactgcataacaattgtattgtatacgaaatgttaaacggggaaagcgaaatcctttttaaaggaaacgaaacgctcatgttttccggtcctcaagctgttgataatgatcggattgcctttatagcgtcaatcgaaggaaaaagggaactatggctttacaattatgcttcgcgggaactttttaaatag

SEQ ID NO: 16166 - protein, 239 aa, Unknown
  Obtained from environmental sample
  misc_feature (1)..(239): Xaa is any amino acid
MEKYSQLWKEMGNDSSLSFSVYKSDYFLIFKKVYGVEFTDEWKKFSASFALDGIENNEDELSSRKFRYFAEREYFIAGLTARGDNLYFIESSESKIGVYNTQTGKTKTINAASGVYNIDVSADGKTMLLSGYKYIEDRAFAVVSEHRTDNGRKTGKDYKGLYKARYFRDGVIGLRSELHNNCIVYEMLNGESEILFKGNETLMFSGPQAVDNDRIAFIASIEGKRELWLYNYASRELFK

SEQ ID NO: 16167 - DNA, 465 bp, Unknown
  Obtained from environmental sample
  misc_feature (1)..(465): n is a, c, g, or t
gtgtcaatcgcggtaatatttttatacagatattatacctacagcgcaaaaaataaagaattgtccttttatataatgaaccaaggaaaaaaaataaataatgtagaaaaacttgtccctataccaagaatattcatcccgcaaagactaacctttgatatagtacaggatctggggattagaagtttatgcgaatacacgttaattttttataacagttcaaataaaacaatgaccttttctcaatgggttaaaggagaatttaaatttgaatcggacatagaattttcattaatagacaaccaaacaaccgcgataatcgcatccgacagattgtattcaagcacggttaaaaagacgcagtttttaagcgacaaagacatagaagaagcagaagatgaaatttttacattacaggcggatttgttggcggaaaaattgaacgctttgttcagaaacaagtaa

SEQ ID NO: 16168 - protein, 154 aa, Unknown
  Obtained from environmental sample
  misc_feature (1)..(154): Xaa is any amino acid
MSIAVIFLYRYYTYSAKNKELSFYIMNQGKKINNVEKLVPIPRIFIPQRLTFDIVQDLGIRSLCEYTLIFYNSSNKTMTFSQWVKGEFKFESDIEFSLIDNQTTAIIASDRLYSSTVKKTQFLSDKDIEEAEDEIFTLQADLLAEKLNALFRNK

SEQ ID NO: 16169 - DNA, 828 bp, Unknown
  Obtained from environmental sample
  misc_feature (1)..(828): n is a, c, g, or t
atgacagaatggccgaggggttgggacaactacgcccggagcttgcgttccgcgtcacggagcagcaacgatccgtctgactggggcaacggcattggtttccgcctcgcgctttcgcgccgcagtttccgcgccgcgactttcgcgccgtggcttcctcgccgcgccccggtttacagacataacaaggaggcatttatgagcggcatataccgcgcaagcgaaaaactgcatgaggtaaaggcgaaactctatccgacgtacctgccggaaaatgaagggacgtacattgcccgcacgtccggcgggaaggcgctcagcgtcgaggatatatgcgccgccatgaagaaccggggcggctataccggcagctatgatgaggccgtcactacggtcaaacacttcctgaaggaaacggagtaccagctctgcggcggcttcagggtgaaccttgggatttttaccatacacctcaacatcggcggcaccttccgctccagggacgaggcctatgaccccgtaaagcaccccttaaccttcaagttccgggccctcaaagccatgcgggacttgcggaacgccattgaagtcagcatcgaaggctacgccgacactcacggctctatcggcaagtttctcgaccacggaagcggggccgtcaacgccgtgtttacccagggtaatgtattcacgataacgggcagcaagatcaagatcgagggcgacgacccaggctgcggcctgtacttcgtgcccgtcgcggatccaggcaaggcggtcaggcggagcataccggcgacagcttccccttcaaactctcaggcatag

SEQ ID NO: 16170 - protein, 275 aa, Unknown
  Obtained from environmental sample
  misc_feature (1)..(275): Xaa is any amino acid
MTEWPRGWDNYARSLRSASRSSNDPSDWGNGIGFRLALSRRSFRAATFAPWLPRRAPVYRHNKEAFMSGIYRASEKLHEVKAKLYPTYLPENEGTYIARTSGGKALSVEDICAAMKNRGGYTGSYDEAVTTVKHFLKETEYQLCGGFRVNLGIFTIHLNIGGTFRSRDEAYDPVKHPLTFKFRALKAMRDLRNAIEVSIEGYADTHGSIGKFLDHGSGAVNAVFTQGNVFTITGSKIKIEGDDPGCGLYFVPVADPGKAVRRSIPATASPSNSQA

SEQ ID NO: 16171 - DNA, 882 bp, Unknown
  Obtained from environmental sample
  misc_feature (1)..(882): n is a, c, g, or t
atgatgggcatgggcggcaacagcagcaattcaggttccatcaggattaacctgcccaaatacaaggaaaggattgaaagcgcaaaccagataaaggacatcttacggcccttcttaaacgatttccccggcgtcgcgttcaattttagcggtggctttcgcggcggcatgatgggcggcggcaacgcgatagacattaccctccgtaccgacgatctggtgaaaggcaaggccctgggtgaaaaaatatccgagcttctaaaagacaatatccccgatgtcaccgaaccccaggttgacctgaaggacggcctcccccagattgacatcaggctggatcgcgaaaaaatgtacgcgctgggcctgaacgcggctaccgtgggcaacgagatcaaggccgcggtagacggcattaccgtactgacgcggtataaaagcgccgggaaagattatgaaattattctaatccttgccgaagccgaccgcaacacaaggcccgcgcttgacaatatttttgtcaacagccagatggcgggcagggttcccctttccagttttgtgagctacgagcagggaaccggccccctcacaatcagccgtgaaaatcaaagccgcatcatccatgtcaccgcgggagcgaggcccaaggcaaagatgaacacgcttcacgcgcgggtggaggagcttatcaggcgggagatacccattgaagacgacgttatcatcgaattcggaggcgacaacgcccagatgataaagatgttcacaagattccttttaatctgcattgtggcgggttttctgggggtcggcgttatggcgtccctgttcgaatcttccgtgatcccttcatcatcatctttaccataccgctttccctga

SEQ ID NO: 16172 - protein, 293 aa, Unknown
  Obtained from environmental sample
  misc_feature (1)..(293): Xaa is any amino acid
MMGMGGNSSNSGSIRINLPKYKERIESANQIKDILRPFLNDFPGVAFNFSGGFRGGMMGGGNAIDITLRTDDLVKGKALGEKISELLKDNIPDVTEPQVDLKDGLPQIDIRLDREKMYALGLNAATVGNEIKAAVDGITVLTRYKSAGKDYEIILILAEADRNTRPALDNIFVNSQMAGRVPLSSFVSYEQGTGPLTISRENQSRIIHVTAGARPKAKMNTLHARVEELIRREIPIEDDVIIEFGGDNAQMIKMFTRFLLICIVAGFLGVGVMASLFESSVIPSSSSLPYRFP

SEQ ID NO: 16173 - DNA, 897 bp, Unknown
  Obtained from environmental sample
  misc_feature (1)..(897): n is a, c, g, or t
atgtacccgttttcgttctatgaatttttgggcgcgctgggcgaggaaatgttatctgaggcctgccgggaagcagcgccggataagccgctcccgcagcctgttcataaacaacttctggatcgcctgaagatttttttgctgataggcggtatgccggaagccgtctcaagttatgcgcaaagcagggatatactgcagagtcaggtgattattgaggatattataacttcgttcagggatgatttttccaaataccggacaaagatgccggctgttattttaaacgaagtttttgaatcggtgatgcatcaggcgcagggaaaatttatctatgaacacgcggcaatagaaaccgcaaacgccagaattaaacaggccctggatttgcttatcatggccgggctcgcaattcctgtaacacacagcgcggcaaacggcatccccctgggcgcggagacaaaccccaaataccgccgtgttattccatgcgataccggtatttttctgcatatactcggaattgataaatcgcagatacttatatctgacgattttaaaaccattaaccagggggcgttagcggaaatatatgccggcctggaacttctgaaaaacggcggcactcatgcccgcaggcagctttattgctggagcagggaaaaagcccaaagcagcgcgcagatcgattatcttatacagctcaagtcgacaatcgttcccattgaagttaaatcaggaacgcagggcggcatgaaaagcctgaatatttttatgaaggaaaaaaatatcagccggggagtaagggcttcgcttgagaatttcgcgcaaaaagacaattttgacatttatccgttgtacgcgattttcgatttgtatataaagggaattatctga

SEQ ID NO: 16174 - protein, 298 aa, Unknown
  Obtained from environmental sample
  misc_feature (1)..(298): Xaa is any amino acid
MYPFSFYEFLGALGEEMLSEACREAAPDKPLPQPVHKQLLDRLKIFLLIGGMPEAVSSYAQSRDILQSQVIIEDIITSFRDDFSKYRTKMPAVILNEVFESVMHQAQGKFIYEHAAIETANARIKQALDLLIMAGLAIPVTHSAANGIPLGAETNPKYRRVIPCDTGIFLHILGIDKSQILISDDFKTINQGALAEIYAGLELLKNGGTHARRQLYCWSREKAQSSAQIDYLIQLKSTIVPIEVKSGTQGGMKSLNIFMKEKNISRGVRASLENFAQKDNFDIYPLYAIFDLYIKGII

SEQ ID NO: 16175 - DNA, 630 bp, Unknown
  Obtained from environmental sample
  misc_feature (1)..(630): n is a, c, g, or t
atgtcggttaatgttatcgcggaacttcatccaatcaggcgcacccgcgtaaaaattacaacaagcccaaaaccgatagcggagataatcagcgccctgaacaccggcttttcgctttctcaggcgcgggtatgccggaacggcgaaattgttacagatttctcaataacagctaacgacggcgatttgcttgttatcaagtttgtcccgcacggcagtacccaaagcgcaggtggcgccatgaaggccggcggctgggcgatggccattgtcggaggactgctcattgcgaccggagtcggagccggtatcggagcggcgctcatcggcgccggcgtcggcatgctcgcgggcggtaccgccctgctcaatatcaacattccaaaaactaaggatactgaaaaaccggaaagcgatccttcaatccgcggcggtaaaaaccaggcgcgtccccacgggcgcataccggttctgcttggccgccaccgcctgtatcccgatcttgccgcanattcttttacgtcaataattggcagccagcaataccttacgcagctattctgcggcgggtataaggattgcgttatcgatcttgacagttttaaacttggggaaacagagcttgtttaa

SEQ ID NO: 16176 - protein, 209 aa, Unknown
  Obtained from environmental sample
  misc_feature (1)..(209): Xaa is any amino acid
MSVNVIAELHPIRRTRVKITTSPKPIAEIISALNTGFSLSQARVCRNGEIVTDFSITANDGDLLVIKFVPHGSTQSAGGAMKAGGWAMAIVGGLLIATGVGAGIGAALIGAGVGMLAGGTALLNINIPKTKDTEKPESDPSIRGGKNQARPHGRIPVLLGRHRLYPDLAAXSFTSIIGSQQYLTQLFCGGYKDCVIDLDSFKLGETELV

SEQ ID NO: 16177 - DNA, 708 bp, Unknown
  Obtained from environmental sample
  misc_feature (1)..(708): n is a, c, g, or t
atgaaaatggaacgagcagtatacagcgaacttttggcgtggaaagcctctaaaaaccgcaagccccttatactgtatggcgcacggcaggtcggcaaaacctggcttttaagggaatttggcaagaacgagtataaaacggccatatacatcaattttgataaagatcccgatgtacagaagtattttacaggtaatatttcccccaattatattattgcggggctggaggactattccaggaaaaaaattgtccccgaggaaacccttatcatattcgatgaaatccaggagaaccagagggcgaaggattgccttaagtatttcaacgaagacgcgccgcaataccatatcgccgctgccgggagtttcctcggtatagccggcggcaaatttcccatcgggcaagtggacgagataaccatacgccccatgtctttttacgagttcttacaggctaagggcgatgacatattgcttaataatattaaaagtcttgacaggtctttattcgatttgagttctattacggccgggccaagattaaaagagtatatgtatgtcgggggaatgcccgcagtggtcaaagcctttattgaatcgggaaatttgcacgaaacgcgcaaggagcaggagaaaatcctgaacaactataaagaggatttttccaaacatattaaagggacggatataccgaaagtccgttaa

SEQ ID NO: 16178 - protein, 235 aa, Unknown
  Obtained from environmental sample
  misc_feature (1)..(235): Xaa is any amino acid
MKMERAVYSELLAWKASKNRKPLILYGARQVGKTWLLREFGKNEYKTAIYINFDKDPDVQKYFTGNISPNYIIAGLEDYSRKKIVPEETLIIFDEIQENQRAKDCLKYFNEDAPQYHIAAAGSFLGIAGGKFPIGQVDEITIRPMSFYEFLQAKGDDILLNNIKSLDRSLFDLSSITAGPRLKEYMYVGGMPAVVKAFIESGNLHETRKEQEKILNNYKEDFSKHIKGTDIPKVR

SEQ ID NO: 16179 - DNA, 837 bp, Unknown
  Obtained from environmental sample
  misc_feature (1)..(837): n is a, c, g, or t
gtggatccccggctggcggccatggatataataaagcccatgttggaagagggaatgaacggggcggtttcccagcaagatactccccaaatggaagcccggttgacggcgatgatcccccaaaaaggcgctgccaagcgtgctgcggcaccagcccttaaacctgctgctcccgctcctgtagctcccgctcctgttgctgctgctcccgctgctgccaagcctgttgcaggattgcctgctgaggaatcgggtcttacggcgatggatattcaggaattaaaagaatcggtggataacgatgtgccgatttatcaggtttcggtcaagtttgatgaaaaaagcctcatgaacaccgtggggggtattcagtgttatgcggcattgaagaatctgggaacagtactccgtacccaaccggagtttgaacggttatacgaagacgtttttttccctgtagtgaattattacgttgccacagacaaaagtacaggagaattgcagaaatatgtaactatccccgatgtaaccctttcttctaccgtaacggatatacaacgtctggccgcaggtgataatgctaatgcgcagcctccggtttccgcagcagttcctgcggctgcttctcccaaagccgccgctcctgcacaggcgcaggcatcggctcccgcagctcctgtagattcaaccgttgccaaagtaaaaacaggagtatccaacgacgacgctaaaaaggcggggaaagaagctggggcaatactgagggtagattccaagcggatcgacgatctccttaacctggtgtcggagagcggttattaccaaagcaacttttaa

SEQ ID NO: 16180 - protein, 278 aa, Unknown
  Obtained from environmental sample
  DOMAIN (103)...(186): P2 response regulator binding domain
  misc_feature (1)..(278): Xaa is any amino acid
MDPRLAAMDIIKPMLEEGMNGAVSQQDTPQMEARLTAMIPQKGAAKRAAAPALKPAAPAPVAPAPVAAAPAAAKPVAGLPAEESGLTAMDIQELKESVDNDVPIYQVSVKFDEKSLMNTVGGIQCYAALKNLGTVLRTQPEFERLYEDVFFPVVNYYVATDKSTGELQKYVTIPDVTLSSTVTDIQRLAAGDNANAQPPVSAAVPAAASPKAAAPAQAQASAPAAPVDSTVAKVKTGVSNDDAKKAGKEAGAILRVDSKRIDDLLNLVSESGYYQSNF

SEQ ID NO: 16181 - DNA, 888 bp, Unknown
  Obtained from environmental sample
  misc_feature (1)..(888): n is a, c, g, or t
atgatcagatggccgaggacatttaacaactggtacatccgccgcagccgccgccgcttctggcgcagcgaaaacgacagcgacaaaaataccgcctacgggactctctactatgtcctcgtccagttttccaaggtgatggccccgttcttgccgtttgtcaccgagaccatctatcgaaatttagtccacggcaaattggcgaacgaaccgtccagcgtacacttaaccgcctaccccacggtcgaaagcgacgccattgatgaaccgcttgaacttaagatgcaacttgtgcgccaagccgtcgctatgggccgcgcccttcgcagccgcttcaccataaagacgcgtcaaccgctaagcgagttcaccgtaatcctctccgaccgcaaaaagatcgatctcatcagggatatggaggagcttgtcaaagaggaattgaacgtcaaaaaggtggccttcgacagcgatgaggagcgagtggtgagcatatcggccaagccgaatttcaagaaattgggcaaggtctttgggcctaagatgaaagaggccggcgcgttgatagagcgattcagcgccgcggatataaagaaacttgagggaggagccgcgatcgacgtaatgggaacggcgctgacctacggcgacatagaggtccgccgcgccaaacgcgaagggttggaggtggaaacggaaggtgaactcaccgtagcactagaagtaacgatcactccggaactgaagcgggagtgcgtggcgcgagaatttgtcaaccgtgtgcaaaataggcgtaaggagataggcctgaacgtcgccgaccgcatcgtaatacgatattcctcctccaaagagattgaggacgcgcttgccgatttccgcattacgtaa

SEQ ID NO: 16182 - protein, 295 aa, Unknown
  Obtained from environmental sample
  DOMAIN (6)...(125): Anticodon-binding domain
  misc_feature (1)..(295): Xaa is any amino acid
MIRWPRTFNNWYIRRSRRRFWRSENDSDKNTAYGTLYYVLVQFSKVMAPFLPFVTETIYRNLVHGKLANEPSSVHLTAYPTVESDAIDEPLELKMQLVRQAVAMGRALRSRFTIKTRQPLSEFTVILSDRKKIDLIRDMEELVKEELNVKKVAFDSDEERVVSISAKPNFKKLGKVFGPKMKEAGALIERFSAADIKKLEGGAAIDVMGTALTYGDIEVRRAKREGLEVETEGELTVALEVTITPELKRECVAREFVNRVQNRRKEIGLNVADRIVIRYSSSKEIEDALADFRIT

SEQ ID NO: 16183 - DNA, 786 bp, Unknown
  Obtained from environmental sample
  misc_feature (1)..(786): n is a, c, g, or t
atggtcacgaaccggcgcgatattgtggggatcgacgcctctatcctcatgcatccgagggtctgggaggcttcggggcacctttcggggttcagcgacccgcttgttgactgcaaaaagtgcaaggagcgcttcagggccgaccatttggaaaacctcgacaagtgcccgaaatgcggcggggagctcaccgaggtgcgccgcttcaaccttatgttcaaaacctttatggggccggtggaggacaactcggccaccgtatatatgcgcccggagacggctcagggcatattcgtcaacttcctcaacgtccagcagtcctcccggctcaaaccgcccttcgggatcgcccaaatcgggaagtctttccgcaacgagatcacgccgggcaacttcacctacaggacgcgcgagttcgagcagatggagatggagttcttctcgccgcccgaccaagacgccaagtggtacgaatattggcgcgaggcgcgtctgcaatggtacaaggactacggcatcaagccggaacacctgcgcctgcgcgaccacgaaaaggacgaactcgcccactacgccaaggcctgcgtagacgtggagtacctcttcccgttcggctggagcgagcttgagggcgtcgcccatcgtaccgattacgacctgaagcaacactcggaattcagcggcaaagatttgtcgttcttcgacgacgagacgaaatcgcactacttcccctacgtcataaaacggcggcgggggcggacagaaccacgctggcattctttgtag

SEQ ID NO: 16184 - protein, 261 aa, Unknown
  Obtained from environmental sample
  DOMAIN (2)...(205): tRNA synthetase class II core domain (G, H, P, S and T)
  misc_feature (1)..(261): Xaa is any amino acid
MVTNRRDIVGIDASILMHPRVWEASGHLSGFSDPLVDCKKCKERFRADHLENLDKCPKCGGELTEVRRFNLMFKTFMGPVEDNSATVYMRPETAQGIFVNFLNVQQSSRLKPPFGIAQIGKSFRNEITPGNFTYRTREFEQMEMEFFSPPDQDAKWYEYWREARLQWYKDYGIKPEHLRLRDHEKDELAHYAKACVDVEYLFPFGWSELEGVAHRTDYDLKQHSEFSGKDLSFFDDETKSHYFPYVIKRRRGRTEPRWHSL

SEQ ID NO: 16185 - DNA, 567 bp, Unknown
  Obtained from environmental sample
  misc_feature (1)..(567): n is a, c, g, or t
ttgtggggatcgacgcctctatcctcatgcatccgagggtctgggaggcttcggggcacctttcggggttcagcgacccgcttgttgactgcaaaaagtgcaaggagcgcttcagggccgaccatttggaaaacctcgacaagtgcccgaaatgcggcggggagctcaccgaggtgcgccgcttcaaccttatgttcaaaacctttatggggccggtggaggacaactcggccaccgtatatatgcgcccggagacggctcagggcatattcgtcaacttcctcaacgtccagcagtcctcccggctcaaaccgcccttcgggatcgcccaaatcgggaagtctttccgcaacgagatcacgccgggcaacttcacctacaggacgcgcgagttcgagcagatggagatggagttcttctcgccgcccgaccaagacgccaagtggtacgaatattggcgcgaggcgcgtctgcaatggtacaaggactacggcatcaagccggaacacctgcgcctgcgcgaccacgaaaaggacgaactcgcccactacgccaaggcctgcgtag

SEQ ID NO: 16186 - protein, 188 aa, Unknown
  Obtained from environmental sample
  misc_feature (1)..(188): Xaa is any amino acid
MWGSTPLSSCIRGSGRLRGTFRGSATRLLTAKSARSASGPTIWKTSTSARNAAGSSPRCAASTLCSKPLWGRWRTTRPPYICARRRLRAYSSTSSTSSSPPGSNRPSGSPKSGSLSATRSRRATSPTGRASSSRWRWSSSRRPTKTPSGTNIGARRVCNGTRTTASSRNTCACATTKRTNSPTTPRPA

SEQ ID NO: 16187 - DNA, 402 bp, Unknown
  Obtained from environmental sample
  misc_feature (1)..(402): n is a, c, g, or t
ttgaggcgctcgttaggggggtctgctctcagtagaattatgttcgacacacactgccacctacaagatgagaggatctccgccggcgtcggcggcatagtagccaacgccaaccgcgccggggttacaagtatgctgtgctgcggcagcgccgccgccgactgggacgccgtcgcgcgtataggggcggactacggggacagcggggtggtatgcgcctacggcgtgcaccccttttacgtaggcggcgtcgatctcggcggcaacgattgggcgaacgatctttccgaacgccttgccggagacccgtcggccgccgtaggcgagatcgggcttgactgcgccgtcagcccgcgcgacgacaagagacaggcgacggttttcattgccaattggaaatag

SEQ ID NO: 16188 - protein, 133 aa, Unknown
  Obtained from environmental sample
  misc_feature (1)..(133): Xaa is any amino acid
MRRSLGGSALSRIMFDTHCHLQDERISAGVGGIVANANRAGVTSMLCCGSAAADWDAVARIGADYGDSGVVCAYGVHPFYVGGVDLGGNDWANDLSERLAGDPSAAVGEIGLDCAVSPRDDKRQATVFIANWK

SEQ ID NO: 16189 - DNA, 471 bp, Unknown
  Obtained from environmental sample
  misc_feature (1)..(471): n is a, c, g, or t
ttggttaaaaacggcgttatgttgttgaatgattcgggaaaaatggttcaacgaatatggaacgaaatgccaaaatattattcaggtattgaaatgggcgaaatcatcattatgccagaccatatccacggaataatcaaaataaatgatccgttcaaaaccaaccccgcggtaggggcaacccaacgtggttgccctccttgcacaacgtgtggttgcccgttaccgtatttaattgaccgtttaaaaacagggacaacgaacaaatacgtagatggtgtcaaaacatcacattggaagccatttcacaaaaaattatggcaacgcaattattatgaacgcataattcgtgatgaagcggaatacgcaagaattgtggaatacatccataataatccgattttatgggaaaaggtgacatacgccataacacaaaacctccccaagcgggaggttttttgttataaataa

SEQ ID NO: 16190 - protein, 156 aa, Unknown
  Obtained from environmental sample
  misc_feature (1)..(156): Xaa is any amino acid
MVKNGVMLLNDSGKMVQRIWNEMPKYYSGIEMGEIIIMPDHIHGIIKINDPFKTNPAVGATQRGCPPCTTCGCPLPYLIDRLKTGTTNKYVDGVKTSHWKPFHKKLWQRNYYERIIRDEAEYARIVEYIHNNPILWEKVTYAITQNLPKREVFCYK

SEQ ID NO: 16191 - DNA, 387 bp, Unknown
  Obtained from environmental sample
  misc_feature (1)..(387): n is a, c, g, or t
gtgttccgaaccgaatctcaagggcgtgtgcatacctcggcggcaacggttgcggttatgcccgaagccgaggaagttgatgttgaagttagaacagaagatttaaaagttgatgtgtacagggcaagcggagcgggcggtcaatacataaacaaaacggattccgctgttcgcataacgcacattccaagcggcttggttgtggcttgccaaaccgagcgtagccaaattcaaaaccgttcaaaagctatggaacttttgcgttctcgtttgctagatcacgccatttccgaaaaacagaaaaaagaatctgccgcaagaaaaagcctagttggcacaggagaccgcagcgacaaaattcgcacatacaatttccctcaaaactga

SEQ ID NO: 16192 - protein, 128 aa, Unknown
  Obtained from environmental sample
  DOMAIN (21)...(128): Peptidyl-tRNA hydrolase domain
  misc_feature (1)..(128): Xaa is any amino acid
MFRTESQGRVHTSAATVAVMPEAEEVDVEVRTEDLKVDVYRASGAGGQYINKTDSAVRITHIPSGLVVACQTERSQIQNRSKAMELLRSRLLDHAISEKQKKESAARKSLVGTGDRSDKIRTYNFPQN

SEQ ID NO: 16193 - DNA, 570 bp, Unknown
  Obtained from environmental sample
  misc_feature (1)..(570): n is a, c, g, or t
atgggcaactaccaagctgcaatagataacattgaaaaagataaaaaaaagctttacaattccgaagattctttcttgtttgaatttgatttgggtgttttgcatcactacaataaaaacttcaaagagagcataaagcacttcgcaaatgcagaacagattatggaagatttatattcacgctcggttagcaacgaagcagccgcgctgctcaccaacgacaatgttcgcccttaccgcccttacccctttgaaatacaatggctttatcaaacgcaaattttaaactatttagcacttggagaaatagacgaagctgttgttgaggctcgccgtgctcttttggcaattcaaagcctacnaganaaagaagaagacnaatttcatgaaagtggtaccttgcaatacctaatagccctctcttacgaatggcaaaaatccgaagatgatgctcgcaatgcctacgacaatgcaaaaaaaatttttggaagttcgggctacaccccaaaactcccagataaggttccaaaaaacaagccggaaataaagttattggcaatccgggtttaa

SEQ ID NO: 16194 - protein, 189 aa, Unknown
  Obtained from environmental sample
  misc_feature (1)..(189): Xaa is any amino acid
MGNYQAAIDNIEKDKKKLYNSEDSFLFEFDLGVLHHYNKNFKESIKHFANAEQIMEDLYSRSVSNEAAALLTNDNVRPYRPYPFEIQWLYQTQILNYLALGEIDEAVVEARRALLAIQSLXXKEEDXFHESGTLQYLIALSYEWQKSEDDARNAYDNAKKIFGSSGYTPKLPDKVPKNKPEIKLLAIRV

SEQ ID NO: 16195 - DNA, 642 bp, Unknown
  Obtained from environmental sample
  misc_feature (1)..(642): n is a, c, g, or t
ttgattgatttcttgtataacatatttatctttcctctggtacaaattgttgaaatttcatttgtaatcgtataccgaatattcagggacaaagcgctttccatattaggggtaagcgccgttgttacggcctgtaccatgcctctttattttattgccgaaaaatggcagcaaattgaaagggaactgcaggcaaggttatatcctaaagtaaagaaaataaaatccgtctttaagggcgatgaacagtatatggttctttccgcctattacagacagaatcattatcatccgatttacgccttaagaagttcccttggcgtttttatacaggttccttttttccttgcggcttacgcgtatctctcaaacttggaatttataaagggagcgtcttttattttcatacgggatttaggcgtgcctgacaggcttatgtccttcggcggcttttatcttaacttgcttcccgttgttatgaccgttattaactgcgtttccggagccgtatatacaaagggattagccgtccgtgaaaaaattcaagtttacggcatggcgataattttccttgttcttctttacaattcgccgtcaggcatggttctttactggaccatgaataatatttctcccttatag

SEQ ID NO: 16196 - protein, 213 aa, Unknown
  Obtained from environmental sample
  DOMAIN (32)...(211): 60Kd inner membrane protein
  misc_feature (1)..(213): Xaa is any amino acid
MIDFLYNIFIFPLVQIVEISFVIVYRIFRDKALSILGVSAVVTACTMPLYFIAEKWQQIERELQARLYPKVKKIKSVFKGDEQYMVLSAYYRQNHYHPIYALRSSLGVFIQVPFFLAAYAYLSNLEFIKGASFIFIRDLGVPDRLMSFGGFYLNLLPVVMTVINCVSGAVYTKGLAVREKIQVYGMAIIFLVLLYNSPSGMVLYWTMNNISPL

SEQ ID NO: 16197 - DNA, 555 bp, Unknown
  Obtained from environmental sample
  misc_feature (1)..(555): n is a, c, g, or t
atggccgagaggggcgtggacacggaagggagcatgatgatacttggcggatatgtgacgcaaaacgtaaatgacaagaaggaaatggagcctgcggtggcgagcgttgataaagaagcgcgcgaaataaacacaatatgcatggacagcggattttacagtgaagaggcggtagccgcggttgaaaaggcgaataaaaaaaaagagcgaaaagggcctgaagtgttttgcgctgtagagaaagggcaccacgggaaaacggtggaagatttgaaaagcaaagggcccagggggcggccgccggcgaacatgagcgcgaaagaaaagatggcgcggaaacttaaaaccaagaaagggaaacaggtatacaagaaacggaaagagacggttgagccggtattcgggataataaaaagcataatgggatttcggcaatttatgttacgtggtatagagaaagtgaataccgaatgggcgttagtgcgcgtggcgtataactttaaaagattgcacagtctcatgggagggaaaaggttgaacgaatgtttggcataa

SEQ ID NO: 16198 - protein, 184 aa, Unknown
  Obtained from environmental sample
  DOMAIN (4)...(167): Transposase DDE domain
  misc_feature (1)..(184): Xaa is any amino acid
MAERGVDTEGSMMILGGYVTQNVNDKKEMEPAVASVDKEAREINTICMDSGFYSEEAVAAVEKANKKKERKGPEVFCAVEKGHHGKTVEDLKSKGPRGRPPANMSAKEKMARKLKTKKGKQVYKKRKETVEPVFGIIKSIMGFRQFMLRGIEKVNTEWALVRVAYNFKRLHSLMGGKRLNECLA

SEQ ID NO: 16199 - DNA, 888 bp, Unknown
  Obtained from environmental sample
  misc_feature (1)..(888): n is a, c, g, or t
atgagggaatccggcggattaaatcaattctacaaagatacgttagtgcaatttcagggcgagttaagaaactatatcgacctaaaaaaagtattaatcgtaaaagatatagactccaaagaagataaagaatgttccgctcttcgcaagaaaataatgaagacgcttaaaaatacgcagatacatcccgatgaaattcagacgttttccgacaaatttataatagcgtccaaaaaaataaagcgttatataaaagagcaggaacgcctagaaaagcatcttaaaatcagttcgttgaaagaacttcgcacaatgggaagataccttacaatcaaagaagaacgtgaaaaacttgaaaatgaactcggtctttccgcagatgaaataaaagaaaaaatacgtcttattcaggtaacggacaaaaaattaagaacgcttgaagaagaatttgaagaacccatagaaagcatcaatcaaatggcaaatgaaatttatcacggtcgtgtaatgatgaaaaacgccaaagacagactgataagagctaacttgaggcttgttgtttctatagcgaaaaaatacacaaacagaggaatgccgttttttgatcttgtacaggaaggaaatatcggtcttatcaaagccgttgaaaaatttgaatatcaaaaaggttttaagttttcaacttacgctacatggtggatcaggcaggctattacacgttccatctcggatcaggcaagaacaatccgcgtgcctgttcacatgatagagcagataaacaaagttgtgcgcgagtcgagacagcttttacaaactttgggcagagagccgaccgatgaggaaatagcggaaaaactcggctggcccgcgttaaagttaaatcggtaa

SEQ ID NO: 16200 - protein, 295 aa, Unknown
  Obtained from environmental sample
  DOMAIN (178)...(248): Sigma-70 region 2
  misc_feature (1)..(295): Xaa is any amino acid
MRESGGLNQFYKDTLVQFQGELRNYIDLKKVLIVKDIDSKEDKECSALRKKIMKTLKNTQIHPDEIQTFSDKFIIASKKIKRYIKEQERLEKHLKISSLKELRTMGRYLTIKEEREKLENELGLSADEIKEKIRLIQVTDKKLRTLEEEFEEPIESINQMANEIYHGRVMMKNAKDRLIRANLRLVVSIAKKYTNRGMPFFDLVQEGNIGLIKAVEKFEYQKGFKFSTYATWWIRQAITRSISDQARTIRVPVHMIEQINKVVRESRQLLQTLGREPTDEEIAEKLGWPALKLNR

SEQ ID NO: 16201 - DNA, 861 bp, Unknown
  Obtained from environmental sample
  misc_feature (1)..(861): n is a, c, g, or t
ttgtacgagttatataaaagaatgacaggaacatttgagcattttctgcatgaaaaagaagagggaaaacccgctctcaattacattttgaacagaaacataaacgaggagatgataaaaaagtttcagcttggtttcgctccttcggatcgggattttcttcacaaattcctgaaacaaaaaggctattccgacgaatttcttgaaaaatcggggctgttttccgcaaaatacaagacaatcccgcttttttcagggcggcttatgttccctatcaccgatcggcaggggaaaatcgtcgctttcggcgggcgcgccctgcccggaacagtgcaaagcgacggaaatgagccgcccaagtacataaattcccctgaaaccgagatttacaagaaagggcagacactttttgccatagaacacgcaaaaccgcagatgaggcagaccaaaaccgtataccttgccgaagggtacatggacgtaatagccctacatcaggcggaaatcgtcaattctgtcgccccgctaggcacggcttttacagacgaacaggcggcatggctgcgccgttgggtggacaatgcagtccttattttcgacagcgatgaggcggggcaaaaggcggcttacaaggcgattatcacctgccgcaagaacggaatttcctgttcccttgtcaatttacaggaaggattggagagcgaaattgatggagaagaagcaaaaaaaataaaagatcctgctgatattttgcaaaaattcggtccccagatattgaaaaaagttgtaaaattcactataaatgactttgtatacttaatttccccgcggcaggcttcaatattctgcggcagaacgtga

SEQ ID NO: 16202 - protein, 286 aa, Unknown
  Obtained from environmental sample
  DOMAIN (150)...(229): Toprim domain
  misc_feature (1)..(286): Xaa is any amino acid
MYELYKRMTGTFEHFLHEKEEGKPALNYILNRNINEEMIKKFQLGFAPSDRDFLHKFLKQKGYSDEFLEKSGLFSAKYKTIPLFSGRLMFPITDRQGKIVAFGGRALPGTVQSDGNEPPKYINSPETEIYKKGQTLFAIEHAKPQMRQTKTVYLAEGYMDVIALHQAEIVNSVAPLGTAFTDEQAAWLRRWVDNAVLIFDSDEAGQKAAYKAIITCRKNGISCSLVNLQEGLESEIDGEEAKKIKDPADILQKFGPQILKKVVKFTINDFVYLISPRQASIFCGRT

SEQ ID NO: 16203 - DNA, 510 bp, Unknown
  Obtained from environmental sample
  misc_feature (1)..(510): n is a, c, g, or t
gtgaaatggctgactagcggcatcgcggcaagcagcgtgaacagagtagtaaccagcttcggcggcacaggcggttggcgcccgaccgaagaagtaattatggcattaaaacttgcggggcttcgcaagacagagaagacctatgacttctttcccgaaatgacaagcctgctaaataaaattaccgcaaagcctgtccgccgaaataaaccaattctcggcaggcgtatctttcatgtggaatcgggcattcatgcggacggcatattgaaagacccaaaatgttacgagcctttcccgccggagacggtcggattaaaacggaagatcgtcatcggcaagaagagcggcacggcttcaatcaaagccaagcttgccgaattgggcatttcttgcgatgaaaaaaaaatctccgctgttctggagggaatcagaataaagagcgaaaaaaaaagagacgcgcttaatgatttggagtttacgcagattgttaaggagcgcgtctcatga

SEQ ID NO: 16204 - protein, 169 aa, Unknown
  Obtained from environmental sample
  misc_feature (1)..(169): Xaa is any amino acid
MKWLTSGIAASSVNRVVTSFGGTGGWRPTEEVIMALKLAGLRKTEKTYDFFPEMTSLLNKITAKPVRRNKPILGRRIFHVESGIHADGILKDPKCYEPFPPETVGLKRKIVIGKKSGTASIKAKLAELGISCDEKKISAVLEGIRIKSEKKRDALNDLEFTQIVKERVS

SEQ ID NO: 16205 - DNA, 864 bp, Unknown
  Obtained from environmental sample
  misc_feature (1)..(864): n is a, c, g, or t
gtgccgcgaataaattttgcgcgtgaaatattcattgtagaagataccgactttgcggagatcgaaaatctttgtgtaaaaacaaacgcaaatttgcttatcggctcttcggatgcgcggcgcatcagccataaactgcatattccgcttattcgctgcgcctttcccattcatgatcatgtcggcggccagcgggcgcgcgtgcttggctttgaaggctcgcttaacttgcttgatcaggcggcgaacgcgatgattgataagaccgaaacaagtttcaggggagagttgtatcaaaagttttttaagggtaaacctgatcattcgcaaataaatactaatgaccaaacagcggcgcatccctgtttcggcgaacacgcctgcggcaacgcccgcgttcatctgccggtcgcgcctgaatgtaacatacagtgcaactattgcctgcgcagtttcgattgtatgaacgaaagcagaccgggcgtgtcatcaaaaatattaacgccgcttgaagcctttgatcggtataaaacactgaaacaaacgctgccgaatttaactgtggtcggcatagccggaccgggcgacgcgttggctaattttgatgaaacccgcgagactcttcgcctgattcgggaaaatgctccaaacattacattttgcatcgcgacaaacggacttatgctgccgcagtatgcaggtgaattgaaggcgcttggagtaagccatgttacggtaacaataaacgctgttgatcccgggattggcgctatgatatacagccatatttattttatgggcgagacatacactcggaatcgaaggcgcgtcaattttgatcgccaatcagcttgcctgaattaa

SEQ ID NO: 16206 - protein, 287 aa, Unknown
  Obtained from environmental sample
  misc_feature (1)..(287): Xaa is any amino acid
MPRINFAREIFIVEDTDFAEIENLCVKTNANLLIGSSDARRISHKLHIPLIRCAFPIHDHVGGQRARVLGFEGSLNLLDQAANAMIDKTETSFRGELYQKFFKGKPDHSQINTNDQTAAHPCFGEHACGNARVHLPVAPECNIQCNYCLRSFDCMNESRPGVSSKILTPLEAFDRYKTLKQTLPNLTVVGIAGPGDALANFDETRETLRLIRENAPNITFCIATNGLMLPQYAGELKALGVSHVTVTINAVDPGIGAMIYSHIYFMGETYTRNRRRVNFDRQSACLN

SEQ ID NO: 16207 - DNA, 387 bp, Unknown
  Obtained from environmental sample
  misc_feature (1)..(387): n is a, c, g, or t
atggttgagcatatactgacccccggcctccctaaaaaattcaaaaaactaggctacagcttcaatcgcatagccagttataaatacgcggaaggcgtttacgctcaaattgacggtatgcttgaaaacggaacacaggcggttgcggtggaagtaaaagttaccctgcggcaaggggacatagacgaccaccttttacgcatggaaaagatacggaaatacgccgatgaacacggcgacaaaaggcagtttatgggagctatagcggccaccatcaccgatgaatccacaagaaactatgccctgaaacatgggctttttatcattgaaccctctggcgaagatgtcaaagttacaaagccgaagaatgaagtgaaggtttggtga

SEQ ID NO: 16208 - protein, 128 aa, Unknown
  Obtained from environmental sample
  misc_feature (1)..(128): Xaa is any amino acid
MVEHILTPGLPKKFKKLGYSFNRIASYKYAEGVYAQIDGMLENGTQAVAVEVKVTLRQGDIDDHLLRMEKIRKYADEHGDKRQFMGAIAATITDESTRNYALKHGLFIIEPSGEDVKVTKPKNEVKVW

SEQ ID NO: 16209 - DNA, 390 bp, Unknown
  Obtained from environmental sample
  misc_feature (1)..(390): n is a, c, g, or t
gtggtgcagccgtttgataaagtttacgctccgaacgccggcgactccgtgcccgttatctattccctcggcaattttttttcaaatcagagaaagcgctatacggacggcgggatagtctttgaggtgaatttgcggaaaagcggcggggcggctaagaaaggcggggtcggcaagacggatatcgtaagctgcggctatatgccgttttgggtctataggtataaccaaggcgacggtagcgtgttccgcctgctgcctgaatgcaaaacgtatcctaccgcctgcgaggagtacaaaatgaacgccgccgacaaggccgcgatggaactgtattttgaagataccaaaaagcttttgcaaaacttgcctatcataagcccttactga

SEQ ID NO: 16210 - protein, 129 aa, Unknown
  Obtained from environmental sample
  misc_feature (1)..(129): Xaa is any amino acid
MVQPFDKVYAPNAGDSVPVIYSLGNFFSNQRKRYTDGGIVFEVNLRKSGGAAKKGGVGKTDIVSCGYMPFWVYRYNQGDGSVFRLLPECKTYPTACEEYKMNAADKAAMELYFEDTKKLLQNLPIISPY

SEQ ID NO: 16211 - DNA, 837 bp, Unknown
  Obtained from environmental sample
  misc_feature (1)..(837): n is a, c, g, or t
atggggacaatggtccatgatacaacgggcgatcctatcgggatcgttgccattgttatgggtggaattgtcgccctgttgagcgtttcatcaacgccgagcatggcagcggttattgacgcgcccatcagggatgaagcggatcttgatcgcattatgatgcggatcaaccaggaaggggtaaaagttaccgttactcccgcaggggtggtacaggtagctgatgataagatcgcccggcgcatgaggatgatactgctcagcgaaggccttattcccaaaaataccgacccttgggcgatattcgacaaggaacgctggactactaccgactttgggcagaaggtcaattttcgccgcgctcaaacccagatgatcaccgatcatatcaaggctattgacggtattgatgatgccagcgtcgtcattgtggttcccgaaaaagaattgttccgttccgaccagaatccagtaacggcaagtgtgagcattaccccccggccgggcagtgatattacgactaaccgcaaaaaaattgagggtattcaaatgctgcttcaactggcagttgaaggccttaaagatgaaaatatcggtattaccgatcaggcaggaaataaacttaacgattttgacaacatggccgcctttgaccgcttagctctcactgagaaggaacaaaaactgatacaacagttggaagcgaaatatcgtgctgacattttacagaccttgcaggctactttttccgcagaacgagtccgcgccgtgaatgttaaattagatatggatatgtccaaagaaaccgtggaaacaaaggaaatcaaacctttatag

SEQ ID NO: 16212 - protein, 278 aa, Unknown
  Obtained from environmental sample
  DOMAIN (20)...(216): Secretory protein of YscJ/FliF family
  misc_feature (1)..(278): Xaa is any amino acid
MGTMVHDTTGDPIGIVAIVMGGIVALLSVSSTPSMAAVIDAPIRDEADLDRIMMRINQEGVKVTVTPAGVVQVADDKIARRMRMILLSEGLIPKNTDPWAIFDKERWTTTDFGQKVNFRRAQTQMITDHIKAIDGIDDASVVIVVPEKELFRSDQNPVTASVSITPRPGSDITTNRKKIEGIQMLLQLAVEGLKDENIGITDQAGNKLNDFDNMAAFDRLALTEKEQKLIQQLEAKYRADILQTLQATFSAERVRAVNVKLDMDMSKETVETKEIKPL

SEQ ID NO: 16213 - DNA, 768 bp, Unknown
  Obtained from environmental sample
  misc_feature (1)..(768): n is a, c, g, or t
atgaaaaatggcgcaaacagcgaagaggaagaactggaggacagaaccgaaaagaaccatactgcggatgccgccgatgaagattcatcggaaaagttcaaggcgacccgtgaaaaattcagaaccatgctgcgggaaggcaagctggaagatcgtaccgtagaactggtggtcaatcaaaatccccagtttcccccctttgaaatgatgggcgtcagcatggaggacattgaaaccaatctttccggctttgccagtttctttggcggcggcaaaaagaacaaagtggtcactgtagcccgcgcgcgggaaatactcaaggctgaggaactggaaaaattgattgaccgcgaccgcgtcagcgacgaggcccgtcagcgggttgaggaaaccggcattatttttattgacgagattgacaaaatagccgttaaaggcgatcggggcggggggccggacgtttcccgcgagggcgtacagcgggatatactccccattgtggaaggggctaccgttactaccaaatgggggccggtcaataccgaccacatactttttatcgctgccggggcttttactgtcagcaagccttcggatttaatccccgaattgcaggggcgtttcccgctgcgggtagaactggattcgctgggaaaagacgatttcctgcgtatcctgaccgagccaaaaaacgccctgacgcggcagtataccgaactccttgccacggaaaatatagaggtagcatttgccccccgacgccattga

SEQ ID NO: 16214 - protein, 255 aa, Unknown
  Obtained from environmental sample
  DOMAIN (51)...(211): ATPase family associated with various cellular activities (AAA)
  misc_feature (1)..(255): Xaa is any amino acid
MKNGANSEEEELEDRTEKNHTADAADEDSSEKFKATREKFRTMLREGKLEDRTVELVVNQNPQFPPFEMMGVSMEDIETNLSGFASFFGGGKKNKVVTVARAREILKAEELEKLIDRDRVSDEARQRVEETGIIFIDEIDKIAVKGDRGGGPDVSREGVQRDILPIVEGATVTTKWGPVNTDHILFIAAGAFTVSKPSDLIPELQGRFPLRVELDSLGKDDFLRILTEPKNALTRQYTELLATENIEVAFAPRRH

SEQ ID NO: 16215 - DNA, 837 bp, Unknown
  Obtained from environmental sample
  misc_feature (1)..(837): n is a, c, g, or t
atgatggacngccgccccagaagcgactttttagagggcattagggttgtacgttccagcattccaaaagaattccgctccatttctgaaattctgcacagaaacggattgccagctcaaatagttcaagacctgctagcagaagttatgctgcactgtcccgtacactcaagggaagaagcccatataaaggagcaaatgaaaaaaacgctggcaaacaggatttcaatagctccgcgtccgcgccttcgcaaaggcagacccttaacgcaaatgttcataggtccggcaggagccggaaaatctggaataataacaaagctagcaggcagagccaccttaacaggcaacccgaatgtagccatagtgacaacagattgctgccgcatgggtgccttggagcaaatggaagcctttgccacagcagcagacataactcttgaagcaataaattcccccgaaggagttcccgaggtttttgaaaggttaagagataaatctttggttttagtggataccgcaggtcgtagcttaaaaaacgaggaatacgaagacgagataagtgctttttacgaagccattcacccagacgaaatgcacttggttttgcctctgaatatgcgcgaccacgatttggaaaaagctgtggaagtttatgctgcattaaaagcaaaccgcatagttttcactaaacaagatgaatcttgcgaacctggtgccctgctgtggctgcctttaaaatttgaaactccgctttcttatattggcaacgggcaaggaccagacaatatagtcagtgcagaaaaagaaattatagcggagtggttgctgaaataa

SEQ ID NO: 16216 - protein, 278 aa, Unknown
  Obtained from environmental sample
  DOMAIN (87)...(278): SRP54-type protein, GTPase domain
  misc_feature (1)..(278): Xaa is any amino acid
MMDXRPRSDFLEGIRVVRSSIPKEFRSISEILHRNGLPAQIVQDLLAEVMLHCPVHSREEAHIKEQMKKTLANRISIAPRPRLRKGRPLTQMFIGPAGAGKSGIITKLAGRATLTGNPNVAIVTTDCCRMGALEQMEAFATAADITLEAINSPEGVPEVFERLRDKSLVLVDTAGRSLKNEEYEDEISAFYEAIHPDEMHLVLPLNMRDHDLEKAVEVYAALKANRIVFTKQDESCEPGALLWLPLKFETPLSYIGNGQGPDNIVSAEKEIIAEWLLK

SEQ ID NO: 16217 - DNA, 879 bp, Unknown
  Obtained from environmental sample
  misc_feature (1)..(879): n is a, c, g, or t
gtggcaggaaacatttttggcgaactgtttaaggtagtaagtttcggggaatcacacgggccggctctgggttgcgtgattgacggctgtccggcggggcttgagctttcaaatgaaagtattaggcaggaattacggcggcgacgtcctgctcagggcggggcgtctaccgcacggaaagaggaagatgagccggaaattttgtccggagtgtttgaaggcaaaactctgggtacgcccattgcgataatggtacgcaacaccgactgtcattcggcggattatgacaatttgcgggatgtataccgtcccggtcatgcggatttttgctgggatgccaaatacggcatacgcgaccaccggggcggcggcagaagttccggcagggaaaccctgtgccgtgtcgccgcgggggcggtggcaaaaaaactgcttgccgcttacggtatccggataaccgcctggacttccgcccttgccgggcttgatatgccccaacccggcgatcctgattttgattttgatgaaattgagaaaaacccgttgaggattcccggcagggcggccgcggaacaggcgctcaaagtggttgaaacgctccgcgccgagggggacagcgccgggggtatagtatcctgtctggcgcggggcgtaccgcccggtctgggcgagccggttttcggcaaacttgacgcgcgtcttgccggggcaatgttgtcgctgggggcggtcaagggtatagaattcggggcgggttttgccgccgcccgtttgaaaggatcggaaaacaacgacacgccggttaataaatccaataatgccgggcgtattcttggcggtatttcagcggtcaggatataccttttatgttgcctttaa

SEQ ID NO: 16218 - protein, 292 aa, Unknown
  Obtained from environmental sample
  DOMAIN (10)...(292): Chorismate synthase
  misc_feature (1)..(292): Xaa is any amino acid
MAGNIFGELFKVVSFGESHGPALGCVIDGCPAGLELSNESIRQELRRRRPAQGGASTARKEEDEPEILSGVFEGKTLGTPIAIMVRNTDCHSADYDNLRDVYRPGHADFCWDAKYGIRDHRGGGRSSGRETLCRVAAGAVAKKLLAAYGIRITAWTSALAGLDMPQPGDPDFDFDEIEKNPLRIPGRAAAEQALKVVETLRAEGDSAGGIVSCLARGVPPGLGEPVFGKLDARLAGAMLSLGAVKGIEFGAGFAAARLKGSENNDTPVNKSNNAGRILGGISAVRIYLLCCL

SEQ ID NO: 16219 - DNA, 375 bp, Unknown
  Obtained from environmental sample
  misc_feature (1)..(375): n is a, c, g, or t
ttggatttattaaccggcgtgtcgttgttttccgatcctttcaaacgggcggcggcaaaacccgccccgaattctatacccttgaccgcccccagcgacaacattgccccggcaagacgcgcgtcaagtttgccgaaaaccggctcgcccagaccgggcggtacgccccgcgccagacaggatactatacccccggcgctgtccccctcggcgcggagcgtttcaaccactttgagcgcctgttccgcggccgccctgccgggaatcctcaacgggtttttctcaatttcatcaaaatcaaaatcaggatcgccgggttggggcatatcaagcccggcaagggcggaagtccaggcggttatccggataccgtaa

SEQ ID NO: 16220 - protein, 124 aa, Unknown
  Obtained from environmental sample
  misc_feature (1)..(124): Xaa is any amino acid
MDLLTGVSLFSDPFKRAAAKPAPNSIPLTAPSDNIAPARRASSLPKTGSPRPGGTPRARQDTIPPALSPSARSVSTTLSACSAAALPGILNGFFSISSKSKSGSPGWGISSPARAEVQAVIRIP

SEQ ID NO: 16221 - DNA, 762 bp, Unknown
  Obtained from environmental sample
  misc_feature (1)..(762): n is a, c, g, or t
ttgattgccgaggggtattctcatcgccagcgtcagatcaccagntttttgctaaggatacttccgcaaaacgacagcaaacagcagataataaatttatcttggtatgtagacccgactcccgacacaatttggaaaaccgttgacgctttcggcaacaatactctcgccggacagatcagcgcgccgcataatcatttccgtttcgggatagaaggggctgcggaagtatcggttgaaccgtatacagtctcggacgaaccatcgcacatactgctctaccctaccgaattgacgctggcgcaccgagggcttaccgatttttataatgacatcagccgttcagccccgaacgatttattggagcgtattcagcacttttcacacgccgtccatgcccgtctgcattacgaacgcggcgtaacttccagcacaacttcggcggcaaaagcgtttgacttgggcaagggcgtctgccaagactacgcgcaaatactgctctccctccttcgccttgataaaattccctgccgctatgtagccggtcttgcctccggctacggcgaaacccacgcatgggtagaagtttggacggggaaccgctactgcgccgcagacccaacacgcgacaaactcgcagacgaaggctacatcgccgtttcaagggggcgcgattttgccgacagttccattgaacgcggagtattcaccggtttgtgccgaggaacgcagacgataaacctgaacatggaaatttcttaa

SEQ ID NO: 16222 - protein, 253 aa, Unknown
  Obtained from environmental sample
  DOMAIN (6)...(77): Bacterial transglutaminase-like N-terminal region
  misc_feature (1)..(253): Xaa is any amino acid
MIAEGYSHRQRQITXFLLRILPQNDSKQQIINLSWYVDPTPDTIWKTVDAFGNNTLAGQISAPHNHFRFGIEGAAEVSVEPYTVSDEPSHILLYPTELTLAHRGLTDFYNDISRSAPNDLLERIQHFSHAVHARLHYERGVTSSTTSAAKAFDLGKGVCQDYAQILLSLLRLDKIPCRYVAGLASGYGETHAWVEVWTGNRYCAADPTRDKLADEGYIAVSRGRDFADSSIERGVFTGLCRGTQTINLNMEIS

SEQ ID NO: 16223 - DNA, 438 bp, Unknown
  Obtained from environmental sample
  misc_feature (1)..(438): n is a, c, g, or t
atgtccaatcaaacgttaaaagcaggctctcaagatgacttaaatgaaatcttgaacgcagaacaagaaaacaaaggcatagcagtttctaacgaagctcttgaggtttataacaaaacgctcaacgattttaaagaagaagttgttatagaaggcataattcgccaagtcagcgacttggaagtttttgttgatgtaaaaggaaaatcagagggaataattccccgcgaggagttcaaagaaggcgaacctatagagataggttcaaaaatcgaagtctatatagacaaatttgaaaacgaagacggtcgttttgttctttcaaagcaaaaggcagatttcctccgaatttggaaacaggtttatgaggcttatgaaagaggagatgttgtgcgcgggactctttcccaccgcataaaagagcggtgtggaagttga

SEQ ID NO: 16224 - protein, 145 aa, Unknown
  Obtained from environmental sample
  DOMAIN (43)...(110): S1 RNA binding domain
  misc_feature (1)..(145): Xaa is any amino acid
MSNQTLKAGSQDDLNEILNAEQENKGIAVSNEALEVYNKTLNDFKEEVVIEGIIRQVSDLEVFVDVKGKSEGIIPREEFKEGEPIEIGSKIEVYIDKFENEDGRFVLSKQKADFLRIWKQVYEAYERGDVVRGTLSHRIKERCGS

SEQ ID NO: 16225 - DNA, 360 bp, Unknown
  Obtained from environmental sample
  misc_feature (1)..(360): n is a, c, g, or t
ttgcgtnttagacgggcgcgatattggaacggtgggtttcccaatgcaaaatacaagttttttttaactgcggattatggcacaagagccgccaggcgactgcttgagttgcaagcagcaggcaaggcagggggcgaaaccatcgaaagcgtagagaaaagtttaagagaaagagatagagcggattcggaaagaaaaatagctcctcttgtaaaggcaaaagatgcaattgaaatagacacctcgcacataacaatacagcaacaagttcagaaaattttgcagagcgtaggcgaggtggcgcgctgcaagcattctctggacacaacccaaaggttacaatgtccaatcaaacgttaa

SEQ ID NO: 16226 - protein, 119 aa, Unknown
  Obtained from environmental sample
  DOMAIN (1)...(95): Cytidylate kinase
  misc_feature (1)..(119): Xaa is any amino acid
MRXRRARYWNGGFPNAKYKFFLTADYGTRAARRLLELQAAGKAGGETIESVEKSLRERDRADSERKIAPLVKAKDAIEIDTSHITIQQQVQKILQSVGEVARCKHSLDTTQRLQCPIKR

SEQ ID NO: 16227 - DNA, 432 bp, Unknown
  Obtained from environmental sample
  misc_feature (1)..(432): n is a, c, g, or t
ttggttcacagcgttgaagtgacgccagccaatgtgcacgatgtggttgttgcccacaagcttatacgccctgacgacaagacagccaaaggcgacagcggctatgtgggcttggagaatcgcgaagatatgaggcacgacccctttctatcacaagtgaaatgcgagatagtgaaacgcccatcgttttggaagaaaaaaggattgggcaagattgcggaggagtttgacagaaatgatgagcgcaggctcataagcaaaaggcagaaggtggagtatgtgtttcatgttgtcaaggatatattcagattcaaaaaacttccctacaagggcattgccaagaatatggaacgccttcaggtggcttttgccaatgccaatctttatatgcttgccatagctggccgcagattctgtcctgtgtttggctga

SEQ ID NO: 16228 - protein, 143 aa, Unknown
  Obtained from environmental sample
  misc_feature (1)..(143): Xaa is any amino acid
MVHSVEVTPANVHDVVVAHKLIRPDDKTAKGDSGYVGLENREDMRHDPFLSQVKCEIVKRPSFWKKKGLGKIAEEFDRNDERRLISKRQKVEYVFHVVKDIFRFKKLPYKGIAKNMERLQVAFANANLYMLAIAGRRFCPVFG

SEQ ID NO: 16229 - DNA, 831 bp, Unknown
  Obtained from environmental sample
  misc_feature (1)..(831): n is a, c, g, or t
ttgccggggacggaggggaaattcgtcacgtctaggcacctgcaagacaggttgatgcgcgagatactctccgacgtggcgcttactgtagagccgttgcaagacgcgatagggcacaaggtgtcgggccgcggcgaattgcatctgtcaatcctcatagagcgcatgcgccgcgagggttacgagtttcaagtgacaagcccgcaggtcatcatgcataaggatgatgacggcaagatgcttgaaccgtacgaggaactgacggtggacgtggacgagaagtacgccggaacggtgatagagaaactcggttcgcgccgaggcataatgcaagatatgtcgcaggaaaacggcatggcgcggatgactttcaaaattcccacaagaggcctattgggctacaaggccgagttcatgaccgacaccaaaggcatggggataatgaactacgtattcttagagtacgccccctacgccggagacatccgcacgagggcgaacggcgtgcttatagccaaagagccgtgtacgtcggtggcctacgcgctgttcaatttgcaagaccgcggaaagatgttcgtgggccccggagttaagatatacagggggatgatagtcggcgagcattgccggtcaaacgatttggtagtcaatcccggcaaagagaaaaagctgtcgaacatgagggcggccggttcggatgaaaacgtgatcctgactccgccgttagacatgagtttagaagactgtatcgcctatatcaatgaggacgaattggtagaagtcacgccgcaaactatcaggttgcggaagagggacaacaagtattaa

SEQ ID NO: 16230 - protein, 276 aa, Unknown
  Obtained from environmental sample
  DOMAIN (79)...(166): Elongation factor G C-terminus
  misc_feature (1)..(276): Xaa is any amino acid
MPGTEGKFVTSRHLQDRLMREILSDVALTVEPLQDAIGHKVSGRGELHLSILIERMRREGYEFQVTSPQVIMHKDDDGKMLEPYEELTVDVDEKYAGTVIEKLGSRRGIMQDMSQENGMARMTFKIPTRGLLGYKAEFMTDTKGMGIMNYVFLEYAPYAGDIRTRANGVLIAKEPCTSVAYALFNLQDRGKMFVGPGVKIYRGMIVGEHCRSNDLVVNPGKEKKLSNMRAAGSDENVILTPPLDMSLEDCIAYINEDELVEVTPQTIRLRKRDNKY

SEQ ID NO: 16231 - DNA, 795 bp, Unknown
  Obtained from environmental sample
  misc_feature (1)..(795): n is a, c, g, or t
atgaataaaaccttgaatatgggaagcttaatcgaggcattaggcgcaatgtttatgatcgtaggatccatcatattgtccggtaacagtattggagccttcatagacataccatcactcctcctcgttcttgtcggttcatatttcgcccttatgatagcgttctcgttggcggacagcttgggtgtttttgccgctatcggacttgcctttcaacagcctacatttgatacggctagtataatccagaaaatggtcgcgttctccgagaaagcccgccgcgaaggtttgcttgctttggaagacgagcttgaagaccttgaagatgaatttatgaaaaaaggtttacgtcttgtagtagacggaaccgacgccacaattatccgcgatctcatggaattggaattaagccagatgcagagcaggcattcatttaaaattaaacttattaacatgtgggcgactcttgttcccgggttgggaatgttaggtacggttatgggattggtaggtatgttacgcaaccttgacgacaaagcgtctatcggccctaacatggctcttgctcttattacaacattctatgggtctttgttttctaacgtattttttataccttttgcaagtaaacttggtatatttgataatgatgaagccagtatgaaggaaatgatcattgaaggcgttctttcgattcaagccggtgataatacgcgtattttagcaatgaaacttcttgcatatcttaatcctgtcgcgcgtatagcaatggaaaaagaagtccttaaggactag

SEQ ID NO: 16232 - protein, 264 aa, Unknown
  Obtained from environmental sample
  DOMAIN (94)...(227): MotA/TolQ/ExbB proton channel family
  misc_feature (1)..(264): Xaa is any amino acid
MNKTLNMGSLIEALGAMFMIVGSIILSGNSIGAFIDIPSLLLVLVGSYFALMIAFSLADSLGVFAAIGLAFQQPTFDTASIIQKMVAFSEKARREGLLALEDELEDLEDEFMKKGLRLVVDGTDATIIRDLMELELSQMQSRHSFKIKLINMWATLVPGLGMLGTVMGLVGMLRNLDDKASIGPNMALALITTFYGSLFSNVFFIPFASKLGIFDNDEASMKEMIIEGVLSIQAGDNTRILAMKLLAYLNPVARIAMEKEVLKD

SEQ ID NO: 16233 - DNA, 351 bp, Unknown
  Obtained from environmental sample
  misc_feature (1)..(351): n is a, c, g, or t
atggacatcacatccattaagaggaagaagagaacactggacgctatggccaacgtgcttaatgaattcctgagcggcgtttcgaagggcttttcggacgcggctttcgcttccttcagccggaggcgatcaacagtcagggaagacatcaaccagtccttcggcgccgacgagcctcccaaggcaaaagccgcaaagactgaatccgccggtgccgcttacctggatataatcaatacaagctccgacacgattgaaaccccacccaaaggcaggggcagaagttccaaagccaaagcaggcgcggcagctggccttccaaaacggcgtggcagagcggcgaanaagtaa

SEQ ID NO: 16234 - protein, 116 aa, Unknown
  Obtained from environmental sample
  misc_feature (1)..(116): Xaa is any amino acid
MDITSIKRKKRTLDAMANVLNEFLSGVSKGFSDAAFASFSRRRSTVREDINQSFGADEPPKAKAAKTESAGAAYLDIINTSSDTIETPPKGRGRSSKAKAGAAAGLPKRRGRAAXK

SEQ ID NO: 16235 - DNA, 465 bp, Unknown
  Obtained from environmental sample
  misc_feature (1)..(465): n is a, c, g, or t
atgttcggtgaaatggcgattcttgaaaattctccgagatcggcgacagccatagccctggatacagtcaaggttctcgaattcaacagccagaattttgagatactcatgctgggaaatccgcaaatagcgcttaagttgctcaggatgttctccaagcggatctatgattcaaaacgccggtttatgatcctgaccctggaagaaccccaggcaaagatagccgatgtctttctcatgctggatgaaagcatagccgatctggacagaatgaccgaaaggcgcgaatttaaaactaccgtagatgacgttgcccactgggcaggcatgaccgtaaacgatacccgtgatgttcttggtcatttcgctacccaacaccgtattgagatgtaccctgacaggataattgttaaaaacatcaacgatttttcccgctttgttaattcacgaagaagaaagacttag

SEQ ID NO: 16236 - protein, 154 aa, Unknown
  Obtained from environmental sample
  misc_feature (1)..(154): Xaa is any amino acid
MFGEMAILENSPRSATAIALDTVKVLEFNSQNFEILMLGNPQIALKLLRMFSKRIYDSKRRFMILTLEEPQAKIADVFLMLDESIADLDRMTERREFKTTVDDVAHWAGMTVNDTRDVLGHFATQHRIEMYPDRIIVKNINDFSRFVNSRRRKT

SEQ ID NO: 16237 - DNA, 780 bp, Unknown
  Obtained from environmental sample
  misc_feature (1)..(780): n is a, c, g, or t
ttgcttaatctgtcatccagggaaattgaccgcctgaaaactgtaatggattcccttttcaggggtgttcttgtttgcgacacctcgcacaggctgatcctggcaaataaagctgccagaaggttcctctcaatagtttcttatgagcagggcagggaaaccatatggagcgttatccccgaagaaacggttgccgagtttctcgcccaaaccctcctttccaccgatgttgcggaggaaagggaattttacgtcgatgtcaacgggacgcagcggctgcttgcggtaagcgtgatgccggtggttcaggatcgccaggtctcaggctcagtgattctcatcgaggacatcacggagagaaggaaccgtgaggcaaaactcaggcaaatggaaaacctcgcgagccttaccaccctggccgcgggggtagcacacgaaatcaagaaccccctgggcgcgctttcaattcacgtacagcttttaaagaaagccctggatgcccaggaaaagctatgcgcggtccatcaggcggcggcggactcccacgaatgtgagccgtataaatatttccgccaaagcgacaaatacatcaaagttttaaatgaggaaatagatcgccttaacagaataatcgttgattttcttttcgcggtaaggccgatgaacctggatccaaggcggggtaacataaatgattttataaaggagcttgcggaatttgtctcgtttgaattaaataaaacccgtattgaattggttcttacctggaagaaaacttaa

SEQ ID NO: 16238 - protein, 259 aa, Unknown
  Obtained from environmental sample
  DOMAIN (16)...(122): PAS fold
  misc_feature (1)..(259): Xaa is any amino acid
MLNLSSREIDRLKTVMDSLFRGVLVCDTSHRLILANKAARRFLSIVSYEQGRETIWSVIPEETVAEFLAQTLLSTDVAEEREFYVDVNGTQRLLAVSVMPVVQDRQVSGSVILIEDITERRNREAKLRQMENLASLTTLAAGVAHEIKNPLGALSIHVQLLKKALDAQEKLCAVHQAAADSHECEPYKYFRQSDKYIKVLNEEIDRLNRIIVDFLFAVRPMNLDPRRGNINDFIKELAEFVSFELNKTRIELVLTWKKT

SEQ ID NO: 16239 - DNA, 339 bp, Unknown
  Obtained from environmental sample
  misc_feature (1)..(339): n is a, c, g, or t
atgaaatgtcaccaggtgcaggcggccgttaaaattctgaaagacaggaatgtaaaatttgtttttgacggagaattgcaggccgacgccgcgcttgtcccttcggttaccgatcagaaggcgccgggcagcccggtaaaaggcaaggttaacactctgatcttcccggatctcggcgcgggcaatatcggctataagctggtgcagcggcttggcaacgccttggctttcgggcctttgctccagggtttcgccaaacccataagcgatctttcccgcggcgcctcggtagacgacatcgtaacgacctgcgcgataacactgtcacgagcaaaataa

SEQ ID NO: 16240 - protein, 112 aa, Unknown
  Obtained from environmental sample
  DOMAIN (1)...(108): Phosphate acetyl/butaryl transferase
  misc_feature (1)..(112): Xaa is any amino acid
MKCHQVQAAVKILKDRNVKFVFDGELQADAALVPSVTDQKAPGSPVKGKVNTLIFPDLGAGNIGYKLVQRLGNALAFGPLLQGFAKPISDLSRGASVDDIVTTCAITLSRAK

SEQ ID NO: 16241 - DNA, 540 bp, Unknown
  Obtained from environmental sample
  misc_feature (1)..(540): n is a, c, g, or t
ttgcgggtttttttcgcaggctttgattctggagggggtcgggggaacttcgatgggataaggttcgccgcggcagtttttaacacgctggaaaaactcgaaaaggcgtcggtagaagacctggcaagtgtttacgacctcggggaaattaccgcgaagataattgtggagggtctgcaggaaacctcggctgaaataancgcgactctagggactggcgttatcagcatcgcgccgcctccaagtgaggaagcccagcccatgcggggactttcgttttgtttcactggggagcttgcctccatgaagcggaaccaggcggaagaaaagatcaaagccctcggcgcctcggccaaatcaacggtagtaaaaggcctttcatacctggtcaccaacgatcccggctccggctccgccaaaaacaagaaggccagagaactggggataccaattatcaatgaggagcaatttttagcattacttgccagccctgcgggcgccgaaaaaccgacgccgcctgctcaaggagaactgttttaa

SEQ ID NO: 16242 - protein, 179 aa, Unknown
  Obtained from environmental sample
  DOMAIN (83)...(161): BRCA1 C Terminus (BRCT) domain
  misc_feature (1)..(179): Xaa is any amino acid
MRVFFAGFDSGGGRGNFDGIRFAAAVFNTLEKLEKASVEDLASVYDLGEITAKIIVEGLQETSAEIXATLGTGVISIAPPPSEEAQPMRGLSFCFTGELASMKRNQAEEKIKALGASAKSTVVKGLSYLVTNDPGSGSAKNKKARELGIPIINEEQFLALLASPAGAEKPTPPAQGELF

SEQ ID NO: 16243 - DNA, 462 bp, Unknown
  Obtained from environmental sample
  misc_feature (1)..(462): n is a, c, g, or t
atgaagaaaggcctgcgcctgatggttgacggcactgacgcggcgattatccgcgatctgatggaactggaactcagcaagacgcaggacaggcatgcgtccagaataggtgtactcaacaactggacggtactgttcccggggcttggaatgttaggaacggtcgtcgggcttatcggtatgttgtcacacctggacgacaaggcgtccatcggccccaacatggctcttgctcttgtaaccactttttacggttcaatgggcgcgaacctgtttgtaataccaatagccaacaaattaaaaggattcgacgctaaggaatccaatgttaaagaaatgataatagaaggggtgctttccattcaggcgggtgaaaatacgcgtattctggctttaaagctgatggcctaccttaacccgactgtacgaaaagtcatggaagcggaattaattaaggactaa

SEQ ID NO: 16244 - protein, 153 aa, Unknown
  Obtained from environmental sample
  DOMAIN (1)...(116): MotA/TolQ/ExbB proton channel family
  misc_feature (1)..(153): Xaa is any amino acid
MKKGLRLMVDGTDAAIIRDLMELELSKTQDRHASRIGVLNNWTVLFPGLGMLGTVVGLIGMLSHLDDKASIGPNMALALVTTFYGSMGANLFVIPIANKLKGFDAKESNVKEMIIEGVLSIQAGENTRILALKLMAYLNPTVRKVMEAELIKD

SEQ ID NO: 16245 - DNA, 444 bp, Unknown
  Obtained from environmental sample
  misc_feature (1)..(444): n is a, c, g, or t
atggttatcctggtaacgctggaaaccaaggtaggcgatgtggaagggatgatgaatttttgtattccgtatattacaatagaaccgatagttggcaagctctccgcccaattctggtattcttcggtacggcgaaacgccacttccgagaacctcaatgtattaaaggagaagctggcgactgtcgatgttaatgtagtagccgaaattgggaagatcgatattcccgtaagggacgttctttcccttcaagcgggggacgttatccgtttgtacaatacccgtgtggaagaaccgtatttcctgaatattggtaataaaccaaaattcctgtgccgtcccggtttaatagggagaaaactggcggtacaaataacaaagaagattgccgagcttcaggaagaagactttgaagaactggcaaacgatgagggggtcatgtaa

SEQ ID NO: 16246 - protein, 147 aa, Unknown
  Obtained from environmental sample
  DOMAIN (55)...(132): Surface presentation of antigens (SPOA) protein
  misc_feature (1)..(147): Xaa is any amino acid
MVILVTLETKVGDVEGMMNFCIPYITIEPIVGKLSAQFWYSSVRRNATSENLNVLKEKLATVDVNVVAEIGKIDIPVRDVLSLQAGDVIRLYNTRVEEPYFLNIGNKPKFLCRPGLIGRKLAVQITKKIAELQEEDFEELANDEGVM

SEQ ID NO: 16247 - DNA, 462 bp, Unknown
  Obtained from environmental sample
  misc_feature (1)..(462): n is a, c, g, or t
atgcctgattggctttattcggatactgttaaagaacattttaccaatccgcgtaacgttcttttggaagacgaggattctttttcgtataacgcaagaggacaaacaggaaatataaaatgcggggatcagatgctgatgctccttaaaattgataatgatgttatcaccgacgtgcgctggagaacctacgggtgcgccagcgccattgcctcaacaagcatgttgtcggaagtaataaagggcatgaaaatagaggatgcctacaaggtaaggcccgaagaccttgttgagaaacttggcggcctgccctcatacaagattcactgctccgtgttaggcgacaaggccctccgcgttgctattgacgactaccttgcaaaaacgcggaagagcccggaatgttacaggaagcggtcacagagatttgccactgcctcggcatcaccgacaaggacatga

SEQ ID NO: 16248 - protein, 153 aa, Unknown
  Obtained from environmental sample
  DOMAIN (5)...(132): NifU-like N terminal domain
  misc_feature (1)..(153): Xaa is any amino acid
MPDWLYSDTVKEHFTNPRNVLLEDEDSFSYNARGQTGNIKCGDQMLMLLKIDNDVITDVRWRTYGCASAIASTSMLSEVIKGMKIEDAYKVRPEDLVEKLGGLPSYKIHCSVLGDKALRVAIDDYLAKTRKSPECYRKRSQRFATASASPTRT

SEQ ID NO: 16249 - DNA, 438 bp, Unknown
  Obtained from environmental sample
  misc_feature (1)..(438): n is a, c, g, or t
atgggtatactgggcttggccagggcggcaaaaatagctttagacgagattgataaatatggaagggaaattgcgcccctgcgaaaccgcctgcgcgaccatctggtcgcagcgatccntggtattaaaataaacggccatcctgtggacatgctgccaaatacgctgaatgtttcattccccggcgctgaaggtgaggcgatcctcctttccatggatttagcgggaatagaggcgtcaaccggatcggcctgcgcttcgggcagccttgagccgtcccatgtgctgatggcgaccggagtagggccggagttggcccacggttcgatccgtttcagcctgggctgggggatcaccgttgaagatattgattatataatagaaacactgccgcctataatcgcccggcttagggcaatgggagggatttatgcctga

SEQ ID NO: 16250 - protein, 145 aa, Unknown
  Obtained from environmental sample
  misc_feature (1)..(145): Xaa is any amino acid
MGILGLARAAKIALDEIDKYGREIAPLRNRLRDHLVAAIXGIKINGHPVDMLPNTLNVSFPGAEGEAILLSMDLAGIEASTGSACASGSLEPSHVLMATGVGPELAHGSIRFSLGWGITVEDIDYIIETLPPIIARLRAMGGIYA

SEQ ID NO: 16251 - DNA, 828 bp, Unknown
  Obtained from environmental sample
  misc_feature (1)..(828): n is a, c, g, or t
ttgaaataccgttttatttccttaaaatcaataagacatgaaaagaaaatccatttgataaaacagaatattataaagcgttattccataagaaaccgaaaaaaaataatggaacaactggaagacatgaaggaatttgttattgatcataccaatataatcataatgaagaatgtgttaataaccattcaggaaataccgggcgattcattcggggatataagaaaacgtattttggaaaacatcgggcagattcgcaaaatggggacggattatctcgcctattcattgattgatactgtggttgacgaatattttattacactggctcatttggaaactgatattgaagatctggaagatcgtgccgtaaagacagataatgacgcgttcatttccgaaatacaggaaacaaaaaaatttcttttctatataaaacgggcaatgctgccattgcgggagaatcttatgattatatcccgccaggatatgctgttagcaaacgaagaactaaagccattccttcaggatttgcgggaaaatttatcaaatgcgatagactccgtagagacctaccgtgaatggctgacaaacataatggatgtaaacctttcggttctgtcataccaattaaacaaagtgatgaaaatactggctgtaatatccgcgatatttattccgttaacttttatcgcggggatatacggcatgaattttgaatttatgcctgaaataagacagcctttgggctaccctgttgtgctgggattcatgggaactgttgcgctgtcaatggtcatactatttaaaacacggagatggttttaa

SEQ ID NO: 16252 - protein, 275 aa, Unknown
  Obtained from environmental sample
  DOMAIN (2)...(275): CorA-like Mg2+ transporter protein
  misc_feature (1)..(275): Xaa is any amino acid
MKYRFISLKSIRHEKKIHLIKQNIIKRYSIRNRKKIMEQLEDMKEFVIDHTNIIIMKNVLITIQEIPGDSFGDIRKRILENIGQIRKMGTDYLAYSLIDTVVDEYFITLAHLETDIEDLEDRAVKTDNDAFISEIQETKKFLFYIKRAMLPLRENLMIISRQDMLLANEELKPFLQDLRENLSNAIDSVETYREWLTNIMDVNLSVLSYQLNKVMKILAVISAIFIPLTFIAGIYGMNFEFMPEIRQPLGYPVVLGFMGTVALSMVILFKTRRWF

SEQ ID NO: 16253 - DNA, 903 bp, Unknown
  Obtained from environmental sample
  misc_feature (1)..(903): n is a, c, g, or t
atgaacccccatattgttacttccggcgatgatcaacatatccatgtcagttactacgatgacaaggacggttccattaaatacaggtacaaccggcggggcactgtgggaaccatagacggcggcaccggtaccaatgccgatgccgtaaacagtaataacaacatccccaaaatgtgggccaatctggacggcggtcttgatcaggaggatgttgacgctacgacctataccacgggcggaagtatcaatgaaaatacgcgggtggtcagatggaccaacagtattgccgctaccaaaactgccagaggaaacatcaaggccggcaagcataattccatagcggttaccagccagggatatccggtaatagcctactacgacgagaccaaccaaaggctcaagctggcggtcagcagaagcgtcaatcccgttcaggcaagcaactgggttatacgggactatgtcataccgcggaatgacaagagcagttttggcaccggcgaatttgtcagcatgaagatagacacgattgccgggacaaaccagaaccgcgtccatattgccgccatgaataccagcaaacggctggtatacgtcaccggcatattgaatccaaccgccggtactggcaattcccagcaggatgaaaattccggcagtaacgtattaacgcctttgccgggacagacgagcgtgacggtacaggtagttgacagcgtgggcagtgtgggcagatggtgcgccctctcgctggacagcgcgggtaatccctggattagctacatggacgaaagttatgtaggctcgcgggacggcgtgaaagtggcgttccttataaaacgacattctacaaaggtgtcacgggcggcacttatttcgcgggaaaatacatccacgtga

SEQ ID NO: 16254 - protein, 300 aa, Unknown
  Obtained from environmental sample
  misc_feature (1)..(300): Xaa is any amino acid
MNPHIVTSGDDQHIHVSYYDDKDGSIKYRYNRRGTVGTIDGGTGTNADAVNSNNNIPKMWANLDGGLDQEDVDATTYTTGGSINENTRVVRWTNSIAATKTARGNIKAGKHNSIAVTSQGYPVIAYYDETNQRLKLAVSRSVNPVQASNWVIRDYVIPRNDKSSFGTGEFVSMKIDTIAGTNQNRVHIAAMNTSKRLVYVTGILNPTAGTGNSQQDENSGSNVLTPLPGQTSVTVQVVDSVGSVGRWCALSLDSAGNPWISYMDESYVGSRDGVKVAFLIKRHSTKVSRAALISRENTST

SEQ ID NO: 16255 - DNA, 918 bp, Unknown
  Obtained from environmental sample
  misc_feature (1)..(918): n is a, c, g, or t
atgacagaatggccgaggttactaaacatgccagttctgtcgggattgcttttcaccggacgcttgccttcagcattcgcctctcccataaggcccgcatcggtcaaggcctgcgccgcagcggctaccgccagttgggtaaagcgggccattttacgggcttcttttttatccatccaaagccccggatcaaaatccttaatttcaccggcgattttgacatcaaaatcggtggtatcaaactgggtgatggggccaatcccgcttttgcccgccttgaggctttcgcagaattcttcaactgatttgcctattggggaaacaagccccattccggtaactactaccttcttcatttctttctccttatgtaaacatcccgccgtctacaggaagaacctgtccggtgatatatgtggaatcgtccgatgccagaaaaagcacggcgtttgctatatcctgcgctgttcccatccgcttgagggggatctgctcgagcattttttcctttacattatcgggaagcactgcggtcatgtcagtagcgataaagccgggagcgatcgcatttacccttacgccgcggctcgccgtttcgtgggcaaggcttttggtcacggctatgagtccggccttgcttgccgaatagtttgcctgccctccgttgccgtggattccgacaacgcttgccatattgatgatggaaccggcgcgtttgcgaatcatgtccctgcctacggtgcgggcgacaagaaaggccgcgctcaagtttatgtccagtaccttctgccattcgtcaagcgacatcctgaacgaaaggttgtctttggtaatgccggcattgttaaccactatgtccaagccgccggaatctttaatggcgttttcgaatgcccctttcaccgccgcaagctgtga

SEQ ID NO: 16256 - protein, 305 aa, Unknown
  Obtained from environmental sample
  SIGNAL (1)...(27)
  misc_feature (1)..(305): Xaa is any amino acid
MTEWPRLLNMPVLSGLLFTGRLPSAFASPIRPASVKACAAAATASWVKRAILRASFLSIQSPGSKSLISPAILTSKSVVSNWVMGPIPLLPALRLSQNSSTDLPIGETSPIPVTTTFFISFSLCKHPAVYRKNLSGDICGIVRCQKKHGVCYILRCSHPLEGDLLEHFFLYIIGKHCGHVSSDKAGSDRIYPYAAARRFVGKAFGHGYESGLACRIVCLPSVAVDSDNACHIDDGTGAFANHVPAYGAGDKKGRAQVYVQYLLPFVKRHPERKVVFGNAGIVNHYVQAAGIFNGVFECPFHRRKL

SEQ ID NO: 16257 - DNA, 606 bp, Unknown
  Obtained from environmental sample
  misc_feature (1)..(606): n is a, c, g, or t
ttgcgggacgggctgcgaagcgaaagaaaagctccactggatcaggcggatctttcacagcttgcggcggtgaaaggggcattcgaaaacgccattaaagattccggcggcttggacatagtggttaacaatgccggcattaccaaagacaacctttcgttcaggatgtcgcttgacgaatggcagaaggtactggacataaacttgagcgcggcctttcttgtcgcccgcaccgtaggcagggacatgattcgcaaacgcgccggttccatcatcaatatggcaagcgttgtcggaatccacggcaacggagggcaggcaaactattcggcaagcaaggccggactcatagccgtgaccaaaagccttgcccacgaaacggcgagccgcggcgtaagggtaaatgcgatcgctcccggctttatcgctactgacatgaccgcagtgcttcccgataatgtaaaggaaaaaatgctcgagcagatccccctcaagcggatgggaacagcgcaggatatagcaaacgccgtgctttttctggcatcggacgattccacatatatcaccggacaggttcttcctgtagacggcgggatgtttacataa

SEQ ID NO: 16258 - protein, 201 aa, Unknown
  Obtained from environmental sample
  DOMAIN (1)...(128): short chain dehydrogenase
  misc_feature (1)..(201): Xaa is any amino acid
MRDGLRSERKAPLDQADLSQLAAVKGAFENAIKDSGGLDIVVNNAGITKDNLSFRMSLDEWQKVLDINLSAAFLVARTVGRDMIRKRAGSIINMASVVGIHGNGGQANYSASKAGLIAVTKSLAHETASRGVRVNAIAPGFIATDMTAVLPDNVKEKMLEQIPLKRMGTAQDIANAVLFLASDDSTYITGQVLPVDGGMFT

SEQ ID NO: 16259 - DNA, 303 bp, Unknown
  Obtained from environmental sample
  misc_feature (1)..(303): n is a, c, g, or t
gtgaatatgactaacttacattctttggatgaaatcagaacaaaagtctctgataaagcccgccaatacggggttaaaagagtatatttattcggctcttatgcccgcggaaagccaaatcccgaaagcgacattgatatttgcattgaaaagggaaatatccaaaccttgtttgagctttccggtttttgtcaggatttagaggaaacccttggaaggaaagttgatgttgttactacagttgctttatccggggagtttaaagaacaaatagaaaaagatatggttctcatttatgaataa

SEQ ID NO: 16260 - protein, 100 aa, Unknown
  Obtained from environmental sample
  DOMAIN (9)...(98): Nucleotidyltransferase domain
  misc_feature (1)..(100): Xaa is any amino acid
MNMTNLHSLDEIRTKVSDKARQYGVKRVYLFGSYARGKPNPESDIDICIEKGNIQTLFELSGFCQDLEETLGRKVDVVTTVALSGEFKEQIEKDMVLIYE

SEQ ID NO: 16261 - DNA, 420 bp, Unknown
  Obtained from environmental sample
  misc_feature (1)..(420): n is a, c, g, or t
atgttaaaatacagcggaaaaggcgctccgcgacatggggctatcgacaaaaaagacaattccccccgccagctttccggcggcgagaagcggcggctcgcgatagccggagtcaccgctatgggctgtaacacggtaatcatggacgaaccttttgccaacctggactggccgggcgttgttcagacactcaaaattatacgacatttaaaaaacagcggtaaaacactgataatcctgactcatgagcttgaaaaggctctggcgttagctgacaggcttataatccttcacaaaggcaaagtccgcgcggactcgcaaccggacacagcgcttgattcccttgacccttcctggggggtgcgcgatccccgcaagagttacgcctcaataaaggactgctcgtggctggaagattaa

SEQ ID NO: 16262 - protein, 139 aa, Unknown
  Obtained from environmental sample
  DOMAIN (5)...(100): ABC transporter
  misc_feature (1)..(139): Xaa is any amino acid
MLKYSGKGAPRHGAIDKKDNSPRQLSGGEKRRLAIAGVTAMGCNTVIMDEPFANLDWPGVVQTLKIIRHLKNSGKTLIILTHELEKALALADRLIILHKGKVRADSQPDTALDSLDPSWGVRDPRKSYASIKDCSWLED

SEQ ID NO: 16263 - DNA, 879 bp, Unknown
  Obtained from environmental sample
  misc_feature (1)..(879): n is a, c, g, or t
gtgaaagccaaagaaatggccgccgccgcctcggagtccggcgcaagttgcgtcaaactgcaaatggtattcgccgatgagattctccatcccaataccggggaagtcaccttgcccggcggcaaaatcaggctctacgaccggttcaaacagcttgaaatggcacctgaattctatgccgatgtcaaagaatacgttgaatcgcttggcctgctgttcctctgcacccctttcggcctgaaaagcgccaaaatcctcaaggctttaaagcctaaaatagtaaaaatcgcctcgcctgaattaaactacaccgcgcttttgcgtgaagtcgccggatggggcttgccgacgctgctgtccacaggggtatcgaggctgggagatatagaggaagcgcttatggggttcagggttcagggttcagggtctagggaacagggaacagggaacagggatcgttgttcggacgacagtgttgcttccgggatgtaccccgaaagttcgtacaataaaccccagtccccagtccccagtccccagtccccctgtctcctacattgcgtcacttcctacccggcgcccgaaacggactacaatctgcgtgtattgcaaagtctcgccgcagtgttcggtgtttctgtgggcgtgagcgaccacagccttgatccctgtctggtgccttctctcgcggtctgtcagggcgcggctgtcattgaaaaacacttctgcctttcccgcgaggatcccggccttgacgatcctatcgcccttgtcccgcaggacttcgcgctgatgtcaggggcaatacgccgcgccgcccaaacagacgcgaaacaacgcttgccttctacagccgtgaacccggttctcagtggttga

SEQ ID NO: 16264 - protein, 292 aa, Unknown
  Obtained from environmental sample
  DOMAIN (6)...(286): NeuB family
  misc_feature (1)..(292): Xaa is any amino acid
MKAKEMAAAASESGASCVKLQMVFADEILHPNTGEVTLPGGKIRLYDRFKQLEMAPEFYADVKEYVESLGLLFLCTPFGLKSAKILKALKPKIVKIASPELNYTALLREVAGWGLPTLLSTGVSRLGDIEEALMGFRVQGSGSREQGTGNRDRCSDDSVASGMYPESSYNKPQSPVPSPQSPCLLHCVTSYPAPETDYNLRVLQSLAAVFGVSVGVSDHSLDPCLVPSLAVCQGAAVIEKHFCLSREDPGLDDPIALVPQDFALMSGAIRRAAQTDAKQRLPSTAVNPVLSG

SEQ ID NO: 16265 - DNA, 708 bp, Unknown
  Obtained from environmental sample
  misc_feature (1)..(708): n is a, c, g, or t
atgaaaaaaataggcaaaaagtaccataaaaacctggcagccttggttattgttttggctctttccggggcgcttattgcaggctatctggccggtctgtttaattttctggaatacaaactctatgacccaagaataaacctttttgccaatagctcaatgagatcccaggatatagttctggttctcctggatcagcatagtattgaatggggccgcgaggagcggggctggggatggccctggccaagagaggcttacgcagagttgctggattacatgaatctagcaaaagccaagtccgtggtcttcgatatgcttttttctgagccctcaatttacactaacatcaggcaggatgagatcatagaaagcgtgttaaaaacgcgtgatatgaccagagccgcttctgccggaggggaactgcaaacagcgctgcgcctttccctggaagcgcttgacaagattgaagaactaaatggcaggcaggatgacgcttcttttgcagcggctgcgacacggtacggcaaggttgtccaaggggttaacttcagcagccagactggaaatgttttcgcctggccttcgtatcttaacaaacctcttttcactacagagaatttcggctccgccatttcaaaatttgacattgccaatgaccaccccaatgagacaaaaacagtcggcgcgcaattcctgcggccataa

SEQ ID NO: 16266 - protein, 235 aa, Unknown
  Obtained from environmental sample
  SIGNAL (1)...(27)
  misc_feature (1)..(235): Xaa is any amino acid
MKKIGKKYHKNLAALVIVLALSGALIAGYLAGLFNFLEYKLYDPRINLFANSSMRSQDIVLVLLDQHSIEWGREERGWGWPWPREAYAELLDYMNLAKAKSVVFDMLFSEPSIYTNIRQDEIIESVLKTRDMTRAASAGGELQTALRLSLEALDKIEELNGRQDDASFAAAATRYGKVVQGVNFSSQTGNVFAWPSYLNKPLFTTENFGSAISKFDIANDHPNETKTVGAQFLRP

SEQ ID NO: 16267 - DNA, 561 bp, Unknown
  Obtained from environmental sample
  misc_feature (1)..(561): n is a, c, g, or t
atggaaaagctggacaaagcttttaaaggaaccagggtggttcaaatcaaaacgattatttcagatattatgatacaggtcgcccattatctttccattaagttttttatagctgtgattaacggggttttgattggcttatgcatgagagtaatagggcttgaattcgccatgatctggggggtattccagtttgtcgcgaattttatcccaagcataggcagtattgcggtggggctaggggcaattgtttttagcgtaattcagttttggcctgatcctacgccaatggttgccgtgggtcttgttatgctggctgttaatattatctttggttttattttggaacctaaaattatgggcgacaggcttggtctttctccgctggttgtgcttctctcccttttggtctggggatggatatggggctttgtcggtcttatcctcgcggtacccatgatggcgatcataaaaatcatctgcaaaaacatccccgtgctggaaccagtttccatacttttgggatcgcacaaggtttcatcatcaaggcgcgaggattga

SEQ ID NO: 16268 - protein, 186 aa, Unknown
  Obtained from environmental sample
  misc_feature (1)..(186): Xaa is any amino acid
MEKLDKAFKGTRVVQIKTIISDIMIQVAHYLSIKFFIAVINGVLIGLCMRVIGLEFAMIWGVFQFVANFIPSIGSIAVGLGAIVFSVIQFWPDPTPMVAVGLVMLAVNIIFGFILEPKIMGDRLGLSPLVVLLSLLVWGWIWGFVGLILAVPMMAIIKIICKNIPVLEPVSILLGSHKVSSSRRED

SEQ ID NO: 16269 - DNA, 831 bp, Unknown
  Obtained from environmental sample
  misc_feature (1)..(831): n is a, c, g, or t
atgggtgacggcggctacccggaggcgagttctctcgcaatgacggacagaatggctcaaccttcaaaaggactgggcggtaaactcctgcttaatacaaaggttaataaaattgttattaaaaacggatctgttacgggagtaaaactggaaaatgaaattctgagcgccgatgccgtaatcgttacacaggaaactatcgcggctcttgacaggttattcgacactcctttacatgacgcatggctgcgggaactccgtgaaaaaacaaaatccgccgtgtgtacttttatcagcatgggtatccgcgcgcaattacccgaaatcataccgctatggcagcctggcgaaccaatcaaatacgcgggtataaatgtaactgaaatcggatttagcaattatgccgggtatgaaggttacgcgccaaaaggctgtaccgcgcttaccaccgcatttatcgaagatacttatgacttttggaaaaaggcaaaagaagaaggccgttacgacgaggaaaaacgcgtactggcggaacaaattagccgcgcgctttgccggaaatatcctcaggcggaagggaatatcgaagttattgacattgcaacgccgctaacctacgaacgttataccggagcatatcacggctcatggatgactattcagggtcccggcgacaaaacgcgaatgtacccgggttccgtgcaaagcgtcggcggattatacttttccggacacaggattatgccgccgggcggacaaccttccgcgctggcggccggacgcatggcaacgcagatggtctgtcgtcaatttggtacagtgtttgtataa

SEQ ID NO: 16270 - protein, 276 aa, Unknown
  Obtained from environmental sample
  misc_feature (1)..(276): Xaa is any amino acid
MGDGGYPEASSLAMTDRMAQPSKGLGGKLLLNTKVNKIVIKNGSVTGVKLENEILSADAVIVTQETIAALDRLFDTPLHDAWLRELREKTKSAVCTFISMGIRAQLPEIIPLWQPGEPIKYAGINVTEIGFSNYAGYEGYAPKGCTALTTAFIEDTYDFWKKAKEEGRYDEEKRVLAEQISRALCRKYPQAEGNIEVIDIATPLTYERYTGAYHGSWMTIQGPGDKTRMYPGSVQSVGGLYFSGHRIMPPGGQPSALAAGRMATQMVCRQFGTVFV

SEQ ID NO: 16271 - DNA, 609 bp, Unknown
  Obtained from environmental sample
  misc_feature (1)..(609): n is a, c, g, or t
atgaaaaaaatttttcgtataggcattgccggctacatgggcgcgggtaagagtacctgcgcccgttctttcgcttctgaagacgctctgataatagacgccgacgcggaggcgaagcggattatggcgcacaactccgccatcaaagagtcgttgcgggcggctttcggtgaggcggtcgttgacgcggagggtaaaataaacgccggcgcgctcggtcgggcggctttcgagtcggtcgacacgctcctgacgctcaacggcataacgcacccgccgctcgtcgagtatttggacgccgctgtctccggatgccgaaaaccgctatgcatcttagacgccgccctaatcccgcttttgggagttgagtcttggttcgatctgtgtatttgggtctgcgcccccttcgagacgcgcctcaaacggcttttggcgaagaggccggacgtgtctgaggcggaattggtcaatcggatgcggatgcaggaagccgtcatgtcagcgcctgatgagggcggggactgggtgatggtcggcgacggagagtgcagagagtatatcgccgacgcgattggaaaaatgcgacagctgtccgaaaagacgctctaa

SEQ ID NO: 16272 - protein, 202 aa, Unknown
  Obtained from environmental sample
  SIGNAL (1)...(25)
  DOMAIN (5)...(185): Dephospho-CoA kinase
  misc_feature (1)..(202): Xaa is any amino acid
MKKIFRIGIAGYMGAGKSTCARSFASEDALIIDADAEAKRIMAHNSAIKESLRAAFGEAVVDAEGKINAGALGRAAFESVDTLLTLNGITHPPLVEYLDAAVSGCRKPLCILDAALIPLLGVESWFDLCIWVCAPFETRLKRLLAKRPDVSEAELVNRMRMQEAVMSAPDEGGDWVMVGDGECREYIADAIGKMRQLSEKTL

SEQ ID NO: 16273 - DNA, 597 bp, Unknown
  Obtained from environmental sample
  misc_feature (1)..(597): n is a, c, g, or t
atgaaacttaatgttaaatttttggctttgggggcatgtttactgatggcgcggccgctttttgcgcagaatatttttcttgaaattaaccttaacagccagagggcgcgaagcatcacgcggtcaatacgtcagaagccctctctggaattattcagggtgatagaacaggccggtaatgacaggaagatctcagggattatcctcaatatttcggcgtgccaggaagacagggagaccctttgggaaattcggaacgccctggaaaaatttaaggcaaaaggaaaaaaggtatgcgcctttatcagcggcgccgaccttgatctgtactgtcttgcgaccataggcgataaaatcgttatggacgatcagggcgttcttatgctgacaggttacgtctggggccgcggttatgtaaaacacagccttgaaaaactgggaattggggcgcgtgagctgcgttatctgaaattcaaatctgcggcggaaacattcacgcgggattcgatgtcggaagaagaccgcgcccaatacggcgaaatactggacgatatgatgcggcttgcccgcgacacggcgtgcgtggcccgctcgtga

SEQ ID NO: 16274 - protein, 198 aa, Unknown
  Obtained from environmental sample
  SIGNAL (1)...(22)
  misc_feature (1)..(198): Xaa is any amino acid
MKLNVKFLALGACLLMARPLFAQNIFLEINLNSQRARSITRSIRQKPSLELFRVIEQAGNDRKISGIILNISACQEDRETLWEIRNALEKFKAKGKKVCAFISGADLDLYCLATIGDKIVMDDQGVLMLTGYVWGRGYVKHSLEKLGIGARELRYLKFKSAAETFTRDSMSEEDRAQYGEILDDMMRLARDTACVARS

SEQ ID NO: 16275 - DNA, 834 bp, Unknown
  Obtained from environmental sample
  misc_feature (1)..(834): n is a, c, g, or t
ttgaaaaatattgaggatatacgtctgtttaagataaacgaaatggtttatcaaaaagacgaatactccactacaaaatttgcgtccgtatttaactccgttcaaaaccttaactgcggggtctttattatcgctgacagcaacggcaaaaaaacggacttctatatgggtgttcgttccctggatgacaaacgtacaacaaaatcattaaaggaaacacttagaaacgcgctgtgcggacagttccctggtgttaaaacagatgatttgcttgacccggtcgcggaggaatttcttgggaacatccaatcgaaaaatatcgcttctgtttcctgtgttgcaaagaacaaggatgaagaatttaccgacaacgaacgctttatccagggacttgaaaagctcgcccttgcaatgcaggggcagcgctacaccgctattgttttggcaaaaagcacaccgacctggcaattgaccgaaacacgccgtgcttatgaaatgatttacacatatctttcgccttttgctaatatgcaatttagttacggaacaaatgcgacattaaacatttctgaagcattttcaagcggtacaagcagaggaacgtcacatgcggtcaatacatcaactcagaaaggcacaagctattctaaaaacactaccgtaagtgaatcgaaaacaagaccgggagttgtttcaagtattcttaaaggtgtcgttgccgtggcaagtattgttgctgccccatttacttttggtacaagtttgattgcggggggactggtcatgggtgcggttccgtcgggctcaaaaacgagctggaacttccaagagtga

SEQ ID NO: 16276 - protein, 277 aa, Unknown
  Obtained from environmental sample
  misc_feature (1)..(277): Xaa is any amino acid
MKNIEDIRLFKINEMVYQKDEYSTTKFASVFNSVQNLNCGVFIIADSNGKKTDFYMGVRSLDDKRTTKSLKETLRNALCGQFPGVKTDDLLDPVAEEFLGNIQSKNIASVSCVAKNKDEEFTDNERFIQGLEKLALAMQGQRYTAIVLAKSTPTWQLTETRRAYEMIYTYLSPFANMQFSYGTNATLNISEAFSSGTSRGTSHAVNTSTQKGTSYSKNTTVSESKTRPGVVSSILKGVVAVASIVAAPFTFGTSLIAGGLVMGAVPSGSKTSWNFQE

SEQ ID NO: 16277 - DNA, 849 bp, Unknown
  Obtained from environmental sample
  misc_feature (1)..(849): n is a, c, g, or t
ttgatggccgagagggcttctggacctaacgccgttaatgtgcacgctacggttcccggcagggttatccgcaagatttcatggcaggacaaatacggcgtgaataacgacgccatcgtaatcaggatggaaggcgcttttgaaaaattgggaagaagagaagatatatatcaatggaaaggtttaagcggttatgatttacaaaggataatttccgaattaggcattgtggaaatggaaaacatgggcaggccccttgccggaatgatttccgccgcaagaagcgaaaacgaaaaaattacgcttgtagtgcgctgtgtttttgatgatccctggcttgccgccgattacgctctttgcagcgaaagattacaggcagttgtagaaggcgccgcgattgtcgccaaagcctgctttaaggtaacgcagattgtttttgcggtttcgcatcacgaaaaagaattgggcgaaaggcttttgcatgaagccggaaattgggatattcaatctgtccttatgctgacaggcggccgttatccgcaaaggaacaacagggagcttgagcttgcgctcagggtgttcgagaaaaaagaaaagtatgatttcggctctttccttatcttaagcccctctgttcttgccgccgcaaatgacgccgtaaagcataaaaggccgattcttgaccgttatgtggctgtcggcggatcggctgtaaggcatcctcaaatattaaaagtaagaatagggatcagaataagcgaattgatagagccatgcggcggctttatagaaactccttataagatgccaccggttccccgctttcgggagggaagtaacctaccttga

SEQ ID NO: 16278 - protein, 282 aa, Unknown
  Obtained from environmental sample
  misc_feature (1)..(282): Xaa is any amino acid
MMAERASGPNAVNVHATVPGRVIRKISWQDKYGVNNDAIVIRMEGAFEKLGRREDIYQWKGLSGYDLQRIISELGIVEMENMGRPLAGMISAARSENEKITLVVRCVFDDPWLAADYALCSERLQAVVEGAAIVAKACFKVTQIVFAVSHHEKELGERLLHEAGNWDIQSVLMLTGGRYPQRNNRELELALRVFEKKEKYDFGSFLILSPSVLAAANDAVKHKRPILDRYVAVGGSAVRHPQILKVRIGIRISELIEPCGGFIETPYKMPPVPRFREGSNLP

SEQ ID NO: 16279 - DNA, 963 bp, Unknown
  Obtained from environmental sample
  misc_feature (1)..(963): n is a, c, g, or t
ttgggcataaaccgcagattatttcttctatcccagtacagaanggatgtggctgttttctgtgtgcgccttcctctgcgcagtacaatgggcgtatctgacaacgggcagtcattgataatagctttaactgcggtttttatcgctgtaataatgaaactcttgttgacagtacggcaattcggcgggtccaaaataaaagacggaagcgcgattgcgacggcgttgattctttcccttcttctgccgaaccagattcaccccgtttatgccgcttttggggcggcgtttgcgattgttatcgtcaagtacagtttcggcggacttggttcaaactggcttaaccccgcgcttggcggctggctttttatccgcttctcctggccttcagtttttgcggttgaaaacagcgtgtcggaaatgtcggtttccggttttaacactattgacggctctgttacttcatttttaaatgattatgttttttctgttacgggagttcagcttccgtctggatatataaaccttcttttttcggataatcccggcatgattgccgacagagggctttttacgcttttgcttggaaccatagttattacggctttggggattaaccgcggctggatacctcttgttttcctttcggtttacggtttcttgattcgttttgccggagacgcgcccggcattttctggacaggagatatattgtacggcctattctccggcggcactgttgcggttgcttttattcttgccgcggaacctggaagcagcgcaaaattatggcagggtgttttcttttcggttgtactggcgtcggttttttcatggtttttccgttaccgctgcatggagtataccggctgtttaattgctttggctcttgtaaactgtcttacgcctcttatacgccttcttgaggataaaattttcttttcacgcaaaaacagcggttag

SEQ ID NO: 16280 - protein, 320 aa, Unknown
  Obtained from environmental sample
  DOMAIN (19)...(316): NQR2, RnfD, RnfE family
  misc_feature (1)..(320): Xaa is any amino acid
MGINRRLFLLSQYRXDVAVFCVRLPLRSTMGVSDNGQSLIIALTAVFIAVIMKLLLTVRQFGGSKIKDGSAIATALILSLLLPNQIHPVYAAFGAAFAIVIVKYSFGGLGSNWLNPALGGWLFIRFSWPSVFAVENSVSEMSVSGFNTIDGSVTSFLNDYVFSVTGVQLPSGYINLLFSDNPGMIADRGLFTLLLGTIVITALGINRGWIPLVFLSVYGFLIRFAGDAPGIFWTGDILYGLFSGGTVAVAFILAAEPGSSAKLWQGVFFSVVLASVFSWFFRYRCMEYTGCLIALALVNCLTPLIRLLEDKIFFSRKNSG

SEQ ID NO: 16281 - DNA, 330 bp, Unknown
  Obtained from environmental sample
  misc_feature (1)..(330): n is a, c, g, or t
ttggaggctcccgtggccgcgctaaaacgtgaaaaaacaaattatccgggcgtattttaccgtactgttgagagaacaggcaagaccggcgaggaacgggtttattatatcctcttcaaaaaagatggtaaggtttttgaggaaaaggtcggcaggcagtatgccgacaatatgactcctgcaaaggcgtccggcatcagggctgatcgtatcgaaggaaaaagacagtcgcgcaaggagcagcgtgaaaaagcattggcggataggaatgccgcccaaaacagatgtacgattggttcgctcggagccagtatcaagagctcgcgataa

SEQ ID NO: 16282 - protein, 109 aa, Unknown
  Obtained from environmental sample
  misc_feature (1)..(109): Xaa is any amino acid
MEAPVAALKREKTNYPGVFYRTVERTGKTGEERVYYILFKKDGKVFEEKVGRQYADNMTPAKASGIRADRIEGKRQSRKEQREKALADRNAAQNRCTIGSLGASIKSSR

SEQ ID NO: 16283 - DNA, 942 bp, Unknown
  Obtained from environmental sample
  misc_feature (1)..(942): n is a, c, g, or t
ttgttatacgcgtcgcagaatgaattaccccgcatggggcacccggcggcggatgaattgaacgccaatcccccgcccattcccgatgcggagccgcgcggctcgcgggctgtttttattcctcctgttgtcggcgatacaaggatgttctgggtagagacttattatcataacgatatatgggtaaagaaacaggcaaccctgagggctgccggacaatatagtaatatttgggttatggacgaaaattacggttccggaggcggtaataaagttactaccgcgcaggcgcaaacgcttgccgctaaatttgacttaatttatcccattgagacgaatcttttaggctatgagtacggcggggggccgggcggggacggcggcagagacggcgatcccaaaatacaaattcttatttatagtattgttgacgcttccggagttgttcaggcgggagggtttttctggagtaaagatttctatcctcaaattattaacgatttgttgggttataaaacaaaccaggcggaaatattttatattgatgcaagccaggttaataattctccggattatacatattccgtcctgattcatgaatttcaacacatgatcaatttcaatgtaaaaaccgtgaaacaaataatgaattcggaaacatggtataacgaaatgctttccatgatggccgaagacgtaattgcgccgttaataggcgttgttccggcaaattcgagacacataacgaatcanaggatcccgacattcctgaacaattatcatacaaccggtataacagaatggggtacccttgagcgtgaatcctatgcaaagggatatgcttttggcgcgtatttgctgcgtaactatgggggagccagcctgttgcggggaatgcttgctcacaattcaccaacacagcctcgggtacggcggcgctag

SEQ ID NO: 16284 - protein, 313 aa, Unknown
  Obtained from environmental sample
  misc_feature (1)..(313): Xaa is any amino acid
MLYASQNELPRMGHPAADELNANPPPIPDAEPRGSRAVFIPPVVGDTRMFWVETYYHNDIWVKKQATLRAAGQYSNIWVMDENYGSGGGNKVTTAQAQTLAAKFDLIYPIETNLLGYEYGGGPGGDGGRDGDPKIQILIYSIVDASGVVQAGGFFWSKDFYPQIINDLLGYKTNQAEIFYIDASQVNNSPDYTYSVLIHEFQHMINFNVKTVKQIMNSETWYNEMLSMMAEDVIAPLIGVVPANSRHITNXRIPTFLNNYHTTGITEWGTLERESYAKGYAFGAYLLRNYGGASLLRGMLAHNSPTQPRVRRR

SEQ ID NO: 16285 - DNA, 675 bp, Unknown
  Obtained from environmental sample
  misc_feature (1)..(675): n is a, c, g, or t
ttgcatgacggtcccggagtgctttccatggccaatgccggtgccggtacaaacggtagccaatttttcattacccatgtggcaactccctggcttgacgggaaacactcggttttcggcaaggtggtcaagggccaggatgtggtcgacgctatacagcagggagacaaaatagaaaaggttgccatcattcgaaatggcgaggcggcagcgaacttcaaggcggatcagggcgtttttgatgctttggttcgtaacagcgaatcagcagctgcggcaaaggcaaaagtccgccaggaagaggaaatcgcggaaatcgccaggaagtacccaaacgccatgatgaatccttccggccttaggtacattgtacaaaaacaggggaatgggcccaagccttctcctggaagtaccgctgtggtcaatataaaaggaagcctggtttcaggcacggtttttgccaattcggatctttctggcggcgctgaagaattgcctgtcggagcgggcaggatacttcccggtctggacgaggctataatgggaatgtcaaagggcgagaagcggctggcaattgtccccccggaattaggctacggaaacagggatatcaacaacgttattccggcgaatagttatctggtttttgagttggagcttgtggagataaaataa

SEQ ID NO: 16286 - protein, 224 aa, Unknown
  Obtained from environmental sample
  DOMAIN (1)...(69): Cyclophilin type peptidyl-prolyl cis-trans isomerase/CLD
  misc_feature (1)..(224): Xaa is any amino acid
MHDGPGVLSMANAGAGTNGSQFFITHVATPWLDGKHSVFGKVVKGQDVVDAIQQGDKIEKVAIIRNGEAAANFKADQGVFDALVRNSESAAAAKAKVRQEEEIAEIARKYPNAMMNPSGLRYIVQKQGNGPKPSPGSTAVVNIKGSLVSGTVFANSDLSGGAEELPVGAGRILPGLDEAIMGMSKGEKRLAIVPPELGYGNRDINNVIPANSYLVFELELVEIK

SEQ ID NO: 16287 - DNA, 441 bp, Unknown
  Obtained from environmental sample
  misc_feature (1)..(441): n is a, c, g, or t
ttgcaaaagtcatttggtcttaaatcgcttaaaattttgcccaaaggcttagacggcgaccatacggacgggcatatagacaatctcgctcgcttcatcgctaaaaatcacgtggttatggtggctggttttgagcagtctcaaaaggaaatagagacttggctaagtgaaaattatgagaatgcaaaagttgatgttttgccgcttccgccgcaaaggcagttaggcaaagaaactttgccagcatcttatatgaattttatatttgtgaatggcggtttgattgtgccaacatataattgtgaagcggattctctggctttggaatattttaagagcgtatttccagacagggaagttataggcatagactgcaccattcccattgaagaaggtggcagcttgcattgcttgagcaagcagatgccagtgtattactag

SEQ ID NO: 16288 - protein, 146 aa, Unknown
  Obtained from environmental sample
  DOMAIN (2)...(143): Porphyromonas-type peptidyl-arginine deiminase
  misc_feature (1)..(146): Xaa is any amino acid
MQKSFGLKSLKILPKGLDGDHTDGHIDNLARFIAKNHVVMVAGFEQSQKEIETWLSENYENAKVDVLPLPPQRQLGKETLPASYMNFIFVNGGLIVPTYNCEADSLALEYFKSVFPDREVIGIDCTIPIEEGGSLHCLSKQMPVYY

SEQ ID NO: 16289 - DNA, 342 bp, Unknown
  Obtained from environmental sample
  misc_feature (1)..(342): n is a, c, g, or t
ttgctgatgggtttaaggattgcgagaaacgggggggttgaaatgggaaaatcatcttatgattatatgattgtaggagcgggcttttttggagcggtgttcgcatttgaaatgaaaaaagctggcaaaaaatgcttggtcatagacaaacgaagccatataggaggaaaattctataccaaaaaaatagcgggtatacaagtccacaaatacggagcgcacatattccctacaaacaataaaagaaatttgggattatatgaacagttttgctccgttcaatcgctttacaaattctccccttgcaagttaacaggggcaactctacaatctcccttttaa

SEQ ID NO: 16290 - protein, 113 aa, Unknown
  Obtained from environmental sample
  misc_feature (1)..(113): Xaa is any amino acid
MLMGLRIARNGGVEMGKSSYDYMIVGAGFFGAVFAFEMKKAGKKCLVIDKRSHIGGKFYTKKIAGIQVHKYGAHIFPTNNKRNLGLYEQFCSVQSLYKFSPCKLTGATLQSPF

SEQ ID NO: 16291 - DNA, 615 bp, Unknown
  Obtained from environmental sample
  misc_feature (1)..(615): n is a, c, g, or t
gtgagggcggcaaacggcggaaccctgtttttggacgaggttgcggagctctcgccggagattcagaaggcccttttacgcaccctgcaagagaaaaccgtcacgcccgttggtagccaaaaagaggtcaaggtggattttaggctgatttgtgctacccatagggatttgcgtattttgattgaaaaggggctttttaggcaggatttatattttaggcttgccgctttacctatccaaattccgcctttgagagagcgaaatgatttgagaagcatagcgcagtccctttggcgtgggcaagagcctttggacgaacaccatttcaagactttgcagagctatttgtggcccggaaacataaggcagcttaaaaatgttttagagcgttacgccctcttaaaaaaacacggctataagctggaatccatcataaaagcggagtttgaacaatgcaaattcagcctgcgtgaaccgccgccgccaaaatacaaaccaaacatctgcgaaatcagcgaagagatacggaattgcagtgggaacaagagccacgccgcanagaaattaggtattagcaggggaagtttgtattacagaatgcgtacagaggagtga

SEQ ID NO: 16292 - protein, 204 aa, Unknown
  Obtained from environmental sample
  DOMAIN (172)...(203): Bacterial regulatory protein, Fis family
  misc_feature (1)..(204): Xaa is any amino acid
MRAANGGTLFLDEVAELSPEIQKALLRTLQEKTVTPVGSQKEVKVDFRLICATHRDLRILIEKGLFRQDLYFRLAALPIQIPPLRERNDLRSIAQSLWRGQEPLDEHHFKTLQSYLWPGNIRQLKNVLERYALLKKHGYKLESIIKAEFEQCKFSLREPPPPKYKPNICEISEEIRNCSGNKSHAAXKLGISRGSLYYRMRTEE

SEQ ID NO: 16293 - DNA, 681 bp, Unknown
  Obtained from environmental sample
  misc_feature (1)..(681): n is a, c, g, or t
atggataaaaattgcttacatatttcgtatgagggcggcatcctggaggatccctggaacgcgccgcgtccggatatgtttcttaccaccgcgaatattgacaatgcccccgacgctgccgacgaggtcacgatcgcgtttgaggcgggtatgccggtctccgtgaacgggaccgcgctttcgccgttcaatctcttgaaaaccctgaacgaatacggcgggcggcacggcatcgggcgcgtcgatatcgtcgagaaccgccttgtcgggatcaagagccgcggggtctacgagactcccggcggtacgctgctctggcaggcgcatcggcagttggagacccttgttttggatcgcgccactatgcacttcaagcagcatatcgggattaagtacgcggagatggcctataacggggagtggttctgcccgttgaaggaagcgcttgacgccttcatcgacaagacgcaggagaaggttacaggcgaggtgcgattgcggttgcataagggtaatatgatcacgcttgggcggcgcagcaaatattccatgtataacgccgaactcgcgacctttgaaaaagaaacggtttataaccaaaaggacgccgagggctttatcaatctttttgggctgcaaattaagtacgcggcattgcgcgatcgcgcctcacgcgactag

SEQ ID NO: 16294 - protein, 226 aa, Unknown
  Obtained from environmental sample
  DOMAIN (1)...(220): Arginosuccinate synthase
  misc_feature (1)..(226): Xaa is any amino acid
MDKNCLHISYEGGILEDPWNAPRPDMFLTTANIDNAPDAADEVTIAFEAGMPVSVNGTALSPFNLLKTLNEYGGRHGIGRVDIVENRLVGIKSRGVYETPGGTLLWQAHRQLETLVLDRATMHFKQHIGIKYAEMAYNGEWFCPLKEALDAFIDKTQEKVTGEVRLRLHKGNMITLGRRSKYSMYNAELATFEKETVYNQKDAEGFINLFGLQIKYAALRDRASRD

SEQ ID NO: 16295 - DNA, 801 bp, Unknown
  Obtained from environmental sample
  misc_feature (1)..(801): n is a, c, g, or t
atgctggtgcagtttcgcgtaacaatagaacttatgtcggcgatggaaaacagcgggcgcaccctcaccacattcaaacagacttgcatgtaccgcgacgagaataccggtcagaatccgattgatgacgccgttcagccgtatacgcttgaaggcccttatggccgtatctttgacggcgatacgacaaagatcaacgacagccggtggattctgtttgaaatgagcgaactgatggaactaaaggacaaggtagtggccccggcgattatgttcctgtttcactttttggaaaagcgtttcaagggtcagatgacgcttctggttgtcgatgaggcgtggcgtttcctggacaacgaggtattcaggaacaaaatgcggcagtggctcaaggaactgcggaaaaaacacgtattctgcgtgtttgccacacaggaggtcgccgacggcgcgaacagtcccattgccagcactctgatccagaactgtccgacaaaaatttatcttgccgatcctgaagcgcataacaacgcggaagcgtatatgaaattcgggctgacagaggatgaggtggcgttattggcaatggcaaggaagaagcgtgattactatttcaaaaacccccaggggacacggctgttccagttgtcgctgggcattatattcctggcgctgatgcgcgcccaggacgcccaggtcaggacggcaaagggtgaggttatccgctgggcggattactgcaaagacttgcttgaattgaaaagcttctggcgtttcaaagaggttttacagaagagatag

SEQ ID NO: 16296 - protein, 266 aa, Unknown
  Obtained from environmental sample
  misc_feature (1)..(266): Xaa is any amino acid
MLVQFRVTIELMSAMENSGRTLTTFKQTCMYRDENTGQNPIDDAVQPYTLEGPYGRIFDGDTTKINDSRWILFEMSELMELKDKVVAPAIMFLFHFLEKRFKGQMTLLVVDEAWRFLDNEVFRNKMRQWLKELRKKHVFCVFATQEVADGANSPIASTLIQNCPTKIYLADPEAHNNAEAYMKFGLTEDEVALLAMARKKRDYYFKNPQGTRLFQLSLGIIFLALMRAQDAQVRTAKGEVIRWADYCKDLLELKSFWRFKEVLQKR

SEQ ID NO: 16297 - DNA, 750 bp, Unknown
  Obtained from environmental sample
  misc_feature (1)..(750): n is a, c, g, or t
atgggaattcagaataagtacaataaagaggccggaaagccaaaggttgcggaactcgtttgcgccttgccctgggcgtactgcgtaccaatcaaagaagagatctcggataccctggcagttgagcactgcgtcgtggtgcataaggacggctgcgtacaacagacttacgggtttcgcggccatgatctggagagtttcagcgcgatgtacatcaattcggtaacggcgtattttaatgagtcggtgaagaggctgggggacggctggatggtttcggtagaggcgcaacggtacatcacaagcgattatccggaaagcgactttgatattgaagccggatatttaatcgaacaggaacgcaaggagagctttcagggttacggaaatcattttgacacatcgtattatctgaattttgtgtacaagccggaaatggaaatcaagcgtaaaatgactaanatcttttttacagaaatccagtttgaaaaagcgcaggacgatattatcgaacaatttatcaaggaggttaaaagggtaacaagcgtactggaggctaaattgatcatcangccgctgacatacagggagacggtgaattacttacattcaacggtgtcaatgcggcgctttaatctgtcgccgccggatcattttctgtttttggatacttttatttgccaaatgcccttgcatataggggcagacgctcagctggaaagatatttcataccatatggccaatcatga

SEQ ID NO: 16298 - protein, 249 aa, Unknown
  Obtained from environmental sample
  misc_feature (1)..(249): Xaa is any amino acid
MGIQNKYNKEAGKPKVAELVCALPWAYCVPIKEEISDTLAVEHCVVVHKDGCVQQTYGFRGHDLESFSAMYINSVTAYFNESVKRLGDGWMVSVEAQRYITSDYPESDFDIEAGYLIEQERKESFQGYGNHFDTSYYLNFVYKPEMEIKRKMTXIFFTEIQFEKAQDDIIEQFIKEVKRVTSVLEAKLIIXPLTYRETVNYLHSTVSMRRFNLSPPDHFLFLDTFICQMPLHIGADAQLERYFIPYGQS

SEQ ID NO: 16299 - DNA, 534 bp, Unknown
  Obtained from environmental sample
  misc_feature (1)..(534): n is a, c, g, or t
atgccagtgctgctggcgaagcgggggcggatttttatgtacgattttcagggcaaccttttatacgcctttggcggcctgggcaacagggagggctgtttcctgaagccaacagcccttgcccaaatgggcccttccctgtatgccctggattccgacaccaccgcccttacccgctttgatatgacaggttacggggtgttgataaatcgcgcccttgatgaatatcaggctggccgctacgaatcctccgcggaggtttgggaagaagtgcttaaaatgaatggcaattatgaccttgcctatatcggcataggccgggcggcgctgcggcagcgcgaataccaaaaggcgatgacttattacaaacttaagcattaccgcgagggctatggcaaggcttttcagttataccgcaaacaatttatggaagagaacctctggaaaatgctgctgattctggcggttattttatttgtcccgccggtcgttaaaaccgtagtgaaaatcgtcagggaggtaaaggaagcatga

SEQ ID NO: 16300 - protein, 177 aa, Unknown
  Obtained from environmental sample
  misc_feature (1)..(177): Xaa is any amino acid
MPVLLAKRGRIFMYDFQGNLLYAFGGLGNREGCFLKPTALAQMGPSLYALDSDTTALTRFDMTGYGVLINRALDEYQAGRYESSAEVWEEVLKMNGNYDLAYIGIGRAALRQREYQKAMTYYKLKHYREGYGKAFQLYRKQFMEENLWKMLLILAVILFVPPVVKTVVKIVREVKEA

SEQ ID NO: 16301 - DNA, 336 bp, Unknown
  Obtained from environmental sample
  misc_feature (1)..(336): n is a, c, g, or t
atgaaatatctgcctgacaaagcctggtttctgtatttagggaaaacattaaagtattcgctgtataccagtgttcatccccttgacggcttctgggatttatcccacgaaaaacgcggttccctggcggcggcaaacgtcattgtcgccctggcgatactggtcgacgtattgcgcctgacgctgaccagtttccagtttgttacagttaacatggagtattttaacgcggctattgttatgatgcgtattatcctgccggttttcctgtgggttgtggcgaactgggctcttaccaccctgatggacggcaaggggcggatgctggatatttaa

SEQ ID NO: 16302 - protein, 111 aa, Unknown
  Obtained from environmental sample
  misc_feature (1)..(111): Xaa is any amino acid
MKYLPDKAWFLYLGKTLKYSLYTSVHPLDGFWDLSHEKRGSLAAANVIVALAILVDVLRLTLTSFQFVTVNMEYFNAAIVMMRIILPVFLWVVANWALTTLMDGKGRMLDI

SEQ ID NO: 16303 - DNA, 366 bp, Unknown
  Obtained from environmental sample
  misc_feature (1)..(366): n is a, c, g, or t
gtggcatggtacgggggcacgggcgaaaccgtcactgatcgcgtaacgcatcgggttgggttattaaagcccatatccctgcggacttttgacatgagcggaaatgtatgcgagtggtgctgggatgagtttggttcaggttattattcaatcagtccggccagtgatccaaaaggcccggggcagaacacggtgcttatcaataatccgggtcaggacacgccccgcgtccgccggggaggaagctggaatcatgggataaacaacacgcgcacttttattcgggactcctttcagcctactgatattaatatgcagaatttctggactataggcttccgtgttatccgcggtccgttacaataa

SEQ ID NO: 16304 - protein, 121 aa, Unknown
  Obtained from environmental sample
  misc_feature (1)..(121): Xaa is any amino acid
MAWYGGTGETVTDRVTHRVGLLKPISLRTFDMSGNVCEWCWDEFGSGYYSISPASDPKGPGQNTVLINNPGQDTPRVRRGGSWNHGINNTRTFIRDSFQPTDINMQNFWTIGFRVIRGPLQ

SEQ ID NO: 16305 - DNA, 651 bp, Unknown
  Obtained from environmental sample
  misc_feature (1)..(651): n is a, c, g, or t
ttggcgaaagcaggtagcaaagctatttgctatttactatttgaatttgctatactgtcatcaataatgaaagcaaggcagttctatattgtttttattttattatcttttcttttttgcggctgcaagtctgccatgaatcgcggctacaatcaggtttccccggcctggcgggttggaacgggcgttgttttagataacctctctacagaactggaacgttttgacaacttatccttaaaataccccgttatattggcgcatgggattgccatgcgagatcgtggaactatattgattccatggggtagaattccgcgtatattgagagaaaacggcgtggaaacatatttaggaaatacggacgcatggggtactattgaatcaaacgcggaattcttaaaaaaaactgtagataaagtattgaatgagacaggtaaagaaaaggttaatataatatcacattccaaaggaggtttggattctcgttatatgatatggaaatataactatggggacaaggtagcaagcctgacgacagtatcaacgccgcatcatggcgcggttgttgcggatatgattttaaatttaaaaacagttcataccaaagccgcggcaaaaagtctggaaagatttggtgaaattgtataa

SEQ ID NO: 16306 - protein, 216 aa, Unknown
  Obtained from environmental sample
  misc_feature (1)..(216): Xaa is any amino acid
MAKAGSKAICYLLFEFAILSSIMKARQFYIVFILLSFLFCGCKSAMNRGYNQVSPAWRVGTGVVLDNLSTELERFDNLSLKYPVILAHGIAMRDRGTILIPWGRIPRILRENGVETYLGNTDAWGTIESNAEFLKKTVDKVLNETGKEKVNIISHSKGGLDSRYMIWKYNYGDKVASLTTVSTPHHGAVVADMILNLKTVHTKAAAKSLERFGEIV

SEQ ID NO: 16307 - DNA, 423 bp, Unknown
  Obtained from environmental sample
  misc_feature (1)..(423): n is a, c, g, or t
atgggatgttcggcgcttgattctttccccataataacaccatctaactgcagaagtaccagcccggcgacagataattataattgtatcgcctgggcttatgggaaagacgatgtctggtgtcaacccggatttttttggccaattccctgcaaggaatacaccatagaagcatatatggaattattctcgtcaattggttacaagcgatgtgaggatgcttcatacgaggaaggtttccaaaaaatagctatgtatattaaagacgaaaaaccaactcataccgcaaggcaattaacaacaggaaaatggacaagtaaacttggttcggatgttgatgttgaacatgattatccggaagtattagatgggccgcaatatggcagcgcgtcaatatttatgaagagagaaattaacaattaa

SEQ ID NO: 16308 - protein, 140 aa, Unknown
  Obtained from environmental sample
  misc_feature (1)..(140): Xaa is any amino acid
MGCSALDSFPIITPSNCRSTSPATDNYNCIAWAYGKDDVWCQPGFFWPIPCKEYTIEAYMELFSSIGYKRCEDASYEEGFQKIAMYIKDEKPTHTARQLTTGKWTSKLGSDVDVEHDYPEVLDGPQYGSASIFMKREINN

SEQ ID NO: 16309 - DNA, 885 bp, Unknown
  Obtained from environmental sample
  misc_feature (1)..(885): n is a, c, g, or t
gtgcctcagtcattgtttctcgtgcatgactggcgcaacgacgtagttgagcttgcccgcattgatcgggaatgggtggaaaagactaccgcgggcgcggttagctacgactggccggttcaggtaaacaagctcctgcgggacggcggcttcgatctgatcatttccctgggacaggttgttcctcacgaagttataggcatggcgaaccacgcgaaaaacctttttgtaggaaccggcggcaaagaggccatcgataaaagccattttgccggcgcctgttttggcatggaaaaaatgatgggccgcgccgacacgcccgtacgcgccatgttcgacgagggcctgcgcctcagcgatggaatgttaccaccggtgttatacgtacttactgttatcagcgctcgaagcgaaactgagactgccaacagcgacaagccgggcaagccaagcctgcccaagggttcccttgccatgcgcgggcttttctgcggttttggccgcgcttgttttgaagaggcagccgcccttgcccgcaaagtaaacgtagaccttttggacgagcccatacgcaaggcggtggtgtaccttgagcctgaggaattccgtaccacctggcttggaaacaaggcggtttacagaacccgcatggcaatggccgacaacggcgagcttttgattatcgcgcccggccttgtacgcttcggcgaagacatgggcatagacgcgctgatcccgcagcacggttaccgcatttcanaggttatcannagaaaggtcagcnaagacgcggaacttgnncaacacctcagcgcccgcgccccactgatccacggttccagcgaagggcgctttcacgtccgctactgccccggccccggntaa

SEQ ID NO: 16310 - protein, 294 aa, Unknown
  Obtained from environmental sample
  misc_feature (1)..(294): Xaa is any amino acid
MPQSLFLVHDWRNDVVELARIDREWVEKTTAGAVSYDWPVQVNKLLRDGGFDLIISLGQVVPHEVIGMANHAKNLFVGTGGKEAIDKSHFAGACFGMEKMMGRADTPVRAMFDEGLRLSDGMLPPVLYVLTVISARSETETANSDKPGKPSLPKGSLAMRGLFCGFGRACFEEAAALARKVNVDLLDEPIRKAVVYLEPEEFRTTWLGNKAVYRTRMAMADNGELLIIAPGLVRFGEDMGIDALIPQHGYRISXVIXRKVSXDAELXQHLSARAPLIHGSSEGRFHVRYCPGPG

SEQ ID NO: 16311 - DNA, 780 bp, Unknown
  Obtained from environmental sample
  misc_feature (1)..(780): n is a, c, g, or t
atggccgaggttattatggtgcgcgggtatgaaaacgaggaaacccggcaggcgatcatgtacgggaaccttagcaacgccaaaatgcgcaattactcgaacaccagcgacaaggcgctggaagcgtttcaaaacacggcccacggaagaatgatgtcagttatgagctgcgcgagggaattctttgcaaaagaagaaaacaaaaagttcttgaagctgcttgacgccatcggcgctgattacgaccgcaacggggagaggcttaaccgcgcctgcatcgacatgtttaacaagcccatgtggcgggttgaaaagtacgtcccgatgaacaggcaggaagtcacgggcgcggaaaacgagcaccgcgttatagaagacctgctgggaatgacgggcgccggggacaaatgggtggagcgcggctttaccgtcaagcgcgaaaaaataaagcccggcgggcagaggcccatcgaactggggctgtacaagacatgggcgaaaagcgtttcggcgacggaacacctgctcgcgtacggcccgctggtccagaggcttaacgccgtctttaaggggtaccacgccggcgaaattaaacaggccatgcgcgacagatgggggcaggcggccgttaaccgcgtaggggaaaccatcgcggaattcgcgaaccccgacgcgttaagcgaaaccgcgcacaggtcgggcttgaataaaattgtcaggtcgctccgcggcaaaacggcgacggcgtacctcgcgtggaaaaccgtcgggcgttcttaa

SEQ ID NO: 16312 - protein, 259 aa, Unknown
  Obtained from environmental sample
  misc_feature (1)..(259): Xaa is any amino acid
MAEVIMVRGYENEETRQAIMYGNLSNAKMRNYSNTSDKALEAFQNTAHGRMMSVMSCAREFFAKEENKKFLKLLDAIGADYDRNGERLNRACIDMFNKPMWRVEKYVPMNRQEVTGAENEHRVIEDLLGMTGAGDKWVERGFTVKREKIKPGGQRPIELGLYKTWAKSVSATEHLLAYGPLVQRLNAVFKGYHAGEIKQAMRDRWGQAAVNRVGETIAEFANPDALSETAHRSGLNKIVRSLRGKTATAYLAWKTVGRS

SEQ ID NO: 16313 - DNA, 435 bp, Unknown
  Obtained from environmental sample
  misc_feature (1)..(435): n is a, c, g, or t
atggccgagcggtgtctcctaaaaggcattacggatattgattttaagcagatggaaaaggtaaaccgggaagaaggggaaagatatgcccaggatcttattactgctcatcctgccttaaaagctatcttctgccattctgaagatccttcaatgggtgccctttcggcaatcgaagcggctggacgtaccgatgtagtaattgctggatttgactgctctcctgaagtagtagacgctatccgttccggcaagattgctgcaaccgcagcgcaacagccggtccttatgggccgtttagcctcccaaggtgttgccaaactgatcaaaggtgaaactgtggaacacgaggtcaaattagggacgcttctggttacaaaagataacattaaccaagtctataacacattacgggaagtagccctgacagaataa

SEQ ID NO: 16314 - protein, 144 aa, Unknown
  Obtained from environmental sample
  misc_feature (1)..(144): Xaa is any amino acid
MAERCLLKGITDIDFKQMEKVNREEGERYAQDLITAHPALKAIFCHSEDPSMGALSAIEAAGRTDVVIAGFDCSPEVVDAIRSGKIAATAAQQPVLMGRLASQGVAKLIKGETVEHEVKLGTLLVTKDNINQVYNTLREVALTE

SEQ ID NO: 16315 - DNA, 336 bp, Unknown
  Obtained from environmental sample
  misc_feature (1)..(336): n is a, c, g, or t
ttgacagcgcccttttgctatctgaggcaagggagcccgagcgggattatagccagcatatcagtggctttaagggcacgtcccaaattcggatgcctttactgcaatcactgccagccttgcacttccaatattgatatgcaggcggtaacccgttatgccgacatcgctgaattgaatgccacgaatgtaccacctacggtattacagcattatatggcccttgagcgccacggctcagattgcgtttcctgcatgaaatgcgaaaacaaatgcccgtttggcataacggtaagccggaacatgaagaaagccgcaacgctttttggcatttaa

SEQ ID NO: 16316 - protein, 111 aa, Unknown
  Obtained from environmental sample
  DOMAIN (75)...(98): 4Fe-4S binding domain
  misc_feature (1)..(111): Xaa is any amino acid
MTAPFCYLRQGSPSGIIASISVALRARPKFGCLYCNHCQPCTSNIDMQAVTRYADIAELNATNVPPTVLQHYMALERHGSDCVSCMKCENKCPFGITVSRNMKKAATLFGI

SEQ ID NO: 16317 - DNA, 720 bp, Unknown
  Obtained from environmental sample
  misc_feature (1)..(720): n is a, c, g, or t
ttggtgcgggccgtggacgacgtgtcgttcaacattaaggacggcgagatcgtttcgctcgtgggcggttccggttgcggaaagagcgtcttggccaagatgatgctgggtctgcaccaccccacctccggcgccttcacctacaagggcgccccgatcaccgactacaatctccattggcgcgaagttcaggcggtcttccaagacccgttcagctgcttcaaccagttcttcacgatccgctcccagcttaaagcggccttcggcatatataaggagaagccctccaacagcgagatggaggaacgggtggatcaagcgctgctggccgtaaacgtcaagccctccgagcttgaggggaagtatccgtttgagctgtccggcggccagatgcagcggatgctgttggccagaatctttgtcctaaggcccaaggttctgatagccgacgagccgacaagcatggttgacgcttgcgtgcgcgccaatatcctcgattacttgatgaagctgaaggaagaattgagtatgacgatcgtcttcatcacgcacgacataggtttggcctactacgtgagcgaccgcatcttcataatgcacaagggaaagatcgtggaacagggcgcgcccgacgatgttacgctgcaccccaagagcgagcatactatccaattgcttgaggatattccggagatacataaagagtggattaagaggtga

SEQ ID NO: 16318 - protein, 239 aa, Unknown
  Obtained from environmental sample
  DOMAIN (15)...(202): ABC transporter
  misc_feature (1)..(239): Xaa is any amino acid
MVRAVDDVSFNIKDGEIVSLVGGSGCGKSVLAKMMLGLHHPTSGAFTYKGAPITDYNLHWREVQAVFQDPFSCFNQFFTIRSQLKAAFGIYKEKPSNSEMEERVDQALLAVNVKPSELEGKYPFELSGGQMQRMLLARIFVLRPKVLIADEPTSMVDACVRANILDYLMKLKEELSMTIVFITHDIGLAYYVSDRIFIMHKGKIVEQGAPDDVTLHPKSEHTIQLLEDIPEIHKEWIKR

SEQ ID NO: 16319 - DNA, 882 bp, Unknown
  Obtained from environmental sample
  misc_feature (1)..(882): n is a, c, g, or t
atgatcagatggccgaggaagtctcccctgcttagaaccctttcgtccattccctttgccattccgtctatacttacggttttgggatttgtgcttttttttggaaactcaggttggctaaaccggcttatttttactttttccggcaagatgccgttgaggattttatataggccggaggccgttattatagcccacgctttcttaaactttcccctggtgatacggctcgcaggagacggactcgccagggtaagaaaggcttacgcacctgccgccgccgcgctgggggcttcgcctttggctattttctttaccgtgatcttgcccctcatatttccttccattatgtctgccgcccttttggttttcctctacagctttacaagttttgccgttgttctggttttaggcggaggaccggcttccacaaccttgtcagttgagatttaccgccacgccagaatcttcttaaattatcccaacgcaggggcactggctttcgtagaaactctaatcgcggtttttgtttttctggcatatttgttctttgggaaaaaatccgccgggataaaaattgacacacaggaaagaattcaggaagagaaagaacttggtcttgtgccaaaaattataacaattgcgtattatgtttttatggcgatttttgttttaggtcctattgtttccatagtcatcgaatcattgctttaccgtccttctcgttcagctggcgtggtttttagcctgacatggtggcgcaatttgggaagaacctgctttcccgcttttttttcgttccctccttttggctttttttttccgcaagcctgggcctgtgtaatttcattcctttggggcaggcacagtaaaattttctga

SEQ ID NO: 16320 - protein, 293 aa, Unknown
  Obtained from environmental sample
  misc_feature (1)..(293): Xaa is any amino acid
MIRWPRKSPLLRTLSSIPFAIPSILTVLGFVLFFGNSGWLNRLIFTFSGKMPLRILYRPEAVIIAHAFLNFPLVIRLAGDGLARVRKAYAPAAAALGASPLAIFFTVILPLIFPSIMSAALLVFLYSFTSFAVVLVLGGGPASTTLSVEIYRHARIFLNYPNAGALAFVETLIAVFVFLAYLFFGKKSAGIKIDTQERIQEEKELGLVPKIITIAYYVFMAIFVLGPIVSIVIESLLYRPSRSAGVVFSLTWWRNLGRTCFPAFFSFPPFGFFFPQAWACVISFLWGRHSKIF

SEQ ID NO: 16321 - DNA, 732 bp, Unknown
  Obtained from environmental sample
  misc_feature (1)..(732): n is a, c, g, or t
ttgtcatcggttttataccccaaagagcgcgtatctccccttcaagagcggcaaattgccggtcttggcaaaaatattacagcccttgctgtagagggcagttttgacgactgccagcgtcttgttaaaaccgctcttgccgatgaagaccttaaaaaacgaatgtctctttcttcggcaaactcaatcaatataagccgccttattccgcaggcggtgtattattcagccgccgcgggaaaagccttcgcagggtttgccgatcctgacggagaggcgacaccgagaaccggcggggcgactgccactaaagtggctcccactttagtggcaagaacgaatgcggcgaatagcggactgcccgttaccctatgcgtcccgtcgggcaattttggtaacttaacggcggggctttacgccatgaaaatgggagcgcctgtaaggcaatttatagcggcgacaaatataaacaagacagtacccgattatcttaattcgggtgaatacctcgcgagaatttcgcaggcgacaatatctaacgctatggacgtaggcgcgcctagtaactttgagcggatgaccgcgcatttttcattagaacagatgcgccaaagcattttaggcgtttcagtcgatgacgaggagacgcgggaaacaattgtacgccttcatgaacaggcggggtattttcttgaccctcacagcgcggtgggaatggaaggaagtccataa

SEQ ID NO: 16322 - protein, 243 aa, Unknown
  Obtained from environmental sample
  misc_feature (1)..(243): Xaa is any amino acid
MSSVLYPKERVSPLQERQIAGLGKNITALAVEGSFDDCQRLVKTALADEDLKKRMSLSSANSINISRLIPQAVYYSAAAGKAFAGFADPDGEATPRTGGATATKVAPTLVARTNAANSGLPVTLCVPSGNFGNLTAGLYAMKMGAPVRQFIAATNINKTVPDYLNSGEYLARISQATISNAMDVGAPSNFERMTAHFSLEQMRQSILGVSVDDEETRETIVRLHEQAGYFLDPHSAVGMEGSP

SEQ ID NO: 16323 - DNA, 795 bp, Unknown
  Obtained from environmental sample
  misc_feature (1)..(795): n is a, c, g, or t
ttggaacaggtattctgcaaaggccctgtcgcgcaggaactggacgagactacccggtttatcccgattcccgacggcattcaggaattctaccgggcctacaggccggctccgctaatccgggcttattttctggaaaaagccctgggaaccccggcggagatttattacaaatttgaggggaccaatacgtcgggttcccacaagctgaattccgcggggccgcaggcgttttacgccaaggaagaggggattacatcccttaccacggaaaccggggcagggcagtggggcagcgccatggccatggccacggcattttacggccttggcctgacggtttttatggtcaaggtaagctcggaacagaagccctaccgcaagaccttaatcgaaacctacggcgcgcagcttttcccgtcgccgtcgaacacaaccgaggccgggaaggccattctggccaaagaccccaataccggcggttcactgggagtcgccatatccgaagccattgagaaggcggtaaagaccgataaatgccgctatgttctgggcagcgtccttaaccatgtcctgcttcaccagtccatcatcggccaggaaaccaaggccgcgtttgacaaatacggaatcaagccggacatcattatcggctgcgccggaggcggctcaaacatgggcgggttaatggccccgttcatgggtgaaaaattggccggcaaatccaacgcccggtttatcgccgtggaacccgccgtcctgtccgtcgtttacgcgcggacggtttgcctatga

SEQ ID NO: 16324 - protein, 264 aa, Unknown
  Obtained from environmental sample
  DOMAIN (30)...(263): Pyridoxal-phosphate dependent enzyme
  misc_feature (1)..(264): Xaa is any amino acid
MEQVFCKGPVAQELDETTRFIPIPDGIQEFYRAYRPAPLIRAYFLEKALGTPAEIYYKFEGTNTSGSHKLNSAGPQAFYAKEEGITSLTTETGAGQWGSAMAMATAFYGLGLTVFMVKVSSEQKPYRKTLIETYGAQLFPSPSNTTEAGKAILAKDPNTGGSLGVAISEAIEKAVKTDKCRYVLGSVLNHVLLHQSIIGQETKAAFDKYGIKPDIIIGCAGGGSNMGGLMAPFMGEKLAGKSNARFIAVEPAVLSVVYARTVCL

SEQ ID NO: 16325 - DNA, 555 bp, Unknown
  Obtained from environmental sample
  misc_feature (1)..(555): n is a, c, g, or t
atggacgaacagaacaatgacgatacagccattgttattcagccgatggtatacggaaattacggtaaagaatcatgttcgggttatttctttacgcgcaatgttgtgacgggcgaaaagagacttcagggcagttactttacgggtaaatttaacgagataggcgagacagggcacgagattaataaaattgacgcgtcttatcttaaacaacttgaaaaaatcgccggagttcttgaggataaattcaaggaaatccgccaagtccgctttacggtggaaagcgaaaaactctggctgatagagcagaggcttgtagaccagaaatctacacaggcggatcttaaactcctgcttgatcttcaaaagcggaaaattgtcgatgcggcttatgtggtaaaagcgattgatcctttaagacttaatgaaattctacaccccgtaattaatcccgcaagcgttaagggatttaaatcatggaagggcggtatcgcgggcgctccgggcgcggcgataggacgcgtctatttcagcacagacgctttatggaagtaa

SEQ ID NO: 16326 - protein, 184 aa, Unknown
  Obtained from environmental sample
  misc_feature (1)..(184): Xaa is any amino acid
MDEQNNDDTAIVIQPMVYGNYGKESCSGYFFTRNVVTGEKRLQGSYFTGKFNEIGETGHEINKIDASYLKQLEKIAGVLEDKFKEIRQVRFTVESEKLWLIEQRLVDQKSTQADLKLLLDLQKRKIVDAAYVVKAIDPLRLNEILHPVINPASVKGFKSWKGGIAGAPGAAIGRVYFSTDALWK

SEQ ID NO: 16327 - DNA, 321 bp, Unknown
  Obtained from environmental sample
  misc_feature (1)..(321): n is a, c, g, or t
gtgaagcttaccgatgatcccgtaaagccacggcccgtttttcggcgtgatcccacgaaagtgccgaggtacgccctaaccgtaggcatggaaaccgttatggactcaagggaagtactcatcattgttccagggcggcaaaaggcaaaagcgctccaggccgctgtcgaaggggcggtcagccagtggtgtcccctntcctgtctccaaatgcacgagaaagcgatcatcgtctgtgatgaagaatcggcggaagaattgaagtacggcacagtccggtatttccaggacattgagagaacagatattcaattgccatga

SEQ ID NO: 16328 - protein, 106 aa, Unknown
  Obtained from environmental sample
  misc_feature (1)..(106): Xaa is any amino acid
MKLTDDPVKPRPVFRRDPTKVPRYALTVGMETVMDSREVLIIVPGRQKAKALQAAVEGAVSQWCPLSCLQMHEKAIIVCDEESAEELKYGTVRYFQDIERTDIQLP

SEQ ID NO: 16329 - DNA, 792 bp, Unknown
  Obtained from environmental sample
  misc_feature (1)..(792): n is a, c, g, or t
atgtcacggcttttggcacagtacggtgtaactgcctttaacccaaccctttaccctatggaaaaagagctgatgcttgaagcggtaaaagcggctgtttcggccatcggcagggaggacggggcccaggtcatggggcttcatctggaaggccccttcatttcgccggaacgcctgggagtcatgaaggcagggacggtgcagaacgttgacttggcgtttatgcaggagctctggaaagctgctgaaggcaggattgttaacatgactgtagccccggaacttaagggaatgagggaattggccttattctgcctaaagaaaggcatcgtattgcaggccggccatacagaagccgaatacgaaaatatggtagaaggaatgcaggcgggcatccttcacagtacacatcttttcaacgccatgagcagtatgaaacaccggaaccccaatgcagtaggggcgattcttattcaccctgaaatgtcctgcgaaattatcgccgatggtttccacatacacccggacctgtacaagctgctattaagggacaagccaatagacaggatcgtgctggtaaccgatgccctgaaaccaaccgaacagaccanaggtcccttgcttgccaacggtgaagaagtgatctttcaggatggtgtttttcatcgcanagccgataatgtaatcgccggctcggccctgaccatgatcaagggcgtacaaaacctggtgagctttggctttagtcttgatgacgcccttaaacagcttcctttaatcccgcacaggtaa

SEQ ID NO: 16330 - protein, 263 aa, Unknown
  Obtained from environmental sample
  misc_feature (1)..(263): Xaa is any amino acid
MSRLLAQYGVTAFNPTLYPMEKELMLEAVKAAVSAIGREDGAQVMGLHLEGPFISPERLGVMKAGTVQNVDLAFMQELWKAAEGRIVNMTVAPELKGMRELALFCLKKGIVLQAGHTEAEYENMVEGMQAGILHSTHLFNAMSSMKHRNPNAVGAILIHPEMSCEIIADGFHIHPDLYKLLLRDKPIDRIVLVTDALKPTEQTXGPLLANGEEVIFQDGVFHRXADNVIAGSALTMIKGVQNLVSFGFSLDDALKQLPLIPHR

SEQ ID NO: 16331 - DNA, 450 bp, Unknown
  Obtained from environmental sample
  misc_feature (1)..(450): n is a, c, g, or t
atgaaagcagagtttttaacacagcatataaagcaacttggaattgaagttttaacaggcgttcccgactccacgctcaaagaattttgcgattacataaactccgaagaaacagagctcactcactacaccgttcctaacgaaggttccgcggttggcattgccgtaggaacctatctttcaacgggaaaacccgcttgcatttatatgcagaacagcggcatagggaacaccgtaaatcccgtcacttcaattgcaaatgccgaggtttatagcattcccatattttttatagttggttatcgcggtgcacccggcacaaaagatgaacctcagcacaaatttatggggcgaataacagagggaatttttgactgcctagaaattgaacatgaagtgatagacaaaaacataagcgaaaccgaactaaacggcatattggcaaaataa

SEQ ID NO: 16332 - protein, 149 aa, Unknown
  Obtained from environmental sample
  DOMAIN (3)...(147): Thiamine pyrophosphate enzyme, N-terminal TPP binding domain
  misc_feature (1)..(149): Xaa is any amino acid
MKAEFLTQHIKQLGIEVLTGVPDSTLKEFCDYINSEETELTHYTVPNEGSAVGIAVGTYLSTGKPACIYMQNSGIGNTVNPVTSIANAEVYSIPIFFIVGYRGAPGTKDEPQHKFMGRITEGIFDCLEIEHEVIDKNISETELNGILAK

SEQ ID NO: 16333 - DNA, 423 bp, Unknown
  Obtained from environmental sample
  misc_feature (1)..(423): n is a, c, g, or t
atgcaattcaccccgcccagtgcagactatttacgccgcaaagcaagcccgttgaagaatttttcaaaggaaggtgaaacgcaaaaataccaaagacatgcacgggtaaacgaggctatccacaaagggcttaaagaactcggtttcaaagagtttataaaaaaggaactgcaggcaggcttagtaatatctgcgatatacccaaacgacaaaaattgggattttgaaaaaatccacgattactgctatgagcaaggattcaccatctacccaggtaaaatttccggtatggatacttttagactttgttcatttggagccattgatgtttctgatattgaagatttttttgttgtttttaaaaaagctttggagcattgcaatgtagctgtgccaattaaatatgaagaggagtcaaaatga

SEQ ID NO: 16334 - protein, 140 aa, Unknown
  Obtained from environmental sample
  misc_feature (1)..(140): Xaa is any amino acid
MQFTPPSADYLRRKASPLKNFSKEGETQKYQRHARVNEAIHKGLKELGFKEFIKKELQAGLVISAIYPNDKNWDFEKIHDYCYEQGFTIYPGKISGMDTFRLCSFGAIDVSDIEDFFVVFKKALEHCNVAVPIKYEEESK

SEQ ID NO: 16335 - DNA, 564 bp, Unknown
  Obtained from environmental sample
  misc_feature (1)..(564): n is a, c, g, or t
atgttgttgatccttaccggtatattaatattcgttccagtatcgccaaacaggggcggtaaccaaaagttggttatgctcaatagatacgaagatttctccatcaatactattatcggtcccaattccaacctgaaaggaaatatcgaaaccggtgggtttacccggattgacggcagtatcatggggaatgtgaatgcccgtggcagggtagtgataggagagagggcgcggttaaggagcaatatttccggtactgcggttactattggcggagtggtgtatggcaatgtaattgctgaggagtccctggtaatcctttccacagcgctggtattgggtgacataatcactcgccgtattcaggcagacgacggatgtcttatccatggcagagtgctggtatgcccggacgaggaaagctggtctcatgccgtcaacgagtaccgtgatgatcagggaataaaatcggcattgcccgtgttttccaaaaacgcgtctcctcgcgttgaatctctgcggggcggacatcttaaagatgagcttattacaaacggggcttga

SEQ ID NO: 16336 - protein, 187 aa, Unknown
  Obtained from environmental sample
  DOMAIN (27)...(139): Protein of unknown function, DUF583
  misc_feature (1)..(187): Xaa is any amino acid
MLLILTGILIFVPVSPNRGGNQKLVMLNRYEDFSINTIIGPNSNLKGNIETGGFTRIDGSIMGNVNARGRVVIGERARLRSNISGTAVTIGGVVYGNVIAEESLVILSTALVLGDIITRRIQADDGCLIHGRVLVCPDEESWSHAVNEYRDDQGIKSALPVFSKNASPRVESLRGGHLKDELITNGA

SEQ ID NO: 16337 - DNA, 897 bp, Unknown
  Obtained from environmental sample
  misc_feature (1)..(897): n is a, c, g, or t
atgttcgagaagtgcgtgagcatctccgataccatatcccgcgcttggtacgagttaggcatgatgtacggttcgcagggcaaggacaaggatatgctcaaggcgttccaaaagttcatttccatagaggctaagaacgccgacgccatattgagggtgggcgagtacctgctcgttacccgcaacatgccggccgacgccatgatgttcctccaaatggccgacgcgctcaagccgaacgatcccaagatcatgcctatgttggcgagaggctacatgaagacgggcaacagcgccgagggtttgaagttgctggagaagatcaagagcaacacgaggggggcgcccgtcgaccttgaggtccgcatagcgctgggcgagggctaccttgccctaggccgtaacatggaggccgccgtcgagtggaaagcggtcattgaccagaagagggatccggcatacctgatcaagtacgccacggcgctggtcgccatgggcaataggaacgccgaggcggtcagcatagccaacgagatactctctaagcagccggagagcatagaggggcttatgctgtcgggcagggttaaggtcgcggcgcgcaactttgaggatgccatggagatcttcaagaaggtgggctacatcaatcccaactacgctccggccgtctacgagcgcgggaatatcttccttatgcagcagaactacgagggcgccaaggcgttcttcgagagggcgcttaaactggagcccaggtacgcgttggcggaactcgggttggccaagctggccaaggcgcagaagaatcaagcggagtaccaaaggcacttgcagaacgccaataaattggatccggtgaatagggagatacaggaggagatgaagaggaggtag

SEQ ID NO: 16338 - protein, 298 aa, Unknown
  Obtained from environmental sample
  DOMAIN (221)...(254): Tetratricopeptide repeat
  misc_feature (1)..(298): Xaa is any amino acid
MFEKCVSISDTISRAWYELGMMYGSQGKDKDMLKAFQKFISIEAKNADAILRVGEYLLVTRNMPADAMMFLQMADALKPNDPKIMPMLARGYMKTGNSAEGLKLLEKIKSNTRGAPVDLEVRIALGEGYLALGRNMEAAVEWKAVIDQKRDPAYLIKYATALVAMGNRNAEAVSIANEILSKQPESIEGLMLSGRVKVAARNFEDAMEIFKKVGYINPNYAPAVYERGNIFLMQQNYEGAKAFFERALKLEPRYALAELGLAKLAKAQKNQAEYQRHLQNANKLDPVNREIQEEMKRR

SEQ ID NO: 16339 - DNA, 882 bp, Unknown
  Obtained from environmental sample
  misc_feature (1)..(882): n is a, c, g, or t
gtggcggacggttcggttatacctcatgttactgagacaataaaaaattttatttatgcgggagccgaaaacagcggcgctgacgtactgattaccgagataggcggtacaacaggcgacattgaaagtcagccgtttctggaagcaatccgccagatttcacttgaaaaaggcggctcaaactgtctttttattcacgtaacgcttgtcccgtatttaaaatgctccggtgaacataaatcaaaacctacacagcactccgtaaaggagctccgcgctatgggtatctcgcctaacatcattattgcccgcgcagacgaaccgttaagcggaggcattaaggataaaatcgctcttttttgcaatgtaaagcctgactgcgtcatagaaaacatgactctttcttctttgtatgaagcgcctcttatgcttcaccaaaacggactggatatagtcgcttgccgcgagttgggaataaatgctcccgaagctgatcttaacgaatggcggaatatgacccaaaaaataactgtaaagaaaaggaatgtaaatatagctattgtcggcaagtacatcaaactccatgacgcatacctttcaattattgaaagcctcaatcatgccggatttgaaaccgcgtcgagcgtaaatattctgtggatcgacagtgaagacataaccaaccaaaacgctggcggaaaaataaaaatgcgcggatggcataattattcccggcggtttccgcaacagggggatcgaaggaaagattgccgtctgccggtactcgagaaaaacaacatcccgtacctcggaatctgccctggaaaggaaatcgccctgataaaatttccccggaatatatgcggaactgagcgccgctaa

SEQ ID NO: 16340 - protein, 293 aa, Unknown
  Obtained from environmental sample
  DOMAIN (2)...(169): CTP synthase N-terminus
  misc_feature (1)..(293): Xaa is any amino acid
MADGSVIPHVTETIKNFIYAGAENSGADVLITEIGGTTGDIESQPFLEAIRQISLEKGGSNCLFIHVTLVPYLKCSGEHKSKPTQHSVKELRAMGISPNIIIARADEPLSGGIKDKIALFCNVKPDCVIENMTLSSLYEAPLMLHQNGLDIVACRELGINAPEADLNEWRNMTQKITVKKRNVNIAIVGKYIKLHDAYLSIIESLNHAGFETASSVNILWIDSEDITNQNAGGKIKMRGWHNYSRRFPQQGDRRKDCRLPVLEKNNIPYLGICPGKEIALIKFPRNICGTERR

SEQ ID NO: 16341 - DNA, 648 bp, Unknown
  Obtained from environmental sample
  misc_feature (1)..(648): n is a, c, g, or t
ttgtattttatcgcgcgccgcctctccgaagagattgaaaaaggcatctgccataactgcgacgaggccggtacctgcaataagcatgatcattgccgcgataaggcgcaggccatcacggagcgcctccttgccaaactcccggaggttcgcgaaaccattctgaaggatgtggacgcgatctatgagggtgatccggcagcgaagagccattccgaggtcattcttgcctatcccgggcttgccgcgattaccgcctaccggattgcgcatatcctggtgcaggaaaacgtccccctcatcccgcgcatgatgatggagcatattcaccatgaaaccggcatcgatattcaccccggcgcgtccatcggaaaacgtcttgtcatcgatcacggcacaggcatcgtgatcggggaaaccgccgtcattggcgataacgtaaaactctatcacggcgttaccctcggcgcgtttgcggtgacaaaggaagccacagacaggaaacgccaccccactttgtgcgatgaggtgaccgtatatgccggcgcgacgatcctgggcggcgatacggtggtcggcaagggatccgttgtgggggcgaatgtgtggctcacccattccgtagaaccctattccagaatcaaatag

SEQ ID NO: 16342 - protein, 215 aa, Unknown
  Obtained from environmental sample
  misc_feature (1)..(215): Xaa is any amino acid
MYFIARRLSEEIEKGICHNCDEAGTCNKHDHCRDKAQAITERLLAKLPEVRETILKDVDAIYEGDPAAKSHSEVILAYPGLAAITAYRIAHILVQENVPLIPRMMMEHIHHETGIDIHPGASIGKRLVIDHGTGIVIGETAVIGDNVKLYHGVTLGAFAVTKEATDRKRHPTLCDEVTVYAGATILGGDTVVGKGSVVGANVWLTHSVEPYSRIK

SEQ ID NO: 16343 - DNA, 687 bp, Unknown
  Obtained from environmental sample
  misc_feature (1)..(687): n is a, c, g, or t
atgatatccctgcccgcggtaatagccgggcttacagccgggctttcatgcgcggcggatttgttcattggcaaaggctcaaacctgattgccagcgacccctgctgggataactacagccttatttttgaaacccgcagacagtcccatataatacccgtccagtttttaaacgccgggtaccccggcctcgacatggaagcgataaaaacggctgtccggcatgaggcaaaaaacggcgcggtgcggatcatcttcaattttcccaataacccttctggctattccgccacaacggaagaagcggacgcccttgtgcgcctgctgggagaggccgccgaggacggggcggacgtgctggtgatttgcgatgacgcctacttcggcctgttctacgaggacaccatttcaaaggaatcgctgttcgcgaaattcgccaaccttcatgaacgcgtgctggcaataaagctggacggccccactaaagaagattatgtgtgggggcttcgcatgggcttccttacattcggctctaaaggtttaagccagacccattatgacgcgctggtaaaaaagctgatgggggctatccgctcttcggtatcatgctcgaacacaagcgcccagcacctcatgctcagagttatggacgattcccgcacgccgggcgaaaaacaggcctactag

SEQ ID NO: 16344 - protein, 228 aa, Unknown
  Obtained from environmental sample
  SIGNAL (1)...(18)
  misc_feature (1)..(228): Xaa is any amino acid
MISLPAVIAGLTAGLSCAADLFIGKGSNLIASDPCWDNYSLIFETRRQSHIIPVQFLNAGYPGLDMEAIKTAVRHEAKNGAVRIIFNFPNNPSGYSATTEEADALVRLLGEAAEDGADVLVICDDAYFGLFYEDTISKESLFAKFANLHERVLAIKLDGPTKEDYVWGLRMGFLTFGSKGLSQTHYDALVKKLMGAIRSSVSCSNTSAQHLMLRVMDDSRTPGEKQAY

SEQ ID NO: 16345 - DNA, 726 bp, Unknown
  Obtained from environmental sample
  misc_feature (1)..(726): n is a, c, g, or t
ttgtttcacaagaacaacgccacaatgcacttttcccagataaacagcatcagaggcggagactttgcggagcttcgcgcttatcttattgccaaactcatgtggaacacatccaccgatgtgaattctattatgcaaacttttttaaaggaatattacggagaaccagctgctccgtacttataccagtatatcaaattacgtgaagaagcgcttgtcaaaagcaatatccgtctttggatatatgacacgcccgtaacgcataaaaatggaatgttgaataaggccatgatggagcgctacaaggaattgtttgataaagcggaacaggctgtcgccggaaaccaaactttcctcgacagggtgcgtgaagcccggctgcctgtcatgtacgccgaactggaaattgcccgtacggagccagataaaaacataggcgaactcacggaactgttaaacttgtttcggaactgggcggacaaatataacgttaccgtgttgaatgagcgtaagaataccgtgaatgaatattgcgagttatatattacgcgtaatttagccgacacccataagagtttagctttgggatgtccggtgacatatctccaacctgccgattcaccctacgataagatcgccgacnaagccctaaccgacggggtatacggaggcaccacctttaatgatggctgggtaggctggaaagcaaagaccccgaatttgtga

SEQ ID NO: 16346 - protein, 241 aa, Unknown
  Obtained from environmental sample
  misc_feature (1)..(241): Xaa is any amino acid
MFHKNNATMHFSQINSIRGGDFAELRAYLIAKLMWNTSTDVNSIMQTFLKEYYGEPAAPYLYQYIKLREEALVKSNIRLWIYDTPVTHKNGMLNKAMMERYKELFDKAEQAVAGNQTFLDRVREARLPVMYAELEIARTEPDKNIGELTELLNLFRNWADKYNVTVLNERKNTVNEYCELYITRNLADTHKSLALGCPVTYLQPADSPYDKIADXALTDGVYGGTTFNDGWVGWKAKTPNL

SEQ ID NO: 16347 - DNA, 342 bp, Unknown
  Obtained from environmental sample
  misc_feature (1)..(342): n is a, c, g, or t
ttggcaactgcaaaaaaacaatacgattttatagttatggaagcggctgggggcataagggttccaatagcagaaaattttgatatggcagatttggcaaaactctctaattttaaggttttgctcgtggcttcccctggtcttggcaccataaaccacaccttgctttctatagactatttaaaatcaaaaaaggttagaatcataggttttgtgttttctccagcaagttttgttgacgaactaaccgaagaaataattgcggacaatgccaaaacaatagagaaaatttcgggagttccttacaagggaactgcgctgccaataccatttattccttaa

SEQ ID NO: 16348 - protein, 113 aa, Unknown
  Obtained from environmental sample
  misc_feature (1)..(113): Xaa is any amino acid
MATAKKQYDFIVMEAAGGIRVPIAENFDMADLAKLSNFKVLLVASPGLGTINHTLLSIDYLKSKKVRIIGFVFSPASFVDELTEEIIADNAKTIEKISGVPYKGTALPIPFIP

SEQ ID NO: 16349 - DNA, 798 bp, Unknown
  Obtained from environmental sample
  misc_feature (1)..(798): n is a, c, g, or t
atgtcctatatcgacttctatcacttttggggtataacttgggagacctacaaaacacggataatcgcaaagggcggcccgctcgaagaggcgcgtcgcgcgctcgaagaggggctgatccggcacatctccttttcgttccacgacgacgcggcgaacctgcccaagatcgccgagtcgggaaacttcgagaccgtcttggcccagtacaacctgcttgaccgctcaaacgaggcggggctcgcaaaggctcacgcgcttgggatgggcacggtggtcatgggtcctgttggcggcggtcgtttaggcgctccgtcagagaagatccgctcaatgatcccgggcggagcgcgctccaatcccgaactcgcgctgcgattcgtactgacaaaccccgcggtctgctgcgcgttgtcggggatgtcgtccatgcaacaagtggaggagaattgcgccacggcgagcgtcggcgaggcgctaagccccgtcgagatggactcggtcgccgccgctatgcgggaaaataaaaagatgtccgacctctactgcaccggctgcaaatactgcatgccctgccagcaagaggtaaacatcccgcgctgtttcgagttgatgaattaccacagggtatacgagatcaccgattacgcgaaagccgaatacaaaaatataggcgcaatatggatgccgggcaaagacgcctcgcactgcaccgagtgcggcgagtgcgaacctgagtgcctgcagaaactggccatcagggagcagttgaaggaggttcagcgtgttctgggataa

SEQ ID NO: 16350 - protein, 265 aa, Unknown
  Obtained from environmental sample
  misc_feature (1)..(265): Xaa is any amino acid
MSYIDFYHFWGITWETYKTRIIAKGGPLEEARRALEEGLIRHISFSFHDDAANLPKIAESGNFETVLAQYNLLDRSNEAGLAKAHALGMGTVVMGPVGGGRLGAPSEKIRSMIPGGARSNPELALRFVLTNPAVCCALSGMSSMQQVEENCATASVGEALSPVEMDSVAAAMRENKKMSDLYCTGCKYCMPCQQEVNIPRCFELMNYHRVYEITDYAKAEYKNIGAIWMPGKDASHCTECGECEPECLQKLAIREQLKEVQRVLG

SEQ ID NO: 16351 - DNA, 825 bp, Unknown
  Obtained from environmental sample
  misc_feature (1)..(825): n is a, c, g, or t
atgaacgaattgattttggttttggatttcggcggacaatacaaagaacttatcgcaagcacggtgcgaggactaaaagtttactccgaaatcatgcacggaagtgtccgcgccgacgaaataaaacgcagaagtcctataggattgattttaacaggcggtccaagcagcgtttacggcacaagcgcgcctcattgcgatccggagattttcaaccttgggattcctgttcttggaatctgttacgggatgcatcttatgtgtcatattctcggcggagaggttgcggcgggcggcattggcgaatacggtcgcgtgaatgttacgacaaaaggtcatcagccgtcaaaattgtttggtacgaaggaggacttttccgcacttatgagccacagagacgttgtcaaacgcttgccgaaaggatttcgtactgctgcgtcaacggcggcgtgcattgcagcgtgcgaatatcccgcggcacaactctacagcgtgcaattccaccccgaaacaaaacacactacaggcggatgcgacattatccgcaggtttctgtacgatgtttgcggcgcacacggcgattacaaaattaccgatcacattaaaactcagataactcagatacgcgaaaaagtcggaaacgagcgcgttttgttggctctatcgggcggtgttgattcgtcgggttgcgcggcactgctggctcgggcaattcccgggccacttgtttgcatttttgtcgaccatggattaatgcgacaaaacgagggcgacgaaatcgaacgcatgtttttcaaatcaaccaatcaaatttattcgcgttaa

SEQ ID NO: 16352 - protein, 274 aa, Unknown
  Obtained from environmental sample
  DOMAIN (18)...(170): Peptidase C26
  misc_feature (1)..(274): Xaa is any amino acid
MNELILVLDFGGQYKELIASTVRGLKVYSEIMHGSVRADEIKRRSPIGLILTGGPSSVYGTSAPHCDPEIFNLGIPVLGICYGMHLMCHILGGEVAAGGIGEYGRVNVTTKGHQPSKLFGTKEDFSALMSHRDVVKRLPKGFRTAASTAACIAACEYPAAQLYSVQFHPETKHTTGGCDIIRRFLYDVCGAHGDYKITDHIKTQITQIREKVGNERVLLALSGGVDSSGCAALLARAIPGPLVCIFVDHGLMRQNEGDEIERMFFKSTNQIYSR

SEQ ID NO: 16353 - DNA, 777 bp, Unknown
  Obtained from environmental sample
  misc_feature (1)..(777): n is a, c, g, or t
atggaaagggaaataactccgtccacaaaagccgtattgatagaaacgccctccaatcccatgatgaatgtaacggacattgcttcggtcgcggcgattacgaaaaaacacaaattgcttcttatagttgacaacacattccttacgccgtattttcaaaagccgttttctttgggcgccgatattgttctgcacagcggaacaaaatatttaggcgggcataacgatactctggcagggctgttggttgtaaaggacttaagtcttgcggaaaaactcaggtttatcgccaaaacaaccggcgcgtgcctttcgccctttgacggcttcctgattatccgcggcatcaaaacgcttgccgtccgcatggaacgccagcaggaaaccgcccggaaaattgtagcctggcttttggagcaaagcgcggtaaaaaaagtgtattaccccggattgaaggatcaccccgattatgacgtgtcctgccgccaggcaagcggctttggcggaatgctctctttttccgtgcgagacgggcagacggcgacaaaaacactggaaagcgtaaaagtcataaaatacgccgaaagtttaggcggcgttgagagcctcattacctacccgatgtttcaaacccacgccgaccttccggaaagcgagcgcaaagcgcggggcatagacgagcgtttattgcgcctgtccgttggactggaagcgccggaagatttaatcgcggacttaaacaggcaattagcccgaccactatctatatcgtcatga

SEQ ID NO: 16354 - protein, 258 aa, Unknown
  Obtained from environmental sample
  DOMAIN (1)...(251): Cys/Met metabolism PLP-dependent enzyme
  misc_feature (1)..(258): Xaa is any amino acid
MEREITPSTKAVLIETPSNPMMNVTDIASVAAITKKHKLLLIVDNTFLTPYFQKPFSLGADIVLHSGTKYLGGHNDTLAGLLVVKDLSLAEKLRFIAKTTGACLSPFDGFLIIRGIKTLAVRMERQQETARKIVAWLLEQSAVKKVYYPGLKDHPDYDVSCRQASGFGGMLSFSVRDGQTATKTLESVKVIKYAESLGGVESLITYPMFQTHADLPESERKARGIDERLLRLSVGLEAPEDLIADLNRQLARPLSISS

SEQ ID NO: 16355 - DNA, 462 bp, Unknown
  Obtained from environmental sample
  misc_feature (1)..(462): n is a, c, g, or t
atgagcaacatatcagaactattagatccggcttgtatccggctggaactcggcacccacctcaaagaagccgcgatcaaagaactcgtgcaactccttgccgacgcgaagaaattgagcggcgatctcgagcgctacgtcgaagaggtgatggggcgcgagaagatctcgtcgaccggcatcggcaaaggcatcgcgatcccgcacgtgctcgtcgccgaggtgagcgagatcatgatggccgtgggccgcagcgtcaagggtgtgcccttcaacgccgtggacggcaaacccgcccacctgatcttcctaataataggccctcaggggcaaaacaacgaatacctgaaaatcctcagcaaactctcaagatacctaaacgaccgtactttctttgagacgctgatgaaaatcgaagatccggcggaagtagtagagttggtcaaggagcgggagcggtag

SEQ ID NO: 16356 - protein, 153 aa, Unknown
  Obtained from environmental sample
  DOMAIN (6)...(151): Phosphoenolpyruvate-dependent sugar phosphotransferase system, EIIA 2
  misc_feature (1)..(153): Xaa is any amino acid
MSNISELLDPACIRLELGTHLKEAAIKELVQLLADAKKLSGDLERYVEEVMGREKISSTGIGKGIAIPHVLVAEVSEIMMAVGRSVKGVPFNAVDGKPAHLIFLIIGPQGQNNEYLKILSKLSRYLNDRTFFETLMKIEDPAEVVELVKERER

SEQ ID NO: 16357 - DNA, 738 bp, Unknown
  Obtained from environmental sample
  misc_feature (1)..(738): n is a, c, g, or t
gtgcgttcaatagactggaatgtaagcgccagattcgggactccctatgtaaaaatgtacagggaagaacgcgaaatgacagtctgcatcatactggataattccccttcgatgcacactcccggtggcagcctttccaaatcgcctggcagcgatgtaaaccgctacgaacaggccgtccttgcagcagcgctgatagctttttccgcggagcaggcgggccagcgcctttccatgatcttctttgaccaggagataagcaaaattatcccgcctcgaaaaggacgctcccacacgatggcggtaatcagcgccgccattgaagcaaagcctgaagaaaaaggaagcggcctggggaaagcgctgattggagcggagaggcttttaaagcgccggagcctggttatcattatctcggattatctctgcataaactgggaacaggaaatcggagatctatcccgaaggcatgatgtcatttcaattaaaatctcaggcccgcttgaccgggagatgcccaggagcgggctactaacactggaagatcccgaaaccggactgaaactcagggcatcagcttcattttcttctttcaggactgcctgggcaacctggcacgaggaacgggtgagcctttgggaagcgatctgccgccgttacggggtggcttgccttgagctgtccaccgccgacgacgccccgacggagttaatgcgttttttccggggccaccaatga

SEQ ID NO: 16358 - protein, 245 aa, Unknown
  Obtained from environmental sample
  misc_feature (1)..(245): Xaa is any amino acid
MRSIDWNVSARFGTPYVKMYREEREMTVCIILDNSPSMHTPGGSLSKSPGSDVNRYEQAVLAAALIAFSAEQAGQRLSMIFFDQEISKIIPPRKGRSHTMAVISAAIEAKPEEKGSGLGKALIGAERLLKRRSLVIIISDYLCINWEQEIGDLSRRHDVISIKISGPLDREMPRSGLLTLEDPETGLKLRASASFSSFRTAWATWHEERVSLWEAICRRYGVACLELSTADDAPTELMRFFRGHQ

SEQ ID NO: 16359 - DNA, 342 bp, Unknown
  Obtained from environmental sample
  misc_feature (1)..(342): n is a, c, g, or t
atggaacttgctttaacggaacttgcaccgatgggactggcgctgacggggctggctttaacgggacttgtaccgacggggctggcgctgatggagtttgctttaacagaacttgttccgatgggacttgttccgacggaacttgcaccgatggagttggctctgatggaacttgctttgatgggacttggaccgatggagctggcgctgactgagctggctttaacgggacttgcaccgatggggttggcgctgatggagtttgctttaacggaacttgttccgacggaacttgctttaatggaacttgctctgcagtatttgaggcgttgccagaattaa

SEQ ID NO: 16360 - protein, 113 aa, Unknown
  Obtained from environmental sample
  misc_feature (1)..(113): Xaa is any amino acid
MELALTELAPMGLALTGLALTGLVPTGLALMEFALTELVPMGLVPTELAPMELALMELALMGLGPMELALTELALTGLAPMGLALMEFALTELVPTELALMELALQYLRRCQN

SEQ ID NO: 16361 - DNA, 360 bp, Unknown
  Obtained from environmental sample
  misc_feature (1)..(360): n is a, c, g, or t
gtgtccaccgcaataagagccgtaagaaggccgtcaatcatttcgccctggcccacgatgcgctttgccatttcctgccgggcgattntaagcaattctaacggagctggctccgacggaactcgttccgacggggctggctctgatggaacttgctttaacggaacttgcaccgatgggactggcgctgacggggctggctttaacgggacttgtaccgacggggctggcgctgatggagtttgctttaacagaacttgttccgatgggacttgttccgacggaacttgcaccgatggagttggctctgatggaacttgctttgatgggacttggaccgatggagctggcgctgactga

SEQ ID NO: 16362 - protein, 119 aa, Unknown
  Obtained from environmental sample
  misc_feature (1)..(119): Xaa is any amino acid
MSTAIRAVRRPSIISPWPTMRFAISCRAIXSNSNGAGSDGTRSDGAGSDGTCFNGTCTDGTGADGAGFNGTCTDGAGADGVCFNRTCSDGTCSDGTCTDGVGSDGTCFDGTWTDGAGAD

SEQ ID NO: 16363 - DNA, 522 bp, Unknown
  Obtained from environmental sample
  misc_feature (1)..(522): n is a, c, g, or t
gtgcagaaagaagcagagtcacagctaaaatacaagacggttcaaatgcccgatggcaaggtttggtttgctgaaaacttaaatgaggcaattggtaactccccgtgctatgagaataaggaagagaattgcaaaaaatgcggacggctttatgattgggaaactgcgctgaaggcttgcccaaagggatggcatttgccaagtgatgaagaatggaataaattggtagaagccgtaggtggagaaaatatagcaggcaaacatttgaaggcaaagactggttgggatggtgatgaaggtacggatgattttggtttttcggctctgcattgtggatctggctacttaacaggcggattcggcataagcgtcgcaacttactggtggagcaacacgaaatctgcagcttgtatatggataattcaagagccaattacaacttttggagctagtatgtacaaagattgtatgccagcttataaaaagcggctttattcaatacgttgcgtaaaggacaattaa

SEQ ID NO: 16364 - protein, 173 aa, Unknown
  Obtained from environmental sample
  misc_feature (1)..(173): Xaa is any amino acid
MQKEAESQLKYKTVQMPDGKVWFAENLNEAIGNSPCYENKEENCKKCGRLYDWETALKACPKGWHLPSDEEWNKLVEAVGGENIAGKHLKAKTGWDGDEGTDDFGFSALHCGSGYLTGGFGISVATYWWSNTKSAACIWIIQEPITTFGASMYKDCMPAYKKRLYSIRCVKDN

SEQ ID NO: 16365 - DNA, 393 bp, Unknown
  Obtained from environmental sample
  misc_feature (1)..(393): n is a, c, g, or t
ttgttttttatcagctctatccacgatgaaaagccaaacggagcggcccttgcctacagtatcgccaagggagccctcaagatgctggttaaagagatggttctggatcttgggcgctacaacgtaagggccaacatcgtcaacatgggcccgatggatggacacgacacactgttctacagcgatctttccccgctctacgaacacaccaaagaacgtatcgtcaatgcaacgtacgttacctttgaagacgtggccaacgctgcgcttttctttgccgctgatgattgtccttcggcaaatggcagcgagctcaagctggacgggggatttcttctctcatactatgtcaagaaaagaccgcctctacagcctcattccggagggaagtga

SEQ ID NO: 16366 - protein, 130 aa, Unknown
  Obtained from environmental sample
  misc_feature (1)..(130): Xaa is any amino acid
MFFISSIHDEKPNGAALAYSIAKGALKMLVKEMVLDLGRYNVRANIVNMGPMDGHDTLFYSDLSPLYEHTKERIVNATYVTFEDVANAALFFAADDCPSANGSELKLDGGFLLSYYVKKRPPLQPHSGGK

SEQ ID NO: 16367 - DNA, 387 bp, Unknown
  Obtained from environmental sample
  misc_feature (1)..(387): n is a, c, g, or t
gtggcggcgttttcaaaattcctgctccacgaagtcggcatagttccgaaagagcaatttataacagataacacgccggataaattcaaggaacaaattacctctgacatcgcctccacttccgccaagcgtaatattcccgtcatctttgaaccggacgccggtctggcgcaggaagctatacgcaatgttaaacacagcggacggggtttgattatcggcagcggctgggataaagagcttgccagggagaaagattacgattttctttcggcggcggcgcctactccctaccgtctggtattgaccaccaactacgccggtttttcaggcggtttgcgggtgatcgaagatatttaccacaacgtgctggcgacttaccgctaa

SEQ ID NO: 16368 - protein, 128 aa, Unknown
  Obtained from environmental sample
  misc_feature (1)..(128): Xaa is any amino acid
MAAFSKFLLHEVGIVPKEQFITDNTPDKFKEQITSDIASTSAKRNIPVIFEPDAGLAQEAIRNVKHSGRGLIIGSGWDKELAREKDYDFLSAAAPTPYRLVLTTNYAGFSGGLRVIEDIYHNVLATYR

SEQ ID NO: 16369 - DNA, 342 bp, Unknown
  Obtained from environmental sample
  misc_feature (1)..(342): n is a, c, g, or t
atgagctacagaatcgcgtttgcaagcacaggtgaatacatagaccagcatttcggatcggcgcggtattttcaggtttatgatctcgcggacagcggaaaccatgaacacgttgaaacccgcgcggcgcangcaaaatgcatggggaattgcgagggcggttttgaccacttattacagattctgaatgactgcgacgcggtatttatcagcaggatcgggcaaagcgcggcagcgtttatgatttccnaaggcaagcgggtgtttgaggcaagcggtaaaatagaggatattttgtcaaaattgaaagaaagaaatctcttanaaggtgaaccggagtga

SEQ ID NO: 16370 - protein, 113 aa, Unknown
  Obtained from environmental sample
  DOMAIN (10)...(104): Dinitrogenase iron-molybdenum cofactor
  misc_feature (1)..(113): Xaa is any amino acid
MSYRIAFASTGEYIDQHFGSARYFQVYDLADSGNHEHVETRAAXAKCMGNCEGGFDHLLQILNDCDAVFISRIGQSAAAFMISXGKRVFEASGKIEDILSKLKERNLLXGEPE

SEQ ID NO: 16371 - DNA, 609 bp, Unknown
  Obtained from environmental sample
  misc_feature (1)..(609): n is a, c, g, or t
ttgggaacgtttacggacggcagagatggtaagacatacaagaaagtgacgatagacggtcagacgtggatggctgagaatttgaattatgaggtggcggatggaaccggttcgtggtgttataaaaacagtgcggatagttgtactaaatacggcaggttgtatggttggaatacggcgatgaacggagcgagtagttccaatacaacgccgagcggtgttcagggtgtttgtcctagtggatggcatttgccgtctagtgcagaatggaatacgttggtggcaaaggccggaggttcttcggtggcgggtagtaagttgaaatcgtcaagcggttggaacaataacggtaatggtacggatgattttgggttttcggctttgccgggcggctaccgcctcaccggtggcagtttcaacaatgccggcaattacggcgactggtggacggccacggagagcgggagcggcaacgcctgcgatgtactacggcagcgaccgcgtgagcgagtacggcctcgacaaaggctacggtttttctgtacgttgttcgcaggactgaagcgcggtgcgggtaggcgtagccaacccgcatcgtgccggtgttag

SEQ ID NO: 16372 - protein, 202 aa, Unknown
  Obtained from environmental sample
  misc_feature (1)..(202): Xaa is any amino acid
MGTFTDGRDGKTYKKVTIDGQTWMAENLNYEVADGTGSWCYKNSADSCTKYGRLYGWNTAMNGASSSNTTPSGVQGVCPSGWHLPSSAEWNTLVAKAGGSSVAGSKLKSSSGWNNNGNGTDDFGFSALPGGYRLTGGSFNNAGNYGDWWTATESGSGNACDVLRQRPRERVRPRQRLRFFCTLFAGLKRGAGRRSQPASCRC

SEQ ID NO: 16373 - DNA, 549 bp, Unknown
  Obtained from environmental sample
  misc_feature (1)..(549): n is a, c, g, or t
atgtataaaaatcaaacatgtgtttggtcccgtttaatcgacaaaacagaaaggctatttattatgcgtataccgtcaatatatcttgagactacgatattcaactttccgtttgcggatgattctccgcagtatcaggcggatacgttacgtttgttcgcggagataaaggatggaaagtttcggccgtttacgtccgaatatgttcttcgtgaacttgaaaacactaccgatgccggtaagctagtgaagatgaaggctatgatttccgattacaatatcaccgtgttaccacccagcgcggaggtcaaacggcttgccgatgtgtacacttcgtctggtgttataccaataaagtatggtcttgacgcgcttcacatagcaattgctacggttaccggtcttgattatattgtgagcctgaattttaagcatatcgtgaaacacaaaacgataatcgaaacagaactaataaacgcccgagaagggttcaagcgtatctttatccacgctccagcggaggtaatagaaaatgaagaaaagccttag

SEQ ID NO: 16374 - protein, 182 aa, Unknown
  Obtained from environmental sample
  misc_feature (1)..(182): Xaa is any amino acid
MYKNQTCVWSRLIDKTERLFIMRIPSIYLETTIFNFPFADDSPQYQADTLRLFAEIKDGKFRPFTSEYVLRELENTTDAGKLVKMKAMISDYNITVLPPSAEVKRLADVYTSSGVIPIKYGLDALHIAIATVTGLDYIVSLNFKHIVKHKTIIETELINAREGFKRIFIHAPAEVIENEEKP

SEQ ID NO: 16375 - DNA, 678 bp, Unknown
  Obtained from environmental sample
  misc_feature (1)..(678): n is a, c, g, or t
ttgatggcgattttgcgggcggcattgacgacgaagttaaaacgcggttctggctgtttcaaagagttacaggcggcgggcgcagcgatagaagaatttgaaatgccgtttttggattatgtgattccaacctactacatcatcgcgtgcgccgaagcgtcgtcaaacctttcgcggtatgacggtttgaagtacggccaccgcagcgcaaacgcacaatcgctttcagaagtgtaccgtctttcccgcaacgaaggtttcggactggaagtaaaaagaagaattatgctcggctcgtttgtgctttcatcggggtactacgacgcttattacaaaaaagcattgcaggtacgcgctcttatcaaagacgcttacacaaaattatttaccaagtatgacatgatactctctcccgtcgcgcctacaacggcgtacaaaatcggggaaaattcaggcgacccgatgaagatgtacatgggcgacatttacaccgtgtcgatcaatttggcgggactcccctccgcggctcttccctgcggatttgattcgacgggattgcctatcggttttcaattaatcggagacgctttctcggagaaaaaaattattgatactgcgcgggtttatcaatcccgcaccgattaccatgtaaaaaaacctgaaggtataaaagtatga

SEQ ID NO: 16376 - protein, 225 aa, Unknown
  Obtained from environmental sample
  DOMAIN (3)...(203): Amidase
  misc_feature (1)..(225): Xaa is any amino acid
MMAILRAALTTKLKRGSGCFKELQAAGAAIEEFEMPFLDYVIPTYYIIACAEASSNLSRYDGLKYGHRSANAQSLSEVYRLSRNEGFGLEVKRRIMLGSFVLSSGYYDAYYKKALQVRALIKDAYTKLFTKYDMILSPVAPTTAYKIGENSGDPMKMYMGDIYTVSINLAGLPSAALPCGFDSTGLPIGFQLIGDAFSEKKIIDTARVYQSRTDYHVKKPEGIKV

SEQ ID NO: 16377 - DNA, 333 bp, Unknown
  Obtained from environmental sample
  misc_feature (1)..(333): n is a, c, g, or t
gtgattaaggatgtgtccgaggcaggcggctacggcgtggtgttcggcagtgaattaacggaagataaattagccgaactcaaggctctcattataaaagagccgcggcgtttcatatctcaagaagtcatcgattttatcgatttggatattatggatgaaagcggcgccgccgtgccccgcaaggcagacttgagagcctttgtgctgaccggcgaaaccacgcgcgtctgggccagcggactgacgcgtttctcgcgcgtggtcggctcattcattgttaattcttcgcagggaggaggctttaaggacacatgggtactatctcggtag

SEQ ID NO: 16378 - protein, 110 aa, Unknown
  Obtained from environmental sample
  DOMAIN (1)...(109): Domain of unknown function (DUF407)
  misc_feature (1)..(110): Xaa is any amino acid
MIKDVSEAGGYGVVFGSELTEDKLAELKALIIKEPRRFISQEVIDFIDLDIMDESGAAVPRKADLRAFVLTGETTRVWASGLTRFSRVVGSFIVNSSQGGGFKDTWVLSR

SEQ ID NO: 16379 - DNA, 891 bp, Unknown
  Obtained from environmental sample
  misc_feature (1)..(891): n is a, c, g, or t
atggacaggacattcggcatacgtgaaggagaaggaccccttgaagcagaactcattgccattgcagattcaattgatgtaactcaccacgtgcaaagattgaaacctgaagatttgccaaccatccgtaatataattgttgaagaaactgggaaaaattacagcaaaatagctgcagaaacgatgttggaaattctagacatctctacaattttatctcttaaagataatgctattaaacaaaccgcttcggaagttttattcccctggactgaggatatacaaacagaaactatttttggtttggctggttttatcgctagtattattgactacaaatccgcttttacacaaaaacattcaacccaaattgccaataaagcttggtttatggggaaatattacaaatatgaaccgcaaacattagcggaattatatttggcggcctctctccacgatctcggcaaattggcggttccctctgatattctggaaaaatccggtaaactttcagatgaggaatttgaaattatcaagaaacacgttcgccttacttgggaacttctaagcgatattgagggatttgaaactatatgtcagtgggcatccaatcatcacgaaaaattagacggcagtggttatccctttggtaaaaaagctcctgagttggattttaattctaggctattggcttgcttggatttatatcaagcgataagcgaagaaagaccctaccaccccagacgcagtcacgcagatactatgcgaatactttatgaaatggcaggcattggaaaaatagacggagatattacaaaagatctagatattgcccttgccccttatgacggtaaggattttccaccaccaaagtatttagaagggaggtaa

SEQ ID NO: 16380 - protein, 296 aa, Unknown
  Obtained from environmental sample
  DOMAIN (117)...(239): HD domain
  misc_feature (1)..(296): Xaa is any amino acid
MDRTFGIREGEGPLEAELIAIADSIDVTHHVQRLKPEDLPTIRNIIVEETGKNYSKIAAETMLEILDISTILSLKDNAIKQTASEVLFPWTEDIQTETIFGLAGFIASIIDYKSAFTQKHSTQIANKAWFMGKYYKYEPQTLAELYLAASLHDLGKLAVPSDILEKSGKLSDEEFEIIKKHVRLTWELLSDIEGFETICQWASNHHEKLDGSGYPFGKKAPELDFNSRLLACLDLYQAISEERPYHPRRSHADTMRILYEMAGIGKIDGDITKDLDIALAPYDGKDFPPPKYLEGR

SEQ ID NO: 16381 - DNA, 648 bp, Unknown
  Obtained from environmental sample
  misc_feature (1)..(648): n is a, c, g, or t
atgttccagcgggtctggggtgatgccaatgacgtgcggcaggataatcagggcaacgagattcgtcccgcgcaagtggaaaaaccccgctgggaaaccgcctttttccgcgactcactgggctacagtaccgaaccctatgaattttatctgggcgcgggaaataatactatccggcttgagggcataaatgagccggcggcaatccggtcgctctgcctgaaagcgcctgttcccgctcaggattaccgggagtacgcgcaggggattgatacgcgtacatatcgcaatacggataccgattttatgttgaaggtacagggtgaacacgccctgtaccgttccgatccgtcgttatacgccatttatgaccgttcttccggtgcgacagatccgcccagcgtggcaaaaatcaaactcaacatgattggcggacaaagctggcgcgtcgccgggcagtggattgaatgggattttctggtgcctgaagatggcatgtaccggtttaccgtcaagggccgtcagaattacaaccgcggttttgtatcgaaccgtatggtgatgatagacgggcaggtaccctgcgcggaacttgccgctgtgccgtttacctacagcaataaatgggaagttggcgacattccgtga

SEQ ID NO: 16382 - protein, 215 aa, Unknown
  Obtained from environmental sample
  misc_feature (1)..(215): Xaa is any amino acid
MFQRVWGDANDVRQDNQGNEIRPAQVEKPRWETAFFRDSLGYSTEPYEFYLGAGNNTIRLEGINEPAAIRSLCLKAPVPAQDYREYAQGIDTRTYRNTDTDFMLKVQGEHALYRSDPSLYAIYDRSSGATDPPSVAKIKLNMIGGQSWRVAGQWIEWDFLVPEDGMYRFTVKGRQNYNRGFVSNRMVMIDGQVPCAELAAVPFTYSNKWEVGDIP

SEQ ID NO: 16383 - DNA, 732 bp, Unknown
  Obtained from environmental sample
  misc_feature (1)..(732): n is a, c, g, or t
atggaaagttctcgtataccattgagaaaatggttgctagctgaatattacatcgtcacggcgcgaaagggcatatctggcttggaactctctaaaaagttgggtatttgccaaaaaagtgcgtggtttttacatcaccgcattaggtttgctttggatgctggtaattttaaccatctgcttggtggtcttggaaagatagttcagaacgatgaaacatattgcgggggcaggaacaagaataggcatactgataaaaagattgagggtagcggtcctgtcggaaaagcgataatactgggaatgtctgaactgggtggcaggaagaaagctcttgtgatatccaatactgagcgggaaaccatacttgcggagataaacaaacacatcaggaaaggcaccattttaagcacggatgaagctacacattacatcggcgtaaatcgacagggctacaagcatcgaagctgcaaccacagtgccaaaaactgggttaatggaatggcttcaactaattccgttgaatctatgtggtcgttattgaaacgcgcattctatggaatttaccataagttctcgattgagcatctgcccaagtatgtggctgaatctgtctttaggctgaacgaaggtcattgcaagtatcagacgatgactaggattgatgccatcgctagctattgcatcggcaaacggctcacctggtcgcaatgcatcggagaatccgtctag

SEQ ID NO: 16384 - protein, 243 aa, Unknown
  Obtained from environmental sample
  misc_feature (1)..(243): Xaa is any amino acid
MESSRIPLRKWLLAEYYIVTARKGISGLELSKKLGICQKSAWFLHHRIRFALDAGNFNHLLGGLGKIVQNDETYCGGRNKNRHTDKKIEGSGPVGKAIILGMSELGGRKKALVISNTERETILAEINKHIRKGTILSTDEATHYIGVNRQGYKHRSCNHSAKNWVNGMASTNSVESMWSLLKRAFYGIYHKFSIEHLPKYVAESVFRLNEGHCKYQTMTRIDAIASYCIGKRLTWSQCIGESV

SEQ ID NO: 16385 - DNA, 867 bp, Unknown
  Obtained from environmental sample
  misc_feature (1)..(867): n is a, c, g, or t
atggcacaggcaagccgcgtttacaaaccctttgacgcaaaattctcgcaaacagccattgccgccgcagaaaaagcctttgaatgggcaacaaaaaatccgtcaatctatttcaaacaaccagagggcatgaacacgggaccatacgctcctagcgatgaaacagtccaagacgaaaaactatgggcagcagcagaactctatatcagcacaaagaaaaaatcttacgagaatataattgatatcattccctttgacggacaaacgccgtggtggggtaatgtgaattttttgactgtgtacagaatttctgatgccaaaaatggatttaaaaaagatttgaacaaaaaggctcaagatacccttattgctgttgcaaatatgctcaaagatatatcagaaaattccgcttatggaataccagtaaataaatggaattttgtttggggttcaaattctgttgttgcaaataatggcattttgcttttgcacgcatactatttaacaaaaaacaaaagctatttagatgccgctcaaagagccttggattatcttttgggagcaaaccccattgacataagttatgtgactgggcacggcaacagaacaccaatgtccccgcaccacagaccctctgaaggagatggcatcacagagccagtgccgggaatgttggttggaggaccgcacgagggtgggcaagatgttaaaccaaatggacgttgcgaaaactatgtgcaaaaaggcaaacccgccctctcctatttagaccacgattgcagctatgccacaaatgaagttgccataaactggaacagccccttagtttacctttctggtgctttgcactttttgaactcaaaatga

SEQ ID NO: 16386 - protein, 288 aa, Unknown
  Obtained from environmental sample
  DOMAIN (1)...(282): Glycosyl hydrolase family 9
  misc_feature (1)..(288): Xaa is any amino acid
MAQASRVYKPFDAKFSQTAIAAAEKAFEWATKNPSIYFKQPEGMNTGPYAPSDETVQDEKLWAAAELYISTKKKSYENIIDIIPFDGQTPWWGNVNFLTVYRISDAKNGFKKDLNKKAQDTLIAVANMLKDISENSAYGIPVNKWNFVWGSNSVVANNGILLLHAYYLTKNKSYLDAAQRALDYLLGANPIDISYVTGHGNRTPMSPHHRPSEGDGITEPVPGMLVGGPHEGGQDVKPNGRCENYVQKGKPALSYLDHDCSYATNEVAINWNSPLVYLSGALHFLNSK

SEQ ID NO: 16387 - DNA, 732 bp, Unknown
  Obtained from environmental sample
  misc_feature (1)..(732): n is a, c, g, or t
gtggtagagcagatcatccggccgacgggcttagccgacccgcaaatagagctccggccgatagccggtcaggtgccggatctgatgaacgaggccgaaaaagtaatcgcgcgccgggaacgtgtgctggtgacggcgctgaccaaacggatgtccgaggaattgagccagtttttactgaccaagggttttaaagtctgctggctgcattccgatgtcgagactttggagcgcgtgcgcatcctcaacgatctgcgttccggcaagtacgatattttagtcggtgtaaatctcttgcgcgaaggactggatttgccggaagtttcgctcattgccatactggatgcggacaaagagggtttcctgcgctccgaacgctcgctcatccagactatcggccgggccgcgcgcaatatcaacggccgggtgatactttatgccgatattctgaccgacagtctggacaaggccgtccgggaaaccaaccgccgccgggcgatacagctccggcacaatcaggagcataatattacaccggagacgatcaagaaaaacattaaaaaaagtgttgccgcggatgaaactattttggcgaanaaagctccgcttnaaaatccgctggaaattatggaatatgtggaacagctgcgtcaggaaatgtttaaagccgcggaggctctggatttcgagcgcgcggctgttttaagagataagttaagcgaattagagtag

SEQ ID NO: 16388 - protein, 243 aa, Unknown
  Obtained from environmental sample
  DOMAIN (210)...(243): UvrB/uvrC motif
  misc_feature (1)..(243): Xaa is any amino acid
MVEQIIRPTGLADPQIELRPIAGQVPDLMNEAEKVIARRERVLVTALTKRMSEELSQFLLTKGFKVCWLHSDVETLERVRILNDLRSGKYDILVGVNLLREGLDLPEVSLIAILDADKEGFLRSERSLIQTIGRAARNINGRVILYADILTDSLDKAVRETNRRRAIQLRHNQEHNITPETIKKNIKKSVAADETILAXKAPLXNPLEIMEYVEQLRQEMFKAAEALDFERAAVLRDKLSELE

SEQ ID NO: 16389 - DNA, 429 bp, Unknown
  Obtained from environmental sample
  misc_feature (1)..(429): n is a, c, g, or t
ttgatctcttatggcgcaagccctaaaaagatattttataaattgaacggcggaaaaaatcttagttccagaaaattattaggcaatattctagcaaggactgaatcctattttaacggaaaacttttacttagttatgaaacaccggacgaatttaaaacttttggttttgaggctagagattctgacaatttaaatcaaatgcttttagcggtcgaaggaactgaagcaattgtaataatccgccaagagtgtgccgacaattgcactgtgagtttaagatcaattgataaggttgacgtgtcactaatagcggcgtccctcggcggaggcgggcacaagaacgcttccggtctcacaatgaaaggtgacattccgtatgtaaaacaaataatgttagattcatttaaaaatatcttcgccgaataa

SEQ ID NO: 16390 - protein, 142 aa, Unknown
  Obtained from environmental sample
  DOMAIN (76)...(142): DHHA1 domain
  misc_feature (1)..(142): Xaa is any amino acid
MISYGASPKKIFYKLNGGKNLSSRKLLGNILARTESYFNGKLLLSYETPDEFKTFGFEARDSDNLNQMLLAVEGTEAIVIIRQECADNCTVSLRSIDKVDVSLIAASLGGGGHKNASGLTMKGDIPYVKQIMLDSFKNIFAE

SEQ ID NO: 16391 - DNA, 588 bp, Unknown
  Obtained from environmental sample
  misc_feature (1)..(588): n is a, c, g, or t
atgaaaatagataaaaagatttttggtgttctttccaacgggaaaaaagttaaattgtggacccttagcgcgggtgatttaaaattatcgcttaccaatttcggcgcgacatggacaagtctccttgcgccttcgcgcgaaggcgttaaagacgacatattgttaggttattcaaaccttgacggttatttgcacaatgaaccgtttatcggcgttactgtcggacgttttgcaaaccgtattaaggacgcgactttttctttaaacggaaaaacctacgatcttcaggcaaatgacggtaaaaattccctccattcgggactgcgcggttttgataaacttctttggagatcggaagcttacgaagaaaacaagggagtctatgttcgctttgaaattgagagtcccgacggcgattgcggttttcccggaaacttaaaggctgtagtcagttacgggcttactgaatccaatgaaataatttgcgattattacgctnaggtggataaaccgtctcccctgtcatctactaatcacgcgtattttaatttagccggagaagggcaggncagtatacttttcccataa

SEQ ID NO: 16392 - protein, 195 aa, Unknown
  Obtained from environmental sample
  DOMAIN (18)...(195): Aldose 1-epimerase
  misc_feature (1)..(195): Xaa is any amino acid
MKIDKKIFGVLSNGKKVKLWTLSAGDLKLSLTNFGATWTSLLAPSREGVKDDILLGYSNLDGYLHNEPFIGVTVGRFANRIKDATFSLNGKTYDLQANDGKNSLHSGLRGFDKLLWRSEAYEENKGVYVRFEIESPDGDCGFPGNLKAVVSYGLTESNEIICDYYAXVDKPSPLSSTNHAYFNLAGEGQXSILFP

SEQ ID NO: 16393 - DNA, 738 bp, Unknown
  Obtained from environmental sample
  misc_feature (1)..(738): n is a, c, g, or t
gtggaacctttttacgaaaacgcggtcagcgtagaaacgcccgatgttccgaaaagacattttaccccgacatctctgcacggcggcgccactgtaagtggcgacgctacttacagtagcgatgtccactggactgacagaaaaagcgcctggtccggcgaaaccgccgctgatattttcagcagtgtagatacccttatcgaacattacgcgaaacaacagggaagggacaatgataaattcaattatggcagctttgggactgttgcccatatttgtatagaagcgctgctttccaatcaggaaactaaaatccccgcgcatctgacaggcctagtcagttccagggatgccgatgccattctttcggcagggaaagaactcgcggagcgttttgcccagtctccgttgggaagcattgccaggaaatcagaaaatttgaagagtgaattccagtttcgcagccttttgcatgtcggcagaaaaaaattctttataaacgggaccatcgatcttctgtttgaagacgcggaaacagtttatgtggttgactttaaaaccgataaccaggaattcccgtgggagcatatcccgcaaatggcatgttattacaaggcggcatctgacctttttgccgttcccgcgaacaagaaatgcagggcatggctttactatctgcgaaccggccatgcggttgacgtaaccacgaaagcaaaagaattcgatttcagggggtga

SEQ ID NO: 16394 - protein, 245 aa, Unknown
  Obtained from environmental sample
  misc_feature (1)..(245): Xaa is any amino acid
MEPFYENAVSVETPDVPKRHFTPTSLHGGATVSGDATYSSDVHWTDRKSAWSGETAADIFSSVDTLIEHYAKQQGRDNDKFNYGSFGTVAHICIEALLSNQETKIPAHLTGLVSSRDADAILSAGKELAERFAQSPLGSIARKSENLKSEFQFRSLLHVGRKKFFINGTIDLLFEDAETVYVVDFKTDNQEFPWEHIPQMACYYKAASDLFAVPANKKCRAWLYYLRTGHAVDVTTKAKEFDFRG

SEQ ID NO: 16395 - DNA, 774 bp, Unknown
  Obtained from environmental sample
  misc_feature (1)..(774): n is a, c, g, or t
atgggcagcttgatttatataatcgaacctgaacaggtatataagtggctgaatattagctccatacgcgaaacggtcgagtcacaggaagaaataattctaagctgtaacaggcggtggctgtctatgaatataagcagcgcccggctgttaataaaagacaaggaaacaaccgtcgccgtcaatataatggccaggaactatattacagatgacctggagcccatgacttttgtggagaacaacaggttaattgtaattcctgcaaataaattttgcaaaaaaaaggacgtggtttccgccggttttaaggaactgaaaaactacggcagaagcggactcgggatgaaagtttttcccacaaccgcctgttttacagaagatgacgatgcgcctgttcttagctatcgctttaaattagatcaagggggcgcgtatacggcggaagtgtggatgaccccgacaaattccgtacaaaacaaacaccccctgcgtttcagttttaaaaattcacagggaaggcaaataattaccgccgtcccctccgattttatggccggcagcccctcggaccaaaggtggtgcgagggtgttctcaacaatatacgcgtcagcaaaattccgttaactttggaagagggagtacaggaaatctcaatcggagcccttgaaccggccctggtgcttgaaaagatactgatttacagagagggcagggacccctccaaacttgattcatatctagggccgcctgtttcagtgtgcaatgagtaa

SEQ ID NO: 16396 - protein, 257 aa, Unknown
  Obtained from environmental sample
  misc_feature (1)..(257): Xaa is any amino acid
MGSLIYIIEPEQVYKWLNISSIRETVESQEEIILSCNRRWLSMNISSARLLIKDKETTVAVNIMARNYITDDLEPMTFVENNRLIVIPANKFCKKKDVVSAGFKELKNYGRSGLGMKVFPTTACFTEDDDAPVLSYRFKLDQGGAYTAEVWMTPTNSVQNKHPLRFSFKNSQGRQIITAVPSDFMAGSPSDQRWCEGVLNNIRVSKIPLTLEEGVQEISIGALEPALVLEKILIYREGRDPSKLDSYLGPPVSVCNE

SEQ ID NO: 16397 - DNA, 879 bp, Unknown
  Obtained from environmental sample
  misc_feature (1)..(879): n is a, c, g, or t
ttgataagaatgcatagtgatacaatgagtgancggcgtaaggctctggcggcgattattgcctgtgttctgttttggggcttttcatttatttcgataaagataacagtgncggttttccctcccatgtcccaggggcttctgcgtttcgcaatagccctggttttcctcttttttatgaagcaaaaactcgcgccgggcgaaagactaaaggcccgcgacatcccgctgcttttgggggcgggctttttcggcgtcactttttactttttctgcgaaaacaacggcgtaaaactggttaccgcgtctgaggcgtccatcgcgattggttcaatccccgtgctgaccatgatcgccgactcgctcagcagaaaatttgcgcgtaacagaaataactatctgccgcagatcggcatacgccagtggattggggcttttgtttccatagccggggtatggcttgttgccggcgtttcatttgccctttcgggcagcgttatgggttacatatacatggcgggtgccgccattttctgggtggtgtattccctgctgacccgccccctctttacccgctgctcccggatccacattgtattttggcagactgtagcgggctttatcggttttattcctttctcaattatggaattcaacaaatggggccgtccggatccgcctgttattcttcatcttgtttttctgagcgtctgctgttccgcattgggttactggtactacgcccgatcccttgaagtcctcggactgtcggtttccgcgatatttatcaatctgatacctctggtaacagccgttttcggttttatcgtaatgggtgaccgcctgactctttacaatggctggggcgtctcgcgataa

SEQ ID NO: 16398 - protein, 292 aa, Unknown
  Obtained from environmental sample
  DOMAIN (177)...(292): Integral membrane protein DUF6
  misc_feature (1)..(292): Xaa is any amino acid
MIRMHSDTMSXRRKALAAIIACVLFWGFSFISIKITVXVFPPMSQGLLRFAIALVFLFFMKQKLAPGERLKARDIPLLLGAGFFGVTFYFFCENNGVKLVTASEASIAIGSIPVLTMIADSLSRKFARNRNNYLPQIGIRQWIGAFVSIAGVWLVAGVSFALSGSVMGYIYMAGAAIFWVVYSLLTRPLFTRCSRIHIVFWQTVAGFIGFIPFSIMEFNKWGRPDPPVILHLVFLSVCCSALGYWYYARSLEVLGLSVSAIFINLIPLVTAVFGFIVMGDRLTLYNGWGVSR

SEQ ID NO: 16399 - DNA, 591 bp, Unknown
  Obtained from environmental sample
  misc_feature (1)..(591): n is a, c, g, or t
ttgatggccgaggacatgcgaattaccgaaccaatcgaacaactgagcatagacgcggcgcggataggcgccggtgacctggatcatgtcctggaagccaaaacaggcgacgagctggagatattggcggcgtctttcaacgcgatgattaccggcataaaaaagattacagccgaaaaggagcgccttgaaaccgcgagcgcggaaaaaacacacgagacgaaaattatccaggaatcgaatcaaaacctgcaatcaatacttgatatgcttcccgccggcgtaggaatcatggacatcgatgacagctctatacttttcgcgaacaaggcgctgatgaaggttctcaactgtacttccacagagcaggtattgggacacagcgggtttgaatttatgcccgtagtacagccgaacggaagaaaaaccgcagatgtggtcgccgatatattccagaacgaatccgccgtcatagaaatgcaattcgttagatcgggcggcgcgccgttcactgcccgtatccattccattaacaccgtctttaagggttcacgcgcatccgttgccattattgaggatataacggcgtaa

SEQ ID NO: 16400 - protein, 196 aa, Unknown
  Obtained from environmental sample
  misc_feature (1)..(196): Xaa is any amino acid
MMAEDMRITEPIEQLSIDAARIGAGDLDHVLEAKTGDELEILAASFNAMITGIKKITAEKERLETASAEKTHETKIIQESNQNLQSILDMLPAGVGIMDIDDSSILFANKALMKVLNCTSTEQVLGHSGFEFMPVVQPNGRKTADVVADIFQNESAVIEMQFVRSGGAPFTARIHSINTVFKGSRASVAIIEDITA

SEQ ID NO: 16401 - DNA, 321 bp, Unknown
  Obtained from environmental sample
  misc_feature (1)..(321): n is a, c, g, or t
gtggttttcccncatantgatcagggcgggcgcctcgcgcctgaattgaaagagctagccgccgaactcgcccgcatagcttcggaggcggggatggaaatgcgctcatgcgccgaagctgaagatttatccgtgctggggatcaagcccggcgcctgcatagacggcgggcttatccgggaaatttccgggcattctctttcgcaaatcggaagcaaagataaaaaccagcggcgtaattgccgctgtgtttccagcgtggatatcggcagttacggttcctgccgggccggctgcgtttattgttatgcgcaacgatga

SEQ ID NO: 16402 - protein, 106 aa, Unknown
  Obtained from environmental sample
  misc_feature (1)..(106): Xaa is any amino acid
MVFPHXDQGGRLAPELKELAAELARIASEAGMEMRSCAEAEDLSVLGIKPGACIDGGLIREISGHSLSQIGSKDKNQRRNCRCVSSVDIGSYGSCRAGCVYCYAQR

SEQ ID NO: 16403 - DNA, 504 bp, Unknown
  Obtained from environmental sample
  misc_feature (1)..(504): n is a, c, g, or t
atgagagggcaaatccaaaacgagcgcatatcgctcttcatgaaaaagagccaggaatggatcaataccgtcgtgcggcaaatctgcctgtcggagttcgagcttgagttccaccggctgcgccggtatggcaagctcagcgaggccgaaatctccgaaatttgggtgcgcaagagcaaggagttctacggcgacatattcaggtacgggcacatggagaatttatggggctatatcagccactttttggatccgttctacacctactcctatgccttcggcgagctgatgacgcacaacctgtacgagaagaagggcagcctgccgaacttcgagaagctccttatcgacatgttcaaggcgggcgacaccaaggacgcgaaggagctcctcgagcctttcggcctcgatcccggcgcgccgcgcttctggaaggacggaatagactacagcatagtccggtggctcgaccaaatcgaggacatgaagggaaagaggagatga

SEQ ID NO: 16404 - protein, 167 aa, Unknown
  Obtained from environmental sample
  misc_feature (1)..(167): Xaa is any amino acid
MRGQIQNERISLFMKKSQEWINTVVRQICLSEFELEFHRLRRYGKLSEAEISEIWVRKSKEFYGDIFRYGHMENLWGYISHFLDPFYTYSYAFGELMTHNLYEKKGSLPNFEKLLIDMFKAGDTKDAKELLEPFGLDPGAPRFWKDGIDYSIVRWLDQIEDMKGKRR

SEQ ID NO: 16405 - DNA, 492 bp, Unknown
  Obtained from environmental sample
  misc_feature (1)..(492): n is a, c, g, or t
ttgaaactatccgatgcttttgaggaactaggcataaaaaaagccccagagttggaattatccgtaagggtgctaaacataaacaagggtcacaacccaaagttggaacgtagaagcaagaacttagctggttactcgttttttgtggcaaaggttagggaatttcagtccattggcaatccattaaaacaagcaatagaaaaggctatccgtcattgcatagataaaggtatattgcgagattatttgagaaaaaattcatcggaggtcgttaatatgtttagtgtagagttcaatttgaaagatgccatcgccgtagccagagaggaaggcgaagatagaggcatagagaaaggcgaagccaggggcgaaaaaaaaggcattaaaaagttgcttacccttttggaaaagggtattcctttggcggaagccaaacgaaggcttggggttaatagaaaaattccagcacatcgccccaaattcgccacctaa

SEQ ID NO: 16406 - protein, 163 aa, Unknown
  Obtained from environmental sample
  misc_feature (1)..(163): Xaa is any amino acid
MKLSDAFEELGIKKAPELELSVRVLNINKGHNPKLERRSKNLAGYSFFVAKVREFQSIGNPLKQAIEKAIRHCIDKGILRDYLRKNSSEVVNMFSVEFNLKDAIAVAREEGEDRGIEKGEARGEKKGIKKLLTLLEKGIPLAEAKRRLGVNRKIPAHRPKFAT

SEQ ID NO: 16407 - DNA, 474 bp, Unknown
  Obtained from environmental sample
  misc_feature (1)..(474): n is a, c, g, or t
ttgatcgcgagcgatttgccaatattaaaagctggcaaaatagacataaaccatctgctcaaagatttccagtctttttggagagagaatagcgagattatctgggatgaactttatgaggagggatttcgcgaatacagagaagcctcaccccatttggtttttcaggcatttttgcagagggtgctcaatgggggagggcatatttcaagagagatggcactaggtaaaaaacgtgttgatatttgcattgagtgggagaatcagaaatacccgattgagcttaaactttacaagggaactaaaacaataaaggattctaaagaacaaattttggattatatggataaatcaggctcaaaagaaggctgggtggtgatttttgaccgcactcccaagaaaagctggagcaaaaaactttacgcaaaagaggtcaagcaatctggaaaaaagataacaatttttgggtgctaa

SEQ ID NO: 16408 - protein, 157 aa, Unknown
  Obtained from environmental sample
  misc_feature (1)..(157): Xaa is any amino acid
MIASDLPILKAGKIDINHLLKDFQSFWRENSEIIWDELYEEGFREYREASPHLVFQAFLQRVLNGGGHISREMALGKKRVDICIEWENQKYPIELKLYKGTKTIKDSKEQILDYMDKSGSKEGWVVIFDRTPKKSWSKKLYAKEVKQSGKKITIFGC

SEQ ID NO: 16409 - DNA, 534 bp, Unknown
  Obtained from environmental sample
  misc_feature (1)..(534): n is a, c, g, or t
ttgcaaacgcttataagccgtgaaaaacccgctacggaaccggcggtgctgaccgtaggcaaagtccgcgccggtaccgggcgcaacataatccccgacgccgcgattttgcaggggacgctgcgcacctactccgacgaattgcaggatatgctgacgcagcgcataaaacagctggcgatgttaaccgccaaagcgttcggagcaagcgccaaagttgttttcgaaaaatcatatccgtcgggctacaacgcgccggaattggccgataggtttagggataagataaaatcgtttctcggcgatgagtgcgtgattgacagaaccgtgccgactatgtacgcggaggatttcgcgcggtatcagcaaatagtgccgggcctatacgtttatttaggagtcgttccgcccaataagaaacggatggaggagatacacagccccagattcttacctgacgagggggcgatagagacggggatcgcggcgcatatagtttttgcgtttgacatactcgggggtgaattgacatga

SEQ ID NO: 16410 - protein, 177 aa, Unknown
  Obtained from environmental sample
  misc_feature (1)..(177): Xaa is any amino acid
MQTLISREKPATEPAVLTVGKVRAGTGRNIIPDAAILQGTLRTYSDELQDMLTQRIKQLAMLTAKAFGASAKVVFEKSYPSGYNAPELADRFRDKIKSFLGDECVIDRTVPTMYAEDFARYQQIVPGLYVYLGVVPPNKKRMEEIHSPRFLPDEGAIETGIAAHIVFAFDILGGELT

SEQ ID NO: 16411 - DNA, 825 bp, Unknown
  Obtained from environmental sample
  misc_feature (1)..(825): n is a, c, g, or t
gtggaggcttgcgacgccaacaagtacactaagaaggagttccgcgagatggcgctggagtatatggccatctcattctccgatatgccaaacggcgtggatgaggctataaaattcttcaataagaacaaaggcagaccatacgaggcgcaggtgatctatatggtgggttctaagaaccgcgatcacggccagtgggacgcggcgatcgacgcgctcagcggcgcgctcaaaaagtaccctatgtacaaggacgccccgctcgccaggcaaaagctgatcgagtgctacgtggtcaaaaaagagcacgataaggccaataaggagcgtgagagcctcgtggacgactacggcgagggtagcaagtggtacacggcgaactcaaaagagcgtaaagtcatagacatagcgaggggccaggtgcgccgcgcgctcggcgatatcgccctcttctaccacggcgagggccaaaagaagaaggacaaggcctctttcgacaaggcgatgaagcgttacaacgagttcttcgccaagttcccggacgacaagtggcgcgtgttcgagtataagtacaacgtggccgagatatacagttctatgggtgactgcgagaaggccgccgataactataggttcgtggccgaggaggacgtgtccaaatatccggcgtacgtcaacgacgtcgatactttgggtatggacgcggaagatcttgagaagttgaaggcgacgaagggcgacnagacgaatcctatcgccatttcccaagaggacgccggctancacgtcatcgtggcgttggatgtgtgccgcaaaaagagatag

SEQ ID NO: 16412 - protein, 274 aa, Unknown
  Obtained from environmental sample
  misc_feature (1)..(274): Xaa is any amino acid
MEACDANKYTKKEFREMALEYMAISFSDMPNGVDEAIKFFNKNKGRPYEAQVIYMVGSKNRDHGQWDAAIDALSGALKKYPMYKDAPLARQKLIECYVVKKEHDKANKERESLVDDYGEGSKWYTANSKERKVIDIARGQVRRALGDIALFYHGEGQKKKDKASFDKAMKRYNEFFAKFPDDKWRVFEYKYNVAEIYSSMGDCEKAADNYRFVAEEDVSKYPAYVNDVDTLGMDAEDLEKLKATKGDXTNPIAISQEDAGXHVIVALDVCRKKR

SEQ ID NO: 16413 - DNA, 387 bp, Unknown
  Obtained from environmental sample
  misc_feature (1)..(387): n is a, c, g, or t
atggctgtatttatagaacccagaattttgaaaggctttcgcgattttttgccttcccaggaaattgcccgtctgaacctcctggaaaagatagaaagctctttccgcttgtacggatttctgcccattgatactccggcgcttgaatactccgagattttgcttggcaaaggcgggggcgaaacggaaaaacagatttaccgttttaaggatcacggggacagagacgttgccctgcgctttgacctgaccgttcccttcgcgcgttttcttgcggaacacagggaggcgctggtcttcccttttaagcgctaccacattgccaaagtctggcggggagaaaacacccagcgcgggcgctacggggattcacccatgcgattttga

SEQ ID NO: 16414 - protein, 128 aa, Unknown
  Obtained from environmental sample
  DOMAIN (23)...(128): tRNA synthetase class II core domain (G, H, P, S and T)
  misc_feature (1)..(128): Xaa is any amino acid
MAVFIEPRILKGFRDFLPSQEIARLNLLEKIESSFRLYGFLPIDTPALEYSEILLGKGGGETEKQIYRFKDHGDRDVALRFDLTVPFARFLAEHREALVFPFKRYHIAKVWRGENTQRGRYGDSPMRF

SEQ ID NO: 16415 - DNA, 498 bp, Unknown
  Obtained from environmental sample
  misc_feature (1)..(498): n is a, c, g, or t
ttgaaagcatttgggattctgcggagaatttcgtggaagataacacgctcaccgtatatatcaagcgtctgcgcgaaaaagtcggcgatgcagttaatattgaaactgtgcgggggcttggttatcgtgctgattagaaaaagtgaaattaaaaatttatccgacaatattcgcagaatcatcgacggacagacggttgacttgcgcgataaccgcgagggtgtgttcagtatattaagaaacgatattcatacccttgccaatctaaaaaatgaacaagttatcgcattgcagcgtgaacgggataatttaaaagacacgcttacggacatatcgcaccagcttaaaacgccgctgacttcaatgttgattatggctgaccttctcgaaaacgctctcttgtcggacgctccgccgcccgaaaagcaaacggaatttattacgaatataaaaacagggtcttacccgcatggagtggcttgtttccgcgcttcttaa

SEQ ID NO: 16416 - protein, 165 aa, Unknown
  Obtained from environmental sample
  misc_feature (1)..(165): Xaa is any amino acid
MKAFGILRRISWKITRSPYISSVCAKKSAMQLILKLCGGLVIVLIRKSEIKNLSDNIRRIIDGQTVDLRDNREGVFSILRNDIHTLANLKNEQVIALQRERDNLKDTLTDISHQLKTPLTSMLIMADLLENALLSDAPPPEKQTEFITNIKTGSYPHGVACFRAS

SEQ ID NO: 16417 - DNA, 480 bp, Unknown
  Obtained from environmental sample
  misc_feature (1)..(480): n is a, c, g, or t
ttggttttgggcgcgagcgtaggcctaggcggcaacgatcacgccgcgaggaggtacttcttgggcggcaacgaaaattggttcaactacgatgtaaacgtagacaactacaacaaaaatctgggctacagctactactcaaccatcgtctccccactgcgcggatggaactacttcgacctgaccggcgacaaggcggcgctcctgaactcagagttccgcttccccttcatacgcgaaatatcaacggtttggccgatcccaatgcagatcagatacataaacggcgccctattcctagacgccggatacgcctggacgggcaacgccatcccccacgagatagccgccggatacggcttcggaatgcgggcgaacctgggaatcttcgtactgcgctacgatatgggctggccgacagactttaaaggcctggcgcgcaagcccattaattacttttcattgggtgcggaattttaa

SEQ ID NO: 16418 - protein, 159 aa, Unknown
  Obtained from environmental sample
  misc_feature (1)..(159): Xaa is any amino acid
MVLGASVGLGGNDHAARRYFLGGNENWFNYDVNVDNYNKNLGYSYYSTIVSPLRGWNYFDLTGDKAALLNSEFRFPFIREISTVWPIPMQIRYINGALFLDAGYAWTGNAIPHEIAAGYGFGMRANLGIFVLRYDMGWPTDFKGLARKPINYFSLGAEF

SEQ ID NO: 16419 - DNA, 450 bp, Unknown
  Obtained from environmental sample
  misc_feature (1)..(450): n is a, c, g, or t
ttgctggaacgcgaggagatgcaaaagcaatggctttcgctgcagctcaaggaagatgagtatgcgcaaaatatggaaaccctcaagagtaacgatcagcgcctgcaggataaggaagatcagttgatcgcctttgagaagcagcttaatgaacgtgaaaaaaagaccggcgaggataaggcggcggaggtgcggcgcagtgagcgtatcgcccaggtcgccaatcagctcatgaatatgccgccgcagcaggccgtggaacggctggagcagcagacggacgatctgcttgttatcgatatcctgaacgcgatcaacaccctctccgaggcgcagggcaggcgtaccgttgtgccttattacatctccctgatgagcaaggaacgcgcggcaatcgtgcaggcaaaaatggccaatatcgcccggctcacgaacgaaaacgatttttaa

SEQ ID NO: 16420 - protein, 149 aa, Unknown
  Obtained from environmental sample
  misc_feature (1)..(149): Xaa is any amino acid
MLEREEMQKQWLSLQLKEDEYAQNMETLKSNDQRLQDKEDQLIAFEKQLNEREKKTGEDKAAEVRRSERIAQVANQLMNMPPQQAVERLEQQTDDLLVIDILNAINTLSEAQGRRTVVPYYISLMSKERAAIVQAKMANIARLTNENDF

SEQ ID NO: 16421 - DNA, 705 bp, Unknown
  Obtained from environmental sample
  misc_feature (1)..(705): n is a, c, g, or t
atgcgagacgtctacccgtacggccttttagcctgtcccctaagcgacatcatagagatccacacctcctccggcaccaccggaaaaccggtcgtggacgcctacacccgcgccgacatcgacctatggggcgagtcgatggctcggacgctctctatgggcggcgtaggcaaggacgacatcctccaaaacgcctacggctacggcctcttcaccggcggtctgggcgcccactacggcgcacagcatataggggcgacctgcatccccatatccggcggcaacaccaaacgccagctggacttcctacgcgacttcggttccacggcgctcacctgcaccccgtcctacagcctctacatagcggaagccggacgcgaagagggtatcgacttcgagaaactgccgctaaaacgcggcttcttcggcgccgaaccgtggagcgacaatatgcgggcggagatagaggagaagttgaaaatcaaggcctacgacatcttcggcctaaccgaaatcataggccccggcgtagccgcggagtgcgagcgccaaaacctgctgcatatattcgaggatcacttctaccccgaaataatcaatcccgacaccggagccgtattgccggacggcgaanagggagaactggtcttcaccacgctgacaaaagagggcaccccgngtatcagatacagaacagggacataa

SEQ ID NO: 16422 - protein, 234 aa, Unknown
  Obtained from environmental sample
  misc_feature (1)..(234): Xaa is any amino acid
MRDVYPYGLLACPLSDIIEIHTSSGTTGKPVVDAYTRADIDLWGESMARTLSMGGVGKDDILQNAYGYGLFTGGLGAHYGAQHIGATCIPISGGNTKRQLDFLRDFGSTALTCTPSYSLYIAEAGREEGIDFEKLPLKRGFFGAEPWSDNMRAEIEEKLKIKAYDIFGLTEIIGPGVAAECERQNLLHIFEDHFYPEIINPDTGAVLPDGEXGELVFTTLTKEGTPXIRYRTGT

SEQ ID NO: 16423 - DNA, 849 bp, Unknown
  Obtained from environmental sample
  misc_feature (1)..(849): n is a, c, g, or t
ttgtcggagatagccgaacagatattcgacaggaaagacacggtaaaaaccattctgctcgccgggccttcaagctccggaaaaaccaccagcgcgaaacgtctttccattgaacttttggtgctgggtttaaagcccgtcgccatcagccttgacagttattatgtggggaatgaacagactccaaggaatgaaaaaggagagccggactacgaatgtcttgaagcgctggacatcccccttttaaacgatcatcttctggctctgtacaggggtgaagagataagcctgcccgtttatgattttaagacgggcgcgagcatcagagacgcgggcaaaaagatccgtatggaagaaaatcgcacggtgcttattgtcgaaggcatccacgcccttaacgacgcccttacgcccgccgttgggcgtgacaccaagtttaaggtttatgtttccgcccttacccagttgaatttggacgaccacaaccgcattccgacaagcgacaaccggctgctgcgccgcatggtacgcgactaccagttcaggggcaaagacgcggcgtggacgatcaggatgtggcctaacgtgcaggcgggggaacggaaacacatattccccttccaaaacaccgccgacgctgctttcaattcggcccttgattacgagctttccgtgctgaaatactacgccgatcccctgctgcgcgcggtgaaacccggccagcgcgaatacgccgaggcttcgcgcctctattcattcctggaaaacttcgcacccatacccccgcagttagtgccgggaaccagtatattgagggagtttatcggggacagcgagtttaagtattaa

SEQ ID NO: 16424 - protein, 282 aa, Unknown
  Obtained from environmental sample
  DOMAIN (17)...(224): Phosphoribulokinase / Uridine kinase family
  misc_feature (1)..(282): Xaa is any amino acid
MSEIAEQIFDRKDTVKTILLAGPSSSGKTTSAKRLSIELLVLGLKPVAISLDSYYVGNEQTPRNEKGEPDYECLEALDIPLLNDHLLALYRGEEISLPVYDFKTGASIRDAGKKIRMEENRTVLIVEGIHALNDALTPAVGRDTKFKVYVSALTQLNLDDHNRIPTSDNRLLRRMVRDYQFRGKDAAWTIRMWPNVQAGERKHIFPFQNTADAAFNSALDYELSVLKYYADPLLRAVKPGQREYAEASRLYSFLENFAPIPPQLVPGTSILREFIGDSEFKY

SEQ ID NO: 16425 - DNA, 882 bp, Unknown
  Obtained from environmental sample
  misc_feature (1)..(882): n is a, c, g, or t
ttgaaattgccctgtcgcttgcccaacaacnggggagcatccatgagccaggatcatacgccaatcattgattttcacattcatatcgcgccgcatcagcaggatacgccgggctatgaaaatctgctgacggatgcgctcggatcaatggaagccgtgcgggagttcaagcggcactatgccgatcccgcgaacatggtcgccaagctgcgtgactacggggtggactacggcgtggcgctggccgaatattcgccgctcgtcaccggctgttgcaccaatgagatggtggaagactattgccgggggcacaaggaattgctgcccttttgcagcttcaacccttttgaggagccggacatgccggccgccctgcgccgcctgcacggccggggttttaagggcatcaagctctacccctcctacaatcactaccatatcaacgacgccagaatgtatcccctgtacagcctggcccaggagttgggactgccggttctcgtgcataccggcacatcaattttcaagaatacccggctgaaatatgcccatcccattgatgtggacgatgtggccgtggattttcccgatctgaccctgctcatggcccatggcggccgcatggcctggtacagcgaggccatgaccctggcccgcctgcaccggaacgtatatattgagttgagcggccttgcggtgaaaaagctgctccagctttttccggacatggagcgtttttcccacaaattcgtgttcggcacggactggccgcaggttgatacggccaaaaatattgccgccatccgcggcctggggctgtccgaagcagcccaggcgcgcattctcggcggcaatgcggccagaattctgggattggcctga

SEQ ID NO: 16426 - protein, 293 aa, Unknown
  Obtained from environmental sample
  DOMAIN (23)...(292): Amidohydrolase
  misc_feature (1)..(293): Xaa is any amino acid
MKLPCRLPNNXGASMSQDHTPIIDFHIHIAPHQQDTPGYENLLTDALGSMEAVREFKRHYADPANMVAKLRDYGVDYGVALAEYSPLVTGCCTNEMVEDYCRGHKELLPFCSFNPFEEPDMPAALRRLHGRGFKGIKLYPSYNHYHINDARMYPLYSLAQELGLPVLVHTGTSIFKNTRLKYAHPIDVDDVAVDFPDLTLLMAHGGRMAWYSEAMTLARLHRNVYIELSGLAVKKLLQLFPDMERFSHKFVFGTDWPQVDTAKNIAAIRGLGLSEAAQARILGGNAARILGLA

SEQ ID NO: 16427 - DNA, 765 bp, Unknown
  Obtained from environmental sample
  misc_feature (1)..(765): n is a, c, g, or t
atgaaaagcgattctgtaaacaagggcattgcccgcgcgccccaccgttcactttttaaggcgttgggatttattgaagaagagtttaaaaggccgttgatagggattgcctgcgcgaagagcgagatagtgccgggccatctgcacctggacaacatcgcgcgcgctgcggcggacggcgttcgcatggcggggggagcgcccgttatctttcctgtaatcggcgtatgcgacggaatcgcgatggggcatgtgggaatgaagtactcactgccgacaagggaactgattgccgactcggttgagtgcatggctttagctcacgcgtttgacgcccttgtttttatccccaactgcgataagattgtgcccggtatgctgatggcgtcggcgcgtcttaaccttccctcagtttttgtttcaggcggacctatgcttgccgggcgcagggacgggaaaccgctgacgcttacgacaatgtttgaggcggtgggcgctgttgccgccgggaagatcagcgagcaggaacttgaagagcttgagaacctttcctgtccgggctgcggttcctgtgcgggaatgtttacggcaaactcgatgaactgtgtaaccgaagcgcttggaatggctctgccggggcacggcactatacccgccgtgatggcggagcgtatccgtttagcaaaaaagaccggaaatgtgatcatggacgttctaaaaaagatctgcgtccaaaacaaatacttacgcaggccgcgtttttga

SEQ ID NO: 16428 - protein, 254 aa, Unknown
  Obtained from environmental sample
  DOMAIN (31)...(254): Dehydratase family
  misc_feature (1)..(254): Xaa is any amino acid
MKSDSVNKGIARAPHRSLFKALGFIEEEFKRPLIGIACAKSEIVPGHLHLDNIARAAADGVRMAGGAPVIFPVIGVCDGIAMGHVGMKYSLPTRELIADSVECMALAHAFDALVFIPNCDKIVPGMLMASARLNLPSVFVSGGPMLAGRRDGKPLTLTTMFEAVGAVAAGKISEQELEELENLSCPGCGSCAGMFTANSMNCVTEALGMALPGHGTIPAVMAERIRLAKKTGNVIMDVLKKICVQNKYLRRPRF

SEQ ID NO: 16429 - DNA, 882 bp, Unknown
  Obtained from environmental sample
  misc_feature (1)..(882): n is a, c, g, or t
atggtgtcgnncctttcaataaacctcgcaaaactcggccatgatgtcaggattgttatacccagatattattcaatagaccgcggcagtttaaaattaatacccggcgcgatgggaccccgaatgggcggcggtattgaggaatggagcgccgtttacgctaccgatatgccgggaacaagcaaaaaaaatccggtaaaagtttattttatcgatcatgaaatatttttcggcagggacggcatttacggcagccatgccgaaactgattttatagacaacccgagacgcttcatgtttttctgccgcgccgcttttcagctttgccgcaagataaagtggtttcctgatgtgcttcatgctcatgactggcctgcggcggttgcgcctgtatatttaaagtttgcggaaagagtaaagggaagcgcgggcggatttgaaaaaacagtttcaatccttactattcacaatcttggctatcaaggaatttaccacaaaaacagctttgactatgcgggacttggctgggatgtcttttatatggcgggttttgaagactggaatatgctgaatatgcttaaagcggggctttacagcgcagacaagctcagtacggtttcgcctaattatgcggaagaaacaaaaactcaggaacacggcttcaggcttgacggagtgctgcggtacagaagcgccgattatataggtatattaaacggaattgacaatgaagtatggaatccggcaaaggacaaatatattcccgaaacttattccgttaaaaacatggaaggcaaggcaaaggcaaaagaagccctacagaaggaatttaaccttccgcgcaactcaaatgtgcctgtaataggaatggtaacgcgttga

SEQ ID NO: 16430 - protein, 293 aa, Unknown
  Obtained from environmental sample
  DOMAIN (1)...(229): Starch synthase catalytic domain
  misc_feature (1)..(293): Xaa is any amino acid
MVSXLSINLAKLGHDVRIVIPRYYSIDRGSLKLIPGAMGPRMGGGIEEWSAVYATDMPGTSKKNPVKVYFIDHEIFFGRDGIYGSHAETDFIDNPRRFMFFCRAAFQLCRKIKWFPDVLHAHDWPAAVAPVYLKFAERVKGSAGGFEKTVSILTIHNLGYQGIYHKNSFDYAGLGWDVFYMAGFEDWNMLNMLKAGLYSADKLSTVSPNYAEETKTQEHGFRLDGVLRYRSADYIGILNGIDNEVWNPAKDKYIPETYSVKNMEGKAKAKEALQKEFNLPRNSNVPVIGMVTR

SEQ ID NO: 16431 - DNA, 594 bp, Unknown
  Obtained from environmental sample
  misc_feature (1)..(594): n is a, c, g, or t
atgtcctttatgtcatatgcgataaagaattatttgcactatgaatattcactgcgggatataaagacagggttgtacaaccatggcttttttatatccngtctgaaagaagaagttgcccaaacaaagcacagttcctacacatcttcggttattgtaatagacgtagacaaattcaaaagctttaatgatacttacggacatcttgcgggtgatcaagtcctggaaaaactggcgcaggttatccggcagggtgtgcgcaacaaagatgtaccttcgcgttttggcggtgaagagtttaccgttatgctgtcccacgccgacactgccatcgcaaaaaaggttgccgagcggctgcgaaccaacgtggaaaaaatgcgggtaccctgggaagaaatcatcctgcctcaggtgactatcagtctgggggtatttgttttcgggccggacagtaatttggaaccggccgatatacttcgccatgccgatgaagcgttatatttttccaaaaacaacggcagaaattgcagtactgtttgggagcctggtttaattgaaaatatgcccgatacggataaaagaataaccatgtaa

SEQ ID NO: 16432 - protein, 197 aa, Unknown
  Obtained from environmental sample
  DOMAIN (14)...(176): GGDEF domain
  misc_feature (1)..(197): Xaa is any amino acid
MSFMSYAIKNYLHYEYSLRDIKTGLYNHGFFISXLKEEVAQTKHSSYTSSVIVIDVDKFKSFNDTYGHLAGDQVLEKLAQVIRQGVRNKDVPSRFGGEEFTVMLSHADTAIAKKVAERLRTNVEKMRVPWEEIILPQVTISLGVFVFGPDSNLEPADILRHADEALYFSKNNGRNCSTVWEPGLIENMPDTDKRITM

SEQ ID NO: 16433 - DNA, 888 bp, Unknown
  Obtained from environmental sample
  misc_feature (1)..(888): n is a, c, g, or t
gtgcgggagcgcttctccgcgatctacggaccgctcggccttgacgccggaacgctcggcgaggtattgaacgatctcgacgcccgcctaagctcctccgccaaccaccccggcaagttcagggacttggtcgtggcggccggagaagacatcaattgccgcctcttcgccgcatacttgaacaccgtcggcgtccaagctaaatacgtaaacccgaaagacgtcggcctaactgtgacccccatcttcggtgacgcgcagccgctcccggaggcggcggcgaatctggcggcgctcaaaggcctatgcgccgaaaccgtagtcgtcttccccggcttcttcggctacacgcccgacggcgaggtggccaccttcagccgcggcggctccgacctgacaggcgccatcctggccgaggccgtggacgccgacgagtacgaaaactggacggacgtggacggcatcttcagcgcccaccccctaatggtcaattcgccaaaacaaatatccgcgctgacttacaaagagatgcgggaactctcctacatcggcttcaacgtcctccacgaggaggccgtgcgcccggtgatgagaaagaagatccctatcaggctgcgcaacacgaacaacatcgacaacaggggaacgttgattgtctccgaaagactgcccgaggtgcgcgacatcgtangcatagcctccggcggcgggtactgcagcttcaccctccaaaagtttttgatgaacagggaaaaaggcttcggaagacgcctgctgtcgatattcgaggatatgcacctctcctacgaacactgcccctccggtgtcgacaatatatcggtcatccttgaccaaaggcagctaaagcccgagacggtaacagcgtaa

SEQ ID NO: 16434 - protein, 295 aa, Unknown
  Obtained from environmental sample
  DOMAIN (1)...(207): Amino acid kinase family
  misc_feature (1)..(295): Xaa is any amino acid
MRERFSAIYGPLGLDAGTLGEVLNDLDARLSSSANHPGKFRDLVVAAGEDINCRLFAAYLNTVGVQAKYVNPKDVGLTVTPIFGDAQPLPEAAANLAALKGLCAETVVVFPGFFGYTPDGEVATFSRGGSDLTGAILAEAVDADEYENWTDVDGIFSAHPLMVNSPKQISALTYKEMRELSYIGFNVLHEEAVRPVMRKKIPIRLRNTNNIDNRGTLIVSERLPEVRDIVXIASGGGYCSFTLQKFLMNREKGFGRRLLSIFEDMHLSYEHCPSGVDNISVILDQRQLKPETVTA

SEQ ID NO: 16435 - DNA, 756 bp, Unknown
  Obtained from environmental sample
  misc_feature (1)..(756): n is a, c, g, or t
atggacggcggccgcaaagggattttcacgagccttttgtattggggagagaacgacgcctacaataccgagcagcggcagatagccgcaaggcggatactggttgatgccgccatgaaggagaacggcattgccctggatgagctgtatcgcacggttgaaataaagggtcttgaaggaactgacctatacagggtttcagacggcaaaataactgtggacgatctcctttacatcatgcggggatacgaaaacgaagaaacccgcaaggctatcgaatacgggaacctaagcaatgccaccgagcgcggcgatgttgaaaaacgcgccggcatcccggaagagatagaagcatttgccaatattgcacacggccgcatgatggcgatattaagctttgcaaaagattattttgccaaagaggagaataaaaaattcttaaagcttgccgaggccataggagcggactacgaccgcaacggcgagcggttaaacaaggccatgatcgatatgttcaaccggcctatgtggagagttgaaaactatgtgcccatgaaccggcgggagcaatccggcggcgtcaatgagaaccgggtaattgaagaccttttgggtattaccggcgccgggcaaaagtgggtgggccgtggattcactgaaaagcggatcattatatcgccttaccgccaggcgccgatagagctggggttatacaagacctgggcgcgtagcgttaccgataccgaacacctatag

SEQ ID NO: 16436 - protein, 251 aa, Unknown
  Obtained from environmental sample
  misc_feature (1)..(251): Xaa is any amino acid
MDGGRKGIFTSLLYWGENDAYNTEQRQIAARRILVDAAMKENGIALDELYRTVEIKGLEGTDLYRVSDGKITVDDLLYIMRGYENEETRKAIEYGNLSNATERGDVEKRAGIPEEIEAFANIAHGRMMAILSFAKDYFAKEENKKFLKLAEAIGADYDRNGERLNKAMIDMFNRPMWRVENYVPMNRREQSGGVNENRVIEDLLGITGAGQKWVGRGFTEKRIIISPYRQAPIELGLYKTWARSVTDTEHL

SEQ ID NO: 16437 - DNA, 795 bp, Unknown
  Obtained from environmental sample
  misc_feature (1)..(795): n is a, c, g, or t
atgtacggcgacgaactgcgtttaaaacaggtgttaaccaatcttttgaccaacgccatcaaatacacaagcgagggaagcattacgctgaaggtgcgcggcaacatcgaggacaacgtaataatgctgatggaatacgccgttattgatacaggctcaggcatacccaaagacagtattaaaaacatttttcttgactattctctggttgacgataaagcgaaccgccgcgttgacggcacgggattaggcctgcccattaccaaaagactggtagacttaatggacggcagaatcgacgttgaaagcgaggaaggcaaaggctcgacattcaaattcagcataatgcagggctatgttgacgacacggttcttggaaaagatatcgcggaaaaactccgcaaattccaatacattgacgacaaacgcgccgccacccaaaaaattgtgagaatagatttaagttacgccagagtgcttgtggtagacgacatgcagaccaatcttgacgtagcatcgggactcttgcgcaaatacaaactgcaagtagactgcgtaaacaacggaaaggccgcggttgaaataatccgggaaggggcgcccgtttacaacgcgatattcatggatcacatgatgcccgaaatggacggcatagaaacggtggacaggatccgcgctttaggcaccgaatacgcaaaaaaaatcccgatcatcgcccttacagctaatgccattcacggaaccgaaaagatgttcttcgcccacgattttcaggattttgaaccaagcccatag

SEQ ID NO: 16438 - protein, 264 aa, Unknown
  Obtained from environmental sample
  DOMAIN (157)...(264): Response regulator receiver domain
  misc_feature (1)..(264): Xaa is any amino acid
MYGDELRLKQVLTNLLTNAIKYTSEGSITLKVRGNIEDNVIMLMEYAVIDTGSGIPKDSIKNIFLDYSLVDDKANRRVDGTGLGLPITKRLVDLMDGRIDVESEEGKGSTFKFSIMQGYVDDTVLGKDIAEKLRKFQYIDDKRAATQKIVRIDLSYARVLVVDDMQTNLDVASGLLRKYKLQVDCVNNGKAAVEIIREGAPVYNAIFMDHMMPEMDGIETVDRIRALGTEYAKKIPIIALTANAIHGTEKMFFAHDFQDFEPSP

SEQ ID NO: 16439 - DNA, 915 bp, Unknown
  Obtained from environmental sample
  misc_feature (1)..(915): n is a, c, g, or t
atgaagcgaggagtggccgaagccgcttatccccggccaggattcctggaagtccctcacgcgcgaggacttggaaatgctgttcgaagtgtagggaaaggagagagttacgagttttccaaggattcctctatgacgcgctggtttgtttcccgccatcccggggccgttgaatgggccgctcggcgggagctttccgtggatcggtttgtgccgcatctggatgtgcatgatgtacagagcggtgacttggtttacggtacgctgcctgttgaactggcggcggaagtctgtcgccggggggcgcgattttttgccctgtgcgtgaacgtgacggaggaacaaagagggcgtaatctgccggcggatgaacttttccggttgaacgcccggctgcgggaatatcatgtcgctgcattggaggagacaatgacccctgattttgatgtacatgtctgcctggtttccgatcaggcagcgcccaatttgctgcctgttctggatgagcaattcgcgccgaaaaacaaacgtatcctcatgttgatcacgcgaaagatgaaaaaaaatgccgatgggttgacggaggtgttcaatagatggggcttcagcgtggaaaaagtttttattaaagacccgtacgattttgatgctattcaggctgagctgattaattttcttgacaaacctgagaataaaaaagccgttctcaatgcgaccggcggtacaaaaattatgaccttggccgctcattccgccttttctatggcagaactgccgactatctacgtcagagaaaacgacnattccctcattnatatgccccacaggcatactgaaaaaaaagcacagagcgttgaatttaagtataagttacgccctgaggattataataaacgcccatggatatactattaa

SEQ ID NO: 16440 - protein, 304 aa, Unknown
  Obtained from environmental sample
  misc_feature (1)..(304): Xaa is any amino acid
MKRGVAEAAYPRPGFLEVPHARGLGNAVRSVGKGESYEFSKDSSMTRWFVSRHPGAVEWAARRELSVDRFVPHLDVHDVQSGDLVYGTLPVELAAEVCRRGARFFALCVNVTEEQRGRNLPADELFRLNARLREYHVAALEETMTPDFDVHVCLVSDQAAPNLLPVLDEQFAPKNKRILMLITRKMKKNADGLTEVFNRWGFSVEKVFIKDPYDFDAIQAELINFLDKPENKKAVLNATGGTKIMTLAAHSAFSMAELPTIYVRENDXSLIXMPHRHTEKKAQSVEFKYKLRPEDYNKRPWIYY

SEQ ID NO: 16441 - DNA, 429 bp, Unknown
  Obtained from environmental sample
  misc_feature (1)..(429): n is a, c, g, or t
atgtattcactgggttacttaagattcgatggatggggagaacttatatggaataaccccgcttatattcaggaagtaagaaaccgtgacatcaggctctatcctctttatccggaatcagccccgtttgtaaaattcggcggattcctgcttcagcgcgacgcggctttggaaggcggagactttatcgtttatttcaaagacgtaagaattatctatgataaagctgttcttgatacagagaaagacatagacgacgaagctttatgggaaattatttttgaccgcgaaacagcccgcaaaacatgggaaatggaaaagtttggtcagacacaggttcttcgttatttggaacttaacaaacaggcaaaagaacttccgttcgacagtcccgacaggcagcagcggcagtctgtaagcgacaaatag

SEQ ID NO: 16442 - protein, 142 aa, Unknown
  Obtained from environmental sample
  DOMAIN (1)...(82): Flagellar filament outer layer protein FlaA
  misc_feature (1)..(142): Xaa is any amino acid
MYSLGYLRFDGWGELIWNNPAYIQEVRNRDIRLYPLYPESAPFVKFGGFLLQRDAALEGGDFIVYFKDVRIIYDKAVLDTEKDIDDEALWEIIFDRETARKTWEMEKFGQTQVLRYLELNKQAKELPFDSPDRQQRQSVSDK

SEQ ID NO: 16443 - DNA, 372 bp, Unknown
  Obtained from environmental sample
  misc_feature (1)..(372): n is a, c, g, or t
atgaaaaaaataagaaatgacacaaaggcagcaaataacttctcacctccggcccaggaagccatgcataaagaatacgaaaaatacagtgaaatacgtcataatatcgttaatgaaataaaagaacgcatagaaaaactgcttaaagagattaattccaaccctgttataagcggccgtataaagaatttttccagttattacggaaaatacctgcgcctgttaaaaagcgacgtanaaaacccggtaattacagacctgttggggataaggattatctgcccctttatcgaggatttgggcgttatagaggaattaattaaaaataattttaacattctggaaaccgaaagaagggacattancatttaa

SEQ ID NO: 16444 - protein, 123 aa, Unknown
  Obtained from environmental sample
  misc_feature (1)..(123): Xaa is any amino acid
MKKIRNDTKAANNFSPPAQEAMHKEYEKYSEIRHNIVNEIKERIEKLLKEINSNPVISGRIKNFSSYYGKYLRLLKSDVXNPVITDLLGIRIICPFIEDLGVIEELIKNNFNILETERRDIXI

SEQ ID NO: 16445 - DNA, 792 bp, Unknown
  Obtained from environmental sample
  misc_feature (1)..(792): n is a, c, g, or t
gtgatcgacgagcacatgtttattttatttggaactggcgcgaatgggaaaagtacatttcttaataccattatgaacctgttaggcgattatgccattgcaacgcctacggaaacgtttatgaggaaaattggagattatatctctaatgatatagcccgattgagagggacccgatttgttactactacggaagcggaacatgggcggcggctgtctgaaccgctgattaaacagataaccggaaatgataaaatgactgcccgcttcctttacggagaattttttaattttattcctactttcaagatttttatggctacgaaccacaagccggttataaagggaactgaccacggtatatggcggcggattaaacttgtgccgttcattacgcggattgaggaagataaacaggacaaacatcttgaacaaaagctaatggaagaaagccctggaattttgaactggctaattgaaggttcaaagcggtggtgtacggaagggttaaaaacgccctctgttattatcagggctaccgatgaataccgtggagaaatggacgttatagggaacttcatcaaagagcgatgtctccagggtgagggttattctatcaaggcgagggagctttttaagtgctatcaggactggtgtgatgaccacaatgagaataccgtaagtgaacggtttttcggcttgaggctcaaggaaatggggcttgagcaaaaacgtctgaacgatgggcggtattggcaggggattgggtttacaatgacggataacagataa

SEQ ID NO: 16446 - protein, 263 aa, Unknown
  Obtained from environmental sample
  DOMAIN (1)...(242): Poxvirus D5 protein-like
  misc_feature (1)..(263): Xaa is any amino acid
MIDEHMFILFGTGANGKSTFLNTIMNLLGDYAIATPTETFMRKIGDYISNDIARLRGTRFVTTTEAEHGRRLSEPLIKQITGNDKMTARFLYGEFFNFIPTFKIFMATNHKPVIKGTDHGIWRRIKLVPFITRIEEDKQDKHLEQKLMEESPGILNWLIEGSKRWCTEGLKTPSVIIRATDEYRGEMDVIGNFIKERCLQGEGYSIKARELFKCYQDWCDDHNENTVSERFFGLRLKEMGLEQKRLNDGRYWQGIGFTMTDNR

SEQ ID NO: 16447 - DNA, 876 bp, Unknown
  Obtained from environmental sample
  misc_feature (1)..(876): n is a, c, g, or t
atggatcagattggccgagacaacggatctatggcggaaacctacaacctgttcgcccataccctccccgactttggcatatcaacaacctttgtagacggcggcgatccaaaaaattttgaaaaagccattaacaaagataccagggctctgtttgtggaatcgctgggcaacccccattccacgattgttgacatggacgcgctggcggcaatcgcccacaaaaacggcatcccgcttattgtggacaataccttctcgccgccatgcctgttccgtccttttgagcatggcgcggacgttgtcgtccattcagccaccaaattcatcggtggccacggaacggctataggcggcgtgatagtagactcgggaaaattcaactgggcggcgaatgacaaattccccggcctttccaaaccgaaccccagctatcacggcgttgtgcttaccgatgcggtggggaatctcgcctatatcataaagatccgggttacgcttatgagggacacgggcgcgaccgtaagccccttccattccttccttttcctgcaagggcttgaaaccctgtccctgcgggttgaacgccatgtggcgaacgccctcaaagtggtggaatatctgcgcaagcacccgaaagtagaatccgtaaaccacccttccctgccgacccatccggataacgccctgtataaaaagtattttccgaacggggcgggatcaattttcacctttgagattaaaggaggcgcgcaagaagcgcgaaactttatcgacaaactggaactgcattcccttctcgcaaatgtggcgggactccaaatcgctggttatacatcccgcgagcacgacacattcacagctttcccgcgatga

SEQ ID NO: 16448 - protein, 291 aa, Unknown
  Obtained from environmental sample
  DOMAIN (2)...(290): Cys/Met metabolism PLP-dependent enzyme
  misc_feature (1)..(291): Xaa is any amino acid
MDQIGRDNGSMAETYNLFAHTLPDFGISTTFVDGGDPKNFEKAINKDTRALFVESLGNPHSTIVDMDALAAIAHKNGIPLIVDNTFSPPCLFRPFEHGADVVVHSATKFIGGHGTAIGGVIVDSGKFNWAANDKFPGLSKPNPSYHGVVLTDAVGNLAYIIKIRVTLMRDTGATVSPFHSFLFLQGLETLSLRVERHVANALKVVEYLRKHPKVESVNHPSLPTHPDNALYKKYFPNGAGSIFTFEIKGGAQEARNFIDKLELHSLLANVAGLQIAGYTSREHDTFTAFPR

SEQ ID NO: 16449 - DNA, 567 bp, Unknown
  Obtained from environmental sample
  misc_feature (1)..(567): n is a, c, g, or t
atgagcgcggcaattgagataaaggggctgtgcgccggatacggcggcggcgcaatcaaagattgcgatgatgttatacgcaatataaatttcagggtggaaaaaggggaatgtctctgcgtactggggccgaacggctgcggcaaaagcaccctgctaaaatcaatagccggaattctaaattaccgcggttccgtcctggttgacggcggcgatatttccgccgttccccgcaaagagcttgcgcgaaaaatcgccctgcttggccagaatatgcaggtattttttccctacacggtatatgaaaccgtttcaatggggcgctacgcctggtcgcgggggattttaaaaaatctttccgcgcaggacaaaacaattattaatgacactctcaagaaacttgacctctgggacataaaagagcgcatgattgatgaactgagcggcggaactttacagcgtgtttttctggcaaaaacgatggcgcagaccccccgcctgattctgctggacgagccggcgaatcatcttgatctgaaacacccagatcgcgctttggactattaa

SEQ ID NO: 16450 - protein, 188 aa, Unknown
  Obtained from environmental sample
  DOMAIN (36)...(188): ABC transporter
  misc_feature (1)..(188): Xaa is any amino acid
MSAAIEIKGLCAGYGGGAIKDCDDVIRNINFRVEKGECLCVLGPNGCGKSTLLKSIAGILNYRGSVLVDGGDISAVPRKELARKIALLGQNMQVFFPYTVYETVSMGRYAWSRGILKNLSAQDKTIINDTLKKLDLWDIKERMIDELSGGTLQRVFLAKTMAQTPRLILLDEPANHLDLKHPDRALDY

SEQ ID NO: 16451 - DNA, 339 bp, Unknown
  Obtained from environmental sample
  misc_feature (1)..(339): n is a, c, g, or t
ttgacgacgatcaggcgcaatcggcgggcgtggaaacaaaaagggctgagaaaaaaattactgccattgtgcagtgtattgacaggagcggcggtagcgttaagcggcgttatcggctttgttgaccttatcgccccgcacgcggcgcgaaaaattaccggctcgcggcacatgtatttaattcccatgtcgttcttcctcggcggctcattaatggtaataaccgatttaatcgccagaacaatcatttcgccatcggaactgccggtgggggcaatcaccgcccttatcggggcgccgttttttgcctgggtgtatttcagggggcgcggacgatga

SEQ ID NO: 16452 - protein, 112 aa, Unknown
  Obtained from environmental sample
  DOMAIN (1)...(108): FecCD transport family
  misc_feature (1)..(112): Xaa is any amino acid
MTTIRRNRRAWKQKGLRKKLLPLCSVLTGAAVALSGVIGFVDLIAPHAARKITGSRHMYLIPMSFFLGGSLMVITDLIARTIISPSELPVGAITALIGAPFFAWVYFRGRGR

SEQ ID NO: 16453 - DNA, 807 bp, Unknown
  Obtained from environmental sample
  misc_feature (1)..(807): n is a, c, g, or t
gtggaactgggaaatcttgatgaacagctttcggtagataatttagttgaaaccgcttccggagacgcttttgaaggttttgatcccggaagcggtataggtttagaaaaagataccggtgaagctggcggagataatattgattcccttgatgatatagatgatttttctttccctgatttggatgttggcgaatcgccgaaagataaaaaacctgccgcggccggtaaagccgccagaaaaaaggtcaagagaaaaggcgagatacctgtccccgaaaaagaagatgatatagaacttaacaacagtgaacttcgctatttacaggaaactctggccggatatcctcttaatcttcgtatagcctgcgaggaaataatcgcggaacagagtgttcgtccggaacagatggtaaggctgataaggaatcttatccgcggcgctcctgcgagagaaaccgccgtgctggccagcgaaatactggataggccgattaccgtaccaagaagctttgaaaaaagctcagtcgaggcgctggaagccgagaaatcaagttttgcctatatctttttccacaatttccttcccgtactgcggctcgttactttagtagcaattgtagctggctctattttctatcttacctataaatttgtgtatataccccttaaagcggaatccatctataaaatgggttatgagcggataccagagggcgaatacgagcgcgccaatgaacgttttaacgaagcctttaatatacaccgcaagaaagactggttctataaatacgcagacgctttntaa

SEQ ID NO: 16454 - protein, 268 aa, Unknown
  Obtained from environmental sample
  misc_feature (1)..(268): Xaa is any amino acid
MELGNLDEQLSVDNLVETASGDAFEGFDPGSGIGLEKDTGEAGGDNIDSLDDIDDFSFPDLDVGESPKDKKPAAAGKAARKKVKRKGEIPVPEKEDDIELNNSELRYLQETLAGYPLNLRIACEEIIAEQSVRPEQMVRLIRNLIRGAPARETAVLASEILDRPITVPRSFEKSSVEALEAEKSSFAYIFFHNFLPVLRLVTLVAIVAGSIFYLTYKFVYIPLKAESIYKMGYERIPEGEYERANERFNEAFNIHRKKDWFYKYADAX

SEQ ID NO: 16455 - DNA, 558 bp, Unknown
  Obtained from environmental sample
  misc_feature (1)..(558): n is a, c, g, or t
atgggggattttgaggcggactttgtcaccctatccccctatatgggcatggactccattgaaccctggctttcctatgccgacagcgcaggcaagggggcctttgtgctgatgcgaaccagcaataaaggtatgcgtgattttgagtaccttgaaataacgcccgacaaaagacgcctgtaccacgcggtcggagacaaacttgccgaacttgccgccgcgcattccggtatgtacggttatggggcatttggcgcggtcgttggctgtaccgagcgggaagaagccgctgaaattcgcgcaaaatattcccggttgtttttccttattcccggttatggggcgcagggcggcgcggcggatgacgcagccctgctgttacgcgaaggaaacggcggcgtggtcaatgcctcgcgatccatactcaaggcatggagtgccgaaattgccgcttccggcggcgatgaagcggcggcaaccaattcattcgcggcggaggcggcccgcggggcggcgcttgcaatgcgtgacgcgataagggcggcggtaaaaaaatga

SEQ ID NO: 16456 - protein, 185 aa, Unknown
  Obtained from environmental sample
  misc_feature (1)..(185): Xaa is any amino acid
MGDFEADFVTLSPYMGMDSIEPWLSYADSAGKGAFVLMRTSNKGMRDFEYLEITPDKRRLYHAVGDKLAELAAAHSGMYGYGAFGAVVGCTEREEAAEIRAKYSRLFFLIPGYGAQGGAADDAALLLREGNGGVVNASRSILKAWSAEIAASGGDEAAATNSFAAEAARGAALAMRDAIRAAVKK

SEQ ID NO: 16457 - DNA, 543 bp, Unknown
  Obtained from environmental sample
  misc_feature (1)..(543): n is a, c, g, or t
atgccgcccttaaggcagaggctggaagacattccggcgctcgtcagccattttcttgctgatgcntgcggcaggcacggcaaaccttccatgagcctgacccaagaagccatggacgcgctgatgtcctattctttccccggcaacgtgcgcgaactggagaacctcatggagcgcttcgccgccttgggctcgggcggggccctagacaaagacgtgttccccgataacgtcctccaagaggctgaaaacaaagggcgcggccactctggaggcgcggcgatttccgccagcacacaagaacaccatgcaggcatccctagcggggggctggacttggacgcatacctaaaatccaccaagggttattttgtgcaaaaggccctcgagctttgcggcgggaacaagacgaaggccgcccatctgctgggcatgggctacaggcccttgaaatacctgctagaagaagcgggcggggcggacgcgctgcccaaggaaccccctgcgccgcaggactttccgcttggcaaaactttggcctaa

SEQ ID NO: 16458 - protein, 180 aa, Unknown
  Obtained from environmental sample
  DOMAIN (1)...(54): Sigma-54 interaction domain
  misc_feature (1)..(180): Xaa is any amino acid
MPPLRQRLEDIPALVSHFLADACGRHGKPSMSLTQEAMDALMSYSFPGNVRELENLMERFAALGSGGALDKDVFPDNVLQEAENKGRGHSGGAAISASTQEHHAGIPSGGLDLDAYLKSTKGYFVQKALELCGGNKTKAAHLLGMGYRPLKYLLEEAGGADALPKEPPAPQDFPLGKTLA

SEQ ID NO: 16459 - DNA, 747 bp, Unknown
  Obtained from environmental sample
  misc_feature (1)..(747): n is a, c, g, or t
gtgatctgtaatatgttcgcctatgaccaacagatcgccgggagcggttatgacggaactcaaagcaacaccttttttctcaatgagattcaccgccccgccgtccgccagaatagttccgggctcaagctcgcttgccttgatcttcgtatcggcgctcatcgacctgaagctgtatatggtcccgtccggaccgaccaacttatagtcgctcggatcgtagaccgggtctccgccgttaaacgtctgattcgtcttaatgagcatataagccccgtcaaacgcccagctcttgtcggttttaacgctttccatcattgcgttgctctttatggagtcgatggttattctcgagttattattgtatcgagccgttccctgcacctcgtccgccacgcctttggcgctgccttcaagcagcttacgcgtgttgaactccgtggtgttcgcgatccggtcgatctcgtaccgcagctgtgtgacttcagcttgcagttccgcccggtcggcgtccgtgttggtgtcgttagcggattgcaccgacagttcgcgcattctctgcagaatgtcctgcgtctccgccagcgccccttcggccgtctggatcatggagatggtgtcttgggcgtttctcgaagccatggcgagaccgcggacttgaccccgcattttctcggatatggcgagtccggccgcgtcgtcgccggctcggttgatgcgatagccgctggagagcttttccattga

SEQ ID NO: 16460 - protein, 248 aa, Unknown
  Obtained from environmental sample
  misc_feature (1)..(248): Xaa is any amino acid
MICNMFAYDQQIAGSGYDGTQSNTFFLNEIHRPAVRQNSSGLKLACLDLRIGAHRPEAVYGPVRTDQLIVARIVDRVSAVKRLIRLNEHISPVKRPALVGFNAFHHCVALYGVDGYSRVIIVSSRSLHLVRHAFGAAFKQLTRVELRGVRDPVDLVPQLCDFSLQFRPVGVRVGVVSGLHRQFAHSLQNVLRLRQRPFGRLDHGDGVLGVSRSHGETADLTPHFLGYGESGRVVAGSVDAIAAGELFH

SEQ ID NO: 16461 - DNA, 369 bp, Unknown
  Obtained from environmental sample
  misc_feature (1)..(369): n is a, c, g, or t
ttgtcggttttaacgctttccatcattgcgttgctctttatggagtcgatggttattctcgagttattattgtatcgagccgttccctgcacctcgtccgccacgcctttggcgctgccttcaagcagcttacgcgtgttgaactccgtggtgttcgcgatccggtcgatctcgtaccgcagctgtgtgacttcagcttgcagttccgcccggtcggcgtccgtgttggtgtcgttagcggattgcaccgacagttcgcgcattctctgcagaatgtcctgcgtctccgccagcgccccttcggccgtctggatcatggagatggtgtcttgggcgtttctcgaagccatggcgagaccgcggacttga

SEQ ID NO: 16462 - protein, 122 aa, Unknown
  Obtained from environmental sample
  misc_feature (1)..(122): Xaa is any amino acid
MSVLTLSIIALLFMESMVILELLLYRAVPCTSSATPLALPSSSLRVLNSVVFAIRSISYRSCVTSACSSARSASVLVSLADCTDSSRILCRMSCVSASAPSAVWIMEMVSWAFLEAMARPRT

SEQ ID NO: 16463 - DNA, 642 bp, Unknown
  Obtained from environmental sample
  misc_feature (1)..(642): n is a, c, g, or t
gtgaggaagatgctggacgaagcgggtcttaatgaagctacgattaccgcatccaatgatctggatgaatcaattattgaaactctggtgaatgccggcgttccggttgatgtttggggcgtgggaacacggctggttaccgggggcgatgattccgcttttaccggcgtatacaagatgacggcctgcgaagataaggacgggcaaatggcgccggtgatgaaattttccgacaatccggaaaaaactaccaaccccggccccaagcaggtgtggcggataaaagacagccatggcgccgctcttgccgacgtgctggctctggacagcgccgccgatgccgaaataattgaattagggtaccggtatcgtttctggcatccttcggcggactaccgtcacttttaccatatcacggagtgggttccgcagccgcttctgaaaaaatacattgcagacggcgaatcctgcggccctcggccctcgctgaatgaaattcgcgcccattccgccgccgaccttgaaacttttgattctacctataaacggcggcttaacccccatgtgtacaaggtatccattaccgaaaaactccgcgacctcaagctggagctgataaaaagccatttgggtgatttgtaa

SEQ ID NO: 16464 - protein, 213 aa, Unknown
  Obtained from environmental sample
  misc_feature (1)..(213): Xaa is any amino acid
MRKMLDEAGLNEATITASNDLDESIIETLVNAGVPVDVWGVGTRLVTGGDDSAFTGVYKMTACEDKDGQMAPVMKFSDNPEKTTNPGPKQVWRIKDSHGAALADVLALDSAADAEIIELGYRYRFWHPSADYRHFYHITEWVPQPLLKKYIADGESCGPRPSLNEIRAHSAADLETFDSTYKRRLNPHVYKVSITEKLRDLKLELIKSHLGDL

SEQ ID NO: 16465 - DNA, 555 bp, Unknown
  Obtained from environmental sample
  misc_feature (1)..(555): n is a, c, g, or t
atgaccacggaggaaatgcttcgcctcaaaggtacattcatggcgccttatatgcagctcgccactgctcttatcgggaaaacccgggaaggcggcggcaatatgttccgccatcagtttgataccatggctactcttatagactacgggtacatagactcagttctattgaaggcgtcgatagtgcatgaccttttcgaagacgtgcctgattttaaccgcaacctccttttgcaagtagactacgaaagcgccgccgtttatgaacttgtaatggaagttacgcgccttcaggaagaaaccaagccgcaattccttacccgcattctggaaacaggctcgcgccaggccaaggtgctgaaagtagcagatcgaatttctaacatgattgcccttggctttgttgtgaataccgatttcatccaccgctacaccgaagagaccgtgcagttcatttttcccatagcggagcaagtggacaaatccatgctttccgagcttaaatccctggtttgttccaggaaaaaatacctttcggcaatcattccaaaataa

SEQ ID NO: 16466 - protein, 184 aa, Unknown
  Obtained from environmental sample
  misc_feature (1)..(184): Xaa is any amino acid
MTTEEMLRLKGTFMAPYMQLATALIGKTREGGGNMFRHQFDTMATLIDYGYIDSVLLKASIVHDLFEDVPDFNRNLLLQVDYESAAVYELVMEVTRLQEETKPQFLTRILETGSRQAKVLKVADRISNMIALGFVVNTDFIHRYTEETVQFIFPIAEQVDKSMLSELKSLVCSRKKYLSAIIPK

SEQ ID NO: 16467 - DNA, 810 bp, Unknown
  Obtained from environmental sample
  misc_feature (1)..(810): n is a, c, g, or t
atggccgccagggttccgtttttaacaacattttccgctcttggggcaagccgcaggttcggtatcacgtccaacaaccgggacaaaaccatccgccgcctgaccacaggcaagcgcatcaacatggcttcggaggacgcggccggcttcgccatcgccaacagggtgggcgccgacatcagggtctccacgcaggcccgccgcaacgcgcaggacggcctcgcctacatgcaggtcgcggacggcgcccttgaggaagtcaccgcgctgctcacccgcgccgccgaactggcgcagcaggcgcagacgggcaccatcagctccaccaaccgcctcgccctggacctcgagttccaggtcatatccgacgccatcaagaacgtctccgacaacgcggtgttcaactcgcagtcggtgttccgctccgaaagcatctacgtcgccgtcgccagcttcgagaagatcaacttcaccatcggcacgatggagggcaacatcagcctctccagcctgaacatcaaggacaccaccgccgccgccagcgcacagcagaagctggaccagctgatccaggacgtctccatgcagcgcgccacgatcggctcccgcatgcagtacatgaacacgatatccaacacgcttggcatccaggtggagaacttcaccgcggcgaagagccagatagaggacgccaacatcgcggacgaggtcatcagcctgaccaagttccagattctgggtcagtccggcaccagcgcgctggcgcagtccaaccaggccgcccagctcatgctcggcctgctccgctag

SEQ ID NO: 16468 - protein, 269 aa, Unknown
  Obtained from environmental sample
  DOMAIN (176)...(247): Bacterial flagellin C-terminus
  misc_feature (1)..(269): Xaa is any amino acid
MAARVPFLTTFSALGASRRFGITSNNRDKTIRRLTTGKRINMASEDAAGFAIANRVGADIRVSTQARRNAQDGLAYMQVADGALEEVTALLTRAAELAQQAQTGTISSTNRLALDLEFQVISDAIKNVSDNAVFNSQSVFRSESIYVAVASFEKINFTIGTMEGNISLSSLNIKDTTAAASAQQKLDQLIQDVSMQRATIGSRMQYMNTISNTLGIQVENFTAAKSQIEDANIADEVISLTKFQILGQSGTSALAQSNQAAQLMLGLLR

SEQ ID NO: 16469 - DNA, 831 bp, Unknown
  Obtained from environmental sample
  misc_feature (1)..(831): n is a, c, g, or t
gtgcatcacggaggatgcatggccgcagggtcaatactgaacaacatttcggccatcggtgcgagccgccagttgggcataacgcagggtgggctggacaagaccattcagcgcctcactactggcagacgtatcaaccaagcggccgacgacgcggcgggtcttgccatcagcaacaggctgggcgcagacatcagggtctccgcgcaggctaggcgcaacgcgctggacggcatagcttatctagccgtcgccgacggctccctagaggaagtcacccaattgctcacacgcggggccgagctggcgcagcaggccaagacgggcaccatcagctccaccaaccgcgaggcgctcaacctcgagttccaagtcatcatcgacgccatcaagaacgtcgccgacaacgccgtgttcaactcgcagtccgtgttccgcgacgaccaaatattcgtcgccgtggccagtttctccgacatcgacttcaccatcggcaccatgcagggcgacatgagcctagagagcccgccgctgaacgtcacggatcacagcaacgcggactgggctggcaagaggctagaccaattaattcaggacgtgtccatgcagcgcgccaccatcggctcgcgtatgcagtacctgaacaccatcgccaacacgctcggcatacagattgagaacttcaccgcggcaagtagccagataagggacgccaacatagctgacgaggtcatcagcctgaccaagttccagatactgngccagtccggcaccagtgccctaggccaggcccatcaagccgcccagctcatgctccaactgcttaggtag

SEQ ID NO: 16470 - protein, 276 aa, Unknown
  Obtained from environmental sample
  DOMAIN (183)...(254): Bacterial flagellin C-terminus
  misc_feature (1)..(276): Xaa is any amino acid
MHHGGCMAAGSILNNISAIGASRQLGITQGGLDKTIQRLTTGRRINQAADDAAGLAISNRLGADIRVSAQARRNALDGIAYLAVADGSLEEVTQLLTRGAELAQQAKTGTISSTNREALNLEFQVIIDAIKNVADNAVFNSQSVFRDDQIFVAVASFSDIDFTIGTMQGDMSLESPPLNVTDHSNADWAGKRLDQLIQDVSMQRATIGSRMQYLNTIANTLGIQIENFTAASSQIRDANIADEVISLTKFQILXQSGTSALGQAHQAAQLMLQLLR

SEQ ID NO: 16471 - DNA, 570 bp, Unknown
  Obtained from environmental sample
  misc_feature (1)..(570): n is a, c, g, or t
gtgtttggcaaaactcaagattccaattatacgccgtttaatgtccggttttttggtaaaaaaatcgatttttttcgttttcagtcaagcaaaaccgctagttcacacccatatagagtaattaaacttttggaggttgttatgaaaaaactttactttttgtttatctttgttttggctttgtccggctgttcggtttccgagtccggaacaacggaaacgaaggatgagggggtcattaccttgatgacgtggaatattaataatttatttgacggcgaggataatggctttgaatacgatngattcctgcaatcggcgggttggtcatcggaaaaatacatgggcaggataaataccatatctgacgcgattggcaggttaaatccccaaccggatattctgatgtttcaagaaattgaatctcttgtaatccttgaagacctagcgtcttcactgccaaatgcgtattcatggagtcattttgccaataattacggggcggcgagtaggacttggataatgagccgcctacccctgactgaaacaaaacccatttcatacccttga

SEQ ID NO: 16472 - protein, 189 aa, Unknown
  Obtained from environmental sample
  misc_feature (1)..(189): Xaa is any amino acid
MFGKTQDSNYTPFNVRFFGKKIDFFRFQSSKTASSHPYRVIKLLEVVMKKLYFLFIFVLALSGCSVSESGTTETKDEGVITLMTWNINNLFDGEDNGFEYDXFLQSAGWSSEKYMGRINTISDAIGRLNPQPDILMFQEIESLVILEDLASSLPNAYSWSHFANNYGAASRTWIMSRLPLTETKPISYP

SEQ ID NO: 16473 - DNA, 705 bp, Unknown
  Obtained from environmental sample
  misc_feature (1)..(705): n is a, c, g, or t
atgttagccaccgcatattttgaggaggaaaactgggaaaaagctatgccggtatatgaaaatctcacagaacaaatttctttaaataaaaacataaagggtatcgataattttgaagtttttctgcggtacggtctttcggcgaaaaaactcaatatgatggaacaggcatacaagggcttttctacggcaagaacctacaggatggataattttgaagtaaactttgaattaggcacccttgagtttgaaagaaaaaattatgaaaaagcgattcagcttttacagcaggcgcgtatccaagaacccgataacccagccgttttacgcactttggggcactctcttttcaggataaaaaaaccaaaagaagcgatgaactttatccgcaaagcgatagatctcgcgcctgatgacaaggaatcgctttatactctggctgaatgttatcaagaagcaaatcaaatagaacaggctttgcgcatttataaccacctgcgcgccgaccccaatatggggccgacttgctgtctcgccgctggaaacattcatctggacacaagacagtacgaattggcgattcaggattttgaaatcggtttaaggcataccaatataaaacctgaaactataaccgaactgcgctacaaacttgccacaacgctgattaagatgatgatatcggcnaggcgatttcacatttaa

SEQ ID NO: 16474 - protein, 234 aa, Unknown
  Obtained from environmental sample
  DOMAIN (106)...(139): Tetratricopeptide repeat
  misc_feature (1)..(234): Xaa is any amino acid
MLATAYFEEENWEKAMPVYENLTEQISLNKNIKGIDNFEVFLRYGLSAKKLNMMEQAYKGFSTARTYRMDNFEVNFELGTLEFERKNYEKAIQLLQQARIQEPDNPAVLRTLGHSLFRIKKPKEAMNFIRKAIDLAPDDKESLYTLAECYQEANQIEQALRIYNHLRADPNMGPTCCLAAGNIHLDTRQYELAIQDFEIGLRHTNIKPETITELRYKLATTLIKMMISARRFHI

SEQ ID NO: 16475 - DNA, 798 bp, Unknown
  Obtained from environmental sample
  misc_feature (1)..(798): n is a, c, g, or t
ttgaaanagatacgtanccctgatatagaagcggaagttttaccatttaccgccattatttttgaagccggcggaattgacaaattgaggatntacggaaaattcgccggaacatggccggagtttttggaaaattacaggaatttaacatcaatagatttaggggttagcggattaaccgaatttccgtcatggatacgcaatattgtttccttgcgttgtttgcgtttatctgttaatacagtattacccgattggatcggcgatatgcagtccctaacggagattcacatatatcatgacaacaaaaatttaaaaactttgccggacagcatcggtaaattaaagaatcttgccatactttatatcaattattcaactttagaaaaattgcctgacaccataggtaatttaatttcgttaaaggagatatatttgtacggtaatgtgaatttaatatctttaccggagagcataggcaatttaaaaaatcttgttaaattaaatatccatcattcagtattagaaaaattgcccgaaacaataggtaatttagtttccttaaaggaattaactctgtacggtaatcacaaattaacatctttacctgacagcatttggaacctgaaaaacctgactgaattcaatcttcaatttacacccttaaaagcattgcccgactgtattggaaatttacaaaatctgaccaaactttcattgcttggaaatgaaatagaaatattaccggacagtattggaaatcttggcaatctgcgcatgctttctctgcagaattga

SEQ ID NO: 16476 - protein, 265 aa, Unknown
  Obtained from environmental sample
  misc_feature (1)..(265): Xaa is any amino acid
MKXIRXPDIEAEVLPFTAIIFEAGGIDKLRXYGKFAGTWPEFLENYRNLTSIDLGVSGLTEFPSWIRNIVSLRCLRLSVNTVLPDWIGDMQSLTEIHIYHDNKNLKTLPDSIGKLKNLAILYINYSTLEKLPDTIGNLISLKEIYLYGNVNLISLPESIGNLKNLVKLNIHHSVLEKLPETIGNLVSLKELTLYGNHKLTSLPDSIWNLKNLTEFNLQFTPLKALPDCIGNLQNLTKLSLLGNEIEILPDSIGNLGNLRMLSLQN

SEQ ID NO: 16477 - DNA, 696 bp, Unknown
  Obtained from environmental sample
  misc_feature (1)..(696): n is a, c, g, or t
gtgtgtacggatagggaggcattgcggaaacttaccgttggaaaagttaaaaaattatctttggccctaaagtgcgaggtagagaagagtcttgctttttccgtgaggtacggagagctaaattgcgggcataaaagctgtggggccgcggccgcccttgtagttgaggaattctttgaagaactgcctaaaattagggttatattagtgcaggatttggatgccgcagtacgcggagacccggcggcgaaaagttccaacgaagtgattctttcatatcccggttttcaggcgatagccattcacagaatagcgcattttttctggacgcggcaggttcccataatcccaaggatgatgagtgagattgttcacggacggacgggcattgacattcatcccggcgcgcaaatagacgagtcattttttatcgatcacgggacgggcgttgtaataggggaaactaccgttataggaaaaaatgttaaactttatcagggggttacgcttggcgccctttcagtaaaaaaagaggaaagtaattgcaagcgccacccgaccattgaagacgacgtgacaatttacgctaacgccacgattcttggcggggagacaatcattggcagtggcagcattatcgggggcagcgtgtggataacgcagtccgtcccgccgggaagcaaggtgagccaatag

SEQ ID NO: 16478 - protein, 231 aa, Unknown
  Obtained from environmental sample
  misc_feature (1)..(231): Xaa is any amino acid
MCTDREALRKLTVGKVKKLSLALKCEVEKSLAFSVRYGELNCGHKSCGAAAALVVEEFFEELPKIRVILVQDLDAAVRGDPAAKSSNEVILSYPGFQAIAIHRIAHFFWTRQVPIIPRMMSEIVHGRTGIDIHPGAQIDESFFIDHGTGVVIGETTVIGKNVKLYQGVTLGALSVKKEESNCKRHPTIEDDVTIYANATILGGETIIGSGSIIGGSVWITQSVPPGSKVSQ

SEQ ID NO: 16479 - DNA, 756 bp, Unknown
  Obtained from environmental sample
  misc_feature (1)..(756): n is a, c, g, or t
ttgccgaaaaattcagaaaanctcggtttttcattttacgctacaaagggcacagcgagatttcttgaaagcaaaggttttaaggttgaatctgtgcataaaatatatgaatgtgcagacaataacacttctacattgctggacagcggaaaaataaactatatagtttccacttcggaaaagggcagagaccctgcctcagacgatgtgaaaatccgcagaaaggcgtgtgctaagggcataccgtgcttaacttccatagatacggcaaatgcgcttgcagatagtttgctttctgggtacaacgagataaataccgaacttgttgatataaataatttgagaagcgagcgtatgaaacttgagtttacaaaaatgcaaggttgcggcaacgattatatttacataaactgttttgatttaaacataaattcgccggagtcgctctcggttcttctatccgacaggcattacggcataggcggcgatggcgtggttttgattatgcgctccgatgttgccgatgcaaaaatgaggatgttcaacctagatggtagcgaaggtaaaatgtgcggaaatgcaatccgctgtgttgcgaaatatttatacgacaataacattatcagaaaattgcaaatgagcatagaaacgctcagcggcataaagaaactttatttaatcactcaaaatgggtttgtttcgtctgttaangttgatantgggcatgccgtgctggagccggaaagatacggntaa

SEQ ID NO: 16480 - protein, 251 aa, Unknown
  Obtained from environmental sample
  DOMAIN (3)...(85): MGS-like domain
  misc_feature (1)..(251): Xaa is any amino acid
MPKNSEXLGFSFYATKGTARFLESKGFKVESVHKIYECADNNTSTLLDSGKINYIVSTSEKGRDPASDDVKIRRKACAKGIPCLTSIDTANALADSLLSGYNEINTELVDINNLRSERMKLEFTKMQGCGNDYIYINCFDLNINSPESLSVLLSDRHYGIGGDGVVLIMRSDVADAKMRMFNLDGSEGKMCGNAIRCVAKYLYDNNIIRKLQMSIETLSGIKKLYLITQNGFVSSVXVDXGHAVLEPERYG

SEQ ID NO: 16481 - DNA, 573 bp, Unknown
  Obtained from environmental sample
  misc_feature (1)..(573): n is a, c, g, or t
gtgccctctctgcgtcctaatttttctcttgtaaaaaggcgtatcttgttgtataaaacaagtatggctggcaaacgaagcagtgtaaccaggacaatcggcatacttacggcaggcggggattgccccggactgaacgcggcgatacggggcgtctgccgggcggcgtatgatcgttatggcatgaatgtaataggcatatccgacggattccgggggcttattgaagaaagcgtcaggacgctcagaccggtagattttaacgggattttgaccagaggcgggaccatcctgggggcaagcagagagaagccgtttaaatctgacattaaagagtctgatgatattattggcgatnaggtagccgcggttattaaaaattacaagaagctcgatctggactgccttgtagtactggggggaaacggcaccaatagtacaggttaccgttttgtgcaggaggggctgaacgtgatcggcctaccaaaaacgattgacaacgatatagtaggcaccgaccgtactttcgggttttattcggcgctgaatatatgcaccgaaagcgatcgatag

SEQ ID NO: 16482 - protein, 190 aa, Unknown
  Obtained from environmental sample
  DOMAIN (31)...(190): Phosphofructokinase
  misc_feature (1)..(190): Xaa is any amino acid
MPSLRPNFSLVKRRILLYKTSMAGKRSSVTRTIGILTAGGDCPGLNAAIRGVCRAAYDRYGMNVIGISDGFRGLIEESVRTLRPVDFNGILTRGGTILGASREKPFKSDIKESDDIIGDXVAAVIKNYKKLDLDCLVVLGGNGTNSTGYRFVQEGLNVIGLPKTIDNDIVGTDRTFGFYSALNICTESDR

SEQ ID NO: 16483 - DNA, 762 bp, Unknown
  Obtained from environmental sample
  misc_feature (1)..(762): n is a, c, g, or t
ttgactggatgctcagttccgaaggacaggcaattgtttcaaaaagctggattacgattaagtagagcaattaatcgaaaacacacagatattttctttaaatatctgtttagcgcggtagccctcttttccgtcctggcattgggggctattttgctttttgttttcgcgcagggaacaatgccgttctttacatctacttcttcgggcatccgtttggtcgcccagcggattgacgaaattacggttaacggcgttacctatataaatcattcaacttttattgatattccgaaaaacaccgaacttatttcgataagtttcccttatgacgattcgtctaacgacggaactgaaacacttgatataacagtaaacgaagctgagaaagacccgcaaaaaaaattgacattttcgcataacggcgaagtaaaaataacatatcccgaaagttatgtgtataccgtaagctggccgaccgctcttgccgctcttgaaaaaagaatccatgtaataatcccggagccgccgtacaatttcgggaaattcatcgccggccttgattggcatccaagcagggacaaggttttcggtatttttccgatgattgccggaaccatcgccgcgagtttaggcgcgatcattttaggcgtgccaatcgccctattatgcgctctttttatggcgggagttcctcgggcagaaaacccgcgtccgccgtgcgcgccggagttgaacttctcgncgggattccttccgtag

SEQ ID NO: 16484 - protein, 253 aa, Unknown
  Obtained from environmental sample
  misc_feature (1)..(253): Xaa is any amino acid
MTGCSVPKDRQLFQKAGLRLSRAINRKHTDIFFKYLFSAVALFSVLALGAILLFVFAQGTMPFFTSTSSGIRLVAQRIDEITVNGVTYINHSTFIDIPKNTELISISFPYDDSSNDGTETLDITVNEAEKDPQKKLTFSHNGEVKITYPESYVYTVSWPTALAALEKRIHVIIPEPPYNFGKFIAGLDWHPSRDKVFGIFPMIAGTIAASLGAIILGVPIALLCALFMAGVPRAENPRPPCAPELNFSXGFLP

SEQ ID NO: 16485 - DNA, 768 bp, Unknown
  Obtained from environmental sample
  misc_feature (1)..(768): n is a, c, g, or t
atggaaacaagctatattcaaatgttcgctatggaaccgcaatcaataccggggatattcctttggggcatcgaaataataaaggcgattcaaaggctaaaaagccctgcccttacggcgatagtgatattcattaccgatcttggaaccgatttattttaccttccggtaattttatttttattctggtggattgacgaaaagaaaggtttccgtctgggaatccttatgcttttatccgcgtggataaactcctttcttaaagacgctttcaaacagcccaggcctttcaattttgaccagtctttgggcctggcatacgaaccgacatacggcgctccgtcagggcacgcccagttttcgctttgtttttgggttccggtagcagcctggttcgccgaaaagaaaagcggcatgaagcgatttttagtctgggctgcggcaatattcttcatccttttaattggctttacccggctttatttgggcgtacactttccaaccgatcttttagcaggctggattataggcgctataatcctttttttgatgtatgttctaaattcgcttttaataaaacacttaagcggccaaacccgtgcgcaaaatattttggctgccatcgcggcgcttgccatgatcagcgtttaccccggcgacagatcccttcccgcactttttctgggatttttccttgggctacacataatgaaaaaagaattcccttttagcccgcaaagcgaaataaangaaaaaaactttcagtaa

SEQ ID NO: 16486 - protein, 255 aa, Unknown
  Obtained from environmental sample
  DOMAIN (69)...(193): PAP2 superfamily
  misc_feature (1)..(255): Xaa is any amino acid
METSYIQMFAMEPQSIPGIFLWGIEIIKAIQRLKSPALTAIVIFITDLGTDLFYLPVILFLFWWIDEKKGFRLGILMLLSAWINSFLKDAFKQPRPFNFDQSLGLAYEPTYGAPSGHAQFSLCFWVPVAAWFAEKKSGMKRFLVWAAAIFFILLIGFTRLYLGVHFPTDLLAGWIIGAIILFLMYVLNSLLIKHLSGQTRAQNILAAIAALAMISVYPGDRSLPALFLGFFLGLHIMKKEFPFSPQSEIXEKNFQ

SEQ ID NO: 16487 - DNA, 771 bp, Unknown
  Obtained from environmental sample
  misc_feature (1)..(771): n is a, c, g, or t
ttggcaggcatgcctacgcntggaaaatccagtctttttaattatctaatccgcgaggatcgttccattgttaccgatgtccctggcactaccagggactggatcgaagccgatatttcactggatgacattccgctccgtttggcggacacggcaggcttgaggaagatggacgcgcccggctcgaaagaagttgacgaagcggaaaaaatcggcatggagaggagcatggagcttcttgaaaaagccaaccttgtcctttatgtgcttgacggcgtaaaaggcttcaccgaagaagacagggtggttttggttaagtacattgaagcgaataaagagaaacctcttgttgttctctggaataaagcggacattgcacccttccaggtctctccggattataaaattactgaaaaaataaaagcgcaatttcttccggtcagcgccaaaaccggagagggcattccagagctattgcgcctaatgaccgatcttttgaaacatagtcttcaatcgtcatcatcatcttccgtttcagaagaccaattgcttcaggccgcgggaccgggcagcttaaggcagaaagagcttattgattcggccatgagcgaaatagaggaagccctggcactggctggccagggggaaagcctggacctcattgctccgctcattcgttccgctattaacgctttgggagaaattacgggcgaagtttcaaacgcggatattttgaaagttatgttcaacagattctgcgtggggaagtaa

SEQ ID NO: 16488 - protein, 256 aa, Unknown
  Obtained from environmental sample
  DOMAIN (1)...(124): GTPase of unknown function
  misc_feature (1)..(256): Xaa is any amino acid
MAGMPTXGKSSLFNYLIREDRSIVTDVPGTTRDWIEADISLDDIPLRLADTAGLRKMDAPGSKEVDEAEKIGMERSMELLEKANLVLYVLDGVKGFTEEDRVVLVKYIEANKEKPLVVLWNKADIAPFQVSPDYKITEKIKAQFLPVSAKTGEGIPELLRLMTDLLKHSLQSSSSSSVSEDQLLQAAGPGSLRQKELIDSAMSEIEEALALAGQGESLDLIAPLIRSAINALGEITGEVSNADILKVMFNRFCVGK

SEQ ID NO: 16489 - DNA, 381 bp, Unknown
  Obtained from environmental sample
  misc_feature (1)..(381): n is a, c, g, or t
ttgttagcagaaggaaattatactgatgacataatagcagacaggacagggcttagccgccgtggcttggaacaattacggcaacgctttgtagaagaaggttttgaagtaaccctagcaggaaaaccccgcggtcatagacaaaaagcgcttagcggggcggatgaagcgcgtcttatagcgttggtatgtagcccaaaacctgacgggaggacacggtggacattacggctgttagcggataaatggagtacgctggcacataccgaaacaaaaacaatatcccgtgaaacagtcagaaggacattaaaaaaaacgaaattaaaccttggcgtagccaggaatggtgcatcccgcctgatgaagagccggagtttgtag

SEQ ID NO: 16490 - protein, 126 aa, Unknown
  Obtained from environmental sample
  misc_feature (1)..(126): Xaa is any amino acid
MLAEGNYTDDIIADRTGLSRRGLEQLRQRFVEEGFEVTLAGKPRGHRQKALSGADEARLIALVCSPKPDGRTRWTLRLLADKWSTLAHTETKTISRETVRRTLKKTKLNLGVARNGASRLMKSRSL

SEQ ID NO: 16491 - DNA, 834 bp, Unknown
  Obtained from environmental sample
  misc_feature (1)..(834): n is a, c, g, or t
atggtcatcagggaatcagaaaatgtttcatatactgtcgaggcttttcttgaatcattaagcctggattccagatttgtcggggtttcttccctatacgaaaaatggcacgataatcctgacattgattcaaaagcaaggcttaacctagcagtgacatttgcggcgatgaaacagtacagcgccgccatggcccagcttcaaaaggcctgggacataaacgggcacaaaaaaacccagcgcgagtatctttttgcgggaaggcttgcccaggaattaggcctacttaccgaagcggaaaattttatcagcgagtgttttcaggatgatattaacagcagtgaaggaaaagaggctctggttgaaatggcaaaaatcctttacgcgggagaacgttttaaagaactcaaagatttttgcgccgagtcgattaaggttaagccagacgatccggtacttttgaattttcaggggcatgcctactggaactttgggaaatacaaacaagccgccaaagcctataacgccgcttttgagctggacaaggaaaacgggatcttcgcgaaaaacgccggaaacgtttacgacgtgatgggccgcaaaaaagacgccgtaaaaaagtacattgaagcgggcaaggcttttttgcaaacaggcaattacagcgaccttgggctcctcgttcccaaactgctctcgctgggcgaggatgattgggaagcgcgaagcctggcgggcaagtgggcttttgccgttgaagactggaaaatggcgaaagaggaattcgcccttgcagaaagcctgcgaaacgcccgaacgccaaaaaccgggtaa

SEQ ID NO: 16492 - protein, 277 aa, Unknown
  Obtained from environmental sample
  DOMAIN (151)...(184): Tetratricopeptide repeat
  misc_feature (1)..(277): Xaa is any amino acid
MVIRESENVSYTVEAFLESLSLDSRFVGVSSLYEKWHDNPDIDSKARLNLAVTFAAMKQYSAAMAQLQKAWDINGHKKTQREYLFAGRLAQELGLLTEAENFISECFQDDINSSEGKEALVEMAKILYAGERFKELKDFCAESIKVKPDDPVLLNFQGHAYWNFGKYKQAAKAYNAAFELDKENGIFAKNAGNVYDVMGRKKDAVKKYIEAGKAFLQTGNYSDLGLLVPKLLSLGEDDWEARSLAGKWAFAVEDWKMAKEEFALAESLRNARTPKTG

SEQ ID NO: 16493 - DNA, 756 bp, Unknown
  Obtained from environmental sample
  misc_feature (1)..(756): n is a, c, g, or t
atggaaccgctttttttgaagagatatccnctttctgaaaatattgtagaaaccacattgccttccaaatttttaaagggccataaaccatataaaaaggaaagtttcccaaactcatccgcagctggggataattattcgccgcgaaagtttctgattgagcatgatgaatcgggcggtatttattccaaaatgatttttaccaatgtattaataaatcagttaaagggggataaatcccgtaagttaaacgcaagggaagaactttggcgggcacaggattcaagtcttttttcacccggcggcttgtatatcaggggggaacttcgcaaagcggcgtacagttcgcttttacgcgctgaaatgatgacgcgtgaaaacggaaaatttattccgtcattaatacagcatgattttgattttgacggcgtaaaagaatttatttttcaggatgcgatgattaactgttacattcaaccaaggggagccggtatttttgaacttgattatctgcccaaggaatggaactatcttgactgcggttcaaacgattacggaaggcgcgccgcttttgccgacgttttgattccgtttgagataaagactgataagcctgaagacgttattactgaaaaatcaaggctttgctttattgagcaatatgaatctatagcgcaggataaaaaaggaaaatcatgttttaagcttccggccttaggtgatgatatgccgttttggagacatagaaataaataa

SEQ ID NO: 16494 - protein, 251 aa, Unknown
  Obtained from environmental sample
  misc_feature (1)..(251): Xaa is any amino acid
MEPLFLKRYPLSENIVETTLPSKFLKGHKPYKKESFPNSSAAGDNYSPRKFLIEHDESGGIYSKMIFTNVLINQLKGDKSRKLNAREELWRAQDSSLFSPGGLYIRGELRKAAYSSLLRAEMMTRENGKFIPSLIQHDFDFDGVKEFIFQDAMINCYIQPRGAGIFELDYLPKEWNYLDCGSNDYGRRAAFADVLIPFEIKTDKPEDVITEKSRLCFIEQYESIAQDKKGKSCFKLPALGDDMPFWRHRNK

SEQ ID NO: 16495 - DNA, 855 bp, Unknown
  Obtained from environmental sample
  misc_feature (1)..(855): n is a, c, g, or t
atggccggaactattatcgcggacgggaanttcaaggcggacggcgcgctgacacttcaaggtgtcaatgttacgcttggggctgttgagacggatccaggtggtggagccgatccggttccgggagttactcaaggttctgtgactacacttggcgcggggagcgttttgtccaaaggtagtgatgttacgtttgccggcagtaaaacgctcaagatattggtgagcggtaaggaagttgacattgagtacactgcgggcgctactcctggaacagatcccggtatactcaaggtgaacggagagttagtagccgacggcaagagtataacgcttgaggacggtacgatcctcacgaatacggatgccgtggctgggaagttaactgtgacggagggtaggatcaaattggttgacggtagcgggacggctattaataaatggactctaatgcaggacagcaccttagccgatggcagtgtaatcgccgatactaaaggtgacgttttagtagccggcacggtaataaccgacgccaaatccttcgccgacggcagcataacgctcggcgccgaaggtaagtccgtgcagttctcgcaaaacgcggatgtcatcctcgcggcggagtacaacaacgccgacgtgggcgacagcataacgttcatcttctcgaactaccaggccccgtcgtcgcagttgaacgactccgtgatggcccaaatcggcgccaacagcggtcagacggcattcgtctccataggcgatatgcgcgccaaagcgctcggcgtcgccgatgttgacgtaggcagcaagtggggcgccgccaccgcgatagagacgtctcggccaatctga

SEQ ID NO: 16496 - protein, 284 aa, Unknown
  Obtained from environmental sample
  misc_feature (1)..(284): Xaa is any amino acid
MAGTIIADGXFKADGALTLQGVNVTLGAVETDPGGGADPVPGVTQGSVTTLGAGSVLSKGSDVTFAGSKTLKILVSGKEVDIEYTAGATPGTDPGILKVNGELVADGKSITLEDGTILTNTDAVAGKLTVTEGRIKLVDGSGTAINKWTLMQDSTLADGSVIADTKGDVLVAGTVITDAKSFADGSITLGAEGKSVQFSQNADVILAAEYNNADVGDSITFIFSNYQAPSSQLNDSVMAQIGANSGQTAFVSIGDMRAKALGVADVDVGSKWGAATAIETSRPI

SEQ ID NO: 16497 - DNA, 534 bp, Unknown
  Obtained from environmental sample
  misc_feature (1)..(534): n is a, c, g, or t
atgaacgttatgctgtcgcccacgtcggcgttgttgtactccgccgcgaggatgacatccgcgttttgcgagaactgcacggacttaccttcggcgccgagcgttatgctgccgtcggcgaaggatttggcgtcggttattaccgtgccggctactaaaacgtcacctttagtatcggcgattacactgccatcggctaaggtgctgtcctgcattagagtccatttattaatagccgtcccgctaccgtcaaccaatttgatcctaccctccgtcacagttaacttcccagccacggcatccgtattcgtgaggatcgtaccgtcctcaagcgttatactcttgccgtcggctactaactctccgttcaccttgagtataccgggatctgttccaggagtagcgcccgcagtgtactcaatgtcaacttccttaccgctcaccaatatcttgagcgttttactgccggcaaacgtaacatcactacctttggacaaaacgctccccgcgccaagtgtagtcacagaaccttga

SEQ ID NO: 16498 - protein, 177 aa, Unknown
  Obtained from environmental sample
  misc_feature (1)..(177): Xaa is any amino acid
MNVMLSPTSALLYSAARMTSAFCENCTDLPSAPSVMLPSAKDLASVITVPATKTSPLVSAITLPSAKVLSCIRVHLLIAVPLPSTNLILPSVTVNFPATASVFVRIVPSSSVILLPSATNSPFTLSIPGSVPGVAPAVYSMSTSLPLTNILSVLLPANVTSLPLDKTLPAPSVVTEP

SEQ ID NO: 16499 - DNA, 399 bp, Unknown
  Obtained from environmental sample
  misc_feature (1)..(399): n is a, c, g, or t
atgaaattgctattagacactcatttactgctttgggctgcatctggtacattaccacaaaaagcgaaagagcttataatgaatgaagagaatattcttttattcagtgcggcaagcatttgggaaattgtgattaaaagcggcttaggtcgtcaagattttcaggtggatgcctatatgttgcataatgggcttttgaataacggctacatagaaattgccgttgatagctatcattccttatctacaggaaaactgcctttgatacataaagacccttttgacagaattttagtcgcacaagcacaagcagaaaaagtaactttgttaacttgcgataaaattttaaccgattatacctgttccgttatttacataaaaccgctcaaaggagcgtag

SEQ ID NO: 16500 - protein, 132 aa, Unknown
  Obtained from environmental sample
  DOMAIN (3)...(121): PIN domain
  misc_feature (1)..(132): Xaa is any amino acid
MKLLLDTHLLLWAASGTLPQKAKELIMNEENILLFSAASIWEIVIKSGLGRQDFQVDAYMLHNGLLNNGYIEIAVDSYHSLSTGKLPLIHKDPFDRILVAQAQAEKVTLLTCDKILTDYTCSVIYIKPLKGA

SEQ ID NO: 16501 - DNA, 771 bp, Unknown
  Obtained from environmental sample
  misc_feature (1)..(771): n is a, c, g, or t
atgcgaaggaatttgtttttaaaattgattgtaacaatcagccttacaacgttactcgcaaattgcggcttggggtctgatgttgaaacgctcaggcaaagggcgcttgaagctaacagtaaaattactgttgccgccataaagggcgtaaccgccccagtaaccggtgagactccggttaccagcattactgaaaacgtgcaatacacgggaaccgtcacctggtctcccagccactcaacctttgctcctttgaccgtatacacggcgactattacgctgacgcctaaagccggatacaccttgcgtggggtggcggcaaactttttcaaggtagcgggggcaaaatcggtaagcaatgctgccaattcaggcgttattacagcggtgtttccatctacagcggcgatcgtgatcaacacggccgccatagcgggcgtaacacccccgatagccggcggaacaccggttgcaagtattaccgcaacggcccagtacacgggaaccgttacttggtcgcccagccactcgacttttgctgctttgaccgtatacacggcaaccataaccctgatggcaagagccgggtacaccttggcaggagtgcctgcaaactttttcacggtcgcgggggcaacattggtgagcaattccgccaattccggcgttgttacggcggtattcccggctaccggcaacaaaaccccggtcgccgctgattataacattagtacgaaactgaggcagacttatggcaacgttacgccgtaa

SEQ ID NO: 16502 - protein, 256 aa, Unknown
  Obtained from environmental sample
  SIGNAL (1)...(25)
  misc_feature (1)..(256): Xaa is any amino acid
MRRNLFLKLIVTISLTTLLANCGLGSDVETLRQRALEANSKITVAAIKGVTAPVTGETPVTSITENVQYTGTVTWSPSHSTFAPLTVYTATITLTPKAGYTLRGVAANFFKVAGAKSVSNAANSGVITAVFPSTAAIVINTAAIAGVTPPIAGGTPVASITATAQYTGTVTWSPSHSTFAALTVYTATITLMARAGYTLAGVPANFFTVAGATLVSNSANSGVVTAVFPATGNKTPVAADYNISTKLRQTYGNVTP

SEQ ID NO: 16503 - DNA, 906 bp, Unknown
  Obtained from environmental sample
  misc_feature (1)..(906): n is a, c, g, or t
gtgatttcgatactcaacaactattactctgaatactttggtttcactcagaacgagatagatgccatgttacagtactacgaactggaggataagaagaatatcgtcagagattggtacaacggttacctatttggtaacaccgtggtgtataatccgtggagttccgtgcatgttgtggataattggctcgcggacataaatgaataccccaaaccgtattgggtgaacaccagcggcaatgacatcattcgcgagatgatagacaaggcaaacctcgaaactgaggttggtccaaaattgaaagatggccttgaaaccctaatgtcaggcaaagcaatctcagcggtagttcacgaagacgtaacgtatggcgatttatacaaggatgccgacaatgtttggaactttctgtttttcaccggctacttaaaaaaggtcggggatgggcgcatggaaggtgtgaaaaaaattgtggatttgtctattccaaacttggaattacaatatatctatgaagaaaaaatacaggaatggtttaacgaaaaggtcaatcagaagaactttaaccgtctttacgaagcgcttttaagcggaaacgccgagcttgtgcaagaagagctgggcgacttccttttggagaccataagctatatggacgccaaagaggacttctatcatggaatagtgctaggcgtactcgccggaatgcgtaattttagcgcanagtcaaatcgtgaaaccggccaaggccgaagcgatattgtcttgcggcacgccagcgggcgcggcaaggccgtcatacttgagctcaaatatacgcccgatatgcgcgaaatagaaaagaagagcgaagaagcagtgaaacaatttgagacggcaagtatgccaaagaatagaaattga

SEQ ID NO: 16504 - protein, 301 aa, Unknown
  Obtained from environmental sample
  DOMAIN (1)...(301): Protein of unknown function (DUF1703)
  misc_feature (1)..(301): Xaa is any amino acid
MISILNNYYSEYFGFTQNEIDAMLQYYELEDKKNIVRDWYNGYLFGNTVVYNPWSSVHVVDNWLADINEYPKPYWVNTSGNDIIREMIDKANLETEVGPKLKDGLETLMSGKAISAVVHEDVTYGDLYKDADNVWNFLFFTGYLKKVGDGRMEGVKKIVDLSIPNLELQYIYEEKIQEWFNEKVNQKNFNRLYEALLSGNAELVQEELGDFLLETISYMDAKEDFYHGIVLGVLAGMRNFSAXSNRETGQGRSDIVLRHASGRGKAVILELKYTPDMREIEKKSEEAVKQFETASMPKNRN

SEQ ID NO: 16505 - DNA, 744 bp, Unknown
  Obtained from environmental sample
  misc_feature (1)..(744): n is a, c, g, or t
atgaaagaaaacatttcaaaattttttgangaattaattatgataacaagactaaaactatcaaattttaaatctcattcaaatacagagttaaatatgggcgcattaacggttttaaccggtataaacagctccggcaaatcaagtgtattacaagcattgcttttacttcgccaaagttataaaaaaggcagattaaacgccggcttggacttgaataagccgttatgcgatataggaaaaggatatgacgcactttcacgcttcgcccggaatgacataattacttttgcgctggatgccgatgaaaaatacgagtggaattttgatacgaaaaacaaattaacagatacatttattccatctgtggaaaaaacatcattcgcaccggagactttccggaaattgccgttgtttaccgatgatttccaataccttagcgcttctagatgggcaaatcgaagttcgtaccctatagatacatacgcagttgaaactgaaaaacagttatcacatgaatatggacaaggggaactggtcgctcattttttgtattattatggaaattataaagggtttgatattgatccggaaaatatactgcatcctaattgcccaagtagaaaattcctggatcaaactattgcatgggaaaacgagataagtcctcgtgttaccatgacggttgaaaagaaagcagaaaatgtaactatagagtatggttatgaaaaaacgggaaaataa

SEQ ID NO: 16506 - protein, 247 aa, Unknown
  Obtained from environmental sample
  misc_feature (1)..(247): Xaa is any amino acid
MKENISKFFXELIMITRLKLSNFKSHSNTELNMGALTVLTGINSSGKSSVLQALLLLRQSYKKGRLNAGLDLNKPLCDIGKGYDALSRFARNDIITFALDADEKYEWNFDTKNKLTDTFIPSVEKTSFAPETFRKLPLFTDDFQYLSASRWANRSSYPIDTYAVETEKQLSHEYGQGELVAHFLYYYGNYKGFDIDPENILHPNCPSRKFLDQTIAWENEISPRVTMTVEKKAENVTIEYGYEKTGK

SEQ ID NO: 16507 - DNA, 879 bp, Unknown
  Obtained from environmental sample
  misc_feature (1)..(879): n is a, c, g, or t
ttggttccttttatggaaaatgccagaactggcgtgcttccatccggattgcgctactacctgctggaaaattcccagccggaagggcgggctttcctgaccctggcggtaaacgcgggatctgttctggagagcgaggaagaacgcggactggcccattttgttgagcacatggcctttaacggcacggccagattcgaaaaatctgaactgataaactacttgcgttccctgggcatgcgctttggccccgagattaacgcctacacttcttttgacgagacagtctacggcattgaagtccctgtcgagaccggctcaggcggtcaaaaaaccatccccgccatggctttggcggttcttgacgactggtgccacagcgttacttttgacacggaagaagtagacaaggaacgactggtagtaatggaggaataccgcgcacgtctgggggcgcaggaacgcataaaccggcaaatatatcctgttatattcaagggttcgccgtacgctgacaggcttccaatcggccttcctgaggtaatagagaacgccccgaaagatcggctggaggggttttacaagaaatggtacaggcccgaaaatatggccgttataatcgtgggcgattttgactcggaataccttgaaagaacccttgcggaacattttcacaacctttggcccgcatccggcaattttaaccgtccccgctataacattagcgcgccaaaaaaaggaagcttacagacgttgattttgacagacagcgagctttcagaatccagcgtggaactattatggagacaaaaagtcgaaaatcgccagcctaatctggcgaatacccgcgaagcgtcatcgactatctggcaagcataa

SEQ ID NO: 16508 - protein, 292 aa, Unknown
  Obtained from environmental sample
  DOMAIN (19)...(173): Insulinase (Peptidase family M16)
  misc_feature (1)..(292): Xaa is any amino acid
MVPFMENARTGVLPSGLRYYLLENSQPEGRAFLTLAVNAGSVLESEEERGLAHFVEHMAFNGTARFEKSELINYLRSLGMRFGPEINAYTSFDETVYGIEVPVETGSGGQKTIPAMALAVLDDWCHSVTFDTEEVDKERLVVMEEYRARLGAQERINRQIYPVIFKGSPYADRLPIGLPEVIENAPKDRLEGFYKKWYRPENMAVIIVGDFDSEYLERTLAEHFHNLWPASGNFNRPRYNISAPKKGSLQTLILTDSELSESSVELLWRQKVENRQPNLANTREASSTIWQA

SEQ ID NO: 16509 - DNA, 501 bp, Unknown
  Obtained from environmental sample
  misc_feature (1)..(501): n is a, c, g, or t
atgacctccgcgttgcggcacaaaataatgtctcgtatcaggagtaacggtacttccatagagctcttgctatgcaaggcattgtggcgcgaaggcatccgttacaggaaaaacctgaaaaccctgccaggcaagccggatatcgcaataacaaagtacaaaatcgccgtcttttgcgacggcgaattttggcacgggaaaaactgggactccgcgaaaaataaaatcaaagaaaaccatgatttttggattgccaaaatagagcggaacattacacgggacaatataaacgaaaaaaaactagcgaatatgggatggacggtacttcgcttttggggcagggatattaagaaaaaccttaacgaatgtgtcaacgaaataaaagaagcaatttacgaaaaaacaaacggccttgataatatggattacaatagcatggttgatttatacgttgccgaaagcgatccgagctatcatgctgaagatttaaggaacctttga

SEQ ID NO: 16510 - protein, 166 aa, Unknown
  Obtained from environmental sample
  DOMAIN (2)...(72): DNA mismatch endonuclease Vsr
  misc_feature (1)..(166): Xaa is any amino acid
MTSALRHKIMSRIRSNGTSIELLLCKALWREGIRYRKNLKTLPGKPDIAITKYKIAVFCDGEFWHGKNWDSAKNKIKENHDFWIAKIERNITRDNINEKKLANMGWTVLRFWGRDIKKNLNECVNEIKEAIYEKTNGLDNMDYNSMVDLYVAESDPSYHAEDLRNL

SEQ ID NO: 16511 - DNA, 972 bp, Unknown
  Obtained from environmental sample
  misc_feature (1)..(972): n is a, c, g, or t
ttgggggacagccagatcgccgagggattcgacttgagtaaaggattgcttaaggctgctgatgaaaaaaataaacatgaacggcggatatttattatcgggcttatagggcttttccttattctgtcgcttggcggcggtgtaatctatctgctttgggaaaggagtgtcaggggcggtcattccaataccgcggtattggacgggcagtctctgctgcttctcagggaattgctttcgagcggggattatcagcaggctctggacactttagatcgcctgctggcggcagagcccaataattctgaattgctgagactgagagaacagttattgagggagcaacagcttgcggaggaacagcagtcttccggagcggttttggcagcccaacagcgtactgaaaacgatagacaacagcaaaataccgaggctcaactcgctgatcagcaacgcgcggaaaccgaaaagcagcaacgtgaagctaatgccgcaaaacaaagggcagcggacgccgaagccaagcgtgttgcccagcagcgagcggaaaacgagaagttacagcgtgaagccgaggccgcgatacgaaaagcggaagaggaagctcttgccagggccgcgcgtgagttacaggaacgcagacaggcggtgaatgacttgatttcgcagggaaaggcgctgcttgaaaaaaatgattttaccggcgcagagagggcctttaccgaggcgcattcccgtatgccggcgaatgataacaggtttgaagcgcagaaactggccgaaatggctgaagcctggtatgatgcttccgcccgcaatcccaattccccggccggcaaggatgccgccagcaaggcgttggcattggcaagcgaatccgtttccaaagatccaagcctgggcctgcctcattccacattgggaaaaattaccgtgaccagcagaactgggataaagctatgccgaatttag

SEQ ID NO: 16512 - protein, 323 aa, Unknown
  Obtained from environmental sample
  misc_feature (1)..(323): Xaa is any amino acid
MGDSQIAEGFDLSKGLLKAADEKNKHERRIFIIGLIGLFLILSLGGGVIYLLWERSVRGGHSNTAVLDGQSLLLLRELLSSGDYQQALDTLDRLLAAEPNNSELLRLREQLLREQQLAEEQQSSGAVLAAQQRTENDRQQQNTEAQLADQQRAETEKQQREANAAKQRAADAEAKRVAQQRAENEKLQREAEAAIRKAEEEALARAARELQERRQAVNDLISQGKALLEKNDFTGAERAFTEAHSRMPANDNRFEAQKLAEMAEAWYDASARNPNSPAGKDAASKALALASESVSKDPSLGLPHSTLGKITVTSRTGIKLCRI

SEQ ID NO: 16513 - DNA, 810 bp, Unknown
  Obtained from environmental sample
  misc_feature (1)..(810): n is a, c, g, or t
gtgggagacgtttccgttattacattttcccgccgtatttttgataatgagggcgaagcgcttggaattatttgccttgatattaaaatggacagggtcagccagcacgctattaaaacgcagtttgccgaaaacgggtacggttttctgttaagcgacagcagagatataatcgcccatccggaaccttccgtgataggaacgaatttccgcaatgtaagaagcacaatcgcgtcttatgaagatgaattggtggaaaacggctatgttaatgaggtaatagcgaccgactaccggggcattaaatccatcgtctttttggaaagactcgaaaacggctggtatatgggagttgtaacgcccagggacaaatattattcaagcacaagaagcatggctttattccttacagtgatgggcgctttattgtcaacggggcttatcgcgattttgctggtaatgttcaatgaattaaacaaggaaaatgaaaaatcgctggcaataacaaaaaaacacgccgacgcggaagcggccaacgccgccaaatccgcgtttctggcaaaggtaagccatgaaatacgcacgcctatgaacgccattttaggcataacagaaattcaactgaggaacggaagcctgcccaatgacacacgaaacgccctggacagaatttacaattcgggttatatgcttttgggaatcatcaacgatattcttgacttgtcaaaaatagaagcgggcaaactggaattattcccggttgaatatgattttcccagccttattaacgataccgggttcttaatatag

SEQ ID NO: 16514 - protein, 269 aa, Unknown
  Obtained from environmental sample
  DOMAIN (3)...(73): Cache domain
  misc_feature (1)..(269): Xaa is any amino acid
MGDVSVITFSRRIFDNEGEALGIICLDIKMDRVSQHAIKTQFAENGYGFLLSDSRDIIAHPEPSVIGTNFRNVRSTIASYEDELVENGYVNEVIATDYRGIKSIVFLERLENGWYMGVVTPRDKYYSSTRSMALFLTVMGALLSTGLIAILLVMFNELNKENEKSLAITKKHADAEAANAAKSAFLAKVSHEIRTPMNAILGITEIQLRNGSLPNDTRNALDRIYNSGYMLLGIINDILDLSKIEAGKLELFPVEYDFPSLINDTGFLI

SEQ ID NO: 16515 - DNA, 795 bp, Unknown
  Obtained from environmental sample
  misc_feature (1)..(795): n is a, c, g, or t
gtgcctgaacgcataggcaagatgatgagggacgtagatgctgtctacggtaaatatatggatgaggccgttagggctgttcaaaacggcgagaattttcattgtacaagtttttctccggctttgaatacaaacttggcaattaatatacagtctttcccaatgggcagttctggcagttcatggagcgtaatgatcgcggcgactgaatcgtacattttaaaagaagtaaaattcctgaccaagattacgatcattattgcggcggtagccattgtaatagcggcgataattgtattccttacacttagcgctactacagccccaatcgtagatgtcgcgaacacccttaaagatatatccgaaggcgaaggcgacttaacgaaatcaatccccgtcaaatcagatgatgaggtaggcgacctttccagatacttcaacaaaacaattcaaaaaatcaggggccttgtgcttctcattaaacagcaggcgggcgtgttgtcggatataggcaatgatctgtccagcaatatgaccgaaaccgcggcggcaatcaaccaaattaccgcaaatatacagagcataaagagccgtgtcattaaccagagcgccagcgttacgcagacaaacgcgacaatggagcaggttatcgttaatatcaacaaactcaacggccatgttgaaaaccagagcagaaacgtttcccaggtatcatccgccattgaggagatggtagccaatatcagttcggtaactcaaacgttggttaataacgccacanatgtaaaaacataa

SEQ ID NO: 16516 - protein, 264 aa, Unknown
  Obtained from environmental sample
  DOMAIN (84)...(155): HAMP domain
  misc_feature (1)..(264): Xaa is any amino acid
MPERIGKMMRDVDAVYGKYMDEAVRAVQNGENFHCTSFSPALNTNLAINIQSFPMGSSGSSWSVMIAATESYILKEVKFLTKITIIIAAVAIVIAAIIVFLTLSATTAPIVDVANTLKDISEGEGDLTKSIPVKSDDEVGDLSRYFNKTIQKIRGLVLLIKQQAGVLSDIGNDLSSNMTETAAAINQITANIQSIKSRVINQSASVTQTNATMEQVIVNINKLNGHVENQSRNVSQVSSAIEEMVANISSVTQTLVNNATXVKT

SEQ ID NO: 16517 - DNA, 888 bp, Unknown
  Obtained from environmental sample
  misc_feature (1)..(888): n is a, c, g, or t
atgcattttaacattaacgtaggagttttcattccaaaacctcatactccctaccaatggtcgtcccaacttgacagtgaaaccgctgaaaaaaagcttaattttatccgcttaaaactaaaacctatggggcataaggtaagcatttcagaccctctaatttcacaaatagaaggcttgttaagcaggggggatgagagagccggattattatgtaaagaagcgtggtcggcgggaagcaggcttgatccttggagcgaatttattaacaaggaggaatggcggaggatacttgaagataatcgtagcgtagtagattcaattttatacggaaagaataaaccgttaccctgggaaaatatagattcccatataacaactgaatatcttttgcgggaattggagaaatctgaaaacagtattggtacttattcatgtaagaaaaaatgtaataattgcggtgtaatgtctaaaatgactccatgtccgccaaaaaagttagataacaatataaataaatcggtctctattgttaaccataaaagaaaagaagttaatgataattctttgtataaaaccgatccgtcaatatacagggtattattcggttttagtaagataggaagcgccgtatttcacggacatttaagcctcatcgagattttttcaatgtctttcagaagagccggaatttcagttatgtttacccaaggttttaaccctcttataaaaatggaattcgcctctccattatcattaggaataagcgcggattgtgaaatagcgtctgttgatttttcagaggaaatatctacggaagactttataacggatttaaataataatttaccctatggtttcgcccgtaaaaagcggaaatttatttaa

SEQ ID NO: 16518 - protein, 295 aa, Unknown
  Obtained from environmental sample
  misc_feature (1)..(295): Xaa is any amino acid
MHFNINVGVFIPKPHTPYQWSSQLDSETAEKKLNFIRLKLKPMGHKVSISDPLISQIEGLLSRGDERAGLLCKEAWSAGSRLDPWSEFINKEEWRRILEDNRSVVDSILYGKNKPLPWENIDSHITTEYLLRELEKSENSIGTYSCKKKCNNCGVMSKMTPCPPKKLDNNINKSVSIVNHKRKEVNDNSLYKTDPSIYRVLFGFSKIGSAVFHGHLSLIEIFSMSFRRAGISVMFTQGFNPLIKMEFASPLSLGISADCEIASVDFSEEISTEDFITDLNNNLPYGFARKKRKFI

SEQ ID NO: 16519 - DNA, 735 bp, Unknown
  Obtained from environmental sample
  misc_feature (1)..(735): n is a, c, g, or t
atgaggcgtaatggtttttggtttggcaagaacctgtccgcgctcaacttcttttttatcaatacccctaagcagggtgcctacgttgtcaccggcctgcgcctcgtcgaggagcttgttgaacatttcgatgcccgttactacggtagtctttgtgggcttaatcccgacgatttcaatttcttcgttcagcttgaggatacccctgtccaccttgccggtaacgacggtgccgcgtccggaaatcgtgaaaacatcctcaataggcataaggaagggtttatccgaatcgcgcactggatcggggaagtacgcatccatcgcttcaagaagcccctcaatacacttggtggtttcttcggaaggcttgccttcggcaagctcggacatcgccttgaacgccgaaccctcaatgatgggcgttttgtcgccggggaaaccgttctggctcagaacgtccttgatctcttctttgaccagttccagcagctcagcatcgtcaaccaggtctatcttgttaaggaagacgatcatattgggaacgccgacctggcgggcaagaataatgtgctcacgggtctggggcataaccgagtccggggcggaaacgaccagtatcgcgccgtccatctgcgccgcgccggttatcatgttcttgatatagtcggcgtgaccgggacagtcgatgtgggcgtaatgccttttgtcggactggattcaaggtgcctggtataa

SEQ ID NO: 16520 - protein, 244 aa, Unknown
  Obtained from environmental sample
  misc_feature (1)..(244): Xaa is any amino acid
MRRNGFWFGKNLSALNFFFINTPKQGAYVVTGLRLVEELVEHFDARYYGSLCGLNPDDFNFFVQLEDTPVHLAGNDGAASGNRENILNRHKEGFIRIAHWIGEVRIHRFKKPLNTLGGFFGRLAFGKLGHRLERRTLNDGRFVAGETVLAQNVLDLFFDQFQQLSIVNQVYLVKEDDHIGNADLAGKNNVLTGLGHNRVRGGNDQYRAVHLRRAGYHVLDIVGVTGTVDVGVMPFVGLDSRCLV

SEQ ID NO: 16521 - DNA, 654 bp, Unknown
  Obtained from environmental sample
  misc_feature (1)..(654): n is a, c, g, or t
atggtttttggtttggcaagaacctgtccgcgctcaacttcttttttatcaatacccctaagcagggtgcctacgttgtcaccggcctgcgcctcgtcgaggagcttgttgaacatttcgatgcccgttactacggtagtctttgtgggcttaatcccgacgatttcaatttcttcgttcagcttgaggatacccctgtccaccttgccggtaacgacggtgccgcgtccggaaatcgtgaaaacatcctcaataggcataaggaagggtttatccgaatcgcgcactggatcggggaagtacgcatccatcgcttcaagaagcccctcaatacacttggtggtttcttcggaaggcttgccttcggcaagctcggacatcgccttgaacgccgaaccctcaatgatgggcgttttgtcgccggggaaaccgttctggctcagaacgtccttgatctcttctttgaccagttccagcagctcagcatcgtcaaccaggtctatcttgttaaggaagacgatcatattgggaacgccgacctggcgggcaagaataatgtgctcacgggtctggggcataaccgagtccggggcggaaacgaccagtatcgcgccgtccatctgcgccgcgccggttatcatgttcttgatatag

SEQ ID NO: 16522 - protein, 217 aa, Unknown
  Obtained from environmental sample
  misc_feature (1)..(217): Xaa is any amino acid
MVFGLARTCPRSTSFLSIPLSRVPTLSPACASSRSLLNISMPVTTVVFVGLIPTISISSFSLRIPLSTLPVTTVPRPEIVKTSSIGIRKGLSESRTGSGKYASIASRSPSIHLVVSSEGLPSASSDIALNAEPSMMGVLSPGKPFWLRTSLISSLTSSSSSASSTRSILLRKTIILGTPTWRARIMCSRVWGITESGAETTSIAPSICAAPVIMFLI

SEQ ID NO: 16523 - DNA, 489 bp, Unknown
  Obtained from environmental sample
  misc_feature (1)..(489): n is a, c, g, or t
atgggaatcgtaaaatcagcttttccgaaggaaaaaaaccatgttacatggtctaactcatactcaatgggtgtaaaattgattgatgaccagcacaaagggcttttagactttgtaaacgatttattcaaccactccagcgggaaggaaaaagaagagcggatgtattttgaattagtcattcaacaagcggttcaatatataaaagagcattttcaagcggaagaaaaattaatgattggaaccaaattccccggttacgctgaacataaaaaagtccacgatgcatttacgatgacggttattaagagcgtaaaagattttgaatctggtaaacgtctggttcttgaaaaattcgcctattttcttaaagattgggttttaagtcatatagccgtaatggacaaacaatacgccgattatttcaggaaaatagccgttcgtaaagaggacggaaaattgcatatcacaaaggcggaaatcaattag

SEQ ID NO: 16524 - protein, 162 aa, Unknown
  Obtained from environmental sample
  DOMAIN (86)...(141): Hemerythrin HHE cation binding domain
  misc_feature (1)..(162): Xaa is any amino acid
MGIVKSAFPKEKNHVTWSNSYSMGVKLIDDQHKGLLDFVNDLFNHSSGKEKEERMYFELVIQQAVQYIKEHFQAEEKLMIGTKFPGYAEHKKVHDAFTMTVIKSVKDFESGKRLVLEKFAYFLKDWVLSHIAVMDKQYADYFRKIAVRKEDGKLHITKAEIN

SEQ ID NO: 16525 - DNA, 711 bp, Unknown
  Obtained from environmental sample
  misc_feature (1)..(711): n is a, c, g, or t
atgataaaaaataatcctctaatcaaaccatgcttgaaatgggcgggaggcaaaaggcaattactggcagaaataatgaaatacctccctataaatattaatgattatacctattatgaaccgtttgtcggagccggagcggtattttttgaattacagcccatgaaagccgttataaatgattttaacgaacaattaatgcttacctataatgttattaaacaaaatgtagaagaccttattttattattacagaaatatcagaaaaaaaatagtaaagaatacttttataaaattaggaatttggatcgagaccagctaaaattcaataaattgacagacacagaaaaagccgcccgcctgatttttcttaataaaacctgttttaacggcttataccgggtaaattcccagggactttttaatgtcccctatggcagatataaaaatccctcgatatgcgaagatattgtattacgtcaaatcagcgcttatcttaattccaatgaaataagcattttaaacaatgactttgagcaggctatattaaaggcaaataaaaaatcttttatatattttgacccgccttatcatagccaggataaaaataattttaccggataccaagcaaacggttttaacgagaaggaacaagaacggctttgcaatgttataaaaaaaatgaccaagcggggcataaaatgtttgtaa

SEQ ID NO: 16526 - protein, 236 aa, Unknown
  Obtained from environmental sample
  DOMAIN (14)...(233): D12 class N6 adenine-specific DNA methyltransferase
  misc_feature (1)..(236): Xaa is any amino acid
MIKNNPLIKPCLKWAGGKRQLLAEIMKYLPININDYTYYEPFVGAGAVFFELQPMKAVINDFNEQLMLTYNVIKQNVEDLILLLQKYQKKNSKEYFYKIRNLDRDQLKFNKLTDTEKAARLIFLNKTCFNGLYRVNSQGLFNVPYGRYKNPSICEDIVLRQISAYLNSNEISILNNDFEQAILKANKKSFIYFDPPYHSQDKNNFTGYQANGFNEKEQERLCNVIKKMTKRGIKCL

SEQ ID NO: 16527 - DNA, 399 bp, Unknown
  Obtained from environmental sample
  misc_feature (1)..(399): n is a, c, g, or t
gtgataggcgaatgcaacgcgacgcatagctcgcaagattacatccggtttttgaagaaagtggataaagcgtgttctcccaagaaggtgctgcacatagtgaccgataatctgtccgcgcataaaacaaaagcggtatatgattatgttgaaagcaatccaaaaagatttgtactccatttcattccgacctattcatcatggcttaatcttgtggaacggtggtttgcggagataaccaataagagcatacgcagaggcagttttgaatcagttgatgaattaatcaccgcaataaaaaaatacataaaaagctggaataaatcagggcgtacgtttacatggactaaaaaaccggatgtgatacttgctaaaatccataaggctcaatcattttga

SEQ ID NO: 16528 - protein, 132 aa, Unknown
  Obtained from environmental sample
  misc_feature (1)..(132): Xaa is any amino acid
MIGECNATHSSQDYIRFLKKVDKACSPKKVLHIVTDNLSAHKTKAVYDYVESNPKRFVLHFIPTYSSWLNLVERWFAEITNKSIRRGSFESVDELITAIKKYIKSWNKSGRTFTWTKKPDVILAKIHKAQSF

SEQ ID NO: 16529 - DNA, 600 bp, Unknown
  Obtained from environmental sample
  misc_feature (1)..(600): n is a, c, g, or t
gtgcttgccgccctgcttacggttagtgaacttgtaaaacgtcctgctcgcgatattgccccgtatgtaaaatttttaaaacccgtaaggggcaggatgacttccatcaataaaaaacaaccatttgaagttgtcatagattacgcgcataccccgtcttcgtttcaggcaatcttccccccgcttcgcgtaaggcttgataaaacgggacgcaagataatcagtctttttggttccgcgggagagcgtgacacgcaaaaaagagccgagcagggaaaaattgccgcccattacagtgattttattattcttaccgatgaagaccctagaggtgaaaaaccaatggatattctggaagagattgaaaaaggcgtacatgaagatcaagaattaaaaacggtttttgaacgcgataaaaatcttttcctgatacccgacagacccaccgcaatacgcaaggctctctctttggcgcaaaaaggcgaccttgtgttgcttttgggcaaagggcatgagaactcaataatttacgccgatcatgtaatgccttttgatgaaatagcggagactgagaaggcgcttaaggagattggtttttaa

SEQ ID NO: 16530 - protein, 199 aa, Unknown
  Obtained from environmental sample
  DOMAIN (29)...(118): Mur ligase family, glutamate ligase domain
  misc_feature (1)..(199): Xaa is any amino acid
MLAALLTVSELVKRPARDIAPYVKFLKPVRGRMTSINKKQPFEVVIDYAHTPSSFQAIFPPLRVRLDKTGRKIISLFGSAGERDTQKRAEQGKIAAHYSDFIILTDEDPRGEKPMDILEEIEKGVHEDQELKTVFERDKNLFLIPDRPTAIRKALSLAQKGDLVLLLGKGHENSIIYADHVMPFDEIAETEKALKEIGF

SEQ ID NO: 16531 - DNA, 813 bp, Unknown
  Obtained from environmental sample
  misc_feature (1)..(813): n is a, c, g, or t
atgttcataagccatccggctcaagtcatgagtatcagattgacgtcagacaaacgggaagcgataaacctngacgtcaagctgtcccgggttaatgtctcggacgcgactgtcagggacgatcgtaccgggcgccgcgcgggcggcggcgggtggcccgcgctgagggcggatgtcatacgttcgatcgatgataaaacgtttgcgatgaaaggaaatgacgcgggagttgaattcgccgtggctgtgagggtcgtatgcgatggaaggctggagaatccatcttcccagttattggtacgtaactgttcagaggtggttttatatgttgcttcgtctacatcaaaccgttcagcggatcctctgaatgacgtcctcaacaggcttaaggctgccgaaaagaaagggtatgcgagtctccgtgaagagcatataagcgatttctcatcgttaatgaagcgttgcgtgatagatctcggccctgctccagaaatggctacagacgcgaggctggaagcgataaataaagaggggaaatcaatgagcgaccccgcgctggccgcgctgtattttcagtttggccgctacctgatcgtctcaggcagtcgcgagggaagctcggcgcttaacctacagggtatttggaatgccgattttacgccgatgtgggacagcaagtacacaataaacataaatctacagatgaattactggccggtagagatcggtaatctatctgagttgcatatgccggtgatggatctgttagagacgctgcataaaaacggaaagaaactgcccgcgtcattatga

SEQ ID NO: 16532 - protein, 270 aa, Unknown
  Obtained from environmental sample
  misc_feature (1)..(270): Xaa is any amino acid
MFISHPAQVMSIRLTSDKREAINLDVKLSRVNVSDATVRDDRTGRRAGGGGWPALRADVIRSIDDKTFAMKGNDAGVEFAVAVRVVCDGRLENPSSQLLVRNCSEVVLYVASSTSNRSADPLNDVLNRLKAAEKKGYASLREEHISDFSSLMKRCVIDLGPAPEMATDARLEAINKEGKSMSDPALAALYFQFGRYLIVSGSREGSSALNLQGIWNADFTPMWDSKYTININLQMNYWPVEIGNLSELHMPVMDLLETLHKNGKKLPASL

SEQ ID NO: 16533 - DNA, 609 bp, Unknown
  Obtained from environmental sample
  misc_feature (1)..(609): n is a, c, g, or t
atgattgcgagcatctctatgaattgccacaggcccagcacccgtacattggactggggaattgtccatgcggatctgctgcccgaagtcccccgcattaaagcccagcaaatggcgctggttttggccgacggagcctatacgagcgtaataaataccaccacaaacaatgtatttgaccgctcttattttaagaaggcaatagccggagaaaacaacattgatatagtcgtaagccgcgcgacaggcaagccggtaattgtaatggcggttccaatccgccaaagtaatgaaaaaaacgcccccataatcggaatacttatggcagaaaaggacggcgtagattacctgaccgatataatgcttgaaaatttaaaactaaatatgccaagcggttattgttacataatggacgtttcctcggggcaggcggtaacaatcgcccacccaaacaaagacatggttgtcaaacgtaacgtgccggaagaacaggcgaagacaaatccggcgttcgcttccgtaagcgtaatgtttgccgaaaatcataagaaaagaaacggaggatcggaatataccctatacgggaaacatttgttaaaagctgtataa

SEQ ID NO: 16534 - protein, 202 aa, Unknown
  Obtained from environmental sample
  misc_feature (1)..(202): Xaa is any amino acid
MIASISMNCHRPSTRTLDWGIVHADLLPEVPRIKAQQMALVLADGAYTSVINTTTNNVFDRSYFKKAIAGENNIDIVVSRATGKPVIVMAVPIRQSNEKNAPIIGILMAEKDGVDYLTDIMLENLKLNMPSGYCYIMDVSSGQAVTIAHPNKDMVVKRNVPEEQAKTNPAFASVSVMFAENHKKRNGGSEYTLYGKHLLKAV

SEQ ID NO: 16535 - DNA, 588 bp, Unknown
  Obtained from environmental sample
  misc_feature (1)..(588): n is a, c, g, or t
atgatcgcgagatccgcacggcaagggaaatttacagccgcaaacggcataatttatgaaggtgattttgtcaacggagactcaactggcaaaggtacacggacatatcctgacggttttgtgtacgaaggtgattttgtcaatggcgcattctgcggaaaaggaaaatttaaaaatcctgacggatctgtatacgaaggcgattttgttgacggacatttccacggaaagggaaaattgaaattttcgaatggagaggtatacgaaggcgattttgtcaatggtggtcctcatggcaaaggaaaattcacattgcctaatggcgatgtatacgaaggcgattttgttggcggtcagcagacaggcaaagggaaatttacatgggacgatgacggcactgtatacgaaggcgatttcctcaacggcaatttccacggcaaaggaaaaatgatatggccagacggcagagtctatgtaggcgattgggctgacggcaagagaaacggcaaaggaaaaagaacctaccccaacggcaaagttgaagaaggcaactggaaagacggaaattttgtggaggaacaggagtaa

SEQ ID NO: 16536 - protein, 195 aa, Unknown
  Obtained from environmental sample
  DOMAIN (19)...(41): MORN repeat
  misc_feature (1)..(195): Xaa is any amino acid
MIARSARQGKFTAANGIIYEGDFVNGDSTGKGTRTYPDGFVYEGDFVNGAFCGKGKFKNPDGSVYEGDFVDGHFHGKGKLKFSNGEVYEGDFVNGGPHGKGKFTLPNGDVYEGDFVGGQQTGKGKFTWDDDGTVYEGDFLNGNFHGKGKMIWPDGRVYVGDWADGKRNGKGKRTYPNGKVEEGNWKDGNFVEEQE

SEQ ID NO: 16537 - DNA, 765 bp, Unknown
  Obtained from environmental sample
  misc_feature (1)..(765): n is a, c, g, or t
ttgcggccgctggtcaatatggcctttgcccggctcgttgccgcggacgcatccacagacgcggctgtggctgcagatgcagatgcagatgcggacgccgcccctgttgatgaaactgccaaagaaacgcgcgaaagaaaaataagccttaatgccaggcggcttggcggtgtaatctctgcgcttaaaagctgtagggcaaaaagcgtcatcgacatgggatgcggggaggggaatcttttagcgttactcctcagggaagggcagttcacgcggatcgccggtatggacgtttcccatattgcccttgaacgcgcgagcgggaaattgaatcttgagaatgtcagtgacagtacgcgggagcgcataacgctgtttcaaagctcgctcatgtataaagattcccgcttcaaaggctacgacgccgtatgcgtcatagaagtaatcgagcatctggatttgccccgccttgccgcttttgaacgggtactgtttgaatatacaaggacgcccaccgtggttttgaccacgccgaaccgcgaatacaacgtanaatacgaaaatcttgacggcgcgtcgcggagcgacgcgataaatctgcggcacggtgaccaccgttttgaatggacacgggctgagttccgcgaatgggcggagaaggccgcctcccggtacggttatacggttaaattctccgggatcggagattctgacgaagctctcggcgcgccgactcaaatgggggtgtttacgttatgcgaatag

SEQ ID NO: 16538 - protein, 254 aa, Unknown
  Obtained from environmental sample
  SIGNAL (1)...(22)
  DOMAIN (71)...(174): Methyltransferase domain
  misc_feature (1)..(254): Xaa is any amino acid
MRPLVNMAFARLVAADASTDAAVAADADADADAAPVDETAKETRERKISLNARRLGGVISALKSCRAKSVIDMGCGEGNLLALLLREGQFTRIAGMDVSHIALERASGKLNLENVSDSTRERITLFQSSLMYKDSRFKGYDAVCVIEVIEHLDLPRLAAFERVLFEYTRTPTVVLTTPNREYNVXYENLDGASRSDAINLRHGDHRFEWTRAEFREWAEKAASRYGYTVKFSGIGDSDEALGAPTQMGVFTLCE

SEQ ID NO: 16539 - DNA, 384 bp, Unknown
  Obtained from environmental sample
  misc_feature (1)..(384): n is a, c, g, or t
atgaaagaggtgatgtgttttatacgcgcgaataaggtcaatgacacaaaaaaagcgctggagacaaacggttttcccgcttttacctgccgtgaatgtttggggcggggtaaaaagagcatagatccgaatttgctgaacacagtattggcagaaggagaattaccgctcaatcctatcggagaaaatttaaccgaagcgacaaggcttatagccaaaaggttctttactttgattgtagaggataatgacgttaaaaaagcggttgatacaatagttggggcgaacaagacaggcaatccgggagacggacgaatttttattctgccgattcaggaatcgtttactgtcagaacaggagagcctaccgcaaaagcgtattag

SEQ ID NO: 16540 - protein, 127 aa, Unknown
  Obtained from environmental sample
  DOMAIN (4)...(120): Nitrogen regulatory protein P-II
  misc_feature (1)..(127): Xaa is any amino acid
MKEVMCFIRANKVNDTKKALETNGFPAFTCRECLGRGKKSIDPNLLNTVLAEGELPLNPIGENLTEATRLIAKRFFTLIVEDNDVKKAVDTIVGANKTGNPGDGRIFILPIQESFTVRTGEPTAKAY

SEQ ID NO: 16541 - DNA, 648 bp, Unknown
  Obtained from environmental sample
  misc_feature (1)..(648): n is a, c, g, or t
ttggattacgggagggaatgccggaaaaaatccctggggaagccagaaggcccattgacatcattcaaccgccctgacatcaagcctccagggttccgccccttcgactttatcgcccgcactgatcctacgcacttcttgaacttcatccagcaggagcatccccagaccatagctcttatcctggcttatctgagcccaacaagggcctcggttattttgcagaatctgaaccacgacgtgcagagcgacgtggcccgcagaatcgcgacaatggaccgtaccagcccggaagtactccgcgaggttgagcgggtgcttgaaaagaaactttcgaccctgtccagcgaggattacaccacggcgggcggcgttgaaagcatcgttgaaatcctcaaccttgtcgaccgcgcctcggagaagcagattattgaggccctggaagacgaagacccggaactcgccgaagagatcaagaagaggatgttcgtgttcgaggatatcgtcatgctggacgaccgctcgatccagaaagtcatgcgggaagtggactcgcaggaacttgccaaggcgctcaaaagcgtggatcaggaggtacaggaaaagattttcaagaatatgtccaaacgcngcggctaccatgcttaa

SEQ ID NO: 16542 - protein, 215 aa, Unknown
  Obtained from environmental sample
  DOMAIN (144)...(213): FliG C-terminal domain
  misc_feature (1)..(215): Xaa is any amino acid
MDYGRECRKKSLGKPEGPLTSFNRPDIKPPGFRPFDFIARTDPTHFLNFIQQEHPQTIALILAYLSPTRASVILQNLNHDVQSDVARRIATMDRTSPEVLREVERVLEKKLSTLSSEDYTTAGGVESIVEILNLVDRASEKQIIEALEDEDPELAEEIKKRMFVFEDIVMLDDRSIQKVMREVDSQELAKALKSVDQEVQEKIFKNMSKRXGYHA

SEQ ID NO: 16543 - DNA, 573 bp, Unknown
  Obtained from environmental sample
  misc_feature (1)..(573): n is a, c, g, or t
gtgactcttgaagaacgcatagacgtattngtacacgcaggcgagatagagcttgctggtgaggcatatagagggaaatacgagctaaatgatggaaaatcaataaaaaggtttatacttagaaaacttagagggaaaatcaaaaatttagatactggcgataatataaccatttcaaagcaaagtgtattaaaactagcaagccacattaaagacggtgaaatataccaaaaaacaatagcttatgttcctaagataatagagaatatgcaatttttggaagaaatgaagccagacaaggaaaatgctagttttaacagctattcgtattatatcattggagtaaagatagacggtgaatcgcataccatacttagcaccgtaggatataaaggtcaagaaatttactatgaccaaaacgtattcataggaactccagaagaagttttcaaagaggcaaaaatttctactgacaataaatatagcagattgaaggagatactgaaagataacggcgattggagacaggtcggaatcgcacttccggaggctccaaccgccgtagaaagctga

SEQ ID NO: 16544 - protein, 190 aa, Unknown
  Obtained from environmental sample
  misc_feature (1)..(190): Xaa is any amino acid
MTLEERIDVXVHAGEIELAGEAYRGKYELNDGKSIKRFILRKLRGKIKNLDTGDNITISKQSVLKLASHIKDGEIYQKTIAYVPKIIENMQFLEEMKPDKENASFNSYSYYIIGVKIDGESHTILSTVGYKGQEIYYDQNVFIGTPEEVFKEAKISTDNKYSRLKEILKDNGDWRQVGIALPEAPTAVES

SEQ ID NO: 16545 - DNA, 528 bp, Unknown
  Obtained from environmental sample
  misc_feature (1)..(528): n is a, c, g, or t
gtggaggtcaaattgattagaggatggtatactgccgccagcgggatgcgggcgcagcaatggcggctggacgctgtggctaataaccttgccaatgtgaacaccgacggttataaacgggacgtagcggcttttaaggccttcccggaactgcttatacgcagacaagacgacgacggggtctatttgcaccccttcggctccgccgacgcggcccccatcgtggggaaaatgggcaccggagtcgagttaaacgagctttataccgcttttgagcagggcagtttcaaggaaacccagagtgatttcgacattgccctggacggaaaaggcttttttgccgtttccacgccctggggcgagcgttatacccgcaacggctctttccaactgggcaaagagggctatctggaaaccaaggagggctatcctgtgatgggagaatacggcccgataaaggtaaaagccaacaatttccaggtggacaaggacggcaggatatggataaacngcggcaatcagcgatga

SEQ ID NO: 16546 - protein, 175 aa, Unknown
  Obtained from environmental sample
  DOMAIN (9)...(39): Flagella basal body rod protein
  misc_feature (1)..(175): Xaa is any amino acid
MEVKLIRGWYTAASGMRAQQWRLDAVANNLANVNTDGYKRDVAAFKAFPELLIRRQDDDGVYLHPFGSADAAPIVGKMGTGVELNELYTAFEQGSFKETQSDFDIALDGKGFFAVSTPWGERYTRNGSFQLGKEGYLETKEGYPVMGEYGPIKVKANNFQVDKDGRIWINXGNQR

SEQ ID NO: 16547 - DNA, 612 bp, Unknown
  Obtained from environmental sample
  misc_feature (1)..(612): n is a, c, g, or t
atgaacaaattaactaagctgcttcagcagcagatgcctcaacggcgtctcaacccgctcaatgattttttgttctacaaaatcatgggcgaaaaaggcgatgaagtccaactcctcggctttattaacgccgttctggggaaaaccggggcagactgctttacttctgtggaaatcatcgaaaacaaatcttttacgccgaaagtcatcggcgacaaaaccagcatcctcgatgtaagggcagtcctccagggtaaaaccaaggtcaacatcgaggttcaggtacgtaaccagcacaacatggatcggcgcagcctgttttattggagcaaggaatatgcggagagtctgaaagcggggcaggattaccataaactgccgaacgttatcgccgtcaacattgttgatttcgactatccgccggtacacaatttccatacgcgctttcatttacgggaggacaatgaccgggaaatgatccttaccggggcgctggaaatacattttatcaatatggtaaaataccggaggcaggcgagaaagggcgtggtgaacgacccgttaaagcggtggtgcttcgacaggctcagcaacacgaaaggcgctccctga

SEQ ID NO: 16548 - protein, 203 aa, Unknown
  Obtained from environmental sample
  misc_feature (1)..(203): Xaa is any amino acid
MNKLTKLLQQQMPQRRLNPLNDFLFYKIMGEKGDEVQLLGFINAVLGKTGADCFTSVEIIENKSFTPKVIGDKTSILDVRAVLQGKTKVNIEVQVRNQHNMDRRSLFYWSKEYAESLKAGQDYHKLPNVIAVNIVDFDYPPVHNFHTRFHLREDNDREMILTGALEIHFINMVKYRRQARKGVVNDPLKRWCFDRLSNTKGAP

SEQ ID NO: 16549 - DNA, 462 bp, Unknown
  Obtained from environmental sample
  misc_feature (1)..(462): n is a, c, g, or t
atgagccccgggctgacgcatttcatccgctcggacgggcatcctaagacatcgatgctggtgcaggtcgtcggcgcgggcatgaatatcattcttgatccgattttcattttcactttcaacttgggcgtcgcgggcgcggcctgggcgacgataatttcgcaatttatttccttcgtttttgtgctgggatatttttcctcaaagtggacgcggctgcgcttccgtttcaggaatatgaagctggacgcgaaactcacaggaagtattctcgccatcgggtttgccccgtttgtgatgcagcttgcgatgagccttgtgggtattttgcaaaacgcgacaatcctgcgatacggcggggatgaggcgctgaccgccatgaccatatttctcagcgtgctcgttgtgatcatcatgccgatcaggggtatcggtcagggcgcgcagccgatcatcgggtaa

SEQ ID NO: 16550 - protein, 153 aa, Unknown
  Obtained from environmental sample
  misc_feature (1)..(153): Xaa is any amino acid
MSPGLTHFIRSDGHPKTSMLVQVVGAGMNIILDPIFIFTFNLGVAGAAWATIISQFISFVFVLGYFSSKWTRLRFRFRNMKLDAKLTGSILAIGFAPFVMQLAMSLVGILQNATILRYGGDEALTAMTIFLSVLVVIIMPIRGIGQGAQPIIG

SEQ ID NO: 16551 - DNA, 336 bp, Unknown
  Obtained from environmental sample
  misc_feature (1)..(336): n is a, c, g, or t
ttgagattaagaccggcggggtggattttaagatttaaggatggactaacaatgccgacagagaaaaatcttcgagatgttgcggtcgccctgaaatatgacgactctgacgaccgcgccccagtggtctccgccaaaggcttcggcctaatggcggagcgtattcgggaactcgcgaaactgagcggcgtccccattcggcaagacagcgacttggtggagttgttggcggagattgacgtggacagggaaattccggcgcaattgtacgcggctgtggcggaagtgctggctatggtgtacaaggcgaacaacgcgatgggggagaagccgtaa

SEQ ID NO: 16552 - protein, 111 aa, Unknown
  Obtained from environmental sample
  misc_feature (1)..(111): Xaa is any amino acid
MRLRPAGWILRFKDGLTMPTEKNLRDVAVALKYDDSDDRAPVVSAKGFGLMAERIRELAKLSGVPIRQDSDLVELLAEIDVDREIPAQLYAAVAEVLAMVYKANNAMGEKP

SEQ ID NO: 16553 - DNA, 765 bp, Unknown
  Obtained from environmental sample
  misc_feature (1)..(765): n is a, c, g, or t
gtgctggcaaaaggcaaaacgctgaaaattatctggcggccttttgaaactctgcccgatgtccggagaacactggataccataggagctattgaaaccggaatgttaaatacggttagcggaagaagcgtcgttgatctgcttgcctcggcgtttttgaacgagtgggtttacaggcgttcattggcgttccgaaagagttttggcaagcaaagcggaggccgggagtacctggaattacttaacctgtttttttacgaaactgaaattgatgtttcagctcccgcaaggcgcagcctgccccaggccatagacagatggctttccgtactgcacattgattttaccgctttccgctacagtcttaccgtaagagacgcccacgcaaaacgcgcttttggaaccgattttaagttttccctttcgatggatgttatcaccaaagaaaaagacgagataaagaaaatccccctttgccgatgcaaagatttggaagcgcttaaggccccgatagcactgtctaattatctgcctgaaattcgcctgcttgcttctgtgtccgaaaaaacgcggaaagaaagcgttgagctttcgcaagcgaggcttgttaattttttggaatccgcttctttcctgcttnnaccgtctgncatgacagtgggactgccgaagagtctgcacagggaactaaagcccaccgctcttggtcagggccgatactgcccggaaaaggctctggttcactcaagcgttatctggacttga

SEQ ID NO: 16554 - protein, 254 aa, Unknown
  Obtained from environmental sample
  misc_feature (1)..(254): Xaa is any amino acid
MLAKGKTLKIIWRPFETLPDVRRTLDTIGAIETGMLNTVSGRSVVDLLASAFLNEWVYRRSLAFRKSFGKQSGGREYLELLNLFFYETEIDVSAPARRSLPQAIDRWLSVLHIDFTAFRYSLTVRDAHAKRAFGTDFKFSLSMDVITKEKDEIKKIPLCRCKDLEALKAPIALSNYLPEIRLLASVSEKTRKESVELSQARLVNFLESASFLLXPSXMTVGLPKSLHRELKPTALGQGRYCPEKALVHSSVIWT

SEQ ID NO: 16555 - DNA, 885 bp, Unknown
  Obtained from environmental sample
  misc_feature (1)..(885): n is a, c, g, or t
atgagctttgcggcggacttggcgatacccacatttcaaaacatcgcgggtaaattcggtctttcctttttggttgcggaaacaataaatatttcagcttcttcccggtttaatttacgggaaagcttcgataatcaaatcgggggcaacagcctttccggtattccggcaatagggatcagcgccatctttaagcttaaatcaggcgggcaaagaatcatcgggggagctctgccctcagaaggtgaagttacggcagatctggcggtcaaacccctttacaacgggatctgggcaatgggaggaggcgcgacctggactgtaggagtggcggacaagaatcctccggtaataactttagactaccctgaaacggtgtggatttcacccaacaatgacggcaaagccgattacctggaattccccataagcattacggacgaaagatttatcacggaatgggtttttgaaataattgatgagaacggcgcggttgcaagggtttaccggaacaaagaaaccaggcctgagacccggagcgtccaaaatttgattgacatgctacgttcggttaattcaggggtagatgttccggaatccatgcgctgggatggcacactggatataggcggaatagcgccggacgggaggtatacctttaccgtcaccgcaaaagatgataacggcaacacttcaatggcggggccttacgaagtatatattgacaacaccccgcctgaaattacagtgaacgcgtttgcgggcgagatgaacattttcgcccctggaagcggaggcggcaggaatacgctgaacataacccatacaggttcccgggtagatttatgggtagggggcgtttacaatccctgggcagcaaggtaa

SEQ ID NO: 16556 - protein, 294 aa, Unknown
  Obtained from environmental sample
  misc_feature (1)..(294): Xaa is any amino acid
MSFAADLAIPTFQNIAGKFGLSFLVAETINISASSRFNLRESFDNQIGGNSLSGIPAIGISAIFKLKSGGQRIIGGALPSEGEVTADLAVKPLYNGIWAMGGGATWTVGVADKNPPVITLDYPETVWISPNNDGKADYLEFPISITDERFITEWVFEIIDENGAVARVYRNKETRPETRSVQNLIDMLRSVNSGVDVPESMRWDGTLDIGGIAPDGRYTFTVTAKDDNGNTSMAGPYEVYIDNTPPEITVNAFAGEMNIFAPGSGGGRNTLNITHTGSRVDLWVGGVYNPWAAR

SEQ ID NO: 16557 - DNA, 726 bp, Unknown
  Obtained from environmental sample
  misc_feature (1)..(726): n is a, c, g, or t
atggcctttaatcttagaacctcgcctccgcagggtaatatgtcagtgccgtactatatttttgcacctaacgggaacggaaaccgcgatacactgcccatcagcgtcacaacagagggcaatgacgagtggaatctcgttatttcctccggcgataacacggcggtcaaatcctggaactggacgggaagagccccagcggtatcaattatctgggacggaaaagacgaagccggaaacatcgtaaacgacggaacctataacataaccctcagcgctaccgatgacgcgggaaacagcacacgcaaaaacataaacaacataattgttgacgccaatgtgccaaagatcttccttacggcctccgcccaggcaatcgctccaaagccggggcaaaccgaggccatgcgctttaacatcatggcaactccgtctgaaggcgtcactttctggaagctggaattaagggacgataacaacgggctaattaaatctttcccgtcccaggccggcggaaccggaccgctccccacagtcctgccctggaacggcgccaatgaaagaaacgaaataatagaagggcgcattaccccttccttaaccgtaaattacgaaaagggtgatgttgtcagggtatcggcgccacccataatggtggatatcaccggtcccgttctcggcttccattatgaacctgaattcttcagcccggataacgacgggtag

SEQ ID NO: 16558 - protein, 241 aa, Unknown
  Obtained from environmental sample
  misc_feature (1)..(241): Xaa is any amino acid
MAFNLRTSPPQGNMSVPYYIFAPNGNGNRDTLPISVTTEGNDEWNLVISSGDNTAVKSWNWTGRAPAVSIIWDGKDEAGNIVNDGTYNITLSATDDAGNSTRKNINNIIVDANVPKIFLTASAQAIAPKPGQTEAMRFNIMATPSEGVTFWKLELRDDNNGLIKSFPSQAGGTGPLPTVLPWNGANERNEIIEGRITPSLTVNYEKGDVVRVSAPPIMVDITGPVLGFHYEPEFFSPDNDG

SEQ ID NO: 16559 - DNA, 837 bp, Unknown
  Obtained from environmental sample
  misc_feature (1)..(837): n is a, c, g, or t
atgggcagcgtaacagccgccgacgtgtgcgccgttacggcattgcctcttgctactgtcaacgagtttttgccaaaggcggcggatgagtattcggggcatttgcaggtaacgcagtcgggtgaaattctatattattttcccaacggttttacaagccgttacaaaggattcggcgtaaccgtaaaaaaagccgttaataaaacagcgtcatttttaaagatcgcttcggtttttttgtttaaagtctggatcatggtaatgcttattggatattttatactttttttagctcttgcgattggcagtatttttttgacaatagcggcacaatccaaaagcagaggagggcggcgcagcagttccgtaaattttggattgttcaatcttatatggcggctttggttttattcggaattgactcgtccccggtacaattatggaacaaattatgttaaaaaagccgcgccgaaacggccaatgcacaaggcggtattttcttttgtttttggagaaaacgatcctaacgcgaattgggaagatcagaaaaacaaagcggttatatcttacattcaggcaaacagcggagtaatttcccttcccgaatacatggcgtttacgggaatgaacagccttgaagcggaaacggacatcctttctttctgttccaagtttgaaggaagccccgaagtaacggaggagggaaccattgtttatcgttttgacaaactgctgttacgcgccgattcggctaaattcagcgaacttattccgcctgtaaagcggcttaaaatattttctgataacgcaaaaacaatgaacggctggttgcggtaa

SEQ ID NO: 16560 - protein, 278 aa, Unknown
  Obtained from environmental sample
  misc_feature (1)..(278): Xaa is any amino acid
MGSVTAADVCAVTALPLATVNEFLPKAADEYSGHLQVTQSGEILYYFPNGFTSRYKGFGVTVKKAVNKTASFLKIASVFLFKVWIMVMLIGYFILFLALAIGSIFLTIAAQSKSRGGRRSSSVNFGLFNLIWRLWFYSELTRPRYNYGTNYVKKAAPKRPMHKAVFSFVFGENDPNANWEDQKNKAVISYIQANSGVISLPEYMAFTGMNSLEAETDILSFCSKFEGSPEVTEEGTIVYRFDKLLLRADSAKFSELIPPVKRLKIFSDNAKTMNGWLR

SEQ ID NO: 16561 - DNA, 831 bp, Unknown
  Obtained from environmental sample
  misc_feature (1)..(831): n is a, c, g, or t
atggacgctggcagggccataatgaatgagatgctggggcggctaaagcagacgcacataggcgtaatacccgcctccacctaccgcgacctcagcgaaggcggtgaaaggggggcctccagtgcctacacgcatggcttggatatccgaatcttggaaggaaaagccatcgtcacccgcgtcgaggctggctcgcccgcaagcactgccggagttaagccaggatgggaaatactaaaggcggatggcagggaagcctcactgggaataaagcgcgtggaagaactttattctaagagtacgcaaaaagacctgatgggttctagggtgatactgaacgccatcaatggggccccttcccatgccacagagatagagtttcacgatggcaaagaagtaagggccataaaacttgacagggccgaacctaagggcagcagggttaagtatggggaaatgccacccagctatttttgggtggagacaaactttagggacgatgggataagggtcatccagtttaacttctggttcaaccctgaagctgtcgccaaggctttttcagagatcatagccaacgcggacaaggcaaagggcttcatcatagatctgcgggggaaccccggcggcatgggtgctatggctatgggcgcagcgggctggttcaccagcaagaggggcctaaagctggggactatgtccatgcgaggcaatacgctgaatttcgtagtgttcccgcngccaaacgccaccagcgcgcccgttgccatactggttgacggctgctctgcctccacctcgagatattcgcgggccggaatgcagaactaa

SEQ ID NO: 16562 - protein, 276 aa, Unknown
  Obtained from environmental sample
  misc_feature (1)..(276): Xaa is any amino acid
MDAGRAIMNEMLGRLKQTHIGVIPASTYRDLSEGGERGASSAYTHGLDIRILEGKAIVTRVEAGSPASTAGVKPGWEILKADGREASLGIKRVEELYSKSTQKDLMGSRVILNAINGAPSHATEIEFHDGKEVRAIKLDRAEPKGSRVKYGEMPPSYFWVETNFRDDGIRVIQFNFWFNPEAVAKAFSEIIANADKAKGFIIDLRGNPGGMGAMAMGAAGWFTSKRGLKLGTMSMRGNTLNFVVFPXPNATSAPVAILVDGCSASTSRYSRAGMQN

SEQ ID NO: 16563 - DNA, 822 bp, Unknown
  Obtained from environmental sample
  misc_feature (1)..(822): n is a, c, g, or t
atgaattccattataaaactattctccctcttttccaaaaaagaaaagagccggctaatcctgatcgccgtcgccgtgctcttcgcctcactgttggaaatgntggaagtcggctccctgggcccgtttatggccctggccgccgatccggatatggtgaaccgccagcccgcgctggcgtttttataccggagcgccggctttgaaggagggaacaataattcctttctggttttccttggcatcgcgatttttattttgataatcgccgtaacggcgataaggacaggcgttttttatatcgcctaccgttttacggcaaaccgccgctatacgttaagcgcgcgcctgttcaggcagtatttgttccagccgtaccagttctttttaaatcataacaccggggagctgtccaaaaatcttttgtcggaagtggacatggttattaacaatgtcctgtggccggccatgaatatctttacccgcggcatgatggccctggcgatattcgttttccttgtcatacttaaccccctggtggcggttcttgccgccgccgtgtttggcgtgctgtattttgggctgtacgcgttcgtgcgcccccggcttgtccgccacggaaaggacgccctggaggctaaccgcctgcgttttaaggcctccgcggaagccttcgggggaattaaagagctaaaaatactggggaaagaaggtttttttattaacgcctacagccagggggcaaggcgtttcgccgtttcccaggcggccaatcagattttttcgaccctgccggcgcaagttatccattcttggcaatag

SEQ ID NO: 16564 - protein, 273 aa, Unknown
  Obtained from environmental sample
  SIGNAL (1)...(29)
  misc_feature (1)..(273): Xaa is any amino acid
MNSIIKLFSLFSKKEKSRLILIAVAVLFASLLEMXEVGSLGPFMALAADPDMVNRQPALAFLYRSAGFEGGNNNSFLVFLGIAIFILIIAVTAIRTGVFYIAYRFTANRRYTLSARLFRQYLFQPYQFFLNHNTGELSKNLLSEVDMVINNVLWPAMNIFTRGMMALAIFVFLVILNPLVAVLAAAVFGVLYFGLYAFVRPRLVRHGKDALEANRLRFKASAEAFGGIKELKILGKEGFFINAYSQGARRFAVSQAANQIFSTLPAQVIHSWQ

SEQ ID NO: 16565 - DNA, 888 bp, Unknown
  Obtained from environmental sample
  misc_feature (1)..(888): n is a, c, g, or t
atggattcagttgaattacttgcaataatcaaacgcggcgagtctaaaaaaatccaattcaaggaaaaactgccgcatattgacagccttgcccacgagctaatcgcgtttgcgaataccaatggcggttctctcttgataggcgttaatgataaaaccggcgatttgaacggtttgtcattcaatgaaattcaacaaagtaattcacaaatagtgaatgccacgatacaaaatgtttttccctcaatcagcgtgttaactgaaacaattactgttgaagatcataatataattgtgattaatgtttctgaaggaaccgataaaccgtataaagacagaaacggaactatttatgtaaaaaacagatccgacaagcgcaaagttacatcaaatgatgaaatagcgcgtttattacaagaaggcggttcgttaaacgcggaagaaataccggtaaagggaagttctgtaaaagacattgatgtccggcttttttcagaatattttaaaaaagaatttgaaataagctatgaagaaaaggggctgaccctggaagaagcgcttatcgcgaaaaaaattatgcgcaacaatcacttgacgcttaccgggcttttattttttggaaacgcaccgcaatcatttcgcccggctttttcaataaaagcggtaatgttcgcgggtaacgatattggcagtaataattaccggagcaaaccggaagatttaaccggaaccattccagaaatgttcaaacaggggatgttgtatattaaaagctgtatcagatatttgcaggaaaggcagggcttcaactcgcatggcatacaggaaatatctattattgctattgaagagttttgcagaacgcgcttatcaccgtggatattttaa

SEQ ID NO: 16566 - protein, 295 aa, Unknown
  Obtained from environmental sample
  DOMAIN (37)...(131): Divergent AAA domain
  misc_feature (1)..(295): Xaa is any amino acid
MDSVELLAIIKRGESKKIQFKEKLPHIDSLAHELIAFANTNGGSLLIGVNDKTGDLNGLSFNEIQQSNSQIVNATIQNVFPSISVLTETITVEDHNIIVINVSEGTDKPYKDRNGTIYVKNRSDKRKVTSNDEIARLLQEGGSLNAEEIPVKGSSVKDIDVRLFSEYFKKEFEISYEEKGLTLEEALIAKKIMRNNHLTLTGLLFFGNAPQSFRPAFSIKAVMFAGNDIGSNNYRSKPEDLTGTIPEMFKQGMLYIKSCIRYLQERQGFNSHGIQEISIIAIEEFCRTRLSPWIF

SEQ ID NO: 16567 - DNA, 759 bp, Unknown
  Obtained from environmental sample
  misc_feature (1)..(759): n is a, c, g, or t
atgaaagggctcttcatgccgcctttccccgaagaattttttctcaaggcctgtatagaaacagtaaaacgcaacgcgcggcttggtttttacccccattacaagccggaatgggaaaaagactcttttatgagcgcggactctgtgtatatacggccctttaccattgccgaaggcggcattggcgtaaatatttcccaggaaccctgggttcttgtaatcaacacgccggtaagcgcttacttttcaggcggcaattccgacgcggttgtaaccgagcgtatccgggcgacgccaaagggaaccggctggataaagtcctgctcaaattatacaatagcggctctcgcgaaacatgaagccattgaggcaggctacatggaatgtgtgtttcttgacgctgtcgagcgcaagtacgttgaggaaggctcgtcctgtaacatctttttttatttaaagtcaggcgagcttgtaacgccgaagttaggcgacacgattctgcccggcataacccgcgccagcgtcattgagcttgcccgagaccggagcattaaaacaagcgagcggagtatttcgattgaggaagcgcttgcggaaacaaaggaatgttttgtcagcggaacagccgcaggcgcggtgcctcttacttctctgaccttccagggcaaaaaaacgatcttcaataacggcaaggaaggcgaacttacggcggaaatgaggaacaccctgaaaggcatacaatacgggacgattccctga

SEQ ID NO: 16568 - protein, 252 aa, Unknown
  Obtained from environmental sample
  DOMAIN (2)...(244): Aminotransferase class IV
  misc_feature (1)..(252): Xaa is any amino acid
MKGLFMPPFPEEFFLKACIETVKRNARLGFYPHYKPEWEKDSFMSADSVYIRPFTIAEGGIGVNISQEPWVLVINTPVSAYFSGGNSDAVVTERIRATPKGTGWIKSCSNYTIAALAKHEAIEAGYMECVFLDAVERKYVEEGSSCNIFFYLKSGELVTPKLGDTILPGITRASVIELARDRSIKTSERSISIEEALAETKECFVSGTAAGAVPLTSLTFQGKKTIFNNGKEGELTAEMRNTLKGIQYGTIP

SEQ ID NO: 16569 - DNA, 723 bp, Unknown
  Obtained from environmental sample
  misc_feature (1)..(723): n is a, c, g, or t
atggagaaacggcgacagctgattaccgttgatcctaacagggattctgaaaagcaggtcagtcagattgaggaacttgtttcccggaaaatcgatgctctttttctcaatcctgttgacctagaagcgatccgtcctgcgctggtttcccttaaccatgctaaaatccctgtcattaactttgactcggaagttaaggatctggatatggtagccgcttttgtgggctctgacaacaggaacgcgggttatatctgcggtgttgaccttgtaaagcgtttacccaaaggtggtcccatcgccattcttgattctccggcaaggatctcgactcgtaaccgcatcgacggtttcaaagaagcaattgaggggcatggttttaccatagtgttcctgagggacgcgcagggcaatgcttctctggcacggcaatataccgaagagatgctcaagtccaataccaaagtagtcgcccttatgggcagcaatgacattgtggcgcttgccgctcatgccgcttgccagtctgcgttccgcactgacattctcatatacggcgttgacggatcacctgcagccaaagccgaaatcgccaaacgcggacagtttgccggctccggcgcgcaaagcccggtctccatcgcnaaggaatctgtcacgattgcgtataagattctgaacaaacaaccttacgaaaaaaagatcccggttaaacattcatga

SEQ ID NO: 16570 - protein, 240 aa, Unknown
  Obtained from environmental sample
  misc_feature (1)..(240): Xaa is any amino acid
MEKRRQLITVDPNRDSEKQVSQIEELVSRKIDALFLNPVDLEAIRPALVSLNHAKIPVINFDSEVKDLDMVAAFVGSDNRNAGYICGVDLVKRLPKGGPIAILDSPARISTRNRIDGFKEAIEGHGFTIVFLRDAQGNASLARQYTEEMLKSNTKVVALMGSNDIVALAAHAACQSAFRTDILIYGVDGSPAAKAEIAKRGQFAGSGAQSPVSIAKESVTIAYKILNKQPYEKKIPVKHS

SEQ ID NO: 16571 - DNA, 741 bp, Unknown
  Obtained from environmental sample
  misc_feature (1)..(741): n is a, c, g, or t
atgccgcgtatttcgcaagctcaggcggcgggcatccgcgtggtgaattttgaggacgagggttcgggcgcggacgaggcggatctcgtcatcaatgcgctatacggcgacaagggccgggacgcccaccgcctgtacggctggcggtatttctgcctgcgggacgaattcgccgccgggcgccgcaacgtcttccggccacgggcgcgtaccgtgctgatcagcttcggcggcacggacccttccgacttcacccgcaagaccttggatgtcgtggaacccctgtgccgggaacgggggctggacatccgcgtggtcgccggccccggctacgcgcaccgcaaggcgcttgagcggcatctggcggagcttgccaatccgcgcctgagctttacccatgccaccaacgtcatgtcgcgcatgatggagggcgcggatttggccgtctgctccgccgggcgcacggtgtatgaactggcgcatatgcgtgtgcccgccctggtcatggcccaccacgaacgcgaactgagccatcgctttgcccgtgccgcgaacggtttttcctggctggggctgatgcagccggattttcataccgcgaagcttcgccgcgcgttcctgcgcatgttggagccttccgtgcgcgcgcggtgctttgagcgtcaggatcgcttccatttcgcaaaaaacaagggccatgtcgtgcagcgcattgtgcgtctgctcgggagcgagggctag

SEQ ID NO: 16572 - protein, 246 aa, Unknown
  Obtained from environmental sample
  misc_feature (1)..(246): Xaa is any amino acid
MPRISQAQAAGIRVVNFEDEGSGADEADLVINALYGDKGRDAHRLYGWRYFCLRDEFAAGRRNVFRPRARTVLISFGGTDPSDFTRKTLDVVEPLCRERGLDIRVVAGPGYAHRKALERHLAELANPRLSFTHATNVMSRMMEGADLAVCSAGRTVYELAHMRVPALVMAHHERELSHRFARAANGFSWLGLMQPDFHTAKLRRAFLRMLEPSVRARCFERQDRFHFAKNKGHVVQRIVRLLGSEG

SEQ ID NO: 16573 - DNA, 648 bp, Unknown
  Obtained from environmental sample
  misc_feature (1)..(648): n is a, c, g, or t
atgagtttttcgaggacattacagcttacgagctatctgnaaaaggaaggagcttctttatcgctggaagaacngacaaggtttattttttcccattctgccttacgcgaaggctgggatatccccaacgtgttccagatttgcacattgaagcgctctgacagcgccacggcgaaacgccaggaagtggggcgtggattgcgtctctgtgttaatcaggaaggggacaggcaggatattgacgtatgcggggagacattggttcacgacttgaataaactgacggtaattgctagtgagagttacgcggattttgtctctgaattgcagagtaaaattcgtgaggatctgtacgaacgcccggtaaaggcaagcaaagagtatttcaccgataaaacactttatgtcgatgacaacattcatactctttcagttaatgaagcgacatcggtatataattaccttgtcaggaacgactacgtagacgacgacggtgcggtcactcccaagtaccgcgctgcggctgaaaacgggcagttagagccattgaaggaggaacttgcgccattcgcaagaggaatacatacgcttgtgcaggctatttttgaccctgatgttatgaaagatantgatcgtagacgggcatga

SEQ ID NO: 16574 - protein, 215 aa, Unknown
  Obtained from environmental sample
  misc_feature (1)..(215): Xaa is any amino acid
MSFSRTLQLTSYLXKEGASLSLEEXTRFIFSHSALREGWDIPNVFQICTLKRSDSATAKRQEVGRGLRLCVNQEGDRQDIDVCGETLVHDLNKLTVIASESYADFVSELQSKIREDLYERPVKASKEYFTDKTLYVDDNIHTLSVNEATSVYNYLVRNDYVDDDGAVTPKYRAAAENGQLEPLKEELAPFARGIHTLVQAIFDPDVMKDXDRRRA

SEQ ID NO: 16575 - DNA, 873 bp, Unknown
  Obtained from environmental sample
  misc_feature (1)..(873): n is a, c, g, or t
atgaatcgcggtaacagaggagattgccatgtatacgccggttccatgagcgcgggtgaatttatcagccatgaggaaatcatggcctcgattgactgggtagaggaaaacaaacacaacgaaaatctgattagccggataacgcggaaagcctcggaaaacaagggcttaaaccaccgcgaggcggctcttcttctggaagcgggcgataaagatgaaattttccggcttgcgaggcggataaaagaagcgttttacggaaacaggatagttctttttgccccgttgtacctttccaattattgcgtaaacggctgtctgtactgtccctatcattcgcaaaacaaaactatggcgcgaaaaaaactttcacaggaagaaatacgccgggaagcgatagccctgcaggatatggggcataaacgccttgccatagaatcgggggaagacccggttaataaccctattgaatatatcgtagagtcaatggaaacgatatacgggataaaacataaaaacggggcgatacgccgcatgaatgtgaatatcgccgcaacaactgtagatgattataaactgctcaaggacgccggtatcggaacatatattctgtttcaggaaacatataaccgggaaaggtataatgaactgcacccgtccggtccgaaatcggactatgactggcacaccgaagccatggacagggccatgcatggcggtatagatgacgtagggttaggcgttttattcggccttggtcaatatctttacgaatttatagcgatactcatgcacgccgaacatttggaaacggcgcacggcgtanggcctcataccataagcgttccgcgcatacgcgccgccgaagaataa

SEQ ID NO: 16576 - protein, 290 aa, Unknown
  Obtained from environmental sample
  DOMAIN (96)...(266): Radical SAM superfamily
  misc_feature (1)..(290): Xaa is any amino acid
MNRGNRGDCHVYAGSMSAGEFISHEEIMASIDWVEENKHNENLISRITRKASENKGLNHREAALLLEAGDKDEIFRLARRIKEAFYGNRIVLFAPLYLSNYCVNGCLYCPYHSQNKTMARKKLSQEEIRREAIALQDMGHKRLAIESGEDPVNNPIEYIVESMETIYGIKHKNGAIRRMNVNIAATTVDDYKLLKDAGIGTYILFQETYNRERYNELHPSGPKSDYDWHTEAMDRAMHGGIDDVGLGVLFGLGQYLYEFIAILMHAEHLETAHGVXPHTISVPRIRAAEE

SEQ ID NO: 16577 - DNA, 624 bp, Unknown
  Obtained from environmental sample
  misc_feature (1)..(624): n is a, c, g, or t
atgatcagatcggccgaggtgcttttgccggatctggccgaaacgcaaatccaagcgctgggaatttttaccggcggctttcatcgggcatntaatataatcgcttttattacgatacccgttacttttttttcactggcccagggacagggcttgatagctctccttttccaaaccagaagttttgacgaggaatcggcgcggttgaccctggcggcttttcactttcatatgccggggctttactttattgcacttaaccgcatactggccccggccttttacgcacagagcgatgcaaagtctcctaccattgcggggattttttcgtttgtcgttaacatggcgctggccgctgttctggcgtttcgcttcaaaggctcaggaattgcctttgccttgtcgtttgccagcgcagttaatacggtggcgcttttgtttttttttagaaggaatcgggagattactcttggccgtaccctaaagtccgcccttttgtacaccataaaactgattttattttctgccctttgccctcatccnngctctctgcttcgccggggatttcggggcttttttctgggaggggcagagtcatttcctatggggcgccgcttttgctaa

SEQ ID NO: 16578 - protein, 207 aa, Unknown
  Obtained from environmental sample
  misc_feature (1)..(207): Xaa is any amino acid
MIRSAEVLLPDLAETQIQALGIFTGGFHRAXNIIAFITIPVTFFSLAQGQGLIALLFQTRSFDEESARLTLAAFHFHMPGLYFIALNRILAPAFYAQSDAKSPTIAGIFSFVVNMALAAVLAFRFKGSGIAFALSFASAVNTVALLFFFRRNREITLGRTLKSALLYTIKLILFSALCPHPXSLLRRGFRGFFLGGAESFPMGRRFC

SEQ ID NO: 16579 - DNA, 609 bp, Unknown
  Obtained from environmental sample
  misc_feature (1)..(609): n is a, c, g, or t
gtgggtgatgaaatacaggtcttaattgtagacgactcagctttaatgcgtaaccttatcggtcatatgatagaggacacgccgggtttggcagtagcggaaaaagcgatgaacggtatattcgctttgcaaaaaattccccgtgtgaaccctgatataattgttcttgaccttgaaatgccggaaatgaacggtatagaattcttaaaagaacgaaaaaaacagggaattacgattcctgtagtaattttgtcgtcaatcgccgcacgcggcgctgaaattacaatggaagccctttcgcttggagcaagcgactttattcagaagccttcaggttccatatcanaagatattcatgaagttaaagatacacttgcgactatgctgctcggttacggcggctcataccgtaagtcacagggtaaaaagttnctaccccctcggaatacaaaaccgaaacaccgggcagaaaaaactctgatattgccgtcatttaacttggctgtcgctcccctgtactccgccaaggcacgaaaccagtacaaaaacgggcaagacagaataaatgccatcggattcacaagggggcctgacgctctgctggaataa

SEQ ID NO: 16580 - protein, 202 aa, Unknown
  Obtained from environmental sample
  DOMAIN (5)...(122): Response regulator receiver domain
  misc_feature (1)..(202): Xaa is any amino acid
MGDEIQVLIVDDSALMRNLIGHMIEDTPGLAVAEKAMNGIFALQKIPRVNPDIIVLDLEMPEMNGIEFLKERKKQGITIPVVILSSIAARGAEITMEALSLGASDFIQKPSGSISXDIHEVKDTLATMLLGYGGSYRKSQGKKXLPPRNTKPKHRAEKTLILPSFNLAVAPLYSAKARNQYKNGQDRINAIGFTRGPDALLE

SEQ ID NO: 16581 - DNA, 708 bp, Unknown
  Obtained from environmental sample
  misc_feature (1)..(708): n is a, c, g, or t
atggttgctccaaaccgttccgtacgggcgccagccccttctttcagttatactcctcccgatgggtatataagctggaatgtcaacggaatacgggcggttgagaaaaagggatttgtttcctggatggaaaaagaagactcggacatggtctgcgtacaggagaccaaggcgcgtcctgagcagctctcggcggaactccgggaaataaaggataaaacagggaagccctattacgcttattgggcctgcgccaataaggccggatattcgggaacggcgatttattccaaaaccgagccactgaatgtgaagtatttaggcataggcgaatttgatgacgaggggagggtagtgcaggcggagtataaggattttaccctcatctccgcttatttccccaattcccaggaaggcggaaggcggctggattataaactgggtttctgcggcgctgtcctggaactctgcaagaagtaccgggcagagaagaggcattttatcctttcaggtgactacaacatcgcccatacgccgattgatctcgccaggccaaaggaaaacgaggggaacgccggctaccttccggaggagcgggcctggatggatacttatacggccgcgggctttatagacagcttccggcattttcaccccggcgaaaccgggcagtacacctggtggactacctcggccgatctgtcttga

SEQ ID NO: 16582 - protein, 235 aa, Unknown
  Obtained from environmental sample
  DOMAIN (24)...(234): Endonuclease/Exonuclease/phosphatase family
  misc_feature (1)..(235): Xaa is any amino acid
MVAPNRSVRAPAPSFSYTPPDGYISWNVNGIRAVEKKGFVSWMEKEDSDMVCVQETKARPEQLSAELREIKDKTGKPYYAYWACANKAGYSGTAIYSKTEPLNVKYLGIGEFDDEGRVVQAEYKDFTLISAYFPNSQEGGRRLDYKLGFCGAVLELCKKYRAEKRHFILSGDYNIAHTPIDLARPKENEGNAGYLPEERAWMDTYTAAGFIDSFRHFHPGETGQYTWWTTSADLS

SEQ ID NO: 16583 - DNA, 447 bp, Unknown
  Obtained from environmental sample
  misc_feature (1)..(447): n is a, c, g, or t
gtgcatagcgaagatgccacaaaagctagacttcacgccgccttagaaaaagagggcgatgaactgcaactcaattatgactttggcgatgattggtgggtactgatgaggcttgaaaaaatactttgngacaaagacctgcccgacgctgaactgcctcgagtgcttgatggcgctggcttcggcatagttgaggacgtgggcggcacttggggtttggctgaactggcaaaagccttcaaaaagaagaaaggggccgattacaaacatttctgcgagtgggtaggcataaaaaatttcgactttactgcgtttgatgttgatgacatgaatttccgcctgaaaaaaataccgcgaatttataaacaaatctacgaggacaaactgtatccaacgaaaaaatccatagacctgatcgaacgcaaatatttaagcaagaagtcttga

SEQ ID NO: 16584 - protein, 148 aa, Unknown
  Obtained from environmental sample
  DOMAIN (1)...(111): Plasmid pRiA4b ORF-3-like protein
  misc_feature (1)..(148): Xaa is any amino acid
MHSEDATKARLHAALEKEGDELQLNYDFGDDWWVLMRLEKILXDKDLPDAELPRVLDGAGFGIVEDVGGTWGLAELAKAFKKKKGADYKHFCEWVGIKNFDFTAFDVDDMNFRLKKIPRIYKQIYEDKLYPTKKSIDLIERKYLSKKS

SEQ ID NO: 16585 - DNA, 915 bp, Unknown
  Obtained from environmental sample
  misc_feature (1)..(915): n is a, c, g, or t
gtggattataattgcgccgaagtacggttaatggtatacaacaacgacatggcgcaatcttggagcataaacaagaacgaaggtttttcagtgcgctgcgctatgacggaacgccacatagtaatgtggcacaccaacggcggcacgctcctccccgtgccgaccgccgtgactcacggcggcgacatagagaaccctgtctcgccggggaagatggaagaattcgccgaatacgtgtacgaaggcacgttctacgactccgcctatacgatgccggcgaacccgcctataattacggcgggacaaagcctctacgctaaatggacggccgtttatacggaatacaagttcggcgggtggtacttagactcgttattgacgataccggcggagttcccgatgaaaaacgtaaaacaagacttagatctgtacgctaaatggggcggcgcgtataccgtaacgttcaatcccaacggcggaacggtaactccgtactccgacaccaccaacatctacgggaaacttgtgtcgttgcccagacccgtcagaaaagactacatattcaacggatggtacaccgcgccggacggcggcgcgaaggtggggactgggacagtgttcagcgcgaacatcaccatatacgcgcagtggagggcgataagcaattcccacataatcacgttcgaccccaacggggggacggtgtcgcctacagttctctataccgaagaaggggagaaactcgcagtgttgcctataccgacaagagaccattgcctctttgtcggatggtatacggcggatggttggctggtaacgacgagtacggtgtttaacgcggacacggttgtctatgcgaggtggaaaggttatacgatagtattccgagttgacgggaaggcaattccggtttga

SEQ ID NO: 16586 - protein, 304 aa, Unknown
  Obtained from environmental sample
  misc_feature (1)..(304): Xaa is any amino acid
MDYNCAEVRLMVYNNDMAQSWSINKNEGFSVRCAMTERHIVMWHTNGGTLLPVPTAVTHGGDIENPVSPGKMEEFAEYVYEGTFYDSAYTMPANPPIITAGQSLYAKWTAVYTEYKFGGWYLDSLLTIPAEFPMKNVKQDLDLYAKWGGAYTVTFNPNGGTVTPYSDTTNIYGKLVSLPRPVRKDYIFNGWYTAPDGGAKVGTGTVFSANITIYAQWRAISNSHIITFDPNGGTVSPTVLYTEEGEKLAVLPIPTRDHCLFVGWYTADGWLVTTSTVFNADTVVYARWKGYTIVFRVDGKAIPV

SEQ ID NO: 16587 - DNA, 468 bp, Unknown
  Obtained from environmental sample
  misc_feature (1)..(468): n is a, c, g, or t
atgcggtatcgaaatccgcgccgccgggttttggtcagcacttgcccggcaacgccgcccgtgggaacgcccgcgccgttttgcccgtcagccccgtccgcgccatctttaccattcgttccgtcttgcccgtcaataccatctttaccgtcagccccgtccgcgcctttcagactggcgagccactctgcttccgttccggcgaagcctccgtcaacggctatttcatatgcgcttttgccgtctttgccatcaacgccatccgtgccgtcgttaccgtccgcgccgtcttgcccgtcagccccatccgcgcctttcagactggcgagccactctgcttccgttccgatgaaacccccgtcaaccgctgtttcatacgcgcttttgccgtccgtgccgtctttaccatcagcaccatccgcgccgtttttaccgtcagcaccatctttgccgtccgcgccgtcttga

SEQ ID NO: 16588 - protein, 155 aa, Unknown
  Obtained from environmental sample
  misc_feature (1)..(155): Xaa is any amino acid
MRYRNPRRRVLVSTCPATPPVGTPAPFCPSAPSAPSLPFVPSCPSIPSLPSAPSAPFRLASHSASVPAKPPSTAISYALLPSLPSTPSVPSLPSAPSCPSAPSAPFRLASHSASVPMKPPSTAVSYALLPSVPSLPSAPSAPFLPSAPSLPSAPS

SEQ ID NO: 16589 - DNA, 438 bp, Unknown
  Obtained from environmental sample
  misc_feature (1)..(438): n is a, c, g, or t
atggctaaattcggattggacaagttctccgccgacccgcccaaacccctcgcaggcaagcgcgtaggcgtcgtatgccacgcggcttccgtcgactcgtcttatcggcacgtgattgatatcctcgcggacggctccaaagaatcggcccgcaggcctgttctatccgcgatcttcggcccgcagcatgggcttttcgggcagacgcaggacaatatggtcgagtgggaggggagcctccatcccgccctcaaaatccccgtatacagcctttacggcgagcaccgcaagccgacgccgggtatgcttgacgggattgacgctatgatctttgacgtacaggacgtangcgcccgcccttatacatacgtgtggacgctaaagcactgtatggaggcctgcgccgagagcggtattcccgtctggngtgtcggatag

SEQ ID NO: 16590 - protein, 145 aa, Unknown
  Obtained from environmental sample
  misc_feature (1)..(145): Xaa is any amino acid
MAKFGLDKFSADPPKPLAGKRVGVVCHAASVDSSYRHVIDILADGSKESARRPVLSAIFGPQHGLFGQTQDNMVEWEGSLHPALKIPVYSLYGEHRKPTPGMLDGIDAMIFDVQDVXARPYTYVWTLKHCMEACAESGIPVWXVG

SEQ ID NO: 16591 - DNA, 837 bp, Unknown
  Obtained from environmental sample
  misc_feature (1)..(837): n is a, c, g, or t
atgcagggagttgtaaatacaggttggcaaatatttaaaagtacagatttaaactctcgatctgggtctagtacaactacgataccatttgaattcaatggaaaaatattttaccctcgaaaaggttctggttggcgtactaatgaaaatggtttaaaaattcttgctcaaaaaaatcgtttaatatcaacagaaaatactttgcgttatgttcatttttataacgattttccatattcaacactgtcaaatttatgggatgacttgatgggtgctcctaatgcaatatatgtagtacaaacaaatgagaaagcaattcaacgctgtctccttatgaccaccgaccccggcgacctggtactcgacattacttgtggcagcggaaccactgcctacgtcgccgaacaatggggacgccgttggattacctgcgacacttcccgtattgccatcactcttgcaaaaaaacgcctcatgaccgcaactttcgattattacaaactggcgcacccggaacagggagtatcaagcggctttgtgtataaaacagttccgcacatcactctcaaatccatagcaaataacgaaccgccggaacaggaaacgctctacgaccagccggaaattgaaaaaagaaaagtccgcatttctggcccctttaccgtggaagcccttcccgctccggttggtactccgacggtgaaaccactcgacgatgaagaaagccctgccccattcttccatgaaaacgcagctaaaaaacaatccgattggatgcaggaattaaaagcttcaggcatatggggcgcaagggcgagaaaantcgtgccgatctga

SEQ ID NO: 16592 - protein, 278 aa, Unknown
  Obtained from environmental sample
  misc_feature (1)..(278): Xaa is any amino acid
MQGVVNTGWQIFKSTDLNSRSGSSTTTIPFEFNGKIFYPRKGSGWRTNENGLKILAQKNRLISTENTLRYVHFYNDFPYSTLSNLWDDLMGAPNAIYVVQTNEKAIQRCLLMTTDPGDLVLDITCGSGTTAYVAEQWGRRWITCDTSRIAITLAKKRLMTATFDYYKLAHPEQGVSSGFVYKTVPHITLKSIANNEPPEQETLYDQPEIEKRKVRISGPFTVEALPAPVGTPTVKPLDDEESPAPFFHENAAKKQSDWMQELKASGIWGARARKXVPI

SEQ ID NO: 16593 - DNA, 333 bp, Unknown
  Obtained from environmental sample
  misc_feature (1)..(333): n is a, c, g, or t
gtggacgcgggaaacaagtatcatacacaagtcgggttattcggctccgtggctttacagttggcaaccgggctgccatatttgcgaaaaatttcggatattgatatatatctgcgccacttgggaagcggacaggaactggagctgttttacaaacagcttgcttctattgaagaacagttcaatgttaccgttgacgcggaaattgaatatcatgaacaatacggggtaaaactcaaagaactgttcgggccggggaagaccgttttggctaagggattatacaatgtgaccctgctggaaaaaacctgccttgaatcattcctactttga

SEQ ID NO: 16594 - protein, 110 aa, Unknown
  Obtained from environmental sample
  misc_feature (1)..(110): Xaa is any amino acid
MDAGNKYHTQVGLFGSVALQLATGLPYLRKISDIDIYLRHLGSGQELELFYKQLASIEEQFNVTVDAEIEYHEQYGVKLKELFGPGKTVLAKGLYNVTLLEKTCLESFLL

SEQ ID NO: 16595 - DNA, 471 bp, Unknown
  Obtained from environmental sample
  misc_feature (1)..(471): n is a, c, g, or t
atgagtgagacagacctgcgcgtatggattaacaatatcgaatactcaggtaaggtaaaaccttccatgaccntgctgcaattcatacgcgatgttgcggggcttacaggcacaaaatccggctgcgagaatggggaatgtggcgcgtgtacggtgctactggatggcaggccggtgcggtcatgtatcattctggctgttgaggcaaacggctgccatgtgagtaccgttgaagggctggctcagggcgagaaaccgcatccccttcagaccgcctttgtagaacatggcgcggtacaatgcggcttttgcataccgggtatgctgatggcgtccaaggctctgcttgataagtatcctcagccaaccgaggagcaggtgcgttacgcgctgggcgggcatatttgccggtgcggcggatataaagcaatcggtaccgcggtcgaaatggctaccggtgcgtcaaagtag

SEQ ID NO: 16596 - protein, 156 aa, Unknown
  Obtained from environmental sample
  DOMAIN (11)...(68): 2Fe-2S iron-sulfur cluster binding domain
  misc_feature (1)..(156): Xaa is any amino acid
MSETDLRVWINNIEYSGKVKPSMTXLQFIRDVAGLTGTKSGCENGECGACTVLLDGRPVRSCIILAVEANGCHVSTVEGLAQGEKPHPLQTAFVEHGAVQCGFCIPGMLMASKALLDKYPQPTEEQVRYALGGHICRCGGYKAIGTAVEMATGASK

SEQ ID NO: 16597 - DNA, 630 bp, Unknown
  Obtained from environmental sample
  misc_feature (1)..(630): n is a, c, g, or t
atgcggagcaaacttgcgttcataaaatcaacattagacaaattatatccaaatccgcctattcctcttgcttatacagatgctttttcttttttaattgcagttgtgctatctgcgcagtgcaaagattccgttgtcaatactgttactccaaaccttatggcaaaggctcccacaccgcaaaaaatggcagaactttctgaacagcaaatttattctctcataaaattatgcgggttggctaaaaacaaaagcaggtttttaaaagaactctcaaaaataatagtccaaaagcatgggggagaagtacctgattcatttgaggaattggaagcattgcctggcgttgggcacaaaacggcgagcgttgttatgtctcatatttttggtgttcctgcttttccagtggatactcacatacacaggcttgctcacagatggggtttaagcgatggcagctctgttttgcaaacggaaaaagatttaaaagccgctttttcaaaaaacgaatggacaaaaaggcatttgcagtttatttactatggcaggcagttctgccctgcgcgagggcacgatttaaagcaatgcgttatatgtgcggctttgaacaagcctattttaaaaccttaa

SEQ ID NO: 16598 - protein, 209 aa, Unknown
  Obtained from environmental sample
  DOMAIN (98)...(127): Helix-hairpin-helix motif
  misc_feature (1)..(209): Xaa is any amino acid
MRSKLAFIKSTLDKLYPNPPIPLAYTDAFSFLIAVVLSAQCKDSVVNTVTPNLMAKAPTPQKMAELSEQQIYSLIKLCGLAKNKSRFLKELSKIIVQKHGGEVPDSFEELEALPGVGHKTASVVMSHIFGVPAFPVDTHIHRLAHRWGLSDGSSVLQTEKDLKAAFSKNEWTKRHLQFIYYGRQFCPARGHDLKQCVICAALNKPILKP

SEQ ID NO: 16599 - DNA, 312 bp, Unknown
  Obtained from environmental sample
  misc_feature (1)..(312): n is a, c, g, or t
atgactcatctcgagcaggcggcttccgttcaggccgtccccggaacgaagatccgcgtgcccctcatcagcggcgccgaggagggcagcagtctgaccataaaccgcgtgttgctgacggccgacgacagcggcaacgtcagcgtgggttccccgacggtcgccggggcgacggtcagcgccaaagtcgtggagcacggcgcgggcaagaaggtgctggtcatcaagaagaagcgccggaaggactacaagcggaagaacgggcacaggcagaagttcacgcagatcgagatagtgtcgatcaacgcgtaa

SEQ ID NO: 16600 - protein, 103 aa, Unknown
  Obtained from environmental sample
  DOMAIN (6)...(96): Ribosomal prokaryotic L21 protein
  misc_feature (1)..(103): Xaa is any amino acid
MTHLEQAASVQAVPGTKIRVPLISGAEEGSSLTINRVLLTADDSGNVSVGSPTVAGATVSAKVVEHGAGKKVLVIKKKRRKDYKRKNGHRQKFTQIEIVSINA

SEQ ID NO: 16601 - DNA, 846 bp, Unknown
  Obtained from environmental sample
  misc_feature (1)..(846): n is a, c, g, or t
atgaaccccaaacgatcttatttggaactcaagcgccaggtaaactacgagggcgcttcctactacgagattcccgctgaccccgcgcgctacgcaagggaaacccctgccgaattaacaaggctgatagcgaactatctggttcttctgtccggaaacacaagcggctacgccaacgatcccctggaaccgaccgcgataaaggcgacggtgcagctgcgcaccgtaggcatgcatgacagcgaggaaattttccgggagattgaaaaatatatcgcggtgaatttcccgcgagacgtgcaagtcaccctggggggccagactatggttgaaagatcgcttaacaacctcgtggtgcagtcacagcttgtctcgatgcttttctcgctcctctgcgtttttatcataatcgccgtttccaacaaatcgcttatagccggagctatcggcataacgccgctttcaatctcgatacttatcaatttcgcggtcatgggcttcgcggggataaagctgaacctcggcacctcgatggttgcggcggtttcggtaggcgtgggcatagactacacgattcactgtctggaggcctacaaaagggaattcagggcaggcggagatgatttcctgcggcgcgtctttttcagttccggcaaggcgattatcattaacgcgatatccgtgggagccggcttcgcggtcctgctcgcgtccagcttcatcatgttaggcgatcttggcctgcttatcgccctgacgatgttcaccaacgcgcttatcagcctgacggtattgccggctttgctcgcggtggttaaaccgagatttatagggagtagggagtag

SEQ ID NO: 16602 - protein, 281 aa, Unknown
  Obtained from environmental sample
  misc_feature (1)..(281): Xaa is any amino acid
MNPKRSYLELKRQVNYEGASYYEIPADPARYARETPAELTRLIANYLVLLSGNTSGYANDPLEPTAIKATVQLRTVGMHDSEEIFREIEKYIAVNFPRDVQVTLGGQTMVERSLNNLVVQSQLVSMLFSLLCVFIIIAVSNKSLIAGAIGITPLSISILINFAVMGFAGIKLNLGTSMVAAVSVGVGIDYTIHCLEAYKREFRAGGDDFLRRVFFSSGKAIIINAISVGAGFAVLLASSFIMLGDLGLLIALTMFTNALISLTVLPALLAVVKPRFIGSRE

SEQ ID NO: 16603 - DNA, 576 bp, Unknown
  Obtained from environmental sample
  misc_feature (1)..(576): n is a, c, g, or t
atgattcgtgccgggcaggcaaaaaatattttggttataggagcggagatttgctcaagggttatggactggagcgaccgcaatacatgtattctctttggagacggcgcggcggcgattctgctatcagcaagcgaagatagcaatcgggggtttattgccgccgcgctcgcatccgatggaaacttagcaaacatactttacttaaacacgcttggagcagaggcttcttttttgagaatggaaggaaccgctgtgtataagctcgccgtatctgagctagaaactataaccaaaaaagcgttggaaaacgcagggctttccattgcagacatagatttatttgtgccccatcaggcaaatatccgcataataaaatcagttggcaaaaggctaggacttgcagaggaaaaggttatagcaaatgtggaaaaatacggaaacacctcctccgcctctattcccattgcactttatgaagcgcagcaaaaagggattttaaaaccgggtatgctcgtggcaatgcctgccataggtggcggcatgaattggggatgcgttttgttcaggtggtag

SEQ ID NO: 16604 - protein, 191 aa, Unknown
  Obtained from environmental sample
  DOMAIN (1)...(61): 3-Oxoacyl-[acyl-carrier-protein (ACP)] synthase III
  misc_feature (1)..(191): Xaa is any amino acid
MIRAGQAKNILVIGAEICSRVMDWSDRNTCILFGDGAAAILLSASEDSNRGFIAAALASDGNLANILYLNTLGAEASFLRMEGTAVYKLAVSELETITKKALENAGLSIADIDLFVPHQANIRIIKSVGKRLGLAEEKVIANVEKYGNTSSASIPIALYEAQQKGILKPGMLVAMPAIGGGMNWGCVLFRW

SEQ ID NO: 16605 - DNA, 792 bp, Unknown
  Obtained from environmental sample
  misc_feature (1)..(792): n is a, c, g, or t
atgatcagatcggccgagatgcagtttgcggtgcagcggggaacggtctatattctggaagcaaatcccagggcttcgcgcacggtgcctttcgtgtccaaggccatcggaacttcggtggccggcctggccgcgcaggtcatggccggccggcctctggccgaggtcaaattgaccgccgagccggagttgctgtaccatgcggtaaaagaatccgtcttccccttcgcgcgttttcccgtggccaccatcgaactggggccggaaatgcgttccacgggtgaagtcatgggcattgaccgcagtttcggcatggcctttttgaaggcccaggctgcggcctatacccgcataccctatacgggcagcgtgatcctgtccgtatccgaccgggacaaggttcccctgattcccttggcggccaagctggaaaagcttggattcaccctctatgccacgccgggcacgaaacaggttctggaggagaggggcatccaaatcagggaagtggtgaagatcgggccgaagcggccgcacattctggatctcttgcgcaacggcgacatccacatgatcgtcaataccgtcagcgggccgttttcggcgcgcgacgccacctccatccgctacgaagccatctcgcgccagatcacgctgctgaccacggtgactgccttggccgccgctgtggaagggctggagacgcggctgaccgataagcgcactgtggccccgctgcaggattattacgccggcatcgtggaaggcaaagcgctgcgccgggcgcgctga

SEQ ID NO: 16606 - protein, 263 aa, Unknown
  Obtained from environmental sample
  DOMAIN (135)...(221): MGS-like domain
  misc_feature (1)..(263): Xaa is any amino acid
MIRSAEMQFAVQRGTVYILEANPRASRTVPFVSKAIGTSVAGLAAQVMAGRPLAEVKLTAEPELLYHAVKESVFPFARFPVATIELGPEMRSTGEVMGIDRSFGMAFLKAQAAAYTRIPYTGSVILSVSDRDKVPLIPLAAKLEKLGFTLYATPGTKQVLEERGIQIREVVKIGPKRPHILDLLRNGDIHMIVNTVSGPFSARDATSIRYEAISRQITLLTTVTALAAAVEGLETRLTDKRTVAPLQDYYAGIVEGKALRRAR

SEQ ID NO: 16607 - DNA, 552 bp, Unknown
  Obtained from environmental sample
  misc_feature (1)..(552): n is a, c, g, or t
atgtctgtcgcgggcatgtctcatgccataacaattcgttcacctgtagcgttgggttccctcaaagaaattaaatgcccaaagctacccaaaacttaccgtctcatcacggcaaaaaatataccgggaaaaaacgttctttcggatttttcagtccctgtattggcggaaaacaaactttcatacataggccagcctgtggctatccttacgggaagtgaaaaatccgttcttgaggatattgcctcaaaaatcgaaattcaggcggaagaagaaaagccttctttttcgtgcaatacctatgagcccgagaatgaaattgtaaagagagattttatatcgggggatccctacaaagctctcggtgaaggcgaaatattattttctgctcgtatactaccgaaattcaggaacatgggtattncggaccctcacggaacggttggcgtgggcttaaatggcactgcggaaaaaaccgtggcctccgaaaaggggaaaaaagtaatggctgccctgaaaatttaccagcccctcaatgggcctatcaggtaa

SEQ ID NO: 16608 - protein, 183 aa, Unknown
  Obtained from environmental sample
  DOMAIN (1)...(93): Aldehyde oxidase and xanthine dehydrogenase, a/b hammerhead domain
  misc_feature (1)..(183): Xaa is any amino acid
MSVAGMSHAITIRSPVALGSLKEIKCPKLPKTYRLITAKNIPGKNVLSDFSVPVLAENKLSYIGQPVAILTGSEKSVLEDIASKIEIQAEEEKPSFSCNTYEPENEIVKRDFISGDPYKALGEGEILFSARILPKFRNMGIXDPHGTVGVGLNGTAEKTVASEKGKKVMAALKIYQPLNGPIR

SEQ ID NO: 16609 - DNA, 405 bp, Unknown
  Obtained from environmental sample
  misc_feature (1)..(405): n is a, c, g, or t
atgacgtttacagccatcggcgggaaaacgtccgcgccgtcaaatcagcaggccggtaaagcggctaaagcgcccgaggcaaaacaaggcgccgggaagggagtgtctaccggcggcagaagccgcgaaaacatcggggacgtgtatttgcaaaacgcggcctcgctacgctatgtgtacaaccaacgcaaacgcgagaaaacgggcctgaccggtagggtcaaggtcgagttcgccgtcaacgaattcggcaaggtgatcttcgccaaagttgtggaatctacgatgtccgacgccgagtttgacgcgatggtggtctcatgcgtgaggagttttgatttcggtaaaatagacagcccgggcgatgtgacggaagttgtttatccttttcacttttccgaatag

SEQ ID NO: 16610 - protein, 134 aa, Unknown
  Obtained from environmental sample
  misc_feature (1)..(134): Xaa is any amino acid
MTFTAIGGKTSAPSNQQAGKAAKAPEAKQGAGKGVSTGGRSRENIGDVYLQNAASLRYVYNQRKREKTGLTGRVKVEFAVNEFGKVIFAKVVESTMSDAEFDAMVVSCVRSFDFGKIDSPGDVTEVVYPFHFSE

SEQ ID NO: 16611 - DNA, 558 bp, Unknown
  Obtained from environmental sample
  misc_feature (1)..(558): n is a, c, g, or t
ttggccgtggtgtccgctttcaccgacgttctaatcgtgccgccgggcgaggccgattatacggcgatcatcataattattgcgatggtaacgatatccgggcttctgaggtttattcaggagctacgcagcaacaacgccgccaagaagctgaccgagatggtggagacgaccgtctgcgtaggcaggaaagtccacgacaaggaactgggcgaaacccgctccgaaaagaaagaactccccttaggcgaggtcgtcgtgggagatttggtctaccttgccgccggcgacatggttccggcggacgtgcggatcattcaggcgaaagacctcttcgtaagccaggccgccctcaccggggagagcgaaccggtggaaaaaatcaagaacgttatcgataaacccggagaaaacccgctggaactgaacaattnggcattcatggggacagacgtaatatccggttccgctatcgctttggttgtaaacgtgggcgacaacacaatactcggttccatagcgaagcaactccaaccaaagcaccgcccacagttttga

SEQ ID NO: 16612 - protein, 185 aa, Unknown
  Obtained from environmental sample
  DOMAIN (25)...(185): E1-E2 ATPase
  misc_feature (1)..(185): Xaa is any amino acid
MAVVSAFTDVLIVPPGEADYTAIIIIIAMVTISGLLRFIQELRSNNAAKKLTEMVETTVCVGRKVHDKELGETRSEKKELPLGEVVVGDLVYLAAGDMVPADVRIIQAKDLFVSQAALTGESEPVEKIKNVIDKPGENPLELNNXAFMGTDVISGSAIALVVNVGDNTILGSIAKQLQPKHRPQF

SEQ ID NO: 16613 - DNA, 876 bp, Unknown
  Obtained from environmental sample
  misc_feature (1)..(876): n is a, c, g, or t
ttgtgtccaccaccccggaaaaactcgttaaggaattcccccccacccttctcctttgggaaaaaaaattttttggggggtggaaaccgggggttttttggggggaagaaaaacctttccccaaccccctccaaattcctccagggggccgggggttccattttggggaaatttttttccggtttggggttttgggcttttttgcctttccggcccaagttccccttcagttttggtgctaaacttaaattagacatttctgccttaccattccgtggaataacgtgnacttggattcctgcgcaggccgcgaaggtggacgccagttctatcggcaagtttatgatttggatagggccaacaagttcagtattcgatataaccacatatatattgatgtttacctacatctgcccgttgatggttccgcacttcatcaaatcggcattcggcgtagacatcggcctcgaaagctgcaattggaacacgttggacacgttgaagaatttattgaacccggaacagattgaaaaagcgaaaggcttcttcgcctcgcttttcaacgccggatggtttgtggagtcgctgtggtctcagacgctggtcatacacatgatacgcacacccaagctcccgttcatacaaagccgggcctcttggcaacttagttcgctcaccacgctcggaatcgccaccggaacgatcatcccgttcacgttgctcggggataaactggggatggctcaactgccgtatgcgtacttcccctggttgatcggcactatctttgcctatatgttgttggctacgttaatgaagaatatctttgtgtggaggtacaaggagttgcgtagcggtcatcctcggccgatctga

SEQ ID NO: 16614 - protein, 291 aa, Unknown
  Obtained from environmental sample
  misc_feature (1)..(291): Xaa is any amino acid
MCPPPRKNSLRNSPPPFSFGKKNFLGGGNRGFFGGKKNLSPTPSKFLQGAGGSILGKFFSGLGFWAFLPFRPKFPFSFGAKLKLDISALPFRGITXTWIPAQAAKVDASSIGKFMIWIGPTSSVFDITTYILMFTYICPLMVPHFIKSAFGVDIGLESCNWNTLDTLKNLLNPEQIEKAKGFFASLFNAGWFVESLWSQTLVIHMIRTPKLPFIQSRASWQLSSLTTLGIATGTIIPFTLLGDKLGMAQLPYAYFPWLIGTIFAYMLLATLMKNIFVWRYKELRSGHPRPI

SEQ ID NO: 16615 - DNA, 513 bp, Unknown
  Obtained from environmental sample
  misc_feature (1)..(513): n is a, c, g, or t
gtgatccgcctgcaaaagcacatccaggttatgctcgatcatcgccactgtattgccctgatccacaaggcgctggatcacttccataagctgcttcacatcggcgaaatggaggccggtggttggctcgtcaaggatgtaaaaggttttacccgtggagcgcttggaaagctccagggcgagctttacccgctgggcctcgccccccgaaagggtaagggcggactggcccagtttcacgtaaccaaggcccaccgaaagcagcgtatccattttgcgggcaatctggggaatgggcgcgaaaaattcagccgcctcttctatcgtcatatccaaaacatcggcaatgcttttgcccttgtagtgtatgtccagagtctccctgttaaagcgcctgccgtggcaaacgtcgcaggtaatgtaaacgtcaggcaaaaaattcatttcaattttaattgttccgtcgccttcgcagttttcgcatctgcctccgcggaatctcggccgatctga

SEQ ID NO: 16616 - protein, 170 aa, Unknown
  Obtained from environmental sample
  misc_feature (1)..(170): Xaa is any amino acid
MIRLQKHIQVMLDHRHCIALIHKALDHFHKLLHIGEMEAGGWLVKDVKGFTRGALGKLQGELYPLGLAPRKGKGGLAQFHVTKAHRKQRIHFAGNLGNGREKFSRLFYRHIQNIGNAFALVVYVQSLPVKAPAVANVAGNVNVRQKIHFNFNCSVAFAVFASASAESRPI

SEQ ID NO: 16617 - DNA, 603 bp, Unknown
  Obtained from environmental sample
  misc_feature (1)..(603): n is a, c, g, or t
atgaattttttgcctgacgtttacattacctgcgacgtttgccacggcaggcgctttaacagggagactctggacatacactacaagggcaaaagcattgccgatgttttggatatgacgatagaagaggcggctgaatttttcgcgcccattccccagattgcccgcaaaatggatacgctgctttcggtgggccttggttacgtgaaactgggccagtccgcccttaccctttcggggggcgaggcccagcgggtaaagctcgccctggagctttccaagcgctccacgggtaaaaccttttacatccttgacgagccaaccaccggcctccatttcgccgatgtgaagcagcttatggaagtgatccagcgccttgtggatcagggcaatacagtggcgatgatcgagcataacctggatgtgcttttgcaggcggatcacataatagatctggggccggaagggggcgacaggggcggggcagtgttaatcacagggacgcctgaacaggtgtctgaatattccggctcgtatacagggcattacattcaagaagcatttaatcngcacggcaggaacccgcgaatgttggcgcgttaa

SEQ ID NO: 16618 - protein, 200 aa, Unknown
  Obtained from environmental sample
  DOMAIN (1)...(156): ABC transporter
  misc_feature (1)..(200): Xaa is any amino acid
MNFLPDVYITCDVCHGRRFNRETLDIHYKGKSIADVLDMTIEEAAEFFAPIPQIARKMDTLLSVGLGYVKLGQSALTLSGGEAQRVKLALELSKRSTGKTFYILDEPTTGLHFADVKQLMEVIQRLVDQGNTVAMIEHNLDVLLQADHIIDLGPEGGDRGGAVLITGTPEQVSEYSGSYTGHYIQEAFNXHGRNPRMLAR

SEQ ID NO: 16619 - DNA, 516 bp, Unknown
  Obtained from environmental sample
  misc_feature (1)..(516): n is a, c, g, or t
atggactctgttgaattagacgcgataatcaaacgcggcgagtcaagcaaaattcaattcaaggaacgtttgccccatcatgacaatcttgcccatgaattaattgccttttccaattcacaaggcggaaaaatcatttttggcgtaaatgataaaaccgggaacttaaacggccttgcttttaatgaaatacaacagataaatcaacagattgtaaatatcgcttcacaaaaagtgtatccgcctgtatttctgactacagagacagtaacgataaataataatcaaattcttgttgtaagcatagaagaaggattgtcaaaaccttataaagattcaaatggaactatttatgtaaaaaacggctctgataagcgcaaagtaacatcaaatgatgaaattgcccgcttattgggcagcaggaatttgttcgcggacgagatagaaatatttgattcaagtataaaagaccttgatatccggcttttttcggaatattttaaaaaagaattttga

SEQ ID NO: 16620 - protein, 171 aa, Unknown
  Obtained from environmental sample
  DOMAIN (37)...(131): Divergent AAA domain
  misc_feature (1)..(171): Xaa is any amino acid
MDSVELDAIIKRGESSKIQFKERLPHHDNLAHELIAFSNSQGGKIIFGVNDKTGNLNGLAFNEIQQINQQIVNIASQKVYPPVFLTTETVTINNNQILVVSIEEGLSKPYKDSNGTIYVKNGSDKRKVTSNDEIARLLGSRNLFADEIEIFDSSIKDLDIRLFSEYFKKEF

SEQ ID NO: 16621 - DNA, 426 bp, Unknown
  Obtained from environmental sample
  misc_feature (1)..(426): n is a, c, g, or t
ttgggttaccgcaaattaacatggggaaaagttgacagtaacggcccgttagatgtaattaacccaattgactattccgaccttattgatattacggatataaagggaagaaaaatcgcccgtccgatggttcatattacatggaacgccggcagtttttcaaaactggaaggagtttttattcccaactttacaggccaccgctttgcttacgatggacgctgggcagcttcgcaaactgaaaaaatgaaagaaatgactatgaatgaaatttatcaaagattaattccgttaattccgggcggagaaagcacaataaacgccatgtttccttccggtatttctgaatttccttctgaattgccgtttcccgacacgtcaggcattgaatattttcaggcgggtctccgtttacaactactataa

SEQ ID NO: 16622 - protein, 141 aa, Unknown
  Obtained from environmental sample
  misc_feature (1)..(141): Xaa is any amino acid
MGYRKLTWGKVDSNGPLDVINPIDYSDLIDITDIKGRKIARPMVHITWNAGSFSKLEGVFIPNFTGHRFAYDGRWAASQTEKMKEMTMNEIYQRLIPLIPGGESTINAMFPSGISEFPSELPFPDTSGIEYFQAGLRLQLL

SEQ ID NO: 16623 - DNA, 489 bp, Unknown
  Obtained from environmental sample
  misc_feature (1)..(489): n is a, c, g, or t
gtgattctaagccatcttgacgtgtgcccgcccggagaagaaaaattatgggacagcgatccgtggactgttatatgcaagaacgatcctcccggactcagggttatcgggcggggagttgaggataaccagcaggggttagtgtcctccattattacggctatggcgtttgtaagccaggggttaaagccttcgcggacaataaaacttttatttgcatctgacgaagaaatggggtcggcttacggcattgagtggcttgtaaagaatcacggcgatttatttaataaaaatgatatggtactggtgcctgacggaggggataaaaaaggcgaatgtattgaaattgccgaaaaaaatattttatgggcgaggtttgtaacccacgggatacagacgcacggttctatgcctgatttgggggcaaacgcttttttggctggcgctgaccttaccgtgcgtcttcatcatgacctcgtgccgatctga

SEQ ID NO: 16624 - protein, 162 aa, Unknown
  Obtained from environmental sample
  DOMAIN (1)...(158): Peptidase family M20/M25/M40
  misc_feature (1)..(162): Xaa is any amino acid
MILSHLDVCPPGEEKLWDSDPWTVICKNDPPGLRVIGRGVEDNQQGLVSSIITAMAFVSQGLKPSRTIKLLFASDEEMGSAYGIEWLVKNHGDLFNKNDMVLVPDGGDKKGECIEIAEKNILWARFVTHGIQTHGSMPDLGANAFLAGADLTVRLHHDLVPI

SEQ ID NO: 16625 - DNA, 540 bp, Unknown
  Obtained from environmental sample
  misc_feature (1)..(540): n is a, c, g, or t
atgatggacgaggcgcgactacggactggaacgccgagaataacgcgacggtcgtgctcttggacgagttcgcgaaagtcggccacgacaccngctttcaaaaatatagtgatcaaagacaacctgacgttcaccttgtatgatagcgtgaaggctatgtatcagtttgataggcaaggtaaggacgacggcaccggcaacgggttcttccagttagacaaccgcggtttcggcaacgagggccgttcgcacaactactctttcaccatggaaatggagtttgagtttcaggcgaagagggagatgacgttcaatttccggggtgacgacgacgtatgggtgttcatagacnagagattggttctcgacatangcggtatacattcggccgtgggcgacaaatttatctggatgatgtcttgcccgcgagcgnagtggggcagaagcacaccctgcgcgtcttttacgccgagcgccacactaatggatccattatctaatccagacaacttagtgccccgccctccgncgtggagctaa

SEQ ID NO: 16626 - protein, 179 aa, Unknown
  Obtained from environmental sample
  misc_feature (1)..(179): Xaa is any amino acid
MMDEARLRTGTPRITRRSCSWTSSRKSATTPAFKNIVIKDNLTFTLYDSVKAMYQFDRQGKDDGTGNGFFQLDNRGFGNEGRSHNYSFTMEMEFEFQAKREMTFNFRGDDDVWVFIDXRLVLDIXGIHSAVGDKFIWMMSCPRAXWGRSTPCASFTPSATLMDPLSNPDNLVPRPPXWS

SEQ ID NO: 16627 - DNA, 657 bp, Unknown
  Obtained from environmental sample
  misc_feature (1)..(657): n is a, c, g, or t
gtgaaaaaagggcaggtactcgcgactctaagacctcttaaacccggcaaggaagggatgaccgtacgcggaacgcccctgccctacgggaatataactccggaaggcgtaagctgcggaaacaatacccgtattgagggaaactcaatagtcgcgtctatccacgggcagctcattattgagaatagaacagttcttaatgtccaggataccctggttatcaaaggcgcggtgggctacagcaccgggaatatcgttttccccggcgacgtattcataaacgggccggtttcggacggatttaaaatattcgcgggcggctcgctgtccataaaacaaaccctggaccttaccagggttgtaaccaagggcgacattcttgtctccgggggaatagtcggcaagggcgccgccctgataaaatccggcggaagcataaggacaaaatttattgaaaaatgccgggtggccgcgcgaaattccgttctggtcgatttggaaatcctccattccgatgtttttgcccttaacaccgttgaaatgggggaaaaggggaagattgtcggcgggaatatctacgcggntcacggcttgcgaaccggagccattggcggcaagaggggaaagtccgggcacccatatccattgcggtgttga

SEQ ID NO: 16628 - protein, 218 aa, Unknown
  Obtained from environmental sample
  misc_feature (1)..(218): Xaa is any amino acid
MKKGQVLATLRPLKPGKEGMTVRGTPLPYGNITPEGVSCGNNTRIEGNSIVASIHGQLIIENRTVLNVQDTLVIKGAVGYSTGNIVFPGDVFINGPVSDGFKIFAGGSLSIKQTLDLTRVVTKGDILVSGGIVGKGAALIKSGGSIRTKFIEKCRVAARNSVLVDLEILHSDVFALNTVEMGEKGKIVGGNIYAXHGLRTGAIGGKRGKSGHPYPLRC

SEQ ID NO: 16629 - DNA, 417 bp, Unknown
  Obtained from environmental sample
  misc_feature (1)..(417): n is a, c, g, or t
atggtattgaccgagtctaaagaagatgataatccaagactctttacgaagatacctgttgtggggacggtcgccgccggagtcccaattctttccgaggagaactgggaagataccctgctgctgcataagtcctccctgaaaaagaacagagtgtactttgccgtanaggtgcgcggtgattcaatgcanaacgccggaatcatggacggcgacatggcggttatagaaaaagcaagtatggttagaaacggcgaaatcgcggtggcggtagttgatgacgncgtgaccttaagcgctttttttaagaaagctcccgcatcaggctgcangcggaaaatccggatttacagccctatttactgccaggatgtgcgtatactggggcggcttggcccnaatatccgtaataattaa

SEQ ID NO: 16630 - protein, 138 aa, Unknown
  Obtained from environmental sample
  DOMAIN (57)...(125): Peptidase S24-like
  misc_feature (1)..(138): Xaa is any amino acid
MVLTESKEDDNPRLFTKIPVVGTVAAGVPILSEENWEDTLLLHKSSLKKNRVYFAVXVRGDSMXNAGIMDGDMAVIEKASMVRNGEIAVAVVDDXVTLSAFFKKAPASGCXRKIRIYSPIYCQDVRILGRLGPNIRNN

SEQ ID NO: 16631 - DNA, 666 bp, Unknown
  Obtained from environmental sample
  misc_feature (1)..(666): n is a, c, g, or t
ttgaactcggcgttgctgtcgcgctgccaggttgtggtgttgaaacgccttgatgaagcggccctcatgcgcttggcgaagcgggcggaggagcgccttggcaagcccctgcccattaccgacggcgcgagggcaaagatgattgccgttgccgacggcgacggccgctatttgctcaaccttatagagatggtgttcgacttttccggcaccgagactgtcgacgaggccgagcttggccgcctgatacaaatgcgctttccaaactatgacaaaggcggggacgcgcactacaacctgatcagcgcactgcacaagtccgtgcgcgggagcgacccggacgcggcgctgtactgggtcagccgcatgatcgcgggcggcgaggacatgaagtacctgctgcggcgccttgcgcgcatgagcgtggaggacataggccttgccgagcccgccgcgctgtcgcgggccatcgccacgtggcaggcgtacgagcggctgggcagccccgagggcgacttggccgtggccgagctggtggtctacatggcaacctgccccaagtcggtcgcctcgtacaaggcgttcggcgaaagcatgggcgcggcgaagtcgaacgggtcgctctcgccgcccgcgcacattttgacgctcctacctcgctcatga

SEQ ID NO: 16632 - protein, 221 aa, Unknown
  Obtained from environmental sample
  misc_feature (1)..(221): Xaa is any amino acid
MNSALLSRCQVVVLKRLDEAALMRLAKRAEERLGKPLPITDGARAKMIAVADGDGRYLLNLIEMVFDFSGTETVDEAELGRLIQMRFPNYDKGGDAHYNLISALHKSVRGSDPDAALYWVSRMIAGGEDMKYLLRRLARMSVEDIGLAEPAALSRAIATWQAYERLGSPEGDLAVAELVVYMATCPKSVASYKAFGESMGAAKSNGSLSPPAHILTLLPRS

SEQ ID NO: 16633 - DNA, 441 bp, Unknown
  Obtained from environmental sample
  misc_feature (1)..(441): n is a, c, g, or t
ttgtttattcctggggcgcggcttgactggacggaacggcaggaaataaacggcgatctgtttatctggccgacagccggttatattacctcgccttacggctaccgcaggtggccttttggcggcaatgtccgccaattccactccggcatggatattggcgcgcctatggggtctccggtacgcgccgccatctccggaagagtcagtgcggtgggctgggatgatgtgctggggaactatgtagtggtcagccaccattcaggttatcgaaccttgtatggacacatgagtacgacaagggtaaaatccggggcttatgtgggaaccggcgagcgcatcggcgatgttggcagtaccggcatgagtaccggtccccatctgcattttacggtttacaaaaacggcgttacggtaaacccccgaaccttgatgaaataa

SEQ ID NO: 16634 - protein, 146 aa, Unknown
  Obtained from environmental sample
  DOMAIN (46)...(141): Peptidase family M23
  misc_feature (1)..(146): Xaa is any amino acid
MFIPGARLDWTERQEINGDLFIWPTAGYITSPYGYRRWPFGGNVRQFHSGMDIGAPMGSPVRAAISGRVSAVGWDDVLGNYVVVSHHSGYRTLYGHMSTTRVKSGAYVGTGERIGDVGSTGMSTGPHLHFTVYKNGVTVNPRTLMK

SEQ ID NO: 16635 - DNA, 414 bp, Unknown
  Obtained from environmental sample
  misc_feature (1)..(414): n is a, c, g, or t
ttgcccccattgtctgacgaagaagacggaaaagaagggggggaagagcagacaacgtattatcacgcagcggtggcaggagcggtggtaaaaccggggtgtaataaagtattacctgtggcggcagagataatcaggaacagcgacggggaaaagaaacaggattgcgagctctctgcggggaaacggtggcttgacgcgcatggagcagagtacgcatggcttaaaccgacacttttaggggacgatttgtactcgaaccggccattttgcgagaaaatagtggaggaaggatggagttttatctttacgtgcaaggaagaatcgcacaaatggcttacggagacggtaacacactcctgtttgtccgaggtaaaggaagagaatgggattcccggaagaagaaacgagtga

SEQ ID NO: 16636 - protein, 137 aa, Unknown
  Obtained from environmental sample
  misc_feature (1)..(137): Xaa is any amino acid
MPPLSDEEDGKEGGEEQTTYYHAAVAGAVVKPGCNKVLPVAAEIIRNSDGEKKQDCELSAGKRWLDAHGAEYAWLKPTLLGDDLYSNRPFCEKIVEEGWSFIFTCKEESHKWLTETVTHSCLSEVKEENGIPGRRNE

SEQ ID NO: 16637 - DNA, 372 bp, Unknown
  Obtained from environmental sample
  misc_feature (1)..(372): n is a, c, g, or t
ttgcgagaaaatagtggaggaaggatggagttttatctttacgtgcaaggaagaatcgcacaaatggcttacggagacggtaacacactcctgtttgtccgaggtaaaggaagagaatgggattcccggaagaagaaacgagtgacctacacgtggaaatacctgaacggggtgcctatccggtatgacgaacgcgacccgtgtatggtgaattatttcagcttggaaaaaaaagctgaaagggcgaagaaaccgagttatttcaacagttggataacgaacaaaccgatnacagacaagaacgttgcgtaccttgccgaatgtgggcgtacgcggtgggagatagaaaacggacctaacaatgtgctttaa

SEQ ID NO: 16638 - protein, 123 aa, Unknown
  Obtained from environmental sample
  misc_feature (1)..(123): Xaa is any amino acid
MRENSGGRMEFYLYVQGRIAQMAYGDGNTLLFVRGKGREWDSRKKKRVTYTWKYLNGVPIRYDERDPCMVNYFSLEKKAERAKKPSYFNSWITNKPXTDKNVAYLAECGRTRWEIENGPNNVL

SEQ ID NO: 16639 - DNA, 516 bp, Unknown
  Obtained from environmental sample
  misc_feature (1)..(516): n is a, c, g, or t
gtggagttcagccttgcggctaacgtaaagagttttacgcctgataaagcgttgttagaggacggggatacgatagattttaatatccttgtcctngccgtgggcgtgcgtcccaacacctcgcttttaaacgggatagcgaaaatcgaccgcggcatcgtcgtaaacgagaaatcagagacgtcaattcccgacatntacgccgcaggcgactgtacccagacgcttgacgtgtcaagcggtcagaacaaggtcatggcgcttttgccaaacgcctatatgcagggcgagtgcgccggaatcaatatgacgggaggcagcgcgcgcttcgacaaggcgatacccatgaacgccatcgggtttttgggactgcacatcattacggcgggtaactacgaaggacaggtatatgtcgaaaataatactacaggtgaaggcggatataaacgcctgtattacagcgataacaaactgaacgggtatatcctatcgcaacgccagcgtcatccnnnttaa

SEQ ID NO: 16640 - protein, 171 aa, Unknown
  Obtained from environmental sample
  misc_feature (1)..(171): Xaa is any amino acid
MEFSLAANVKSFTPDKALLEDGDTIDFNILVLAVGVRPNTSLLNGIAKIDRGIVVNEKSETSIPDXYAAGDCTQTLDVSSGQNKVMALLPNAYMQGECAGINMTGGSARFDKAIPMNAIGFLGLHIITAGNYEGQVYVENNTTGEGGYKRLYYSDNKLNGYILSQRQRHPX

SEQ ID NO: 16641 - DNA, 876 bp, Unknown
  Obtained from environmental sample
  misc_feature (1)..(876): n is a, c, g, or t
atgattgcgagagagttgggcgacctggctttcgaccgcaaggacaggacgggcgcgctcgccgcctacaaggccgcgcttgccgccgatccgagggccaagggtttccacaagcgctacgccgagctcgtggacgccgggggcgctccgcaagataagataaccgcgatggaaggggccatagccgccggcgaggccgacgcgcccatgcttataaagttgggcaacatctaccgcgaccagaagcagccggccaaggccgtgccgctttttgagaaggccgttaaggagaataggaacgatgtgcagcttttggccgcgctggcgcagagccaggaggccgccggcatgatcggcgaggccataaccacttacgagcagtacgtgctcatggatcccaaggcgtctaaagagcacaagacgttgggtgacctctacactaagcagaagaagcccgccgaggcgatgcgcgcttacaaaaagtacttggagcgcaacccgactgacaacgcggtggcgctgatggtggcgagggaggcgtacaacgcaaagcagttccaagaggccgtcaggtattttgcgatggtgcagggtgaggagtctaagaagcccgagttcataaagatgtacggaacggccgcgttccaggcgaacgacaacgcgagggcgctcaccgtccttaaagaaataggcacgccgctcaacaaggatcccgaagtgttcaagatgctggaggaggtcagccgccgcaccggggccaacgatatggcggtcaactacctaaagcagtacgcggccttgcgtccgcaggacgtggaggccaacagaaaattaggcgacgcgctcttcgacgtaaggacgaagccggcgcgctga

SEQ ID NO: 16642 - protein, 291 aa, Unknown
  Obtained from environmental sample
  DOMAIN (136)...(169): Tetratricopeptide repeat
  misc_feature (1)..(291): Xaa is any amino acid
MIARELGDLAFDRKDRTGALAAYKAALAADPRAKGFHKRYAELVDAGGAPQDKITAMEGAIAAGEADAPMLIKLGNIYRDQKQPAKAVPLFEKAVKENRNDVQLLAALAQSQEAAGMIGEAITTYEQYVLMDPKASKEHKTLGDLYTKQKKPAEAMRAYKKYLERNPTDNAVALMVAREAYNAKQFQEAVRYFAMVQGEESKKPEFIKMYGTAAFQANDNARALTVLKEIGTPLNKDPEVFKMLEEVSRRTGANDMAVNYLKQYAALRPQDVEANRKLGDALFDVRTKPAR

SEQ ID NO: 16643 - DNA, 483 bp, Unknown
  Obtained from environmental sample
  misc_feature (1)..(483): n is a, c, g, or t
gtgaaggcggtcatcgaccagaagagggagactcaatatcttataaagtacgccacggcgctggtcgctatgggcaataggaactccgaggcggtgggcatcgcaaacgagatattggcgaagcagccggataatatcgaggggctcatgctctcaggcaggattaaagtcgcgtcgcgcaactttgaggacgcgatggagatattcaagcaggtgggctacaaagaccccaactacgccccggccatctacgagcgcgggaacatcttcctgatgcagcagaactacgacggcgccaaggcgttctttgagagggcgctgaagctggatcccaagttcgcgctggcggagctcggtttggcgaagtgggccaaggcgcagaagaatcaggccgaataccaaaaacgcttgcagaacgccagcaaattggatccggggaacaaagagatacaagacgagatgaagaggagcaatatccgttga

SEQ ID NO: 16644 - protein, 160 aa, Unknown
  Obtained from environmental sample
  DOMAIN (80)...(113): Tetratricopeptide repeat
  misc_feature (1)..(160): Xaa is any amino acid
MKAVIDQKRETQYLIKYATALVAMGNRNSEAVGIANEILAKQPDNIEGLMLSGRIKVASRNFEDAMEIFKQVGYKDPNYAPAIYERGNIFLMQQNYDGAKAFFERALKLDPKFALAELGLAKWAKAQKNQAEYQKRLQNASKLDPGNKEIQDEMKRSNIR

SEQ ID NO: 16645 - DNA, 804 bp, Unknown
  Obtained from environmental sample
  misc_feature (1)..(804): n is a, c, g, or t
atgatgaagacgaaatacgttttagattggctcaaggtgaacttcatcggcgtcgaggctacttgcaagtcgctacgcgagatcgccaaatacttcaacgatccggctttaacgaaaaaggtggaagaggtgatcgcggacgagacggcggctattaaagatgagatggatcactaccgcgccaagctgaccggcaagacggcgggcatattctccggcggctcgcggtcgcaccactatcaggcgctgcttaaagacttggggatgaagaccgtgatcgccggatacgagttcgcccaccgcgacgactacgaggggcgcgacgtcatcccgaccatcaaggaagacgccgacaacaagaacatcgagagcattaccgtaaagcccgatgaaaaactctaccgcgagagatacacagcgcagcagatagccgatctcaaatccggcgaagaaggcatagagctcgacacctacgacggcatgattccggagatgtgcgccggcgacgtggtggtggacgactacaaccacttcgagacggacgctctcatcaagaccgtgaagccggacattttcctgtcgggcataaaggacaaacactccatacagaaggcgggcgtgtcgtcgcgtcagatacactcctacgactactccggcccgtattcaggttttcacggcgccgtgaatttcggcagggacgtggcgatggccatatacacaaacgcgtggcagctggtcacgccgccgtggaagcacgaacctatgcttaccggcaaaatcgcggaggagggaaaaaatgcttga

SEQ ID NO: 16646 - protein, 267 aa, Unknown
  Obtained from environmental sample
  DOMAIN (1)...(240): Nitrogenase component 1 type Oxidoreductase
  misc_feature (1)..(267): Xaa is any amino acid
MMKTKYVLDWLKVNFIGVEATCKSLREIAKYFNDPALTKKVEEVIADETAAIKDEMDHYRAKLTGKTAGIFSGGSRSHHYQALLKDLGMKTVIAGYEFAHRDDYEGRDVIPTIKEDADNKNIESITVKPDEKLYRERYTAQQIADLKSGEEGIELDTYDGMIPEMCAGDVVVDDYNHFETDALIKTVKPDIFLSGIKDKHSIQKAGVSSRQIHSYDYSGPYSGFHGAVNFGRDVAMAIYTNAWQLVTPPWKHEPMLTGKIAEEGKNA

SEQ ID NO: 16647 - DNA, 486 bp, Unknown
  Obtained from environmental sample
  misc_feature (1)..(486): n is a, c, g, or t
atggttaattatggttcaagtttagcagttccagaaggttatatttcaaaggtacaagctattttggaaatgcctggggtgcaggctttaatccccagagatgttggtttctattgggggcgtggctttgaaaaagaacaaaacggaaataaactcaaaaaactttatctgctaaaacgccgcacagaaatggacggcaaagaaattgccactgcaaatcctcaccgcgtttccgatgggctttctgctgggcaggtagcggtatcgcttcgctttaagggaatggggccaaagaagttcggctcggtaactggcaacaatgtgggcaagcaaatggcaattgttttggacgggcaggtgattagcgctcccngtattcgcgaccgcataccanatggcgaagctcanatcacangcttggaaagcatggcagaggcaacccagctagctgttgttttagagcaggtgcattgcctgcaacaatga

SEQ ID NO: 16648 - protein, 161 aa, Unknown
  Obtained from environmental sample
  misc_feature (1)..(161): Xaa is any amino acid
MVNYGSSLAVPEGYISKVQAILEMPGVQALIPRDVGFYWGRGFEKEQNGNKLKKLYLLKRRTEMDGKEIATANPHRVSDGLSAGQVAVSLRFKGMGPKKFGSVTGNNVGKQMAIVLDGQVISAPXIRDRIPXGEAXITXLESMAEATQLAVVLEQVHCLQQ

SEQ ID NO: 16649 - DNA, 690 bp, Unknown
  Obtained from environmental sample
  misc_feature (1)..(690): n is a, c, g, or t
atggaacccaaaaacagcgtattcacaaaatttttccgttcgctgcacatgacggtgttcgtcgccgccgtggtaatcttgaccgtcgtatacatacccatcgtcttccttaccgtgctgatctcccgcaagatctcccgcaaattcgcgcgcgtctggagtcgccacgtgctcgctatgggcggtgtgggcgtgaaagtcgtgggcgcggacaaacttgacgacagcgagcggtatgtgttcatgtccaaccaccaaagcgcgctcgacatccccatcatatacgtcgggctgagcgaacaaatcagtttcatagccaagaaagaactctttatgataccgttcttcggctggggcatgtgggcggtggggcacataagcatagaccgccaaaacccccgcaaggcgcacgcgtcaatagcccgcgccgtgcaacgcctcaacaaggagaacgtctcgctgatactctttcctgagggcacgcgctcaaaagacggcaaggtgctggacttcaagacggcaagtttcaccctggcgtttgcagcggggcgtaaacttgtccccgtggcgataaagggcgcaatagaccgccctgccgccaaaaagcagccgcatagtaccgggagaagtggaactggtatggggcgacccgattcccgtggacgaactgnaaggaatgaaccaagttga

SEQ ID NO: 16650 - protein, 229 aa, Unknown
  Obtained from environmental sample
  DOMAIN (64)...(192): Acyltransferase
  misc_feature (1)..(229): Xaa is any amino acid
MEPKNSVFTKFFRSLHMTVFVAAVVILTVVYIPIVFLTVLISRKISRKFARVWSRHVLAMGGVGVKVVGADKLDDSERYVFMSNHQSALDIPIIYVGLSEQISFIAKKELFMIPFFGWGMWAVGHISIDRQNPRKAHASIARAVQRLNKENVSLILFPEGTRSKDGKVLDFKTASFTLAFAAGRKLVPVAIKGAIDRPAAKKQPHSTGRSGTGMGRPDSRGRTXRNEPS

SEQ ID NO: 16651 - DNA, 498 bp, Unknown
  Obtained from environmental sample
  misc_feature (1)..(498): n is a, c, g, or t
atggggtgtgcagcattatacctttcaaaaccgcggacattgctcagttccggcgggctgggggcgatgggttacggtttgggagcggcgattggggcaagtatagcgcataacaggcagagaacgatcctgttcaccggagacggcagtttcggaatgaacctgaatgagcttgccaccgcggtatcgcagaaacttccggtggtagttgtcatattcaacaacggcgttttgggtttgccgcgccaatggcagacggtattttatgaggggcggtactcgcacagtacgcttgagcgcaagaccgattttcccgcgctggcaaaagcgttcggcgcggagggctttgccgcggaaaatctgcctgaactggaacgggcgctgaatagcctgccgtccggcaaaccagcggtcatagactgccgcattgatatggatgagaaggtgctgcccatgattccgccgggcggatcggtcaaagacatcattctcaattaa

SEQ ID NO: 16652 - protein, 165 aa, Unknown
  Obtained from environmental sample
  DOMAIN (1)...(141): Thiamine pyrophosphate enzyme, C-terminal TPP binding domain
  misc_feature (1)..(165): Xaa is any amino acid
MGCAALYLSKPRTLLSSGGLGAMGYGLGAAIGASIAHNRQRTILFTGDGSFGMNLNELATAVSQKLPVVVVIFNNGVLGLPRQWQTVFYEGRYSHSTLERKTDFPALAKAFGAEGFAAENLPELERALNSLPSGKPAVIDCRIDMDEKVLPMIPPGGSVKDIILN

SEQ ID NO: 16653 - DNA, 483 bp, Unknown
  Obtained from environmental sample
  misc_feature (1)..(483): n is a, c, g, or t
atgacttcgatgggtgccaaaatggtattgcaagtgcctcaaatgaaaacgctggtatcaggcgcatctgggcagctcgccacagccgtcagaagacattgggcagaagacaacctgatcattcccagcgaggcggagcttgatctggcggacgagggggccataagggccgcaatccanaaatatcggccggatgtttttctgaattgcgccgcctacancaacgtggacgcagccgaggccaatgaagggctggcgcatttggtgaacggacaggcagttgggtggatagccgaggagtgncacaacgtcggtgcgatgctggtccaaatcagcacggactatgtatttgatggactctcgacgcgggcactaaaagaggacgacccttgttggccatgcaacgggtatgggaaaagcaaactggaagggcgaaatagcccccccaaaaacccaaaaggcttggcatccttccgaatttag

SEQ ID NO: 16654 - protein, 160 aa, Unknown
  Obtained from environmental sample
  DOMAIN (16)...(159): RmlD substrate binding domain
  misc_feature (1)..(160): Xaa is any amino acid
MTSMGAKMVLQVPQMKTLVSGASGQLATAVRRHWAEDNLIIPSEAELDLADEGAIRAAIXKYRPDVFLNCAAYXNVDAAEANEGLAHLVNGQAVGWIAEEXHNVGAMLVQISTDYVFDGLSTRALKEDDPCWPCNGYGKSKLEGRNSPPKNPKGLASFRI

SEQ ID NO: 16655 - DNA, 654 bp, Unknown
  Obtained from environmental sample
  misc_feature (1)..(654): n is a, c, g, or t
atgacccctagagttgaaatgcacgccatagacgttcaaactccactcccagatgtaataaagctcttaaacagcgaaagatacagccgcttgcctgtgtattccggttctatagataacataataggcattctctccaacagagaatttttagcttggtacaccgagagatcgcacgagccttttgatttggaaaagctggcgcgccctgctatttttgctccaacaggaaaaaggctagattctcttttgcgcgaacttagagaaagcaacaaccatttggtaatagtcgttgacgaatacggaggtaccgcagggctagccacaatggaagatattttagaagagattgtgggcgaaataaaagacgaagacgattcagaagaagatatgggatttgttaaactaccatctgggcaatacatgctagaccctctgattaccctttccgacttggaagaccgcatgggaatccattttgaaataaaagaagacgagcatatagaaactctttctgggcttatacaatacaccttgggttctttgccacaaaccggaaccacagtccaaattcagggttacacattcagaataaagaaaatggacggcacaaaaatggaagaaattattttggaaaccgaatttaaacattaa

SEQ ID NO: 16656 - protein, 217 aa, Unknown
  Obtained from environmental sample
  DOMAIN (134)...(215): Transporter associated domain
  misc_feature (1)..(217): Xaa is any amino acid
MTPRVEMHAIDVQTPLPDVIKLLNSERYSRLPVYSGSIDNIIGILSNREFLAWYTERSHEPFDLEKLARPAIFAPTGKRLDSLLRELRESNNHLVIVVDEYGGTAGLATMEDILEEIVGEIKDEDDSEEDMGFVKLPSGQYMLDPLITLSDLEDRMGIHFEIKEDEHIETLSGLIQYTLGSLPQTGTTVQIQGYTFRIKKMDGTKMEEIILETEFKH

SEQ ID NO: 16657 - DNA, 804 bp, Unknown
  Obtained from environmental sample
  misc_feature (1)..(804): n is a, c, g, or t
gtgatgcatgccgcgcagacctatttttttattaccgccctttcttttccttttttggcgctgtacaccgccgcggcagccctgtatcgcagcatggggaattccgccattaccatgaaaatcgcgatattggtaaacatcctcaatatcgggggaaacgcgatctttatctacggtatggatctcaaggtagcaggcgcggcgctggcaacccttatcgggcgggccgccgccgccttcattttgatcatgctccttttacggaataaaacaggccccatcaatctgaaagggataacgaaaatcagaatagaaccggtgatgataaagcgtattctcaatatcggcgttccaagcggcctggaaagctccatgttccagtttggaaaaatccttctcgcccggattttcaccgcggctggaaccgtggccattgccgccaatgccataaccaatgtgatcaactccatggcttttatgccgggtaacgcttttggtatgggactgctcaccattgtcgggcaatgccttggcgcgngcgattatcaggcggcaaaacgatataccaaaaaaatccttgccgctacctatctggtctatctgtttggcaatatcaatatttttattttcagaaaccagcttatagggatcttcggactctcacaggaagcccacaaaatggccgagagttttattttggttcaatgtaattcttccacttttttctgggggcctttcctttggtcctccccacgcgctgaaagccgcgggcgacgcccgctaatgtatgaatgtgacggttag

SEQ ID NO: 16658 - protein, 267 aa, Unknown
  Obtained from environmental sample
  SIGNAL (1)...(25)
  DOMAIN (118)...(267): MatE
  misc_feature (1)..(267): Xaa is any amino acid
MMHAAQTYFFITALSFPFLALYTAAAALYRSMGNSAITMKIAILVNILNIGGNAIFIYGMDLKVAGAALATLIGRAAAAFILIMLLLRNKTGPINLKGITKIRIEPVMIKRILNIGVPSGLESSMFQFGKILLARIFTAAGTVAIAANAITNVINSMAFMPGNAFGMGLLTIVGQCLGAXDYQAAKRYTKKILAATYLVYLFGNINIFIFRNQLIGIFGLSQEAHKMAESFILVQCNSSTFFWGPFLWSSPRAESRGRRPLMYECDG

SEQ ID NO: 16659 - DNA, 357 bp, Unknown
  Obtained from environmental sample
  misc_feature (1)..(357): n is a, c, g, or t
gtgcggtcatttgaaggattagaaaaaatctgctccggcgtgccggattccagaatggagccttcatacataaataccaccctgtttgcaacttcccgcgcaaagcccatttcatgggatacaacaagcattgtcataccggcggcggcaagctgtttcatgacagctaacacttcgccgaccagttccggatcaagagaggaagtaggctcgtcaaagagcatgatcctcggctccatggcaagagcgcgggcgattgcgacacgctgctgctgtccgccggacagttttgaagggtacgcgctgattttatcgcccaaccctactctttccagtatctgtacggatttattatga

SEQ ID NO: 16660 - protein, 118 aa, Unknown
  Obtained from environmental sample
  DOMAIN (70)...(108): Protein of unknown function (DUF1602)
  misc_feature (1)..(118): Xaa is any amino acid
MRSFEGLEKICSGVPDSRMEPSYINTTLFATSRAKPISWDTTSIVIPAAASCFMTANTSPTSSGSREEVGSSKSMILGSMARARAIATRCCCPPDSFEGYALILSPNPTLSSICTDLL

SEQ ID NO: 16661 - DNA, 591 bp, Unknown
  Obtained from environmental sample
  misc_feature (1)..(591): n is a, c, g, or t
atgattgcgagccgcctgcctgaatctttcggtaatcttgccgcccttgaaaaacttaaattaagccacagcaaaaccgtacttttcccggattctttcggcggcttaaaatcgctaaaggagttagaactggaaataggacgcgatgaaacagttacggaagatccatgggaaaataaaattgactttccgcttgataaaatagaagatgatattattcgtctccccgaatcattcggaggactctcttctcttgaaaatattaaaataagcggtaatatcgctcctctgccggaatctttcggaaatttgcggtctttaaaatttctcttcatggatttttcaatttcaaagtttgttcatttcggaggaacgagcggcggcgacagaccctatgtcaaaaatgattttaactctctccctgaatctttcggaaatctttgttctctggaagatttttacattgacggatgcaatcttaaaactctgccggacagtttcggaaatcttcgcgcgttaaagaccctttcattaagaaacacaaaacttgaatctctgcccgattcattcggcaatcttgcttctctttga

SEQ ID NO: 16662 - protein, 196 aa, Unknown
  Obtained from environmental sample
  misc_feature (1)..(196): Xaa is any amino acid
MIASRLPESFGNLAALEKLKLSHSKTVLFPDSFGGLKSLKELELEIGRDETVTEDPWENKIDFPLDKIEDDIIRLPESFGGLSSLENIKISGNIAPLPESFGNLRSLKFLFMDFSISKFVHFGGTSGGDRPYVKNDFNSLPESFGNLCSLEDFYIDGCNLKTLPDSFGNLRALKTLSLRNTKLESLPDSFGNLASL

SEQ ID NO: 16663 - DNA, 750 bp, Unknown
  Obtained from environmental sample
  misc_feature (1)..(750): n is a, c, g, or t
gtgcccacttttcaggatgattacagccttgcgcgcctgagtattgagacgctgctttcttttatccctgacagcaatgacagtcttaaaaaaccggcaaggatcatccgcatcggctgcgagccgggtataacctttctggatcgccgggcctgggcttntgaggaatttgtgaccaaaggcagaatcgaggaagccgcgctggtaaagctggaaattacggagaacccccacggcgcggcgtgggaagcgttagctgcaattctgccccgttttccgccggggacggttgacggcctttgggttccctgggaagaatttgccggcggctgcgccgaagcgcttgcctcggcgggaaggcgggacattaagctgaccagcataggcatttccaatgatgtcatacacctgatgctgcgtcatcctgatacctggcttgcgagcgcggctgtagatccaaagctggccggcaccgttaatatgcgcatcctcgcggcgaggcttgccggggaggacccgggcgttactttttcatttagcccccagcttgtaaaaacggcggacataaatattggggttaatctcggcaatatatccgtgatagtgccgggatggggagaaggggaagggctttttgacaattataagtggatgatcgacttgaaaaccgcgggggagaaatatctgaggatacctccgatcccgcaggtggcgccacaggcggttgggcctcacaaggtgacgccatga

SEQ ID NO: 16664 - protein, 249 aa, Unknown
  Obtained from environmental sample
  misc_feature (1)..(249): Xaa is any amino acid
MPTFQDDYSLARLSIETLLSFIPDSNDSLKKPARIIRIGCEPGITFLDRRAWAXEEFVTKGRIEEAALVKLEITENPHGAAWEALAAILPRFPPGTVDGLWVPWEEFAGGCAEALASAGRRDIKLTSIGISNDVIHLMLRHPDTWLASAAVDPKLAGTVNMRILAARLAGEDPGVTFSFSPQLVKTADINIGVNLGNISVIVPGWGEGEGLFDNYKWMIDLKTAGEKYLRIPPIPQVAPQAVGPHKVTP

SEQ ID NO: 16665 - DNA, 735 bp, Unknown
  Obtained from environmental sample
  misc_feature (1)..(735): n is a, c, g, or t
ttggaacggctaggcgtccgtacctttgaggagtacctggtcagcctgggttttcactcaattatggaaaccattggaacgcatggcactggcctcgcccttggtaacgccgaggtaagccttgaagaaatggtacgagccttctcggtttttccgcgtatgggaatgcccgcgcaactccgctggacagaagacggcaaacctggcgatgctgcaccgcctgcgatgtccccatacgcggcctggatgatcgccgacatactctcggacaggtcaagccgcttcgtgggtttcggtcctgctccggcgcttgcgacaccgtttgagtcgatgttcaaaacagggacagccaatcagtttcagcacatctgggctttgggcgctacaaagcgttttaccgtgggcgtctggatgggtaacttttcgggagagactatcatcggcagcacgggaagctcaatccccgccaggattgcggcgaaactcctcggcgttttggaggaatcggctgggcaagggaaagggcgggtgtcaagccgggtaaccgaaaacctggccggccctttgccgccgggaacaaccgaagtgcgaatctgcgcgctttcgggaatggcggcaggcccttactgtaccgggcttacaaaggaatttatacgcaacgagaaaattcccgccgccctgtactggcacactctggcggggctttnttacccagcgaataccgtccgtggctga

SEQ ID NO: 16666 - protein, 244 aa, Unknown
  Obtained from environmental sample
  misc_feature (1)..(244): Xaa is any amino acid
MERLGVRTFEEYLVSLGFHSIMETIGTHGTGLALGNAEVSLEEMVRAFSVFPRMGMPAQLRWTEDGKPGDAAPPAMSPYAAWMIADILSDRSSRFVGFGPAPALATPFESMFKTGTANQFQHIWALGATKRFTVGVWMGNFSGETIIGSTGSSIPARIAAKLLGVLEESAGQGKGRVSSRVTENLAGPLPPGTTEVRICALSGMAAGPYCTGLTKEFIRNEKIPAALYWHTLAGLXYPANTVRG

SEQ ID NO: 16667 - DNA, 594 bp, Unknown
  Obtained from environmental sample
  misc_feature (1)..(594): n is a, c, g, or t
atgngtatcattatgcttgtaatgacagtaattgcctttatcatccaattgctcccccaaaagaaacagcctgcaacagctaaagaaaagaacaggcttatacttcatgatttagaacctgaaacagctcaaaatttgtttatagatggaaataacacccaattcttttgcgccaataaaaaaatggcaacatgccatggctggtatagctgctggcttcaaacccccggcatttgcataatgcatgacggcactgaatctctgggaaaacaaattgcgttttgcggcgaatttattatcataagtaaaaatttatacggtggattcagcgcggaaataaaaaacgcgctggacaggtcaatttcttccgcattgccttttttttgtgtccgaaataatgaattacaccatcaaccaagatacccaaacgaaggaaggatgaaggtatgcatctataacgcgagtgaaatatccaatgttgataaagaatctttaagggaaatagcaaaagctaacggtataaatatgaataaaagtgattgtgaaacaatttttgtgaatgacgtaactgagctgagagaggtattaatatga

SEQ ID NO: 16668 - protein, 197 aa, Unknown
  Obtained from environmental sample
  misc_feature (1)..(197): Xaa is any amino acid
MXIIMLVMTVIAFIIQLLPQKKQPATAKEKNRLILHDLEPETAQNLFIDGNNTQFFCANKKMATCHGWYSCWLQTPGICIMHDGTESLGKQIAFCGEFIIISKNLYGGFSAEIKNALDRSISSALPFFCVRNNELHHQPRYPNEGRMKVCIYNASEISNVDKESLREIAKANGINMNKSDCETIFVNDVTELREVLI

SEQ ID NO: 16669 - DNA, 567 bp, Unknown
  Obtained from environmental sample
  misc_feature (1)..(567): n is a, c, g, or t
ttggggcaacgcagcggtaaaacaaacttttttcacgcgctcatatttcttttgaattttgccgtttattcaggtccgcggaaacaagcgggagatattatagaaattgattatttttatttctcaaaacaaacggaacagggacctgcgtcttttgaacttattttttacataaaaaatactgacagaaaaaatatccgataccgatatggttttacccttacccatgaagaagtaataacagaatatttgtttgcagtttacaataccagagaagtaacactattcaccagagaaaagcaaaatattgttaccactaattattttaatgaaggaagtaaaataaaatctgcggtacgtccgaattgttctgttttatccgtatgcgcccaatacaatggcgatattgcaaagagtattatccgttattttaaggaaatgatcgttacctttggcatgagcgacattaattcagtcacacaaaanagcctgattggttcagacgataatgctcgtgtacaagtacttaattttcttcattatgctgatattcaggtaaaagaataa

SEQ ID NO: 16670 - protein, 188 aa, Unknown
  Obtained from environmental sample
  misc_feature (1)..(188): Xaa is any amino acid
MGQRSGKTNFFHALIFLLNFAVYSGPRKQAGDIIEIDYFYFSKQTEQGPASFELIFYIKNTDRKNIRYRYGFTLTHEEVITEYLFAVYNTREVTLFTREKQNIVTTNYFNEGSKIKSAVRPNCSVLSVCAQYNGDIAKSIIRYFKEMIVTFGMSDINSVTQXSLIGSDDNARVQVLNFLHYADIQVKE

SEQ ID NO: 16671 - DNA, 468 bp, Unknown
  Obtained from environmental sample
  misc_feature (1)..(468): n is a, c, g, or t
gtgatgggcggcccctcagccgagtacgaggtctcgctgaactccggcggacaggtgctggcctacttagacaggggcaagtacggccgtctgcgggcggtggtcatagatagggagaagcgtttttactacgccgacgccgacngcgccngaaacgttccggagatcaaggatttcgcgacgcccggcggccccttcaaggngccgctgcgcccctgcgactgcaaggatgtgtgggatggctgcnacntcncgttcttagccttgcacggggaaatcggcgagnacgggacgattcaggggtattttgacaccttangcgtccccaacaccggctgcggggtctacgcccgcgcggtgggcatgaacaagaacacctcgaaatttcctgtacatgctcggcgggcctgcccggtggcccaattatttccgtctacggggttcaaaccacccaaaaaaaaccgttga

SEQ ID NO: 16672 - protein, 155 aa, Unknown
  Obtained from environmental sample
  DOMAIN (1)...(122): D-ala D-ala ligase N-terminus
  misc_feature (1)..(155): Xaa is any amino acid
MMGGPSAEYEVSLNSGGQVLAYLDRGKYGRLRAVVIDREKRFYYADADXAXNVPEIKDFATPGGPFKXPLRPCDCKDVWDGCXXXFLALHGEIGEXGTIQGYFDTLXVPNTGCGVYARAVGMNKNTSKFPVHARRACPVAQLFPSTGFKPPKKNR

SEQ ID NO: 16673 - DNA, 312 bp, Unknown
  Obtained from environmental sample
  misc_feature (1)..(312): n is a, c, g, or t
ttgaagggacttgcccgcgaattaaacataccggttgtggccctttcacagctcaggcgcgaagccgagaaagaaaaaccgggcctggccgacatacgcgaatcgggctccattgagcaggacgcggacctggttatgctccttaacagggacagggaagtggagaaaaccaggcaggaacaggaaaaagcgatttcccaaaaagtacagctcatgctggcaaaaaacaggaacgggcctgtgggtacagttgatcttactttctttaagtatcttacaaaattcgtttcatatactgatgacaggggttag

SEQ ID NO: 16674 - protein, 103 aa, Unknown
  Obtained from environmental sample
  misc_feature (1)..(103): Xaa is any amino acid
MKGLARELNIPVVALSQLRREAEKEKPGLADIRESGSIEQDADLVMLLNRDREVEKTRQEQEKAISQKVQLMLAKNRNGPVGTVDLTFFKYLTKFVSYTDDRG

SEQ ID NO: 16675 - DNA, 321 bp, Unknown
  Obtained from environmental sample
  misc_feature (1)..(321): n is a, c, g, or t
atgacccccgcaatgcgtatcntcntggtagtctcaaaggcgggcggcctgggattgaatctgaccgctgcaagccgggtgatacattacgacctgtggtacaacccggcggtagaaaaccaggcgaccgacagggccttccgtataggccagaaacgcaccgtttttgtccaccgctttatcacccggaacagttttgaggaaaaaatagacgccatgatcaccagcaagcaggaattggcagacatgaccgtagcctcaggcgagtcctggattgcccggatgagccataatgagttaaaagcccttttcgatagataa

SEQ ID NO: 16676 - protein, 106 aa, Unknown
  Obtained from environmental sample
  misc_feature (1)..(106): Xaa is any amino acid
MTPAMRIXXVVSKAGGLGLNLTAASRVIHYDLWYNPAVENQATDRAFRIGQKRTVFVHRFITRNSFEEKIDAMITSKQELADMTVASGESWIARMSHNELKALFDR

SEQ ID NO: 16677 - DNA, 603 bp, Unknown
  Obtained from environmental sample
  misc_feature (1)..(603): n is a, c, g, or t
atggtgacgcacgtgttcttggcggggctgttcttctttcttatgttgcgcagatcgttcggcgtcgcccgcctcgccgctttggcgggggcgctgttttatatgctcagtccgcagttcgtcagccacgtgaatccggggcacgacggaaagatgattgtgatcgcttggctgccgtacgttgtgtggcgtctgcgctccgttctgtcgctgccgtcgctgcgcaacgcggcccttatggctataggtatcgctatgatgattctctcgccgcacgtgcagatgacttatttcgtcctaatgggcattttcttgtactgggcggcggatgttgttaagtctctcgcggagaaagttgagaagaagcgcgtcgccggcaaggcggcgtatttttggatagccgtgtttatggggatgggggcgtcgttcatcgtattctacccgtcgtacatgtttgtgaaggaagctttctccgtgcgncgcgttgaccgagggttcgagttcgccacgtcttgggcgatggggtgggcggagtttttctcgctttgggtgcacgaattcggggacgcgcttgagtactattggggcaaaaactacttttaa

SEQ ID NO: 16678 - protein, 200 aa, Unknown
  Obtained from environmental sample
  SIGNAL (1)...(26)
  misc_feature (1)..(200): Xaa is any amino acid
MVTHVFLAGLFFFLMLRRSFGVARLAALAGALFYMLSPQFVSHVNPGHDGKMIVIAWLPYVVWRLRSVLSLPSLRNAALMAIGIAMMILSPHVQMTYFVLMGIFLYWAADVVKSLAEKVEKKRVAGKAAYFWIAVFMGMGASFIVFYPSYMFVKEAFSVRRVDRGFEFATSWAMGWAEFFSLWVHEFGDALEYYWGKNYF

SEQ ID NO: 16679 - DNA, 582 bp, Unknown
  Obtained from environmental sample
  misc_feature (1)..(582): n is a, c, g, or t
atgctgttacgctcccttacaacgcctgttaaatccacgcaaaggataacgtccgccgccctttccgctcttgcgcggcttggaatacacagcgcggcggatctgcttcttcattatccgcgcgattgggaagacagaacaaaaaccgttcccttaagtgaatttaacaggacaagggtatgtacggttgtaacggttgttgcgcgcgactggataggttacggcagaatgagaacgttaaaggcctatgttgaggatgaatctggcagggcggctcttttgtgttttaaccgtccgtggcttgataagcagctttttacaggggccaaattaaggctttgggggcggttttattataagtacggagagattcaatccggttctttcgaaattgaaccttttgaaaacaatacggaatcgggcggcatactgccggtttatccgctttcttcgggagtaacgcanacgcanatgcgccgttttatttcgcgccttcttgaacaatacgccgcanaaatagaaaacgagcttccgcttgaattatcgaaagagacaacttgttgcaaaagggcgaagcgctaa

SEQ ID NO: 16680 - protein, 193 aa, Unknown
  Obtained from environmental sample
  misc_feature (1)..(193): Xaa is any amino acid
MLLRSLTTPVKSTQRITSAALSALARLGIHSAADLLLHYPRDWEDRTKTVPLSEFNRTRVCTVVTVVARDWIGYGRMRTLKAYVEDESGRAALLCFNRPWLDKQLFTGAKLRLWGRFYYKYGEIQSGSFEIEPFENNTESGGILPVYPLSSGVTXTXMRRFISRLLEQYAAXIENELPLELSKETTCCKRAKR

SEQ ID NO: 16681 - DNA, 495 bp, Unknown
  Obtained from environmental sample
  misc_feature (1)..(495): n is a, c, g, or t
ttgagaacgcgctctcaacgccaaaaggctgacagatgcgggcgcggactgcgtcaagatcgagctgtggacgataggccnggaatcgtaagagtgctcgcgaaaaacggcttcaccgtctgcgccnacatgggctacaacccccagcgccacaacaaaccgcaactcttcggcagagacgccgcccaagccgccgagcttctcgacggagccaaagccctctgcgacgccggcgcaaaactcatagtactggagatgaccccgaacagcctatcccgcaaaatcagcgccgccatacccgtcccgaccataggcataggcagcggcaacgactgcgacgggcaggtgctggtggtgaacgacctactcggaatgtcgagaaggctcttcaaacacgcccaccgcttcgcgaacctgcgggagaagatgttcgaggctttcaaagactacatagacgcgggaagtcgcggagttcccgggggacgaccatcctga

SEQ ID NO: 16682 - protein, 164 aa, Unknown
  Obtained from environmental sample
  DOMAIN (1)...(162): Ketopantoate hydroxymethyltransferase
  misc_feature (1)..(164): Xaa is any amino acid
MRTRSQRQKADRCGRGLRQDRAVDDRPGIVRVLAKNGFTVCAXMGYNPQRHNKPQLFGRDAAQAAELLDGAKALCDAGAKLIVLEMTPNSLSRKISAAIPVPTIGIGSGNDCDGQVLVVNDLLGMSRRLFKHAHRFANLREKMFEAFKDYIDAGSRGVPGGRPS

SEQ ID NO: 16683 - DNA, 774 bp, Unknown
  Obtained from environmental sample
  misc_feature (1)..(774): n is a, c, g, or t
ttgctcgccgttctttatggacatggcggaatcaaattcagcatcctgaccggaaattaccggcagtttggttttgtatttggcatcggctttgcaggcttcgagaatggcgcgcgccagtgtgtcattgggtgcgagtatcgcgtccaaagtaacgctcttggcatcgttgttcagcaggttttccatgcgggttttcgcaatgggggcctgccagttttcggtggcaattctctggaagttggcggtgtcagcggaagtcttgggatagggacccacgactttgagtacgcccttgtcaatgaaggggttaagaacgctcatcgcgccgtcaaagaagaagaaggcattgccgtctgtcggggaaccggcaaacagggtgatttgtttgggcgccgcagcggtggccgcattcagattcagcccgtctacaatgctctgcgcctggagtacgccgactttgaaattgttgaaggtgatgaagtaatcataatccgcagaattaggaataatccggtcatacgctacaaccacaaccttgtctttgttggcttcggcaattaccgaaccaacgccgtcattgatacaaccgactaccagagctttggctccctgggtcaggaagctctgaatctgctgattctgctgagcctgatccgcgttaccatactggtctttcgcatcgtagccacgtttaatggcttccgctttgagagaagcgccgtcttttacccagcgctgcacatgtgtttcgggcatagcaataccaattaa

SEQ ID NO: 16684 - protein, 257 aa, Unknown
  Obtained from environmental sample
  misc_feature (1)..(257): Xaa is any amino acid
MLAVLYGHGGIKFSILTGNYRQFGFVFGIGFAGFENGARQCVIGCEYRVQSNALGIVVQQVFHAGFRNGGLPVFGGNSLEVGGVSGSLGIGTHDFEYALVNEGVKNAHRAVKEEEGIAVCRGTGKQGDLFGRRSGGRIQIQPVYNALRLEYADFEIVEGDEVIIIRRIRNNPVIRYNHNLVFVGFGNYRTNAVIDTTDYQSFGSLGQEALNLLILLSLIRVTILVFRIVATFNGFRFERSAVFYPALHMCFGHSNTN

SEQ ID NO: 16685 - DNA, 741 bp, Unknown
  Obtained from environmental sample
  misc_feature (1)..(741): n is a, c, g, or t
ttgattttgtacatgtatattcagttttttaatacatccggctcagaaaacattcaacacttcgcgcacattatcgcggtttatgcggaagcatcttcggatttctccgtcctcaaaggaaggttatttatgaataaagattttntgcaatttgacacggtacgtgacaacgcgcttaaactcgcgcatcgcatctgcagcgacggatttttccccgacgtgatctatgtatcattacgcggcggagcttatctcggcaacctgataagcgagtattataaaattgtacacaaaggggcgcatcccgtgtactacgcggctgttgtcgcgcgctcttacaccgatgtcgcgaaagcggaaggtgtaaaggtagacggctggacatattccccggaacatttgcgggtaggggacaaggtgctgctcattgacgatatttttgattcgggaagaaccattaaccatctggcgcagataattttagacatgggaattccaagaaacgatttaaaaatcgcggttcacgattataaatatttttacgataaacctgaacagtacgccattcaacccgattactggtgccgcaggcatgatgtgtcaattcacgacgatacctactggattcattacatgagccacgagcttatggggttaactgaaaaagaattggaagaaaattactattcccgcgatccaagcctaagggacgcgttacatgtaattacggaaaaaaaatga

SEQ ID NO: 16686 - protein, 246 aa, Unknown
  Obtained from environmental sample
  misc_feature (1)..(246): Xaa is any amino acid
MILYMYIQFFNTSGSENIQHFAHIIAVYAEASSDFSVLKGRLFMNKDFXQFDTVRDNALKLAHRICSDGFFPDVIYVSLRGGAYLGNLISEYYKIVHKGAHPVYYAAVVARSYTDVAKAEGVKVDGWTYSPEHLRVGDKVLLIDDIFDSGRTINHLAQIILDMGIPRNDLKIAVHDYKYFYDKPEQYAIQPDYWCRRHDVSIHDDTYWIHYMSHELMGLTEKELEENYYSRDPSLRDALHVITEKK

SEQ ID NO: 16687 - DNA, 489 bp, Unknown
  Obtained from environmental sample
  misc_feature (1)..(489): n is a, c, g, or t
gtggccttggcttccaaggcggctttacgcaatgcgatgtccaagaacgatctttccaccttcctggcacgaggggatttgatcgaaaagcagattcaggaagaggtggaaaggcaaaccaccgaatggggcatcacggttcagtatgtggaaataaccgacatacagattcccgaagccctgcaagattcgctctcacgcatggcgcaggccgaaagggaaaagaaagcccgcgtctttcttgcggaagctgaaatcgagatcgccaggaaactggaagaggcgatttctatctacgcgaaaaacgaaggcgcgttaaaactcaaaatactttcaatactgaacgagggtcttaaagcagggaactccatgatgcttataccgaattctatcgcggaggaactaaagaccagagatgtcttcggacttgcggctctgaacgagctaaagaagaaagagggggaaaacaatgacagtagtaaaagctga

SEQ ID NO: 16688 - protein, 162 aa, Unknown
  Obtained from environmental sample
  misc_feature (1)..(162): Xaa is any amino acid
MALASKAALRNAMSKNDLSTFLARGDLIEKQIQEEVERQTTEWGITVQYVEITDIQIPEALQDSLSRMAQAEREKKARVFLAEAEIEIARKLEEAISIYAKNEGALKLKILSILNEGLKAGNSMMLIPNSIAEELKTRDVFGLAALNELKKKEGENNDSSKS

SEQ ID NO: 16689 - DNA, 306 bp, Unknown
  Obtained from environmental sample
  misc_feature (1)..(306): n is a, c, g, or t
atgacagtagtaaaagctgaaaacgtagtaaaagactacggccttaacagccagacggtacacgccttgcggggagtgaacctcgaattctccggcggggaattttccgcgattgccgggccttccggaagcggcaaatccaccttccttcacctggccggttgccttgacaccctgacaggcggaaccataaacgtcggaggcacggacacggcgcanatgtcgcgccagcaactcgctattttaggcggcacagcatangtttcatctttcaggcctataaccttataccggtgcttttcgtag

SEQ ID NO: 16690 - protein, 101 aa, Unknown
  Obtained from environmental sample
  misc_feature (1)..(101): Xaa is any amino acid
MTVVKAENVVKDYGLNSQTVHALRGVNLEFSGGEFSAIAGPSGSGKSTFLHLAGCLDTLTGGTINVGGTDTAXMSRQQLAILGGTAXVSSFRPITLYRCFS

SEQ ID NO: 16691 - DNA, 855 bp, Unknown
  Obtained from environmental sample
  misc_feature (1)..(855): n is a, c, g, or t
atgatcagatcggccgagagtatcctcggggtaataggcggtacgggtgtgactgtccgtcttcttacggattcttccggtgttgatgataagtcttttaacgcagccgcttggagaggtattcttgaattttatggcgatactgcaacaaatcctaaaaataagggaaaggtttatgattgggttacaactcaggatcaaagtatgtatgtcccaaatcttcgaatggttacagatcagggatacgatcttattatcgtaaacgggtttacatgggctgaatcattgtctacggtttccaatgataatccttctcaaaaatatcttatcgtcgatgttgattgggttcaggcaggtaatgtaatgcaggccgcttacgctgagcatgaaggctcttatcttgtcggtgtcgccgccgcgttaaaagcgcttgaagacggcgtgtcttcaccccgctttggttttattggcggaatgcccgatccggttattacaaaatttgaggtaggttatgtgcaaggtattctttctattattcccgacgctgaaatagtagattattatgtaaacagttgggatgaacccgccctcgcaaaaacgcaggcgatgatttggtatgactcgggcgtttacgctattttctccgcggcgggaaacagcgggaacggaactatcgcgcaggcgaaggaatatcgtaccttgggcaaaaatgtctgggcgataggcgtggattccgatcaatatgaagatgggctttataattcaaagaattccgccgttcttacatcaatgcttaaacgtgttgaaaacagcgttattttcgcgttaaatgcgggtaaaaataaaactttttaa

SEQ ID NO: 16692 - protein, 284 aa, Unknown
  Obtained from environmental sample
  DOMAIN (1)...(283): Basic membrane protein
  misc_feature (1)..(284): Xaa is any amino acid
MIRSAESILGVIGGTGVTVRLLTDSSGVDDKSFNAAAWRGILEFYGDTATNPKNKGKVYDWVTTQDQSMYVPNLRMVTDQGYDLIIVNGFTWAESLSTVSNDNPSQKYLIVDVDWVQAGNVMQAAYAEHEGSYLVGVAAALKALEDGVSSPRFGFIGGMPDPVITKFEVGYVQGILSIIPDAEIVDYYVNSWDEPALAKTQAMIWYDSGVYAIFSAAGNSGNGTIAQAKEYRTLGKNVWAIGVDSDQYEDGLYNSKNSAVLTSMLKRVENSVIFALNAGKNKTF

SEQ ID NO: 16693 - DNA, 837 bp, Unknown
  Obtained from environmental sample
  misc_feature (1)..(837): n is a, c, g, or t
gtggttcacaaagcggcggctcagcgcctttgcggcaaatataaagttaaccgcctgcccgaagacggcaagatcgccgaagtcagggtttatgtcgagaaagacacggtttcgctccttgtggatttaagcggggagccgcttttcaaacggggttacagaagcgagggcggcgtagcgccgctgagggagacaactgccgccgccattttgttgttatccggctggaaacgcaaatttccgctttatgatcctttttgcggttccggcacaatccttatcgaagcgcttatgtacgcctgggatatggcccccggtctcggcaggcgttttgcaatcgaagacctgctcatcgcagacggtaaaatcgaaaaggctgtccgcgatgagttccgaagtaaaatagactttagccgtcttgtaagaatttcaggcagcgatgaggatagccgttccgtgtccattgcctcgtccaatgccgcccgcctgcgcgacatagccgaaggcaggcaaccgcaaaagggcactcgcgcggcaaacgacaaggcggcaattgacctaaaaaccatgccgatgaaggaagcccgttctgccttcccggatcagggttttttgcttactaatccgccatacggcaaacggcttggagatcagtcccaatccgagcaaatttaccgggaaatgggcggcctttcagagcgatttgcgggctggaaacttgccgtaataaccgatcatagcggttttgaaagctttttcggcaaaaaagcggactcctgccgagagatcagcaacggcgcaattccttcttttttttatcaatatgatgtaatataa

SEQ ID NO: 16694 - protein, 278 aa, Unknown
  Obtained from environmental sample
  DOMAIN (51)...(274): Putative RNA methylase family UPF0020
  misc_feature (1)..(278): Xaa is any amino acid
MVHKAAAQRLCGKYKVNRLPEDGKIAEVRVYVEKDTVSLLVDLSGEPLFKRGYRSEGGVAPLRETTAAAILLLSGWKRKFPLYDPFCGSGTILIEALMYAWDMAPGLGRRFAIEDLLIADGKIEKAVRDEFRSKIDFSRLVRISGSDEDSRSVSIASSNAARLRDIAEGRQPQKGTRAANDKAAIDLKTMPMKEARSAFPDQGFLLTNPPYGKRLGDQSQSEQIYREMGGLSERFAGWKLAVITDHSGFESFFGKKADSCREISNGAIPSFFYQYDVI

SEQ ID NO: 16695 - DNA, 675 bp, Unknown
  Obtained from environmental sample
  misc_feature (1)..(675): n is a, c, g, or t
gtgagggccatcacgataccggagcggacaaaggcatacctgaccgtccaggaaatccaaaagctggcagatactcccctgggcggaaagctggggggcatggtaaagcaggctttccttttcgcgtgttttaccggcatacggatttcagaccttagaacgcttgaatggggcgacatcaatatcgaatccaggcaaattggcaagcggcaggaaaagacggagcgcaaggttttcatcccgcttcactccgtggcgtggggaattataaatgacggtgcaatccataactacaaagagcttgtattccccaggcttacgcagtcgaaaaccgataccgggcaatacattgtcgcatgggcaaaaaaagccgggattgaaaagaatgtcggctggcacacggcccggcatactttcgcggttctctccctggaatccgggattgatatttcgagggggaaaaggggtaagggccagatcaatctggtattggacagagagaattacccgctggtacttcgccagtacgggacggagggagcgaaggcgcaagcgatctcgatgtgtatagcccagaagaggccgataaccaaggagaatctggaagggtttcttacgaacctggaagaagccttggaagaaatattcgagggcggcgtggacgagccgcaataa

SEQ ID NO: 16696 - protein, 224 aa, Unknown
  Obtained from environmental sample
  DOMAIN (19)...(179): Phage integrase family
  misc_feature (1)..(224): Xaa is any amino acid
MRAITIPERTKAYLTVQEIQKLADTPLGGKLGGMVKQAFLFACFTGIRISDLRTLEWGDINIESRQIGKRQEKTERKVFIPLHSVAWGIINDGAIHNYKELVFPRLTQSKTDTGQYIVAWAKKAGIEKNVGWHTARHTFAVLSLESGIDISRGKRGKGQINLVLDRENYPLVLRQYGTEGAKAQAISMCIAQKRPITKENLEGFLTNLEEALEEIFEGGVDEPQ

SEQ ID NO: 16697 - DNA, 672 bp, Unknown
  Obtained from environmental sample
  misc_feature (1)..(672): n is a, c, g, or t
atggtgggctanntaggnccaacgggcgcgggtaaaaccacagccttcaatatgattacaggccaatatgtccccaccagtggacagattttttttgaggataagaatattaccggtaaaaagccccatgtaataacagaagcgggcatagccagaactttccagaatatcaggctcttcagcaaaatgaccgttctggagaacatccttgccgcctgcgctcttcgcgagaaaccgggcctgtttgagtcggttctgcatctaccgacttaccaggccaaggaaaagcgctctttggaatttgcgcatgaaatgcttgcctcggtcggccttttggagaacgcacatgacaacgcggtatccctgccttatggcaagcagcgccgccttgagattgtccgcgccctggcaaccaggcccaagtttttgctgcttgacgaacccgccgccgggatgaacccacaggaatcatacgagttgatggacttcattgtctcggtacgggacaaattcaaaatttgcgttttgcttattgaacaccacatgcaggtggtaatgggtatatgttcgcgcctttatgtacttgactacggctttaccatagcggaggggccgcccaatgagatacagaaagaccagaaagtaattgacgcctatctgggggttggttga

SEQ ID NO: 16698 - protein, 223 aa, Unknown
  Obtained from environmental sample
  DOMAIN (1)...(198): ABC transporter
  misc_feature (1)..(223): Xaa is any amino acid
MVGXXGPTGAGKTTAFNMITGQYVPTSGQIFFEDKNITGKKPHVITEAGIARTFQNIRLFSKMTVLENILAACALREKPGLFESVLHLPTYQAKEKRSLEFAHEMLASVGLLENAHDNAVSLPYGKQRRLEIVRALATRPKFLLLDEPAAGMNPQESYELMDFIVSVRDKFKICVLLIEHHMQVVMGICSRLYVLDYGFTIAEGPPNEIQKDQKVIDAYLGVG

SEQ ID NO: 16699 - DNA, 723 bp, Unknown
  Obtained from environmental sample
  misc_feature (1)..(723): n is a, c, g, or t
gtgattgaggttcaagggcttcacaagaaattcggccggctggaagtgctgcggggggttgatttttccataaccgaaggggaaataatcgccctggtcgggccctccggctccggcaagtccaccctcctgcgctgcatcaacggtctggaggaggcgacgcggggccgcgtggtcatcgacggcgcggacgtaacccaccccgaggccagcatggatgaaatccgcacccgggtcggcttcgtctttcagaatttcaacctctttccccacatgtcggtgcggcgcaacatcaccctggcccccaccgtggtcaagcgggtgcccttggccgaggccgaggccgtctgcgccgacctcctggccaaggtcggcctgtcggacaagatcgactcttttcccaaccagctctccggtggccagcggcagcgggtggccattgcccgggccctggccatgcaccccaagtatatgctcttcgacgagcccacctcggccctggacccggaaatgatcggcgaggtcctggccgtcatccgccaactggccttggcgggcatgaccatggccatcgtcacccacgaaatgagcttcgcccgggaaatcgccacctccgtcgtcttcatggacggcgggctgctcctggagcaggcgccgccggacaaattcttctccggcccggataacccccgggccgccgagttcgtgggccgtattctataa

SEQ ID NO: 16700 - protein, 240 aa, Unknown
  Obtained from environmental sample
  DOMAIN (10)...(193): RecF/RecN/SMC N terminal domain
  misc_feature (1)..(240): Xaa is any amino acid
MIEVQGLHKKFGRLEVLRGVDFSITEGEIIALVGPSGSGKSTLLRCINGLEEATRGRVVIDGADVTHPEASMDEIRTRVGFVFQNFNLFPHMSVRRNITLAPTVVKRVPLAEAEAVCADLLAKVGLSDKIDSFPNQLSGGQRQRVAIARALAMHPKYMLFDEPTSALDPEMIGEVLAVIRQLALAGMTMAIVTHEMSFAREIATSVVFMDGGLLLEQAPPDKFFSGPDNPRAAEFVGRIL

SEQ ID NO: 16701 - DNA, 501 bp, Unknown
  Obtained from environmental sample
  misc_feature (1)..(501): n is a, c, g, or t
atggagagacacccgctccgctcaagctcaggcgttttgggcttttcgctgctgaatcccgaccagtaccttggcaggcttgtaaagctcgatccgggcaccggcgctgaaaatagaaggtcgccccttacatccgtaaacggaaggactgtcagcattgtcagcaatagaattttcgcaatagccggggaaaacaggggcgacggagccattcgcctggtcgagattaacccggacacccttgaaatgataaagcagggggatgatgacatagctgccgacagcctgctctgggtaaacggacaggatctatacgcgattaccggtacaacagacagctacaacctggccaggtttaatactgattttgtactgcagtcacgctcagctattgctgttcacccgcacgcgtcggtccttttctccgacggcaatcttgtaacccagagaacagacgggagcgcggtgctgcttaacccgagcgatttgagcggaagataa

SEQ ID NO: 16702 - protein, 166 aa, Unknown
  Obtained from environmental sample
  misc_feature (1)..(166): Xaa is any amino acid
MERHPLRSSSGVLGFSLLNPDQYLGRLVKLDPGTGAENRRSPLTSVNGRTVSIVSNRIFAIAGENRGDGAIRLVEINPDTLEMIKQGDDDIAADSLLWVNGQDLYAITGTTDSYNLARFNTDFVLQSRSAIAVHPHASVLFSDGNLVTQRTDGSAVLLNPSDLSGR

SEQ ID NO: 16703 - DNA, 576 bp, Unknown
  Obtained from environmental sample
  misc_feature (1)..(576): n is a, c, g, or t
atggaccttaagcttgccgaagccctcgataaaatgatcctcacagcttccggctggcgctcggttttttccgcggacggagacggcgaaagcccctgcaagggcatttcgcctgagcacaaaataatcgtagctttagcggcaaaggctttttcagattttttaagcggcaatgacggcataatccttgtgggaagggatacccggcctacgggcgaagctatcgcggatgcggcgatccgttcccttcttgcggcgggacgtgaacccaagtacgccggaattgtcgccgcgcctgaaataatggcttttacgcgaaaagcaggcctctccggctttatttatatttccgcgagccacaaccccataggccacaacggaatcaaattcggcctctctgacggaggagtgcttagagcggagaaaaacgccctgttggtttctgcctttaaaacgcttattgctaaagaagaagcaatagaaagtttcctctccctttttagaaacgtacccgccgagggactggctaaagtttactccgctcaggatgactcggccgatctgatcaatggntga

SEQ ID NO: 16704 - protein, 191 aa, Unknown
  Obtained from environmental sample
  DOMAIN (11)...(157): Phosphoglucomutase/phosphomannomutase, alpha/beta/alpha domain I
  misc_feature (1)..(191): Xaa is any amino acid
MDLKLAEALDKMILTASGWRSVFSADGDGESPCKGISPEHKIIVALAAKAFSDFLSGNDGIILVGRDTRPTGEAIADAAIRSLLAAGREPKYAGIVAAPEIMAFTRKAGLSGFIYISASHNPIGHNGIKFGLSDGGVLRAEKNALLVSAFKTLIAKEEAIESFLSLFRNVPAEGLAKVYSAQDDSADLING

SEQ ID NO: 16705 - DNA, 639 bp, Unknown
  Obtained from environmental sample
  misc_feature (1)..(639): n is a, c, g, or t
ttgacagttaccacactggaaactgtttcaccggacaggatagaatactactgggttgaccagcacggcagccttgttaccaccagcggcggcgcaatcaccgtggtcaccggcacgacactgaccattaccgcgcagggtacaggttatactgtcaaagagtggcatttaaacggcgttaataccggacaaaacggaaatacatataacttttcaagtatgagaatcggaaaacataccgtaggattgtttgttgagaagggcggcaatctttataacaccaacatcgtcattacgacggtaggagtaaccgtaacctttaatattaacagcggaaccggaacggctcccgcttcacagacggttcccgccggttccggcattacacttcccgagggcagcgggttttccagaaccggctctaccttcggcggctggaataccaatacctcaggaaccggaacgaattacaatgcgggatcttcctatacgcttacggaaaatgtcacattttatgcaaaatgggtgatctttaacgaagattttgaagggacaacacattcgtttaccattgaaaatggctcgcaaacaaacaaatggtatgtaggaaccgctaccgctaacgctctgccgatctga

SEQ ID NO: 16706 - protein, 212 aa, Unknown
  Obtained from environmental sample
  misc_feature (1)..(212): Xaa is any amino acid
MTVTTLETVSPDRIEYYWVDQHGSLVTTSGGAITVVTGTTLTITAQGTGYTVKEWHLNGVNTGQNGNTYNFSSMRIGKHTVGLFVEKGGNLYNTNIVITTVGVTVTFNINSGTGTAPASQTVPAGSGITLPEGSGFSRTGSTFGGWNTNTSGTGTNYNAGSSYTLTENVTFYAKWVIFNEDFEGTTHSFTIENGSQTNKWYVGTATANALPI

SEQ ID NO: 16707 - DNA, 873 bp, Unknown
  Obtained from environmental sample
  misc_feature (1)..(873): n is a, c, g, or t
atgaaataccatatttttatcgggtcaactcttgacgacctgaaaaatgaacgcaaagaaatcccgcgtattattatggaattgggtcaccttcccgtaaccgccgaatatctggacagcacggcaaaaaattacgataaactgcttgaaaaaataatagaagaatgtgattactttatcgctgttatcgcccacaaatacgccccgaaaggcgcaaaaatatccccgcttgaatcagaatgcaatatcgcccacagaaaaaatgttccgataatttcacttatcatagacgagaaggcgcgatggaaagcgacaaaaaaagaaaaggaagccgatcttgtaaaaaaagtggaagattttaaaaaaagactgcgccccggcataagcgacacatggcttaactcgacagacctttgccaaaaactgcaaagcctgcttattcagcaaattaatcttgcgccgcggaacggatgggtaaaggcggatcaggcaatcgcgccttcggtagccaacgaattatcgcgcctttcgacagagaacgaacaactcaggcatcagataaaaattgaaagcggagaaattgtcgcaaaactgagagtgcagatgaagaacgcgtttaaggtactcgcgctgaataaagtcatgttgagtttttactacgcgtcgggaaacaactgggaaaacagccgcagattccgttatttgcgaatctttaaattgcttgttcccgaattggcgattggaaaaaaaacggcggaaatttcccgttttcttggcacagtgcttaatcccgatttggacaaacctgtccgcaaggactaccctactccctcanacactatcaaaaaatcatgccggatttatccatggtaa

SEQ ID NO: 16708 - protein, 290 aa, Unknown
  Obtained from environmental sample
  misc_feature (1)..(290): Xaa is any amino acid
MKYHIFIGSTLDDLKNERKEIPRIIMELGHLPVTAEYLDSTAKNYDKLLEKIIEECDYFIAVIAHKYAPKGAKISPLESECNIAHRKNVPIISLIIDEKARWKATKKEKEADLVKKVEDFKKRLRPGISDTWLNSTDLCQKLQSLLIQQINLAPRNGWVKADQAIAPSVANELSRLSTENEQLRHQIKIESGEIVAKLRVQMKNAFKVLALNKVMLSFYYASGNNWENSRRFRYLRIFKLLVPELAIGKKTAEISRFLGTVLNPDLDKPVRKDYPTPSXTIKKSCRIYPW

SEQ ID NO: 16709 - DNA, 549 bp, Unknown
  Obtained from environmental sample
  misc_feature (1)..(549): n is a, c, g, or t
atggggttagacatgaaaaccagaaaaaatatttgcgggagaattttcaagcgttaccagaaagccgctaaaaaagacaaggcaaagatacttgacgagtatgccccgctgcttgggtacaaccgcgattatttagccaacctgctaactaactggggaaaaacacgatatgccctctctgaagggaaaccagtcaaatacatagccaaactggtcgcaaaagcccagaaaagcgcttgcaagggcaaaaaaacaggaaggccggaaaagtaccacaaagccttcgtcgaagcccttaaggccgtatgggagctttttgattttcaatgtgggaaactcctttcacccatggtcaagggaatgataagctttctggttcttgagtttaacttaagcgaacagctaaaggcattgcttctttcggcgagccctgcaaccctcgacagaaaactaaaaaacataaagaacgttatcgccctaaaggcattcataccacccaagcccggaacgctccttaaaagccagaatccgatacgggtctgtttttga

SEQ ID NO: 16710 - protein, 182 aa, Unknown
  Obtained from environmental sample
  misc_feature (1)..(182): Xaa is any amino acid
MGLDMKTRKNICGRIFKRYQKAAKKDKAKILDEYAPLLGYNRDYLANLLTNWGKTRYALSEGKPVKYIAKLVAKAQKSACKGKKTGRPEKYHKAFVEALKAVWELFDFQCGKLLSPMVKGMISFLVLEFNLSEQLKALLLSASPATLDRKLKNIKNVIALKAFIPPKPGTLLKSQNPIRVCF

SEQ ID NO: 16711 - DNA, 777 bp, Unknown
  Obtained from environmental sample
  misc_feature (1)..(777): n is a, c, g, or t
atgaccttaaaccacgcggttctgggcggaataggcggttttgccgggatgtattcgctgaaggaatttctgtcgggcattggcgcgatggaagagccggtgctggtttccggcacggacggggtcggaaccaagctggatattgccttcaaattaaaaaaattcgacacggtgggaattgactgcgttgccatgtgcgtcaatgacgtgctgtgtgtcggggccaggcctctgttctttctggattaccttgcctgcggtaaactcgatgccgacatggccgcggaaatcgtcaaaggcgtcgcaattggctgccgggaaacgggcagcgtgctgcttggcggagagaccgccgaaatgcccggattttacgaaaacggaaaatatgatatagccggtttttcagtcggcattgttgaccgcaaaaaaatagttgacggttccaaaatctgcgaaggggacgcgctgctgggaataagctcgtccggcccgcactcaaacggtttcagcctgatacgcaaaataatcccggatatgaacgaggactttggcggaatgcccatcggcatggcccttctggaaccgacgcgcctgtacgccaaacccgtattaagcttaatgaaaaaagttgagatacgcggtatggcccatatcacgggcggcggcttctacgaaaacatcccgcggatttttggcaaacaaaaatataccgcggtgattcgggaaggctcctgggacatccgccgattttcgcaaggatgccgcgggctgttataa

SEQ ID NO: 16712 - protein, 258 aa, Unknown
  Obtained from environmental sample
  DOMAIN (151)...(258): AIR synthase related protein, C-terminal domain
  misc_feature (1)..(258): Xaa is any amino acid
MTLNHAVLGGIGGFAGMYSLKEFLSGIGAMEEPVLVSGTDGVGTKLDIAFKLKKFDTVGIDCVAMCVNDVLCVGARPLFFLDYLACGKLDADMAAEIVKGVAIGCRETGSVLLGGETAEMPGFYENGKYDIAGFSVGIVDRKKIVDGSKICEGDALLGISSSGPHSNGFSLIRKIIPDMNEDFGGMPIGMALLEPTRLYAKPVLSLMKKVEIRGMAHITGGGFYENIPRIFGKQKYTAVIREGSWDIRRFSQGCRGLL

SEQ ID NO: 16713 - DNA, 348 bp, Unknown
  Obtained from environmental sample
  misc_feature (1)..(348): n is a, c, g, or t
ttgacagatcggccgagactgggcgagctcgctgagcaatgcaactatctgggcagaaaagggcgcggcgtaagggtggttggccgcctgaaacaggacaggtggacggacaacgacggtaagccccattcgcgtgtttccattgtcgcggagcatgttgaattccgccctgatttcaagaaagaggcaagccatgataatgacggcgctgaaaagggcaaagattccgtttactgcggcaatcttgccgatgaagcggccgaagccgccgaagcggtacaggactataacaacgccgctgtgacggaatacgaggagtctcctgtattggcggagacggtgttttaa

SEQ ID NO: 16714 - protein, 115 aa, Unknown
  Obtained from environmental sample
  misc_feature (1)..(115): Xaa is any amino acid
MTDRPRLGELAEQCNYLGRKGRGVRVVGRLKQDRWTDNDGKPHSRVSIVAEHVEFRPDFKKEASHDNDGAEKGKDSVYCGNLADEAAEAAEAVQDYNNAAVTEYEESPVLAETVF

SEQ ID NO: 16715 - DNA, 492 bp, Unknown
  Obtained from environmental sample
  misc_feature (1)..(492): n is a, c, g, or t
gtgggaaaacaaccggcaaaatttggaagcgcatttgggcccaggaaaccctgccgcgccgtttgcgggagtttgtatttgtgcctgtttttgcctggcccgttcttttccgcatccgcgccgatcttggaaaattttaggatttcaaatcatttcaggacagccggcggtgatttattcttgctttgcggcgatcgtgaggagacgcttgtcattccggaaagaccgttctcaatcatcgacaagatcccgttcttaaaggaagcgggcttcaggcgtttcatcattgaccttagcggccccgtcctgaaaaaaaaggcatacaaggacctgatgcaatcagcggaaagcggcgttcccttgcccgacataagcaggtttaactggaaagacggcttctttcaagaaggggtacagggttcaggggccagggtacagggtcttggtacgcagctccccgaaccccgaacccccaaccctgtaccccgttaa

SEQ ID NO: 16716 - protein, 163 aa, Unknown
  Obtained from environmental sample
  misc_feature (1)..(163): Xaa is any amino acid
MGKQPAKFGSAFGPRKPCRAVCGSLYLCLFLPGPFFSASAPILENFRISNHFRTAGGDLFLLCGDREETLVIPERPFSIIDKIPFLKEAGFRRFIIDLSGPVLKKKAYKDLMQSAESGVPLPDISRFNWKDGFFQEGVQGSGARVQGLGTQLPEPRTPNPVPR

SEQ ID NO: 16717 - DNA, 306 bp, Unknown
  Obtained from environmental sample
  misc_feature (1)..(306): n is a, c, g, or t
ttgatgcgtgcctgcagcgatttgatggcatcttccgaattttttgattgctgggaagtggtttcggccagcttacgtatctcctgggccaccaccgcgaaaccccggcccgcttcaccggcatgggcggcctctatcgcggcgttcatgctcagaagattcgtctgggtagcaacgttggatattaccttgttcatctccgccagggtctgggattccttttcaacctgcttggcagcttccgaggtctgtgaaagccgctttttttcttccgggaagaataaccagtctgaaggactgcgataa

SEQ ID NO: 16718 - protein, 101 aa, Unknown
  Obtained from environmental sample
  misc_feature (1)..(101): Xaa is any amino acid
MMRACSDLMASSEFFDCWEVVSASLRISWATTAKPRPASPAWAASIAAFMLRRFVWVATLDITLFISARVWDSFSTCLAASEVCESRFFSSGKNNQSEGLR

SEQ ID NO: 16719 - DNA, 597 bp, Unknown
  Obtained from environmental sample
  misc_feature (1)..(597): n is a, c, g, or t
atgaacaaggtaatatccaacgttgctacccagacgaatcttctgagcatgaacgccgcgatagaggccgcccatgccggtgaagcgggccggggtttcgcggtggtggcccaggagatacgtaagctggccgaaaccacttcccagcaatcaaaaaattcggaagatgccatcaaatcgctgcaggcacgcatcaaggagattgctgcggcggcaggtcatgtggaagaatcctttgacggcatgatcgacatgattcatcaggtagaggggatcaccgcaagtcttaaaaacgccacagaggagcagggcataggctctaatcagcttctttcgtcaatttcggcaatcaaatccatcacccatgacgtagaaaccggggcccaggccatgaaaaccagttcctcagaggcggtcgcggcctgccggaaccttacggaactgagccgcagcgtggatggaaaggtatccaaatgtggtgaaggggccaaatcacttaccgccaattccgaagcggtggccatgagcgtggaaaatactaagctcgctgttgcccagcttgagagatccatcaatccctttaagatacggaactga

SEQ ID NO: 16720 - protein, 198 aa, Unknown
  Obtained from environmental sample
  SIGNAL (1)...(26)
  DOMAIN (1)...(157): Methyl-accepting chemotaxis protein (MCP) signaling domain
  misc_feature (1)..(198): Xaa is any amino acid
MNKVISNVATQTNLLSMNAAIEAAHAGEAGRGFAVVAQEIRKLAETTSQQSKNSEDAIKSLQARIKEIAAAAGHVEESFDGMIDMIHQVEGITASLKNATEEQGIGSNQLLSSISAIKSITHDVETGAQAMKTSSSEAVAACRNLTELSRSVDGKVSKCGEGAKSLTANSEAVAMSVENTKLAVAQLERSINPFKIRN

SEQ ID NO: 16721 - DNA, 420 bp, Unknown
  Obtained from environmental sample
  misc_feature (1)..(420): n is a, c, g, or t
atgatacagagagcctacgagcttgatcccgattacggcggcgcttctcttgatgaattttttattattttttattcatcactgcctgaaatgatgggaggagacaaagaaaaagcgcagcgccatttccaaagagcgctggaaaaaacaaacggtaattctacaagcgcgtacatttcctacgcccagtcaatcagcgttcccgcgcaggattatgatacattcacggaatgtcttgaaagagctctggctgttgatccaaatgccgatccttctacaagattgatgaccattatcaatcagaagaaagcgaggtggctgctcgacaatgcatataacttcttttcgtttattcccatgccggatgattactatctggataattactttccggaagaatactatccggaagattactga

SEQ ID NO: 16722 - protein, 139 aa, Unknown
  Obtained from environmental sample
  misc_feature (1)..(139): Xaa is any amino acid
MIQRAYELDPDYGGASLDEFFIIFYSSLPEMMGGDKEKAQRHFQRALEKTNGNSTSAYISYAQSISVPAQDYDTFTECLERALAVDPNADPSTRLMTIINQKKARWLLDNAYNFFSFIPMPDDYYLDNYFPEEYYPEDY

SEQ ID NO: 16723 - DNA, 324 bp, Unknown
  Obtained from environmental sample
  misc_feature (1)..(324): n is a, c, g, or t
gtgatggttgtttacgcgtggagaaagcgattgctgaagcagtcgttattacggagcggcaacaaggtaaccgccgagtttgagagtgtggatatcgacacgtcgctcacggtgaatgatgagcatccgtatattattaaatgcaagtggacggatagatacggtgttcagcatacattaaaaagtgaaaacctgtggttcgatcccgcgccgattatcgagaagaagcatataaaaacgttcccggtgtacatggatttgcgaaattctaagcgttattacgtctcggttgaggaattggagggcggtctgggagaggggtaa

SEQ ID NO: 16724 - protein, 107 aa, Unknown
  Obtained from environmental sample
  misc_feature (1)..(107): Xaa is any amino acid
MMVVYAWRKRLLKQSLLRSGNKVTAEFESVDIDTSLTVNDEHPYIIKCKWTDRYGVQHTLKSENLWFDPAPIIEKKHIKTFPVYMDLRNSKRYYVSVEELEGGLGEG

SEQ ID NO: 16725 - DNA, 504 bp, Unknown
  Obtained from environmental sample
  misc_feature (1)..(504): n is a, c, g, or t
ttgtttttcgatatgaaatggaattcgctttcaagtgaaatatcttacggtcatgacatagaaggaagctggcttatgtacgaagcggctcttgcggttggcggcgaaaaccttgtctctgaagtaaaaaaagcggcacttaataccgcggaaataacattcaataccgcaattgacggtaaaaacggcggattgttcagcggctgcgacaaagaaaaaaaaattatccctaaaaaagaatggtggccgcaggcggaagctgtcgttggtttttacaatgcctatgagttgtcaggtgaaataaaatatttaaacgcagctgaaaatatttgggattatataaagaatcactttacggacaatgtaaacggtgaatggcataatgaattgagtatggacaatacgccggacacaaaaatgccgaaagccggtttttggaaatgcccgtatcataacgcacgctgttgttttgagataataaagagaagtcagtccgctgattaa

SEQ ID NO: 16726 - protein, 167 aa, Unknown
  Obtained from environmental sample
  misc_feature (1)..(167): Xaa is any amino acid
MFFDMKWNSLSSEISYGHDIEGSWLMYEAALAVGGENLVSEVKKAALNTAEITFNTAIDGKNGGLFSGCDKEKKIIPKKEWWPQAEAVVGFYNAYELSGEIKYLNAAENIWDYIKNHFTDNVNGEWHNELSMDNTPDTKMPKAGFWKCPYHNARCCFEIIKRSQSAD

SEQ ID NO: 16727 - DNA, 678 bp, Unknown
  Obtained from environmental sample
  misc_feature (1)..(678): n is a, c, g, or t
gtgcgccatcgcggcggcggaaacaagcgttttatccgtattatcgatttcaagcgcgacaagatcaatgttccggggatagtcgagaccatcgagtacgatcccaaccgttcggcgtttatcgcgctgatcaagtatgtcgacggcgagcgccgttacattttggccaccgtcaacatgaaagtcggccagaagatattgtccggagcggaagcggagatcgcggagggtaactgtatgcccttggcgaacatccccctcggcacccaggtccacaacatagagttgcgcgaaaagaagggcggccagatcgcccgtagcgcgggcgcctacgcggagattgtggcgaaagagaataacttggtgcagataaagttcccgtccagcgaagttcgtaacgttcgcgagggttgcgtcgccacaataggccgcgtaagcaacgccgatcatatagatatctgcataggttcggcgggccgcaagcgccacatgggcatacgtcccacggtgcgcggcgtggccatgaaccccgtcgaccacccgatgggcggcggcgagggcaaaacctccggcggcggccatcccgtgtcgccttgnggtcagaaggcaaaggggctcaagacgagagatcataagaagccgtccggcaaatatatcgtaaggcggaggtctaagtaa

SEQ ID NO: 16728 - protein, 225 aa, Unknown
  Obtained from environmental sample
  DOMAIN (1)...(68): Ribosomal Proteins L2, RNA binding domain
  misc_feature (1)..(225): Xaa is any amino acid
MRHRGGGNKRFIRIIDFKRDKINVPGIVETIEYDPNRSAFIALIKYVDGERRYILATVNMKVGQKILSGAEAEIAEGNCMPLANIPLGTQVHNIELREKKGGQIARSAGAYAEIVAKENNLVQIKFPSSEVRNVREGCVATIGRVSNADHIDICIGSAGRKRHMGIRPTVRGVAMNPVDHPMGGGEGKTSGGGHPVSPXGQKAKGLKTRDHKKPSGKYIVRRRSK

SEQ ID NO: 16729 - DNA, 906 bp, Unknown
  Obtained from environmental sample
  misc_feature (1)..(906): n is a, c, g, or t
gtgatcaacgcggatgatccgagctcaggctttttttcaaacgcgacgggccgcagaaagctgagtttcagcgtgaaggggaaagacgccgacctcacggtaaaagagatagaaagcagcgccttggggaatcggtacaatgtacacatcgcgtctgaaaaggcggacattgagatacgcgacaatctgcccggcgcgttcaacgcgggcaatgtgctggcatcgcttttggttgtttccggcctgacaaagatcccggtacgggagcttgtcccgctctgccccaaacttctgcccgtgcgcggacgcatgactgcggttgacaagggccagagtttcgaggtgctggtagactacgcccacacgccatcgtcttttcagacggttttcccgccgctgcgaaaacggcttgacaattccggcaagccggggcgaagaataatcagcctttttggttcagccggcgagagggacacgcaaaaacgcgccgagcagggaaaaatcgccgccagatattctgacattatagtattgaccgatgaagaccctcggggcgaggttcccattgacatacttgaggaaatcgcacagggcataaatgcccagggcatttatgcccagggcatttatgcccagggagttcatgctgaaaatccggcgctattcaaacaaggtgaaaatctttttttaatccccgaccggcctgaagcgatacggaaagctttttcccttgcacgcgaaggcgacctcgtgctgctgctgggcaaaggccacgagaacacgattatatacaaagatcgcgtaatgccctatgatgaaatcggcgaggcggagaaagcttggaagagggagtggggagtagggagtagggagtgggtgttctcggccgatctgatcattgggtaa

SEQ ID NO: 16730 - protein, 301 aa, Unknown
  Obtained from environmental sample
  DOMAIN (100)...(192): Mur ligase family, glutamate ligase domain
  misc_feature (1)..(301): Xaa is any amino acid
MINADDPSSGFFSNATGRRKLSFSVKGKDADLTVKEIESSALGNRYNVHIASEKADIEIRDNLPGAFNAGNVLASLLVVSGLTKIPVRELVPLCPKLLPVRGRMTAVDKGQSFEVLVDYAHTPSSFQTVFPPLRKRLDNSGKPGRRIISLFGSAGERDTQKRAEQGKIAARYSDIIVLTDEDPRGEVPIDILEEIAQGINAQGIYAQGIYAQGVHAENPALFKQGENLFLIPDRPEAIRKAFSLAREGDLVLLLGKGHENTIIYKDRVMPYDEIGEAEKAWKREWGVGSREWVFSADLIIG

SEQ ID NO: 16731 - DNA, 486 bp, Unknown
  Obtained from environmental sample
  misc_feature (1)..(486): n is a, c, g, or t
atgttttacgcgcgcgcttgcgctcctctcccggatgtcgcctttttggcgaccttttacctccgcaaaaggtatacaaataaaacaaacaggaggaccaaaatgaatcaaaacttaacggaaattatttttattcttgaccgcagcggctctatgggcggcctggaaagcgacacaatcggaggctttaacggttttgtaaaaaaacaggcggaagcaggccttacatgccttaccactgtgctttttgacgatcaatacgaaattctgcacaacggtattaacgccggggatgttgtccttacaaacaaggagtattttacccgcggctccaccgctcttcttgacgctgtgggcaaaaccattaacgatgtgggaaggaggctcagcgacacgccggaagattcaagacccggcaaggttatctttgtcatcaccaccgacggactgaaaacgcaagcaaagagttcagctatgacaaagtaa

SEQ ID NO: 16732 - protein, 161 aa, Unknown
  Obtained from environmental sample
  misc_feature (1)..(161): Xaa is any amino acid
MFYARACAPLPDVAFLATFYLRKRYTNKTNRRTKMNQNLTEIIFILDRSGSMGGLESDTIGGFNGFVKKQAEAGLTCLTTVLFDDQYEILHNGINAGDVVLTNKEYFTRGSTALLDAVGKTINDVGRRLSDTPEDSRPGKVIFVITTDGLKTQAKSSAMTK

SEQ ID NO: 16733 - DNA, 873 bp, Unknown
  Obtained from environmental sample
  misc_feature (1)..(873): n is a, c, g, or t
ttgcggaaaccgggagaaaatatgggcgattacactgtggtaggaattgacttgggaacgagtacctcagtcgtaaaagtgagaaattattatgaagcgggaacgacgccgacggatcatactttgcaatttgacggccgtaacttgcttccgacattgatattcaaagacagcgaaggcaatttgtcttatgggaaggcagcgctgaacaaggaatctgacagggaatctgacagggaacacggcgaacaaggaggccggctgtatgaaaatttcaagatgaaattaaccggcgatgattccaaagaggataaagaagccaaagaacttacccaaaaattttttaatcatatctattcaaggtttgatgaggagagggtaaactacggcgtgctggaaaaagtaaagacctatgtcagttatcctgtaaaatggaaagacgacacaagacgatttatgatagagtgcgcaaagaatgcaaaatttacgaatgtggaaggagtagacgaggcaagcgcggccatatatgcggctatacctaaccatcttgagaatctgcaaaaagaaggaatccttcgcggcgacaaacctgttaccgttatgatgctggatatgggcgccggaacatccgatatcgcgatttttaattttaagatgggcgcagacaagaaacttgccgccggtaatccggtaacatggcccccaacagacaaacagagttgcggcggaagagaaatagaaaagtatatggcggttgaattggaaaattatatcaaaaaaatctcaaatgaaaacgagatcaaaaaaaacataagaaaacaaataaaaaattctgtaaaaggatggaaagaagatcactgtctccggatctaa

SEQ ID NO: 16734 - protein, 290 aa, Unknown
  Obtained from environmental sample
  misc_feature (1)..(290): Xaa is any amino acid
MRKPGENMGDYTVVGIDLGTSTSVVKVRNYYEAGTTPTDHTLQFDGRNLLPTLIFKDSEGNLSYGKAALNKESDRESDREHGEQGGRLYENFKMKLTGDDSKEDKEAKELTQKFFNHIYSRFDEERVNYGVLEKVKTYVSYPVKWKDDTRRFMIECAKNAKFTNVEGVDEASAAIYAAIPNHLENLQKEGILRGDKPVTVMMLDMGAGTSDIAIFNFKMGADKKLAAGNPVTWPPTDKQSCGGREIEKYMAVELENYIKKISNENEIKKNIRKQIKNSVKGWKEDHCLRI

SEQ ID NO: 16735 - DNA, 561 bp, Unknown
  Obtained from environmental sample
  misc_feature (1)..(561): n is a, c, g, or t
gtgtcaaaatcttcttcggcaagtacagtgtcctccccgccgacattatcctcaggaaccgagatctcctcgaaaccggtgtcaaaactttcttcggcaagtacagtgtcctccccgccgacattatcctcaggaaccgagatctcctcgaaaccggtgtcaaaactttcttcggcaagtacagtgtcctccccgccggcatcgacctcaggaaccgagagttcctcgaaaccggtgtcaaaattttcttcggcaagtacagtgtcctccccgccgacattatcctcattgtgcggaagatctatatcagacaacgctaaagcgtcaaagtttgtatcatcatcaatatcgggcaaatcaggcaagtcaggcaagtcaaccgatacaccttccccgccagccaaatcctcaaagccgacatctagctcgggcatggaaaaatcttcggtggattcctggttttcggcgctggctgaggtcaaatcctggggttcacctttcacccagactccgtattcatccagttcatcggccgaaccgatgttacccctgtcggagtaa

SEQ ID NO: 16736 - protein, 186 aa, Unknown
  Obtained from environmental sample
  SIGNAL (1)...(17)
  misc_feature (1)..(186): Xaa is any amino acid
MSKSSSASTVSSPPTLSSGTEISSKPVSKLSSASTVSSPPTLSSGTEISSKPVSKLSSASTVSSPPASTSGTESSSKPVSKFSSASTVSSPPTLSSLCGRSISDNAKASKFVSSSISGKSGKSGKSTDTPSPPAKSSKPTSSSGMEKSSVDSWFSALAEVKSWGSPFTQTPYSSSSSAEPMLPLSE

SEQ ID NO: 16737 - DNA, 834 bp, Unknown
  Obtained from environmental sample
  misc_feature (1)..(834): n is a, c, g, or t
atgagcacacgaaaacatctattcatgccgccggccgccgcgtcaatcttagccctgatcttttcccttgccacaaccgcctcagccgcatccaacgacgacgaggatttcaaatggcaggaagcctcgagggagctcgacgccctccccttctcccaagcgtatatcgactccgtaagaaaagcgtacgcgggcgcgccctcgctgcaaagcggactgcgcgcgatggaatccaaacgcttcgccaacggcgaaaccctcgtcttcgaggtcggatggacggtcttcaaggcaggctacctcatcctctccgccgcgcacctgcgcagccgcggactgatgcgcgtaagcgccaaggccatgaccggcaacaaagtaagcgcaatctataaaatacgcaaccacgaaatatcatggatcgacgccgacggcctctaccccgtcttcttcgaacagcatatccgcgaaggcaaaaaatacaaagccgacaactacacaatctacgacaacgccgccggcaaactctttctcaaaagaagcgacgtcaaagaattcgacaccccgaagttcacgcacgactacatatccgtgatgtactacgtgcgcacaatgcccttaaaccccggcgacgagttcgaggcgttcctgttcacaagaccgaaaacgtacccgatgaaattcaaggtgcacgaaaaacgcgaaaccgtanacgtaggcgggaaaagctacaactgcgtaaaggtcgaacccgctttagtcggggaggggcgcgtattccaaagaaagancagatggaaatatgggtcacggacgacgaanaccactatcccgtaa

SEQ ID NO: 16738 - protein, 277 aa, Unknown
  Obtained from environmental sample
  SIGNAL (1)...(29)
  misc_feature (1)..(277): Xaa is any amino acid
MSTRKHLFMPPAAASILALIFSLATTASAASNDDEDFKWQEASRELDALPFSQAYIDSVRKAYAGAPSLQSGLRAMESKRFANGETLVFEVGWTVFKAGYLILSAAHLRSRGLMRVSAKAMTGNKVSAIYKIRNHEISWIDADGLYPVFFEQHIREGKKYKADNYTIYDNAAGKLFLKRSDVKEFDTPKFTHDYISVMYYVRTMPLNPGDEFEAFLFTRPKTYPMKFKVHEKRETVXVGGKSYNCVKVEPALVGEGRVFQRKXRWKYGSRTTXTTIP

SEQ ID NO: 16739 - DNA, 711 bp, Unknown
  Obtained from environmental sample
  misc_feature (1)..(711): n is a, c, g, or t
ttgctttcaatgccgattatgttctctgctatgagctatggctccataagctacaacgctcacgaaagtttggcacgtgcagcagaggaactgggcattttatacaacacaggcgaaggtggtttgcacgaagatttttaccgttggggcaagaataccatagttcaggtagcatctgggcgttttggcgttcatcctcaatatttgaatagcggagcggcgatagagataaagatagggcagggagcaaagcctggcattggggggcatttgcctgggacaaaaattgtgggtgatatttcacgcacaaggatgattcccgaaggcaccgatgccatatcgcccgctccgcaccacgatatttattctattgaagatttgcggcaattggttttctcactaaaagaagcctccgattacaaaaagccggttatagtgaaaatcgcagccgttcacaatgttgttgccatagcaagcggcattgcaaggagcggagcagacataatagccatagacggtttccgtggcggaacgggagcagctcccacacgcatacgcgaccacgttggcattcccatagaacttgcactcgcgggcgttgataagcgtttgcgcgatgagggcattcgcgacaatgtatctatagttgtgggcggtagtattcgctccagcgcagatattgtaaaagcntgttgcacttggcgcagatag

SEQ ID NO: 16740 - protein, 236 aa, Unknown
  Obtained from environmental sample
  SIGNAL (1)...(20)
  DOMAIN (1)...(236): Conserved region in glutamate synthase
  misc_feature (1)..(236): Xaa is any amino acid
MLSMPIMFSAMSYGSISYNAHESLARAAEELGILYNTGEGGLHEDFYRWGKNTIVQVASGRFGVHPQYLNSGAAIEIKIGQGAKPGIGGHLPGTKIVGDISRTRMIPEGTDAISPAPHHDIYSIEDLRQLVFSLKEASDYKKPVIVKIAAVHNVVAIASGIARSGADIIAIDGFRGGTGAAPTRIRDHVGIPIELALAGVDKRLRDEGIRDNVSIVVGGSIRSSADIVKACCTWRR

SEQ ID NO: 16741 - DNA, 783 bp, Unknown
  Obtained from environmental sample
  misc_feature (1)..(783): n is a, c, g, or t
atgggcgagaaagacggcgcctgcatcattcagatctccgtgagcgacacggggatagggataagcgccgagcagcaaaaacacctcttccgctcattccagcaagccgagagcagcacaacgcgcaagtacggcggcacggggcttggattagccatctgcaaaagcatcgtggagatgatgggcggcaagatatggatcgaatcggaaccgggaaaaggttcaacattcacctttgacatagaggcgcagcgcggcactgcaaaagagaaacacggattgctcgcccctgaggtaaactggagcaacgtccgcataatggctgtggacgacgaccccgacacgctgacctactttcgcgacataacgacgggattaggcgtatcctgcgacaccgccctaagcggggaagatgcgctgaaacttgtggacaaaaccggcgactaccacatctacttcatagattggaagatgccgaatatggacggcatacagcttgtacgcgaactgaaagcgcgaaccaaagaaccgtccgtagtaataatgaactccgccgccgattggagtaccgtagaagaggaggcgaaaggcataggggtggacaagtttctcaccaaaccgctcttcccgtccacggtggcggatattataaacgagtgcataggcttagttcaaccgcaaacggaggaagaacaaaccgacatcaccggcatctttgcgggacgccgcatactgctggtggaagacgggagatcaaccgtgaaatcatctcggccgatctga

SEQ ID NO: 16742 - protein, 260 aa, Unknown
  Obtained from environmental sample
  DOMAIN (104)...(218): Response regulator receiver domain
  misc_feature (1)..(260): Xaa is any amino acid
MGEKDGACIIQISVSDTGIGISAEQQKHLFRSFQQAESSTTRKYGGTGLGLAICKSIVEMMGGKIWIESEPGKGSTFTFDIEAQRGTAKEKHGLLAPEVNWSNVRIMAVDDDPDTLTYFRDITTGLGVSCDTALSGEDALKLVDKTGDYHIYFIDWKMPNMDGIQLVRELKARTKEPSVVIMNSAADWSTVEEEAKGIGVDKFLTKPLFPSTVADIINECIGLVQPQTEEEQTDITGIFAGRRILLVEDGRSTVKSSRPI

SEQ ID NO: 16743 - DNA, 423 bp, Unknown
  Obtained from environmental sample
  misc_feature (1)..(423): n is a, c, g, or t
atgtcgcatccggcgacccagcccgattccgaaatagcttttgaaacctcgctaggcggcggggcatggcgctcgatgttccaagttgtaaggcatcgcctgcaatccaatcggaatggctctagggcttttgttgggcaagcgtctatgcagtttgtgcatttgccgcacctgtttccaatgaatggttcatctggctggatttcaacgtctagcaggagcgtgcccaggaagccccagcttccctgcttgccagctatcaaaagggtatttttgccctgccagccaaggccagccctcaccgctaggcccctctccaatagtggggcagtgtcaacgcaggccctgccattggctcctggcgccaagtcttggatgtattccagcaggcgctgcaagcgcgtcttgattattcggtggtag

SEQ ID NO: 16744 - protein, 140 aa, Unknown
  Obtained from environmental sample
  misc_feature (1)..(140): Xaa is any amino acid
MSHPATQPDSEIAFETSLGGGAWRSMFQVVRHRLQSNRNGSRAFVGQASMQFVHLPHLFPMNGSSGWISTSSRSVPRKPQLPCLPAIKRVFLPCQPRPALTARPLSNSGAVSTQALPLAPGAKSWMYSSRRCKRVLIIRW

SEQ ID NO: 16745 - DNA, 330 bp, Unknown
  Obtained from environmental sample
  misc_feature (1)..(330): n is a, c, g, or t
atggttatcgccggagcaatgtcagggctgggcggtgccatgctgtaccttgccggttcagggaagggcatcaccgtggttgacgtgctggcaatggaaggctttaacggcatacccgtcgcgcttctggggcttaacaacccgctggggatcatcttttccggcctgctggtggcctatcttaatgtaggcggattcaacatgcagttatacaaatttgcgcctcaagtcatcgagatcattataggggtgattatctacttcagcgccttcgcccttttgctaaaaggctttattacctccctgagaaaacgctgggggaaaccatga

SEQ ID NO: 16746 - protein, 109 aa, Unknown
  Obtained from environmental sample
  misc_feature (1)..(109): Xaa is any amino acid
MVIAGAMSGLGGAMLYLAGSGKGITVVDVLAMEGFNGIPVALLGLNNPLGIIFSGLLVAYLNVGGFNMQLYKFAPQVIEIIIGVIIYFSAFALLLKGFITSLRKRWGKP

SEQ ID NO: 16747 - DNA, 486 bp, Unknown
  Obtained from environmental sample
  misc_feature (1)..(486): n is a, c, g, or t
atgaacattctgtattttctggttcagcagaccatgtttttctcgattccccttttaatcgtagcgctggggggaatgttttcagagcgctccggcgtcatcaatatagcccttgagggcatcatgatcatgggcggttttaccggcatcctttttatcaacttttttcaaaaggcaatccccggccagccgatactgctgctggcggtgcttatctcgatcatctccggcgtcttaatctccctgctgcacggctacgcgtccattaacatgaaggccaaccagatcatcagcggcacggcgattaacatgcttgccccggcagtcgcaatctacgtcgccaggcagatacgcaccgtgcagcanataccttttgtaaaccagttccgcatcgagagagccccggtgctgggcagtattcccctgatcgggccgttatttttcccgtacacctacctgaccacctaccttggttttataatctga

SEQ ID NO: 16748 - protein, 161 aa, Unknown
  Obtained from environmental sample
  misc_feature (1)..(161): Xaa is any amino acid
MNILYFLVQQTMFFSIPLLIVALGGMFSERSGVINIALEGIMIMGGFTGILFINFFQKAIPGQPILLLAVLISIISGVLISLLHGYASINMKANQIISGTAINMLAPAVAIYVARQIRTVQXIPFVNQFRIERAPVLGSIPLIGPLFFPYTYLTTYLGFII

SEQ ID NO: 16749 - DNA, 723 bp, Unknown
  Obtained from environmental sample
  misc_feature (1)..(723): n is a, c, g, or t
gtggttgccccgggcgacatgttgattcggctttttgccgantgcgtctacttcatcataaaagataatgcatggagccttgtcgcgggcntgctgaaacagatccctcacccttgncgcgccgacgcctacaaacatctncacaaagtccgcgccgctcatacgaaaaaacacaactccggcttctccggcaacagcgcgggccagcagggtcttgcctgttcccggcggccctaccagcaatacgcctttaggtatcttaccgccaatatcggtgtacttcttcgggttcttcaaaaagtccactacttcaaccagttcttcctntgcttcgtcaactccggcgacatcgttaaatcgcgtggcaatatctccttccgccacgatcaccgcgcggttctgtcccacggaaagaacattgccacccatagtgcccagccgcttcattacaaaacggaagagaagcaggaaaaaagcgatgggcagcacccaactgaatatgatgttgagtatggcgctgccttcccgcgcatccgcgtaataggccacgcctttttcatccatcagtttgattatatcgggatcattgatgggaaccgtacggtagaccggatcctgcgccgccatattgcggagcacccggcccatttccctttgaggggtaatggttgtataacctgtaaaataggtatcggtcagctctacccttttaatctcgcctga

SEQ ID NO: 16750 - protein, 240 aa, Unknown
  Obtained from environmental sample
  misc_feature (1)..(240): Xaa is any amino acid
MVAPGDMLIRLFAXCVYFIIKDNAWSLVAGXLKQIPHPXRADAYKHLHKVRAAHTKKHNSGFSGNSAGQQGLACSRRPYQQYAFRYLTANIGVLLRVLQKVHYFNQFFLCFVNSGDIVKSRGNISFRHDHRAVLSHGKNIATHSAQPLHYKTEEKQEKSDGQHPTEYDVEYGAAFPRIRVIGHAFFIHQFDYIGIIDGNRTVDRILRRHIAEHPAHFPLRGNGCITCKIGIGQLYPFNLA

SEQ ID NO: 16751 - DNA, 327 bp, Unknown
  Obtained from environmental sample
  misc_feature (1)..(327): n is a, c, g, or t
ttgcctgttcccggcggccctaccagcaatacgcctttaggtatcttaccgccaatatcggtgtacttcttcgggttcttcaaaaagtccactacttcaaccagttcttcctntgcttcgtcaactccggcgacatcgttaaatcgcgtggcaatatctccttccgccacgatcaccgcgcggttctgtcccacggaaagaacattgccacccatagtgcccagccgcttcattacaaaacggaagagaagcaggaaaaaagcgatgggcagcacccaactgaatatgatgttgagtatggcgctgccttcccgcgcatccgcgtaa

SEQ ID NO: 16752 - protein, 108 aa, Unknown
  Obtained from environmental sample
  misc_feature (1)..(108): Xaa is any amino acid
MPVPGGPTSNTPLGILPPISVYFFGFFKKSTTSTSSSXASSTPATSLNRVAISPSATITARFCPTERTLPPIVPSRFITKRKRSRKKAMGSTQLNMMLSMALPSRASA

SEQ ID NO: 16753 - DNA, 552 bp, Unknown
  Obtained from environmental sample
  misc_feature (1)..(552): n is a, c, g, or t
gtgctggccggcatcgaggacgaagtgtcggccgcggaatctaagtacacgcagcccgaccaggtcgaagacttcgtcaagaaaacgggtgttgattcactcgctatctccatcggaacctctcacggcgcgttcaagttcaaacccgaacagtgcacgaaaaacgcggacggcgtgcttgtgccgccccccctgcgcttcgacattttggaagagatcgaaaagcgcatccccggcttccccatcgtgctccacggatcaagttccgtgctgcccgagtacgtgaagatcattgaggagtgcggcggccacttgaaggctgcggtcggcatcccctccgaacagctccgcaaagcggcgaagtcggcggtttgcaaaatcaacatcgattccgacggacgtctcgtcctgaccgcgataatccgcaaagtctttaaggaatcgccggcggagtttgatccgaggaaataccttggcccggcgagagaagagttggtcaagatgatgatcgacaagaacgagaatgttctgggcagcgcaggcaaggcttga

SEQ ID NO: 16754 - protein, 183 aa, Unknown
  Obtained from environmental sample
  DOMAIN (1)...(183): Fructose-bisphosphate aldolase class-II
  misc_feature (1)..(183): Xaa is any amino acid
MLAGIEDEVSAAESKYTQPDQVEDFVKKTGVDSLAISIGTSHGAFKFKPEQCTKNADGVLVPPPLRFDILEEIEKRIPGFPIVLHGSSSVLPEYVKIIEECGGHLKAAVGIPSEQLRKAAKSAVCKINIDSDGRLVLTAIIRKVFKESPAEFDPRKYLGPAREELVKMMIDKNENVLGSAGKA

SEQ ID NO: 16755 - DNA, 717 bp, Unknown
  Obtained from environmental sample
  misc_feature (1)..(717): n is a, c, g, or t
atgcagatgaaagcgatgataggcgagcttgacatatcctcaatattcaaggggcaggaagtgcgctttactcttgagagccttcccgggcgaagattttcaggcattgtggaaacgctgaggatggttcctgttgtttcgaataacgttgtttcatatacggttattatcaacgtggagaacaagggcggctcccttctgccggggatgacatgcgccgtggactttattgtagaaaaaacagataacgccctccttgtttccaatgccgcccttcgttatcagccgacaagccttaacgcggaacaaatttccgatttggtgtttaacgcaagccttgaaaatatgacggaagagcaaaaacaaaacgcccttgaggctagggaacagcaaaaaaatgagtcttcacagcagaaacaaaaccagggacaaaacagcaacagccagggactttcccagttaatgatgggggggtcccagcccggcattagaatgggaggcggcggcaggccgctttccggaggacaagcttccggcgggcagggaagccagcagcgcgtccgcgctgtagcatggcgtaatctttggttttttaacagcgaaggcaagttaggcgtagtgcaggtacgcaccggcatcagcgacggttcgtcaactgaaataattgtacccgatgattttgagggcaggcaggtaattttaagggagaaaatttaa

SEQ ID NO: 16756 - protein, 238 aa, Unknown
  Obtained from environmental sample
  misc_feature (1)..(238): Xaa is any amino acid
MQMKAMIGELDISSIFKGQEVRFTLESLPGRRFSGIVETLRMVPVVSNNVVSYTVIINVENKGGSLLPGMTCAVDFIVEKTDNALLVSNAALRYQPTSLNAEQISDLVFNASLENMTEEQKQNALEAREQQKNESSQQKQNQGQNSNSQGLSQLMMGGSQPGIRMGGGGRPLSGGQASGGQGSQQRVRAVAWRNLWFFNSEGKLGVVQVRTGISDGSSTEIIVPDDFEGRQVILREKI

SEQ ID NO: 16757 - DNA, 843 bp, Unknown
  Obtained from environmental sample
  misc_feature (1)..(843): n is a, c, g, or t
ttgcgcgacgactacgtagagatacaaatttccgccgagtccgctgaaccgccggagtatctgtacggcggcgaattcggcgaatctgtctactcgctgactacggtgtccgccgttatccccaaaagcgtgaggctgcgcaaccaaaattaccgtactcccgaaacgccgccggagggcgccgcctccggcggcgccagcggttcgcgcggcacgtggggtagcgtgtacgaatacggcggcacattcaagaacgacgaggagggcaagcgactggcgtcgctctacctaaagcggttgcaaacggagaatttgcaaaccgtcgggagcagcaggtgcgtggcgtttcgtgccggagagataatttccatcgccggcatcggcgagtttttattgctctccgtggagcacgagggcgggcaaggggagaggagcggcaatcaagagtatacctacaacaaccacttccgctgcatcgacgcaaccaagaaaacctacgccccgccgctccgcgcgaagccgccggtggccgccggactaatcaccgcgcccatagacgcgcttggggaagatctgcccaatatagacgagatgggaagataccgcgtaaaactcccattcgacctctccgaaacaccggagtacggcgcgacaaaagacatccgcttatcgcaaatatccggcggggagggttacggcgtccactttccgtcaaagaagaactcggagatgatactcggctacgtagacggaaaccccgacaagcccataggcctggggctactgcccgacgcaaacgcgaaatcggtatcgaacagcggcaataggacggaaaacgtataa

SEQ ID NO: 16758 - protein, 280 aa, Unknown
  Obtained from environmental sample
  DOMAIN (184)...(258): Protein of unknown function, DUF586
  misc_feature (1)..(280): Xaa is any amino acid
MRDDYVEIQISAESAEPPEYLYGGEFGESVYSLTTVSAVIPKSVRLRNQNYRTPETPPEGAASGGASGSRGTWGSVYEYGGTFKNDEEGKRLASLYLKRLQTENLQTVGSSRCVAFRAGEIISIAGIGEFLLLSVEHEGGQGERSGNQEYTYNNHFRCIDATKKTYAPPLRAKPPVAAGLITAPIDALGEDLPNIDEMGRYRVKLPFDLSETPEYGATKDIRLSQISGGEGYGVHFPSKKNSEMILGYVDGNPDKPIGLGLLPDANAKSVSNSGNRTENV

SEQ ID NO: 16759 - DNA, 561 bp, Unknown
  Obtained from environmental sample
  misc_feature (1)..(561): n is a, c, g, or t
ttgccggattgccgggggaaaaaccttcaatcttttggtagggggtttgaccagatctggcaagcggttagggaggagagagaagagggaacagggaacagtgaacagataacagatgggagagaagagggaacagtgaacagtgaacagagaacagataacagagaacagataacagaggggagagaaaagggaggggagaaagattctagggtggaaattcaggttgggattttgaaggggttgccgggggcggcgatttcgcgtcacaatgaggcgtttgggatgcggtataattgtaagccgccttatgaaatagaagaaacttcgtcactttccgcagatgatttacggcgcgtgaaaaactttgccgctttttgggagcggcttgtgaatagggggcttttggctttggataacgaaccggtttttgagaaatttatgtctctttcggatgcgctctttgcccattttggcaaaaactggggtattgataaaaatgagctacttaaaaaagtgactgaaaatttatttgagaagaactctcacaaagaacactaa

SEQ ID NO: 16760 - protein, 186 aa, Unknown
  Obtained from environmental sample
  misc_feature (1)..(186): Xaa is any amino acid
MPDCRGKNLQSFGRGFDQIWQAVREEREEGTGNSEQITDGREEGTVNSEQRTDNREQITEGREKGGEKDSRVEIQVGILKGLPGAAISRHNEAFGMRYNCKPPYEIEETSSLSADDLRRVKNFAAFWERLVNRGLLALDNEPVFEKFMSLSDALFAHFGKNWGIDKNELLKKVTENLFEKNSHKEH

SEQ ID NO: 16761 - DNA, 738 bp, Unknown
  Obtained from environmental sample
  misc_feature (1)..(738): n is a, c, g, or t
ttgcgcgacatatcagagtccttgttagttgacatggcacaacaattggaagtacagtcatataccacgatttccgccagccacgctcttatggcgattgacgcttacctgaaagccgttccaacagccgaaacaggcacttttaccgtacaggaagtttcaaaagacaaccagcgcaaggacttaaagcccgccggaaccgccgtgttcagcgtcccattctccgctaacgcggcaaaaatcagcgtggataacaaagataaccttaatcttttttatcagataacggcggctggttttgaccgcgagatgccgtcaaaggaaacaaagaacggcattgaaatttacagggaattcctcgacagcgcgggaaaaccggcagcttctttcaaagtcggcgacattgtaacggtaaaactcaatttccgcagtctttccaacaacgaacaccgggatgtggctattgtcgatttatgccccgcgggtcttgagacggaaattgattcggtgcggcaggacgacaaccaatcgtcggcgtggaaagccgactatgtcgatatccgcgaggacaggctggtaatttacggctcggtaagcggcaaggtcgccagtttcagttaccgcgcgagggcgatcaacgccggcacttttacaaccccgcctctttatgccgaagcgttatacgataaatcggtatgggcgctgcgtccgcaggcttcgattaagattacgaaatga

SEQ ID NO: 16762 - protein, 245 aa, Unknown
  Obtained from environmental sample
  misc_feature (1)..(245): Xaa is any amino acid
MRDISESLLVDMAQQLEVQSYTTISASHALMAIDAYLKAVPTAETGTFTVQEVSKDNQRKDLKPAGTAVFSVPFSANAAKISVDNKDNLNLFYQITAAGFDREMPSKETKNGIEIYREFLDSAGKPAASFKVGDIVTVKLNFRSLSNNEHRDVAIVDLCPAGLETEIDSVRQDDNQSSAWKADYVDIREDRLVIYGSVSGKVASFSYRARAINAGTFTTPPLYAEALYDKSVWALRPQASIKITK

SEQ ID NO: 16763 - DNA, 705 bp, Unknown
  Obtained from environmental sample
  misc_feature (1)..(705): n is a, c, g, or t
atgctggaaagaaatcccgcccccgatgattttattgcgaaagccggacgttcaacgccaatagcctacaaaacaggcacttcaatcggttttaaagacgcgtggtctatcgccatctttgaccgttatgtgctatgcgtatggcttggaaatttctccggtgagggaaacagcgcgtttatcggcaggcttagcgccgctcctttgggcttcagcataatagacgcggtacttgcggagattccccgtgaaaatctttatgcgccccgtcccctgccgcaggaagttaaagcggtgcaagtatgcgccgtatccggagacattccttccgacgactgcccccggcttattaatacgctttttatccccggcgtttccccgatcaaccgctgcaagattcaccgcaaagtcttcattgacacacgcacaggataccggacagacgaaaccgaaggcacctatatccgcggtgaagtccgcgagttctggccctcggatatactggaaatttttgaagccgcgggccttccgcgtctttcgccgccgccctaccctcctgatgatcccgcgaacggcgctgtctcaaggggctttccgccttcgataatttcaccccttgccaacaccgattacattgtccggcctgggtatcagactgacagccgtttaatcagatggtgctctcgcagcgctcggccgatctga

SEQ ID NO: 16764 - protein, 234 aa, Unknown
  Obtained from environmental sample
  misc_feature (1)..(234): Xaa is any amino acid
MLERNPAPDDFIAKAGRSTPIAYKTGTSIGFKDAWSIAIFDRYVLCVWLGNFSGEGNSAFIGRLSAAPLGFSIIDAVLAEIPRENLYAPRPLPQEVKAVQVCAVSGDIPSDDCPRLINTLFIPGVSPINRCKIHRKVFIDTRTGYRTDETEGTYIRGEVREFWPSDILEIFEAAGLPRLSPPPYPPDDPANGAVSRGFPPSIISPLANTDYIVRPGYQTDSRLIRWCSRSARPI

SEQ ID NO: 16765 - DNA, 708 bp, Unknown
  Obtained from environmental sample
  misc_feature (1)..(708): n is a, c, g, or t
gtggaatcggaagaacagatctgcagtattgcgtggcatgtcaaagaagcgggagcgaatcttttacgcggcggcgcgttcaagccacggacttctccctattcgtttcaggggcttagagacgaaggcatagagtttttgttaaaagcaaaagaactcaacggaatgcccgtcgtcagcgagataatgaacgccaaccatctgcctatgtttgagcaggttgatgtaattcaagtcggcgcgcgcaatatgcagaactttgaactgttgaaagaacttggcaggcaggataagccaatcctgttgaaacgcggtcttgccaataccctggaagaacttttaatgagcgcggagtacatcatgtcaggtggaaacggaaagatcattctatgcgagcgcggcatccgcacctttgaaacagccactcgtaatacgcttgatatttcagccgtgccgatgttaaagcggctgacccatctgcccgtcatcattgaccccagccacgcggcgggcgacgcggctcttgtatacccgctgtcaatggcatcagccgccgcaggcgcggacggattgatcattgaagtacacaatgatcccgcccatgcctggtgtgacgggccgcagtcgattacgccggaggcttttgccactttagcgcatgatgttcagaagattctgaaaataataaataagaaaagtgaaaagtga

SEQ ID NO: 16766 - protein, 235 aa, Unknown
  Obtained from environmental sample
  DOMAIN (1)...(228): DAHP synthetase I family
  misc_feature (1)..(235): Xaa is any amino acid
MESEEQICSIAWHVKEAGANLLRGGAFKPRTSPYSFQGLRDEGIEFLLKAKELNGMPVVSEIMNANHLPMFEQVDVIQVGARNMQNFELLKELGRQDKPILLKRGLANTLEELLMSAEYIMSGGNGKIILCERGIRTFETATRNTLDISAVPMLKRLTHLPVIIDPSHAAGDAALVYPLSMASAAAGADGLIIEVHNDPAHAWCDGPQSITPEAFATLAHDVQKILKIINKKSEK

SEQ ID NO: 16767 - DNA, 420 bp, Unknown
  Obtained from environmental sample
  misc_feature (1)..(420): n is a, c, g, or t
gtggcaaaagcctccggcgtaatcgactgcggcccgtcacaccaggcatgggcgggatcattgtgtacttcaatgatcaatccgtccgcgcctgcggcggctgatgccattgacagcgggtatacaagagccgcgtcgcccgccgcgtggctggggtcaatgatgacgggcagatgggtcagccgctttaacatcggcacggctgaaatatcaagcgtattacgagtggctgtttcaaaggtgcggatgccgcgctcgcatagaatgatctttccgtttccacctgacatgatgtactccgcgctcattaaaagttcttccagggtattggcaagaccgcgtttcaacaggattggcttatcctgcctgccaagttctttcaacagttcaaagttctgcatattgcgcgcgccgacttga

SEQ ID NO: 16768 - protein, 139 aa, Unknown
  Obtained from environmental sample
  misc_feature (1)..(139): Xaa is any amino acid
MAKASGVIDCGPSHQAWAGSLCTSMINPSAPAAADAIDSGYTRAASPAAWLGSMMTGRWVSRFNIGTAEISSVLRVAVSKVRMPRSHRMIFPFPPDMMYSALIKSSSRVLARPRFNRIGLSCLPSSFNSSKFCILRAPT

SEQ ID NO: 16769 - DNA, 792 bp, Unknown
  Obtained from environmental sample
  misc_feature (1)..(792): n is a, c, g, or t
gtgcaacgcttgccttgcaagcacaagcgatgtttcttttgcacagacgaagccgcttatggagcagctagaacaacaaaggccgtagcggtttttgtaccggagaatttcgcgggttgggtaggggaggcaaaggttttggcaagggtaaaaaatccttatgaggctataataaagtgtgcggaaattttaaataaaaaagaattcacctctagcgaaattcactcttcggcacagataagcccgaatgttttaattccacctggcgtgaaaatcggtgaaaattgcgttctgcattcaggcgtaaatctctacccgaatgttgaaattggcagcggaacaattttgcactcaggcgttgtgattggctctcgcggctttggtttttacgaatgcaatggagagcaagtagcggttccgcattttggtggcgtggtgataggagataattgcgaaattggtccaaattccgttgtggctgctggttttttggaaccaactaggcttggaaatttttgcaaactggatagctttgtgcaaattgggcataactgcatagttgggagcaatgcgattttctgctcgcagtctgggcttgcaggctcggttattgtggaagacgatgtgactttggcaggcggcgcgcaggtcgcgggacatttaaccctcggcaaaggctgtattatagcggcaaaggcaggggttacaaagagcattaagccaggtgcaaaagtagctggttttcctgccattcctattgaggagtggaggcggcgtaatattcttgcttaa

SEQ ID NO: 16770 - protein, 263 aa, Unknown
  Obtained from environmental sample
  DOMAIN (144)...(161): Bacterial transferase hexapeptide (three repeats)
  misc_feature (1)..(263): Xaa is any amino acid
MQRLPCKHKRCFFCTDEAAYGAARTTKAVAVFVPENFAGWVGEAKVLARVKNPYEAIIKCAEILNKKEFTSSEIHSSAQISPNVLIPPGVKIGENCVLHSGVNLYPNVEIGSGTILHSGVVIGSRGFGFYECNGEQVAVPHFGGVVIGDNCEIGPNSVVAAGFLEPTRLGNFCKLDSFVQIGHNCIVGSNAIFCSQSGLAGSVIVEDDVTLAGGAQVAGHLTLGKGCIIAAKAGVTKSIKPGAKVAGFPAIPIEEWRRRNILA

SEQ ID NO: 16771 - DNA, 477 bp, Unknown
  Obtained from environmental sample
  misc_feature (1)..(477): n is a, c, g, or t
atgcatattaacattagaagagcttgctctacagattacgaccaaataaacaatttgttctggcaaagcgatctttaccattataaaaatgaaccgtatatttatgaaaaatcaaatgaacactcccgaagcaaggaatacatagaatcattaattaatgataaaacaaatatatttatcgtattggaagttgaaaatgaaataataggttttttatatgcttatgaagagacaaaaggaagactcccatttcacaaaaaaagaaaatacattgttattgataatatagtagtcgatgagaaatatcaaaataaagggtacggaaaaaaattattggattatataataaaatatgcaaaagatgaaaaatacaatgatttagaattatatgtatattgttttaataaaaatgcgataaaattatatgaagaatacggatttgaaaatttaacgcaaaacatgattctaaaattatag

SEQ ID NO: 16772 - protein, 158 aa, Unknown
  Obtained from environmental sample
  DOMAIN (60)...(148): Acetyltransferase (GNAT) family
  misc_feature (1)..(158): Xaa is any amino acid
MHINIRRACSTDYDQINNLFWQSDLYHYKNEPYIYEKSNEHSRSKEYIESLINDKTNIFIVLEVENEIIGFLYAYEETKGRLPFHKKRKYIVIDNIVVDEKYQNKGYGKKLLDYIIKYAKDEKYNDLELYVYCFNKNAIKLYEEYGFENLTQNMILKL

SEQ ID NO: 16773 - DNA, 657 bp, Unknown
  Obtained from environmental sample
  misc_feature (1)..(657): n is a, c, g, or t
gtggttgccaacggcaatctggcggccaaggttgtgcttgttgtcctgctcagtttttcggttttcagttgggtgataattttacaaaaggcattgctctaccgtcgaagctcgaggacatcccacaaattcagggcggctttccgcaaagctggcgactggcgcgaattcaagcaacaggggcagagatattcggcgagtccgctgctgggcctatttttggccggctactcggaagtgacgtaccaattgcggaactcttcgcaaggaggaaagtcctacataagaaatatggaggcggtggagaggtctctccaaagggcgtcagtggttgagatggggaggctggaaaaatctcttggccttttggctacagtcgccgccactagcccattcattggtctctttggcaccgtatggggcatcatcgaggcatttcagcgcatcggggcaactggcaacgcaaacctaatgacggtggccgttcccattgccgaggcactggttgcgacggctctgggactcatcgccgctgtgccatcccttatggcgtacaactattttctaagccaattgaagcgatggcagatggaactcgatgattattccctagaattcatcagcctcagcgagcggaatttccttgagcccaagtga

SEQ ID NO: 16774 - protein, 218 aa, Unknown
  Obtained from environmental sample
  SIGNAL (1)...(23)
  DOMAIN (66)...(204): MotA/TolQ/ExbB proton channel family
  misc_feature (1)..(218): Xaa is any amino acid
MVANGNLAAKVVLVVLLSFSVFSWVIILQKALLYRRSSRTSHKFRAAFRKAGDWREFKQQGQRYSASPLLGLFLAGYSEVTYQLRNSSQGGKSYIRNMEAVERSLQRASVVEMGRLEKSLGLLATVAATSPFIGLFGTVWGIIEAFQRIGATGNANLMTVAVPIAEALVATALGLIAAVPSLMAYNYFLSQLKRWQMELDDYSLEFISLSERNFLEPK

SEQ ID NO: 16775 - DNA, 300 bp, Unknown
  Obtained from environmental sample
  misc_feature (1)..(300): n is a, c, g, or t
atgagcgcgacggggccggtgatggcaaaactcaaagccatgaacgaggagcaggtcaccgcctatcttgaacggacaatccgtgacgtgcagaattaccatcgtatccttacctcgcttgatgattatttcaaaacaaacatatcccagagtgaacgcgcgcggataaaggggataaagcccgaattggcatccatcaaaaactgcattgtcagggcgaaccagctgagggccgaatataccgcggcaaaagaagaagaggaacagatgaaacgcctgggcatcacccccggcgcctga

SEQ ID NO: 16776 - protein, 99 aa, Unknown
  Obtained from environmental sample
  misc_feature (1)..(99): Xaa is any amino acid
MSATGPVMAKLKAMNEEQVTAYLERTIRDVQNYHRILTSLDDYFKTNISQSERARIKGIKPELASIKNCIVRANQLRAEYTAAKEEEEQMKRLGITPGA

SEQ ID NO: 16777 - DNA, 855 bp, Unknown
  Obtained from environmental sample
  misc_feature (1)..(855): n is a, c, g, or t
ttgggctatgatccctccgtattgggttacccctggttttttgtgaacaattattatccaatttattatccgtttctcatgtttccgcttattatccgtggtatcggtacggctgatcaaatcctgggaaagatcattcttgactcaaccatgattttggttaccggtatttttaccggcgttatggtctattttgttctgtcgtggagcagaaccgccataagcaggaaacaaaatattcacggtaccgcccgctggggtacggttaaagatattaaggcaatcggcctgtttgaagacgagggcgtggtaatcggccagcaggagaacgcgaaggttgactatgcgatgatcgacggttcagtaaaactgtcgctgcgcaggccgtcaagaattttgcgccattccgggcagacttcgacgattatgtttgcccctacccgcagtggaaagggggtcagttccgttattcccacctgtattgattatccccacagcctgataacgattgatcccaaaggtgaaaactttaacatgaccgccggctggcgcagaaaattttctcatgtactgcgcttgtcgccggtcagtaaagataccctgcaattcaacatacttgatgagttagatgaagaaaacgcctaccgtgacgcttcaatgatagccgacatactgaccagccccgcggacggcaaagctgacggcagttccaaacactggaccgatacggccaaagacctgataaccggcgccattctccatgttaaattttcagattacccggataaatccctgtacggcgtattggcgtttttatcacaggcccggcggcaatgccgatacntatgccgatga

SEQ ID NO: 16778 - protein, 284 aa, Unknown
  Obtained from environmental sample
  misc_feature (1)..(284): Xaa is any amino acid
MGYDPSVLGYPWFFVNNYYPIYYPFLMFPLIIRGIGTADQILGKIILDSTMILVTGIFTGVMVYFVLSWSRTAISRKQNIHGTARWGTVKDIKAIGLFEDEGVVIGQQENAKVDYAMIDGSVKLSLRRPSRILRHSGQTSTIMFAPTRSGKGVSSVIPTCIDYPHSLITIDPKGENFNMTAGWRRKFSHVLRLSPVSKDTLQFNILDELDEENAYRDASMIADILTSPADGKADGSSKHWTDTAKDLITGAILHVKFSDYPDKSLYGVLAFLSQARRQCRYXCR

SEQ ID NO: 16779 - DNA, 831 bp, Unknown
  Obtained from environmental sample
  misc_feature (1)..(831): n is a, c, g, or t
atggcagacccagtacagcgcgcggattcgggagatggacgctcaatggaagacctgcgccgccgcaaccgggaaatgaccggtgaaaacgatgagcgcatcgctctgttgcgccagagcctggaggatatccgcaaagaactcagcgtccagacaaaaatctttaaccgaaccggagagcttcagcaggaactggaacgccacatggaagaaatcaacggcgatcttgaccgcctggctcagcgcaaaaatgagatcgcccaggtggaaagccagtttacctatatcaagcggcttggggatgaggtgaacgccaaaatggttcgcttcctttcggaaaaagaccgcattaaattgatggagaatgattttaaccgcctgcttcaaacctcccaggcagtggaagaaaaactcacccaggtctcgacttccgatgacacccttcaggccgtgcaggtgcaaatccgcaagctggaagacgctatcagggaaaccgaagaaaagtaccagcgcgttgagcgcaaaggccagatactggaagaaaccaatgccagcattgaccgcaactttaagacattgcaggaaatcgaagccgcgcttaagaacgcggatgctaccatttccctgcttgtacagcaatgcgaaaccttgcgggattccattgagactctggcggcggaaaacgaaaaagcgcgggacacttcggaaaaactcattaccctggatgattcgcttaaccttatcgaaaaacgcatcgcggaaatgaacgtagcgcgggaatggctcgcccggtggaaacagagtacctcggccgatctgatccttggttga

SEQ ID NO: 16780 - protein, 276 aa, Unknown
  Obtained from environmental sample
  misc_feature (1)..(276): Xaa is any amino acid
MADPVQRADSGDGRSMEDLRRRNREMTGENDERIALLRQSLEDIRKELSVQTKIFNRTGELQQELERHMEEINGDLDRLAQRKNEIAQVESQFTYIKRLGDEVNAKMVRFLSEKDRIKLMENDFNRLLQTSQAVEEKLTQVSTSDDTLQAVQVQIRKLEDAIRETEEKYQRVERKGQILEETNASIDRNFKTLQEIEAALKNADATISLLVQQCETLRDSIETLAAENEKARDTSEKLITLDDSLNLIEKRIAEMNVAREWLARWKQSTSADLILG

SEQ ID NO: 16781 - DNA, 771 bp, Unknown
  Obtained from environmental sample
  misc_feature (1)..(771): n is a, c, g, or t
ttgcgcaacgcttttactggtggggtaagcacgtttagctgtgttgtgtactttatccgtaaagcgcacagtatggagattttatgggggacggcctcccccattcaagtgcgcgataagttgctgggtatcgccacaaagttacgtgccagaggcgcatacaaaattcaagttgacaatccgcagaagttcctgacaaaactcattgggaacaatattaatataatggagcagcaggagcttttagacgagtatttcgtaaacgagtttcagggcaaaataaaatcgagcattacccgcgctctcaacgaaacacagacagaacttcttggaattgaggcgcgtcttgaggaattcgcagaaatggtggagccgtttttgggcgaggcactaggtgattacggtttgaagataataaaattctcaattgcctcactcgacatagacggggatgaactgcgccgccgttatgacgaaatcgggatggatgccatcgctaaaatgcgcaatgcggcggccgataagggtgttatggacgtcctcggcgaatcgtggggcaagcagcaggcggcgaacatacttggcacacttgccgcaaatccgggttcgggcggattagcctctgccggggctggggttgggatgggaatggcggctgggagtgtttttggaggcatggcgcagcanatgtttgcgcctgtgcagcaacaagtaacgtcccaaattacgagcgccgcagtgaacgatccggtcgcgtctctaaaaaactaa

SEQ ID NO: 16782 - protein, 256 aa, Unknown
  Obtained from environmental sample
  misc_feature (1)..(256): Xaa is any amino acid
MRNAFTGGVSTFSCVVYFIRKAHSMEILWGTASPIQVRDKLLGIATKLRARGAYKIQVDNPQKFLTKLIGNNINIMEQQELLDEYFVNEFQGKIKSSITRALNETQTELLGIEARLEEFAEMVEPFLGEALGDYGLKIIKFSIASLDIDGDELRRRYDEIGMDAIAKMRNAAADKGVMDVLGESWGKQQAANILGTLAANPGSGGLASAGAGVGMGMAAGSVFGGMAQXMFAPVQQQVTSQITSAAVNDPVASLKN

SEQ ID NO: 16783 - DNA, 600 bp, Unknown
  Obtained from environmental sample
  misc_feature (1)..(600): n is a, c, g, or t
atgtatttactgcatggaattggcggaacccataccgagtggctgggcggcaatccaaatgaagtactgagtaaccttatcaacgccgacaaagccaaacctatgattgtggttataccaaatgtgagggcgatgaatccggatattgttccatccgatattttcagcataacaagtattaatgcttttaacaattttatcaatgacttaaagaacgatcttatgccatttataaacgagaattaccctgtttcaaatgaacgtaataaacgcgctattgccggattgtcaatgggtggcatggagtctcttcacataggccttcgtatgccggaaacattcggctatattggcgctttttcttccgctcccggcctgccgcttacggcaacgcaaatgaatcttccggatgaatacaaaaacaacacatttataatggtctgctgcggtttagaggattcgctgctctctttttctcaaacttacaatcaattgcttgtggataacggagtacaaaccacatattatacaattcatggcggccatgattttacagtctggaaaaacggcttgtaccattttgcgaagagcattttctga

SEQ ID NO: 16784 - protein, 199 aa, Unknown
  Obtained from environmental sample
  DOMAIN (2)...(198): Putative esterase
  misc_feature (1)..(199): Xaa is any amino acid
MYLLHGIGGTHTEWLGGNPNEVLSNLINADKAKPMIVVIPNVRAMNPDIVPSDIFSITSINAFNNFINDLKNDLMPFINENYPVSNERNKRAIAGLSMGGMESLHIGLRMPETFGYIGAFSSAPGLPLTATQMNLPDEYKNNTFIMVCCGLEDSLLSFSQTYNQLLVDNGVQTTYYTIHGGHDFTVWKNGLYHFAKSIF

SEQ ID NO: 16785 - DNA, 891 bp, Unknown
  Obtained from environmental sample
  misc_feature (1)..(891): n is a, c, g, or t
gtgagaagtatatcaatttcggctcttttgaattcgggcgcgataggcgaacgctcggaatttatctgcaacggcacttacgaatggactaccccctcaggcagaaaagaacggctgcgctgcgccgacggggtcgcgcacggcagggtagggccgagggaaataataatgtactcctgcaatataggcgcgtttcacgccgccagtatgcagaacgaccagggcttctaccagtccatgctggatttcggttttggcaaaagaaccggcgcgtggaggccggaaatggaaatagccggtttccttgacaagccgggatcgaagacatggtcaagccgtaccaagcagtctatagcgttcgggcaggagatagccgtttccgccctgcagatgctgcaggccgccggcgtgatcgcgaacgacggattattggtcccgccaaaaatagtgtcccgcatcatttccgccgacggcaaaacagaaagtgcctgggacaacggcgacaaccaaagccgccaggtaataagccaggatgtcgcccggaggatgcgccggtacatggctgacacggcgagcctggagggcaccggctggcgcggcagcatcggcgatctcaatatcgctataaaaaccggcacagcccaataccgggatccgtccagcgcgaggggatcgacttactccgatactgattttatctcaagctgtatcgcccttctgcctgcggaaagcccttcgctcgtattgtatgtggctattattaaacccaggggggaaacttacggcggaagaatcgccgcgcccgccatanaggaagccgccgaagaaattgtcaattaccttggcatcccccggggcagaaccccctggtggtcacattccgcaacataa

SEQ ID NO: 16786 - protein, 296 aa, Unknown
  Obtained from environmental sample
  DOMAIN (1)...(275): Penicillin binding protein transpeptidase domain
  misc_feature (1)..(296): Xaa is any amino acid
MRSISISALLNSGAIGERSEFICNGTYEWTTPSGRKERLRCADGVAHGRVGPREIIMYSCNIGAFHAASMQNDQGFYQSMLDFGFGKRTGAWRPEMEIAGFLDKPGSKTWSSRTKQSIAFGQEIAVSALQMLQAAGVIANDGLLVPPKIVSRIISADGKTESAWDNGDNQSRQVISQDVARRMRRYMADTASLEGTGWRGSIGDLNIAIKTGTAQYRDPSSARGSTYSDTDFISSCIALLPAESPSLVLYVAIIKPRGETYGGRIAAPAIXEAAEEIVNYLGIPRGRTPWWSHSAT

SEQ ID NO: 16787 - DNA, 471 bp, Unknown
  Obtained from environmental sample
  misc_feature (1)..(471): n is a, c, g, or t
gtggattcaatacttacaagcggcagggcgcagttgtcaagcgatgttacgcgaaattcacaggcgcttatggatgcgttaaaattgggaatacttgtttccggcgtggaactgacggaaattaccgcgcccgccgaaactatccgttattttgaggaagtaagaaacgcgtccatttacaaggcgaccaattaccagcgggcgcaggaatacgcctctacccggatacttggggcagaagcggcggcgaacacgctcaaacaaaccgccatttccgaacaggcggaaagactgactaaagcccggggagaaatggcggaattctacgggctgtacgagcaatacgcgagaaacccgcaaatcataatgtccgggacattcaggcagagagtgggcgcggttcttaagagagcgggcaagtccgtggtgcttccgtcaggaacggaaacgccgactttcctgctgccgtaa

SEQ ID NO: 16788 - protein, 156 aa, Unknown
  Obtained from environmental sample
  misc_feature (1)..(156): Xaa is any amino acid
MDSILTSGRAQLSSDVTRNSQALMDALKLGILVSGVELTEITAPAETIRYFEEVRNASIYKATNYQRAQEYASTRILGAEAAANTLKQTAISEQAERLTKARGEMAEFYGLYEQYARNPQIIMSGTFRQRVGAVLKRAGKSVVLPSGTETPTFLLP

SEQ ID NO: 16789 - DNA, 879 bp, Unknown
  Obtained from environmental sample
  misc_feature (1)..(879): n is a, c, g, or t
atgaaatttaaccgcgcctgnataaagaaacacntgacattcggtttaccctatcaggccggcacatttgtaaacgtccttaaagactcaatctccgcgatagtgatagggttaatcataggcaccgcggccacaggcatggtcaatatggcgtcgacaatcgcgacatttccgattatgctcatggctatactgggtagactttttttcccggctttcgcccgcacaatcaacgataagtcggcacttgaaaaactgtttgccttatcaatacgcgtcattaacgccttcgtcgcgccgttggccatgttcatactcgttatggccgcgcctttcacactgcatcttttcggtgaaaaatgggtagaatccgaaactatggaactctggttcttactatggccggccaatctgtttttgccgacattaacggtatgtacgtgtcttctgaatgctttcggtctgtcaaaaaccgttctgaaatataatatcgcgtggatgctgataactctgggactcggcaccccacttgttttcgcgctcggcgccaaaggtttcggatacgcgaacattgccgttaatatcgcgacggtaacggtcgcttgggaaatacgtaaatatctaagctgcaaaatcttaaaagaagcgcttctaggctggcttccggcggtttctctcgtctggttcccgttggtatataaacactttttcgagatcggaaagccgcacctatttatatgcgcgattctttacttcgctttttccaccgccgtaacctttgttctttctaaaaaagatattcgtacgttcatggaaaattcaatcggaattcaacccgcaaactccgtatcaagcgcgggtaaggaggcagtggaataa

SEQ ID NO: 16790 - protein, 292 aa, Unknown
  Obtained from environmental sample
  misc_feature (1)..(292): Xaa is any amino acid
MKFNRAXIKKHXTFGLPYQAGTFVNVLKDSISAIVIGLIIGTAATGMVNMASTIATFPIMLMAILGRLFFPAFARTINDKSALEKLFALSIRVINAFVAPLAMFILVMAAPFTLHLFGEKWVESETMELWFLLWPANLFLPTLTVCTCLLNAFGLSKTVLKYNIAWMLITLGLGTPLVFALGAKGFGYANIAVNIATVTVAWEIRKYLSCKILKEALLGWLPAVSLVWFPLVYKHFFEIGKPHLFICAILYFAFSTAVTFVLSKKDIRTFMENSIGIQPANSVSSAGKEAVE

SEQ ID NO: 16791 - DNA, 846 bp, Unknown
  Obtained from environmental sample
  misc_feature (1)..(846): n is a, c, g, or t
ttgctcggtgagatgcagacattaatcctagtgaagaacgctaaatggtcgctgggttatcaaataattagcagtattgggcttgcgaaggaaagcgggctgttcaggttattgattaatgaacccagcgacaaatttagatttttaggattcctcttgccctttaaattcctcaaaaagtattctaaacttgaatgtaaaggagatttttctatgagcggcggcggaattaaggattcgtacaaccagtgggaagagactcaggtaaagaaaaccctttcgaaatttcctgaacaaaagcagaaatacgaatttgacaccggagtcgaggttaaaaggctttatacgccgcttgacctgccggattttgattacgaaaccagtctgggctatccggggcagtacccgtttacacgcggcgttcagcccaccatgtaccgaggcaagcattggacaatgcggatgtacgcgggctttgctaccgccgaggaatccaacaagcggtacaagtaccttatagagcagggttccatgggtctctcggtggcctttgaccttccgacccagatgggctacgactcaaccgactccatcgcgcanggcgaagttggcaaggttggcgtcgctattgattccctggcggatatggagatcctctttgacggcattccccttgataaagtttctacctcaatgacaataaacgcgccggctggcgttcttttggcaatgtacatagcggttgccgaaaagcagggcgtggcccccgacaaacttcgcggcactattcaaaacgatattctaaaaagagtacatagccaggggcaacttatatttcccccgtaa

SEQ ID NO: 16792 - protein, 281 aa, Unknown
  Obtained from environmental sample
  DOMAIN (103)...(281): Methylmalonyl-CoA mutase
  misc_feature (1)..(281): Xaa is any amino acid
MLGEMQTLILVKNAKWSLGYQIISSIGLAKESGLFRLLINEPSDKFRFLGFLLPFKFLKKYSKLECKGDFSMSGGGIKDSYNQWEETQVKKTLSKFPEQKQKYEFDTGVEVKRLYTPLDLPDFDYETSLGYPGQYPFTRGVQPTMYRGKHWTMRMYAGFATAEESNKRYKYLIEQGSMGLSVAFDLPTQMGYDSTDSIAXGEVGKVGVAIDSLADMEILFDGIPLDKVSTSMTINAPAGVLLAMYIAVAEKQGVAPDKLRGTIQNDILKRVHSQGQLIFPP

SEQ ID NO: 16793 - DNA, 552 bp, Unknown
  Obtained from environmental sample
  misc_feature (1)..(552): n is a, c, g, or t
atgaaagacgtttaccgttccctgtatttgaatgaaactccttttatagaaacaaaccttgaatcggcggaaatgattaagtacgcatccaacgctttccttgcggttaaaattacttttataaacgaaattgccaacctttgcgaaaaaacaggcgcggatgtgcaggatgtcgctcgggcgatgggtaaagacgggaggataggttccaagtttcttcatccgggtcccggatacggcggttcctgtttccccaaagacacaagcgccctgataaaaatcggcagggataataatgagattctgcatattgtagaaacaacaatagaaacaaatgaaaaacaaaaactgcgcgcggcgcanaaaatagaatccgtccttggaacgcttaaaaataaaactttatgccttcttggcctttcctttaaaccaaacaccgatgatatacgcaagtctccggctattacaatatgcgaataccttgtaagcaaaggggcctttttgcgcctctacgatcccgccgcgatgaaggaagcgaaaaaaaaagtttag

SEQ ID NO: 16794 - protein, 183 aa, Unknown
  Obtained from environmental sample
  DOMAIN (20)...(115): UDP-glucose/GDP-mannose dehydrogenase family, central domain
  misc_feature (1)..(183): Xaa is any amino acid
MKDVYRSLYLNETPFIETNLESAEMIKYASNAFLAVKITFINEIANLCEKTGADVQDVARAMGKDGRIGSKFLHPGPGYGGSCFPKDTSALIKIGRDNNEILHIVETTIETNEKQKLRAAXKIESVLGTLKNKTLCLLGLSFKPNTDDIRKSPAITICEYLVSKGAFLRLYDPAAMKEAKKKV

SEQ ID NO: 16795 - DNA, 582 bp, Unknown
  Obtained from environmental sample
  misc_feature (1)..(582): n is a, c, g, or t
atggaagtgggctcctttatcggtcttgccgctgtaacaggcggagacttgcacatagaaggcgctcatcctcaggatatgcgcccggcaaaaatcgcctttgggaaattgggcattgtttgggcgcatgagggaacggttatccatgtgccgaaaaatcagagtatggaagtaaaccacgacctcggcggtatgattccaaaaatagacgacgccccttggccaggcttcccgcccgatcttatcagcataataatcgttgttgccacgcagataaaaggcactgtattggttcacgaaaaaatgtatgaatcgcgaatgttctttgtggacaaacttatcggcatgggagcgagaatcgtgttatgcgatccgcaccgcgccgttatttcaggaccggcaaaacttcacggttcggaattgataagccctgacgtgcgcgcgggaatgtccatgctgattgccgctatgtgcgccgaaggcaagagcgttatacgcaatgtttaccagattgagcgcggttatgaacagcttgcggcaagactttccagccttggcgcgaatatcgtaaggaatgattga

SEQ ID NO: 16796 - protein, 193 aa, Unknown
  Obtained from environmental sample
  misc_feature (1)..(193): Xaa is any amino acid
MEVGSFIGLAAVTGGDLHIEGAHPQDMRPAKIAFGKLGIVWAHEGTVIHVPKNQSMEVNHDLGGMIPKIDDAPWPGFPPDLISIIIVVATQIKGTVLVHEKMYESRMFFVDKLIGMGARIVLCDPHRAVISGPAKLHGSELISPDVRAGMSMLIAAMCAEGKSVIRNVYQIERGYEQLAARLSSLGANIVRND

SEQ ID NO: 16797 - DNA, 429 bp, Unknown
  Obtained from environmental sample
  misc_feature (1)..(429): n is a, c, g, or t
atgatcagatcggccgagtgcggccgcaatgcggccgcatttgcgggagacaagggcgatgtcgccatattcgcgaccggagtaatggtaagcaaggcggcgcaggcggcggaaaaattaaaagccaaaggcgtaggcgcgcaggtgctgaacgtcagtacgctcaagccgcttctaaaagaagaagtgatcaagtatgccgaagggaaaaaggcaattatcactgcggaagaatcagttaagacgggcggcatgggcagcgcgattgcgtcgctgcttttgggcgaaataaacgcccccttccgacaaatcgccatcaatgaccagtttgggacttccgcccgttcttacgaagaactgttgaacagatacaggttgagcgcggacgatgtatacaatgcggcatgttccgcgttaggaattaattaa

SEQ ID NO: 16798 - protein, 142 aa, Unknown
  Obtained from environmental sample
  DOMAIN (10)...(131): Transketolase, C-terminal domain
  misc_feature (1)..(142): Xaa is any amino acid
MIRSAECGRNAAAFAGDKGDVAIFATGVMVSKAAQAAEKLKAKGVGAQVLNVSTLKPLLKEEVIKYAEGKKAIITAEESVKTGGMGSAIASLLLGEINAPFRQIAINDQFGTSARSYEELLNRYRLSADDVYNAACSALGIN

SEQ ID NO: 16799 - DNA, 369 bp, Unknown
  Obtained from environmental sample
  misc_feature (1)..(369): n is a, c, g, or t
ttgattattgacggtgctcacacgccggaaagcgccctgtcntgcgctgaaactttttgttcgctttacggcgaaaaaggcatactgctgtttggatgcgccgccgacaaaaacgccgccgccatggcggatattctgctgccccgtttttcacagattatcgtcaccacgccgggaaccttcaaagccagcgatcccgaaaaggccttcaacgcctttacttccgaaaaaacactgttaataaaagatacccatgcggcgatacagaaggcgctggaaacaagccgaaacaaaaacttacccattcttgttaccggttctttttaccttgcctcagaggttcggggttatgcgttatcgcggtcataa

SEQ ID NO: 16800 - protein, 122 aa, Unknown
  Obtained from environmental sample
  misc_feature (1)..(122): Xaa is any amino acid
MIIDGAHTPESALSCAETFCSLYGEKGILLFGCAADKNAAAMADILLPRFSQIIVTTPGTFKASDPEKAFNAFTSEKTLLIKDTHAAIQKALETSRNKNLPILVTGSFYLASEVRGYALSRS

SEQ ID NO: 16801 - DNA, 558 bp, Unknown
  Obtained from environmental sample
  misc_feature (1)..(558): n is a, c, g, or t
gtgtttaaattttgccctgcatgcgcgtcggaaaaaattgaatttgcggaaggtaaagtatttcgctgtcctgattgcggccttgtgtactatcacaacaccgcagctgccaccggctgtataatcagcataccggaaaaaaccgccgacaaggtcgccggcggtatcttatccgcagagcggatcatgtttttggttcggggcaaggagccgtcaaaaggaaaactggatttgcccggcggttttgtagatcccggcgaaggcatttttgagggcctgtaccgcgaattacgggaagagatcggctggacgccgcccattcccgacggtgcgtctcttgccgatgtttttactttatttgcgtcattctccaatgtatatccctacaaaaactttgcctacaatacctgcgatttatatttccgcatccgcgcaccgggtctgcgggaacaagacctgcgccttgaacaggctgaaattgccgccgtccgttttctcaagccggaaaacattgactacagcgaaattgctttgatcaacccgcctcgtgcaatctga

SEQ ID NO: 16802 - protein, 185 aa, Unknown
  Obtained from environmental sample
  DOMAIN (49)...(185): NUDIX domain
  misc_feature (1)..(185): Xaa is any amino acid
MFKFCPACASEKIEFAEGKVFRCPDCGLVYYHNTAAATGCIISIPEKTADKVAGGILSAERIMFLVRGKEPSKGKLDLPGGFVDPGEGIFEGLYRELREEIGWTPPIPDGASLADVFTLFASFSNVYPYKNFAYNTCDLYFRIRAPGLREQDLRLEQAEIAAVRFLKPENIDYSEIALINPPRAI

SEQ ID NO: 16803 - DNA, 852 bp, Unknown
  Obtained from environmental sample
  misc_feature (1)..(852): n is a, c, g, or t
atggccgagctcttagtgagagtgatccgcgttgattatgagccgataaagcgtgaaggaaaaaaaatcgatgacaattcccttatagagatgacaaataatcttttggacaataagttgtttcaggcaacgcttataggactccttgcggaactgtcccaaaaaataagctctctggaagaaacggttcagggtgtgtttgcgcttttgtgcaatgcctgccgctcggaaatatgttcaataatgataaaggatgatgatgacggcttattggtatataacgctaacaactcaggctacactcgggaaatagcggaagattttaaggctatcaccatcgctgattttaatacccgtttttccgactataaagtggtttccaaagagatcaaggattttttcccggcgggagaaaaaaacgaaagaatcgaatcctatattatgcttacccttgccaattcaggggatgattttgcgacggttcatatcggtacttctgtgaaagagtatttctctcccctggtacttgaaaacctgaatgtctttctttcttccgcggctccgataatcgcgaatgccttgcatgtacggcagatggatattatgcaaaagaaaaccagagctgcctttgcgcgctatgttcctgtagatgtcatggacgagataataaaaaaatccctggctcaatcaacccagggtgaaaccaggcttgtggcgattctgttttcagacatcagaagtttcaccacaatctcggagaatacccaggcccaggaattggtaagttttctcaattactatttttccaaaatgggtgatgaaattaccgccgagggagggcacatagactaa

SEQ ID NO: 16804 - protein, 283 aa, Unknown
  Obtained from environmental sample
  misc_feature (1)..(283): Xaa is any amino acid
MAELLVRVIRVDYEPIKREGKKIDDNSLIEMTNNLLDNKLFQATLIGLLAELSQKISSLEETVQGVFALLCNACRSEICSIMIKDDDDGLLVYNANNSGYTREIAEDFKAITIADFNTRFSDYKVVSKEIKDFFPAGEKNERIESYIMLTLANSGDDFATVHIGTSVKEYFSPLVLENLNVFLSSAAPIIANALHVRQMDIMQKKTRAAFARYVPVDVMDEIIKKSLAQSTQGETRLVAILFSDIRSFTTISENTQAQELVSFLNYYFSKMGDEITAEGGHID

SEQ ID NO: 16805 - DNA, 516 bp, Unknown
  Obtained from environmental sample
  misc_feature (1)..(516): n is a, c, g, or t
gtgcgacggcgcgctgccgatcttccgcggaaagagctggccgttataggcggcggcgacacagccgtagaggaggccgtccacctgacgcggttcgcctccaaggtctacctgatccaccgtaggaatgagctccgggccggcgcgataatgcgggaacgggcggcgtcgcacccgaaaatcgaaatcctgtggaacaaggtcgtcgacgagttcttgggcgaacagaggctgagcggattaaaactgcgcgataccgtcaccggggctatatccgaactgacggcggccggcgcgttcgaggccataggccacaaaccgaacgtaggtttccttaacggccaattaaagttagacgaacaaggctacatcgccgtaacgccaggcacgtcgaaaacatctgttgaaggcgtcttcgccgccggcgacgtatgcgacccccactaccgccaagctataacggcggcggctagcggatgcagggcggcgcttgatgtgcaacgatggttgcagtaa

SEQ ID NO: 16806 - protein, 171 aa, Unknown
  Obtained from environmental sample
  DOMAIN (12)...(149): Pyridine nucleotide-disulphide oxidoreductase
  misc_feature (1)..(171): Xaa is any amino acid
MRRRAADLPRKELAVIGGGDTAVEEAVHLTRFASKVYLIHRRNELRAGAIMRERAASHPKIEILWNKVVDEFLGEQRLSGLKLRDTVTGAISELTAAGAFEAIGHKPNVGFLNGQLKLDEQGYIAVTPGTSKTSVEGVFAAGDVCDPHYRQAITAAASGCRAALDVQRWLQ

SEQ ID NO: 16807 - DNA, 816 bp, Unknown
  Obtained from environmental sample
  misc_feature (1)..(816): n is a, c, g, or t
atgatggactccgcgaatattcaggcgcgtgacgcaatatatttaaagacacgggctcaaaagaaaggagaaaagtttgactggacgccgctttacacggaacatgacgcaattgcggcggttagccagacgattggtgtttcgtataacagacccatatttatcggaaatggagtaagtcttgaattttacgatgcggggcatattctcggctctgcgattgccgccataaaaataaaaaaaggcggcgaagaattaaatatcctcgcgacaggagaccttggtcgcaaaggtaagcccattatacgcaatccggcaattcccgaagttgcgccggattatatcattcttgaaagcacttacggcgatcgtcttcacgattccacagatgacgctgttaaaaaacttgctgacatagcaaaacgggctgtaaaaaacaaagggaaaatacttatcccttcatttgcgattgaacgtactcaggaacttgtttactattttcatctgctggttgatgacggagtaattcccgaagtaccgatctttgtagattcgccgatggcgactaatgcaactacgatttttcaggtacacccggaatgttacggcgaagaaataaaggaagcctttatcaaacaccataaaaatccgtttggctttaacagccttcattttacgaccagcgtacaggaatcaaaggctttaaatgatcatgaaggtccgcttatcattatttcggcggacgaaatgtgcgaagccgggcgtattcacatcatcttattcacaatatacaggatcccaacacaactatcatga

SEQ ID NO: 16808 - protein, 271 aa, Unknown
  Obtained from environmental sample
  misc_feature (1)..(271): Xaa is any amino acid
MMDSANIQARDAIYLKTRAQKKGEKFDWTPLYTEHDAIAAVSQTIGVSYNRPIFIGNGVSLEFYDAGHILGSAIAAIKIKKGGEELNILATGDLGRKGKPIIRNPAIPEVAPDYIILESTYGDRLHDSTDDAVKKLADIAKRAVKNKGKILIPSFAIERTQELVYYFHLLVDDGVIPEVPIFVDSPMATNATTIFQVHPECYGEEIKEAFIKHHKNPFGFNSLHFTTSVQESKALNDHEGPLIIISADEMCEAGRIHIILFTIYRIPTQLS

SEQ ID NO: 16809 - DNA, 405 bp, Unknown
  Obtained from environmental sample
  misc_feature (1)..(405): n is a, c, g, or t
atgctcagtctatcaaaagacttggaaaccggcgttgaaaaaattgattcagaacacaaggagcttatcaaaaggattaacaaacttgtagaagtaggaggaagctccgcttcacatgaagaagtcgaaaaaaccattgattatcttggcgattatgtagttaagcatttcagcgatgaagaggaactccaaaccaaaagcaaatatccaggatatcctgaacacaaaaagctgcacaccctttttattgatgattttgctaaattaaaagcggaatttgagaaaaatggaaattccatggaatttacaatgaagcttaataatacgttggtaacatggattgtaaagcacataaaaggcgaagacgtggaattcggcaaatattataaagcgcagggcatgtaa

SEQ ID NO: 16810 - protein, 134 aa, Unknown
  Obtained from environmental sample
  DOMAIN (71)...(128): Hemerythrin HHE cation binding domain
  misc_feature (1)..(134): Xaa is any amino acid
MLSLSKDLETGVEKIDSEHKELIKRINKLVEVGGSSASHEEVEKTIDYLGDYVVKHFSDEEELQTKSKYPGYPEHKKLHTLFIDDFAKLKAEFEKNGNSMEFTMKLNNTLVTWIVKHIKGEDVEFGKYYKAQGM

SEQ ID NO: 16811 - DNA, 825 bp, Unknown
  Obtained from environmental sample
  misc_feature (1)..(825): n is a, c, g, or t
gtgcgtgataaaattgttatctgcacaaaatcagcgccgcttgcgccggataaagtgatggcaaatatcgaaaacagtttacggatgctgcggactgactatattgacgtgctgcagtttcacaatccgccttttgtgccccgccccggcggtacagacggcctgtacgatcttgcgctgaaagcgaaggcgcagggaaaaatccgccacataggcattacgcagcacagcaaggatcgcgcccgagaagcggcgctgtccggtctgtacgataccttgcagtatccgctgtcctatctgtccacagatgaagaattggcgctgattgatctgtgccgcgaacacaatatgggcctgcttgccatgaagggtttatgcgggggcatcctgaccaacgcgcgggcggcgtttgcgtttctgcggcggcatgataatgtgattcccatttggggaatgcagagaatgtccgaactacaggaatttctgtcttacgaagaaaatccgcccctgctcgacaacaaacttcaagcgatcatcgaagccgacagaaaagagttatccggcaatttttgccggagctgcggctattgcctgccctgcccggcggatattcaaataccgactgtggcgcgcatcacatttttaatgagaagaaccgttaacgcaggttttatgaccgagggctttcaacaagaaatgaaaaaaatcgacaactgtaccggctgcggtcattgtaaagaaaattgtccgtatgagttggatactcccacgctcttaaaaagacaacaagcagaatattttgaaatgataaaaacactcaaataa

SEQ ID NO: 16812 - protein, 274 aa, Unknown
  Obtained from environmental sample
  misc_feature (1)..(274): Xaa is any amino acid
MRDKIVICTKSAPLAPDKVMANIENSLRMLRTDYIDVLQFHNPPFVPRPGGTDGLYDLALKAKAQGKIRHIGITQHSKDRAREAALSGLYDTLQYPLSYLSTDEELALIDLCREHNMGLLAMKGLCGGILTNARAAFAFLRRHDNVIPIWGMQRMSELQEFLSYEENPPLLDNKLQAIIEADRKELSGNFCRSCGYCLPCPADIQIPTVARITFLMRRTVNAGFMTEGFQQEMKKIDNCTGCGHCKENCPYELDTPTLLKRQQAEYFEMIKTLK

SEQ ID NO: 16813 - DNA, 684 bp, Unknown
  Obtained from environmental sample
  misc_feature (1)..(684): n is a, c, g, or t
ttggcagaacttttggaaatacaagaggaaattttggaaatggattatgaaatagaagctatgaaactggagcttgcatctttgaatatagcttttaactcggtgcttaatataccgcatacaagcgaaattttgctcgcagattcaataattttgcaaacatttgattttgaaaaaaaatccgagccacctatgatttctatgattggcacagaaagcgaaatttttaaggcacagcgagatatgaacaagataatgggttatccgatgtttggcttaggcattcaatataaaaaggaaatggaaaaaggaatgtttatggcaatggcaagcctaacactcccaatatggcgcgcaaaaacaaatgccgccttgctggaaaacgaattgcaggtagaggcatcccaaaaaatgcttatggatgcgagaaacaatttagaagtggaacgcttgatggcaaagagcaatttgcagaatttaaacaaaaaaatagtgctttacaagcagcaaaaggaacttgcggagagcagtcagaaaatagctttgcaaaattttagcgcaggcaggggaatgctatcggatattttgcaaataaataaaaaattactatattatacaataatggaattggaaacggctacggaatataataaaacagtagctcaaacggagattttgttttga

SEQ ID NO: 16814 - protein, 227 aa, Unknown
  Obtained from environmental sample
  misc_feature (1)..(227): Xaa is any amino acid
MAELLEIQEEILEMDYEIEAMKLELASLNIAFNSVLNIPHTSEILLADSIILQTFDFEKKSEPPMISMIGTESEIFKAQRDMNKIMGYPMFGLGIQYKKEMEKGMFMAMASLTLPIWRAKTNAALLENELQVEASQKMLMDARNNLEVERLMAKSNLQNLNKKIVLYKQQKELAESSQKIALQNFSAGRGMLSDILQINKKLLYYTIMELETATEYNKTVAQTEILF

SEQ ID NO: 16815 - DNA, 915 bp, Unknown
  Obtained from environmental sample
  misc_feature (1)..(915): n is a, c, g, or t
gtgtattacaacacaacatcaaccggctacaacgtagttgacgttccattgggaacagatgattcacatttaagcggctggacagcggtaaccggagacaaacaaatttccaccttacccgtatcaggaaaaacattagaactctttccgggaggcggagcggcaaatgttataaccactttgcctgcaaattatccaaaaactgacttctacggcaacgctataaacaacggagccgccgcaggagcggtacaatccaatgcaagcggcagtggaatttatgtagaggtgtcggtgaatgacagccagagaggaagcgtcagcggattgccaacatccagtaataacgatggtcttgttttaagtcctgttacgcttacggcaaatccggcaagcgggtgctatttggcgtactggctggtaaacgggcaaaagagtacagttacatcaacgcaattaacgctgacaactcattcaagagtacaggctgtatttagaaaagaattcaccgtcagtaattttacggacacacagggcagcgactcgacacagggaactttgcgttatgctataaacaacgcgcaggacggggacaagatcgtcataaacggaacagcggggcagacaagcatcgcgctgagaagcagtcttgaaataagcaagaacattaccatagaagggaacggcgtaaccataacgcgggcaagctcgtcgacttcttataggttcttgtatatttatagtacggtaaccatcagccgagtctggttcaaagacggcaggataacagatagaggagcagctatatataactacggaaacgtaacgctggaatcctgcatattcagcgggaatcaaagtgatgacggcggcacaatattaaattctagcggaaccatgnctcggccgatctga

SEQ ID NO: 16816 - protein, 304 aa, Unknown
  Obtained from environmental sample
  misc_feature (1)..(304): Xaa is any amino acid
MYYNTTSTGYNVVDVPLGTDDSHLSGWTAVTGDKQISTLPVSGKTLELFPGGGAANVITTLPANYPKTDFYGNAINNGAAAGAVQSNASGSGIYVEVSVNDSQRGSVSGLPTSSNNDGLVLSPVTLTANPASGCYLAYWLVNGQKSTVTSTQLTLTTHSRVQAVFRKEFTVSNFTDTQGSDSTQGTLRYAINNAQDGDKIVINGTAGQTSIALRSSLEISKNITIEGNGVTITRASSSTSYRFLYIYSTVTISRVWFKDGRITDRGAAIYNYGNVTLESCIFSGNQSDDGGTILNSSGTMXRPI

SEQ ID NO: 16817 - DNA, 585 bp, Unknown
  Obtained from environmental sample
  misc_feature (1)..(585): n is a, c, g, or t
ttgcggaaggtcggaatagcgtttgcccatgaagaattcgccaaagtttactggtttaggcagcttttagtccctcaggactggactgcccctgtttttctgcccggccagcttgttcccgacgatactaaggactccggtatccttttttatgtatatgaagtgcccgaagacgtttttcagcttgaatacaggcttgttataaacggtctttggtcgattgatccgcttaatccggcgtccaaaaaagacccggtttccggccttcttttttcaaccgtgaccctcccgcccaggactcttaagccaaatcccctaagaggaatgcccgacggcttgacttttatgtttagcgcgcctcccggcgaaaatatcacggttgcgggcgattttaacggatgggacccttttatgtacgaactgaaggaataccctgccggcgtttacagccttactctcgctctgccgccgggtactcatcaatatgtatttttttacaaaggccgccgttatgttgaccctcacaacccaaaccgaatctacgcgaaggacggcagcgccgcctcaataatcaccgtcccgtaa

SEQ ID NO: 16818 - protein, 194 aa, Unknown
  Obtained from environmental sample
  misc_feature (1)..(194): Xaa is any amino acid
MRKVGIAFAHEEFAKVYWFRQLLVPQDWTAPVFLPGQLVPDDTKDSGILFYVYEVPEDVFQLEYRLVINGLWSIDPLNPASKKDPVSGLLFSTVTLPPRTLKPNPLRGMPDGLTFMFSAPPGENITVAGDFNGWDPFMYELKEYPAGVYSLTLALPPGTHQYVFFYKGRRYVDPHNPNRIYAKDGSAASIITVP

SEQ ID NO: 16819 - DNA, 927 bp, Unknown
  Obtained from environmental sample
  misc_feature (1)..(927): n is a, c, g, or t
ttgatcgcgagctttaagtggggaggggaattttatccgcgcaaggtgtgttccacagtgagccagcaccacatttacggatttcttttttcgatactgctgcccttcacctcgggaataccgttcaggagggaaatgatacatgtttcggaggaattggaaaaatttaccgatacggaatactccatcattaccgttccggcgtttcttaaacgggcggttgaagttgaaactccggtaagcctccgtttaaaatcgccgtgcatcctcgcttcaggcggcttcctttttccggacatagcgcaaaaaacctttgaggtttttggagtttggccgcttgaaatgtacggcagtaccgaaacttcaggcgtcgcgtggagacagcaaagcgcaggtcctatgtggacgccctttggcaacgccaaactatgggtaaatgaagacagctgcctggtagtacaatctgattacattaaagatccgtccggcatttttgaaacttcggacattgtgaagatgcttcccgacggacggtttatattgatgggacgccttgactcggtggttaaaatcgaaggtaaaagaatttcactcccggaagttgaaaaccgcattacagagtcaggtcttgtttcggatgtatgcgtaatcgccctggaagatgtccgccagtaccttgcagcagcgctggtctttaacccgcaggggaaagaaaagttcgcggggctggaaaaaaatgagatcaataaattctggcgggagtacctgttaaaatattttgaaaataccgttatccccaaaagatggcgttaccttgaatcgcttcccgttgacgctcaggggaaaaagaagaaagaggatatcgaaatgctttttgcggaagnatccggaactagctcgccctttgtgggagtaatacttncatag

SEQ ID NO: 16820 - protein, 308 aa, Unknown
  Obtained from environmental sample
  misc_feature (1)..(308): Xaa is any amino acid
MIASFKWGGEFYPRKVCSTVSQHHIYGFLFSILLPFTSGIPFRREMIHVSEELEKFTDTEYSIITVPAFLKRAVEVETPVSLRLKSPCILASGGFLFPDIAQKTFEVFGVWPLEMYGSTETSGVAWRQQSAGPMWTPFGNAKLWVNEDSCLVVQSDYIKDPSGIFETSDIVKMLPDGRFILMGRLDSVVKIEGKRISLPEVENRITESGLVSDVCVIALEDVRQYLAAALVFNPQGKEKFAGLEKNEINKFWREYLLKYFENTVIPKRWRYLESLPVDAQGKKKKEDIEMLFAEXSGTSSPFVGVILX

SEQ ID NO: 16821 - DNA, 642 bp, Unknown
  Obtained from environmental sample
  misc_feature (1)..(642): n is a, c, g, or t
atgcttatgtttcacggcattttagacgatgcgggggtagttcctctacgtacggttaacttgtacaccatgcttgccaaatacaattctccaaaggataaaatagcatatatggaaaaaaagaaggaaattataaggataaaaaaggggttatatgttagttcgcctgcaattcacaagcagctattatcaagagaattgatagcaaatcatctgtatggaccgtcttatgtatctttagaaacggctctgtctttttatgggattatacctgagaggactgaaactatgcgttctgtaacttttaaaaggagcaaaaaattcaaaacctcgcttggcttgtttgaatatcaaagcattccgagtaaaatttactcaataggctttaggcaggaatttgccaaggacaattacgcttatttgattgcaactccagaaaaggctctttgcgatttattgttagctaccgccaatttaaaattttcttcaaaaaaatctatgctgaattttctggaacaggatttgcgtgttgatttatccgctgtaaaatgggatataggtattgttcaggaatgtatagatgcaggcaaaaaaagcagggatttgctttatttgaaagaggtgttaaatgaatgtgtttga

SEQ ID NO: 16822 - protein, 213 aa, Unknown
  Obtained from environmental sample
  misc_feature (1)..(213): Xaa is any amino acid
MLMFHGILDDAGVVPLRTVNLYTMLAKYNSPKDKIAYMEKKKEIIRIKKGLYVSSPAIHKQLLSRELIANHLYGPSYVSLETALSFYGIIPERTETMRSVTFKRSKKFKTSLGLFEYQSIPSKIYSIGFRQEFAKDNYAYLIATPEKALCDLLLATANLKFSSKKSMLNFLEQDLRVDLSAVKWDIGIVQECIDAGKKSRDLLYLKEVLNECV

SEQ ID NO: 16823 - DNA, 900 bp, Unknown
  Obtained from environmental sample
  misc_feature (1)..(900): n is a, c, g, or t
atggcgaatgaaggcaaaagcggtttgtgggcgttggggcgtgtaatggatctttccataagcgatgtggaggcatttgcaaaaaaaattccttntaagttgccagacttagatgatttcactttggaagatgttagaaaacaagatgatgatntgagcgctttaatagaacgctcggaactctataaggatttttggaatttatctgttaagttggaagattttataagccagtccggtacgcacgctgccgcacttataatagcaccttgcaatatgacggagctggttcctatttaccgccttaaacttggtgacgaccccgctgtgcaatatgataaacattataccgaagatataggtttattgaaaatggatattttggggcttagaaatttgtctataattcaagaagcggttaataccattgaagagacaaaaaaacaaaaattggatataagccaaattccgttaaacgatgccaaaacatttgatttgttcgggcagggaaatacggttggagtgtttcagtttgaatcttttggaatgcgcagatatttgcaggaattgaaaccgagctgccttgaagacttaatcgctatgaatgctctttaccgcccaggcccaatggaaaatattcctagatatataaaagggaaaaacgacccttcaacaataaactgctatcacgaaagtttgaaacccattttaatggagacttacggagttattgtttttcaagaacaggttatgcaaatagctcaggtattatcagggttttcgctgggcaaggcagatattctccgcagggcaatgggaaaaaagaacgaaaaggaaatggcaaaaatgcaacctgaatttttgaaaacggaaaagagagaaatatntctccgaatctga

SEQ ID NO: 16824 - protein, 299 aa, Unknown
  Obtained from environmental sample
  DOMAIN (1)...(295): Bacterial DNA polymerase III alpha subunit
  misc_feature (1)..(299): Xaa is any amino acid
MANEGKSGLWALGRVMDLSISDVEAFAKKIPXKLPDLDDFTLEDVRKQDDDXSALIERSELYKDFWNLSVKLEDFISQSGTHAAALIIAPCNMTELVPIYRLKLGDDPAVQYDKHYTEDIGLLKMDILGLRNLSIIQEAVNTIEETKKQKLDISQIPLNDAKTFDLFGQGNTVGVFQFESFGMRRYLQELKPSCLEDLIAMNALYRPGPMENIPRYIKGKNDPSTINCYHESLKPILMETYGVIVFQEQVMQIAQVLSGFSLGKADILRRAMGKKNEKEMAKMQPEFLKTEKREIXLRI

SEQ ID NO: 16825 - DNA, 834 bp, Unknown
  Obtained from environmental sample
  misc_feature (1)..(834): n is a, c, g, or t
atgagcggaaaagtggaagcggtctatgttgattataacgacaatgttaaaaaagggcaggttcttgcccagcttaataccgatatgctccgtcttcaaagggatcaacagcaggccgccgttcaaaaagcgcgcgccaattacgaattacagttgatcaattaccgtaatcaggaagccttggcgcaaagggaactgatttccgaatatgagttgaaaacttcaaagacttcctttgataatcaaagggccgatcttgcggtagccgaagcgaatttaagggttattgagacggagataaatcaatacgcgtttattacgtcccccattgacggcatcgtgcttgacaaaaatattaacgtgggcgatacggtagtcgattcggcgaataacaattcaggcagtatttttacgattgccgaaaatctgcgcgagatgcagatagaggcgatgataggggagcttgacatagcctcaatattcaagggacaggaagtgcgctttacgcttgagagtcttcctaaccgcaggtttaccggcgttgtggaaacgttgaggatggttcccgtcgtgtcgaatagcgtggtttcgtataccgttattatcaacgtggaaaaccgtggcggctcccttctgccggggatgacatgcgccgtggactttatcgtggaacggagcgagaacgcgcttattgttcccaatgccgccctgcgttatcagccgacaagccttagcgcggaacaaatttccgatttggtatttaacgcaagtcttgaaaatatgacggaagaacaaaaacaaaccgccatgaagctaggaaaaacaaaaacttga

SEQ ID NO: 16826 - protein, 277 aa, Unknown
  Obtained from environmental sample
  misc_feature (1)..(277): Xaa is any amino acid
MSGKVEAVYVDYNDNVKKGQVLAQLNTDMLRLQRDQQQAAVQKARANYELQLINYRNQEALAQRELISEYELKTSKTSFDNQRADLAVAEANLRVIETEINQYAFITSPIDGIVLDKNINVGDTVVDSANNNSGSIFTIAENLREMQIEAMIGELDIASIFKGQEVRFTLESLPNRRFTGVVETLRMVPVVSNSVVSYTVIINVENRGGSLLPGMTCAVDFIVERSENALIVPNAALRYQPTSLSAEQISDLVFNASLENMTEEQKQTAMKLGKTKT

SEQ ID NO: 16827 - DNA, 390 bp, Unknown
  Obtained from environmental sample
  misc_feature (1)..(390): n is a, c, g, or t
atgcgttattttttagatacgaatatctttgtattctatgctttgggcggtgagaatttagacagagaaacaacagccatatttggcgactacgaaaacataatttacgtaagtgccgaagttgtaaaagaaacaatgcacttaataaggcaaaagaaaatagacgtaaaacattggaaaaccccaaatgacatttggaaatctataaacgaatggggttttgtagttgattacgtcaaggaagaacacataagaacattaggcaacttaacaaccgcaaaagaccacaaagacccaacagaccacattattattgcgcaagcaataacaaacaaaatgcccgtaatcagcagcgacagccaattcaggcattacaaaggacaaggttaa

SEQ ID NO: 16828 - protein, 129 aa, Unknown
  Obtained from environmental sample
  DOMAIN (3)...(125): PIN domain
  misc_feature (1)..(129): Xaa is any amino acid
MRYFLDTNIFVFYALGGENLDRETTAIFGDYENIIYVSAEVVKETMHLIRQKKIDVKHWKTPNDIWKSINEWGFVVDYVKEEHIRTLGNLTTAKDHKDPTDHIIIAQAITNKMPVISSDSQFRHYKGQG

SEQ ID NO: 16829 - DNA, 462 bp, Unknown
  Obtained from environmental sample
  misc_feature (1)..(462): n is a, c, g, or t
atgggtatttttagttcgattaatatagcggccaccggcttgagcgccgaccgggtacggctggatgtcatagccgacaatatggcaaacgtgaacaccacgcggactgccgaaggcggcccgttccgccgcagccgggtcattatgcgcccgcggacggaaagccccttctggcgttccccctttcttccccaaactatggacaatggcattgggcgcggagtacgggtagcggaaattcaaaaggatttttccaaagaaaatcccctgcgctgggacccgacccaccctgacgcgattaaatccggtccgcggcagggctatgttgaactgcccaatgtggatgtggtgaccgaaatggtggatatgatttccgcttcgcggtcttacgaggcaaacgcgcaaataattgaaggttcaaaatccatattccggcgcgcgctggacattggcggaaaataa

SEQ ID NO: 16830 - protein, 153 aa, Unknown
  Obtained from environmental sample
  DOMAIN (7)...(37): Flagella basal body rod protein
  misc_feature (1)..(153): Xaa is any amino acid
MGIFSSINIAATGLSADRVRLDVIADNMANVNTTRTAEGGPFRRSRVIMRPRTESPFWRSPFLPQTMDNGIGRGVRVAEIQKDFSKENPLRWDPTHPDAIKSGPRQGYVELPNVDVVTEMVDMISASRSYEANAQIIEGSKSIFRRALDIGGK

SEQ ID NO: 16831 - DNA, 330 bp, Unknown
  Obtained from environmental sample
  misc_feature (1)..(330): n is a, c, g, or t
atgggggccgatttcgcggtcaatagcggtatcaacccgctgaccgagggcgcgacgcgggtaggggagtttgaatttaccgtactgcacgtccccggccacacgcaaggcggctgcgccttcgtcttcggcgacgtatgtttttgcggcgatacaatcttcgccggttccgtcggccggacagacttgccgggcggcaattccaaccaattaatagcgagcatacgcgaaaagattctaacgctgccgccccaaacggtactgtgccccggtcacggcggtcggactacggttgaacgggaggcgcggagcaatccgttcttgcgttga

SEQ ID NO: 16832 - protein, 109 aa, Unknown
  Obtained from environmental sample
  misc_feature (1)..(109): Xaa is any amino acid
MGADFAVNSGINPLTEGATRVGEFEFTVLHVPGHTQGGCAFVFGDVCFCGDTIFAGSVGRTDLPGGNSNQLIASIREKILTLPPQTVLCPGHGGRTTVEREARSNPFLR

SEQ ID NO: 16833 - DNA, 447 bp, Unknown
  Obtained from environmental sample
  misc_feature (1)..(447): n is a, c, g, or t
atgaattgcacattcacagatgcggctggcgaagttaaaccagctataatgggttgctatggaattggcgttggtcgtttaatggcaagcgttgtagaaaacagccacgatgattttggtcctatatggcctctttccattgccccattccaggttctcattgtgcaaatagcaaaagacgatgcaattttgcaagtatctgagcgactagaaaaagaactggaatccaaaggcattgaagttttggtggacgaccgtgacgaacgcccaggagttaagtttaaagacggcgatttatggggaattcctattcgtatttccattggcaaaaagggtcttgcggaaaataaggttgagtggaaacttcgctctcagaaagagatggaaatggtgcctattgcagaggttgcggataaagtgcataaatgcattaaacaaaattgttaa

SEQ ID NO: 16834 - protein, 148 aa, Unknown
  Obtained from environmental sample
  DOMAIN (51)...(143): Anticodon binding domain
  misc_feature (1)..(148): Xaa is any amino acid
MNCTFTDAAGEVKPAIMGCYGIGVGRLMASVVENSHDDFGPIWPLSIAPFQVLIVQIAKDDAILQVSERLEKELESKGIEVLVDDRDERPGVKFKDGDLWGIPIRISIGKKGLAENKVEWKLRSQKEMEMVPIAEVADKVHKCIKQNC

SEQ ID NO: 16835 - DNA, 873 bp, Unknown
  Obtained from environmental sample
  misc_feature (1)..(873): n is a, c, g, or t
ttggtggttgccgcagatgtgcgcagagaaggacattccgtaaccatttttgaggcgttccacaaactgggtggagttatgcgctatggcattccagaattccgcctgcccaattccattgtggacaaagaaatagaaacgctgaaaaagatgggcgttcagttcaaaacaaatttcgtagttggcagaacacgcaaaatttccgacttgctcaaaaaagacggctttgatgtagcattcataggcacaggcgcagggcttccgctttttatgggaatcctaggcgaagaattgaacggagttttttccgcaaacgaatttttgacaagggcgaatttaatgcgtgcttatgagaaagattttgcagacacaccgctctgggaaggaaaggaggtcgcggttctgggcggcggcaatgtagcgatggatgctgccagaatatctgtgcgcttgggtgcaaaggttcgcataatttaccgcagaacagccgcagaaatgcccgcaagggcagaggaaattcaccacgctatggaagagggagttgagttttgctatctccaaaacccaagcgaaattttaggcgatgaaaagggttttgttcgcgctttgaaaatagaacgctacaaactcggcgaaccagacgaaaaaggcagaccacgccccgtgaaaattgagggagaatcttttgagcttcctgttgatacagttttggtagccataggaaattccctcaatccgctaataagccaaggaactcccgatttgaaagtgaataaaagaggcaatattgagcttttgaatccagagancaatgccacatatatggataaagttttcgctggcggtgatattgtgcttggggcggcacggtga

SEQ ID NO: 16836 - protein, 290 aa, Unknown
  Obtained from environmental sample
  DOMAIN (131)...(241): Pyridine nucleotide-disulphide oxidoreductase
  misc_feature (1)..(290): Xaa is any amino acid
MVVAADVRREGHSVTIFEAFHKLGGVMRYGIPEFRLPNSIVDKEIETLKKMGVQFKTNFVVGRTRKISDLLKKDGFDVAFIGTGAGLPLFMGILGEELNGVFSANEFLTRANLMRAYEKDFADTPLWEGKEVAVLGGGNVAMDAARISVRLGAKVRIIYRRTAAEMPARAEEIHHAMEEGVEFCYLQNPSEILGDEKGFVRALKIERYKLGEPDEKGRPRPVKIEGESFELPVDTVLVAIGNSLNPLISQGTPDLKVNKRGNIELLNPEXNATYMDKVFAGGDIVLGAAR

SEQ ID NO: 16837 - DNA, 582 bp, Unknown
  Obtained from environmental sample
  misc_feature (1)..(582): n is a, c, g, or t
atgatggccgaggccacggcgcacaaggcgttcggcgaggcgctggccgtcttgggcggcgacgcgctctgcatatcggccttcgagacgctggcctcggtggggcggatagacatcatcgcggaaatcgcttccgcgctcgggacgagcggcatgctcggcggccaggtggtggacatcgagtcggagggaaagccggtaggccgggagaccgtggagtacatacacatgaacaagaccgcggcgcttatcagggcgtcgatacgtgtgggggcgcttttggccgacgcgccgcccgatacgctggaaaaactgtcgtcatacgggaacaacgtaggcttggcctttcaggtggtggacgacatacttgacgaagagggaactacggagacgctcggcaaggacgcggggagcgacgttgagaaaggcaaagcgacctatccggcggtcgtgggaatggacgagtcaaagaagtacgctcacgagttgatagaaaaagcgtgggctgacatagcgttcttgggcgacaagggggccgtattgaaggaattggcggagtacatacgggtcaggatttcgtga

SEQ ID NO: 16838 - protein, 193 aa, Unknown
  Obtained from environmental sample
  DOMAIN (1)...(189): Polyprenyl synthetase
  misc_feature (1)..(193): Xaa is any amino acid
MMAEATAHKAFGEALAVLGGDALCISAFETLASVGRIDIIAEIASALGTSGMLGGQVVDIESEGKPVGRETVEYIHMNKTAALIRASIRVGALLADAPPDTLEKLSSYGNNVGLAFQVVDDILDEEGTTETLGKDAGSDVEKGKATYPAVVGMDESKKYAHELIEKAWADIAFLGDKGAVLKELAEYIRVRIS

SEQ ID NO: 16839 - DNA, 822 bp, Unknown
  Obtained from environmental sample
  misc_feature (1)..(822): n is a, c, g, or t
atggacaagtcgggcgcagacgccgaccgcgtcttgacccagctttccgaacatcacatcgtagctgaggaatggggcggtaccgtccccgtatgtcgcgtatccgcaaagtcgggcgcgggggtagagcaccttcttgaaaacatacttacgcttgcagaagtaatggaattaaaggctaaccccaaccgtagcgcaataggtacggttgtagaaagtagacttgacaagggcaagggacccgttgcaacaatcctagttaaaaacggtacgctaaaggtgtctaactacgttatcgtagggactacaatgggtaaaatccgcgccatgttcgacgacaagggacgcgaagtaaaatccgcggcgccctctatccccgttaccattttggggcttagggacgttcccaattcgggcgacaagcttatggtagtaaaggacgaagaaacggcaaaatcggtgcttgccgaacgactactaaagggcaagggggacaatgattccgacctaaagatgtcgcttgacgacgtgttcagtaagattgcggaaggaaagcttaaggtactaaaccttgtagtcaaggcggacgttaacggctctgcagaagcaattaagcaacagcttttggctttaagtaacgaagaggtccgcataaatatcgtaagctgcggagtaggcgctattaacgaaaccgacgttatgacggcggggactgcgggcgcgattattcttggctttaacgtaagacccgacactaacgcaaaagcaaaggctacggaaaagggtgtgacatcagaccgtaccgcattatttacgaactaa

SEQ ID NO: 16840 - protein, 273 aa, Unknown
  Obtained from environmental sample
  DOMAIN (80)...(143): Elongation factor Tu domain 2
  misc_feature (1)..(273): Xaa is any amino acid
MDKSGADADRVLTQLSEHHIVAEEWGGTVPVCRVSAKSGAGVEHLLENILTLAEVMELKANPNRSAIGTVVESRLDKGKGPVATILVKNGTLKVSNYVIVGTTMGKIRAMFDDKGREVKSAAPSIPVTILGLRDVPNSGDKLMVVKDEETAKSVLAERLLKGKGDNDSDLKMSLDDVFSKIAEGKLKVLNLVVKADVNGSAEAIKQQLLALSNEEVRINIVSCGVGAINETDVMTAGTAGAIILGFNVRPDTNAKAKATEKGVTSDRTALFTN

SEQ ID NO: 16841 - DNA, 594 bp, Unknown
  Obtained from environmental sample
  misc_feature (1)..(594): n is a, c, g, or t
ttgagtcttaagcggctgggccttgattacattgatatttaccagctccacaacgttagttccgaagctcaaaaagaaacggtgtttgatccggacggcgcaatggaggggcttgaagaagcggtaaaagcaggcaaagtgcggtttccggctttctccagccacagtatcccattggctattgaaatcatgaaaagcaaaaaatttgcctcagttcagcttccctttaactacatagacagagaggcggcggaagaggcaatcccgctggctaaggaacttgacatgggctttatcgccatgaagccgatgggcggcggcctcttgcctgacgcggcgctctccttccggttttttagacaatacgaaaacattgttcccgatccaggctttgaaaaaattgaagaggtgcgcgagattgccggaattgttgaaagaagagaaaccctcagcgaggaagacaaaaaggaaattgaaaagcagcgccttgaattaggccccagttggtgccaccgctgcgnatactgccagccttgtcccagggaaatccatatcagtacggcgtttgacatgaagagctttataaagcgatga

SEQ ID NO: 16842 - protein, 197 aa, Unknown
  Obtained from environmental sample
  misc_feature (1)..(197): Xaa is any amino acid
MSLKRLGLDYIDIYQLHNVSSEAQKETVFDPDGAMEGLEEAVKAGKVRFPAFSSHSIPLAIEIMKSKKFASVQLPFNYIDREAAEEAIPLAKELDMGFIAMKPMGGGLLPDAALSFRFFRQYENIVPDPGFEKIEEVREIAGIVERRETLSEEDKKEIEKQRLELGPSWCHRCXYCQPCPREIHISTAFDMKSFIKR

SEQ ID NO: 16843 - DNA, 423 bp, Unknown
  Obtained from environmental sample
  misc_feature (1)..(423): n is a, c, g, or t
ttggagagagaccgtcgtaacgagctggagcaggacaagataaatcttgaaaggatatttgacacaaaaattttcggaatggcctatccctacggaacctttaacgatgaagtaaagaaaatcgtcgggcgctgcggccttctttacgcgcggggcgtgcagagtactttttctttcgatatcccgaaagatttgctcgcttatcagccaacggcaatacatacggataccggcttaatggaactggctgaaactttcataaaattaaagccggaaagcccccaggttttttacctttgggggcacagttatgaatttgacacagacaacaattggcatattatcgaagatttctgtaaacttatgtcaaatagagacgacatatactacgcgaccaacgcccaagctctgctgggagtataa

SEQ ID NO: 16844 - protein, 140 aa, Unknown
  Obtained from environmental sample
  misc_feature (1)..(140): Xaa is any amino acid
MERDRRNELEQDKINLERIFDTKIFGMAYPYGTFNDEVKKIVGRCGLLYARGVQSTFSFDIPKDLLAYQPTAIHTDTGLMELAETFIKLKPESPQVFYLWGHSYEFDTDNNWHIIEDFCKLMSNRDDIYYATNAQALLGV

SEQ ID NO: 16845 - DNA, 777 bp, Unknown
  Obtained from environmental sample
  misc_feature (1)..(777): n is a, c, g, or t
atgaacagaagcaccatcatgggcgatattattgattctgcacctgaggccattgagtaccattgggaccttgtcaaaaacgaccttgcgaaatacccagatttgatggccgtcagcgggagcaacctccaattccgcttgatccttgtcggcaccaaccaaggctggctgcacgcctttggagaggtgtccactagggccacgagtgccgacggcaaggaatatgtgacaggaaatgtcgcagaactttggagcttcatgccaacggactttttggaaaacttggactatatcacgcgcccaggcaacatccaccgtttcatggtcaatgggaccccagtgatttaccatctggacataccgtccaaggcagacggcataggcgatggtatagtcaacctagatggcaatggccacgtcgagcgggtcttggctgtgttcggccttggcaagggggggcgcagctactatgccctaaacatcgaaaatccgtttgaacccaaaatacagtggacgttggtaccagatgaggccggcgatgtcaaagcattccccgattcccgtatagaagtgggagctgatgtaactgccgccaatgtgcggaatatgcttggcaagtggggcttctctactgccactccagccttagggagggtcgtattcaatgggtccagtggcagacagctaagggatgcggtatttttcagcggtggcttcagcgtgccagaggtggaggcaaaatttgtggacagctatggcaagccaatccgcccataa

SEQ ID NO: 16846 - protein, 258 aa, Unknown
  Obtained from environmental sample
  misc_feature (1)..(258): Xaa is any amino acid
MNRSTIMGDIIDSAPEAIEYHWDLVKNDLAKYPDLMAVSGSNLQFRLILVGTNQGWLHAFGEVSTRATSADGKEYVTGNVAELWSFMPTDFLENLDYITRPGNIHRFMVNGTPVIYHLDIPSKADGIGDGIVNLDGNGHVERVLAVFGLGKGGRSYYALNIENPFEPKIQWTLVPDEAGDVKAFPDSRIEVGADVTAANVRNMLGKWGFSTATPALGRVVFNGSSGRQLRDAVFFSGGFSVPEVEAKFVDSYGKPIRP

SEQ ID NO: 16847 - DNA, 615 bp, Unknown
  Obtained from environmental sample
  misc_feature (1)..(615): n is a, c, g, or t
atgaaccgtataaaaccgcctgaatatcatcattcggattgtgttttcccggcaaggcggctatggaaaaatataatacaggactgttcacaatcgtcaattgaaactaaaatactcggacttgacagaagcggggacatccccggcgctttggctcccgaaatatggtttgagttcctgaaaaccggaaaaacggaaaaattagggggaatttgcgatcataatacaaccgatataaaaggtctggcgtcgattatggcggcaatgatcgttatagcggaagatccgttttgcgcaaaatatgattatgatttatgtcggcttgcccttaactggcgcgtttattgcaggcggaatgaaaacaaagatttgcaggcaacaggcgactgtcttttacaattagcggcgcggaaaaaagatgtgaatccgcaaaaaattaaagcctcgatatacagggcgttggccattgattgcgaaagaaaggaaaaaaattacgttcttgcgttggaatatgtaaaaaaatgcctgcttttaacagaaataaacgaaaaatgccgcgatgaatttgaacgccggaaggaaagattggaaaaaaaagttaatcagatcagttaa

SEQ ID NO: 16848 - protein, 204 aa, Unknown
  Obtained from environmental sample
  misc_feature (1)..(204): Xaa is any amino acid
MNRIKPPEYHHSDCVFPARRLWKNIIQDCSQSSIETKILGLDRSGDIPGALAPEIWFEFLKTGKTEKLGGICDHNTTDIKGLASIMAAMIVIAEDPFCAKYDYDLCRLALNWRVYCRRNENKDLQATGDCLLQLAARKKDVNPQKIKASIYRALAIDCERKEKNYVLALEYVKKCLLLTEINEKCRDEFERRKERLEKKVNQIS

SEQ ID NO: 16849 - DNA, 462 bp, Unknown
  Obtained from environmental sample
  misc_feature (1)..(462): n is a, c, g, or t
atggacaggctgataaaaatttctgacggccgcattgaagcaggcgtgattcctgatctcggcggtatggtcgcgttgttgcgcatcgtcggcaaacccaatatcctaaaggctgatcaaagcttgtggaaagagccgcccgcgcccccgtgtgttttcggcccgaatcctgtttggaagccatacaacggccacatcgtctggctcggcccgcatagcgagtggtgggcgcaccaagacaagagcccgaagaagcgccgagaacgcgcggtctggccgcccgatccgtatatcaacaacggatattacgaggttattgagcgcggcgacacggaagtgactatgcgggggccaaagagcgagttcagcggggttcgtctcacaaagtccgtcaagatcagggccggcaaggtgcacttctacgtttgcgccgaaaatatccgaaatacccccgtctcgtga

SEQ ID NO: 16850 - protein, 153 aa, Unknown
  Obtained from environmental sample
  misc_feature (1)..(153): Xaa is any amino acid
MDRLIKISDGRIEAGVIPDLGGMVALLRIVGKPNILKADQSLWKEPPAPPCVFGPNPVWKPYNGHIVWLGPHSEWWAHQDKSPKKRRERAVWPPDPYINNGYYEVIERGDTEVTMRGPKSEFSGVRLTKSVKIRAGKVHFYVCAENIRNTPVS

SEQ ID NO: 16851 - DNA, 834 bp, Unknown
  Obtained from environmental sample
  misc_feature (1)..(834): n is a, c, g, or t
gtggaagaaaaattctctgggatttcgcagattgaatttgttcaacagcttgcgaaatacgataccggggaaataattaagaaactgcaatacatcagggaaaaaattattaaggcggggcttatagtaaatgtcacgggaagcgcacttaatgtcgccggtacggagatagcgcagagattcaaccgctttggtccgcctttgccccggctttccgtggaaataggcgcaggtacgcaggctacacaatcacctgaagtttttacttccaagtctttgcaagtgggttttgcggcgttggcgttaaattccgcgcctcatgacacgttggaacaagtcgcagaatttgttttaacgcatcagttgagtaccggggcgttatgggaagatatacggatgaaaggcggcgcttacggcgcttttatcaacagcaattcgcttgagaactgcgtgtcttttgccacataccgcgatccaaatccactgcgttcattggatgtgatttcttcaatatttaaagatagttcttatggaaaatgttccgaggactaccttgttaagtccataatcgggtgttattcgaaagagacacgccctcaaaccgcggcggaaaaaggcttggttgatttttacaggtttctttacggtatggaagaaagttactataaaagaaaacttgagcggttaatttcagtctcaaccgcggacattgaagcagtttttaattcattaaattccagagtaacctcgccacccggtataatagcgggcgtaaaaaaagccgaggaaagcgctaaaaagcttggaaccgacgtgcaaatcttgaaaatataa

SEQ ID NO: 16852 - protein, 277 aa, Unknown
  Obtained from environmental sample
  misc_feature (1)..(277): Xaa is any amino acid
MEEKFSGISQIEFVQQLAKYDTGEIIKKLQYIREKIIKAGLIVNVTGSALNVAGTEIAQRFNRFGPPLPRLSVEIGAGTQATQSPEVFTSKSLQVGFAALALNSAPHDTLEQVAEFVLTHQLSTGALWEDIRMKGGAYGAFINSNSLENCVSFATYRDPNPLRSLDVISSIFKDSSYGKCSEDYLVKSIIGCYSKETRPQTAAEKGLVDFYRFLYGMEESYYKRKLERLISVSTADIEAVFNSLNSRVTSPPGIIAGVKKAEESAKKLGTDVQILKI

SEQ ID NO: 16853 - DNA, 426 bp, Unknown
  Obtained from environmental sample
  misc_feature (1)..(426): n is a, c, g, or t
gtgatcacatcttcgtgttataagggcagcgcggagaattgcgcgaaatacggaaggctgtacatgtgggatgtagcaatgatagcgtgtccgtccggctggcacttgccaaatcgtggggaatgggatgcgttagtaacaacggcgggtggaagcaatgttgcgggtggtaagttgaaggcaaagagcggttggtattccagcatacccggaacggacgagtttggattttcggccatggggggcggctgccgttgcaatggtgggttcgtcgatgccgacacctggggcttctggtggacggctaatccggcaagcgatcgctacgccttctacctagaaatgtactacgatagcggccgcgtggaatacgactacttttcgaagaacgatatgtactctgtgcgttgcgttaagaatgattga

SEQ ID NO: 16854 - protein, 141 aa, Unknown
  Obtained from environmental sample
  misc_feature (1)..(141): Xaa is any amino acid
MITSSCYKGSAENCAKYGRLYMWDVAMIACPSGWHLPNRGEWDALVTTAGGSNVAGGKLKAKSGWYSSIPGTDEFGFSAMGGGCRCNGGFVDADTWGFWWTANPASDRYAFYLEMYYDSGRVEYDYFSKNDMYSVRCVKND

SEQ ID NO: 16855 - DNA, 387 bp, Unknown
  Obtained from environmental sample
  misc_feature (1)..(387): n is a, c, g, or t
atgatccgcccggacggcttccagattaaccttgaaggcgccggcggcgccgacagggccggcatgagcggccagccggctaaattccatgaaaattggtttgagtatcttaaagccgcggggattatcaccctcttttcctacgcgaacgctaaaatgacagaaaccgccgctaaatacgcttccgaagacaaagccaataacatcgccgccgctaacgccgattttgtcagcaacctcggcggccagcttgccggccgcgcggccaatatacagcccactcttacagtcgataacggcacccccattaacattttattaaataaaaatttatatcttccgccggtcgcggggtatcccgcttctgaaaaatatttattggagtag

SEQ ID NO: 16856 - protein, 128 aa, Unknown
  Obtained from environmental sample
  DOMAIN (1)...(118): Bacterial conjugation TrbI-like protein
  misc_feature (1)..(128): Xaa is any amino acid
MIRPDGFQINLEGAGGADRAGMSGQPAKFHENWFEYLKAAGIITLFSYANAKMTETAAKYASEDKANNIAAANADFVSNLGGQLAGRAANIQPTLTVDNGTPINILLNKNLYLPPVAGYPASEKYLLE

SEQ ID NO: 16857 - DNA, 672 bp, Unknown
  Obtained from environmental sample
  misc_feature (1)..(672): n is a, c, g, or t
gtggaacctgcgattattctcaagagcatagcgagcccaagccttttaagcactgtattcacgcagaagtttgaaacgcatctgccgtattacaggcaggagaaacagtttgaacagataggggctgaaataagcagacaggatatggccaactggcagcaacaagtatacatgaggcttgaacctctgtttgagttgctaaaaaaagcggttaaggacggccctgtaatacaaatggacgaaacgccggtgcaggtcatctcggatttgaaatccgcagacatgaagtccgaagaaactgacaagaaagaaacgcatgaaagctatatgtggcttaccctcggcggatctgccgggaagaaagtaacatggtatgaatatcatccgacccgcgccggatatcacgcgagaacgtttctggaaggatattcgggatacctgcagacagacgggtataaagggtatgacagcgcgttaaaagatatgcccaacatcattcatgtggggtgtttcgcccacgcgagacggaagttttttgaagcggcgaagataaataagaattccaaatccgcgcaggaagggataaagcacatccgcaagctgtacgacattgagaatgaattacgtgaaaagtttgcaaataanncatacatgtttctgacagaacgctag

SEQ ID NO: 16858 - protein, 223 aa, Unknown
  Obtained from environmental sample
  DOMAIN (4)...(165): Transposase IS66 family
  misc_feature (1)..(223): Xaa is any amino acid
MEPAIILKSIASPSLLSTVFTQKFETHLPYYRQEKQFEQIGAEISRQDMANWQQQVYMRLEPLFELLKKAVKDGPVIQMDETPVQVISDLKSADMKSEETDKKETHESYMWLTLGGSAGKKVTWYEYHPTRAGYHARTFLEGYSGYLQTDGYKGYDSALKDMPNIIHVGCFAHARRKFFEAAKINKNSKSAQEGIKHIRKLYDIENELREKFANXXYMFLTER

SEQ ID NO: 16859 - DNA, 708 bp, Unknown
  Obtained from environmental sample
  misc_feature (1)..(708): n is a, c, g, or t
atgggtatcgatctgaatttaaaaaatctggacagccttttccctgctggttttagtgaagaacaaaaggctcaggcaaaaaccctgttcttaaaaaacctttcaatggaggcgcatggtttctacggcggcaaaatgcaaaccttgccaaaatgcggcatttacggctttaactggctaaacgtttggtacacccccggcgtgtcaaaaatttccacaacgatcagggacgataacgacacttcattcgccctctccaaccgtggaaatctggtggcagtagtctcggattctaccagggtcttaggcgacggggactgcacgcctcctggagggcttggtgtcatggaaggaaaggccatgctcatgaagtacctgggcggcgtggacgcggttgcgctttgcgtcgactcaaaaggccaggacggcaggaacgatcccgggcggcttattgactttgtaaaaatggtccagcacagctttggcgcaatcaaccttgaagatataagtcagcccaactgttacagggtgttggatgaactgcgggaagcctgcgatattcctgtctggcacgacgatgcccagggaacagcctgtgttacccttgccgctcttatcaacgcgcttaagcttgctggcaagaagattggagacgcgaagatcacgctgctgggggcgggcgcttccacaccactatcgcgcggctga

SEQ ID NO: 16860 - protein, 235 aa, Unknown
  Obtained from environmental sample
  DOMAIN (44)...(192): Malic enzyme, N-terminal domain
  misc_feature (1)..(235): Xaa is any amino acid
MGIDLNLKNLDSLFPAGFSEEQKAQAKTLFLKNLSMEAHGFYGGKMQTLPKCGIYGFNWLNVWYTPGVSKISTTIRDDNDTSFALSNRGNLVAVVSDSTRVLGDGDCTPPGGLGVMEGKAMLMKYLGGVDAVALCVDSKGQDGRNDPGRLIDFVKMVQHSFGAINLEDISQPNCYRVLDELREACDIPVWHDDAQGTACVTLAALINALKLAGKKIGDAKITLLGAGASTPLSRG

SEQ ID NO: 16861 - DNA, 840 bp, Unknown
  Obtained from environmental sample
  misc_feature (1)..(840): n is a, c, g, or t
atggggcttatgttcaacgatcttatttttacggttgtaataactttgaccgtttcaatnatagtcgcggtcacgcttgtcccaagcctttcaggttccatattaaaacttgacacaagaatacaaaagccgataaaaaacaaaatattgagtataatagatggaaagattgaagcagcccttgtctttttagaaaaaaattacaagattgcccttgattactgcctatcccacaggcttatcattatcgccctggtcgttcttattcttgttttctcgctctttcaattcagcggcattggaatgaatatgtacgtccgtatgcgcactgatgacaatgtaacgcttaatgttatgatgccccgcggaaccgccattgacgttacggaaaaagtgttatttgacattgaggctcttgtcaagcgtgaggtgaaaggttacaataacattgtcctgacggcgacgcgaagcggaaataatcaggggtcgatacagatcaccctaccccctccggccaggcaaatagatactcccgatacaattatgaaaaaacttaccccctaccttaattcaattccgggaacgcggattagtttcagggcggggcgcggtatgggaagctcctctccgattgaaattgccgtcagttcaaaaaattacgccgcattaatggatactgcccaggatattcaacatattattatgaattatctgccggagatagaaaatccagtggtaaatgtcgatgaaggcgccccacagttacagatagagattgaccgcgaccgcgcgtcaagttttggtttgtccctttctacaatcgctctcgtgccgatctga

SEQ ID NO: 16862 - protein, 279 aa, Unknown
  Obtained from environmental sample
  misc_feature (1)..(279): Xaa is any amino acid
MGLMFNDLIFTVVITLTVSXIVAVTLVPSLSGSILKLDTRIQKPIKNKILSIIDGKIEAALVFLEKNYKIALDYCLSHRLIIIALVVLILVFSLFQFSGIGMNMYVRMRTDDNVTLNVMMPRGTAIDVTEKVLFDIEALVKREVKGYNNIVLTATRSGNNQGSIQITLPPPARQIDTPDTIMKKLTPYLNSIPGTRISFRAGRGMGSSSPIEIAVSSKNYAALMDTAQDIQHIIMNYLPEIENPVVNVDEGAPQLQIEIDRDRASSFGLSLSTIALVPI

SEQ ID NO: 16863 - DNA, 870 bp, Unknown
  Obtained from environmental sample
  misc_feature (1)..(870): n is a, c, g, or t
atgaaaatgaagccggatttttctttatttttacttcaagttgtcatattgattattgtgtctgcggcgtttgcagtgatttttttcaagacgtctatgccgaaaaacattgcggatatttgcatttatattattgtttacattgccgcatttattttgacattctgcatacgcaagaataacgaatgggaacgcgccattgtacttcgcttcggtaaatttcataaggtcagggggcctgggctgttttttcttctgcctgttgccgaccgtgtcgctcaaacagttgatatccgaatcagggtttcggacttttccgcgcagaaaactttaacgggcgattccgttactgtcgatgttgacgctctttgtttctggctggtttgggatccgcaaaaagcggttcttgaagtagagaattattttgacgctgttgtgtattcttccaagaccgcattgcgcagcgcggtttcaagtcatgatctttcaacatttcttgagcgcagtgatgtgattgaaaaacaaattcaggaagaggttgataaaaaaactaccgattggggtataacggttcttcatattgagattaccgatattcaaattccggaacatttacaggattcgctttcgcgtgtcgcgcaggcggaaagggaaaagaaggggcgtattcttcttgccgaggcggaaattgagattgccaaaaaactggaagaagcgattactatctacgctaaaaatgaaggaacaatgaaacttaagattctttctattttgaacgagggcttgaaagcgggcaattcaatgatgttggttcccaattncatagcggaagaattaaaaacaaagatatattcggtttacaggcgttaa

SEQ ID NO: 16864 - protein, 289 aa, Unknown
  Obtained from environmental sample
  SIGNAL (1)...(25)
  DOMAIN (56)...(230): SPFH domain / Band 7 family
  misc_feature (1)..(289): Xaa is any amino acid
MKMKPDFSLFLLQVVILIIVSAAFAVIFFKTSMPKNIADICIYIIVYIAAFILTFCIRKNNEWERAIVLRFGKFHKVRGPGLFFLLPVADRVAQTVDIRIRVSDFSAQKTLTGDSVTVDVDALCFWLVWDPQKAVLEVENYFDAVVYSSKTALRSAVSSHDLSTFLERSDVIEKQIQEEVDKKTTDWGITVLHIEITDIQIPEHLQDSLSRVAQAEREKKGRILLAEAEIEIAKKLEEAITIYAKNEGTMKLKILSILNEGLKAGNSMMLVPNXIAEELKTKIYSVYRR

SEQ ID NO: 16865 - DNA, 837 bp, Unknown
  Obtained from environmental sample
  misc_feature (1)..(837): n is a, c, g, or t
gtgctgaacagggatggctatgagacttcctatttgggaaaatggcacctctgggcggcggaactggggaatcactacgatccaaaaaattcttttgtcccccccggaaaagaccgtcttggttttgacggctatttcgcccattacaactttcaccacaactactacggcgcggcggcctactaccacctggacagtcccgcgaaaaactacacccccggttatgaacccgatgcccataccaacatggcaattgagcagctggaacggctttcggcagggaacaaaccctttgcctttttcctttcccttggaactccccacgatccctgggttcacgaaaacgtgcccggagaataccttgagcgttttaaggatattgagttttccctgcctgaaaactacctccccgggaacgatccctatgcggacaactgggcgaagctcagcgagagggagcggaaagaactgccatcctggatgcgggcttactatgccatgaccgccaatctggacgataatatcggctgcctcatggatgccatcaagaggcttggcctctatgacaattccatcatcgttttcacctccgaccacggcgaactttttggcgcccacggccgcagggcaaagaacattttttacgatgaggcagtccgcgttcccttcctcgtgcgctggaagggtatcctgaatgaaggcggcgtttcggatatctgccttaacaccgtggatatcatgcccacccttctctctttgatggatcttggcataccgaaggaagttgaaggctttaatttcaaggacatcctgctgagaatggctctgccgatctga

SEQ ID NO: 16866 - protein, 278 aa, Unknown
  Obtained from environmental sample
  DOMAIN (4)...(276): Sulfatase
  misc_feature (1)..(278): Xaa is any amino acid
MLNRDGYETSYLGKWHLWAAELGNHYDPKNSFVPPGKDRLGFDGYFAHYNFHHNYYGAAAYYHLDSPAKNYTPGYEPDAHTNMAIEQLERLSAGNKPFAFFLSLGTPHDPWVHENVPGEYLERFKDIEFSLPENYLPGNDPYADNWAKLSERERKELPSWMRAYYAMTANLDDNIGCLMDAIKRLGLYDNSIIVFTSDHGELFGAHGRRAKNIFYDEAVRVPFLVRWKGILNEGGVSDICLNTVDIMPTLLSLMDLGIPKEVEGFNFKDILLRMALPI

SEQ ID NO: 16867 - DNA, 762 bp, Unknown
  Obtained from environmental sample
  misc_feature (1)..(762): n is a, c, g, or t
gtgggacaattaacaaactacgatataatctgccgggaaaagggcgcaagcgctcagttaaaaaaataccgcgcggtaaaagatgaaaaagaaatcgaaataacgcggaaagcagcgggaataacaaacgaacttattgaacttttggaaaaaaatgtgcgcggcggaaaaataaaaacagaggcggacgcggctttgttgattgaggttgaggcccgcaagcgcggctgcgagggaacaagttttgaaactcttgcggcaggtcccgcgcgaagtttcgccattcacgcattccccaactggacatattccgaattcggcggcgacggactttccattctggattttggcgtaagattagacggctattctacggatgtaaccctgacttttacccgcaatttgaatcccaaacaggaaaaactggtcaatcttacggaaaaagcggcaaaactagcgctttcaattgcacataacggaacgccggcgaaagacatagccgcggccgtagacgctctttttacaaaatccaaaaaacagatgccgcacggtctcgggcacggtctcggtcttcaggaacatgaatacccgcttatttcaaaccgcggcagcaatgaatgggtccttgaaccgggaatgatcttcacgatagagcccggtctctacgaccccctcctgggcggctgccgtcttgaaaacgacgtgctgattaccgaatccggcacggaagtgcttacaacctcgcatattattcgtctatag

SEQ ID NO: 16868 - protein, 253 aa, Unknown
  Obtained from environmental sample
  DOMAIN (33)...(247): metallopeptidase family M24
  misc_feature (1)..(253): Xaa is any amino acid
MGQLTNYDIICREKGASAQLKKYRAVKDEKEIEITRKAAGITNELIELLEKNVRGGKIKTEADAALLIEVEARKRGCEGTSFETLAAGPARSFAIHAFPNWTYSEFGGDGLSILDFGVRLDGYSTDVTLTFTRNLNPKQEKLVNLTEKAAKLALSIAHNGTPAKDIAAAVDALFTKSKKQMPHGLGHGLGLQEHEYPLISNRGSNEWVLEPGMIFTIEPGLYDPLLGGCRLENDVLITESGTEVLTTSHIIRL

SEQ ID NO: 16869 - DNA, 834 bp, Unknown
  Obtained from environmental sample
  misc_feature (1)..(834): n is a, c, g, or t
gtgtacgagcgcgccaagcctaaagccatctttgttctgacgacctgcgccgcgggcataatcggtgaggacgtcgagagcgtctgcgacgaggcggaggcggatatcggcatccctgtggtcgccgttttctgcgagggcttccgatccacggtttggactaccggtttcgacgcgggctatcacggtatagcgcgaaagttggtcaaggtgccccgcaaacgcagggacgatatgataaacgtgatcaacttttggggcagcgacgtctttaaggattggttcgccccgttcggcgcggcgcccaattacatcacgccctattccactatagaaagcctcacgtggtctagcgaggcggcggcgacggtgcaggcttgctcgacgctaggttcttatctgggcgcggctctggaacaggagttcggcgtgcccgaactgcccactgccccgccctacggaatcgcccagaccgatcggtggttcagggcgctcggaaagctgctcaaaaaggaggatgttgccgagcgggttatcgccgagaaaagggcggagtatctgcccaagatcaaggcgctgaaagagaagatccgcaagtacgcggacgggcggacgctgaccgcctacgttaccggcggggcggcccacgggcacgcgcttttgtcggtgctcggcgagttggggattcaagcggtcggcgcggccattttccaccacgatccggatcttcgacaacggcgagccgggatacgaccaacttgcccagcgtgtgagggattacggcgacgtgccgaaatttcaacgtctgccacaagcaggagtttgaacttgtga

SEQ ID NO: 16870 - protein, 277 aa, Unknown
  Obtained from environmental sample
  DOMAIN (1)...(277): Nitrogenase component 1 type Oxidoreductase
  misc_feature (1)..(277): Xaa is any amino acid
MYERAKPKAIFVLTTCAAGIIGEDVESVCDEAEADIGIPVVAVFCEGFRSTVWTTGFDAGYHGIARKLVKVPRKRRDDMINVINFWGSDVFKDWFAPFGAAPNYITPYSTIESLTWSSEAAATVQACSTLGSYLGAALEQEFGVPELPTAPPYGIAQTDRWFRALGKLLKKEDVAERVIAEKRAEYLPKIKALKEKIRKYADGRTLTAYVTGGAAHGHALLSVLGELGIQAVGAAIFHHDPDLRQRRAGIRPTCPACEGLRRRAEISTSATSRSLNL

SEQ ID NO: 16871 - DNA, 390 bp, Unknown
  Obtained from environmental sample
  misc_feature (1)..(390): n is a, c, g, or t
atgggaaatatgtcaataggaaaaaacaatttattattacttaataggcaaagttactggcatatgaaaagtataaaggaagtattggccaaaaatttgaaaataaaccgcctgaaactgggcttaacgcaagaaaaattggcggagaaaactgatatttcaacgcattatctggcaatggttgaacttgcccgcaagtttccttctgctaatatgctggaacgtctagccaaggctttagatattgaaccccatgagttgttttatatgcctagcgttgccgaaaatgccttggaacatttacaggagtctattgtggctaatatagaacggatagtctccaatacaataaaagaaaccttagaaaatgaatataaatacaagatataa

SEQ ID NO: 16872 - protein, 129 aa, Unknown
  Obtained from environmental sample
  DOMAIN (33)...(87): Helix-turn-helix
  misc_feature (1)..(129): Xaa is any amino acid
MGNMSIGKNNLLLLNRQSYWHMKSIKEVLAKNLKINRLKLGLTQEKLAEKTDISTHYLAMVELARKFPSANMLERLAKALDIEPHELFYMPSVAENALEHLQESIVANIERIVSNTIKETLENEYKYKI

SEQ ID NO: 16873 - DNA, 528 bp, Unknown
  Obtained from environmental sample
  misc_feature (1)..(528): n is a, c, g, or t
atgaaagcagtagcttctttttttgggaaacgtatgcttagggagctgaacgaagaaacattgctgacacgattggtggatttgaggaacactattggcgacagagcgatactcagggccatgcactttttcagtgaaaaccacagggtggatgcgatgctggccgcgcttgaggaaatggctgcgcttccggcagaaaaggctatggatgtttttcttgcccttgtcagggaatccggggattcgtcctgggaattactgcaaaacatttactctcccaaaaatttcaatgagcagggtttgagccttgcccttgcgctgacaaaaaatttcttcaattcaggctcaggcaaaggcgcatgccgagtacacggcggcgggtttgcagggacaattcaggcgtacatctcaacggaaaggctaagggattaccgcaacatgatggaaggaatttttggaatcggggcccttacagttttaaggataaggcccttgggcgccgttgagctgaatctcaatcaggcttga

SEQ ID NO: 16874 - protein, 175 aa, Unknown
  Obtained from environmental sample
  misc_feature (1)..(175): Xaa is any amino acid
MKAVASFFGKRMLRELNEETLLTRLVDLRNTIGDRAILRAMHFFSENHRVDAMLAALEEMAALPAEKAMDVFLALVRESGDSSWELLQNIYSPKNFNEQGLSLALALTKNFFNSGSGKGACRVHGGGFAGTIQAYISTERLRDYRNMMEGIFGIGALTVLRIRPLGAVELNLNQA

SEQ ID NO: 16875 - DNA, 840 bp, Unknown
  Obtained from environmental sample
  misc_feature (1)..(840): n is a, c, g, or t
atggtacgccagcacccaggttttatcaaaggcttaagggtatgggaaaattgtattttgggttcggaaagaaagggacgactgttattcaattccgggctgtcaaagaaaacggttgaagaaaaagcgagtcagtggcatgtaaatattccattagacgtcccggctgaatccctcactgtaggtcaacggcaaaaagccgcgattctcgcgttgcttcttcgcgatgttaagtggttcatctttgatgaaccaaccgccgttctctctgtggaagaaactgaaagccttttccagcttttcaggcgcttgtgcggcgaaggccggggaattattttcattacccataagctaaaggaagctctggcaattgctaatagagttacagttatccgatgtggcgtagccagggagacccgcaaaacttccggactttctgccgaagagttaagaaaggaaatttttggcacggaaaatttcacaaaacagaccaaagactcaatccagaacccgcattgtgagccgattcttgtcattaaggaccttcatcttgaaccgcctggattacccgctattaaaaacgtaaacttgcgcctaacgccgggaatgatcatgggcatcacagggagccgggatggcggttatgaaaccctggaaaacgcgataactggtttttataaaattggcgatgaaagcggaaaccataatagcggttcaattgcgcttaacggtcaggacatcaccggtaatggtgtccgtgcattccgcaacgcgggaggggcttaccttggcgctaaccggctgggcagtaatttagcccgtgaactcccgtttgtttga

SEQ ID NO: 16876 - protein, 279 aa, Unknown
  Obtained from environmental sample
  DOMAIN (17)...(134): ABC transporter
  misc_feature (1)..(279): Xaa is any amino acid
MVRQHPGFIKGLRVWENCILGSERKGRLLFNSGLSKKTVEEKASQWHVNIPLDVPAESLTVGQRQKAAILALLLRDVKWFIFDEPTAVLSVEETESLFQLFRRLCGEGRGIIFITHKLKEALAIANRVTVIRCGVARETRKTSGLSAEELRKEIFGTENFTKQTKDSIQNPHCEPILVIKDLHLEPPGLPAIKNVNLRLTPGMIMGITGSRDGGYETLENAITGFYKIGDESGNHNSGSIALNGQDITGNGVRAFRNAGGAYLGANRLGSNLARELPFV

SEQ ID NO: 16877 - DNA, 747 bp, Unknown
  Obtained from environmental sample
  misc_feature (1)..(747): n is a, c, g, or t
atgtgtaccctggttttatgttcaatcaacctcaagcatcccgccggtattcccttgggaaatatgataagccgcaatcccctgtatgaagatattacccgctgccgttccctgcgtccgtataatcggggagatgagccccgccgtatcaactggaagattagcgcccgtatgggacatatcgatgtgcccttcgagcgtacaggcgcgcaatcagtatccttcatggttaatgaatatgaaactaccgcgtcataccccctcatgatttttcttaatgcggatcaaaatgaatatccgttaaaaaaacagggggactttatagaacgcgccatagaagccgccgcctctctctgtttgaaaaccgcgcgggaacggcaggaactggggattgttttctacacttcttccgcagaaggtggtatctccgttattgcgccgtccgcttttacccttgttcccattcttgaacgattggcggcgctgaggataaaggcgaatgtcagggtaaaagagcgcggcagcgcgcttaccatgcttgaacagggtaaacatctgtcctatggaacacgctttctatatatcggtcccgatttggggagtgaagcgtatatcaaccttaactcattaaagaaatatcatctttctcttgagtaccttatcattgacgaccgctctatgccttcccttgttcccggaaattccccgcgttataaaatgaaggagaatggccgtgaaatcgtataa

SEQ ID NO: 16878 - protein, 248 aa, Unknown
  Obtained from environmental sample
  misc_feature (1)..(248): Xaa is any amino acid
MCTLVLCSINLKHPAGIPLGNMISRNPLYEDITRCRSLRPYNRGDEPRRINWKISARMGHIDVPFERTGAQSVSFMVNEYETTASYPLMIFLNADQNEYPLKKQGDFIERAIEAAASLCLKTARERQELGIVFYTSSAEGGISVIAPSAFTLVPILERLAALRIKANVRVKERGSALTMLEQGKHLSYGTRFLYIGPDLGSEAYINLNSLKKYHLSLEYLIIDDRSMPSLVPGNSPRYKMKENGREIV

SEQ ID NO: 16879 - DNA, 600 bp, Unknown
  Obtained from environmental sample
  misc_feature (1)..(600): n is a, c, g, or t
ttgggttatctcgccgggcttgtaactacaagcggaatgtccaacgccaacagcgccaaaagggtcggttttatcgccgcccaagaatatcccatgctgaacaggcagatggttccaggctttattgacggcgcgcgccgtgttgatccgaatattgaactggattttcgcgttatcggtaattggtatgacgcaagcaaggcctccgagcttgcgtctggcatgattaacgccggagtcgatgtgtttacctcaattgcgggcggcgcggcgcaggggttgatacgtaccataaaagagcgcggcgcttattcggtgaattttaacaccaacgattacagtcaggctcctggtttcattgtgggctgcggtaaaatggaacagaaaaaactcgtaaaagaaatacttacggacgcgcttgccggaaagatcaattacggcaactcaaaaacggttggcgttaaagaaggctacatagattttatttctgatgaccccggctaccgcgataatgttcccgcggatatacaaaaaaaattcggcagcttcatggatgacttccgcgccgggcgtattgaatatacagttccggccctgtaa

SEQ ID NO: 16880 - protein, 199 aa, Unknown
  Obtained from environmental sample
  SIGNAL (1)...(16)
  misc_feature (1)..(199): Xaa is any amino acid
MGYLAGLVTTSGMSNANSAKRVGFIAAQEYPMLNRQMVPGFIDGARRVDPNIELDFRVIGNWYDASKASELASGMINAGVDVFTSIAGGAAQGLIRTIKERGAYSVNFNTNDYSQAPGFIVGCGKMEQKKLVKEILTDALAGKINYGNSKTVGVKEGYIDFISDDPGYRDNVPADIQKKFGSFMDDFRAGRIEYTVPAL

SEQ ID NO: 16881 - DNA, 696 bp, Unknown
  Obtained from environmental sample
  misc_feature (1)..(696): n is a, c, g, or t
atgaattgggattgggggcttgctgtgaaaataagcgttttaaatctgtcaggacgaatatacacaagcaaagagggcggatttaacttgttgaaatcgggtacagacatggaaaaaaaattattgtatgtccatcctatacacgccaacaggacgctcaaagcgttaaattttcccttgtcaatttgcgaagcggtgcttcagcaccatgagctggaagacggatcgggttttcctcaacagcttaaaggaaacgctatcggcttgtatggaaaaattttggcggttgccggattttacgagaccttctcgactgaaagtattgatgggataaagtgcagccacagcgggatagtgcaaatactgaagaatggcgggtgttttgacgtgtcggttatacgggctttagtgaattcaatatcaatttacccggttgggatatatgttttattgtccaacgggaaacgcgggcaggtgtcggacatagaccgggagaatccacgttttccatttgtaagaatatttggaaaacaatcgtacaacgaacatatgaaaacttccgatgagctttttatagtccgtccgcttaccggtgatgaagtcgaagtttctgttaaagaggtcgaaaattctgttaaaaagaataaggatcgtaatctaaggtcgttatttaatcgccgcttttaccagccctaa

SEQ ID NO: 16882 - protein, 231 aa, Unknown
  Obtained from environmental sample
  misc_feature (1)..(231): Xaa is any amino acid
MNWDWGLAVKISVLNLSGRIYTSKEGGFNLLKSGTDMEKKLLYVHPIHANRTLKALNFPLSICEAVLQHHELEDGSGFPQQLKGNAIGLYGKILAVAGFYETFSTESIDGIKCSHSGIVQILKNGGCFDVSVIRALVNSISIYPVGIYVLLSNGKRGQVSDIDRENPRFPFVRIFGKQSYNEHMKTSDELFIVRPLTGDEVEVSVKEVENSVKKNKDRNLRSLFNRRFYQP

SEQ ID NO: 16883 - DNA, 864 bp, Unknown
  Obtained from environmental sample
  misc_feature (1)..(864): n is a, c, g, or t
gtgggtttattcgataatgctggagtttttccctcctatggaggtttgccgttctggcagtctgggtctttcagccccggtgttgtgacagtgtcagcgaccagtaatctcgtcaaggttacttgtattagtctgggaacggcgactatcaccgttaccacggaagaaggcggcaaaaccgcgacttgtactgttaccgtcagcgccggcgagcctgtaacaggcgtaacccttgaccagtcagttatagaccttaccgccggcggtaagggaaccctctatgcgaaaatagagccctccaatgtagcaaataagagagtaaaatggaacagcagtaactccgctgtagcgacagtatcagggtccggcaatatcggcacggttaccggtattagcctgggaacggcgactatcaccgttactacggaagaaggcaataaaaccgcgacttgtgctgttaccgtcggcgccagattggcggtaaccggcgtaacccttgacaagccaactcttagctttcccatcggcgatacagaatacctctatcctgcaataactccctataacgcgacaaatcagactgtgacatgtagcagcagtaactccgctgtagcgacagtatcatgggacggtaatatcggcgcggataccggtgttaaagcgggaacagcaactatcaccgttaccancgaagacggcaaaaaaaccgcaacttgcgctgttaccgtcagcgccggcagtaccggcattgtggcagtaaccggcgtaaccctgaaacaagacggctatcacccctttacccccggttttacgggaaacccctctttcgaaaacattgtatcccccttaacgccccggaattaa

SEQ ID NO: 16884 - protein, 287 aa, Unknown
  Obtained from environmental sample
  DOMAIN (160)...(241): Bacterial Ig-like domain (group 2)
  misc_feature (1)..(287): Xaa is any amino acid
MGLFDNAGVFPSYGGLPFWQSGSFSPGVVTVSATSNLVKVTCISLGTATITVTTEEGGKTATCTVTVSAGEPVTGVTLDQSVIDLTAGGKGTLYAKIEPSNVANKRVKWNSSNSAVATVSGSGNIGTVTGISLGTATITVTTEEGNKTATCAVTVGARLAVTGVTLDKPTLSFPIGDTEYLYPAITPYNATNQTVTCSSSNSAVATVSWDGNIGADTGVKAGTATITVTXEDGKKTATCAVTVSAGSTGIVAVTGVTLKQDGYHPFTPGFTGNPSFENIVSPLTPRN

SEQ ID NO: 16885 - DNA, 855 bp, Unknown
  Obtained from environmental sample
  misc_feature (1)..(855): n is a, c, g, or t
atggcaactggagcagaagaagcctcggtgagtgctgatgaggtggctaaagcggtggataaggtttcaataaacataaacgagatggcaagtggagcagaagaagcctcggtaaatgttgccgaggttgctaaagaagtaggtcaggtttcaacaaatataaaagttatggcaaacgctgcccaaaaagcctctatgaatgccaacgaggttgccagtgcagcggagcagatgtccgctaatatgaacaccatagcttctgctatagaagagatgagttcaagcataagccagatatccaccaatgctggcgatgcccataaaatagccgaagatgccatgaaccgctccaacgaagctaccgaagttatgagtaaactaggtgttgccgctaaggagatagggcaggtgaccgacgtcatcaaaaggatagcggacaagactaatcttcttgccttgaacgcgactattgaggcagcatctgctggcgaggccggcaaaggctttgctgttgtggctggtgaaatcaaggaacttgcgaaccagagcgcgaggagcgcagacgacatatcgcgccgcatagatggcatacaagttagcactggcgaagcagtaacagctataaaaaatgtttctagcattattgttcatgtaaacgagagcgtagagtccatatccagccacgctgctcagcagaccgaggctagcaatgagatagcgaaaaatgttacgcaagcaaatacaggtgctaaacgtgtagctgagtctatgagcgaggtagctaaagacaataagagtatagctgacaacgcatcgcaggctaattccagcatagagattgtatctaatccataa

SEQ ID NO: 16886 - protein, 284 aa, Unknown
  Obtained from environmental sample
  DOMAIN (69)...(284): Methyl-accepting chemotaxis protein (MCP) signaling domain
  misc_feature (1)..(284): Xaa is any amino acid
MATGAEEASVSADEVAKAVDKVSININEMASGAEEASVNVAEVAKEVGQVSTNIKVMANAAQKASMNANEVASAAEQMSANMNTIASAIEEMSSSISQISTNAGDAHKIAEDAMNRSNEATEVMSKLGVAAKEIGQVTDVIKRIADKTNLLALNATIEAASAGEAGKGFAVVAGEIKELANQSARSADDISRRIDGIQVSTGEAVTAIKNVSSIIVHVNESVESISSHAAQQTEASNEIAKNVTQANTGAKRVAESMSEVAKDNKSIADNASQANSSIEIVSNP

SEQ ID NO: 16887 - DNA, 498 bp, Unknown
  Obtained from environmental sample
  misc_feature (1)..(498): n is a, c, g, or t
atgctagaaacattttttatagctgttactgcttcgccagtgctaacttgtatgccatctatgcggcgcgatatgtcgtctgcgctcctcgcgctctggttcgcaagttccttgatttcaccagccacaacagcaaagcctttgccggcctcgccagcagatgctgcctcaatagtcgcgttcaaggcaagaagattagtcttgtccgctatccttttgatgacgtcggtcacctgccctatctccttagcggcaacacctagtttactcataacttcggtagcttcgttggagcggttcatggcatcttcggctattttatgggcatcgccagcattggtggatatctggcttatgcttgaactcatctcttctatagcagaagctatggtgttcatattagcggacatctgctccgctgcactggcaacctcgttggcattcatagaggctttttgggcagcgtttgccataacttttatatttgttgaaacctga

SEQ ID NO: 16888 - protein, 165 aa, Unknown
  Obtained from environmental sample
  SIGNAL (1)...(22)
  misc_feature (1)..(165): Xaa is any amino acid
MLETFFIAVTASPVLTCMPSMRRDMSSALLALWFASSLISPATTAKPLPASPADAASIVAFKARRLVLSAILLMTSVTCPISLAATPSLLITSVASLERFMASSAILWASPALVDIWLMLELISSIAEAMVFILADICSAALATSLAFIEAFWAAFAITFIFVET

SEQ ID NO: 16889 - DNA, 927 bp, Unknown
  Obtained from environmental sample
  misc_feature (1)..(927): n is a, c, g, or t
atggacaagccggacctggattatatggaagggcttccccggcaattttccattgaacaaaaaaccacccaccgtaacccccgttccaccgtgggaaccgtcactgaaatttatgattattaccgtctgctctatgcccgcatcggcatcccccactgcccggtctgcggcagggagatccgcgagcaaccggtggattccattattgatacgattttgcagttcaaaaaagggacgcggatacaactgctggccccggtaatccggggcaagaagggcgagcatcaaaaaattattgaggatgcccgcaaggctggttttgcgcgggcaagaattgacggcgttccggtgaatcttgatgaaagcatcaaactggacaagcaaaagaaacacagcattgaaattgtggttgaccgcatcgtgattgaacaggatatccgctcgcggctggcggaatcgacagaaactgccctgcaaaccgcagacgggcttttgctggttctggtcagtgacgaaggcaagaactccgagcaatttttttcgcaaaagaatgcctgcccggactgcggcgtttccattcctgaattgcagccgcgcctcttctcgtttaataacccctttggggcctgccccagttgcaccggactgggggcaaagctggaatttgatcccgatttggtaattcccgatccttccctttcctttaacgagggcggggtcgttccctataaccccgacagcgcatggcaccgcagccgttttgaaagccttgccaaacattataaattcagcctggatacgcccttgtcaaaactgcccaaaaaaatactggacgctattctctggggcagcaaggatgaaataaagatacgttacgataaccgcgagggaacaggacatttgagttcgtcaactcggccgatctga

SEQ ID NO: 16890 - protein, 308 aa, Unknown
  Obtained from environmental sample
  misc_feature (1)..(308): Xaa is any amino acid
MDKPDLDYMEGLPRQFSIEQKTTHRNPRSTVGTVTEIYDYYRLLYARIGIPHCPVCGREIREQPVDSIIDTILQFKKGTRIQLLAPVIRGKKGEHQKIIEDARKAGFARARIDGVPVNLDESIKLDKQKKHSIEIVVDRIVIEQDIRSRLAESTETALQTADGLLLVLVSDEGKNSEQFFSQKNACPDCGVSIPELQPRLFSFNNPFGACPSCTGLGAKLEFDPDLVIPDPSLSFNEGGVVPYNPDSAWHRSRFESLAKHYKFSLDTPLSKLPKKILDAILWGSKDEIKIRYDNREGTGHLSSSTRPI

SEQ ID NO: 16891 - DNA, 801 bp, Unknown
  Obtained from environmental sample
  misc_feature (1)..(801): n is a, c, g, or t
gtggttaaatacgaagatattattcccggaacaaccctcaaggaagaaatagacgaggataccggccatactgaaaagcgtattaccgaattccagcttgagaccaaacagccccgtattcacatcgtggatgaaaatggcaatgagcttgcctcgtatcaccttcccggaggggcgattctgcaggttgatgaaggcgaaaaaatcaaggcggggcgtaccattgccaagatactgaaagaatctgcccgcgccatggacatcacttccggtcttccccgcgtcagcgaattgtttgaagcccgcaagccgcgaagcccggcggaacttgccaaagtttcgggaacggtgttcttccagggaattgtcaaaggcaaacgcaaagtcaccgttcaggacgcatttggccgcgaatacccgcattttattcccatgaccaaacggctcctggtgcgggacggcgacacggtggaagccggagaatctctctgcgccgggtcggtcaatcctcatgacgtactgcatatcctgggcgaaagtacccttcaacgctacctgatggatgaaattcaacaggtataccggttgcagggcgtgtcgattaacgacaagcacatcggcgttataatccgccagatgatgcgtaaggttgagatacgttctgtcggcgatacccggtttatctacggacaaatggtagacaagtaccgcttccatgaagaaaatgcccgtgttattgccgaaggcggtcagcccgccattgcccaacccatgttccagggtattaccaagcgtcgctga

SEQ ID NO: 16892 - protein, 266 aa, Unknown
  Obtained from environmental sample
  DOMAIN (57)...(266): RNA polymerase Rpb1, domain 5
  misc_feature (1)..(266): Xaa is any amino acid
MVKYEDIIPGTTLKEEIDEDTGHTEKRITEFQLETKQPRIHIVDENGNELASYHLPGGAILQVDEGEKIKAGRTIAKILKESARAMDITSGLPRVSELFEARKPRSPAELAKVSGTVFFQGIVKGKRKVTVQDAFGREYPHFIPMTKRLLVRDGDTVEAGESLCAGSVNPHDVLHILGESTLQRYLMDEIQQVYRLQGVSINDKHIGVIIRQMMRKVEIRSVGDTRFIYGQMVDKYRFHEENARVIAEGGQPAIAQPMFQGITKRR

SEQ ID NO: 16893 - DNA, 747 bp, Unknown
  Obtained from environmental sample
  misc_feature (1)..(747): n is a, c, g, or t
atgactatttttcaactggcgcattttgactaccccacggtgcttagaaaattcgaccccaactttactgaagggccgttttcgagtgagccgaaattttcccccgccaaggcggggctgatggttaaagagataggcgagtttttggcagtctcccaggttattaccccggaaaacgactggaaaaccctgttaaaactgctcaggatctgcgccggggaggagatgatcgccgacacccagtttgcccaaatgctgatggggctgcgggatgtaatcaattccaaaatcctggaattgatagttcagtacggaatcaagaatcctgtatgggcctgcaggccgaaaattcctgatgagcgcatcgcagaatcctggctggaggtgagaattgtaaaagcgcaggagtgtatagacagaatcagcaacgccgagaaaaacaagcaaattagcgtattgcttaaggaaattttttacggcggcgatcttacgcatctggaaaactatacgcccgctaaaagcgattttttccgtaataaggaattagcctattatacttatgcggaaggattgaattacctggcggttttcctggacgagtatcttcaaaaagaaatacgagaactgtttgatatattgcttatccgggggcagtggacaaataacaccgattcaaaggaattatcggaagaattccaccaatgctggagctgcccgaagctatcgcaaaattggatgaatccctga

SEQ ID NO: 16894 - protein, 248 aa, Unknown
  Obtained from environmental sample
  misc_feature (1)..(248): Xaa is any amino acid
MTIFQLAHFDYPTVLRKFDPNFTEGPFSSEPKFSPAKAGLMVKEIGEFLAVSQVITPENDWKTLLKLLRICAGEEMIADTQFAQMLMGLRDVINSKILELIVQYGIKNPVWACRPKIPDERIAESWLEVRIVKAQECIDRISNAEKNKQISVLLKEIFYGGDLTHLENYTPAKSDFFRNKELAYYTYAEGLNYLAVFLDEYLQKEIRELFDILLIRGQWTNNTDSKELSEEFHQCWSCPKLSQNWMNP

SEQ ID NO: 16895 - DNA, 447 bp, Unknown
  Obtained from environmental sample
  misc_feature (1)..(447): n is a, c, g, or t
gtgggggtctttgttaatgaagacccccgcttagcgctcgacaccgcacataccgccggggtggacgtcgtgcagctgcacggggacgaaacgcccgagtactgcgccggattcccgatgccggtcatcaaagtattctccgtcggcgcggattttgacccgtccgttatgagccggtacgctaccgccggctacctgctcgacacttgggaccccaaacgacgcggcggcagcgggaacactttcgattggtcaatcgcggctaaagcgtgcggtatgcacgacacagtgatcctatccggcggacttaatccgtccaacgtccgtgaggctgtcgaggccgtacgcccctacgccgtcgaccttaacagcggtgtggaagccggcccgggggtgaaagatcacgacaagataaaggccgccgtctccgccgtcaagggggaataa

SEQ ID NO: 16896 - protein, 148 aa, Unknown
  Obtained from environmental sample
  DOMAIN (2)...(144): N-(5'phosphoribosyl)anthranilate (PRA) isomerase
  misc_feature (1)..(148): Xaa is any amino acid
MGVFVNEDPRLALDTAHTAGVDVVQLHGDETPEYCAGFPMPVIKVFSVGADFDPSVMSRYATAGYLLDTWDPKRRGGSGNTFDWSIAAKACGMHDTVILSGGLNPSNVREAVEAVRPYAVDLNSGVEAGPGVKDHDKIKAAVSAVKGE

SEQ ID NO: 16897 - DNA, 420 bp, Unknown
  Obtained from environmental sample
  misc_feature (1)..(420): n is a, c, g, or t
atgaacgcggatgaaacaatcgccttttacaatacgctcagaaaaacccgcgataaagaatctgtttcaacagagaaagaaaaagaagaaataatcatacacgacatttgcccaatgcttaaaataattaccgacggcgaattattccctattatagttgttaaactcggaggccgcggcgcggtagtaatcgcgggcggaaatgtttaccgcgaggatacatttgcaattattccgcgaaacacagtcggagccggagacgctttttgcgcagccttcatttccgcgtggttacgggacaactcgctttccgagtgcgccgcgcttggaaacaaagtagcgcgggaaatacttgaagttccgggaacacacataaaaagcggaaaattaaaatcgttcgcgaagattttgcagagatag

SEQ ID NO: 16898 - protein, 139 aa, Unknown
  Obtained from environmental sample
  misc_feature (1)..(139): Xaa is any amino acid
MNADETIAFYNTLRKTRDKESVSTEKEKEEIIIHDICPMLKIITDGELFPIIVVKLGGRGAVVIAGGNVYREDTFAIIPRNTVGAGDAFCAAFISAWLRDNSLSECAALGNKVAREILEVPGTHIKSGKLKSFAKILQR

SEQ ID NO: 16899 - DNA, 411 bp, Unknown
  Obtained from environmental sample
  misc_feature (1)..(411): n is a, c, g, or t
atgagcgcctgcactacgcttgccgaacttgccaaacagggaacagacggctatgacgcggtgattcttcccggcggaatgcccggctcaacaaatcttgcggcttcaaaagagacaggctcgctccttaaaaacatggcggcggcggggaaaacaatttgcgctatntgcgccgctcccgctcttgtactcgccccccttggcctgcttaacgggaaaaattttacctgctacccgggaatggaagaaaaagtaaatgaaggcaaatggtcggacagccgcgttgtggcggacgggaatgtgattacaagccgcggcgcgggaacggcgggagagtttgccgccgcgattattgaaaaattactggacaaagctgccgcgaaaaagatagcggacgctgttttactgtaa

SEQ ID NO: 16900 - protein, 136 aa, Unknown
  Obtained from environmental sample
  DOMAIN (3)...(122): DJ-1/PfpI family
  misc_feature (1)..(136): Xaa is any amino acid
MSACTTLAELAKQGTDGYDAVILPGGMPGSTNLAASKETGSLLKNMAAAGKTICAXCAAPALVLAPLGLLNGKNFTCYPGMEEKVNEGKWSDSRVVADGNVITSRGAGTAGEFAAAIIEKLLDKAAAKKIADAVLL

SEQ ID NO: 16901 - DNA, 714 bp, Unknown
  Obtained from environmental sample
  misc_feature (1)..(714): n is a, c, g, or t
ttgctgcccggccttttcaaactgccaagccccgtaaaaccggcgcgaaacgacattattatttttgaaaacccttcatatatttcaagagggcctgttttcgatgtggcccagcggataatttttatgcttaccatttcgctcgtggacatcgacagggatgaagcgggacagccccgcgcccattttttgatcaaaagggctgtagggatggcgggcgaccgttttattttggaaaaaggcgagatgaagatccgtttttcgggcgacgatcgctggacagacgagagggaatacgcggcggcgcaaggatggaagcataacataaaccgcctgatggaaaaagataaatatcaggcgctgcaagcggccggaaaaagcgccgcctggcaggatcttggcttatccgttcctgaacgcctgcggcaggaggctgctccggcaaacagcatccgttttcccgattacctcgcacatgaaaaggccaggcttgaaaccctgcgcggcgccatgcctcatgaccgccgttatgcgacactgctggcaaaaaattcactgggctggtatgtgcctgaaggcaggctgcttccccttggcgacaacagggacaattcgcgggacgggcgctactttggccccgtgcggctttcaaaggtgctgggcaaaggctccgccattttttggcccagtagacggatagggctgatacgctag

SEQ ID NO: 16902 - protein, 237 aa, Unknown
  Obtained from environmental sample
  misc_feature (1)..(237): Xaa is any amino acid
MLPGLFKLPSPVKPARNDIIIFENPSYISRGPVFDVAQRIIFMLTISLVDIDRDEAGQPRAHFLIKRAVGMAGDRFILEKGEMKIRFSGDDRWTDEREYAAAQGWKHNINRLMEKDKYQALQAAGKSAAWQDLGLSVPERLRQEAAPANSIRFPDYLAHEKARLETLRGAMPHDRRYATLLAKNSLGWYVPEGRLLPLGDNRDNSRDGRYFGPVRLSKVLGKGSAIFWPSRRIGLIR

SEQ ID NO: 16903 - DNA, 786 bp, Unknown
  Obtained from environmental sample
  misc_feature (1)..(786): n is a, c, g, or t
atgcgctggctaagggacgactggaatattcagatttggcgttccgccatgtatcttaaagaaggcggatatattacccaaagaaaccttaaatttgtccttgaggaatcggtagacgcggctattaagctgggtatttacgtaataatcgactggcatgtccaccatgaccgcgatcccaacgtatataaagatgaagctctcgaatttttttcagaaatggctaaaaagtacagttcataccccaatattttgtatgaaatctgcaatgaacccaacggcaacgacgtaacatggagcggttcgataaaaccctacgcgcaggaagttattgccgaaataaggaaatatgaccccgataatatcattattgtagggacgcctttatggagccagcgcgtggatacggccgctcttgaccccattcaaagccccaatataatgtataccttgcatttctacgccgggacgagtgggcagaattccatggataagacaaaatttgccgttgaaaaggggcttcccgtctttgttaccgaatgcggcacaactcaggcttcgggcggcggcggagtatatgagaaagaatttctaaattggctggtttttcttaaggagtacggaatttcatgggtaaattggtctgtaaccaacaaaggcgaggattcgggagtattggcttataatgccgaccctaacgccaagggcggctggacagacgaagatttatcgccttctgggcgttttgtaaggcgaattttgagaaacgaaattcgaataaaataa

SEQ ID NO: 16904 - protein, 261 aa, Unknown
  Obtained from environmental sample
  DOMAIN (2)...(224): Cellulase (glycosyl hydrolase family 5)
  misc_feature (1)..(261): Xaa is any amino acid
MRWLRDDWNIQIWRSAMYLKEGGYITQRNLKFVLEESVDAAIKLGIYVIIDWHVHHDRDPNVYKDEALEFFSEMAKKYSSYPNILYEICNEPNGNDVTWSGSIKPYAQEVIAEIRKYDPDNIIIVGTPLWSQRVDTAALDPIQSPNIMYTLHFYAGTSGQNSMDKTKFAVEKGLPVFVTECGTTQASGGGGVYEKEFLNWLVFLKEYGISWVNWSVTNKGEDSGVLAYNADPNAKGGWTDEDLSPSGRFVRRILRNEIRIK

SEQ ID NO: 16905 - DNA, 513 bp, Unknown
  Obtained from environmental sample
  misc_feature (1)..(513): n is a, c, g, or t
atgatagataaattagagcaaattcaaacaatgatttatgaaatccgggggcaaaaagttatgctcgaccttgatcttgctgtattgtatcaggtggaaaccaagaatcttaacaaaactgtaaaaagaaatttgaagcgttttccggctgatttcatgtttcagcttgctgataaagagtgggaaaatttgcggttccaaattggaaccgcaaaaaaagtcgaaaaaacgaggttcaatccatatgtttttaccgaacagggtattgcgatgctctctggtcttttgaacagcgacattgcaattacagttaatattcaaataatgcgggcttttgttaagttaagacattatatacttgatatttcagatactaacgaacaaatagcggaactccgcaaattgcttatgctctatattgaaaagaacgacaagcgagtaaatgaaattattatcgccctgagcaatttaattgaaaatccgccaaaaacaaaaaagataggctttatttaa

SEQ ID NO: 16906 - protein, 170 aa, Unknown
  Obtained from environmental sample
  misc_feature (1)..(170): Xaa is any amino acid
MIDKLEQIQTMIYEIRGQKVMLDLDLAVLYQVETKNLNKTVKRNLKRFPADFMFQLADKEWENLRFQIGTAKKVEKTRFNPYVFTEQGIAMLSGLLNSDIAITVNIQIMRAFVKLRHYILDISDTNEQIAELRKLLMLYIEKNDKRVNEIIIALSNLIENPPKTKKIGFI

SEQ ID NO: 16907 - DNA, 819 bp, Unknown
  Obtained from environmental sample
  misc_feature (1)..(819): n is a, c, g, or t
gtgaggcgttgtcggaaattacaagcctcattacggctaaagcgggcgggaaatgatgatatgaataacggagcgatcctaagcggcatccgcaaagccaaggccgagaaccgccgcgcccactgggtgctgctcgaccccgacgactttaccacggagagggcggcggaggtggcgcgggcctcgcaagatagcggcgtcggcgcgctgcttgtgggcggaagcctgttgcaggcaaaccggattgacgactttgtcaagtcattaagagaggcggtgtctataccggtgatactcttccccggcgacgcgacacagttgtctaggcacgccagcgccctattgtatctgtcattgatatcggggcgcaatccggtcaacctgatcggcgagcaggtgaaggcggcgccgatcatccgccagtacggattggagcctatatcaacaggttacatgctggtggagtccggcgcggtgacctcggtggagtttatgagcggcacccgtccgctgcccaggacaaagcccaacatcgccgccgcccacgccttggccgcgatgtatctggggatggacatgatatacttggaggccgggagcggcgcagcgctgaccgttccggcggagatgatagaggcggtgcgcaagtgcgtggatatccccgtaatagtgggcggggggataagggacgaggagacggcgctggaaaaactgcgggcgggcgccgacatcatagtcaccggaaatttgttgcggaaagaggacgggttggagaggatgagggggatcgcggggcgcgtcagcgggtttcgcgcctga

SEQ ID NO: 16908 - protein, 272 aa, Unknown
  Obtained from environmental sample
  DOMAIN (32)...(268): PcrB family
  misc_feature (1)..(272): Xaa is any amino acid
MRRCRKLQASLRLKRAGNDDMNNGAILSGIRKAKAENRRAHWVLLDPDDFTTERAAEVARASQDSGVGALLVGGSLLQANRIDDFVKSLREAVSIPVILFPGDATQLSRHASALLYLSLISGRNPVNLIGEQVKAAPIIRQYGLEPISTGYMLVESGAVTSVEFMSGTRPLPRTKPNIAAAHALAAMYLGMDMIYLEAGSGAALTVPAEMIEAVRKCVDIPVIVGGGIRDEETALEKLRAGADIIVTGNLLRKEDGLERMRGIAGRVSGFRA

SEQ ID NO: 16909 - DNA, 420 bp, Unknown
  Obtained from environmental sample
  misc_feature (1)..(420): n is a, c, g, or t
gtgcagacgggatcagacgagtcccgttttgatttcagtaaatttaccatattggtctcggaagatgacgcgatcaacagggaagttatggccgcgcttctggaaaagatcggcatttcctttgattttgccgaaaacggcaaaaaggccgtcgccctgtttcaggagcatcccgagaagtacaacatgatcctcatggacgttcacatgccggaaatgaacggatatgaagcgacgcgggcgatacgcgaaagcgtttctccaatcggaaaaaacatccgtattatcgcgcttaccgccgatgtttttaaggaagacatagaaaaatgcctggaggccggcatggacggacatatcggaaaacctgtttatccgaataatttatacgcgatgctcaaaaaacatctgttgacgtcataa

SEQ ID NO: 16910 - protein, 139 aa, Unknown
  Obtained from environmental sample
  DOMAIN (15)...(133): Response regulator receiver domain
  misc_feature (1)..(139): Xaa is any amino acid
MQTGSDESRFDFSKFTILVSEDDAINREVMAALLEKIGISFDFAENGKKAVALFQEHPEKYNMILMDVHMPEMNGYEATRAIRESVSPIGKNIRIIALTADVFKEDIEKCLEAGMDGHIGKPVYPNNLYAMLKKHLLTS

SEQ ID NO: 16911 - DNA, 453 bp, Unknown
  Obtained from environmental sample
  misc_feature (1)..(453): n is a, c, g, or t
gtggaagtaaccgtcaacacattcaaggagtttgtcggtttagacgtgagcccaaggcatcctcattttctggatccggaaaaaggaatggaatgggacatatcggccgttatcggcctttccggcgccgtcaagggagccgtaattgtctccatgaaggctgagttggcaattaaactgaccaacatcctcgccggagagggacatacggaaattgacgccgatgttgtcgatgcgataggcgaaataaacaacatcattgcgggtaacatcaaacccaaagtgccgaacggagataagatagttatttctattcctactattattaaaggaaaagaacattcaattgcgtggccaagcaaacaaacacggatattatgcattcctcataaagcttatgagaatgatatatttcacctgatggtggccattgaattggaacctgagaaataa

SEQ ID NO: 16912 - protein, 150 aa, Unknown
  Obtained from environmental sample
  misc_feature (1)..(150): Xaa is any amino acid
MEVTVNTFKEFVGLDVSPRHPHFLDPEKGMEWDISAVIGLSGAVKGAVIVSMKAELAIKLTNILAGEGHTEIDADVVDAIGEINNIIAGNIKPKVPNGDKIVISIPTIIKGKEHSIAWPSKQTRILCIPHKAYENDIFHLMVAIELEPEK

SEQ ID NO: 16913 - DNA, 366 bp, Unknown
  Obtained from environmental sample
  misc_feature (1)..(366): n is a, c, g, or t
gtgagccccgctctcattgaacgcgtgattgggggcgttaaacaataccgcgccgttatccccctgctccccctgacggaaacccccaaagaaacggacttgccgcttgacggctttgctggctgcgactcttggggtcctgtttttatcaaacaacagttaaagagggggttcatcggaacagcccaaacgccccaggcttttgcttttccggaaattcttgccgcccatgaaaaggccgccgcgcaggagagggagtttaccgatgacgccgaagtctgggcggagttttgcggccccgtcgcggtcatccccggcgagattggaaaccgaaaaataactttcagggaagatatgttatgttaa

SEQ ID NO: 16914 - protein, 121 aa, Unknown
  Obtained from environmental sample
  misc_feature (1)..(121): Xaa is any amino acid
MSPALIERVIGGVKQYRAVIPLLPLTETPKETDLPLDGFAGCDSWGPVFIKQQLKRGFIGTAQTPQAFAFPEILAAHEKAAAQEREFTDDAEVWAEFCGPVAVIPGEIGNRKITFREDMLC

SEQ ID NO: 16915 - DNA, 597 bp, Unknown
  Obtained from environmental sample
  misc_feature (1)..(597): n is a, c, g, or t
atgaagctttccgtttacttttggcgtagtgaggacgccggttatgtttttgattcggaggttctggatgaagttttttccaagggcattgcgtctcttaaaatttctcacaccgactcactttttagaactcaaaaacggaaatctgtacgtgtaaaaaagcataagcctgcctatctttaccctgttttgagcgaagaagaaataaacagaatagaagacagtccgggtatcaaatgttttattgaagacctttccgataccggctgtgccttaacaataggaggaagggcccagtcgggtttgcgtattaaggcgcagtttcatctgaataattccattatttgtatgagcggtactgtccgctcggttgaatacaaggaagatttgaacagatccctgcttcatgttgaggctgatcccctgcctatagaaatcaggaaccagatactgggagatgttttcggtatgcttccggaagatgaggaagagcttcctttcaggatgctgggagaggaagccgaggaaatggctacggaaatagagccggaagaagagggcgaagaattatttgctgccgacaccgaggtctcgtga

SEQ ID NO: 16916 - protein, 198 aa, Unknown
  Obtained from environmental sample
  DOMAIN (45)...(156): PilZ domain
  misc_feature (1)..(198): Xaa is any amino acid
MKLSVYFWRSEDAGYVFDSEVLDEVFSKGIASLKISHTDSLFRTQKRKSVRVKKHKPAYLYPVLSEEEINRIEDSPGIKCFIEDLSDTGCALTIGGRAQSGLRIKAQFHLNNSIICMSGTVRSVEYKEDLNRSLLHVEADPLPIEIRNQILGDVFGMLPEDEEELPFRMLGEEAEEMATEIEPEEEGEELFAADTEVS

SEQ ID NO: 16917 - DNA, 708 bp, Unknown
  Obtained from environmental sample
  misc_feature (1)..(708): n is a, c, g, or t
atgaaagtaggaacagtcaaggaaatcaaaaagcacgaataccgtgtcggcttgactccaaatgctgtgggggcgtacaaaaatgccggaaacaccgtctttgtggaaaaaggcgccggggaaggatcaggctataccgacgatcagtacgtcgccgccggggcaaaaatcctgccgtcagccaaggatgtatgggcggaagccgaaatggtggtgaaggttaaggaaccgcttgaagccgaatacggtctaatccgtgaaaaccagattttgtacacctatctgcaccttgcgccggataagccgcagaccgaagcgcttttaaaagcgaagtgcatagccgtcgcttacgagaccatcaaggacaaaaaaggacagcttccctgcctaaagccaatgagtcagattgcgggccgccttgcgatacaggaaggggcaaaataccttgaaaaaccagagggcggcaggggcgtactgctctccggcgttcccggcgttccccacgcggaaatcgtggtgctgggagcgggcgttgtcggcgcaaacgcggtaaaaatcgcggtaggtatcggcgcacatgtaacggttgttgacattaaccttgacaggcttgaatacctggaagacatctacggctcaagggtttccacgctcttttctacgcctgaaaacgtgacgaaatttgcccaggcgactcggccaatctga

SEQ ID NO: 16918 - protein, 235 aa, Unknown
  Obtained from environmental sample
  DOMAIN (149)...(235): Alanine dehydrogenase/PNT, C-terminal domain
  misc_feature (1)..(235): Xaa is any amino acid
MKVGTVKEIKKHEYRVGLTPNAVGAYKNAGNTVFVEKGAGEGSGYTDDQYVAAGAKILPSAKDVWAEAEMVVKVKEPLEAEYGLIRENQILYTYLHLAPDKPQTEALLKAKCIAVAYETIKDKKGQLPCLKPMSQIAGRLAIQEGAKYLEKPEGGRGVLLSGVPGVPHAEIVVLGAGVVGANAVKIAVGIGAHVTVVDINLDRLEYLEDIYGSRVSTLFSTPENVTKFAQATRPI

SEQ ID NO: 16919 - DNA, 324 bp, Unknown
  Obtained from environmental sample
  misc_feature (1)..(324): n is a, c, g, or t
gtgcaagccgccgttaagctcctgaaagacaggaatgtaaaatttgtttttgacggcgaattgcaggccgacgccgcgcttgtcccttcggttaccgatcagaaagctccgggcagcccggtaaaaggcaaggttaacactctgatcttcccggatctcggcgcgggcaatatcggctataagctggtgcagcggcttggcaacgccctggctttcgggcctttactccagggtttcgcgaagcccataagcgatctttcccgcggcgcctccgttgatgacatcgtaacgacctgcgcgataacgctgtcacgagcgaagtaa

SEQ ID NO: 16920 - protein, 107 aa, Unknown
  Obtained from environmental sample
  DOMAIN (1)...(103): Phosphate acetyl/butaryl transferase
  misc_feature (1)..(107): Xaa is any amino acid
MQAAVKLLKDRNVKFVFDGELQADAALVPSVTDQKAPGSPVKGKVNTLIFPDLGAGNIGYKLVQRLGNALAFGPLLQGFAKPISDLSRGASVDDIVTTCAITLSRAK

SEQ ID NO: 16921 - DNA, 429 bp, Unknown
  Obtained from environmental sample
  misc_feature (1)..(429): n is a, c, g, or t
gtggaagacctggcaagtgtttacggcctcggggaaattaccgcgaagataatagttgagggtcttgcggaaaccgcggacgagatggacgcgactcttgggactggcgttatcagcatagcagggcctccgagtgaggaagcccagcctatgcggggactttcgttttgtttcaccggggagcttgcctctatgaagcggaaccaggcggaagaaaagatcaaagcccttggggcatcggcgaagaaaacggtagtgaaaggtctttcatacctggtcaccaacgatcccggctccggctccgccaaaaacaagaaggccagggagttaggaatagccatcatcaacgaggagcaatttttggaattacttgccagccctgtgggcgctaaaaatccaacgccgcctgcccaaggcgaactgttttaa

SEQ ID NO: 16922 - protein, 142 aa, Unknown
  Obtained from environmental sample
  DOMAIN (46)...(124): BRCA1 C Terminus (BRCT) domain
  misc_feature (1)..(142): Xaa is any amino acid
MEDLASVYGLGEITAKIIVEGLAETADEMDATLGTGVISIAGPPSEEAQPMRGLSFCFTGELASMKRNQAEEKIKALGASAKKTVVKGLSYLVTNDPGSGSAKNKKARELGIAIINEEQFLELLASPVGAKNPTPPAQGELF

SEQ ID NO: 16923 - DNA, 555 bp, Unknown
  Obtained from environmental sample
  misc_feature (1)..(555): n is a, c, g, or t
ttggattttgccggtattttcggcaacaacaatcctgtcatcgttgaaataggctttggcatgggcaaggcgacagcccttattgccggggaaaacccggataaaaactatgtagggcttgagatccacaaaccggggataggccgcctcctctgggaaatagagcagcgttccctttcaaatgtcaggataatcgaacatgacgcgaccgaggtttttcagaacatgatccccgaaaattcgcttgacgggacgcatattttcttccccgatccctggcccaaaaaacgccaccacaagcgcaggctgatacagcggccttttacggattgtattagttcaaggttaaagccgggggggtatatctacatggtcagcgactggctggactacgccaattgggcgctggctgtgttaaccgataccgaaggcttggttaacgaatatgggggctttagcccgccccaaacatggcggccccttacaagttttgaaaaaaaaggtcttgacaagaaacatgaaataaaggaattgtttttcaggcggagcctatga

SEQ ID NO: 16924 - protein, 184 aa, Unknown
  Obtained from environmental sample
  DOMAIN (2)...(183): Putative methyltransferase
  misc_feature (1)..(184): Xaa is any amino acid
MDFAGIFGNNNPVIVEIGFGMGKATALIAGENPDKNYVGLEIHKPGIGRLLWEIEQRSLSNVRIIEHDATEVFQNMIPENSLDGTHIFFPDPWPKKRHHKRRLIQRPFTDCISSRLKPGGYIYMVSDWLDYANWALAVLTDTEGLVNEYGGFSPPQTWRPLTSFEKKGLDKKHEIKELFFRRSL

SEQ ID NO: 16925 - DNA, 390 bp, Unknown
  Obtained from environmental sample
  misc_feature (1)..(390): n is a, c, g, or t
atggacatagccgatacgggcgtgcgcgtaacggaagaaggcgtgaccatcagcatttcgaatatacagttcctggcgaattccgccgaactgcctgagaaggaaaaacaggcaatcgccgaaatagccaagatactccgctcggttccgggcagaaagctccttatcgccgggcataccgctcttgccggagtcgcgcgcgaaagggtgcgcatctcgcgcgagcgggcgcaggcggtcgctgattaccttgtctttttgggctcgcgcaggcgggacgaaatagtcgtcactggatacggagccgaaaagcccgtcgcggataacaagacggctgaagggatggcgcttaacagaagagtcgagattacactgctggaggacaaataa

SEQ ID NO: 16926 - protein, 129 aa, Unknown
  Obtained from environmental sample
  DOMAIN (23)...(119): OmpA family
  misc_feature (1)..(129): Xaa is any amino acid
MDIADTGVRVTEEGVTISISNIQFLANSAELPEKEKQAIAEIAKILRSVPGRKLLIAGHTALAGVARERVRISRERAQAVADYLVFLGSRRRDEIVVTGYGAEKPVADNKTAEGMALNRRVEITLLEDK

SEQ ID NO: 16927 - DNA, 357 bp, Unknown
  Obtained from environmental sample
  misc_feature (1)..(357): n is a, c, g, or t
atggatcatataaccgccgaagtacagcaggcggttgccgcctcgggcgtgacagagggtatctgcctggtgtttgtgcctcataccaccgcggcggtaacgataaacgaaaacgccgatccggatgtcccccatgacgtgggattggctctggatcggatttcgcccgaccggcgggaatttcaccacagtgaaggtaattcggcggcccataccaagtcaagcctggtggggccgtccattacattgatcgtctcgggcggaaagcttcttttgggaacatggcaggggatttggttcaacgaatacgacggccctcgcagcagaaaggtacatgtgagggtgatgggggagtaa

SEQ ID NO: 16928 - protein, 118 aa, Unknown
  Obtained from environmental sample
  DOMAIN (1)...(116): Uncharacterised protein family UPF0047
  misc_feature (1)..(118): Xaa is any amino acid
MDHITAEVQQAVAASGVTEGICLVFVPHTTAAVTINENADPDVPHDVGLALDRISPDRREFHHSEGNSAAHTKSSLVGPSITLIVSGGKLLLGTWQGIWFNEYDGPRSRKVHVRVMGE

SEQ ID NO: 16929 - DNA, 414 bp, Unknown
  Obtained from environmental sample
  misc_feature (1)..(414): n is a, c, g, or t
ttgacattgacagagattcagaaattaaacgggactgagaacatagatgcgaatttgcataccgggagagtccgggtggacgttaagccgccatcggggacaaaaacggccacgacggtaaaagggccgtcctcgacagcgtctgttcggggtaccgtctttgaatttgacagcgacaacctgtatgtaagcgaagggacggtaagctatatcgggaaccgcggccagtacgttatagtcagggccggggaaaacagccgcctgaaacagacagggcaggcggcctacccgagggacggcaggaactcggacttaatgcccccgaaccctgtcgggacaagcgccgcagacgcccttgtttccagccctgttgtaacaggggcagactttgacacaggactggaattcaattga

SEQ ID NO: 16930 - protein, 137 aa, Unknown
  Obtained from environmental sample
  misc_feature (1)..(137): Xaa is any amino acid
MTLTEIQKLNGTENIDANLHTGRVRVDVKPPSGTKTATTVKGPSSTASVRGTVFEFDSDNLYVSEGTVSYIGNRGQYVIVRAGENSRLKQTGQAAYPRDGRNSDLMPPNPVGTSAADALVSSPVVTGADFDTGLEFN

SEQ ID NO: 16931 - DNA, 582 bp, Unknown
  Obtained from environmental sample
  misc_feature (1)..(582): n is a, c, g, or t
ttgacgtatttgacgcccgatgaaagggcggagatgagaaaaaggctcggtgcctttaacggggattctaccctgacgcagatacggaacagcctgatgcgcatagtaaccgacccctaccccaataccgtggacgaggacttaaaacttctcgtgcaaataggcatcggcacggacattcgaagaacgggaggggcaaatcctgccaaacttcgcggctatcttgaaattgacgaaaaagtcctggatgccgcgcttgccacaaaacttcccgcagtaaaacagctctttggttcggatacaaccggagatctcattgttaataccggaatagcatacgcagtagaaaaccttacaaaaccttacgttgaaagcaccggaatatttgccctaaaaaccggcaacattgattccaaaatccagcaggaaagccgccgtattgaaaccctcgatcgccagcttgcggccaaggaagcggaattgagaaagcaatacgcccagatggaaggggcgtacaaccggatggaacaaatgggaacctccatggaccgcttctcacagcagaacaacaacaatagataa

SEQ ID NO: 16932 - protein, 193 aa, Unknown
  Obtained from environmental sample
  DOMAIN (1)...(177): Flagellar hook-associated protein 2 C-terminus
  misc_feature (1)..(193): Xaa is any amino acid
MTYLTPDERAEMRKRLGAFNGDSTLTQIRNSLMRIVTDPYPNTVDEDLKLLVQIGIGTDIRRTGGANPAKLRGYLEIDEKVLDAALATKLPAVKQLFGSDTTGDLIVNTGIAYAVENLTKPYVESTGIFALKTGNIDSKIQQESRRIETLDRQLAAKEAELRKQYAQMEGAYNRMEQMGTSMDRFSQQNNNNR

SEQ ID NO: 16933 - DNA, 873 bp, Unknown
  Obtained from environmental sample
  misc_feature (1)..(873): n is a, c, g, or t
ttgcgtttccgcgcactttctgattttttgcagagcgaaagtttgggtttattggataatctgaattttccagcagcgggggaggtttgccattctggcaatctgggtatttctgcacaggctttgtgggttagcgcaaagtttttaaagaactcaaagtcaattttgataataacaaaagagcaaaaatccgtggatttatggcttgaaaacctatgtttgcaaatagatgaaagcgatttgctttcattgccccttacaaaagaggcagacaaagctaggattttcagcggaattttggaagaaaagttgaaatttatccaaaacgcggcagccggttctaaagttgttgttgcaagcgcagaagcactcaaaacaaaattgccatctgcaaaacgcttaaaagaaaaatccctgaatttgaaagtaggcgatattttaagagaagaaaatttgcaggaaatttttatatcaagaggattcagggaacagcctgttgtggagagtgttggggatttttccataagaggttgcgttatagacataaacccgcttttgcgcgaacaccccatacgcatggaactctggggcaatacattggaatccataagaacctttgatatatttacgcaaaggtctctggaaaatttagagagcatagagattttcccaatgaatttgcacgaggaaaatgatagctttgcatttgattttttaagagattatttaatagcaacagaagattattacagcctgccgctggaattttcagaggaattgtcaaaacattcaatagtgaatttttctgttttaaacaatgccaaatcctcaaatcaaataattcccccaactcgctcaaaattccggttttga

SEQ ID NO: 16934 - protein, 290 aa, Unknown
  Obtained from environmental sample
  misc_feature (1)..(290): Xaa is any amino acid
MRFRALSDFLQSESLGLLDNLNFPAAGEVCHSGNLGISAQALWVSAKFLKNSKSILIITKEQKSVDLWLENLCLQIDESDLLSLPLTKEADKARIFSGILEEKLKFIQNAAAGSKVVVASAEALKTKLPSAKRLKEKSLNLKVGDILREENLQEIFISRGFREQPVVESVGDFSIRGCVIDINPLLREHPIRMELWGNTLESIRTFDIFTQRSLENLESIEIFPMNLHEENDSFAFDFLRDYLIATEDYYSLPLEFSEELSKHSIVNFSVLNNAKSSNQIIPPTRSKFRF

SEQ ID NO: 16935 - DNA, 588 bp, Unknown
  Obtained from environmental sample
  misc_feature (1)..(588): n is a, c, g, or t
gtgggaatggttcaaagctggcagcgcgttaaatgccttatgcaaaacttctccttgaaggcagcaaaatacgacttggtttccaagccccaagaagaacttgcggagggcttgtttgaactttccctagactacttgccagatactccgcctaccctgctggatgtgggttgtggaactggacatttgagccttgacttggcaagcctttttccaaaaagtttggactgcttggatatttccaaagagatgctttctttatgcaaagaaaaattgcaagcaaattttccaaatataaaatggcggctttttgaaaacgatgcggaaaattttgaaccaaacgaaaaatacgatgcaatttattgcagcgcgacaattcaatggttcaacaacctccctgcatttttggcaagagcaaaaaaatggctgaacccaaacggcattttggcagttggcgcatttggcgaaaaaactctctgcgaactgcacaaggcatatcttgaagcaacaggcaggcagttggaaacaaaagccaaattttacccattggacaaattaaaaattattttcaaaaaatccnggttttga

SEQ ID NO: 16936 - protein, 195 aa, Unknown
  Obtained from environmental sample
  DOMAIN (23)...(184): Methyltransferase small domain
  misc_feature (1)..(195): Xaa is any amino acid
MGMVQSWQRVKCLMQNFSLKAAKYDLVSKPQEELAEGLFELSLDYLPDTPPTLLDVGCGTGHLSLDLASLFPKSLDCLDISKEMLSLCKEKLQANFPNIKWRLFENDAENFEPNEKYDAIYCSATIQWFNNLPAFLARAKKWLNPNGILAVGAFGEKTLCELHKAYLEATGRQLETKAKFYPLDKLKIIFKKSXF

SEQ ID NO: 16937 - DNA, 318 bp, Unknown
  Obtained from environmental sample
  misc_feature (1)..(318): n is a, c, g, or t
atggagccacgttttttgggcgttgtagcggttatagcaaaaagcttgncacgcattcacgaaacaaatttaaaaaagcaaggaatgcttgcactttgctttgccgataaaagcgactacgataaaattttagaaaatgacatcttggaaatttcagggctttgcgaatttagtccgggttgtcaattcacgcttcttttgcaccacgcagatggaacaaatgaaaaaatcctcttgaatcagtcttacaacgaaagccagtgggaatggttcaaagctggcagcgcgttaaatgccttatgcaaaacttctccttga

SEQ ID NO: 16938 - protein, 105 aa, Unknown
  Obtained from environmental sample
  misc_feature (1)..(105): Xaa is any amino acid
MEPRFLGVVAVIAKSLXRIHETNLKKQGMLALCFADKSDYDKILENDILEISGLCEFSPGCQFTLLLHHADGTNEKILLNQSYNESQWEWFKAGSALNALCKTSP

SEQ ID NO: 16939 - DNA, 489 bp, Unknown
  Obtained from environmental sample
  misc_feature (1)..(489): n is a, c, g, or t
atgctcctttaccacggaacaaacactcactttgaagcacccaaaataattgctccaaatagagctttagattttggtacaggtttttacaccacaagcaataagaaacaggcgaaggactgggctaatgtggttgtcaaaagagcaaattctggaaaagctttgttaaatatttatgaattagatgaaagttatactcaaaagttaaatgtaaaaaaattcgagaaaattggtaaagaatggctggattttgtttgcgaacataggttagaaacctataaaggcgatagctacgatttgattattggagcggttgcaaatgatagaacaatgcctgttttgcaaggttatatgaatgcaaaaaacaaagatttatatgcacctgtggcattgagcgaaattcaggcagagaaactgactgaccagtatgtatttaaaaatgatttggctttaaattttttgcatttgcaggagatagtagaattatga

SEQ ID NO: 16940 - protein, 162 aa, Unknown
  Obtained from environmental sample
  misc_feature (1)..(162): Xaa is any amino acid
MLLYHGTNTHFEAPKIIAPNRALDFGTGFYTTSNKKQAKDWANVVVKRANSGKALLNIYELDESYTQKLNVKKFEKIGKEWLDFVCEHRLETYKGDSYDLIIGAVANDRTMPVLQGYMNAKNKDLYAPVALSEIQAEKLTDQYVFKNDLALNFLHLQEIVEL

SEQ ID NO: 16941 - DNA, 837 bp, Unknown
  Obtained from environmental sample
  misc_feature (1)..(837): n is a, c, g, or t
ttgttgacctcaaggatgtgcaggngctttgaaccacaaaagataatgatcctctgcacgggtacgcaggcggaacccttgagcggccttgccaggctgctcaaaggcgaagtgaaaggaattaaaccatcattgggtgacaggctgatactaagcgctaggcccatccccggcaacgaagtgcccatttctagactgctggacagggcggcgcggctgggactggagacctctaccgccgactttgagccagtgcatgtaactggccacgcccagatggaagacgctgcgctgatgatggatctgctaaagcccgaatatgtcatccccgcgcatggcacttttcggctgctgctcggccacgctaagttggcgcagtccaggggctgggctgcggacaaaacgcccctgctggaggacggacagtgcctacagttgttcagcgacggtggttctaggctggcgggggtcgtccccgtgggcaggtgcttcgtcttggacggcctagagagaagggttgatgcgcgggtggtacacgacaggctgataatgcaggaagatggcatagtggtggccacgatacagataaacaaacaggggaaaatggtgggtgagccatccatcctcagccgcggattcgtcatcctcaacgacgacgaggcatacagcgggctgctaaaagagacgcttcgccaaaccttcagcgaagccccgaatgaagtgcaaaaggacagggagcttctgtcagagctgctgcgccagtccctaaagaggatcatcaggaaaacaacccaaacccgccccatcatcgtgtcgctggtattggatgcaaagtag

SEQ ID NO: 16942 - protein, 278 aa, Unknown
  Obtained from environmental sample
  DOMAIN (76)...(116): RNA-metabolising metallo-beta-lactamase
  misc_feature (1)..(278): Xaa is any amino acid
MLTSRMCRXFEPQKIMILCTGTQAEPLSGLARLLKGEVKGIKPSLGDRLILSARPIPGNEVPISRLLDRAARLGLETSTADFEPVHVTGHAQMEDAALMMDLLKPEYVIPAHGTFRLLLGHAKLAQSRGWAADKTPLLEDGQCLQLFSDGGSRLAGVVPVGRCFVLDGLERRVDARVVHDRLIMQEDGIVVATIQINKQGKMVGEPSILSRGFVILNDDEAYSGLLKETLRQTFSEAPNEVQKDRELLSELLRQSLKRIIRKTTQTRPIIVSLVLDAK

SEQ ID NO: 16943 - DNA, 684 bp, Unknown
  Obtained from environmental sample
  misc_feature (1)..(684): n is a, c, g, or t
ttgaaaaataaaattataggcacatctaatttattccatgcagactgtatggacttaatggcaaccctgcccgataaaagcattgatttagccatcgttgatccgccgtggggagttaaggcgggatgttcgggtctaaaaaataaaaaaaagacgatgaaaatatataacgatattccgccaaatgctgattattttcaagaattattcagggtatctaaaaatcagattatgtgcggagctaatttttttattgattatcttcctaatagggctactggatgggtattttgggataaatgcaatcattataagatattttcagacggcgaattgatatgggtatcgcttgaaaataaagtagttaaattcacatttgatatgggatacaatagaggatttgattataagaaaagaatacatcctaacgaaaaaccactggcattatataaatggcttttatcaaaatacgccaaaaacggcgataaaattctggacacccattttggcagtggttctatagcggtagcctgtaatgaactaggctttgacttgacggcttgcgagattgacgaagactattatgctgccgcttgtaagcgtataaatgaggctgtaaaacacagggcgatttattcagcngtggcgtatgaaaataaatatagaacatggggggctaaatga

SEQ ID NO: 16944 - protein, 227 aa, Unknown
  Obtained from environmental sample
  DOMAIN (28)...(200): DNA methylase
  misc_feature (1)..(227): Xaa is any amino acid
MKNKIIGTSNLFHADCMDLMATLPDKSIDLAIVDPPWGVKAGCSGLKNKKKTMKIYNDIPPNADYFQELFRVSKNQIMCGANFFIDYLPNRATGWVFWDKCNHYKIFSDGELIWVSLENKVVKFTFDMGYNRGFDYKKRIHPNEKPLALYKWLLSKYAKNGDKILDTHFGSGSIAVACNELGFDLTACEIDEDYYAAACKRINEAVKHRAIYSAVAYENKYRTWGAK

SEQ ID NO: 16945 - DNA, 339 bp, Unknown
  Obtained from environmental sample
  misc_feature (1)..(339): n is a, c, g, or t
ttggactatatacaacaattaattcaaaggtatccttccctggaatcactcaagagcaatataagcgcggcgtttgacattattgcggattcatacacaaagggcggtaaactgctgatagcgggaaacggcggaagcgcttccgacgccgaacacattgccggcgaattgatgaaaacttttgaaaaaaagagatcactgcctgattctttcattatggatattaaaaaagttaatattgaaatntgccgaataccttattccgcgtatgcagcccgggcttcctacaatcgcgctttcaggtcacgcctcgctaacacggcggataactcgcgataa

SEQ ID NO: 16946 - protein, 112 aa, Unknown
  Obtained from environmental sample
  misc_feature (1)..(112): Xaa is any amino acid
MDYIQQLIQRYPSLESLKSNISAAFDIIADSYTKGGKLLIAGNGGSASDAEHIAGELMKTFEKKRSLPDSFIMDIKKVNIEXCRIPYSAYAARASYNRAFRSRLANTADNSR

SEQ ID NO: 16947 - DNA, 522 bp, Unknown
  Obtained from environmental sample
  misc_feature (1)..(522): n is a, c, g, or t
atggagttctatgaaaatgagcgcgtaattgttaatccgcttcgcctgaaacgctggatcagaaacgagattgaatcatcgttgattctatattataccggagtttcaagagaaagcgcgaatattattaacgaacaaattaaacatacgcaaaaaggcgattcaaaaaacattgaaagcatgcatgagatgaaaagacaggcggtaattatgaaagaatcgcttttaaagggagatttcaaaggtttctccggttgtcttttaaacggctggcttgccaagaaaaacgccgccgcttcaatctccaattcatttttggatgagctgtatcaatacgcgcttgacaacggcgcggaatcggctaaaatttcaggcgcgggcggaggcggctttatgatgatatactgtaacccctgcaaaaaaatcacgctcatcagggcattaaaggaaaaagaaggtatggtattgacaccttcttttaccgagataggaacacaggcttggactatatacaacaattaa

SEQ ID NO: 16948 - protein, 173 aa, Unknown
  Obtained from environmental sample
  DOMAIN (71)...(155): GHMP kinases C terminal
  misc_feature (1)..(173): Xaa is any amino acid
MEFYENERVIVNPLRLKRWIRNEIESSLILYYTGVSRESANIINEQIKHTQKGDSKNIESMHEMKRQAVIMKESLLKGDFKGFSGCLLNGWLAKKNAAASISNSFLDELYQYALDNGAESAKISGAGGGGFMMIYCNPCKKITLIRALKEKEGMVLTPSFTEIGTQAWTIYNN

SEQ ID NO: 16949 - DNA, 879 bp, Unknown
  Obtained from environmental sample
  misc_feature (1)..(879): n is a, c, g, or t
atgtgcgcttattacaagaaaaaacgcgcagaacttccgaaacttgactatgaacacgcaattatggcgtgtaccgattcaaaccctgtatttatccgtaaaatcgaatattacgcgtggcgtgaaattgacgacgagaatcatcttgagatggctcagaaagaaatactgccgcttattctggaaaatgaatcgttacgccaaattcgccgcgaagtcctgttaaatccgggaccggcgacgacaagcgacagcgttaaatacgcccaggtttgcgccgacatctgtccgcgtgaaaaagaattcggcgatgttatgaaatggatttgcaaagagcttaccgcccttgttgctgatccgtccgaatatgaaactgtctttttcggcggttctggcactgccgccgatgaagcgatgatttcttcctgcgttcccgaagccgggcatatccttattgtcgataacggctcttatggcgaacggcttgcgaaaatagcctctgtttataaaatcaaccacactgtatataaaagctcaacttacgaaaaaattaatttaaccgctcttgaaaatgaatttaaaacaggcaaatatacccatcttggcattgtgtaccacgaaaccacaacaggcttgcttaacccccttgatgtaatatgcccgcttgcaaagaaatatagtatagttacaatagttgacgcggtaagcatatacgccggaatgcctatggaactgtccaaactaggtattgattttatggcttccacttccaataaaaatattcagggaatggcgggcgttggttttgttatctgcaaaaagagcgagcttgaaaaacaaaaacattcccatgcgaaactattacctgaatatttatga

SEQ ID NO: 16950 - protein, 292 aa, Unknown
  Obtained from environmental sample
  misc_feature (1)..(292): Xaa is any amino acid
MCAYYKKKRAELPKLDYEHAIMACTDSNPVFIRKIEYYAWREIDDENHLEMAQKEILPLILENESLRQIRREVLLNPGPATTSDSVKYAQVCADICPREKEFGDVMKWICKELTALVADPSEYETVFFGGSGTAADEAMISSCVPEAGHILIVDNGSYGERLAKIASVYKINHTVYKSSTYEKINLTALENEFKTGKYTHLGIVYHETTTGLLNPLDVICPLAKKYSIVTIVDAVSIYAGMPMELSKLGIDFMASTSNKNIQGMAGVGFVICKKSELEKQKHSHAKLLPEYL

SEQ ID NO: 16951 - DNA, 738 bp, Unknown
  Obtained from environmental sample
  misc_feature (1)..(738): n is a, c, g, or t
ttgtggaaacgggaaccgttgtttcagtatttgaaacgccaaaaacccaggcggcgcgggagatgtttcatgcccagtgaaaaaataatggaagtgctgtccatgctgccggcggcgacggcggaaaccgcctacatgacctttgtgtcaacctttttcgcctgtgtgctgggttttcccctgggggtgtacctgtacgccgcctcccccgccggtcttgccccgaagcgggtactgtacaacgtcctttcccgcctggtgaatattttccgttcgcttcccttcatcatactgatgattctgctgatacccctgacgcggatgatcatcaagaccagcatcggacccacggcggtgattatccctctttccatagccgccgcgccatttgtcgcccgcgtcgcggaatccgccctgtccgaagttgaccccggcgttataactgcggccagggcaatgggttcgacgaattttcagcttatccgcaaagtgctgattcccgaatctttgcccgctttggtttccggccttgccctgaccgtcatcaacttaatcggctattcggcaatggcgggggcaatcggcggcggcggcctgggcgaccttgccatacgctacggctattaccgcttcaggacggacgtaaccatcggcgcggtcattgtcatactgatactagtagaagcggttcaactcatcggctctgcaatcagccgcaccctgctttccaaacgctga

SEQ ID NO: 16952 - protein, 245 aa, Unknown
  Obtained from environmental sample
  DOMAIN (40)...(243): Binding-protein-dependent transport system inner membrane component
  misc_feature (1)..(245): Xaa is any amino acid
MWKREPLFQYLKRQKPRRRGRCFMPSEKIMEVLSMLPAATAETAYMTFVSTFFACVLGFPLGVYLYAASPAGLAPKRVLYNVLSRLVNIFRSLPFIILMILLIPLTRMIIKTSIGPTAVIIPLSIAAAPFVARVAESALSEVDPGVITAARAMGSTNFQLIRKVLIPESLPALVSGLALTVINLIGYSAMAGAIGGGGLGDLAIRYGYYRFRTDVTIGAVIVILILVEAVQLIGSAISRTLLSKR

SEQ ID NO: 16953 - DNA, 756 bp, Unknown
  Obtained from environmental sample
  misc_feature (1)..(756): n is a, c, g, or t
atgtccttgccgtcattcggaaggacggtcgcgggtaagggtctttcgctgattgcttttgatacctgctacggagcgttgttggaagtagcttatcaggttagaaaagacgctgagctttttgtcggatccgaaggtgaaataatgtcaacgggctgggattatacagctttgtttacagattttatcgggaagcgaaacctttcgatttccaatcttggcgacgcgattcaaaatcagttcagtgagcattacgcttcgctcaacaacgcgacaatatcgcagatacaattatcgcaggttaataacctttattcgcggttcaatgatttttcaggcgcggttgccgaagcgatatctgacgaaccggccaaagacgctgttttgaaccaaatacttcacaacgtggaaagttatttctttacttcctttccttcggacatgtacattgatattcttgattttgctaaaaaaacggcggcaataagggaactcattacaacagacgcggatcaacaggaggcaatttttaagtcggccaacaaactggaggaggctctggctctggtggttccttcatcatgggcaaaaaacggaacaagcaaaaaaatcggggtgcatctaattccgttacagggcattgcggttccggctgccaggcatgaattagcgtatatcanaggcagtatggctatagacaagagcgccttcgtcgaagattcgagcattgggcgcctaacgctgttcctaaaatga

SEQ ID NO: 16954 - protein, 251 aa, Unknown
  Obtained from environmental sample
  misc_feature (1)..(251): Xaa is any amino acid
MSLPSFGRTVAGKGLSLIAFDTCYGALLEVAYQVRKDAELFVGSEGEIMSTGWDYTALFTDFIGKRNLSISNLGDAIQNQFSEHYASLNNATISQIQLSQVNNLYSRFNDFSGAVAEAISDEPAKDAVLNQILHNVESYFFTSFPSDMYIDILDFAKKTAAIRELITTDADQQEAIFKSANKLEEALALVVPSSWAKNGTSKKIGVHLIPLQGIAVPAARHELAYIXGSMAIDKSAFVEDSSIGRLTLFLK

SEQ ID NO: 16955 - DNA, 840 bp, Unknown
  Obtained from environmental sample
  misc_feature (1)..(840): n is a, c, g, or t
ttgcatgaagacagatcagtgcttcgtttcatggaagagggttttttaaggagtatgcctgaaaaaacgacggtgtttctgatttcccgttccatatcccgcctgaatatcgcggatatgttttcccgcggccaggtattcaacataaacgaaaatgacttcctttttacaaaaaacgagcttggtctgtatttccgccaacagggtatgtcattccggccggaaagcttgcgcgagatcatgcaggataccgaaggttgggcgtttgctattagccttatcgcgcgttcctgccagagagcgcccggctacggcggatatgtgcgtaacgcggtgaagttgaatctcttccggtttttggaaacggaaatatgggacgggatttcaaagcgtctgcaggaatttttggtccgcctttcactcatcggtcacctgtccgttgacctgatttccaggctgtcagaaggggaagaaggattgatcgcggaaatggagagacaaagcgcgtatatccggcgggacagttatatcaacgcgtacctcattcaccctctgtttttggaattcctgaaaacaaaacaggaattgctttcggaaaaacaaaaaaaggaaacctacgccgtttcaggcgattggtgcgctcataacggttttaagatagacgccatttcctaccatgagaagactggaaactatcaggcaatactgctgattttaaccgggttaagcacccaaataccgcaggatatcgcgaaatacgcggccgctgtctttgaccgcgcgcctgatgaagcgttcgaaaagacggaattcctcgcggatatgcacttgcgtacctaa

SEQ ID NO: 16956 - protein, 279 aa, Unknown
  Obtained from environmental sample
  misc_feature (1)..(279): Xaa is any amino acid
MHEDRSVLRFMEEGFLRSMPEKTTVFLISRSISRLNIADMFSRGQVFNINENDFLFTKNELGLYFRQQGMSFRPESLREIMQDTEGWAFAISLIARSCQRAPGYGGYVRNAVKLNLFRFLETEIWDGISKRLQEFLVRLSLIGHLSVDLISRLSEGEEGLIAEMERQSAYIRRDSYINAYLIHPLFLEFLKTKQELLSEKQKKETYAVSGDWCAHNGFKIDAISYHEKTGNYQAILLILTGLSTQIPQDIAKYAAAVFDRAPDEAFEKTEFLADMHLRT

SEQ ID NO: 16957 - DNA, 789 bp, Unknown
  Obtained from environmental sample
  misc_feature (1)..(789): n is a, c, g, or t
atggccaaacttagagaaaacgtccccccgcacgatgatgagcttgagcgcgccgcactcggcagcttgctcgccgacagtcaggctatagacgcggtcaggcagaaccacctgaggcaggaggatttttactcaagggcacatcagaggattttcgagacaatcagcgcgcttgacattcataacctcacccccgatatacaaactgtaatacaggaactcaagcaaaacggcaaacttgacgaggccggcggggcggcctatgttgcctcccttacctcggtcgttccctccagcgcgaatatcgaatactacatagagtcggtgcttgatcattcgctgagacgttccctgctccgcgtcgcctctgacataggcgtgacagcctacgatgagtccatggaatcgcatgagatactggataaagtcgaagagagtatttacaaactccgggacgaaaggcaggctttcccctacaaaaaattaagcgaggttttgctacctacgtttgacaaaatagaggaagtgtatagaaccaagaacgccctgaccggaatcccctccgggtttgaaaagctggacgaaatgacaaccggcttccagccggccgattttatcattatcggcgcgcggccttccgtgggcaaaaccgccctcgccctgaatatggccgcccatatcgctttcaagaacaaaattccaatcgcgtttttctcgctggagatgaccgatatgtccctggcgcagcgccttatttcagcgccgcgcaggtggacggaaataaaatga

SEQ ID NO: 16958 - protein, 262 aa, Unknown
  Obtained from environmental sample
  DOMAIN (182)...(262): DnaB-like helicase C terminal domain
  misc_feature (1)..(262): Xaa is any amino acid
MAKLRENVPPHDDELERAALGSLLADSQAIDAVRQNHLRQEDFYSRAHQRIFETISALDIHNLTPDIQTVIQELKQNGKLDEAGGAAYVASLTSVVPSSANIEYYIESVLDHSLRRSLLRVASDIGVTAYDESMESHEILDKVEESIYKLRDERQAFPYKKLSEVLLPTFDKIEEVYRTKNALTGIPSGFEKLDEMTTGFQPADFIIIGARPSVGKTALALNMAAHIAFKNKIPIAFFSLEMTDMSLAQRLISAPRRWTEIK

SEQ ID NO: 16959 - DNA, 462 bp, Unknown
  Obtained from environmental sample
  misc_feature (1)..(462): n is a, c, g, or t
ttgcctgagctggatgaggcgaaggaaatagcgcagtatattgtttctcaatacctgtggggaatattcagtgaagtccatatcgtatatacgcacatgtacagttccatcaaacttgttccacgggaaaggcagcttttacctcttaacactgaaataatgcaaaaagaatttgaaaaattcggaggaaagcgcgagaaactcagttttgaatattggccttcaaaagaagacgtatttgacgcccttgttcccctatatgtaaaagggataatatacggctcccttgtggaagcttatgtaagcgaacaaagcgcccgtatgtccgcgatggacgaggccagcaagaacgcggaagaaatgctcggcgatttgcagataaactataaccgcgcgaggcaggcgggcattacccaggaaatgacagaaattgtcggcggggcggaagcgttgagcgactaa

SEQ ID NO: 16960 - protein, 153 aa, Unknown
  Obtained from environmental sample
  DOMAIN (1)...(151): ATP synthase
  misc_feature (1)..(153): Xaa is any amino acid
MPELDEAKEIAQYIVSQYLWGIFSEVHIVYTHMYSSIKLVPRERQLLPLNTEIMQKEFEKFGGKREKLSFEYWPSKEDVFDALVPLYVKGIIYGSLVEAYVSEQSARMSAMDEASKNAEEMLGDLQINYNRARQAGITQEMTEIVGGAEALSD

SEQ ID NO: 16961 - DNA, 924 bp, Unknown
  Obtained from environmental sample
  misc_feature (1)..(924): n is a, c, g, or t
gtgggcggtatagttggattctgtctacataccccaaaaatcaccaatacttatttcatgggcaatgtaaccggaggtaattatgtaggtggtatagttggaaaattactatttaataataatgaaactattatctccaatacttacgtcataggcggcgtaactggaagtgatagtgtaggtggcatagttggatatatagacttcgataaagtcaccatcttcaatacttatttcataggcgatgtaaccggaggtagtagtgtaggagccgtagttgggtacaatagaagtggtacagtcattgcaacaaactctttctacaattccaacgttccaagcatatacggcactgcaaagaccactgaagaaatgaaaaatattctcacctatattgcaagcgactgggatttcaattccatctgggcaatagacccaggcgtgaacagtagctatccctttttgcaaacttcaacatattacacaaatggcaaaaaacaaatctcagaagcaagcaatattccaagcacggtggaactttacacaggttcgccaattcaacctattgtggataacgttatgtataaaggaacaaaattaacaaaaggaacggattacgatgtgctgtattacaacaacgtgaacgctggcaacgaggctaaaatcataatagttggcaagggcaattattatggcaccaaaaccgtgaatttccacataaccgaccaaaaaaggaatatagctgatgtcacaatagaccccattatcccagaacagataaaaggcgactcaatcaagccaaaaccgattgtaagagatttcaacaatacggcaactctcagggaaggcaaagactatgccttggaatactacgaaaataaatatgccggacaggcgattaaaaaattctctcggccgatctga

SEQ ID NO: 16962 - protein, 307 aa, Unknown
  Obtained from environmental sample
  misc_feature (1)..(307): Xaa is any amino acid
MGGIVGFCLHTPKITNTYFMGNVTGGNYVGGIVGKLLFNNNETIISNTYVIGGVTGSDSVGGIVGYIDFDKVTIFNTYFIGDVTGGSSVGAVVGYNRSGTVIATNSFYNSNVPSIYGTAKTTEEMKNILTYIASDWDFNSIWAIDPGVNSSYPFLQTSTYYTNGKKQISEASNIPSTVELYTGSPIQPIVDNVMYKGTKLTKGTDYDVLYYNNVNAGNEAKIIIVGKGNYYGTKTVNFHITDQKRNIADVTIDPIIPEQIKGDSIKPKPIVRDFNNTATLREGKDYALEYYENKYAGQAIKKFSRPI

SEQ ID NO: 16963 - DNA, 687 bp, Unknown
  Obtained from environmental sample
  misc_feature (1)..(687): n is a, c, g, or t
atgatcagagatgcgccacagcagaggttatctccaatgatttctcgtatgcagaaacttgataatataaaaaaaataacagcggaaaccgatacgcttattgaattgatatatgaatatagatatatcgtaaaaacctttgaatggcaaattatacgggaaataattatagataggcttgaaggatcaaggcgaagtataagtggtcataaaattgaggcgagtgtacggacaagctttgttgcatctgttcagcattatttctcgatttataataactatggaaaatttaagaaaattgaatttgccgataaacaaataaaaatagggagacatacagtagatatatctgctagactgattcctaaaaataaagaggatgtggaaagtattcttattccggtaaaaacaagggaaacggaaggaggcggacattcacatttgtttactcgtgatattatgtccgcaataactgacataaagaataatatgaaaaaccatcaccttgttgtggttataattgctgaaaattggtctccagaagaacttgttactattgatgaaaccattgatattatttttcattttaatatgaacccaaataaatttgttggttttgatgaaaaatctcagcaaaaattaaataaatatatggagtcattatttaagaaaaggaatagaaagtga

SEQ ID NO: 16964 - protein, 228 aa, Unknown
  Obtained from environmental sample
  misc_feature (1)..(228): Xaa is any amino acid
MIRDAPQQRLSPMISRMQKLDNIKKITAETDTLIELIYEYRYIVKTFEWQIIREIIIDRLEGSRRSISGHKIEASVRTSFVASVQHYFSIYNNYGKFKKIEFADKQIKIGRHTVDISARLIPKNKEDVESILIPVKTRETEGGGHSHLFTRDIMSAITDIKNNMKNHHLVVVIIAENWSPEELVTIDETIDIIFHFNMNPNKFVGFDEKSQQKLNKYMESLFKKRNRK

SEQ ID NO: 16965 - DNA, 348 bp, Unknown
  Obtained from environmental sample
  misc_feature (1)..(348): n is a, c, g, or t
ttgaatgaaacggaaaatgttatcaataaaaaggagaacgtcctggccttctttgtcgcggaaatgttccgccatggtcagccccgcaagagcgaccctcatgcgcgctccgggtggttcgttcatctgaccgaatacaagcgctgttttatcaataacaccgctctcgttcatttctttccagagatcggcgccttcacgcgagcgctctcctacgccggcaaataccgagtagccggaatgttctgtggctatatttcgaatcaactccataatgataacggttttccctactcccgcgccgccgaaaagtccgacctttccgccttttgcgtaaggtgcaattaa

SEQ ID NO: 16966 - protein, 115 aa, Unknown
  Obtained from environmental sample
  misc_feature (1)..(115): Xaa is any amino acid
MNETENVINKKENVLAFFVAEMFRHGQPRKSDPHARSGWFVHLTEYKRCFINNTALVHFFPEIGAFTRALSYAGKYRVAGMFCGYISNQLHNDNGFPYSRAAEKSDLSAFCVRCN

SEQ ID NO: 16967 - DNA, 630 bp, Unknown
  Obtained from environmental sample
  misc_feature (1)..(630): n is a, c, g, or t
atgacagatcggacagactaccctgagataatcaggatgcagatgcgcgccatagcggaggccgccctcaacgtcggaaagaagggcgtgaaggccatcccggaagtcatggtgcccctggtaggcacggtcaaagagctcgtctacaccaaggcggagatgcttgccgaaatagccgaggtcaacaaagagcgcggcaccaatttcagttgcccgataggcaccatgatcgaaataccgcgcgccgccataaccgccgaccaagtggccgcggaggccgactacttcagcttcggcaccaacgacctgacgcagatgggcttcggcttcagccgcgacgacgccggctccttcctgccggagtatgtccgcaagaagatactggacgacgacccgttccagacgctcgaccagcagggcatcggcgaactggtcagaatcgcgtgcgaaaagggcaggtccgtgaagtccgacttgaagctgggggtatgcggcgaacacggcggcgacccgcgctccgtcaaattcttcttcaagtgcggtttgaactacgtcagttgcagccccttccgcgtccccatagcaatcctggccgccgcgcaggcaagcatagagaaaaacaaggcgtaa

SEQ ID NO: 16968 - protein, 209 aa, Unknown
  Obtained from environmental sample
  DOMAIN (2)...(204): PEP-utilising enzyme, TIM barrel domain
  misc_feature (1)..(209): Xaa is any amino acid
MTDRTDYPEIIRMQMRAIAEAALNVGKKGVKAIPEVMVPLVGTVKELVYTKAEMLAEIAEVNKERGTNFSCPIGTMIEIPRAAITADQVAAEADYFSFGTNDLTQMGFGFSRDDAGSFLPEYVRKKILDDDPFQTLDQQGIGELVRIACEKGRSVKSDLKLGVCGEHGGDPRSVKFFFKCGLNYVSCSPFRVPIAILAAAQASIEKNKA

SEQ ID NO: 16969 - DNA, 822 bp, Unknown
  Obtained from environmental sample
  misc_feature (1)..(822): n is a, c, g, or t
gtgcggggcagtgaagtttcccgcagtccgcagttgatactcgaagaaatccgcttggttggcgagcgcggagtacgggaaattaccctgctggggcaaaatgtcaacagctacaactggaacaatggggagttacacttcgccgacctgttacgaataatcgccgccgaagcagaaaaaagcggcatcagatggctgaggttcctttccgccaatcccaaagatttctcgccggagacggttcgggtaatggcggaaaaccgggtattttgccgccatctgcacctctgcgtccagcatggctcaaaccggattctcgccgcaatgaaccggggctacacccgcgaacattacctttccctggtcaaagagatacgctccgccatgccggaaatcagcctttccaccgacattttgatcggttttcccggcgaaacagaggacgatgtgcgggaaaccctgtcgctcatggaggaagtacagtttttatatgcctatatgtaccattacaacccgcgggaaggaaccgccgcctatggtttgccggacaggataagcgaggaagtcaagcgggaacggctttcccgggtgataaatttgcagaaaaagcatacctcggcgctgctcaaaaagcgaataggagcgcgagaaacggtattagtagagggaatttcccgaaaaaatgccgatgaattagtaacacgcactgaaagagatgaaatggccgtcgcccccggtccggcctccctgatcggctctttcgccgaacttaccctttcgggcttgcggggaaatactttccgtgcaaaggaaatttcatga

SEQ ID NO: 16970 - protein, 273 aa, Unknown
  Obtained from environmental sample
  misc_feature (1)..(273): Xaa is any amino acid
MRGSEVSRSPQLILEEIRLVGERGVREITLLGQNVNSYNWNNGELHFADLLRIIAAEAEKSGIRWLRFLSANPKDFSPETVRVMAENRVFCRHLHLCVQHGSNRILAAMNRGYTREHYLSLVKEIRSAMPEISLSTDILIGFPGETEDDVRETLSLMEEVQFLYAYMYHYNPREGTAAYGLPDRISEEVKRERLSRVINLQKKHTSALLKKRIGARETVLVEGISRKNADELVTRTERDEMAVAPGPASLIGSFAELTLSGLRGNTFRAKEIS

SEQ ID NO: 16971 - DNA, 882 bp, Unknown
  Obtained from environmental sample
  misc_feature (1)..(882): n is a, c, g, or t
atgttatcaaagaatgaaacgaccggtttgtcggaaatcggcaacgaccttgccagcaacatgaccgagaccgccgccgcgatcaatcaaattaacgccaatatccagagcatcaagggacgcgtcattaaccagagcgccagcgttaccgagaccaacgccacaatggaacaggttatcaccaatatcaacaaacttaacgatcaggtggaaaaccagagcaataatatttcccaggcgtcgtccgccattgaacaaatggtggcgaatataggttccgtgacaaacactcttgtcaacaacgcggagaatgttaagacattggaagaagcttccgaaataggacaccacggactggaagagatggccgccgacattaaggaaatcgcaaaagaatcggaaagcctcctaaaaattaattccgtaatgaaagacattgccagccagaccaacctgctttcgatgaacgccgcgatagaagcggctcacgcgggcaatgccggaaaaggttttgccgtagtcgccgacgaaatccgtaaactggctgaaagctcaggcgagcagtcaaaaattataggtgatgttttgaaaaaaattaaaaacgccatcgacaagttaagcggttccacagaaaacgtgcttaccgaattcaacgcgattgactcaggcgttaagactgtggcgctgcaggaagacaatatccgcaacgcgatggaagaacaaggcgagggaagcaaacagatacttaccggcgtcagcaatgtaaatgaaatcacccgccaggttaagggcggcagcacgcaaatgcttgaaggcagcagggaagtaattaatgaaagccacaacctgaaattgtacgcagaaatctgtccatctgcctga

SEQ ID NO: 16972 - protein, 293 aa, Unknown
  Obtained from environmental sample
  DOMAIN (71)...(284): Methyl-accepting chemotaxis protein (MCP) signaling domain
  misc_feature (1)..(293): Xaa is any amino acid
MLSKNETTGLSEIGNDLASNMTETAAAINQINANIQSIKGRVINQSASVTETNATMEQVITNINKLNDQVENQSNNISQASSAIEQMVANIGSVTNTLVNNAENVKTLEEASEIGHHGLEEMAADIKEIAKESESLLKINSVMKDIASQTNLLSMNAAIEAAHAGNAGKGFAVVADEIRKLAESSGEQSKIIGDVLKKIKNAIDKLSGSTENVLTEFNAIDSGVKTVALQEDNIRNAMEEQGEGSKQILTGVSNVNEITRQVKGGSTQMLEGSREVINESHNLKLYAEICPSA

SEQ ID NO: 16973 - DNA, 480 bp, Unknown
  Obtained from environmental sample
  misc_feature (1)..(480): n is a, c, g, or t
ttgaaggggcttggcagaaacgtgaaggttaccaccgtcgccaataccgccgaagcggcgaaaatggtggcggaatccgatcggaacgatgttgcggctcttgcttcccgttcgtgctgcgatctttacgccttgaaatgccttgacagctcaatacaggacaggggcaacaactatacgcggttcatctgtatctccaaaaacctcgaaatatatccgggagccgatcgtaccagcgtcatgctgactacctcgcacaagcccggctcgctttacaaggtgcttggccttatatacacccttggcgtgaatgtcgtaaagctggaaagccgcccgatcccagaccgcgatttcgagttcatgttttattttgatcttgaaacatcggtatattcaaaaaaattcagccagcttatgtgcgaactggaaaatttgtgcgaggaatttcactatctcggcagttacacagaaattgtttaa

SEQ ID NO: 16974 - protein, 159 aa, Unknown
  Obtained from environmental sample
  misc_feature (1)..(159): Xaa is any amino acid
MKGLGRNVKVTTVANTAEAAKMVAESDRNDVAALASRSCCDLYALKCLDSSIQDRGNNYTRFICISKNLEIYPGADRTSVMLTTSHKPGSLYKVLGLIYTLGVNVVKLESRPIPDRDFEFMFYFDLETSVYSKKFSQLMCELENLCEEFHYLGSYTEIV

SEQ ID NO: 16975 - DNA, 450 bp, Unknown
  Obtained from environmental sample
  misc_feature (1)..(450): n is a, c, g, or t
ttgaatgtgaaggttgtaaccaaggcttacggtcttattgatgttgatgagcgccagaagataattttcccccagggtttgttcgggtttgagaatctgacagactacctgctccttgacgcggaacgccagccgttttattggctgcaatcaatagacatggaacaggttgcctttgtactgctcagtccctttctgttccggcccgattacgaactgaacatcagcaatgaagaacttgccgagataggcataaacgcgccggaaaaggccctggtcttttcgatagttaccatcccaccggacggcagccccattaccgccaacttacaggggccgctgattatcaaccgcgacaccagaacgggcaagcaggcggtgctgtccgatgcccgctggaaaaccaagcacgatattatgacagagctggcggcgacggggaatgtataa

SEQ ID NO: 16976 - protein, 149 aa, Unknown
  Obtained from environmental sample
  DOMAIN (19)...(142): Uncharacterized BCR, COG1699
  misc_feature (1)..(149): Xaa is any amino acid
MNVKVVTKAYGLIDVDERQKIIFPQGLFGFENLTDYLLLDAERQPFYWLQSIDMEQVAFVLLSPFLFRPDYELNISNEELAEIGINAPEKALVFSIVTIPPDGSPITANLQGPLIINRDTRTGKQAVLSDARWKTKHDIMTELAATGNV

SEQ ID NO: 16977 - DNA, 447 bp, Unknown
  Obtained from environmental sample
  misc_feature (1)..(447): n is a, c, g, or t
gtgcgcctcggctggtcgattgttccaaaagcgctcaagtacgcgggaggcgagaacgtcaacgcggactggaaccgcatcgcgggaactatttttaacggcgcgtccaatatcgctcaggcggggggacttgccgcgttagacgacatgggacttaaagaaatccgcgagctgactgatttttatcttggaaacgcgaaattgattaggggcgcccttcaaaagctgggaataaaatgtataggcggagacaattccccatacatctgggcgcattttcccggcaaggacagttgggaagtgttctcccaaatccttgaaaagtgttatgttgtaaccacccccggagccggtttcggtcccgccggacaaagcttcatccgcttctcagccttcggccacagagccgatgtcgaagaagcgtgtaaacgccttagcaaaatataa

SEQ ID NO: 16978 - protein, 148 aa, Unknown
  Obtained from environmental sample
  misc_feature (1)..(148): Xaa is any amino acid
MRLGWSIVPKALKYAGGENVNADWNRIAGTIFNGASNIAQAGGLAALDDMGLKEIRELTDFYLGNAKLIRGALQKLGIKCIGGDNSPYIWAHFPGKDSWEVFSQILEKCYVVTTPGAGFGPAGQSFIRFSAFGHRADVEEACKRLSKI

SEQ ID NO: 16979 - DNA, 891 bp, Unknown
  Obtained from environmental sample
  misc_feature (1)..(891): n is a, c, g, or t
atgtccgttgattaccgccgcttcatgtcagacagcttgctggaaaatttcaagatggaaagagacgctattcggaaaacagatattaatacgcccatcactaccaacatgatgggtacatacaaataccttgattattttaaatgggcaagggaaatggatatagtctcctgggataattatccgtcatataataccccctggagcatggtagccatgtgccacgatctgatgcgtggtttgaaaaacaaaccatttatgctgatggaacaaactcccagccagcagaattggcagccctacaactccttgaaacggccgggccaaatgcgcgcgcagagttaccagactctggcccatggcgccaatacgatacagtttttccagatgcggcgctctataggagggtgtgaaaaatttcatggcgcggtaattgaacatgcgggaaccgaaaacgcaagagtattccgcgaagttgcatgtttagggaaagaattacaaaaattagattccggttttttggatgcccgcaattccgccgaggttggaatcatttttgattgggagaattattgggcgctggaatacaccagcgggccaaataaagacttgaagtattgtgaccaaatccatcaatattatcagtatttctatgataacaatatccctgtagatatgatcccggtagatgcggatttttcaaattataaattgattatcgcgccggtattatacatggtaaaagacggcatggccgggcggctggaacagcttgttgagaatggcggcatctttgttacaggctttatgagcggcattgttaatgagaacgacaatgtccatctgggagggtatcccggaccgcttcgcaaactggccggtgttgggtga

SEQ ID NO: 16980 - protein, 296 aa, Unknown
  Obtained from environmental sample
  DOMAIN (1)...(169): Beta-galactosidase
  misc_feature (1)..(296): Xaa is any amino acid
MSVDYRRFMSDSLLENFKMERDAIRKTDINTPITTNMMGTYKYLDYFKWAREMDIVSWDNYPSYNTPWSMVAMCHDLMRGLKNKPFMLMEQTPSQQNWQPYNSLKRPGQMRAQSYQTLAHGANTIQFFQMRRSIGGCEKFHGAVIEHAGTENARVFREVACLGKELQKLDSGFLDARNSAEVGIIFDWENYWALEYTSGPNKDLKYCDQIHQYYQYFYDNNIPVDMIPVDADFSNYKLIIAPVLYMVKDGMAGRLEQLVENGGIFVTGFMSGIVNENDNVHLGGYPGPLRKLAGVG

SEQ ID NO: 16981 - DNA, 720 bp, Unknown
  Obtained from environmental sample
  misc_feature (1)..(720): n is a, c, g, or t
atggccgttacatcaaatgaaagtattaatttaagtcagacgggattattgtataatcctcagctgcaggacgacaaaacagttgaaaaattgtttgtggtacgccaaaaacaatttgaattattattgaatagaatattacaagaaaatgaaaacagcataccacagcattatcttattatcggacagcgagggatgggtaaaaccatgcttctcaagagaatggaagttgaattgcataaagagcaataccggcggctgtttattcccctgctttaccgcgaagaacaatacaatgtaaaagatctcgctgaattttggttgaatactttggacgctttggcggacagcttgaaagcggaaaaatatccggctcaaatggtagcggatattgataaaactataatggaactgtcaagaaaacaatctaaaattatttcagaagaagcgtataaatacttaatggatatttgttgtaatataaaccgcagacccgtgttattgatagataatataggattgatattcagcagactggataatgacaaagaaagtaaaacggaacaatgggctttgcgtaaactgctaagtgaaaatggagcgcctattgtcgtaagcggaggcgttacccttattgacagcgtanataattacggtatgcctttttatgatttcttccaaatttcacactttataaattggaatatgtttgattcataa

SEQ ID NO: 16982 - protein, 239 aa, Unknown
  Obtained from environmental sample
  misc_feature (1)..(239): Xaa is any amino acid
MAVTSNESINLSQTGLLYNPQLQDDKTVEKLFVVRQKQFELLLNRILQENENSIPQHYLIIGQRGMGKTMLLKRMEVELHKEQYRRLFIPLLYREEQYNVKDLAEFWLNTLDALADSLKAEKYPAQMVADIDKTIMELSRKQSKIISEEAYKYLMDICCNINRRPVLLIDNIGLIFSRLDNDKESKTEQWALRKLLSENGAPIVVSGGVTLIDSVXNYGMPFYDFFQISHFINWNMFDS

SEQ ID NO: 16983 - DNA, 342 bp, Unknown
  Obtained from environmental sample
  misc_feature (1)..(342): n is a, c, g, or t
atgagaaaaatattaaaaattgtaagtattgttttttttcttttctttgtaatgtcctgcggggatttacctgaaacatttaaagtaatttattatactaacggaagcacatccggatttcaacctaccgataataacaaatacaaatcgggcgaatatgcgactgttcttggtaaaaatacattagtaaaagaagacaaaaattcttccggacaggtaataaaagaatatcaattcgacggttggaataccaaagcggattattcaggagaaacgtataaagaaggcgctcaaattcagataaataaaacaaatatacttttttttcctgtttggaagtga

SEQ ID NO: 16984 - protein, 113 aa, Unknown
  Obtained from environmental sample
  SIGNAL (1)...(19)
  misc_feature (1)..(113): Xaa is any amino acid
MRKILKIVSIVFFLFFVMSCGDLPETFKVIYYTNGSTSGFQPTDNNKYKSGEYATVLGKNTLVKEDKNSSGQVIKEYQFDGWNTKADYSGETYKEGAQIQINKTNILFFPVWK

SEQ ID NO: 16985 - DNA, 468 bp, Unknown
  Obtained from environmental sample
  misc_feature (1)..(468): n is a, c, g, or t
gtggtaacgccggtgcgccgcgccttgaccagcaagcccctcatggtaaaactttcacctaacgcgccggatttgaccgccgtcgcccgcgcctgcatcaacgcgggggccgatgccctttcgctggtcaacacattcaaagcgatggcaatagacgtacaaaagcgcaaagtagtttttgacaatatcagcgcggggctttccggcccggcaattaaacccattgcccttcgcatggtatgggagttgtgcagggaattaaaaccggctgttcccattgtggggtttgggggcattgccggcgccaatgacgcgctggaattccttatggccggcgcggcggcaatacaagtcggttccgccacctttgcccaccccgcaaccatgatcgaaattattgacggcattgaggattatatgcgccgccgcgatattgccaaactggaagatattgccattcgcggttaa

SEQ ID NO: 16986 - protein, 155 aa, Unknown
  Obtained from environmental sample
  DOMAIN (1)...(140): Dihydroorotate dehydrogenase
  misc_feature (1)..(155): Xaa is any amino acid
MVTPVRRALTSKPLMVKLSPNAPDLTAVARACINAGADALSLVNTFKAMAIDVQKRKVVFDNISAGLSGPAIKPIALRMVWELCRELKPAVPIVGFGGIAGANDALEFLMAGAAAIQVGSATFAHPATMIEIIDGIEDYMRRRDIAKLEDIAIRG

SEQ ID NO: 16987 - DNA, 855 bp, Unknown
  Obtained from environmental sample
  misc_feature (1)..(855): n is a, c, g, or t
ttggccgaggtgggccttgataccgcggcagaatatgttcctcccgccgaacggcggcgggccgcatccgacgcggaagcggttctggcttttaacaaggcgctggtagactctacttttgacgctgcggcgtgttacaaagtacagatcgcctactatgaagaaatgggtatcgccggactttcggcttacgcgcaaacattgcggtatatccgcgaaaagggcggtttggttattgccgacattaaacgcggcgacattgccgataccgccagccgttatgcgaaagcccattttgcgggggactttgaggcggactttgttaccctctcaccctatatgggtatggactccattgagccctggctttcctatgccgacagcgcgggcaagggggcctttgtgctgatgcgaaccagcaataaaggcatgcgtgattttgagtaccttgaaatagcgccggacaaaaggcggctgtatcacgcggtcggggacaaactcactgagcttgccgccgcgcattccggcatatacgattatggagcgtttggcgcggtcgttggctgtaccgaacaggaagaagccgctgaaattcgcaagatgtatccccgcttgtttttccttattcccggttatggggcgcagggcggcgcggcggatgacgctgccttgctgttacgcgaagggaacggcggcgtggtcaatgcctcgagatccatactcaaggcgtggagcgccgagttaaaagattccggcggcgatgaatcggcggcagctaactcattcgcggcggaggcggcccgcagggcggcgcttgtcatgcgtgacgcgataagggcggcggtaaaaaaatga

SEQ ID NO: 16988 - protein, 284 aa, Unknown
  Obtained from environmental sample
  DOMAIN (2)...(251): Orotidine 5'-phosphate decarboxylase / HUMPS family
  misc_feature (1)..(284): Xaa is any amino acid
MAEVGLDTAAEYVPPAERRRAASDAEAVLAFNKALVDSTFDAAACYKVQIAYYEEMGIAGLSAYAQTLRYIREKGGLVIADIKRGDIADTASRYAKAHFAGDFEADFVTLSPYMGMDSIEPWLSYADSAGKGAFVLMRTSNKGMRDFEYLEIAPDKRRLYHAVGDKLTELAAAHSGIYDYGAFGAVVGCTEQEEAAEIRKMYPRLFFLIPGYGAQGGAADDAALLLREGNGGVVNASRSILKAWSAELKDSGGDESAAANSFAAEAARRAALVMRDAIRAAVKK

SEQ ID NO: 16989 - DNA, 573 bp, Unknown
  Obtained from environmental sample
  misc_feature (1)..(573): n is a, c, g, or t
atgccgttcccggagaaaatcggcagcttttgcccgcgtatgagggtcgcgaggccgtctatgcacgacatgccggtctggatgaagttccgggggtattcccgcgccacggggttgatggcgcggccgttcacgtcgcgcaccgtttcggcgtacacctcgcccatgccgtccagcgggcggcacagcccgtcgaacacacggcccagtatctcctccgacaggcgtatttccatcggccgcccggtgaaacgcgccgtggcgttgttgaggctcatgtcgtgcgtgccctcgaaaaccagcaccacggccttgtcgccgtctatgcgcaccaccctgcccgttttttccgtcacggactcgccgttgcgcaccttgaaacgcactatctcctggttggccggcgcggccacgccttccagcacgaccagcgagccgttgatttcgttaagaccggcgtattccatctatgacctcacccacgcggcacattgtcgtaaaattcgtctatgcagccgaaatacctgtccagtttctccagctcgtcgttgcccacgtcgtattttatgttga

SEQ ID NO: 16990 - protein, 190 aa, Unknown
  Obtained from environmental sample
  misc_feature (1)..(190): Xaa is any amino acid
MPFPEKIGSFCPRMRVARPSMHDMPVWMKFRGYSRATGLMARPFTSRTVSAYTSPMPSSGRHSPSNTRPSISSDRRISIGRPVKRAVALLRLMSCVPSKTSTTALSPSMRTTLPVFSVTDSPLRTLKRTISWLAGAATPSSTTSEPLISLRPAYSIYDLTHAAHCRKIRLCSRNTCPVSPARRCPRRILC

SEQ ID NO: 16991 - DNA, 351 bp, Unknown
  Obtained from environmental sample
  misc_feature (1)..(351): n is a, c, g, or t
ttggagatcgtgaagctgatcggcgcggacgtgctgccggacgaccagcggctggtgctggcgatagcccgagtcatacgcgtgggctttctgcagcagaacgcttaccatgcctttgacacttacgtgccgttcgccaagcagctgaaaatgatggagatcatactctaccttaacgcggcctgccagcgcctggtgacgcaaggcataccgatgagcgtgataaacggccatgacattttcgagcgcgtgatcaacataaaatacgacgtgggcaacgacgagctggagaaactggacaggtatttcggctgcatagacgaattttacgacaatgtgccgcgtgggtga

SEQ ID NO: 16992 - protein, 116 aa, Unknown
  Obtained from environmental sample
  DOMAIN (1)...(115): ATP synthase alpha/beta chain, C terminal domain
  misc_feature (1)..(116): Xaa is any amino acid
MEIVKLIGADVLPDDQRLVLAIARVIRVGFLQQNAYHAFDTYVPFAKQLKMMEIILYLNAACQRLVTQGIPMSVINGHDIFERVINIKYDVGNDELEKLDRYFGCIDEFYDNVPRG

SEQ ID NO: 16993 - DNA, 714 bp, Unknown
  Obtained from environmental sample
  misc_feature (1)..(714): n is a, c, g, or t
atgttcattctgtgcaatcctcataaccctgtcgggcgcgtttggaaacgcgatgaactggagcgcatgggtgaaatagctttgaggcatggcgtgattgttatcgccgatgaaatccaccaggattttgtttttcaaggccgatggcctgaccaagggcacaaacatcttgtattcgccgaccttaacagggatttcgcggatataaccgttacctgcacatcgccgtcaaaaacttttaatctcgccggattgctctgcgccaatatttttatttccaacaaggaactgcgtgaaaaattcaacagggaatataatggctgcgggttaagccagccgggcgtaatggggcttgtcgcctgcaaagcggcgtatgaggacggggccggatggctggagcagcttcttgactaccttgccggaaatatgttatttctcaaaacatatctttcaaagcacattccgaagatcaagcttattgaaccggagggaacatatcttgcgtggctggattgcaatgaacttggaatttccgcaaacaaacttgacgaaacgcttataaataagggaaaattatggctgagttccggtttgtcattcggaaaaggcggaagcgggtttgagcgcatgaataccgcctgccctcatccggttttacagaacgcgctggaacggttaaaaagtgtggattgngaaagcgtagagaggaaatag

SEQ ID NO: 16994 - protein, 237 aa, Unknown
  Obtained from environmental sample
  misc_feature (1)..(237): Xaa is any amino acid
MFILCNPHNPVGRVWKRDELERMGEIALRHGVIVIADEIHQDFVFQGRWPDQGHKHLVFADLNRDFADITVTCTSPSKTFNLAGLLCANIFISNKELREKFNREYNGCGLSQPGVMGLVACKAAYEDGAGWLEQLLDYLAGNMLFLKTYLSKHIPKIKLIEPEGTYLAWLDCNELGISANKLDETLINKGKLWLSSGLSFGKGGSGFERMNTACPHPVLQNALERLKSVDXESVERK

SEQ ID NO: 16995 - DNA, 336 bp, Unknown
  Obtained from environmental sample
  misc_feature (1)..(336): n is a, c, g, or t
atggttgcggcggcggcatttatcgtaataattaaatcttactcctacttaaggattgcgtcttttgacatatttgccatagggttacgcgcactgttgatttccttcctgcttgcccgtcatcccggcgatggcgcgtatattgcattagccgcgctttgtcttgggtacggaagcggcgaataccgcgcgggctaccttattctgaaaccgctggctttttatcttgtggcaataggcacatttatagatgtaacgttaggcgctttaggctcttatgtagcggcccgtaccagcggatttgtagaagaaaataatctggtacgatttatctaa

SEQ ID NO: 16996 - protein, 111 aa, Unknown
  Obtained from environmental sample
  misc_feature (1)..(111): Xaa is any amino acid
MVAAAAFIVIIKSYSYLRIASFDIFAIGLRALLISFLLARHPGDGAYIALAALCLGYGSGEYRAGYLILKPLAFYLVAIGTFIDVTLGALGSYVAARTSGFVEENNLVRFI

SEQ ID NO: 16997 - DNA, 333 bp, Unknown
  Obtained from environmental sample
  misc_feature (1)..(333): n is a, c, g, or t
atgnaagaaaaaattgtcgcggacattttctcgattcaaaaagttatagacccgcttgaagaaatgtactattcggtcatttcaaaacagaacgccggaaaaacggctgtcagaaccgaaacccccgatgaagtatcaggccttaaaacttcgcttgaaaaattaaaaagcgaggccgttgtccgctcaacaaagaacaaagaattgctttccaaacgtatacttgaactgcgtcaggaaataaaaaccctgcgaaacaacccctacgcggcaagaggcagacgctccttcggcgaatcaaattccgcatcccttgtagacttaaaaggctaa

SEQ ID NO: 16998 - protein, 110 aa, Unknown
  Obtained from environmental sample
  misc_feature (1)..(110): Xaa is any amino acid
MXEKIVADIFSIQKVIDPLEEMYYSVISKQNAGKTAVRTETPDEVSGLKTSLEKLKSEAVVRSTKNKELLSKRILELRQEIKTLRNNPYAARGRRSFGESNSASLVDLKG

SEQ ID NO: 16999 - DNA, 840 bp, Unknown
  Obtained from environmental sample
  misc_feature (1)..(840): n is a, c, g, or t
atgccattgggcgagcagtgcggaatgcatttgccggcaaaaaccggaatagccggcattgcggtgttttcaattgtcgtaggtataactgctacactggcggaaccggcagtggctgtacttcagcagcagggtagcgttataccgccgtggaatgcccctcttttatacctgctcttgaaccgtggaaccaaatggcttgtagcggcaatagcgtcaggagtgggactttcggtagtactgggtgtgtaccgttttatgttcggctggggttttaaaccgccggtattcatcattattcccatccttgttattttaagctgcatatttgatgaaaaccccattttaagaccggtggtaaatcttgcctgggacacaggaggcgctgctaccggagcggttacagtaccaataattctggcacttggacttggcgttgtaaaaatcgggggaaagaattccaacagctctggtttggggctggtaaccctcgcttcagctttaccggttaccggagttctttttcttgcggcaatgctatgccaaaaagtcccaatgccgtccggccccgtttcgtttttttccgccgaacctgaacagcgtgccagagcagtctttgtagccggttccagtgaagaactcgttagaatcgcaaataaagcggttttctccggagatctttccacggaggaatttgccgaatgctttggcgagggaacatttgacaccagtggaaacattgaagaaactactgtaattaacctgcaatttctgggtgaacatctaaaatccgcgcttgttgccgttattcccctgccctggtgcttatcgtttctctga

SEQ ID NO: 17000 - protein, 279 aa, Unknown
  Obtained from environmental sample
  DOMAIN (1)...(181): Protein of unknown function (DUF1538)
  misc_feature (1)..(279): Xaa is any amino acid
MPLGEQCGMHLPAKTGIAGIAVFSIVVGITATLAEPAVAVLQQQGSVIPPWNAPLLYLLLNRGTKWLVAAIASGVGLSVVLGVYRFMFGWGFKPPVFIIIPILVILSCIFDENPILRPVVNLAWDTGGAATGAVTVPIILALGLGVVKIGGKNSNSSGLGLVTLASALPVTGVLFLAAMLCQKVPMPSGPVSFFSAEPEQRARAVFVAGSSEELVRIANKAVFSGDLSTEEFAECFGEGTFDTSGNIEETTVINLQFLGEHLKSALVAVIPLPWCLSFL

SEQ ID NO: 17001 - DNA, 381 bp, Unknown
  Obtained from environmental sample
  misc_feature (1)..(381): n is a, c, g, or t
atgctggccgctatcggtgttggcagcggcatggtcataggctttgccagaattttattcagcaatatgctgccgtcaggaggcatacacctctcatggatacttctgccttgctacggtttggccctgctgttaacgataattgcacctgaagatttttcttccattgcctgggacgtagccggaattgccaccggcccaattacagtgcccataattatcacagccggtctggggcttgggcgtgattccatccgctccgacggcgctttcggcattgtggcaaccgccagcgtcgtccccataatcgtgattctcgtgtctggaatcattgaaatggcaagatccaaacgggcaatcaggagaggctatggagaatga

SEQ ID NO: 17002 - protein, 126 aa, Unknown
  Obtained from environmental sample
  DOMAIN (1)...(113): Protein of unknown function (DUF1538)
  misc_feature (1)..(126): Xaa is any amino acid
MLAAIGVGSGMVIGFARILFSNMLPSGGIHLSWILLPCYGLALLLTIIAPEDFSSIAWDVAGIATGPITVPIIITAGLGLGRDSIRSDGAFGIVATASVVPIIVILVSGIIEMARSKRAIRRGYGE

SEQ ID NO: 17003 - DNA, 561 bp, Unknown
  Obtained from environmental sample
  misc_feature (1)..(561): n is a, c, g, or t
atgtatctagctgggacaaatccaacaggcgcaaatatacttaatcgttccggttttttccttggcgtactttggaaggcgtctgcgcgaaaagaaacggaaaaacaaattgtagatataactttttttgggagaaatgtaaaagttcacaaaggaattcagcaaaaacttgcgataatcgaagaacaaattcaagacgccgcaaaaaccgataatgcgattcaagcatggatagacaatcttgattctccgggagggtattattggcgggctatcgcaaaaactaaatcgcgatcatatcactcttacggacttgccattgatttgcttccaaaatcgctagacggtaaacaatcgtattggttgtgggcttctcaaaaggaaagcgactggtggaatgtttcgtataacgaaagatatcatccgcctgagacggtaataaaaatatttgagtcctatggttttgtttggggcggcaaatgggttatgttcgataccatgcattttgaataccgtcctgaggtatttattctaaatggactgccgttgaaagaaaaataa

SEQ ID NO: 17004 - protein, 186 aa, Unknown
  Obtained from environmental sample
  DOMAIN (46)...(174): D-alanyl-D-alanine carboxypeptidase
  misc_feature (1)..(186): Xaa is any amino acid
MYLAGTNPTGANILNRSGFFLGVLWKASARKETEKQIVDITFFGRNVKVHKGIQQKLAIIEEQIQDAAKTDNAIQAWIDNLDSPGGYYWRAIAKTKSRSYHSYGLAIDLLPKSLDGKQSYWLWASQKESDWWNVSYNERYHPPETVIKIFESYGFVWGGKWVMFDTMHFEYRPEVFILNGLPLKEK

SEQ ID NO: 17005 - DNA, 597 bp, Unknown
  Obtained from environmental sample
  misc_feature (1)..(597): n is a, c, g, or t
gtgctgcgcttttccgccgcgttttgggccgggcgccacggcaggatgggcgaatacctgcaccggcgcgcccttggcctggatgaacgggaggtggagccttggacgccgcccaagtcggaaagcgcggaaaccacgtttgtcaaggatacgcgggatcgcgccgtgcttacggactggctgtaccgccacgccgagcgggtgggtcggcatctgcgagggcagggactggcaggcagggtgatcacgctcaaggtgaaatacgcggattttcgccaggtcacccggcagctcaccttgccggcgcccacgtgcgccacggatacgatttttgagaccggctgccgtctgctggccgaactcgatccgcgcgatccgatccgtctgatcgggataggcgtgtccggttttgacgtcggcgcgcggcagttgctcctgccgttcgcggatgacggacgcagccaggcggaggatcgacgaaccaggctggatcggacgctggacgctctggccggcaaatacgggcgcggcatcgtggctcgcggcaggttgcgccgggacaaggcggagaacgggaacacgcatgagcgcgattga

SEQ ID NO: 17006 - protein, 198 aa, Unknown
  Obtained from environmental sample
  misc_feature (1)..(198): Xaa is any amino acid
MLRFSAAFWAGRHGRMGEYLHRRALGLDEREVEPWTPPKSESAETTFVKDTRDRAVLTDWLYRHAERVGRHLRGQGLAGRVITLKVKYADFRQVTRQLTLPAPTCATDTIFETGCRLLAELDPRDPIRLIGIGVSGFDVGARQLLLPFADDGRSQAEDRRTRLDRTLDALAGKYGRGIVARGRLRRDKAENGNTHERD

SEQ ID NO: 17007 - DNA, 753 bp, Unknown
  Obtained from environmental sample
  misc_feature (1)..(753): n is a, c, g, or t
atgcctttggacttatttgaaaaagaacaaaaaatatttgacaatgtaaccaaacgtgttgaggaagtccgaaagggcggttcttttgactttaaggaatacgaagctctggtgaaggaatacggaaagttattgaagcagctccgccagaatatacattttgccgacaaggtttcgaatagtttatacaaaagcaacctcaacttgaatgaaaaagttcattttgacgccttaaccggtatttataaccggcgttttatggatgacaacctaaaacgggtagtaaaaaccctgtcccgcactaatggagtgttaagcgtcctgatgcttgacattgattttttcaaaaaatacaacgatacctatggtcacagtatgggtgatgattgtcttaagaaagttgcaaaagcgctttgtgagaccgcaagaatggacgattgtgtaatacggtacggcggcgaggaatttgtagtcttattgccaaacaccgatgaggcgggcgcgggaataacagcggaaaggcttctcaatagcgtaaggtctctttgcatacctcatagaaacagcgacatcgcggattatgtaaccatttcgattggagcgacgacgatcacagtgaagtacaatcatcaatacatggattatatagaacgcgccgataaagcgttgtacatatcaaaagataccgggcgtaacaagtacacccatcttaaataccatgatgaagaaggagacatcgacaatgaggcttaa

SEQ ID NO: 17008 - protein, 250 aa, Unknown
  Obtained from environmental sample
  DOMAIN (69)...(233): GGDEF domain
  misc_feature (1)..(250): Xaa is any amino acid
MPLDLFEKEQKIFDNVTKRVEEVRKGGSFDFKEYEALVKEYGKLLKQLRQNIHFADKVSNSLYKSNLNLNEKVHFDALTGIYNRRFMDDNLKRVVKTLSRTNGVLSVLMLDIDFFKKYNDTYGHSMGDDCLKKVAKALCETARMDDCVIRYGGEEFVVLLPNTDEAGAGITAERLLNSVRSLCIPHRNSDIADYVTISIGATTITVKYNHQYMDYIERADKALYISKDTGRNKYTHLKYHDEEGDIDNEA

SEQ ID NO: 17009 - DNA, 393 bp, Unknown
  Obtained from environmental sample
  misc_feature (1)..(393): n is a, c, g, or t
atggcacagaccaccgagcccgcagggatcagaccgaaggtctgcggttcccctctggaaagagaaaagcgcgtggacgaaatactcgaccttgtggggctggattcttcctacaaaaagcgaaggcccgccgagctttcatcggggcaaaaacaacgggttgccataggtttcgctttgatgctgaaacccggcttaatcgtggccgatgagccagtcagcgctttggatgtttcggtggcggcgcaagtactgaaccttttccgcgatttgaataaaaaactaggcctggcattgctgtttatctcccataatatggaagtggtacattacctctgcgatcgtgtcgctgttatgcgaaatggcgggataacagatgtttacttgccttga

SEQ ID NO: 17010 - protein, 130 aa, Unknown
  Obtained from environmental sample
  DOMAIN (1)...(122): ABC transporter
  misc_feature (1)..(130): Xaa is any amino acid
MAQTTEPAGIRPKVCGSPLEREKRVDEILDLVGLDSSYKKRRPAELSSGQKQRVAIGFALMLKPGLIVADEPVSALDVSVAAQVLNLFRDLNKKLGLALLFISHNMEVVHYLCDRVAVMRNGGITDVYLP

SEQ ID NO: 17011 - DNA, 909 bp, Unknown
  Obtained from environmental sample
  misc_feature (1)..(909): n is a, c, g, or t
ttgaccgccgcccgtttcaangacggcatttatttcaaaaatcccctcctgacctttcagttcagggattacgccgaccacaccgacntggtggtcaccggccaacgggacataggggacgtgacgggctcgatcagccccggcggcaatccttcncacgccggggccgtgattcaagatatgccctattcggaactcaagaacaggctgctcctcaacgtgcaggatttcgccctggccgacgacccggcccaaggtgaaaaagccctgcgccagtttataggcgaagggtcgctgaacgccgtaaacgcccattacgatactgtgtcgcagatggcttcggccctggacggccgcttccagacccttctggaggggcagaccgcgccgtccgccggcgagggccccgccgaaagccgcctctgggtgaaacccttcggccagtggaaccgccaggatgacgagaatggcctcctcggctaccgctaccactccggcggcctcatgctgggctacgaccgggaaatggcccagcccggcctgaccctgggtctttacggcgctgtctccaaaggcagcctggaaaacgatttggccgaaaccgacatccaaaccacgggcttgggcctctacggcctctacgaattcggcggcggctacttcgcggacctcaatttcggctacggccactccaataacgaatccgtcatcgacctggtcttcggcggccgtaagaccagcaagttctccaccgacagtttccagaccggcctgaacttaggccgggtttttcaactaagtcaagatactactctgacccctagcgccgggctccgctatacccacgtcaagcagaacggctgggaagaaaaaatagtctccgacccgataaaagctcggccgatctga

SEQ ID NO: 17012 - protein, 302 aa, Unknown
  Obtained from environmental sample
  DOMAIN (135)...(301): Autotransporter beta-domain
  misc_feature (1)..(302): Xaa is any amino acid
MTAARFXDGIYFKNPLLTFQFRDYADHTDXVVTGQRDIGDVTGSISPGGNPSHAGAVIQDMPYSELKNRLLLNVQDFALADDPAQGEKALRQFIGEGSLNAVNAHYDTVSQMASALDGRFQTLLEGQTAPSAGEGPAESRLWVKPFGQWNRQDDENGLLGYRYHSGGLMLGYDREMAQPGLTLGLYGAVSKGSLENDLAETDIQTTGLGLYGLYEFGGGYFADLNFGYGHSNNESVIDLVFGGRKTSKFSTDSFQTGLNLGRVFQLSQDTTLTPSAGLRYTHVKQNGWEEKIVSDPIKARPI

SEQ ID NO: 17013 - DNA, 321 bp, Unknown
  Obtained from environmental sample
  misc_feature (1)..(321): n is a, c, g, or t
ttgaacgccatcgctgaacggagttttgcacacaaaaatagccgagttttgcaagaggctcaattgagacaaatgctggcagccccactcattgaacagcaattttatctgcgcccagtagaaatcgtcgcgcaagagcttctggggaagctactatgcaaaggtgacgttgttttgaggatcacggaagtggaggcatacggcggaaccgaagacagtgccagtcactgcaggtttggcaaaacgccccgcaatgagccaatgtggggggcgggcggacactgctatgtgtacctgtgctatggaatccaccaatgctaa

SEQ ID NO: 17014 - protein, 106 aa, Unknown
  Obtained from environmental sample
  DOMAIN (32)...(106): Methylpurine-DNA glycosylase (MPG)
  misc_feature (1)..(106): Xaa is any amino acid
MNAIAERSFAHKNSRVLQEAQLRQMLAAPLIEQQFYLRPVEIVAQELLGKLLCKGDVVLRITEVEAYGGTEDSASHCRFGKTPRNEPMWGAGGHCYVYLCYGIHQC

SEQ ID NO: 17015 - DNA, 666 bp, Unknown
  Obtained from environmental sample
  misc_feature (1)..(666): n is a, c, g, or t
ttgatgacaaacaataattctaacgcgaaagtacatatatttgacgttgatcacactgttgtaagaaaaacaagcgcggaatactttgtacaaatagcgttaaaagaaaaaattatacgtttttcgcagataagccatttattaatcgactggataaagtacaaacttgcgttcccgaacaatgattttatagaaaacaccgtaaaaagattggcaggcattcaaaaagaagaccttgaacgcgttgccgcggaatgttttgaaaagcgcattaagaaaaatatttacatcgatgcaaaaaatataattgaagacttgcttaaaagcggagagaaagtaatatttgccacatcatcatttgattttatcataagaccgttagaaaaatatttcggaatagaaggctctcttgcgagtcagcttgagtattcgcagggtaagatgacaggtaaattagcaggctacagtttctttggaccaaaaaagaaaaccgccgcaatagcgtggatggaaaccaacggcattaaccctcaaaacgtcagcttttattccgactcatacaccgacctacccccttctgaacactgcggaaatcccgtagcggtaaaccctgatggtatccttgcgcgcaaggaaaaaaacgcgggtggaggtggtgcggtttaa

SEQ ID NO: 17016 - protein, 221 aa, Unknown
  Obtained from environmental sample
  misc_feature (1)..(221): Xaa is any amino acid
MMTNNNSNAKVHIFDVDHTVVRKTSAEYFVQIALKEKIIRFSQISHLLIDWIKYKLAFPNNDFIENTVKRLAGIQKEDLERVAAECFEKRIKKNIYIDAKNIIEDLLKSGEKVIFATSSFDFIIRPLEKYFGIEGSLASQLEYSQGKMTGKLAGYSFFGPKKKTAAIAWMETNGINPQNVSFYSDSYTDLPPSEHCGNPVAVNPDGILARKEKNAGGGGAV

SEQ ID NO: 17017 - DNA, 876 bp, Unknown
  Obtained from environmental sample
  misc_feature (1)..(876): n is a, c, g, or t
atgaaaaacaggggttgcaaaatagatgaactctacgatattttgcccatagaaattatcgtaaatcaggtgaccgactgctacaccgccttgggatatgtgcataatttgtggatgccgctatacagccgttttaaagactacattgccgttccaaagccaaatctgtaccaaagcctgcacacaacggtaataggacctcagggaaagctggttgaggttcaaataagaaccaaagatatgaacgaaaccgcagagcacggcatggctgcgcactgggcttacaagttcaatttgaaaaacgaagagcttgaaaaaaatatggactgggtgggcaaaataacaaaaatgcaaaatgaaatcccaaactcaacggaattcctgggttttttgcacgaaagccttttgccagaagattgctatgcatggactcctcagggaaaaaaaatcaccttgccctccagagcaaccattttggattttgcctttgctgtgcacacagatttgggcttgcattgcctaggagcccgtgctggaggcaatgttttgggattggatgcagacattcccgtgggagaaaccattcagattttgcaaagcgattcccaagaacctcaagaaaactggctgtccatagttaaaacccaaaaagcgcaatctgccataaggcaatggctcagaaaaactataacaactcaatccgaagttttaggcaaaaaaatatggcagagggaacttcaaggcttaaaaataacaaaagaaaattatccaaaagactccgatatttgccatgccttcaaggttcaaaacatagacgctttttacgaaagtcttggcaaaagncgaaatccccctaaaaacgtgttccattcctaa

SEQ ID NO: 17018 - protein, 291 aa, Unknown
  Obtained from environmental sample
  DOMAIN (140)...(199): TGS domain
  misc_feature (1)..(291): Xaa is any amino acid
MKNRGCKIDELYDILPIEIIVNQVTDCYTALGYVHNLWMPLYSRFKDYIAVPKPNLYQSLHTTVIGPQGKLVEVQIRTKDMNETAEHGMAAHWAYKFNLKNEELEKNMDWVGKITKMQNEIPNSTEFLGFLHESLLPEDCYAWTPQGKKITLPSRATILDFAFAVHTDLGLHCLGARAGGNVLGLDADIPVGETIQILQSDSQEPQENWLSIVKTQKAQSAIRQWLRKTITTQSEVLGKKIWQRELQGLKITKENYPKDSDICHAFKVQNIDAFYESLGKXRNPPKNVFHS

SEQ ID NO: 17019 - DNA, 903 bp, Unknown
  Obtained from environmental sample
  misc_feature (1)..(903): n is a, c, g, or t
ttgtcggcgattcggtctgaattaaccactctcaaaaaagaatttgccggcgtacgtattgaaagcgttcccggcgtaaaaaccgaggcccggcacggcggtttttttgacggagaagagggagatgatgaaaaaatcaccctgaccggcgatgagatgcaaaacatcctcacatccgccgatttttccgcacctgaggaagacaccggttttgacccccaacgggaagcggatgaagccgcccttaaagaactttccgcgcagaatgaaagcgccgcggaagcagaggaagaggaagaaataaaaatagatttcgacaatctgggtatcagtctggatgatgacacagaagcggaagcccaggatgagttcccgccgctggaaaccggcgctgatgatgagtttgaaacatcctctttggaagaaatacccccgctggaagaactgccgtcggaagatttgcaggaagagcttatgcctcttgaagcgtttgacgaagcagatgatgaagaactgcagaatctccgccttgagggtgcgagcccttttacccccgcccccgataacagcgtttatctggagactgacccttttgccctggacacttccggcctcgaagaaacatcccttgaagaaacttcttttgaagacacctctttcgcggaaagcggcttaactgaaattgccgcgccggaagaagcggctcccgcagaaacagtttcccaggatacaatttctgaaatcaccacagaattaagtcttgatgacatcggcttagaccttgataccgatgcattttccattgatgaaagtttgccgtcgtttgatgaagaaacaggcgaagaacaaaccgatattggcgctatagatatttccgcggaggaaaaaaaagcgctgaaataa

SEQ ID NO: 17020 - protein, 300 aa, Unknown
  Obtained from environmental sample
  misc_feature (1)..(300): Xaa is any amino acid
MSAIRSELTTLKKEFAGVRIESVPGVKTEARHGGFFDGEEGDDEKITLTGDEMQNILTSADFSAPEEDTGFDPQREADEAALKELSAQNESAAEAEEEEEIKIDFDNLGISLDDDTEAEAQDEFPPLETGADDEFETSSLEEIPPLEELPSEDLQEELMPLEAFDEADDEELQNLRLEGASPFTPAPDNSVYLETDPFALDTSGLEETSLEETSFEDTSFAESGLTEIAAPEEAAPAETVSQDTISEITTELSLDDIGLDLDTDAFSIDESLPSFDEETGEEQTDIGAIDISAEEKKALK

SEQ ID NO: 17021 - DNA, 864 bp, Unknown
  Obtained from environmental sample
  misc_feature (1)..(864): n is a, c, g, or t
atggccgagaatggattcgatccttcactcataatgccaaatccatcactttcgtttaacgaaggtgggttagtgccttacaatccagattccgcctggtaccggagccgctttgatagcatagcgcggcattttaaattcagcctggacacgcctctaaaagacattcctaaaaaagcccttaacgccatgatctacggcagtgaagatgacctggaagtacattataaaaaccgcgagggcacttcccactttgattacaacaccaggttccccggcgtgcttgaagaccttaaaaggcggtatatggaaaccagctcgcctgggattaaggactggcttgaaaagtttatgagccagaagccctgcgaggaatgcgggggaaagagattgaagcccgaggttctggcggtaactgtcgggggcaggaacatctgggatttgaccgggctttcggttacggacacgctgaagttttttgaaacgttgaagataaacaaaaccgaaaaaacaatcgcccgccaaattttaaaagaaataaacgccaggcttggctttatgaaaaacgtcggcttggattaccttacccttgagcgaaaggccgccacgctttcaggcggggaagcacagcgcatcaggctggccacgcagataggctccagccttgtgggtgtgctttacattctggacgagccttcaatcggccttcaccagcgggacaaccagcggcttattgataccctgcttcacctgcgcgacataggaaacacccttatcgttgttgagcatgacgagcagaccctgcgtactgccgatcatatcgttgaccttggcccgggagcgggagtcccgggggaaggatag

SEQ ID NO: 17022 - protein, 287 aa, Unknown
  Obtained from environmental sample
  DOMAIN (128)...(280): ABC transporter
  misc_feature (1)..(287): Xaa is any amino acid
MAENGFDPSLIMPNPSLSFNEGGLVPYNPDSAWYRSRFDSIARHFKFSLDTPLKDIPKKALNAMIYGSEDDLEVHYKNREGTSHFDYNTRFPGVLEDLKRRYMETSSPGIKDWLEKFMSQKPCEECGGKRLKPEVLAVTVGGRNIWDLTGLSVTDTLKFFETLKINKTEKTIARQILKEINARLGFMKNVGLDYLTLERKAATLSGGEAQRIRLATQIGSSLVGVLYILDEPSIGLHQRDNQRLIDTLLHLRDIGNTLIVVEHDEQTLRTADHIVDLGPGAGVPGEG

SEQ ID NO: 17023 - DNA, 888 bp, Unknown
  Obtained from environmental sample
  misc_feature (1)..(888): n is a, c, g, or t
gtgccccgatctatatatttcctttatcagccagtggagatagccattaacgtttcctttagtactatttccatcctttccgaacaggcggactcgctgcctggcgttttttggcagtcaaaaccccttcgcaattatcaggatactggcagcctcgcgcacataatcggctatgttggcaacattaccagggacgagctgacggttctttacaaccagggctaccagcagggggacataatcgggaagagtggcattgagaagcagtacgatgaattgctgcgcggaaaggaaggcagggaaaccaggactgtcgatgtaaggggaaggaacgttactggagataatacgaggattaaccctgaaacaggcaaaaacctggttcttactatagacagaaagattcaaaccctggcggaaaaagctctgggtatgcgaatgggagctgttgtggtcctgcgcccgacaaacggcgaaatactcgcaatggtttcgtatccgtggtacgacccgaatattttcaatcaaactgatctggaagatgcgtaccttgctttgctcgacgatccgaacaagccctttattaaccgcgcaattcaatccagctatcctccggcttcaaccttcaaggtcattatgaccacaggtattctcgctgaaaacgcctttcctcccgaacagcttgtggaatgcaagggggaaatagactacggcgacaggcaatggcattgccatatcaggcgcggccacggtaggcttaatttgcagagggccatggcgcagtcctgtgatatttattactggaatgtcgggagggattaccttggcattgaaaacatcattaactatgcgagggattacggctanggggatgtanctcggccataa

SEQ ID NO: 17024 - protein, 295 aa, Unknown
  Obtained from environmental sample
  DOMAIN (1)...(116): Penicillin-binding Protein dimerisation domain
  misc_feature (1)..(295): Xaa is any amino acid
MPRSIYFLYQPVEIAINVSFSTISILSEQADSLPGVFWQSKPLRNYQDTGSLAHIIGYVGNITRDELTVLYNQGYQQGDIIGKSGIEKQYDELLRGKEGRETRTVDVRGRNVTGDNTRINPETGKNLVLTIDRKIQTLAEKALGMRMGAVVVLRPTNGEILAMVSYPWYDPNIFNQTDLEDAYLALLDDPNKPFINRAIQSSYPPASTFKVIMTTGILAENAFPPEQLVECKGEIDYGDRQWHCHIRRGHGRLNLQRAMAQSCDIYYWNVGRDYLGIENIINYARDYGXGDVXRP

SEQ ID NO: 17025 - DNA, 534 bp, Unknown
  Obtained from environmental sample
  misc_feature (1)..(534): n is a, c, g, or t
ttgggtttttcccaggatctgcgataccagcatattccggcggttcttatcggccgggatccgaacaatcttttttccgcgtttgttatcaataaagggtttcatgcgggagtgtcaaccaatatgccggtgatcgcttaccataacgggacgcaggggcttgtgggcaaggttgtaaacgccggggcttttgagagccttgtaatgcccctttatgatgaaaggtgctttgtgtcttccaggctatccgaatcccgctatgaaggaattgtcgaaggccggggaattcccgaagctcccctattaatgcgttatatcagaaaaagggcaagggacgaaataagcatcggcgatatggtggtatcaagcggcatagggggcgtctatccttccggcatcaatatcggaagggtaaaccgcgtaattttcgaggaagacgatctttccatggaagtggaacttgaaccttccatagatttttcccgcctggaatacgtatttgttataaaacaactggaagaaaccaatggttaa

SEQ ID NO: 17026 - protein, 177 aa, Unknown
  Obtained from environmental sample
  DOMAIN (14)...(173): rod shape-determining protein MreC
  misc_feature (1)..(177): Xaa is any amino acid
MGFSQDLRYQHIPAVLIGRDPNNLFSAFVINKGFHAGVSTNMPVIAYHNGTQGLVGKVVNAGAFESLVMPLYDERCFVSSRLSESRYEGIVEGRGIPEAPLLMRYIRKRARDEISIGDMVVSSGIGGVYPSGINIGRVNRVIFEEDDLSMEVELEPSIDFSRLEYVFVIKQLEETNG

SEQ ID NO: 17027 - DNA, 333 bp, Unknown
  Obtained from environmental sample
  misc_feature (1)..(333): n is a, c, g, or t
atggttaaaaaaatcatttttgctttgctactcaccattggcgcggcgctcctccaatcaaccattttgtcccgttttattatttacactcatgctgtcccggatctcactttgggcattctggtttattcagcctatgtgaacgggaccatgccagggcagttaacagggtttttttccggagttttgctggattttctttcatcagcgcctttggggcttaacgctnttgtacgtacccttaccggcgctcttacaggccttatgaaaggtactttttaccttgattttttctttttcccgatggcgctttgcgccggggcaacgatttga

SEQ ID NO: 17028 - protein, 110 aa, Unknown
  Obtained from environmental sample
  SIGNAL (1)...(18)
  misc_feature (1)..(110): Xaa is any amino acid
MVKKIIFALLLTIGAALLQSTILSRFIIYTHAVPDLTLGILVYSAYVNGTMPGQLTGFFSGVLLDFLSSAPLGLNAXVRTLTGALTGLMKGTFYLDFFFFPMALCAGATI

SEQ ID NO: 17029 - DNA, 360 bp, Unknown
  Obtained from environmental sample
  misc_feature (1)..(360): n is a, c, g, or t
atggctgtttcacaagcgcctaatatggtttataatctggaggaagttcctgaatattgcagacctttcctggtacgcggaacaaacgggtattctttcaatcaggttataaaggactcgattgtttttgaatatcatgatataactaatgataacaccctgccggaagttgatattattcttgtaagagatgttgtttcattcttaccggaagctgaacagggaagagttatagcggatttttcagagaaactgagaaacaacggtattgtaatcatgggcagaaacgaagagcttagcggaattatttggcagtcaatgtccgatgatcctgtttctgcgtttttacatagcgcataa

SEQ ID NO: 17030 - protein, 119 aa, Unknown
  Obtained from environmental sample
  DOMAIN (1)...(115): CheR methyltransferase, SAM binding domain
  misc_feature (1)..(119): Xaa is any amino acid
MAVSQAPNMVYNLEEVPEYCRPFLVRGTNGYSFNQVIKDSIVFEYHDITNDNTLPEVDIILVRDVVSFLPEAEQGRVIADFSEKLRNNGIVIMGRNEELSGIIWQSMSDDPVSAFLHSA

SEQ ID NO: 17031 - DNA, 420 bp, Unknown
  Obtained from environmental sample
  misc_feature (1)..(420): n is a, c, g, or t
gtggacgggcgtggggccccgctgtcgctcgtcgtgaccggtgcgaaccggcacgacgtcacccaggtggaggcggtgctgtcggcgctggtcggccgcgcccccgccccgggcaggaggccgcgcctgtgcgccgacgcgggctacaggggcaggagggccgaggaggccatggagcgccacgggtacgccccaaaggtaaaggggcgcggcgatgaggcgagggagctgaaggcggacccgtcgaagagggctaggcggtgggtggtggaggcggcccacggctggttcaacaggttccgcaagctgctggtgcgctacgagaagcttgagcggtcctacctggccctgtgccacttggccgccgccatcatcgtcttcaggaaggtcggggggaaaataaatattatttacggataa

SEQ ID NO: 17032 - protein, 139 aa, Unknown
  Obtained from environmental sample
  DOMAIN (1)...(124): Transposase DDE domain
  misc_feature (1)..(139): Xaa is any amino acid
MDGRGAPLSLVVTGANRHDVTQVEAVLSALVGRAPAPGRRPRLCADAGYRGRRAEEAMERHGYAPKVKGRGDEARELKADPSKRARRWVVEAAHGWFNRFRKLLVRYEKLERSYLALCHLAAAIIVFRKVGGKINIIYG

SEQ ID NO: 17033 - DNA, 495 bp, Unknown
  Obtained from environmental sample
  misc_feature (1)..(495): n is a, c, g, or t
gtgcgggtgctgcggacgggctgccagtggaagtcgctgccgaagacggagtacggcagctccagctcgatacaccagcatttcctcgaatgggagagggcgggcctcttccgtgacatctggagggccgggctggcggagtgcgacgacatggagggcatagcgtggagctggcagagcatagacggcgccatggtgaaggcgccgaccgcgagggaggcggtggggccaaaccccaccgacaggggaaaaaaatgggagcaggcggcacctgctggtggacgggcgtggggccccgctgtcgctcgtcgtgaccggtgcgaaccggcacgacgtcacccaggtggaggcggtgctgtcggcgctggtcggccgcgcccccgccccgggcaggaggccgcgcctgtgcgccgacgcgggctacaggggcaggagggccgaggaggccatggagcgccacgggtacgccccaaaggtaaaggggcgcggcgatga

SEQ ID NO: 17034 - protein, 164 aa, Unknown
  Obtained from environmental sample
  misc_feature (1)..(164): Xaa is any amino acid
MRVLRTGCQWKSLPKTEYGSSSSIHQHFLEWERAGLFRDIWRAGLAECDDMEGIAWSWQSIDGAMVKAPTAREAVGPNPTDRGKKWEQAAPAGGRAWGPAVARRDRCEPARRHPGGGGAVGAGRPRPRPGQEAAPVRRRGLQGQEGRGGHGAPRVRPKGKGARR

SEQ ID NO: 17035 - DNA, 423 bp, Unknown
  Obtained from environmental sample
  misc_feature (1)..(423): n is a, c, g, or t
gtgacagtagaggagatgaccaccggtacttttaagcgttctaaattgataaagatcgcggctatgggcgtaggcggcggcatggtgataggtttcgcgcgggtgctgttcagcaatttgctgccttcaggcggcatacatctttcgtggattctggctccttgctatcttcttgccctgatcctgacaattttcgcgcctgaagatttttcctcgatagcgtgggacgtcgcaggcatcgccacaggccccatcaccgttccaataatcataacttcagggcttggcctcggacgcgattcactgcgggctgacggcgctttcggcattgtggcgacggccagcgtatttccgattatcgtaatattaatatcgggcattgttgataaagcgagatcgaagcgcgtgttaagcaggatgtag

SEQ ID NO: 17036 - protein, 140 aa, Unknown
  Obtained from environmental sample
  DOMAIN (1)...(130): Protein of unknown function (DUF1538)
  misc_feature (1)..(140): Xaa is any amino acid
MTVEEMTTGTFKRSKLIKIAAMGVGGGMVIGFARVLFSNLLPSGGIHLSWILAPCYLLALILTIFAPEDFSSIAWDVAGIATGPITVPIIITSGLGLGRDSLRADGAFGIVATASVFPIIVILISGIVDKARSKRVLSRM

SEQ ID NO: 17037 - DNA, 759 bp, Unknown
  Obtained from environmental sample
  misc_feature (1)..(759): n is a, c, g, or t
atgagggctgagaacgatcaggtccccgggttctccgcgacgttgcgccacatctacaaccgggctcagtttaacatggactacaacatctcgttaaacaattacaccgattacgataatcagagccataacttcaatggcgagctgacaggttcgatcatgttcgccgacggtatttgggcgatgggccagccggtgagcgacggcggtttcgtcctgataaacccgagcggcgacctggccgccgccactgtgcacgtcaaccgctcgcgggcggccggcagcgaattcagccgcagcggggtgttgggcgcggcctaccacaaccgtatcatgtcctacagcccgacggagctcacgctcagcctgaccgacgtccctgtcggcgcgttcctggagcagagccggtactacgtgatgggcacctacaagcagggcttcgcccttaaagtgggcaagcggtcgcaggtcatggccatagtgcccttcgtggaaaaacgcggcgggaggcctttgggccacacttacctgacgctgacggcggacaccgagaatcaagacgacgaggtaatcaacgcaccgcgcgcctccttcacgagcgacgacggaatactgcagatgggcggcttggcgccggggtacagataccgcgtgaaattccggcagtcttcgcgattgagggacgcgctgatagagatcccggcggacgcccacggaatctacgagcacccggttgtggaggtcgagcgggaggattga

SEQ ID NO: 17038 - protein, 252 aa, Unknown
  Obtained from environmental sample
  misc_feature (1)..(252): Xaa is any amino acid
MRAENDQVPGFSATLRHIYNRAQFNMDYNISLNNYTDYDNQSHNFNGELTGSIMFADGIWAMGQPVSDGGFVLINPSGDLAAATVHVNRSRAAGSEFSRSGVLGAAYHNRIMSYSPTELTLSLTDVPVGAFLEQSRYYVMGTYKQGFALKVGKRSQVMAIVPFVEKRGGRPLGHTYLTLTADTENQDDEVINAPRASFTSDDGILQMGGLAPGYRYRVKFRQSSRLRDALIEIPADAHGIYEHPVVEVERED

SEQ ID NO: 17039 - DNA, 627 bp, Unknown
  Obtained from environmental sample
  misc_feature (1)..(627): n is a, c, g, or t
atggcccgaataacagccgcctcaatcgccgcggttgtcgtaagtttacaactcggcgcgttctcggtagtgcttgaaacattgctttcgggcattacagaactgccgttcacagcctttgtccttttaatgcagcccatacatcttgcaatcggcattgtcgagggcattgtaagcgccgccgttttatgttttgtttacaagatgcgccctgaaatcatggaaagcagttttgaaagaacagccattaaaaatgaaacgccgataaaaactgtacttatcgcgcttaccgcaatcacgctgattaccggaggcttgctgtccctgttcgtttccgaacatcctgacgggcttgaatggtcaataaaaaatataaccggaacaacagagcttgaaacagaaaataagtttttagaaggggcggcttccatacaggaaaaaaccgcttttctgcccgattataatttttccgacgcaggcgaagaaggcacagcggcaggaacaaccctttcaggaattttaggcggtatttttacattcctgcttgccggatttagcgtgttaatcatttcagttgttaaaaagaaacgaagtgaaaaacaaaatatacgaactgtacgcgcttga

SEQ ID NO: 17040 - protein, 208 aa, Unknown
  Obtained from environmental sample
  SIGNAL (1)...(22)
  misc_feature (1)..(208): Xaa is any amino acid
MARITAASIAAVVVSLQLGAFSVVLETLLSGITELPFTAFVLLMQPIHLAIGIVEGIVSAAVLCFVYKMRPEIMESSFERTAIKNETPIKTVLIALTAITLITGGLLSLFVSEHPDGLEWSIKNITGTTELETENKFLEGAASIQEKTAFLPDYNFSDAGEEGTAAGTTLSGILGGIFTFLLAGFSVLIISVVKKKRSEKQNIRTVRA

SEQ ID NO: 17041 - DNA, 303 bp, Unknown
  Obtained from environmental sample
  misc_feature (1)..(303): n is a, c, g, or t
atgaaaacgctttattttgaatgtaacatgggcgcggcgggcgatatgctgacggcagccctgcttgaattacacgacaaccctcaagaatttttgaaaaaattaaacggtattggtattcccaatacggtaataagcgcggaaccgtccgtaaaatgcggcataaccggaacacacataaaagttacaattaacggacatgaggagaatgataacgtacacaaacatcaagagcatactcacgaacataaacacggcgaacatcaccacagcaataacagttatcacgatataaacacataa

SEQ ID NO: 17042 - protein, 100 aa, Unknown
  Obtained from environmental sample
  misc_feature (1)..(100): Xaa is any amino acid
MKTLYFECNMGAAGDMLTAALLELHDNPQEFLKKLNGIGIPNTVISAEPSVKCGITGTHIKVTINGHEENDNVHKHQEHTHEHKHGEHHHSNNSYHDINT

SEQ ID NO: 17043 - DNA, 465 bp, Unknown
  Obtained from environmental sample
  misc_feature (1)..(465): n is a, c, g, or t
ttgcaatattatcaaacggcgcgaattggaataatcggcgaaatgccaaaacctgacggcattggaaaaatagtagtcgccaccggaggcacaagcgacattcccgttgcggaagaagcggcaataaccgccgaagctcttggaaatgaagttgtccgtcttttcgatgtcggcgttgcaggacttcaccggctactatcacggcttgaaacaattatggacgcgcaggtaataatttccatagccggaatggaaggggcattaaccagcgtcataggcggccttgttgactgccccgtcatcggcgttcccaccagcgtaggctacggagcttcgttcaacggactgtccgcgcttctttcaatgcttaattcatgctccagcggcgtaagcgtagtgaacatagacaatggtttcggcgcggggtatcttgcaagcatgataaatcacagatttatcgtttag

SEQ ID NO: 17044 - protein, 154 aa, Unknown
  Obtained from environmental sample
  DOMAIN (22)...(153): AIR carboxylase
  misc_feature (1)..(154): Xaa is any amino acid
MQYYQTARIGIIGEMPKPDGIGKIVVATGGTSDIPVAEEAAITAEALGNEVVRLFDVGVAGLHRLLSRLETIMDAQVIISIAGMEGALTSVIGGLVDCPVIGVPTSVGYGASFNGLSALLSMLNSCSSGVSVVNIDNGFGAGYLASMINHRFIV

SEQ ID NO: 17045 - DNA, 573 bp, Unknown
  Obtained from environmental sample
  misc_feature (1)..(573): n is a, c, g, or t
gtgcaaaaccccggcaggaactggctgcagactatagagcagagcgtccagctcccccgggtagtggccataggcgagatcggtctggactattaccggaaattcggcgataaaaaatcgcaaatcgaactgtttataacgcagcttgacctggccgccaagttgaatatgcctgtaatcatccataaccgggacgcgggccacgatgtgctggaaatccttcgcgatcgcctgccgcccagggggggagtattgcattgctattccgaggatgccgcttatgccagggaagcccaaaagctgaacctgtacttttcttttgccggaaacctaacctacaaaaacgcccgtaacctccacgagacgattccggaactgcccgttgaccgcatccttatcgaatcggaaagcccgtttatggtgccgaccgggcaaaagggcaaacgcaatatgcccaaatatctgcccgaaacctgtctatgtctcgccaaaatgctggaaatggaacccgaagcgaccgcggcgcagctttgggagaacgccaacaggttttttggccttcctaatgagtga

SEQ ID NO: 17046 - protein, 190 aa, Unknown
  Obtained from environmental sample
  DOMAIN (1)...(186): TatD related DNase
  misc_feature (1)..(190): Xaa is any amino acid
MQNPGRNWLQTIEQSVQLPRVVAIGEIGLDYYRKFGDKKSQIELFITQLDLAAKLNMPVIIHNRDAGHDVLEILRDRLPPRGGVLHCYSEDAAYAREAQKLNLYFSFAGNLTYKNARNLHETIPELPVDRILIESESPFMVPTGQKGKRNMPKYLPETCLCLAKMLEMEPEATAAQLWENANRFFGLPNE

SEQ ID NO: 17047 - DNA, 327 bp, Unknown
  Obtained from environmental sample
  misc_feature (1)..(327): n is a, c, g, or t
ttgcaatataaagttttagccgaaggcagtggccaagcagcaaaagacggagatacagtctccgttcattacacgggcactcttatagatggtttaaaattcgacagttccgttgacaaaaatcaaccgctgaccgtagttttgtccgatgggcagctaatacaaggttggatagaaatgctccgccttatgaaaaaaggcggcaaagttaaagtatggattccgagcaatctcggctatggtgaaatgggcaagccgccatttatcgctggtaattcactgcttatttttgaaatggaattgttagacatcaaaccggcaaagtga

SEQ ID NO: 17048 - protein, 108 aa, Unknown
  Obtained from environmental sample
  DOMAIN (9)...(102): FKBP-type peptidyl-prolyl cis-trans isomerase
  misc_feature (1)..(108): Xaa is any amino acid
MQYKVLAEGSGQAAKDGDTVSVHYTGTLIDGLKFDSSVDKNQPLTVVLSDGQLIQGWIEMLRLMKKGGKVKVWIPSNLGYGEMGKPPFIAGNSLLIFEMELLDIKPAK

SEQ ID NO: 17049 - DNA, 444 bp, Unknown
  Obtained from environmental sample
  misc_feature (1)..(444): n is a, c, g, or t
atgaggcaaaatagaatcttggtacccaatgccgtctaccatgtcaccgccagaatcaaccgcggtgagcgcattttcctagacgctgccatgcgtaccctgtttctggactatcttaaacgcctgaaaacaaagtactccttcgctatctacaacttctgcatcatgggaaactatatccacttcgtcattcgccctgataaaggcagctccctgtccaaaatcatgcagtggctattgggaaactacgccaaaggctggaacaagctccacggggttacaggccatttgtggggagaccggtttttctcgaggatagtcgacggcggcagagaggcattcttcaggttattcaggtacgtcagcgagaaccccgtggaggctggcatggtggggcgggcctgggagtgggactccaacggtgtgtggcaccatgtgcgttaa

SEQ ID NO: 17050 - protein, 147 aa, Unknown
  Obtained from environmental sample
  DOMAIN (52)...(102): Protein of unknown function (DUF1568)
  misc_feature (1)..(147): Xaa is any amino acid
MRQNRILVPNAVYHVTARINRGERIFLDAAMRTLFLDYLKRLKTKYSFAIYNFCIMGNYIHFVIRPDKGSSLSKIMQWLLGNYAKGWNKLHGVTGHLWGDRFFSRIVDGGREAFFRLFRYVSENPVEAGMVGRAWEWDSNGVWHHVR

SEQ ID NO: 17051 - DNA, 852 bp, Unknown
  Obtained from environmental sample
  misc_feature (1)..(852): n is a, c, g, or t
atgatcgcgagcctctatgtgtcggtaactgaagagggcagaaccgaaagcggacggcttgcgctgacggtacaggcgcagccgcaatcggcaatgccgacggcaggcgcgacgcagacaactgtcattaaagatacgttagagcaaaagagcgttgcatttacgctgaccagcaccaataccggcgcctggaaggtgtattcggcagcaaccagcggcaccgcgctgacaaacgttaccgcaacctttaccgcgccgaccctgactttgtcttccaccggcgacgaccttgccgccgatacctactatgtgtcggtaaccgaaaccaacaaagccgaaagcgaccggctcgggttgacggttggggcatatgtggcgcccgggcaatcgagaacgccgacggcaagccctgccgatgcaatcgtcgccaaaaccgcggaaacgcaaagttccattaaatttaagctgaccagcacccatgacggcgcatggaaggtgtatcttaacgaaaccggcggcggcgtggcgccttttaccgcaacttttgaggagccctaccttactttagcttcattattaggcaccgatattcctgaggggtcttattacgtgtcggtaaccgaagacggtaaagacgaaagcaacctgcttaagctgacagtcgcggcgcagcaggaatcggcaatgccgacggcagacgttaccgccgttgccaaaaccgcgtcaccgcanaagagcgttaccttcgagctgaccagcactcataccggcgaatggaaggtgtactggaatcaaaccagcaccaacgtggcgactgccgttaccgtggccttgcctcccccaacctgctga

SEQ ID NO: 17052 - protein, 283 aa, Unknown
  Obtained from environmental sample
  misc_feature (1)..(283): Xaa is any amino acid
MIASLYVSVTEEGRTESGRLALTVQAQPQSAMPTAGATQTTVIKDTLEQKSVAFTLTSTNTGAWKVYSAATSGTALTNVTATFTAPTLTLSSTGDDLAADTYYVSVTETNKAESDRLGLTVGAYVAPGQSRTPTASPADAIVAKTAETQSSIKFKLTSTHDGAWKVYLNETGGGVAPFTATFEEPYLTLASLLGTDIPEGSYYVSVTEDGKDESNLLKLTVAAQQESAMPTADVTAVAKTASPXKSVTFELTSTHTGEWKVYWNQTSTNVATAVTVALPPPTC

SEQ ID NO: 17053 - DNA, 426 bp, Unknown
  Obtained from environmental sample
  misc_feature (1)..(426): n is a, c, g, or t
atgaagttccctgctgttgccttcgatttggacggcacactttatcccaattacagactcaatttccgcctaattccgtttatactaaaagaacagcgctttcttagggcaatgggaacggccagaacccggcttagaaaaacaggcgggggaagaatcggtgatttttacgaagcacaggcgaaaatcatgggggagatactcggcgagagctcggaaaaagttatggaaaagaccgagacgcttatttaccgaggctgggaagatcattttaagaaagtaaggctttttccccatgtggtggagaccctggacgctttgcgcaggaacgcgataaccctcggcctgctttcggaatttcccccggaaaacaaactgaaaaacctgaaaatattcgattgctgggacgtggtaagtctgttctga

SEQ ID NO: 17054 - protein, 141 aa, Unknown
  Obtained from environmental sample
  misc_feature (1)..(141): Xaa is any amino acid
MKFPAVAFDLDGTLYPNYRLNFRLIPFILKEQRFLRAMGTARTRLRKTGGGRIGDFYEAQAKIMGEILGESSEKVMEKTETLIYRGWEDHFKKVRLFPHVVETLDALRRNAITLGLLSEFPPENKLKNLKIFDCWDVVSLF

SEQ ID NO: 17055 - DNA, 438 bp, Unknown
  Obtained from environmental sample
  misc_feature (1)..(438): n is a, c, g, or t
ttgttgggcgatgtgaaagccgtggacgccacgatcctcaactccgcgctggacgacgggataattccggtggtttcttccgtggcctacggtatcggcgaggacgagggccgctcgctcaatataaacgcggacattgccgccgcgaaaattgccggggccatcagggcggaaaaactcatgcttatgacggatgtgcagggcatactccgcaatgtccaggatacggcctcgttaatcaggcagataaaccgctcggagatggaagccctaaaaagagacggtgttttcagcaagggcatgatcccaaagatcgactgctgcctgcttgcaatggacggaggcgtcaagagaactcacattattgacggacgcctgccccatgcccttttaatcgagctttttaccgacgaaggcatgggcacaatgatagaataa

SEQ ID NO: 17056 - protein, 145 aa, Unknown
  Obtained from environmental sample
  misc_feature (1)..(145): Xaa is any amino acid
MLGDVKAVDATILNSALDDGIIPVVSSVAYGIGEDEGRSLNINADIAAAKIAGAIRAEKLMLMTDVQGILRNVQDTASLIRQINRSEMEALKRDGVFSKGMIPKIDCCLLAMDGGVKRTHIIDGRLPHALLIELFTDEGMGTMIE

SEQ ID NO: 17057 - DNA, 522 bp, Unknown
  Obtained from environmental sample
  misc_feature (1)..(522): n is a, c, g, or t
atgtccgatttaaagtgcgatattaaaagaataaatggaggggtctgcgctccgaaaggtttctcggcgggcggtatacactgtggcatcaggacaaaatcgaaaaagctcgacctggctttgctttattccgaaaaaccctgtacggcagccgcgatgtttacaaccaacaaggtaaaatccgcctgcattttggtaagccgggaacacgtttcaggcggcgttctgcgcgcggtgattgccaattcggggaacgccaacgcctgtacaggcgaaggcggccttgccgtggcgcgtaaaatggcgaaccttgccgggggccttttcggcataagccccaaagaagtagcggtggcttccaccggggttataggcgtacctctcccgatagaacctattgaaagcggtatggcttcccttcgcgacgcgctaaaaagcagcgaagaaggccatttaacggcccttgaagcgatcatgactacngacatacgcaagaaagacggggcggtggaaattgaatag

SEQ ID NO: 17058 - protein, 173 aa, Unknown
  Obtained from environmental sample
  DOMAIN (21)...(173): ArgJ family
  misc_feature (1)..(173): Xaa is any amino acid
MSDLKCDIKRINGGVCAPKGFSAGGIHCGIRTKSKKLDLALLYSEKPCTAAAMFTTNKVKSACILVSREHVSGGVLRAVIANSGNANACTGEGGLAVARKMANLAGGLFGISPKEVAVASTGVIGVPLPIEPIESGMASLRDALKSSEEGHLTALEAIMTTDIRKKDGAVEIE

SEQ ID NO: 17059 - DNA, 735 bp, Unknown
  Obtained from environmental sample
  misc_feature (1)..(735): n is a, c, g, or t
atgaaagcgcatgatcctaatgttccaattctgcttcttgtgatgaacaattccagccttgcggggctggatccatccaggcctgaatgtaaagcggttattgataaaatatttgtttggaacgggtattccaaactgtttgtagccatgatcaagtacattgaagacctgcgtaatgttgataacgatacgcaaattggcatggttccggtaatcctccttatagaggattccatccgttactactcgcgctatctgcctgagctttactctgtggtcttaaaccagaccaaagttcttctggaggaagaacgctctgttgaaacaaacaaaataatcagaatgagatggcggcccaaaattcttttggccgccaattacgaagaggccctggatttgttcaaacgttatgaaccctatttgttgacggtgatttcagacatccgttatccggtcaatggcgttgatgatccggaagccggatttaagtttcttaccgaggtcagggcaagaaggcccgaaacacccattctattgcaatccagcgaagactcaaatcgggacaaaatttatgcaatgggagccgcgtttgtagataaaaattcaaatacattgggccatgacatgatcgtcttttttcaaactcatctgggctttggcccgtttgtttttagaaggtctgatggtgtggagctgtcacgggccgcaacaatggatgagctggaaaccaattaa

SEQ ID NO: 17060 - protein, 244 aa, Unknown
  Obtained from environmental sample
  misc_feature (1)..(244): Xaa is any amino acid
MKAHDPNVPILLLVMNNSSLAGLDPSRPECKAVIDKIFVWNGYSKLFVAMIKYIEDLRNVDNDTQIGMVPVILLIEDSIRYYSRYLPELYSVVLNQTKVLLEEERSVETNKIIRMRWRPKILLAANYEEALDLFKRYEPYLLTVISDIRYPVNGVDDPEAGFKFLTEVRARRPETPILLQSSEDSNRDKIYAMGAAFVDKNSNTLGHDMIVFFQTHLGFGPFVFRRSDGVELSRAATMDELETN

SEQ ID NO: 17061 - DNA, 618 bp, Unknown
  Obtained from environmental sample
  misc_feature (1)..(618): n is a, c, g, or t
atgatggccggntcggatggatataataaactggcaaatctgcaaaaagtgagcccgcggttagggttgacgacggtggcttcgcttgccatacgcctgctccttatctgcgcggttttgctgctgatactgtctattcccgaccttatgttccagcgctggcgcttccgggaacggaacaaaatgtcccggcaggaaatgaaagaagaaatgagaatgtatgaaggagacccgcagatacggggcagaatccgcagccgtttccgggaactcctgaaacaaaatattgccgcggcggttccccgcgccgacgtggttatcaccaacccgacccactatgccgtggcgctggagtatcagcgggataccatgccggggccgatggtgaccgccaagggcgcggatgagatggcggcgcggatacggaatttggcccgtgacaacggcgttccgttagttgaaaacaagcccgtcgcccaggccttgttccgggagacggaggtgggggattatattcccgaagcgtattattccgtggttgcgaccatattcagaaaggtgatggatattaatgaactgcggcgcaagacaaaagcgtctgagaaggcaagcgcatga

SEQ ID NO: 17062 - protein, 205 aa, Unknown
  Obtained from environmental sample
  DOMAIN (2)...(188): FlhB HrpN YscU SpaS Family
  misc_feature (1)..(205): Xaa is any amino acid
MMAGSDGYNKLANLQKVSPRLGLTTVASLAIRLLLICAVLLLILSIPDLMFQRWRFRERNKMSRQEMKEEMRMYEGDPQIRGRIRSRFRELLKQNIAAAVPRADVVITNPTHYAVALEYQRDTMPGPMVTAKGADEMAARIRNLARDNGVPLVENKPVAQALFRETEVGDYIPEAYYSVVATIFRKVMDINELRRKTKASEKASA

SEQ ID NO: 17063 - DNA, 759 bp, Unknown
  Obtained from environmental sample
  misc_feature (1)..(759): n is a, c, g, or t
gtgggaatagaacttgttcagtacggtttgnccgcagagggcgattttaaaattaattcgtataaagttgaaaacgagaaaggtgttttttccattgcgggatttcccgatgaatttaaaattcgcattcccggcagacatcaggctttaaatgttgcggcaggtttggctcttgcctcctcgctggcaaaaaatgacggcgcggtaaatggaaccggcttaaatcaaaatcaactggagtccataaaaaacgctcttatcaattttaaaagcactaaacgccgaagcgaaataataggcgaaactggcggaataatttttatggacgattacggacatcaccctactgcgataaaaacaacgcttgtcggaattaaaaatttttatccaaatcggcggctgattgtgagttttatgtcacacacatatacccgtacatcagctttactggatgaattttcaaaatgttttaacgatgccgatattctttacctgcataaaatttacgcgtccgcgagagaaaattataagggcggcgttaacggatatacactctatgaaaaaacatccaatgtccgtaccgccgccggtaaaaggcaaacattctattttgatgagatagatgacgcattccagccattatgtgaaactttaaaaagcggcgacatttttatcactcttggagccggaaacaactggccgcttggcgtaaaacttctaaagtattttagttcaaaggacgggggaaaacatggttag

SEQ ID NO: 17064 - protein, 252 aa, Unknown
  Obtained from environmental sample
  DOMAIN (92)...(180): Mur ligase family, glutamate ligase domain
  misc_feature (1)..(252): Xaa is any amino acid
MGIELVQYGLXAEGDFKINSYKVENEKGVFSIAGFPDEFKIRIPGRHQALNVAAGLALASSLAKNDGAVNGTGLNQNQLESIKNALINFKSTKRRSEIIGETGGIIFMDDYGHHPTAIKTTLVGIKNFYPNRRLIVSFMSHTYTRTSALLDEFSKCFNDADILYLHKIYASARENYKGGVNGYTLYEKTSNVRTAAGKRQTFYFDEIDDAFQPLCETLKSGDIFITLGAGNNWPLGVKLLKYFSSKDGGKHG

SEQ ID NO: 17065 - DNA, 360 bp, Unknown
  Obtained from environmental sample
  misc_feature (1)..(360): n is a, c, g, or t
atgttaaacaaacaagaagcggcacgtgagcttaaagagaacattcttccgttctggaggaacatggccgatgaggagaacggcggcttttacggcgaagctgatttttacggcaagctgaacaaaaccgccgacaagggctgtattttaaattcgcggatattgtggacgttttctgccgcataccgtgtatttggggatgacgcctacaaggcttgcgcccggcgtgcgcgggattttttgtcctcagcttttcatgatacggcgcatggcggggtgtactggctggtagaccataccggtaaggcgctggatacaaggaagcaattttataatctcgcctttggaattacgcgttaa

SEQ ID NO: 17066 - protein, 119 aa, Unknown
  Obtained from environmental sample
  misc_feature (1)..(119): Xaa is any amino acid
MLNKQEAARELKENILPFWRNMADEENGGFYGEADFYGKLNKTADKGCILNSRILWTFSAAYRVFGDDAYKACARRARDFLSSAFHDTAHGGVYWLVDHTGKALDTRKQFYNLAFGITR

SEQ ID NO: 17067 - DNA, 834 bp, Unknown
  Obtained from environmental sample
  misc_feature (1)..(834): n is a, c, g, or t
atggaagccggtgtgggcggcggcggttatattgaaaagaccgcgccggaagggctgccggagtccgcatggaacaacgtaaacctcgaacttgggatgttggaacctgagtctttttcaaagccccggactctgctgtacagcgcttataccgtacagaaaggcgatatgatcggcgggttggcggagaatttcgggcttaaccaggataccatcatttcgataaacaacataaaaaacacaaggctggtgcagatagggcaggttttgcgtattcccaaccaggacgggataatgtatacggtaaaaaaagacgatacccttgatgctattgccgaaaagtacaaatccaatgtttctgacattcagattgcaaacgagcttttttccaacgctgccctgaccggcacgtcgttgtttatccccggcgcgaaacttgactggacggaaaggcaggaaataaacggcgatctgtttatgtggccagttaacggctatataacttcgccttacggctaccgaatctaccccttcgacgacgacggcggacgccagttccattccggtatggatatcggcgcatcttacggcacccctgtgagggcggccatgtcggggcgtgtcagttccgcgggctgggatgatgtgcttgggaaccatgttgttataagccatcatgccggttacaggacattgtacggccacatgagcgtaataaggggtaaaaccggggcttatgtgggaaccggcgagcgcatcggagacgttggcagcaccggccgcagcaccggccccacgtgcatttcaccgtatacaaaaacggagtcacggtaa

SEQ ID NO: 17068 - protein, 277 aa, Unknown
  Obtained from environmental sample
  DOMAIN (185)...(270): Peptidase family M23
  misc_feature (1)..(277): Xaa is any amino acid
MEAGVGGGGYIEKTAPEGLPESAWNNVNLELGMLEPESFSKPRTLLYSAYTVQKGDMIGGLAENFGLNQDTIISINNIKNTRLVQIGQVLRIPNQDGIMYTVKKDDTLDAIAEKYKSNVSDIQIANELFSNAALTGTSLFIPGAKLDWTERQEINGDLFMWPVNGYITSPYGYRIYPFDDDGGRQFHSGMDIGASYGTPVRAAMSGRVSSAGWDDVLGNHVVISHHAGYRTLYGHMSVIRGKTGAYVGTGERIGDVGSTGRSTGPTCISPYTKTESR

SEQ ID NO: 17069 - DNA, 876 bp, Unknown
  Obtained from environmental sample
  misc_feature (1)..(876): n is a, c, g, or t
ttgcgtggcgggcagtcaaaagaagaacgtgatgaaatctggaaaaagctggaatccggggagagtaaattcattatcgcaaacccggaagtcctgcttacagaacaggtaatgagacggtttgaaaaaataaaaattgttcatattgttattgacgaggcgcactgcgtaagtgaatggggtgaaagtttcaggcctagctatcttgagatcaataagattattaaaaacatttccattgccaacggcggcgccgaaggcgccggcgctcccttgataacggcctttaccgcgacagcaagcgcgcccgtcctggaaaaaataaaaaagtacgtcttcggtgaaatcggggcgcatcagattgtgggaaaccctgacaggccgaatatcgcctattccgcaaagggctgtatagtgagaaaccttgccgcgcgggatctgctgttacaaaacgcccgccccgcgattgtgttctgctcatccagacagggtacggaggaccttgcccgcttcctcagggtcagccttggggaaataggcatggactggcataacgaaatacgtttttaccatgccggtttaagcagggaagaaaaatccaacgtggaaaaatggttcatgggcagcagtcaggctgtattatgcgcaacttgcgcctacgggatgggtgtggacaaggccgatgtccgcactgtcatacacagggactgcgccccttccgtagaggcgtatctgcaggaatcgggcagggccggccgcgacggctcccagtcaagggcgatccttttgtgggggcctgatgacaaaagaagcctgctgcgggcgaaaacagaaacagaccgtctgcggctttccggcctatctcggccgatctga

SEQ ID NO: 17070 - protein, 291 aa, Unknown
  Obtained from environmental sample
  DOMAIN (179)...(255): Helicase conserved C-terminal domain
  misc_feature (1)..(291): Xaa is any amino acid
MRGGQSKEERDEIWKKLESGESKFIIANPEVLLTEQVMRRFEKIKIVHIVIDEAHCVSEWGESFRPSYLEINKIIKNISIANGGAEGAGAPLITAFTATASAPVLEKIKKYVFGEIGAHQIVGNPDRPNIAYSAKGCIVRNLAARDLLLQNARPAIVFCSSRQGTEDLARFLRVSLGEIGMDWHNEIRFYHAGLSREEKSNVEKWFMGSSQAVLCATCAYGMGVDKADVRTVIHRDCAPSVEAYLQESGRAGRDGSQSRAILLWGPDDKRSLLRAKTETDRLRLSGLSRPI

SEQ ID NO: 17071 - DNA, 783 bp, Unknown
  Obtained from environmental sample
  misc_feature (1)..(783): n is a, c, g, or t
atggctgttttatcaattcaatctcatgtggttttcgggtacgccggaaacacggcggcagtttttcccctgcaaaggcttggcagggaagtatgggcaattaacacggttgaattttccaaccacacgggttacggctcgtggaaaggcaaagtactgggcgcggaacttgccgccgagcttattactggtattgaagaaaggggcgtattaaatcgctgtgaagcggtgctttcaggatatttgggcgacgcgtccgtcgccatggctattgtagacgcggttaaaaaggtacgaaaccaatcacctaacgcgctttacgcctgcgatcccgtaatgggcgacgtagggcgcggtttttacgtaaaacctgatatccccggcatttttaacaaagagctaataccgcttgcggatataatgacgccaaaccagtttgaacttgacgctataacgggaataaatacgcaaaatatggcagatacgcttaaagcgataaaggttctgcatgaaaagggtccttcaatcgtgcttgtaacaagttacaaggaaaaagaaggggaactttcaatgattgcctcagataaaaaagaaatatataaaattacaacccccgaactgccgcttgataagggagtcgccggaaccggggacatgaccgcggcggtgtttttatcgcggtatctagagactaaagaccttaaaaaaactctggaattgtgtaccgcctcagtttttggcattttagaggcaagtttaaagcggcaactctcggccatctga

SEQ ID NO: 17072 - protein, 260 aa, Unknown
  Obtained from environmental sample
  DOMAIN (56)...(258): Phosphomethylpyrimidine kinase
  misc_feature (1)..(260): Xaa is any amino acid
MAVLSIQSHVVFGYAGNTAAVFPLQRLGREVWAINTVEFSNHTGYGSWKGKVLGAELAAELITGIEERGVLNRCEAVLSGYLGDASVAMAIVDAVKKVRNQSPNALYACDPVMGDVGRGFYVKPDIPGIFNKELIPLADIMTPNQFELDAITGINTQNMADTLKAIKVLHEKGPSIVLVTSYKEKEGELSMIASDKKEIYKITTPELPLDKGVAGTGDMTAAVFLSRYLETKDLKKTLELCTASVFGILEASLKRQLSAI

SEQ ID NO: 17073 - DNA, 837 bp, Unknown
  Obtained from environmental sample
  misc_feature (1)..(837): n is a, c, g, or t
atgttgagtttaaataagaatgtttttttaattctttgtcttacggcagttcaggcgtttgctcaagttcctgaaacaaacacatcaactgcggacgaaatggaaaccctgttaaacacaaatgccgttacttatttacaggcggtgcgctttgtgctggaagcggctgacattgccgcaatcactgaccgaggcgaagcgtttcaatacgcaaaagaacaaaacctgcttccgcaaaaagccgcgccggatactgcggttacattggaaaacatttcttatattttaatgaaatctttcaatataaaaggcggaattatttataccatctccaaaaatccgcactttgcgtatcgggagcttgtctacaaagaaataattcagggcagagccgatcccgacatgaaagtatcaggcgatcaactgctttttatgatcggaagattattagcggatcgggatgaagctgtcgcagtaaagccaaaagtaactaaaaagaaaaaagatgccgaaaccagccataaagaagagattgccgccgccattaatgcggcgttggaagagcaaaaagtgcaggatacccaagcttcggtaacggaagaaggaattataatcaacctttccaatattcaattcccggccgactcggcgactttaccggattcagaaaagaaaaaacttcgtgatgtttctgcaatcctaaaggcaatttcagcaaaaaaaataatagtcgcgggacattccgcgatggccggttctgaagaaggacggcgcaaactttccttcgaccgcgctgtctcggttgccgcatatcttagttctttggaaaacttgtaa

SEQ ID NO: 17074 - protein, 278 aa, Unknown
  Obtained from environmental sample
  SIGNAL (1)...(21)
  DOMAIN (211)...(278): OmpA family
  misc_feature (1)..(278): Xaa is any amino acid
MLSLNKNVFLILCLTAVQAFAQVPETNTSTADEMETLLNTNAVTYLQAVRFVLEAADIAAITDRGEAFQYAKEQNLLPQKAAPDTAVTLENISYILMKSFNIKGGIIYTISKNPHFAYRELVYKEIIQGRADPDMKVSGDQLLFMIGRLLADRDEAVAVKPKVTKKKKDAETSHKEEIAAAINAALEEQKVQDTQASVTEEGIIINLSNIQFPADSATLPDSEKKKLRDVSAILKAISAKKIIVAGHSAMAGSEEGRRKLSFDRAVSVAAYLSSLENL

SEQ ID NO: 17075 - DNA, 786 bp, Unknown
  Obtained from environmental sample
  misc_feature (1)..(786): n is a, c, g, or t
atggaattcttcaggcttgcctcgcagcttaacctgaaaaacgccaaaatttgcgctttcggccccacgcggaaaagaggggtgaaagcgtctgacgatacccatcttcgcagccttctggatgccggaaccgaaggggtgacgatcttcggcaaaagctgggatttgcacgtaaccgagatactccgcgcggggcttgatgaaaatatagccatgatagccgaaaccgccgcgttcctcaaagcccagggccgcgcggtgatctacgacgcggaacatttttttgacggctggtccgcaaacccggattacgccctttccacgctgaaggcggcctgggactcaggcgcggacatgctggtgttatgcgacaccaacggcggcgctttccctgaaactgtcattgccggcgtaaaggccgtgagggattttatcccggacgcgccgcttggaatacacgcgcataacgattccggcctcgctctggcgaataccataggcgcggtacaggcgggctgcgtccacgtgcaggggacgctggcgggttttggggaacgctgcggcaatactgcccttgcggcgctgcttcccagcctggaacttaaaatggggctgcgctgcctgccctccggcagccttgaaaagctttttgagctgacccgcagggtggcggaaattgccaatatcctgataagcgatgacatgccctatataggcggccacgcgttctcgcacaaggcggggatgcatgccgacggcatcctgaaaaaccaggcgttcctttga

SEQ ID NO: 17076 - protein, 261 aa, Unknown
  Obtained from environmental sample
  DOMAIN (5)...(229): HMGL-like
  misc_feature (1)..(261): Xaa is any amino acid
MEFFRLASQLNLKNAKICAFGPTRKRGVKASDDTHLRSLLDAGTEGVTIFGKSWDLHVTEILRAGLDENIAMIAETAAFLKAQGRAVIYDAEHFFDGWSANPDYALSTLKAAWDSGADMLVLCDTNGGAFPETVIAGVKAVRDFIPDAPLGIHAHNDSGLALANTIGAVQAGCVHVQGTLAGFGERCGNTALAALLPSLELKMGLRCLPSGSLEKLFELTRRVAEIANILISDDMPYIGGHAFSHKAGMHADGILKNQAFL

SEQ ID NO: 17077 - DNA, 342 bp, Unknown
  Obtained from environmental sample
  misc_feature (1)..(342): n is a, c, g, or t
gtgtcaagcggatggcgcttgcctgatacggcggattggaataaattggttaacgcggcggctggcggttcttctacggcgggcaaaaaactgaaatcgacatacggttgggacagtgatggtaacggtacagatgagtttggattttcggctctgcctggcggctaccgcagcaccgacggcagtttcggcactgtcggcaagagcggcgactggtggacggccacggaggacgggagcggtagcgcctacggccggtacatgcgctatggcgaagacaacgtgggcgagtacggcggcgacaagggccacggtaactctgcacgttgcttgcaggactga

SEQ ID NO: 17078 - protein, 113 aa, Unknown
  Obtained from environmental sample
  misc_feature (1)..(113): Xaa is any amino acid
MSSGWRLPDTADWNKLVNAAAGGSSTAGKKLKSTYGWDSDGNGTDEFGFSALPGGYRSTDGSFGTVGKSGDWWTATEDGSGSAYGRYMRYGEDNVGEYGGDKGHGNSARCLQD

SEQ ID NO: 17079 - DNA, 498 bp, Unknown
  Obtained from environmental sample
  misc_feature (1)..(498): n is a, c, g, or t
gtggaacctgctcccgacgcggcgcgttatgtgaaagaagagcttggtttcccctgttatcagggtttcttccccgctgctatgaaaggcttaagcggttttgatgcggtaactttatggtacgtaatcgagcattttgaggaagtaggggaagcgctccgcgagattcacgggctattaatagagggcggggtgttggctttttctaccccttctttttccggaatttcaggcaaaaaatccctctcttcatttttgaaaaacagccctccggatcattttactgtctggagccccaggatctgcgcctggattttaaggcgctacggtttcaggctccgcaaaatcgtggttaccggccaccaccccgagcgctttcctctgcttggccggtttgcagaccctgcgaaaaaaagtccgctttaccgttttctgttttttataagccgccttttccgcctcggcgacactttcgaagtctacgccgtgaaaggttga

SEQ ID NO: 17080 - protein, 165 aa, Unknown
  Obtained from environmental sample
  misc_feature (1)..(165): Xaa is any amino acid
MEPAPDAARYVKEELGFPCYQGFFPAAMKGLSGFDAVTLWYVIEHFEEVGEALREIHGLLIEGGVLAFSTPSFSGISGKKSLSSFLKNSPPDHFTVWSPRICAWILRRYGFRLRKIVVTGHHPERFPLLGRFADPAKKSPLYRFLFFISRLFRLGDTFEVYAVKG

SEQ ID NO: 17081 - DNA, 534 bp, Unknown
  Obtained from environmental sample
  misc_feature (1)..(534): n is a, c, g, or t
atgcgttacgcaggcagaatatttgatctgtttatcctgatggaatggggagacaaaatttatataatcgaccagcacgccgcgcatgaacgtataatttataataaattccttagcgagcctgtccccaaacaagaactgcttgcgcccattccattcactacggaaagcgacgaagaagacgtttttctttccgctaaccgcgaagaattgtcgcgtcttggcgttgaaattgaaaaagacgcggaaagctggagtattaccgctctgcccgctgactggcggatgggcgacgcggaaaccgtgaaggaaattctagggcttcggcaagcgggtgaaaacatggcaaaacgctgggcggcgacattttgctgccgcgcggcaattaaagacggcgatcttcttgatgatgaaaccgcttttgaattgggtaaggaagcgttaactttgcctgatccgcgctgtcctcacgggagacctgtttggacggagattagcagggaagcgctttttaaggctgtaagacgggattaa

SEQ ID NO: 17082 - protein, 177 aa, Unknown
  Obtained from environmental sample
  misc_feature (1)..(177): Xaa is any amino acid
MRYAGRIFDLFILMEWGDKIYIIDQHAAHERIIYNKFLSEPVPKQELLAPIPFTTESDEEDVFLSANREELSRLGVEIEKDAESWSITALPADWRMGDAETVKEILGLRQAGENMAKRWAATFCCRAAIKDGDLLDDETAFELGKEALTLPDPRCPHGRPVWTEISREALFKAVRRD

SEQ ID NO: 17083 - DNA, 435 bp, Unknown
  Obtained from environmental sample
  misc_feature (1)..(435): n is a, c, g, or t
gtggcaagccgccatgcctcccttccgtcaacagaactgataatttcaagacgcgctacggcgcaggcagccgccaatgcctcacctctgaatccaagcgtattagcggtatttaaatcatcaaggcattttattttgcttgtcgcgtgggtaagagagcagattgccaaatcttcgcgggtcatgccgccgccgtcgtcggaaacttcaacctttttacaaccgccttcctcaatggagatttcaatgttcaatgagcccgcgtctatggcgttgtcaagaaattcccgcacaagcgcggcggggcggtcgataacttcgccggcggcaatgcgcagagcctcttccggcggcagtatggcaatacggctgtttcccggcatatcagactccattatttttaccactaaccacacgaacgccacgaacttgtag

SEQ ID NO: 17084 - protein, 144 aa, Unknown
  Obtained from environmental sample
  misc_feature (1)..(144): Xaa is any amino acid
MASRHASLPSTELIISRRATAQAAANASPLNPSVLAVFKSSRHFILLVAWVREQIAKSSRVMPPPSSETSTFLQPPSSMEISMFNEPASMALSRNSRTSAAGRSITSPAAMRRASSGGSMAIRLFPGISDSIIFTTNHTNATNL

SEQ ID NO: 17085 - DNA, 543 bp, Unknown
  Obtained from environmental sample
  misc_feature (1)..(543): n is a, c, g, or t
ttgtcgcacaataccacatcccccagcccaagggccaaaagcagccgggcgaccgccgtgccggcggcgcccgcgcccagtatgacggcgttgatgttatccagctttttcccggtgagcttaagcgcgttcaacagggccgccgttgtcacgacagccgtgccgtgctggtcgtcgtggaatatgggaatgtcgcagcgggttttcagcttgcgttcgatttcaaagcagcgcggggccgagatatcctcaaggttaatccccccgaaactccccgctagcagggcggtcgtttcgacaatcacgtcaacttcctttgaacgtatgcacagcgggaccgcgtctatcccgccaaaggctttgaacaggacgcatttaccctccattacgggcattcccgcctcaggcccgatgtcgcctaacccaagcaccgcggttccgtcggtgacaaccgccaccgtgttccagcgtccggtcagttcccagcttttttccgggtatttctgtatttcaaggccagggctgggcgacgccgggcgataa

SEQ ID NO: 17086 - protein, 180 aa, Unknown
  Obtained from environmental sample
  SIGNAL (1)...(29)
  misc_feature (1)..(180): Xaa is any amino acid
MSHNTTSPSPRAKSSRATAVPAAPAPSMTALMLSSFFPVSLSAFNRAAVVTTAVPCWSSWNMGMSQRVFSLRSISKQRGAEISSRLIPPKLPASRAVVSTITSTSFERMHSGTASIPPKALNRTHLPSITGIPASGPMSPNPSTAVPSVTTATVFQRPVSSQLFSGYFCISRPGLGDAGR

SEQ ID NO: 17087 - DNA, 423 bp, Unknown
  Obtained from environmental sample
  misc_feature (1)..(423): n is a, c, g, or t
ttgaaaaatacaagaatttgctatgaattcaaagacaaggttttatttttgcccggcagcaggctggggcaattgaagcgaaatctaaaaaaatacataaccatcgcaaaaaacgaggaaaacgctgtttttgtggcttctcgcaatgaactttttgattttttgaataaaaaacttaaaggcaaatttccagttatcttaaaagaacacggggcatcctttgcaggggcaaaagcggcagtttgcacacctggcaccgctgttttggaagcctacctagctggcgttccaaccatagcggcagcagtgatagaccctttaacatacataatgggcaaaatctttttaaagacaaaatatttgacattgcctaatattattttgcaaaaggaagttgtgagagagcatatatttttgtggtag

SEQ ID NO: 17088 - protein, 140 aa, Unknown
  Obtained from environmental sample
  misc_feature (1)..(140): Xaa is any amino acid
MKNTRICYEFKDKVLFLPGSRLGQLKRNLKKYITIAKNEENAVFVASRNELFDFLNKKLKGKFPVILKEHGASFAGAKAAVCTPGTAVLEAYLAGVPTIAAAVIDPLTYIMGKIFLKTKYLTLPNIILQKEVVREHIFLW

SEQ ID NO: 17089 - DNA, 549 bp, Unknown
  Obtained from environmental sample
  misc_feature (1)..(549): n is a, c, g, or t
ttgattgttaatccacgtctgccaattccgtcagacagggacaacgttttcccgtctatggacacaatttttgtcagcccggattcaaggaccctgtatattaaagttgattattacaggaatacattcgacgaatccacaaacatcagaacgggaattgagcaggacagctctgttatctggattatgaatgtagaagacgggctttgggaaaaatatgtggatgtgcctttttttgaataccagtatacggaacaaaacaggaaaatcactatgaagatgctatattcattgcttggaattgtcagaaacggaaggatatttctttcttttccggtagaaggcggttactccatacttgtcatgccttcggaatacggaacgacaggggagcagcgccagggctttatcagggtagataatgatgaactgcagtttaatgcctttgatctcagcgccgacggaattttatcggggcttttggtcgacgagtggcaggtaaaactggtatggtggaggactgacaaatttcttccgataaatttttaa

SEQ ID NO: 17090 - protein, 182 aa, Unknown
  Obtained from environmental sample
  misc_feature (1)..(182): Xaa is any amino acid
MIVNPRLPIPSDRDNVFPSMDTIFVSPDSRTLYIKVDYYRNTFDESTNIRTGIEQDSSVIWIMNVEDGLWEKYVDVPFFEYQYTEQNRKITMKMLYSLLGIVRNGRIFLSFPVEGGYSILVMPSEYGTTGEQRQGFIRVDNDELQFNAFDLSADGILSGLLVDEWQVKLVWWRTDKFLPINF

SEQ ID NO: 17091 - DNA, 522 bp, Unknown
  Obtained from environmental sample
  misc_feature (1)..(522): n is a, c, g, or t
atggacatgctgaaagagagcggagttgccgtggtgcataacccccagtccaatatgggcaacgccgtgggtgtctctccggtgcttgatatgttgaaaaacggagtacttgttggaatgggaaccgacggctacgccgccgacgtgcttgagtcctataagactgcggctattctccacaaacacgccaaagcgctgccctcggttgcctgggctgagcctcccgccatgctctttgaaaacaacaaaacaataatggaacgttttatcaaaggcaaaatcggcgttctcgcgaagaatcattacgccgatataattatcgttgactataaaggcccgacccctgttaacgcaaataccattaacagtcatatcctttttggcataactggccgccacgttgacacgaccatgatcaacggcaaaattatcatgaaggacagggtcttgctcaacattgacgaggagtctctgatggcaaaatccagggaacaggcaaaaaaactctgggagaggatataa

SEQ ID NO: 17092 - protein, 173 aa, Unknown
  Obtained from environmental sample
  misc_feature (1)..(173): Xaa is any amino acid
MDMLKESGVAVVHNPQSNMGNAVGVSPVLDMLKNGVLVGMGTDGYAADVLESYKTAAILHKHAKALPSVAWAEPPAMLFENNKTIMERFIKGKIGVLAKNHYADIIIVDYKGPTPVNANTINSHILFGITGRHVDTTMINGKIIMKDRVLLNIDEESLMAKSREQAKKLWERI

SEQ ID NO: 17093 - DNA, 438 bp, Unknown
  Obtained from environmental sample
  misc_feature (1)..(438): n is a, c, g, or t
atgaatgattttgccggccttggcgtactgcccgaattcgccgacaggctttccaaaaagtccgtcaattgtccgactgttgtccagcgccttgttatcccaaaattgctggaggggaaaagcgtaattttccgctcagccacaggcacgggcaagactctcgcgtatctgctccccggccttcagcggctgttaagcgacatcggcgctccgtatcatgggccgcggcttcttgtctgcgcccccacccttgaactctgctcccaaataaaagatgaaatagactttttgctggagaataaaagcggcgttaatgtttcgctgcttatcggctccataaatttaagccgccaaatcgacggccttaaaaaaacaaaccccttgttgttgtcggcaatcccggtaggcttctcctgctggcaaagatgggcaaactaa

SEQ ID NO: 17094 - protein, 145 aa, Unknown
  Obtained from environmental sample
  DOMAIN (26)...(144): DEAD/DEAH box helicase
  misc_feature (1)..(145): Xaa is any amino acid
MNDFAGLGVLPEFADRLSKKSVNCPTVVQRLVIPKLLEGKSVIFRSATGTGKTLAYLLPGLQRLLSDIGAPYHGPRLLVCAPTLELCSQIKDEIDFLLENKSGVNVSLLIGSINLSRQIDGLKKTNPLLLSAIPVGFSCWQRWAN

SEQ ID NO: 17095 - DNA, 459 bp, Unknown
  Obtained from environmental sample
  misc_feature (1)..(459): n is a, c, g, or t
atgggaagtttcgccatgcgggactggtcgtcggtattgcttctgcttccgtttttggtcgttggaatagcaggggttttctttttcacaaaggaaatggacattttaagtttcggcgacgaacaggcaaaatcttcgggagtggagacgggagcggtgcggaaaaaactgctcgctctctgcgccgtactgacgggagccgccgtcgctctcagcggcgttatcggctttgtagacctgatagcccctcatgcggcgcgccgaatctgcgggtctaatcacagacatttaatcccaatgtcgtttgttctcggcggctctttacttgttttaaccgacctgttggcaagaacagttgtctcgccgtccgagcttcccgtgggagcgattaccgccctaatcggcgcgccgttttttgcgtgggtctactttaggcggcggcgcaaggcgcaggtgtaa

SEQ ID NO: 17096 - protein, 152 aa, Unknown
  Obtained from environmental sample
  DOMAIN (1)...(145): FecCD transport family
  misc_feature (1)..(152): Xaa is any amino acid
MGSFAMRDWSSVLLLLPFLVVGIAGVFFFTKEMDILSFGDEQAKSSGVETGAVRKKLLALCAVLTGAAVALSGVIGFVDLIAPHAARRICGSNHRHLIPMSFVLGGSLLVLTDLLARTVVSPSELPVGAITALIGAPFFAWVYFRRRRKAQV

SEQ ID NO: 17097 - DNA, 654 bp, Unknown
  Obtained from environmental sample
  misc_feature (1)..(654): n is a, c, g, or t
gtggttccgcttgtctcaatacgcgaaggctaccttatcgatctgcccctcggggtggattcggagcagcaggaggaattttactcgcagattatcgcgtccgcggtaaaccttggcaggaaatttcattttgacgaagcgcacgcccgccatgtcgcgaacctctgcatgacgctttttgacgcgctggtaaaagaacacggcatggattcccgccagcgcatgatgttgaaaacagccgccatcctccacgacatagggtcctttataaaaacatcgggccacaacaggcacggccagtacattgtttccaattctgaaatattcggcctgccccgcgacgagctggacattatcgccaatgttatccgctaccaccagggacgcgaaccgacgcaggcggacatagaatatataagccttcagagggaggagaggatcatagtgctgaaaatggcgtcgattctgcggatcgccgacgcccttgacaggggtcatacccagcagttaaaaaacctcagcgtagaacgcaagcctgagacaatcgccctgcacgcccagggagcctatgacatctcacaggaactaatcgcgctcgaagaaaaagccgactacttccaggcggttttcggctataaagtcgttttgaattag

SEQ ID NO: 17098 - protein, 217 aa, Unknown
  Obtained from environmental sample
  DOMAIN (45)...(165): HD domain
  misc_feature (1)..(217): Xaa is any amino acid
MVPLVSIREGYLIDLPLGVDSEQQEEFYSQIIASAVNLGRKFHFDEAHARHVANLCMTLFDALVKEHGMDSRQRMMLKTAAILHDIGSFIKTSGHNRHGQYIVSNSEIFGLPRDELDIIANVIRYHQGREPTQADIEYISLQREERIIVLKMASILRIADALDRGHTQQLKNLSVERKPETIALHAQGAYDISQELIALEEKADYFQAVFGYKVVLN

SEQ ID NO: 17099 - DNA, 798 bp, Unknown
  Obtained from environmental sample
  misc_feature (1)..(798): n is a, c, g, or t
gtgcgcgctgctgcggcggaatgggggccgcgtttcttccgccgggtggagatgatacgcctgaacggcggctggcaattacaccctgcgttatacgatatgctggcggattctctgcggcgggaaatcgcccttgactggggcaacgcaatgacgctgaccaggctgggccgccgctatatccgcaatgccctgcgcaacctcagcctaattccgcgctgtcattcgctgcggcagctttcgttcggcagcactccggcgctggtattgggggccggcccctcgctggatgaaacgcttgacgattttcaatcccgttttggccatacgctgtgtgcgccggaacagcggcctttcagaatcatctgcgttgatacctgccttccgagtttaaaggaacggggtataacccctgatcttgccgtcattctggaaagccagcactggaatctgaatgactttaccgggctgtccggctggaaagtgcccgccgccctggacctctccgccctgccccgctcggctgccgttctttcaggcggtctttttctttttttcaccccctggacacgattgaacatttttgagcggctgggaaccgccggtttgctgcccttaagcctgcccccgctgggatcggttggcctgagcgccgcgatgattgcccggcggcttacccgcggacctctcatcaccgccggtctggatttttcatttaccatggattcgtatcatgcgcgttcaacgccgggtcataaaggcaaattgcgccgccacaaccgctttaccggcctataa

SEQ ID NO: 17100 - protein, 265 aa, Unknown
  Obtained from environmental sample
  DOMAIN (59)...(237): Protein of unknown function DUF115
  misc_feature (1)..(265): Xaa is any amino acid
MRAAAAEWGPRFFRRVEMIRLNGGWQLHPALYDMLADSLRREIALDWGNAMTLTRLGRRYIRNALRNLSLIPRCHSLRQLSFGSTPALVLGAGPSLDETLDDFQSRFGHTLCAPEQRPFRIICVDTCLPSLKERGITPDLAVILESQHWNLNDFTGLSGWKVPAALDLSALPRSAAVLSGGLFLFFTPWTRLNIFERLGTAGLLPLSLPPLGSVGLSAAMIARRLTRGPLITAGLDFSFTMDSYHARSTPGHKGKLRRHNRFTGL

SEQ ID NO: 17101 - DNA, 861 bp, Unknown
  Obtained from environmental sample
  misc_feature (1)..(861): n is a, c, g, or t
atgacagattggcacgagggtatcgttattgtggcctttgttctggttccggccatagtgcccaatgcccacatgggccgcgatgtggatttgacctttggttattacgataaggttcctatcagctatgtaccggggaattattttgcccagtattacgaaatggtagcccgctaccggcaaaataacatgaacagcgaaaataattcctacgtaaattatcagatatggcgtgaagcgttcgaaggcgccgctattcatacggccgttctccatgaaattaaaaaatccggctacacagcgccgtcaaaaatagttgaccgtgatgtagcccggcttccccaattccaggagaatgggcgtttttccgccgctctctaccggcaaatggatgataaccagcggctggccctgtggcggcaggtacaggatgatattgccaaagatcatttccatgccgatgtaaccggactgctcaagcccgccgcggaagcggaatttatcagtaaaatggcagccgctcagcggagttttgatatgacggttttttcggtggacgcctatcctgaaaccgaatatgaagcctatattcgggaacattccgatttgttccgctctgtccacctttcaatgatcacggtgaattccagcgagcgggaagcgcggaagatacttgattcaatcaaaaacggtgagactacttttgaagacgccgccagggcttattccaaagacggctatgcggataaaggcggggatatggggataaaaatggtttatgaattaaatattgatattcccgaagaacagaacgcgaaaaagttattgcccttgncaaggacgagtacagtgaaattttga

SEQ ID NO: 17102 - protein, 286 aa, Unknown
  Obtained from environmental sample
  misc_feature (1)..(286): Xaa is any amino acid
MTDWHEGIVIVAFVLVPAIVPNAHMGRDVDLTFGYYDKVPISYVPGNYFAQYYEMVARYRQNNMNSENNSYVNYQIWREAFEGAAIHTAVLHEIKKSGYTAPSKIVDRDVARLPQFQENGRFSAALYRQMDDNQRLALWRQVQDDIAKDHFHADVTGLLKPAAEAEFISKMAAAQRSFDMTVFSVDAYPETEYEAYIREHSDLFRSVHLSMITVNSSEREARKILDSIKNGETTFEDAARAYSKDGYADKGGDMGIKMVYELNIDIPEEQNAKKLLPLXRTSTVKF

SEQ ID NO: 17103 - DNA, 843 bp, Unknown
  Obtained from environmental sample
  misc_feature (1)..(843): n is a, c, g, or t
ttgacaaaagtttttaaggaaggcaagggatttcttttaatagcgaatcttgttttggcaagttttcaacgccgtcttggaaacgaactgggagtaaaacccggcgaagaaatgaaaacggcggtacaagccgctcaggaaatgggtttatcttacagcctttgcgaccgtgaggtgcaaacaactttaagcagggcatgggcgcgctgcggcttctggagcaaggcaaaattattagcatctcttttggcaagcgcttttacaacggaaaaacttagtgaaaaagaaatagaagaattaaaaaacaaaaatgagcttgacggcatgatgagcgaacttgcgaattatttgccggctgttaaagaagttttaattgatgaaagagaccgctatcttgccgcgaaaatatgggattctgtgtccgggaaaacaaaccaaagagttatagccgtaatgggcgcgggacacattcagggcattaaaacatatttggaaaaattcagcaaaggcgaagaatcaatcgatgtaagtgaattggaaaaaattcctccggcgggtttgttttccaaaatagcgcgttttattatccccgccgccgttatagctcttgtagccgcaggcttttatcgcgccggaacagggataggtctttccatgatgcttcagtgggtattgtggaacggctctcttgcggccttgggcgcaatcatcgctcttggtcatccgcttgcgattatagtctcttttctgggtgcgccgattacttcgctgaacccgtttatcggcgttggggattttatccggtattgttcaagcggcgttaaaaaaaccgcgggtttctga

SEQ ID NO: 17104 - protein, 280 aa, Unknown
  Obtained from environmental sample
  DOMAIN (1)...(173): TraB family
  misc_feature (1)..(280): Xaa is any amino acid
MTKVFKEGKGFLLIANLVLASFQRRLGNELGVKPGEEMKTAVQAAQEMGLSYSLCDREVQTTLSRAWARCGFWSKAKLLASLLASAFTTEKLSEKEIEELKNKNELDGMMSELANYLPAVKEVLIDERDRYLAAKIWDSVSGKTNQRVIAVMGAGHIQGIKTYLEKFSKGEESIDVSELEKIPPAGLFSKIARFIIPAAVIALVAAGFYRAGTGIGLSMMLQWVLWNGSLAALGAIIALGHPLAIIVSFLGAPITSLNPFIGVGDFIRYCSSGVKKTAGF

SEQ ID NO: 17105 - DNA, 426 bp, Unknown
  Obtained from environmental sample
  misc_feature (1)..(426): n is a, c, g, or t
ttgcgcctccgcgccgcgggcgaacacccgcaggcccttgcctccgccggcgtgaacgtgatcaggatacgctacattgccgtgcttatctccggcattctcgccggacttgccggcggctgcatagtccttactcaggatatccaatatacggtaagcacgataaacggaaagggctttatcgcccttgccgccgtgtcgttcggccgctgggttccattgggcattctcggctccagtttcctgttcggcgtgtcatccgccctggccgtcaacattgtcaatatcagcggcttgcaatttctgccttccgaattttttaacatgatgccttatctgattacgcttgtaacactggtactttttagcggcaaggactacgcgccaagagccgccgggaaaccgtatgataagggaaagagctaa

SEQ ID NO: 17106 - protein, 141 aa, Unknown
  Obtained from environmental sample
  misc_feature (1)..(141): Xaa is any amino acid
MRLRAAGEHPQALASAGVNVIRIRYIAVLISGILAGLAGGCIVLTQDIQYTVSTINGKGFIALAAVSFGRWVPLGILGSSFLFGVSSALAVNIVNISGLQFLPSEFFNMMPYLITLVTLVLFSGKDYAPRAAGKPYDKGKS

SEQ ID NO: 17107 - DNA, 522 bp, Unknown
  Obtained from environmental sample
  misc_feature (1)..(522): n is a, c, g, or t
ttggtagcggcgagcgtgaacaaacgcttcgcgcagttcggcatgcccgccgcgcgccgcgcggcggtggcgctggtatcattggcgcttttggctgcgggaatcgccgtctccgtggcctacctgcgcatagacgtacagatattcaacgacgaccagataggtgtgggcgggccgtactggtcgtctttctcacagagggcgctggagacggcgcacgaagaaaaacgcaacgtgatcgtgaacttcactgcgtcgtggtgcacaaactgcaaactaaacaaggcggccgctcttaacaccgccgcggcgcggcaattatacggcgaaaaaaacattttgctattgactgccgacattacgaacgataacccggaggcgcaggaacttatgcggcatttgggatcgagaagcgtgccgtttttagcgatattcccaggcaacgcgcctaaaaccccggtgataatgcgagatattctttccaaagagaaattcttgggggaactcaggaatttgccttga

SEQ ID NO: 17108 - protein, 173 aa, Unknown
  Obtained from environmental sample
  misc_feature (1)..(173): Xaa is any amino acid
MVAASVNKRFAQFGMPAARRAAVALVSLALLAAGIAVSVAYLRIDVQIFNDDQIGVGGPYWSSFSQRALETAHEEKRNVIVNFTASWCTNCKLNKAAALNTAAARQLYGEKNILLLTADITNDNPEAQELMRHLGSRSVPFLAIFPGNAPKTPVIMRDILSKEKFLGELRNLP

SEQ ID NO: 17109 - DNA, 762 bp, Unknown
  Obtained from environmental sample
  misc_feature (1)..(762): n is a, c, g, or t
atgaatctggcagatgagtacatcaacgcgtatgaacgtttcggccactggaaagacgcagccattatgatccgcggagaagcggcctggagtcttaccctcattttctttcaaatgtggtacatggagaaaaaatctcaggatgatattatttcattttacccctggaaaaacacggatggttctattggaggctgtccgataaaatccaggggttttgttcagccttatgcggacagtcccattgacgaagaaaatgtcggcgaacacgtttacattcagattatcaacaacgcaaaaaagtttgtttacatcaataccccataccttgtgattgacgacagccttctttcggttttggccctttccgccaagagcggggtagacataaggatcatcacgccataccgctgggacaaatggatagtcgccgttgtctcccgctcttactaccgccagttaattcaggccggggtaaagatatacgaatattccgccgggtttaaccattcaaaaacctttgtatccgacgaccgtgtagccaccgtaggaaccacaaacctcgatttcagaagcctctacctgcattttgaatgtggcgtctggatgtatncaaccgaaagcattgcaaacgtcaaggaagatttcataaaaaccctgccgtcctgccgggaaatcacacttgagggttgttccagaaacgcggcgcagaggattttccaggatgtgcttagggttttttgcgccgctgatgtagtataa

SEQ ID NO: 17110 - protein, 253 aa, Unknown
  Obtained from environmental sample
  DOMAIN (165)...(192): Phospholipase D Active site motif
  misc_feature (1)..(253): Xaa is any amino acid
MNLADEYINAYERFGHWKDAAIMIRGEAAWSLTLIFFQMWYMEKKSQDDIISFYPWKNTDGSIGGCPIKSRGFVQPYADSPIDEENVGEHVYIQIINNAKKFVYINTPYLVIDDSLLSVLALSAKSGVDIRIITPYRWDKWIVAVVSRSYYRQLIQAGVKIYEYSAGFNHSKTFVSDDRVATVGTTNLDFRSLYLHFECGVWMYXTESIANVKEDFIKTLPSCREITLEGCSRNAAQRIFQDVLRVFCAADVV

SEQ ID NO: 17111 - DNA, 888 bp, Unknown
  Obtained from environmental sample
  misc_feature (1)..(888): n is a, c, g, or t
ttgttggggaatattggatggaagagagaagatgtgttcattaccaattctattctttgtaatccacaagataaaaatggtaataactctactcctacacaagaagaaatagaaaattgtagctattatcttgaaatgacattagaactaataaatccagatatgattgttacattgggagcaaaagctttagaagcattaaaatgtattaaagatcatgattttgtcttacgcgactgtgttgctcaaaaattatcttggaataatagatatatattccctgtatatcacatgggatcaagagcaactattcataggggaattatcaaacaaaggaaagattttattatcttatcacatattgttgatccaataaaaggaataaaaaatcatccagctaaaataaagagatcgagtaagaaagatttagttttagataacaggttacttgatatggttatagaaattattactgaattaaaatcagtctcattatttaaattaacaaaattgctatatctgattgattataatcattataaagagtttggaaactcaatatctggtaatatttatttgcgtatgcaggatggtccttggattccaacattgaaaaatatcccaagtgaatatgggaaagaattatttaaagtgacttttgatggaaaaaagcccatattatcacatatctcaaataattatttaagtggattaaccgaggaacaaaaggaatttatacttactgtcgttcaaaatataaggatttctctgaatttatttgaaatagccacatatagaacagaaccgatgcagtacatattgggacnagaaaaattagngtcgcatatgtccaggatccctatactctataaaaattcagcattctag

SEQ ID NO: 17112 - protein, 295 aa, Unknown
  Obtained from environmental sample
  misc_feature (1)..(295): Xaa is any amino acid
MLGNIGWKREDVFITNSILCNPQDKNGNNSTPTQEEIENCSYYLEMTLELINPDMIVTLGAKALEALKCIKDHDFVLRDCVAQKLSWNNRYIFPVYHMGSRATIHRGIIKQRKDFIILSHIVDPIKGIKNHPAKIKRSSKKDLVLDNRLLDMVIEIITELKSVSLFKLTKLLYLIDYNHYKEFGNSISGNIYLRMQDGPWIPTLKNIPSEYGKELFKVTFDGKKPILSHISNNYLSGLTEEQKEFILTVVQNIRISLNLFEIATYRTEPMQYILGXEKLXSHMSRIPILYKNSAF

SEQ ID NO: 17113 - DNA, 366 bp, Unknown
  Obtained from environmental sample
  misc_feature (1)..(366): n is a, c, g, or t
gtgatgtcagaattgtgcaatcaattacacgcaattgctcgagaaggcaaacgttttgactttagtatgggatatgacacaatcccgctaaatggcatttgcattatgtttgaaaaaggtgagtttgctcacgctggtgatagaattgtgtatattggaactcatacaggtaacaatcaattgaaaagtcgcatctaccaacattttgaaaacgaaaacaaaaacagaagcatttttcgtaaaaacattggcagatgtttcttaaaccgtacaaatagtcactacttatctacatgggaattagatacaacttctagaagaaaaaaagagctgtactctaatctcattgaccgagaactgaaatag

SEQ ID NO: 17114 - protein, 121 aa, Unknown
  Obtained from environmental sample
  misc_feature (1)..(121): Xaa is any amino acid
MMSELCNQLHAIAREGKRFDFSMGYDTIPLNGICIMFEKGEFAHAGDRIVYIGTHTGNNQLKSRIYQHFENENKNRSIFRKNIGRCFLNRTNSHYLSTWELDTTSRRKKELYSNLIDRELK

SEQ ID NO: 17115 - DNA, 504 bp, Unknown
  Obtained from environmental sample
  misc_feature (1)..(504): n is a, c, g, or t
ttgggttggggcacatacaaagtcggcgaaagaggccctgccggcgggattgtcttctatgacaaggggaacgatgatggcggctggcgctatctggaagccgcgcatgaggatattcagggtacatctgtagcgctttcagaaagtataaatatggacaactgcggtgaacgggctgtgggaaaagggaaatcaaacaccaaggcaatcatggtagaagcagataagaaaggcggcggtttcacatgggcggcttataagtgtgtaaactacacccagggcggctataacgactggttccttccctcacgtgacgaactgaactatatgtacggcaatctacacgcgaaagaattgggaggtttcaggaatgaaaattattggtcatcaactgccgatggttccaattatttttggcatataaatttttctaatggaaccgaaggttcttcccattatagttggaacagtctccgtgtccgccccataaggcagtttaggtaa

SEQ ID NO: 17116 - protein, 167 aa, Unknown
  Obtained from environmental sample
  misc_feature (1)..(167): Xaa is any amino acid
MGWGTYKVGERGPAGGIVFYDKGNDDGGWRYLEAAHEDIQGTSVALSESINMDNCGERAVGKGKSNTKAIMVEADKKGGGFTWAAYKCVNYTQGGYNDWFLPSRDELNYMYGNLHAKELGGFRNENYWSSTADGSNYFWHINFSNGTEGSSHYSWNSLRVRPIRQFR

SEQ ID NO: 17117 - DNA, 456 bp, Unknown
  Obtained from environmental sample
  misc_feature (1)..(456): n is a, c, g, or t
ttgtcagattggccgagaactggaagtgcaagctacgaagttgtagttaaagcgaaggcggattgggtggaaatgacggttggggtgctggaaaaacacggggtgtatcactcgatgaatccaagcgtaacggtggcggataatgctgttctttcgcttgaggagaagtttcagggcggtacgggaattaattttactcctcccccaaaacatattattagcgccggactggttggggaaataaagaaaaacatggagattgccgcaaagggatgcggcgttgaagattattgccgtatagacatatttgcaaataacgataccaatgaaattattgtaatagaaataaacagcctgccgggattgtctccgtctaccgtgttgtttcaacaaggggcaaaagaagaacctccgctttatccaatggaattattagagtatattatatcaaagtag

SEQ ID NO: 17118 - protein, 151 aa, Unknown
  Obtained from environmental sample
  misc_feature (1)..(151): Xaa is any amino acid
MSDWPRTGSASYEVVVKAKADWVEMTVGVLEKHGVYHSMNPSVTVADNAVLSLEEKFQGGTGINFTPPPKHIISAGLVGEIKKNMEIAAKGCGVEDYCRIDIFANNDTNEIIVIEINSLPGLSPSTVLFQQGAKEEPPLYPMELLEYIISK

SEQ ID NO: 17119 - DNA, 312 bp, Unknown
  Obtained from environmental sample
  misc_feature (1)..(312): n is a, c, g, or t
atgaaagaacttttgttatctgaaatcataaccggaatgagcgccacggcgttaaattaccggcagcatgatataattgtaaaaggcgtaagtacagacacgcgaagtttaaaaaaaggggatatgtacattgcccttaaaggcgaaaattttgacggtcatgattttatttctatcgcgcagacnaaaggagcgtgcgccgtcgtatgttccagagatgtggattcatcactgccggttttaaaagtaaacgatactttgactgctctgcaaagcttgcggcttatacaggacaaattcaatatcccataa

SEQ ID NO: 17120 - protein, 103 aa, Unknown
  Obtained from environmental sample
  DOMAIN (26)...(98): Mur ligase family, catalytic domain
  misc_feature (1)..(103): Xaa is any amino acid
MKELLLSEIITGMSATALNYRQHDIIVKGVSTDTRSLKKGDMYIALKGENFDGHDFISIAQTKGACAVVCSRDVDSSLPVLKVNDTLTALQSLRLIQDKFNIP

SEQ ID NO: 17121 - DNA, 447 bp, Unknown
  Obtained from environmental sample
  misc_feature (1)..(447): n is a, c, g, or t
atgcttaagatgaataatttgaggccggcggcggggtcgcaccgcgagacaaagagactggggcgcggcacgggcagcgggcagggcaagacggcggggcatgggagcaacggcgacaagtctcgcagcggctcataccaaaaattttactttgagggcggccagacgccgcttacgcgtcgcatacccaaggtgggtttccacagcccgtttaagaaagagtatcagatcgtcaacgtcggcgcgcttgaggaggccgatttgggcggatccgacgttactgccgagacgctccgtaaattgggccttatacatgaggctgacaggcccgtgaagattttggggacgggcgagttgactaaggcgctggtgtttcgggtagatgcctattcgaagtcggcgaaagagaagattgagaaagcaaaagggaaagcagaggtcgtataa

SEQ ID NO: 17122 - protein, 148 aa, Unknown
  Obtained from environmental sample
  DOMAIN (112)...(143): Ribosomal protein L15
  misc_feature (1)..(148): Xaa is any amino acid
MLKMNNLRPAAGSHRETKRLGRGTGSGQGKTAGHGSNGDKSRSGSYQKFYFEGGQTPLTRRIPKVGFHSPFKKEYQIVNVGALEEADLGGSDVTAETLRKLGLIHEADRPVKILGTGELTKALVFRVDAYSKSAKEKIEKAKGKAEVV

SEQ ID NO: 17123 - DNA, 789 bp, Unknown
  Obtained from environmental sample
  misc_feature (1)..(789): n is a, c, g, or t
ttggctcatcttatttacagccacaaatacattgctgcgtcttcaattacactaaccgacccgagcaattctgagaacaatatttccgtttctggtgcagactctatacgtgggcgcggaaattccacctgggctggggacaaaaagccatatagaataaaatttgcagagcataaatccatgttcggaaaaacaaaaaaacacaaaagctgggcactactcgcaaattggtacgaccaaacctttgccctaaatgcagttgggtttgaactcggcaaacgcattgggatccccggcacaccaaaccaattcctcgtggatttctatttaaacaatgaatacaaagggatttaccaaataacggacatagttcaggtgaacaaaggtagattagaaatagacgagaacgatggatggcttgttgaatttgactaccactgccccagcgatgcagatgaggtcagttttgccaccgattacccagacacaaattttcgaggtgcgcagtttttaggttctgccaaattgcacacattcataaaatcgccagaggatttacctagctcatctggctacgattttgtaaaaaaagacgtaaatgaccttacgaccgctatgtttaaaaaatctggttttccagaaaatggttaccgtgatttagtggatttggagagtgttgcaaaatacttaatgctagagcagttcttggacaattatgattttaacaacaatcacaacccagcggctttccagcttcaaactttttcacaagacagggcggcaaaataa

SEQ ID NO: 17124 - protein, 262 aa, Unknown
  Obtained from environmental sample
  misc_feature (1)..(262): Xaa is any amino acid
MAHLIYSHKYIAASSITLTDPSNSENNISVSGADSIRGRGNSTWAGDKKPYRIKFAEHKSMFGKTKKHKSWALLANWYDQTFALNAVGFELGKRIGIPGTPNQFLVDFYLNNEYKGIYQITDIVQVNKGRLEIDENDGWLVEFDYHCPSDADEVSFATDYPDTNFRGAQFLGSAKLHTFIKSPEDLPSSSGYDFVKKDVNDLTTAMFKKSGFPENGYRDLVDLESVAKYLMLEQFLDNYDFNNNHNPAAFQLQTFSQDRAAK

SEQ ID NO: 17125 - DNA, 834 bp, Unknown
  Obtained from environmental sample
  misc_feature (1)..(834): n is a, c, g, or t
atgagcattgttgaacgggtgcagcgaatcagcgaaccgtacaaaaaagccaaccgaaaatttcataccgaagacaccgtaatccaggcgggcgaatacttaattggaggggggaatttccagtttattgccggaccgtgttcggtagaatcccctgagcaaatctgcgagattgcccggcaggtatatgcgtctggggcgcgttttttacggggcggcgcgttcaaaccccgcacttcaccgtatgcgtttcaggggctgcgcgacgaaggtatacagttattactgcaggcaaaagaaataaccggaatgcccattgtcagtgaaatcatgaacgccgatcatattgccatgtttgaatgtgttgatgttattcaggtgggcgcccgtaatatgcagaattttgaattgctgaaagaactgggcaagttgaaaaagccggttttgctgaaacgagggctggcaaatacgctggaagaactgttgatgagcgccgagtatatcatgtccggcggaaacgatcaggtgattttatgcgagcgggggattcgtacctttgaaacggcgacccgcaataccctcgatatttccgccatacccatgttaaaacaaatgtcgcaccttccggttgtcattgatccgagccatgccgccggtatcgcaaaactggtgtatccgctgtctatggcggcggcggcggcgggcgcggacggactgcttattgaagtgcataatgatcccgcccatgcgttatgcgacgggccgcaatcaattacgcccggaagaatttgcccgtttatccggcgatgtcaaacggattttagatattattaa

SEQ ID NO: 17126 - protein, 277 aa, Unknown
  Obtained from environmental sample
  DOMAIN (25)...(276): DAHP synthetase I family
  misc_feature (1)..(277): Xaa is any amino acid
MSIVERVQRISEPYKKANRKFHTEDTVIQAGEYLIGGGNFQFIAGPCSVESPEQICEIARQVYASGARFLRGGAFKPRTSPYAFQGLRDEGIQLLLQAKEITGMPIVSEIMNADHIAMFECVDVIQVGARNMQNFELLKELGKLKKPVLLKRGLANTLEELLMSAEYIMSGGNDQVILCERGIRTFETATRNTLDISAIPMLKQMSHLPVVIDPSHAAGIAKLVYPLSMAAAAAGADGLLIEVHNDPAHALCDGPQSITPGRICPFIRRCQTDFRYY

SEQ ID NO: 17127 - DNA, 324 bp, Unknown
  Obtained from environmental sample
  misc_feature (1)..(324): n is a, c, g, or t
atggctacaggctggtatgttcttcatatctattccggttatgagaacaaaattgaaaaaacaatccgcaatatgctcgagatgggagaactcgacaaggagatcgtccgcgatgtgaagattcccgccgaggaagttaccgaggtaaaggacggggagaaacgtaccataaccaaaaaattccttcccggctatatcctggtggaaatggatctccctgacgtggatatgggctggaaggagcctttgtcaaaaatcaagaagatccagggtgttaccggctttgnttggaacccccacggggcggtaagccccagcgcttag

SEQ ID NO: 17128 - protein, 107 aa, Unknown
  Obtained from environmental sample
  DOMAIN (3)...(106): Transcription termination factor nusG
  misc_feature (1)..(107): Xaa is any amino acid
MATGWYVLHIYSGYENKIEKTIRNMLEMGELDKEIVRDVKIPAEEVTEVKDGEKRTITKKFLPGYILVEMDLPDVDMGWKEPLSKIKKIQGVTGFXWNPHGAVSPSA

SEQ ID NO: 17129 - DNA, 882 bp, Unknown
  Obtained from environmental sample
  misc_feature (1)..(882): n is a, c, g, or t
ttggagactatcctgcacggttgcggactgcgttacctgttcactgagacgcacgggcttttggacgccgacccgcgcccgccaaacggcgtgtacgcgccggttaggtgccgcgaggcccccgtggcggctttcgcccgcgacgcggagtgctcacgctccgtatggagcgccgacgagggctaccccggcgacccgcactaccgcgacttccacaaagacataggtcatgacctcgacatgcgctatatagccccctacatagacccggcgggcattcgtatccacacgggcataaagtaccaccgcgtaacggataagcgcaacccgaacaagctgctttacgagagggaagacgcgttgcgccgcgcctccgtccacgcctccgacttcctaaaaaaacgcgccgagcaaataggcaaaatcgccgacggcatgaaccgcccccccatagccgccgccccctacgacgcggaactcttcggccactggtggttcgaaggcccggaatggctaaattttctaatccgcaaatgcgccgcggagcaagacgcattcacgatgacgaccccgtcggaatacttggaacggcatcccgaaagccacacctgcgcccccgccttctcaagctggggcgacggcgggtactcgcaagtctggctaaacgagacaaacgagtggatatacccgcacctccacagaatggaagacaaaatggtagattgcgccagagagttccgccttgtaggctgcggacttgaacagagggcgttaaatcaaatggcgagagaattgctattagcgcaatcaagcgactgggcatttatcatgaaaaccngggacgacggtagagtacgcgacgcgcagggtaaagaacaatag

SEQ ID NO: 17130 - protein, 293 aa, Unknown
  Obtained from environmental sample
  misc_feature (1)..(293): Xaa is any amino acid
METILHGCGLRYLFTETHGLLDADPRPPNGVYAPVRCREAPVAAFARDAECSRSVWSADEGYPGDPHYRDFHKDIGHDLDMRYIAPYIDPAGIRIHTGIKYHRVTDKRNPNKLLYEREDALRRASVHASDFLKKRAEQIGKIADGMNRPPIAAAPYDAELFGHWWFEGPEWLNFLIRKCAAEQDAFTMTTPSEYLERHPESHTCAPAFSSWGDGGYSQVWLNETNEWIYPHLHRMEDKMVDCAREFRLVGCGLEQRALNQMARELLLAQSSDWAFIMKTXDDGRVRDAQGKEQ

SEQ ID NO: 17131 - DNA, 708 bp, Unknown
  Obtained from environmental sample
  misc_feature (1)..(708): n is a, c, g, or t
gtgatgatcaactccccccacaacccgaccggcagggtgtactccgccggggatatggctgccctggcggagattctgcgaagccatgggaaaaaaaccggacggcggccctacctggtagcggatgaaccctaccgggaaattgtgtatgacggcattgccgtaccgccggtgctttccgtctacgaagaatccattgttgtcacttccttttccaagagcctttcccttcctggggaacggatcggatatattgccgcagggccggaaatcggcgatccggaaaatgtcctgggggcgttgatctatgccaccagagttctgggctttgtgaacgccccggccctgatgcagcgaatggcggcggaactttccggcgaacgggtagcggtggaagtatacaagcgccgccgcgacgcctttaaggaagttttggacaaggcgggaattgcctatgcagatccggaaggggctttttatttgtttgccaaagttccttcccaaagcgagaagggcaaagccgaaagtcaatcaaccgcggatgacaaagccttttctgattgtttaaagaagcaccttgttctgggggtgccgggaagcaattttgccgcccccggctggatccgttttgcctactgcgtggacgaaaaggtgatccgcgcttccgccgctgcttttaaggaagcggtggatgaatggatgtcttga

SEQ ID NO: 17132 - protein, 235 aa, Unknown
  Obtained from environmental sample
  misc_feature (1)..(235): Xaa is any amino acid
MMINSPHNPTGRVYSAGDMAALAEILRSHGKKTGRRPYLVADEPYREIVYDGIAVPPVLSVYEESIVVTSFSKSLSLPGERIGYIAAGPEIGDPENVLGALIYATRVLGFVNAPALMQRMAAELSGERVAVEVYKRRRDAFKEVLDKAGIAYADPEGAFYLFAKVPSQSEKGKAESQSTADDKAFSDCLKKHLVLGVPGSNFAAPGWIRFAYCVDEKVIRASAAAFKEAVDEWMS

SEQ ID NO: 17133 - DNA, 846 bp, Unknown
  Obtained from environmental sample
  misc_feature (1)..(846): n is a, c, g, or t
atgaaaacagcccttatatcaggcgttaccggacaagacggcgcttacttgtcggaattccttcttaaaaaggggtatgccgtccacggtattaaacgccgttcatccagctttaacactgaacgtattgatcatctgtaccaggatccacatgagaaggaaaaaaagttttttcttcattatggcgatttaacggacacttccaaccttgtacgtattgttcaggaagtacaaccggatgaaatatacaaccttggcgcgcaaagtcatgttcaggtttcttttgaagttccagagtatacagcggacacggacggaataggaacattaagactattagaagctgttagaattttaggcatggaaaataaggtaaggttttatcaggcttccacaagcgaattgtttggtaaagtgcaggagattcctcaaaaagagacgactcctttttatccgcgaagcccttatgcggcggcaaaactatatgcctattggatagttgtgagttatcgtgaatcttacggtatgtttgcatgtaacggcatacttttcaatcatgaaagcccaatacgtggagagacttttgttacccgtaaaattacccgcgccgccgcccgaataaaattaggattgcaggataaactttacataggtaatattgacgccaagcgcgactggngctacgcgggcgactatatagagcttatgtggctaatgctccagcagaaagaggcggacgacttcattatggcgacaggggttactactaccgtaagggactttatttcaatggcattttcagaggccggaaataacaattttatgggagggcaaaggtgtcagtga

SEQ ID NO: 17134 - protein, 281 aa, Unknown
  Obtained from environmental sample
  DOMAIN (4)...(251): NAD dependent epimerase/dehydratase family
  misc_feature (1)..(281): Xaa is any amino acid
MKTALISGVTGQDGAYLSEFLLKKGYAVHGIKRRSSSFNTERIDHLYQDPHEKEKKFFLHYGDLTDTSNLVRIVQEVQPDEIYNLGAQSHVQVSFEVPEYTADTDGIGTLRLLEAVRILGMENKVRFYQASTSELFGKVQEIPQKETTPFYPRSPYAAAKLYAYWIVVSYRESYGMFACNGILFNHESPIRGETFVTRKITRAAARIKLGLQDKLYIGNIDAKRDWXYAGDYIELMWLMLQQKEADDFIMATGVTTTVRDFISMAFSEAGNNNFMGGQRCQ

SEQ ID NO: 17135 - DNA, 576 bp, Unknown
  Obtained from environmental sample
  misc_feature (1)..(576): n is a, c, g, or t
gtgtattcgataagagcaaagattttaagcattgtatttttatttattgcgttgacaggcgttacgttcgtcatttattcggtaagaacgactgtaaattataaacgtatgcgtcttgaaggcattgaaaaaacggttcaacaggaaactgaaaaagtaaacaggataatatctgtaatagaacgcgccgcgatattatacgccgtaggcggaaaactcacctatgatgttcagcaggaaaaattcggcaaagatttggtgattgagtttctttcaagtttacctatgactgtcggcggaggcttttggtttgagccttatgcttttagaaaagacattctgcgtaaaagttttttcgcgttcttcgacaaaaggacgggaatgatccgcatagacgatgccttttttttggatgattatgattatcataataaaggctggtatcgtgaaattgcggacaacgtaaatgaaccgtattatgttgtatggacaaaaccctatatcgatgattcaggatcattcagcctgataacgacggcgggggccggtatctttgacgaaaacggaaaganntga

SEQ ID NO: 17136 - protein, 191 aa, Unknown
  Obtained from environmental sample
  SIGNAL (1)...(27)
  misc_feature (1)..(191): Xaa is any amino acid
MYSIRAKILSIVFLFIALTGVTFVIYSVRTTVNYKRMRLEGIEKTVQQETEKVNRIISVIERAAILYAVGGKLTYDVQQEKFGKDLVIEFLSSLPMTVGGGFWFEPYAFRKDILRKSFFAFFDKRTGMIRIDDAFFLDDYDYHNKGWYREIADNVNEPYYVVWTKPYIDDSGSFSLITTAGAGIFDENGKX

SEQ ID NO: 17137 - DNA, 318 bp, Unknown
  Obtained from environmental sample
  misc_feature (1)..(318): n is a, c, g, or t
atgaatgaagaggtattgactattacggaaaatccagccgacgacggaatatgtaatctttacgcaaaaggccggatcgattccaacagcgcggatcttttaaaggataaacttgataacgcgttaaaaaccgaacataaaacaataattctgaatatgtctcaggtaaagtatctaagttctataggaataagggtcattttgaatacatacaagcaggctaaggaagcggataaaaaattcaacatagcgcgtccgtccgactttgttaaaaatgttttaggcatggtcgctttaaaagagatgctggtaacatag

SEQ ID NO: 17138 - protein, 105 aa, Unknown
  Obtained from environmental sample
  DOMAIN (8)...(104): STAS domain
  misc_feature (1)..(105): Xaa is any amino acid
MNEEVLTITENPADDGICNLYAKGRIDSNSADLLKDKLDNALKTEHKTIILNMSQVKYLSSIGIRVILNTYKQAKEADKKFNIARPSDFVKNVLGMVALKEMLVT

SEQ ID NO: 17139 - DNA, 903 bp, Unknown
  Obtained from environmental sample
  misc_feature (1)..(903): n is a, c, g, or t
ttggtgtacataggcgcaataacatacggagcggttcaaattatcattggcataggagaacgccggaaccttgcggaaagggagttttatgaccttgccgacagggccacttcttcaagcgtttttcttggctttatgagcgaagcataccaggcaaccatcagggattttttgggcgcttccgacacgcttctgggagtcatcattaccacttccggcggggaatccgcttttgaaaagtatcccggcagcggcattgtctggacagcagattctccacgattcaagacagggtttggctttccgggaaaatctttctttttgccgctgggaatagaaggccagcggaacgtaaccatacaggcaatttacggcttaatagattatatttttctacagaaaattctaaggcaaacccttttagtgatactctccgctctgattgttgcgtttattaccctccttatggaaagggcaataaagaacagggcgtattacaacaaaggcgaatcacgcggcataaataccagcgaccctgacgatagctactatgacgttagcagcatggaagaggaagatcccaaggggctttttaaaccaaggggtaacatcggctgggattcctacaccaacgaaagacttgcctccgaacttcaccgctcgtcttcttttgaacaggatctggtattccttgctatggaactaanaggcccggaaaaagtcaacgacagcctgtattgcaaatttaccgaggaggcagtgaatttctttacnatgagggatttgatctttggaaggggcgaaaacggaatagccgttataataccccatattgatctggatcatggaatttcaaaatccgggcatttccgccgccgtctcatttcaaaatacaggaattaa

SEQ ID NO: 17140 - protein, 300 aa, Unknown
  Obtained from environmental sample
  misc_feature (1)..(300): Xaa is any amino acid
MVYIGAITYGAVQIIIGIGERRNLAEREFYDLADRATSSSVFLGFMSEAYQATIRDFLGASDTLLGVIITTSGGESAFEKYPGSGIVWTADSPRFKTGFGFPGKSFFLPLGIEGQRNVTIQAIYGLIDYIFLQKILRQTLLVILSALIVAFITLLMERAIKNRAYYNKGESRGINTSDPDDSYYDVSSMEEEDPKGLFKPRGNIGWDSYTNERLASELHRSSSFEQDLVFLAMELXGPEKVNDSLYCKFTEEAVNFFTMRDLIFGRGENGIAVIIPHIDLDHGISKSGHFRRRLISKYRN

SEQ ID NO: 17141 - DNA, 708 bp, Unknown
  Obtained from environmental sample
  misc_feature (1)..(708): n is a, c, g, or t
atggtagtccggcggaacagcgactgcgggcggctttcattcaccacagacatagcggcggcattacgggaaagtacggtggtttttattgccgtcggcacccccccaacggacgacggcggcgctgacctttcccatgtggaagcggcggcccggcaaatcggctctttgatggataagtacaccgttattgtagacaagagcactgtccctataggcaccggccgtaaagtccagggatgggttaatgaagaactatccaaatgcggaaagcatattgagtttgatgtggtttccaaccctgaatttttacgcgaaggttccgccgtttatgattttacccatcctgaccgcatagtcatcggcagcgagagtgagcgggcaaggaatataatgaaggacatttaccgctccctttatctgaatgagactccctatattgagaccaatcttgaatcggcagagatgattaaatacgcttctaacgcttttcttgcggtaaaaattacgtttatcaatgagatttccaacctctgtgaaaaaaccggcgccaatgtgcgggatgttgcccgcgcgatgggcaaagacggaagaatagggtccaaattcttacatcccggccccggttacggcgggtcttgctttcccaaagataccaaagcccttgcaaaaattggcagggaaaatggtgaaatactgcacatgtag

SEQ ID NO: 17142 - protein, 235 aa, Unknown
  Obtained from environmental sample
  DOMAIN (1)...(141): UDP-glucose/GDP-mannose dehydrogenase family, NAD binding domain
  misc_feature (1)..(235): Xaa is any amino acid
MVVRRNSDCGRLSFTTDIAAALRESTVVFIAVGTPPTDDGGADLSHVEAAARQIGSLMDKYTVIVDKSTVPIGTGRKVQGWVNEELSKCGKHIEFDVVSNPEFLREGSAVYDFTHPDRIVIGSESERARNIMKDIYRSLYLNETPYIETNLESAEMIKYASNAFLAVKITFINEISNLCEKTGANVRDVARAMGKDGRIGSKFLHPGPGYGGSCFPKDTKALAKIGRENGEILHM

SEQ ID NO: 17143 - DNA, 432 bp, Unknown
  Obtained from environmental sample
  misc_feature (1)..(432): n is a, c, g, or t
ttgaataaagacacggttgataacaataaaaacccgcgcgcggcgctggtgcagtttattaaattcggcatagtaggattttccaacacagccgtctcatacctgatatactccgtcttggtgtacatagggcagcactatctcgtcgccagcgtggcggcgtttattgtgagcgtgctgaattcgttcttttggaacaacaagtacgttttcaaacacagcgacggtcagaagcgcggcatttggggggcgcttctcaagacgtacatttcgtacgcctttaccgggcttgtattgagcaatatattgctgttcgtttttattgacttgttgcacgtatcgaagtatatagcgccgtttttcggcttggcggtgacgattccgttgaattttgttttgaataagaagtgggcgtttaaagccgacgcttag

SEQ ID NO: 17144 - protein, 143 aa, Unknown
  Obtained from environmental sample
  DOMAIN (21)...(139): GtrA-like protein
  misc_feature (1)..(143): Xaa is any amino acid
MNKDTVDNNKNPRAALVQFIKFGIVGFSNTAVSYLIYSVLVYIGQHYLVASVAAFIVSVLNSFFWNNKYVFKHSDGQKRGIWGALLKTYISYAFTGLVLSNILLFVFIDLLHVSKYIAPFFGLAVTIPLNFVLNKKWAFKADA

SEQ ID NO: 17145 - DNA, 327 bp, Unknown
  Obtained from environmental sample
  misc_feature (1)..(327): n is a, c, g, or t
atgatccctgccggaggccgcgcccaattccgaccccagtggttcggtttcctgatcacctgccgcgacggggttagccgcaacgaactggtcaggcgtctggaggacaggaacatccaaacaagaatgctcttcgcggggaatctggtcaagcacccgtgttttgacgctctgaggggatcgggagagggctacagggtggcgggaacgcttaacgccacagaccgcatcatgaacgatacattttggataggcgtgtatcccggaatgagcgacgctatgatcgataggatgatagaggttatacgcgagtctttgcggccgtaa

SEQ ID NO: 17146 - protein, 108 aa, Unknown
  Obtained from environmental sample
  misc_feature (1)..(108): Xaa is any amino acid
MIPAGGRAQFRPQWFGFLITCRDGVSRNELVRRLEDRNIQTRMLFAGNLVKHPCFDALRGSGEGYRVAGTLNATDRIMNDTFWIGVYPGMSDAMIDRMIEVIRESLRP

SEQ ID NO: 17147 - DNA, 462 bp, Unknown
  Obtained from environmental sample
  misc_feature (1)..(462): n is a, c, g, or t
gtgacaatgcgcatactaatcgacaaattagaagccgatcagatactatcgcgggaagaattcaaaatactgttctcttgcggcgacgactacctctttgaacgcgcaaggcatgtagccgatagcgtgtacggaaaaagtatcttcatgcgcggccttgtggagtttacaagttactgcaaaaacgactgtttttactgcggtttgcgggcgggcaataaaaaggccacgcggtataggctctcaaaaagtgaaatgcttgactgctgcgaaaagggctacgctttaggctttcgcacctttgtactgcaagggggggaagacccttactatactgatgagattatggcggagatcattagcgagataagggccgcttatagagattgcgcgataacactatctcttggcgagcgcagcgccgagagctacgagcgcctacgtaaacgcggcgcccgatag

SEQ ID NO: 17148 - protein, 153 aa, Unknown
  Obtained from environmental sample
  misc_feature (1)..(153): Xaa is any amino acid
MTMRILIDKLEADQILSREEFKILFSCGDDYLFERARHVADSVYGKSIFMRGLVEFTSYCKNDCFYCGLRAGNKKATRYRLSKSEMLDCCEKGYALGFRTFVLQGGEDPYYTDEIMAEIISEIRAAYRDCAITLSLGERSAESYERLRKRGAR

SEQ ID NO: 17149 - DNA, 402 bp, Unknown
  Obtained from environmental sample
  misc_feature (1)..(402): n is a, c, g, or t
ttgaatacanggcttgtaattaacggtctttggtctattgatccgctaaaccccctgtccaaaagggatccggtttccggccttcttttttcaactgtgaccgtcccgcccgggcctattaagccaaatcccctaagaggaatgcccgacggcataacttttatgttcaatgcgcttccgggcgaaaacatcactgttgcgggcgattttaacggatgggatcctttcatgtatgaactgaaggaatatcccgccggcgtttacagccttactctcgctctgccgccgggcactcatcaatatgtatttttctacaggggcaggcgttatgttgaccctcacaatccaaaccgaatttacgcaaaggacgggagcgccgcttctttaattaccgtcccataa

SEQ ID NO: 17150 - protein, 133 aa, Unknown
  Obtained from environmental sample
  misc_feature (1)..(133): Xaa is any amino acid
MNTXLVINGLWSIDPLNPLSKRDPVSGLLFSTVTVPPGPIKPNPLRGMPDGITFMFNALPGENITVAGDFNGWDPFMYELKEYPAGVYSLTLALPPGTHQYVFFYRGRRYVDPHNPNRIYAKDGSAASLITVP

SEQ ID NO: 17151 - DNA, 792 bp, Unknown
  Obtained from environmental sample
  misc_feature (1)..(792): n is a, c, g, or t
atgatcatagtaaggactccaactagggtcagcttcacgggaggtggaagcgacttgccggctttctacaaaaaacacggcggcgcggtgctctcatcggggctgaacaggtacctgtacctgtccatccacccctacttttacccagacaaactgatatgcaagtattccaagaatgaactagtcaataatgccagcgagttggcgcaccctatctttaaggcgctgctgacacaattcggcgtcaatggcgtagaaatcacctgcactgccgatgtgccagcgggaacagggcttggctcctccagcagctttacagtcggcctaatccacgccctccacgcctacacagggaaatatgtgtcagcagcctccctggcggccgaagcctgtcacacagagattgacgtcctcggcgagccaataggcaagcaagaccaatacgccgctgcctttggcggcctcaacgtctttaggttcaataaggacggccatgttgacgttgaaccagtgatcatgtcgccagaggcaaaggggcgcatggagcgcaacctgctgatgttttacactggcgacctgcggtcagcctcacagatactctccgagcatggcaaaaatgtggccaccgacagcgacaaagaaaatgcacaattggagatatgcaagctgacggacgagctgcacaaagaactggtgaacgacaacatagacgcgcttggctcaatcctccacgctggctggctgcaaaagncgcaaattggcaaatggnncatcacgaaccnncggccatag

SEQ ID NO: 17152 - protein, 263 aa, Unknown
  Obtained from environmental sample
  DOMAIN (86)...(154): GHMP kinases N terminal domain
  misc_feature (1)..(263): Xaa is any amino acid
MIIVRTPTRVSFTGGGSDLPAFYKKHGGAVLSSGLNRYLYLSIHPYFYPDKLICKYSKNELVNNASELAHPIFKALLTQFGVNGVEITCTADVPAGTGLGSSSSFTVGLIHALHAYTGKYVSAASLAAEACHTEIDVLGEPIGKQDQYAAAFGGLNVFRFNKDGHVDVEPVIMSPEAKGRMERNLLMFYTGDLRSASQILSEHGKNVATDSDKENAQLEICKLTDELHKELVNDNIDALGSILHAGWLQKXQIGKWXITNXRP

SEQ ID NO: 17153 - DNA, 777 bp, Unknown
  Obtained from environmental sample
  misc_feature (1)..(777): n is a, c, g, or t
gtggtgtacccggaaaacaacgcggtaatccggcagaatatcaacattctgggcgtcgccgcgggccgttatggcgtgacacgggtggtggtgcgtctggatgacagcgattataccgatgtcaccggtacggaatactggaataaacctgttgatttttcatccatctctgacggcaaacataccctgtatgtccaggctttcgattccaaagaagtcgccggtcccgtagggaaagttgattttatccttgatagatctccgccggatattgatcttagttcccataatgttggtgatattatcaccggctccgttaccctcaagggagcggcaaatgatccaaacggcataaaaaccatagaatacagtgtggacggcgaaaaatatgtctcgttgtccgggaaatcaaagagcagcggtacttcccaggcgtttaccttgtcgataaacaccaaagcattaccggacggcccggtggtttactatttccggacggtggacatgaccggcgtggctacggttaaaccgtatttgttttttgtaaccaacagcgggcctgaacttgaggtatacagcccggcgccaagtgaggatgtttttggcacgttcttcctctccggccgcgcttatgataaaaccggcctttccaaactgtactatgaatggggcgctgtcaaagaagatattgaaatgcgccccggcgacccctattggtacgtcgcgctgcaaaccggtaagggacgaatccggttagatcaaacccgcggctattaa

SEQ ID NO: 17154 - protein, 258 aa, Unknown
  Obtained from environmental sample
  misc_feature (1)..(258): Xaa is any amino acid
MVYPENNAVIRQNINILGVAAGRYGVTRVVVRLDDSDYTDVTGTEYWNKPVDFSSISDGKHTLYVQAFDSKEVAGPVGKVDFILDRSPPDIDLSSHNVGDIITGSVTLKGAANDPNGIKTIEYSVDGEKYVSLSGKSKSSGTSQAFTLSINTKALPDGPVVYYFRTVDMTGVATVKPYLFFVTNSGPELEVYSPAPSEDVFGTFFLSGRAYDKTGLSKLYYEWGAVKEDIEMRPGDPYWYVALQTGKGRIRLDQTRGY

SEQ ID NO: 17155 - DNA, 468 bp, Unknown
  Obtained from environmental sample
  misc_feature (1)..(468): n is a, c, g, or t
gtgccggaagccgaggccggggccggcgacggccgcctggtcatcaaggaccgcatagccgacaacatgttcatgcagactctcntgcggcccgaggaatattcggtcctggccatgcccaacctgaacggcgattacctctccgacgccctggccgcccagataggcggcctgggcctggccccgggggccaacgtgggcgacggcctggccgtcttcgaggccacccacggcacggcccccaaatacgccggccaggacaaggtcaaccccggctccctcatcctctccggggccctgatgctggaattcatgggctggccggaagccgccgaaaaagtgaggacggccgtggcccggaccatagccgccggattggtcacctacgatttggcccggcagacgaccggcctgaccccggtctccacctcggccttcggccgggcggccaccgaaaacatatcctga

SEQ ID NO: 17156 - protein, 155 aa, Unknown
  Obtained from environmental sample
  DOMAIN (1)...(150): Isocitrate/isopropylmalate dehydrogenase
  misc_feature (1)..(155): Xaa is any amino acid
MPEAEAGAGDGRLVIKDRIADNMFMQTLXRPEEYSVLAMPNLNGDYLSDALAAQIGGLGLAPGANVGDGLAVFEATHGTAPKYAGQDKVNPGSLILSGALMLEFMGWPEAAEKVRTAVARTIAAGLVTYDLARQTTGLTPVSTSAFGRAATENIS

SEQ ID NO: 17157 - DNA, 558 bp, Unknown
  Obtained from environmental sample
  misc_feature (1)..(558): n is a, c, g, or t
atggataaaacattgatcatcggcgcggctatggtagacaatatgctggaattggacaggctgcctgcgcccggggaagatatatttgccagaaacgaacaacgcctcgtgggcggatgcgcgttgaatgtggcaacagtgctgaaggcgtttaacgtgccctacgaactgctggttccggtaggtaacggcagaaacgccgccattgtcagggaggagatgctggcgcggggctttcgtattgttctggaggtggactcaggcgataacggttattgccttgccctcgtagataatcagggagagcgaaccttaatcaccctgccgggaatagagctttttttcaagcccgattggtttgactgcgtggaggcttcgcagtatacgcgtgtatatgtgacgggctatgaaatcggcagcgaaggaggcgggaatttcctggcgtttctgaaaggccaccctcatcttaaaatcttctttgcccccggcccccggatttcctatattccagccgaaaggatggactcgctgctcggcctcggcccggttctgcattga

SEQ ID NO: 17158 - protein, 185 aa, Unknown
  Obtained from environmental sample
  misc_feature (1)..(185): Xaa is any amino acid
MDKTLIIGAAMVDNMLELDRLPAPGEDIFARNEQRLVGGCALNVATVLKAFNVPYELLVPVGNGRNAAIVREEMLARGFRIVLEVDSGDNGYCLALVDNQGERTLITLPGIELFFKPDWFDCVEASQYTRVYVTGYEIGSEGGGNFLAFLKGHPHLKIFFAPGPRISYIPAERMDSLLGLGPVLH

SEQ ID NO: 17159 - DNA, 483 bp, Unknown
  Obtained from environmental sample
  misc_feature (1)..(483): n is a, c, g, or t
atgggagtttcaccgtctacaattacccgcgttaccggcgttgaggcaacattcaggaatttcaatcagggtaacgccgctatgttaaatcagcggctttccattatcggcctcggcaatgataacgcggaatacgatctcacaaaaagagagtttttttccgccgcgagggtcgccgaaacttacggctggggatcgccgcttcatcttgcggcggaacaattattgccgtcaatcggcgcggtcgccgaattccccgtaacaattattccgctgaaaaaggcgcaatcagcggtcgcggccaccgcaacgttaggcgcaacaggaacggcaaccgcaaacggctccggcgttatttatatcggcggcataggcgcggaattcccggtgttaaaagacgcaactgcggatcaagtgttaggcgaaattaaaaacgccattaacagncgttttgtcaatgccggtagaaccggggaattgtaa

SEQ ID NO: 17160 - protein, 160 aa, Unknown
  Obtained from environmental sample
  misc_feature (1)..(160): Xaa is any amino acid
MGVSPSTITRVTGVEATFRNFNQGNAAMLNQRLSIIGLGNDNAEYDLTKREFFSAARVAETYGWGSPLHLAAEQLLPSIGAVAEFPVTIIPLKKAQSAVAATATLGATGTATANGSGVIYIGGIGAEFPVLKDATADQVLGEIKNAINXRFVNAGRTGEL

SEQ ID NO: 17161 - DNA, 447 bp, Unknown
  Obtained from environmental sample
  misc_feature (1)..(447): n is a, c, g, or t
atgtctgacagctattttgacaccgacgatataacaaaagagtacgacggtaaaattgtcaggcgcattctttcgtacttaaaaccttataaagttcttgttgtctttaccattgccgctcttgttctttccactttgggagagctttatatccctgtcttgcagcagaagatcattgacaaggctcttctgggaaaagacgttccttaccttgtaaaaggatgtattctgtatctgataattcttgtaatagtgtttatttttaccttttgtcagacatggacagccgctcttatgacacagcgcgtaatgaaagatatgcgcatcgggcttttcagcaaaactgtttcacagtctacggattttctttcccgtcatcctgtgggaaggatcgttacgcgtttaaccggcgacgtggaaacaatggacgagtttttacaactgtaa

SEQ ID NO: 17162 - protein, 148 aa, Unknown
  Obtained from environmental sample
  misc_feature (1)..(148): Xaa is any amino acid
MSDSYFDTDDITKEYDGKIVRRILSYLKPYKVLVVFTIAALVLSTLGELYIPVLQQKIIDKALLGKDVPYLVKGCILYLIILVIVFIFTFCQTWTAALMTQRVMKDMRIGLFSKTVSQSTDFLSRHPVGRIVTRLTGDVETMDEFLQL

SEQ ID NO: 17163 - DNA, 459 bp, Unknown
  Obtained from environmental sample
  misc_feature (1)..(459): n is a, c, g, or t
ttgcgtcggaacggatacgcggacaaccggagcggcggaaaaagcggttgtttttgcctctttggacaaggattgggtctttntcagcaaggaaaagacacgctggtaggagagcgcggacttactctttccgcggggcaaaacaaaaggacggctattgccagggccgttatcatggacagtgaatttntgatactggacgactctctctccgcggtagataacgaaaccgaaagaaaaatacttgaatcgttaagaaaagaaagaaaagggcgcacaacgattattatctcccaccgcgtttcgactcttaaatacgcggacaaggcgcttgttctggacaaggggaaaatgatcgaatacggaactcccgaacagcttgtaactcaaggcggtttttacgctcgtatggcggcgctccaaaaactggaacctcagacggagacgccgaatgtctga

SEQ ID NO: 17164 - protein, 152 aa, Unknown
  Obtained from environmental sample
  DOMAIN (7)...(116): ABC transporter
  misc_feature (1)..(152): Xaa is any amino acid
MRRNGYADNRSGGKSGCFCLFGQGLGLXQQGKDTLVGERGLTLSAGQNKRTAIARAVIMDSEFXILDDSLSAVDNETERKILESLRKERKGRTTIIISHRVSTLKYADKALVLDKGKMIEYGTPEQLVTQGGFYARMAALQKLEPQTETPNV

SEQ ID NO: 17165 - DNA, 330 bp, Unknown
  Obtained from environmental sample
  misc_feature (1)..(330): n is a, c, g, or t
gtggtcgaaatggggaggctggaaaaatcccttggccttttggctacagtcgccgccactagcccattcattggtctctttggtaccgtatggggcatcatcgaggcatttcagcgcatcggggcaactggcaacgcaaacctagtgacggtggccgttcccattgccgaggcactggttgcgacggctcttggcctcatcgccgctgtgccatcccttatggcgtataactattttctaagccaattgaagcggtggcagatggaactcgacgattattccctagaattcatcagcctcagcgagcggaacttccttgagcccaagtga

SEQ ID NO: 17166 - protein, 109 aa, Unknown
  Obtained from environmental sample
  DOMAIN (1)...(95): MotA/TolQ/ExbB proton channel family
  misc_feature (1)..(109): Xaa is any amino acid
MVEMGRLEKSLGLLATVAATSPFIGLFGTVWGIIEAFQRIGATGNANLVTVAVPIAEALVATALGLIAAVPSLMAYNYFLSQLKRWQMELDDYSLEFISLSERNFLEPK

SEQ ID NO: 17167 - DNA, 447 bp, Unknown
  Obtained from environmental sample
  misc_feature (1)..(447): n is a, c, g, or t
atgcccgctggagactttctgatgtgcagcgatgttttggtgttgggagcagggattgcaggatgcaccgccgcgctgcgggccgcagagctgggcttggacgtcctattggccgccaagggaaagctgggggacagcaacacagcgcaggcgcaagggggcatcataggcttggcccattccggcgacagcgcggaaatgctggctgcggacatcgaagcggccggggtggggctgtgccggagtgaggccgttgcgctgctagcagcagagggcccatccttgtgccacgattttctttggaagcagcttggagtcccattcgacttggaacctgaaaccggctatccagggggcacagcggaagcagcgcacagcactaggcggatattccatgtgaaagacgcgactggcaggnccattcangatgcccctctcgaaaggtga

SEQ ID NO: 17168 - protein, 148 aa, Unknown
  Obtained from environmental sample
  misc_feature (1)..(148): Xaa is any amino acid
MPAGDFLMCSDVLVLGAGIAGCTAALRAAELGLDVLLAAKGKLGDSNTAQAQGGIIGLAHSGDSAEMLAADIEAAGVGLCRSEAVALLAAEGPSLCHDFLWKQLGVPFDLEPETGYPGGTAEAAHSTRRIFHVKDATGRXIXDAPLER

SEQ ID NO: 17169 - DNA, 675 bp, Unknown
  Obtained from environmental sample
  misc_feature (1)..(675): n is a, c, g, or t
atgcttacggtaaaagccgccatgataggcgacattgtaggaaatcacggcgttgaaactctggaaacaaaactgccggagttgattaaagaacatcaaattgattttgtctcggtcaacggcgaaaatgcagccgaaggttttggcatgaccgagaatgactttaaacgcataatcgcagccggcgcggatgtgataacttccggaaatcacatctgggaaaaacgcgaattctggaatgttctgaatactgaaaacacaattcttcgcccggctaattatccggcgggtactgtaacaaatcctgatgtttccggcaccggatctgcctgcataaataaaaaaggaataacctggatagttataaatcttcagggccgcgaattaatgactgctattgattgtccgtttaaatgttttgataggcttataaatttgcatatgggcgaagcggccggtattcatccgctttttacgggaatcggcaattcaattccgtgcgccctgccgattgtacttgtagatttccatgccgaatcaagccgcgagaaagaagcccttgcctattacgccgacgggcgcgcggcggtaattgccggcactcacacgcatatacaaaccgcagatgaacggatattgcaaagggcagcgcatacatcaccgaccttggaatga

SEQ ID NO: 17170 - protein, 224 aa, Unknown
  Obtained from environmental sample
  misc_feature (1)..(224): Xaa is any amino acid
MLTVKAAMIGDIVGNHGVETLETKLPELIKEHQIDFVSVNGENAAEGFGMTENDFKRIIAAGADVITSGNHIWEKREFWNVLNTENTILRPANYPAGTVTNPDVSGTGSACINKKGITWIVINLQGRELMTAIDCPFKCFDRLINLHMGEAAGIHPLFTGIGNSIPCALPIVLVDFHAESSREKEALAYYADGRAAVIAGTHTHIQTADERILQRAAHTSPTLE

SEQ ID NO: 17171 - DNA, 414 bp, Unknown
  Obtained from environmental sample
  misc_feature (1)..(414): n is a, c, g, or t
atggcatggtttcagcgtcttataacaatttatgaccttatccgccctgttatggacgtcgcccttcttgcctttcttctgtacaaaggctatgaactccttgaaagaacacaggcgcttccgcttgtaaaaggaatggggtttcttgtccttgtttacggcatagcgtttctttttaaccttaccactttgcgctgggtgttaacaactttggctcccggtctttttgtcgtaattgccattgtttttcagcctgaactgagaaaaattatcgtaaggctcgggcagggggagtttttcaggccggacaacaaaccgcgcataggccagcttgacgcggtaattacggcggcggaacttctttccgaacagcggaggggaatgttagttgttttcccccgtaaatcaacataa

SEQ ID NO: 17172 - protein, 137 aa, Unknown
  Obtained from environmental sample
  misc_feature (1)..(137): Xaa is any amino acid
MAWFQRLITIYDLIRPVMDVALLAFLLYKGYELLERTQALPLVKGMGFLVLVYGIAFLFNLTTLRWVLTTLAPGLFVVIAIVFQPELRKIIVRLGQGEFFRPDNKPRIGQLDAVITAAELLSEQRRGMLVVFPRKST

SEQ ID NO: 17173 - DNA, 522 bp, Unknown
  Obtained from environmental sample
  misc_feature (1)..(522): n is a, c, g, or t
ttgcgcggtgaaaaaaacaacatatatcagatactggaagaagatatcgaagcctatattgatttaagcaaatatacaaccgaagatacacataaaattccggtgcagatccgcaagaaaggaagcgcgcttggcatagagcctcttgaaataaccgtagaaccggcggatgtacttatcaaaattgaaaataaaataagccgtgatataataataattccttcttttaacgggtttatagcggaaggatacgaaatgacaagccaatcaataaatccttcttcaattaccgcggaaggtccgcgcagtaatatcgaatcgatatttgaatttaacacggcccctatcgatcttgaggggcgttacgggaatttttcaattttaacaaatattattgttaatgatccgttaattattgcgcacggaaacaggatgatcgaataccgcgcggcaatcaggaaaataccaagagaacccgccgccgttccaactcaaactgttaaagaggccgacgaagaatga

SEQ ID NO: 17174 - protein, 173 aa, Unknown
  Obtained from environmental sample
  misc_feature (1)..(173): Xaa is any amino acid
MRGEKNNIYQILEEDIEAYIDLSKYTTEDTHKIPVQIRKKGSALGIEPLEITVEPADVLIKIENKISRDIIIIPSFNGFIAEGYEMTSQSINPSSITAEGPRSNIESIFEFNTAPIDLEGRYGNFSILTNIIVNDPLIIAHGNRMIEYRAAIRKIPREPAAVPTQTVKEADEE

SEQ ID NO: 17175 - DNA, 654 bp, Unknown
  Obtained from environmental sample
  misc_feature (1)..(654): n is a, c, g, or t
atgacagaaaataaaactatacactttatcaaaaatataaccaacactgacttatccacttgcaacgaagcggactcttttttgcagtcggcaatgtggggccgctttaaatcccgttttgggtgggaggcaaaagcttttaccgttgactgggacaaaggtggcgttaaacccctgctggtactttttcgccgtatcgcgccgggcctttccatggcctacattccctgggggccggaattgcccgccgcctttcccggcgatcccctgctgcgggccgctgcggcggcggaacttgcccgcgctttacggtacttgcttccccgaacaacaacctttattcgctttgacccgccctggtttgatccggcgggaaccgttccgccggaattgcctgcgccgtttaagcgggccgctgcggacattcagccgccggacacggtactcattgacctcagtctgccccctgatgacatactcgccgccatgaaacccaagtggcgctacaatatcggacttgccggaaagcgcggtgttaccgttattaacagcggagatcaaggcatcgacattttttaccgtcttcttgaggaaaccgcggaacgcgacggccttgctgttcacggtattgagtattatcgggtgctgttttga

SEQ ID NO: 17176 - protein, 217 aa, Unknown
  Obtained from environmental sample
  misc_feature (1)..(217): Xaa is any amino acid
MTENKTIHFIKNITNTDLSTCNEADSFLQSAMWGRFKSRFGWEAKAFTVDWDKGGVKPLLVLFRRIAPGLSMAYIPWGPELPAAFPGDPLLRAAAAAELARALRYLLPRTTTFIRFDPPWFDPAGTVPPELPAPFKRAAADIQPPDTVLIDLSLPPDDILAAMKPKWRYNIGLAGKRGVTVINSGDQGIDIFYRLLEETAERDGLAVHGIEYYRVLF

SEQ ID NO: 17177 - DNA, 489 bp, Unknown
  Obtained from environmental sample
  misc_feature (1)..(489): n is a, c, g, or t
gtgataccaggccgactaccgccaaaaagtaaccgtaactttttcctgtctgactgtattatggtaaatcttgttgacattggcgttaacctgatgagtcccgcgtttgaccgggaccgtgaagatgttattgccagagcggaagccgccggagtaaaaacgctgatcatcaccggcagcagtatcgcaaacagcgccgaggcattggctttcgctcaaactcacccacaatgtaaaacaaccgccggggtgcatccccacaatgcaaaggattgggatacggcggcccggctggaagaattggtttcaccggaatcgtcagctatgccggtggctgttggggaatgcggccttgattacaaccgcaatttttccccgccgcaggcccagcgaaaatgttttgaggatcagcttgcccttgcggcgcggctggaaagccggtatttcttcatgagcgggatgcctttgaagattttttatccattctga

SEQ ID NO: 17178 - protein, 162 aa, Unknown
  Obtained from environmental sample
  DOMAIN (21)...(162): TatD related DNase
  misc_feature (1)..(162): Xaa is any amino acid
MIPGRLPPKSNRNFFLSDCIMVNLVDIGVNLMSPAFDRDREDVIARAEAAGVKTLIITGSSIANSAEALAFAQTHPQCKTTAGVHPHNAKDWDTAARLEELVSPESSAMPVAVGECGLDYNRNFSPPQAQRKCFEDQLALAARLESRYFFMSGMPLKIFYPF

SEQ ID NO: 17179 - DNA, 876 bp, Unknown
  Obtained from environmental sample
  misc_feature (1)..(876): n is a, c, g, or t
atggaccgttacggcgcggactggaaaatggtgcaccgcggctggcagacccatgtattcggaaacgcccgccagtttgcaacgacgcgggaagcggtcgaaacctaccgcaaggaaattcccggcattatcgatcaggacttaaaagaatttgttatagccgaaaacggcaagcccataggcacaatcgaagatggggattcccttatctactttaacttccggggagaccgcgcgcttgaaatcacggccgcttttgaagatgacaactttacccatttcgataggggacgccgcccgaagatttgctattcgggaatgatggaatatgacggcgacttgcacgtaccaaaacggtaccttgtcagtcccccttcaatagaccgcacaatgggcgagtacctcgcggcgacaggcgttaggacgctcgctatttccgaaacccaaaagtacgggcacgttacctactttttcaacggaaaccgcacgggcaagttcgacgataaacttgaagactatgtagaaataaaaagcgacgttcttccctttgaacagcgcccgtggatgaagtgcgcggaaattacagatcaggtaatggccgcagtaggttcgggcaaatatgattttatcaggctgaactatcccaacggcgacatggtgggacacacgggcgtttatcaggcggttgtatgttcaatggaagcgatggacattcagcttggcaggctcttaaaagccgccgacgaagccggcgcggtaatggtgatcacagccgatcacggcaacagcgacgatatgttcgagcatgacaagaagacgggcgcggtttcactgaaagcggacggcacgcccaagtccaagacaagccacagctga

SEQ ID NO: 17180 - protein, 291 aa, Unknown
  Obtained from environmental sample
  DOMAIN (1)...(179): BPG-independent PGAM N-terminus (iPGM_N)
  misc_feature (1)..(291): Xaa is any amino acid
MDRYGADWKMVHRGWQTHVFGNARQFATTREAVETYRKEIPGIIDQDLKEFVIAENGKPIGTIEDGDSLIYFNFRGDRALEITAAFEDDNFTHFDRGRRPKICYSGMMEYDGDLHVPKRYLVSPPSIDRTMGEYLAATGVRTLAISETQKYGHVTYFFNGNRTGKFDDKLEDYVEIKSDVLPFEQRPWMKCAEITDQVMAAVGSGKYDFIRLNYPNGDMVGHTGVYQAVVCSMEAMDIQLGRLLKAADEAGAVMVITADHGNSDDMFEHDKKTGAVSLKADGTPKSKTSHS

SEQ ID NO: 17181 - DNA, 744 bp, Unknown
  Obtained from environmental sample
  misc_feature (1)..(744): n is a, c, g, or t
ttgggggaacttccggctgacgagattgaatactttaaaggcttgcaaaaacaactcgcggagcaggaaggcttcaagccggcggctgtagagcttctcgttaatacggcggagaaaatcattcggagtacagaaagcgagctccgcagaatgttgaacagcatctaccatctgcttctctcggaaacaggccgcaccaaagcggactgggatcttgtcaattcgccgggcgttcttgacccttcaaagcggcggcctttcgcgggcatgcaggtataccttgaggatatccgctccccatttaacgtaggttccatgttcagggccgccgaatctttcggggttgaaaagctctggctttccccgttctgcgccgatccccgccacaagcgggccgagcgcacggccatgggctgcgtcgatgtcctcccctgggaacgtttatcaggcgatccatttacagccccgcatgaaaagccttttaccaggggggcaatctttgctcttgaaaccggcggcactccgcttgaggatttctcttttccaatgcggggaatactgatcgccggctcagaagagttaggcgtaagcccggccgccctcgctgcggcggatgcgtcccttggcagagtcagtataacctgttacggcgcgaaaggatccctcaatgtgtcggtagctttcgggattgtaatgcatgcttggagtagagacatggtccactacgcccgcttctcaggctaa

SEQ ID NO: 17182 - protein, 247 aa, Unknown
  Obtained from environmental sample
  DOMAIN (89)...(233): SpoU rRNA Methylase family
  misc_feature (1)..(247): Xaa is any amino acid
MGELPADEIEYFKGLQKQLAEQEGFKPAAVELLVNTAEKIIRSTESELRRMLNSIYHLLLSETGRTKADWDLVNSPGVLDPSKRRPFAGMQVYLEDIRSPFNVGSMFRAAESFGVEKLWLSPFCADPRHKRAERTAMGCVDVLPWERLSGDPFTAPHEKPFTRGAIFALETGGTPLEDFSFPMRGILIAGSEELGVSPAALAAADASLGRVSITCYGAKGSLNVSVAFGIVMHAWSRDMVHYARFSG

SEQ ID NO: 17183 - DNA, 426 bp, Unknown
  Obtained from environmental sample
  misc_feature (1)..(426): n is a, c, g, or t
gtgaaagtttacaatatcaacaaaggccataacgttgaaatggtggagcggagtttgctgcttagcggttacgtggcgtttgtcgcggaagtgcgcgaaaataataaaaaggatatgaatcgcgaacaagctatggaaaaggccgtggaagattgcataaagaaaggaatattaaccgattttcttaataaacacaaacaggagattgtgaaaatgctcgtaacagaatgggattacgaaaggaaattggcagtcgtgggggaggagcactatcagacgggtagggctgaagggcggaccgaaggatgggcggaaggacagcgtgatttcatcagaaatatgtacaagggtggattcactgttgcggagattgtaagggctgccggattctccgaacaagaagtcaaaaacatcttggggatatga

SEQ ID NO: 17184 - protein, 141 aa, Unknown
  Obtained from environmental sample
  misc_feature (1)..(141): Xaa is any amino acid
MKVYNINKGHNVEMVERSLLLSGYVAFVAEVRENNKKDMNREQAMEKAVEDCIKKGILTDFLNKHKQEIVKMLVTEWDYERKLAVVGEEHYQTGRAEGRTEGWAEGQRDFIRNMYKGGFTVAEIVRAAGFSEQEVKNILGI

SEQ ID NO: 17185 - DNA, 771 bp, Unknown
  Obtained from environmental sample
  misc_feature (1)..(771): n is a, c, g, or t
ttgagctatggctacggactgtcggcatcgccactacaggtgcttatggccggatgcgccattgccaacggcggaaagcttatgaagccatacattgtaaaggccgtctataacgacaagggggccctcttgcaggaggccaagcccgaagtgaggcaccaagttataagcgaggagacatcagctcttatgcgggaagtgctcaagggcgtcatcactaatgggacggcaaaaaaggccgcgctgaacggggccgaggcctttggaaagactggcaccagcagaaaggtgatagacggccaatacgactcaaagcggcactatgcctcatttttgggctttttccctgcggacaagccggagtatggaatcttggtgatgttggacgagccagccggcgacgtgactgggggcgacgtggcggctccggcctttaagaaaattggcgatgcgattctgcgttactcgcagtcaacgcctcatcctgcaaagggcgaaagcgtaagactcacgctgcttgattggccggtcagcgaaggagaggaagcggccatccatgtgcaaaaggggcgcacgccagacgtgaggggaatggtcttgaggaacgcggtgcanagagtgaccttggcaggcgggacagtgcgggtggcggcagggggcctgtcagtccatcattcccaaggagcgttcaaagtttcaatgcagtcgcctgagcctgggaagccgctgcccaacgacaagattgtcaccttgcacctgagggcccnatga

SEQ ID NO: 17186 - protein, 256 aa, Unknown
  Obtained from environmental sample
  SIGNAL (1)...(22)
  misc_feature (1)..(256): Xaa is any amino acid
MSYGYGLSASPLQVLMAGCAIANGGKLMKPYIVKAVYNDKGALLQEAKPEVRHQVISEETSALMREVLKGVITNGTAKKAALNGAEAFGKTGTSRKVIDGQYDSKRHYASFLGFFPADKPEYGILVMLDEPAGDVTGGDVAAPAFKKIGDAILRYSQSTPHPAKGESVRLTLLDWPVSEGEEAAIHVQKGRTPDVRGMVLRNAVXRVTLAGGTVRVAAGGLSVHHSQGAFKVSMQSPEPGKPLPNDKIVTLHLRAX

SEQ ID NO: 17187 - DNA, 699 bp, Unknown
  Obtained from environmental sample
  misc_feature (1)..(699): n is a, c, g, or t
atgcccggatttgttctagacaacttttatacccaggaggagatacgcgctatttcccaatatatcgcgcaaaagagtgaagaaattattaaaacttacccaaagaatgatcctgcccactgtactttgggaatgaatatttggatagacggcaaactctacggcggtatagggacggtggatatgaacgaaccgcttaccgacggacaaaaagaaacccttttaataatttctaaagttctaaagctgtattttcagaaccacagtatttatatgcgaatcgcggaagataaagttaactggatagacagcctactggacggagttgatatttccgcggatataatttccaattatctttacaggtttcaatggaaacttgacgaccatttctgtataatcacctttaccgcttccgccgacatgaaaattcccattgtatccattttggatataaaacagataaacgaaatttttcccgacgcgcttatttccgtttacgaggagcatattgtcattattatacgttgtaccgacaaacaacagccgcacggaaagaagaaacagcagttggaacagttcctaaaaaaagacattatgctacactgcggaatcagcatggtttttaataattttatgaaattacgcttttattatgccccagagcaatttgcgcccgcccatacaaaccttcgttaa

SEQ ID NO: 17188 - protein, 232 aa, Unknown
  Obtained from environmental sample
  misc_feature (1)..(232): Xaa is any amino acid
MPGFVLDNFYTQEEIRAISQYIAQKSEEIIKTYPKNDPAHCTLGMNIWIDGKLYGGIGTVDMNEPLTDGQKETLLIISKVLKLYFQNHSIYMRIAEDKVNWIDSLLDGVDISADIISNYLYRFQWKLDDHFCIITFTASADMKIPIVSILDIKQINEIFPDALISVYEEHIVIIIRCTDKQQPHGKKKQQLEQFLKKDIMLHCGISMVFNNFMKLRFYYAPEQFAPAHTNLR

SEQ ID NO: 17189 - DNA, 816 bp, Unknown
  Obtained from environmental sample
  misc_feature (1)..(816): n is a, c, g, or t
gtgttcggcattctcggttcgtttctttggtacggcgcttcatacagcagtaccatgtacgcgatggcaagcaaggatgtccgtcttaaagacgtgcaggcttcgttggatcaactgcgcgatgaaactgccctgcttttaagggaagcgcggaattttgaaggtgcgctttccggtgttctttcggcgctaggtaaaaatgtaaacaatatgacatcccataatacattgggcgatttaagctcatttttgggcattaaagaaacaacggatgggacgcttcgtgaagttgatgatgtgcgtaaactttccgcgtatctttcgcaggctgtaggtccaattaaagaaatgggcgttcttctggattcacagagcgccctgcttacagaaatccccagtatttggcctgtcaagggcggcatagggaacatttcaatgttctttggccagaatattaacccgataagcggacagtattatattcacaaagggattgatatttccacccaccgcgccggcgatcaggttttggcgacagcggacgggcaggtagttgctaccgaatataccaacgactttggcaattttgtaattatcaggcataaacacggttattatactcgttatgcgcacttgcagagtatcaaggcaaagcttgggcagaatgttcagcagagcgaagttatcggttatatcggaaataccggtgtttctacaggtcctcatctgcattatgaagttcatatcggttccgaatgtgtagatccttatcgctatattacccttcgttccccgcgtgccnaaacaggacattag

SEQ ID NO: 17190 - protein, 271 aa, Unknown
  Obtained from environmental sample
  SIGNAL (1)...(23)
  DOMAIN (160)...(256): Peptidase family M23
  misc_feature (1)..(271): Xaa is any amino acid
MFGILGSFLWYGASYSSTMYAMASKDVRLKDVQASLDQLRDETALLLREARNFEGALSGVLSALGKNVNNMTSHNTLGDLSSFLGIKETTDGTLREVDDVRKLSAYLSQAVGPIKEMGVLLDSQSALLTEIPSIWPVKGGIGNISMFFGQNINPISGQYYIHKGIDISTHRAGDQVLATADGQVVATEYTNDFGNFVIIRHKHGYYTRYAHLQSIKAKLGQNVQQSEVIGYIGNTGVSTGPHLHYEVHIGSECVDPYRYITLRSPRAXTGH

SEQ ID NO: 17191 - DNA, 744 bp, Unknown
  Obtained from environmental sample
  misc_feature (1)..(744): n is a, c, g, or t
ttgaaattagtgtttcatgagttaggctggaatgtattacatacatttacctgtaattacgggttgaattttattggggcgggtcttggaacatgggcctttattgagactgatattgactggaaatggcgtaatattgcctataataacacatggctgtctgattcaggacggccggggctttatataggttacgttgttcccgccataacgcctgtttttacttatacgttaggatggtttaaaaacgacgacaagcttcaaataaccggcatggcgctgctgcagacgcttatgataatgttggctgttcagacgcccttaaaaatggttacaggcagggctttgcctggaattgtcaccgaactcgaccacacgagaagcctgcgtaccgacaatttcagcggtgaatttgactggtttaataaaaatcccattgggggctggccaagcgcgcataccgcaaacgcgtttgcggcggcggcgacaatatcacaaatatattcggaaaatttgtggttaaaaatcggagtttattcttatgccgccataatcggctttggcgttacggtaaacgtacattgngcgtcggaagcgttagcgggcgctttaatcggatacgcggttggcagcaccgtaggcaaaagttttaaaaagttaactgaagataaatcaaataaagattcagatganaataatgtatcattttattttttatcaaacagcataggaatgataaattaa

SEQ ID NO: 17192 - protein, 247 aa, Unknown
  Obtained from environmental sample
  DOMAIN (90)...(222): PAP2 superfamily
  misc_feature (1)..(247): Xaa is any amino acid
MKLVFHELGWNVLHTFTCNYGLNFIGAGLGTWAFIETDIDWKWRNIAYNNTWLSDSGRPGLYIGYVVPAITPVFTYTLGWFKNDDKLQITGMALLQTLMIMLAVQTPLKMVTGRALPGIVTELDHTRSLRTDNFSGEFDWFNKNPIGGWPSAHTANAFAAAATISQIYSENLWLKIGVYSYAAIIGFGVTVNVHXASEALAGALIGYAVGSTVGKSFKKLTEDKSNKDSDXNNVSFYFLSNSIGMIN

SEQ ID NO: 17193 - DNA, 828 bp, Unknown
  Obtained from environmental sample
  misc_feature (1)..(828): n is a, c, g, or t
ttgcattacctgaaaaaaggcttgcccgccgtctttcagattgacgacggctgggaactggctgtcggagactgggaggtcaacggcgcaaggtttccgcgggggctaaaatacatcgcggagaaaattgataattcaggccttatacccggtctttggcttgcgccgtttttacagacccgccgatccaggatttttcaggaacgccccgaatggcttctttcggaacggggccgtcctgtgaaagcggggtggaaccctaactgggacggtgtttattactgccttgatctgtcgagggaagatgtaatgaaatatttgcgttccctcatggatcggattattgatggctggggtttccgctacataaagctggatttcctttatgcgggttttttaagcggtgaaaatggcggcagtagaactgcagagcgttttgaagaagctattgcgcttttaacagagcgtaaaaggaatgctgccgcccttccgcttgtctatctgggctgcggtcttcccctgggctcttcctataggcatctccccctttcccggattggtactgacacccttgaaaaatgggattggcgtctcgcgaaatttatacgccatgaaggccgacccagcgccctgctttccatgcgtgaaaccatctcccggtcttttatgaacggtaccgtttatatgaatgatccggatgttgtttttctgcgtactattaactgcgcgttagatgaaacggaaaaagaatgtatcgcgctggttaattttttattcgccngggcaaatcatggttccgataatttccatacccctcggccgatctga

SEQ ID NO: 17194 - protein, 275 aa, Unknown
  Obtained from environmental sample
  misc_feature (1)..(275): Xaa is any amino acid
MHYLKKGLPAVFQIDDGWELAVGDWEVNGARFPRGLKYIAEKIDNSGLIPGLWLAPFLQTRRSRIFQERPEWLLSERGRPVKAGWNPNWDGVYYCLDLSREDVMKYLRSLMDRIIDGWGFRYIKLDFLYAGFLSGENGGSRTAERFEEAIALLTERKRNAAALPLVYLGCGLPLGSSYRHLPLSRIGTDTLEKWDWRLAKFIRHEGRPSALLSMRETISRSFMNGTVYMNDPDVVFLRTINCALDETEKECIALVNFLFAXANHGSDNFHTPRPI

SEQ ID NO: 17195 - DNA, 756 bp, Unknown
  Obtained from environmental sample
  misc_feature (1)..(756): n is a, c, g, or t
atggaacaggttatcgccaacatcaacaaactcaacggtcatattgaaagaatggcgtcaaatgtcggcgctgtcaccaagacactgctcaacaacgccgacaatgtaaaaacattactggaagcctccgaagtaggaaagaccggattggcggaagtagtgactgacattcaggaaatcgccagagaatccgaaggcttgctggaaatcaactccgtaatggaaaacatagccagccagactaacctgctttcgatgaacgccgcgattgaagccgcccatgcgggagaagcgggaaaaggtttcgctgtagtcgccgatgaaattcgtaaacttgcggaatcatcaagcgaacaatcaaaaacgattggcaatgttttgaagaagataaaagagtcaatcgataagataaccaaatcctccaccgatgtacaggcgcgttttggagcgatagactcaagcgtaaaaacagtttccgaacatgagcagaatatccgcaatgccatggaagagcaggaaatcggcggaaggcagatattggaatccattggtcgattaagagacataacctattcggttaaaaaaggctctgacgatatggaaggatcgggcggaactttggtaaaagaaacggatgaatttataaaaataagcaaagaaacggtagacggcatgaacgaaataatgacgggtattaatcagataaatgtttcgataaaccatgttaacgaaatgagtattgagaacaaacaataa

SEQ ID NO: 17196 - protein, 251 aa, Unknown
  Obtained from environmental sample
  DOMAIN (1)...(216): Methyl-accepting chemotaxis protein (MCP) signaling domain
  misc_feature (1)..(251): Xaa is any amino acid
MEQVIANINKLNGHIERMASNVGAVTKTLLNNADNVKTLLEASEVGKTGLAEVVTDIQEIARESEGLLEINSVMENIASQTNLLSMNAAIEAAHAGEAGKGFAVVADEIRKLAESSSEQSKTIGNVLKKIKESIDKITKSSTDVQARFGAIDSSVKTVSEHEQNIRNAMEEQEIGGRQILESIGRLRDITYSVKKGSDDMEGSGGTLVKETDEFIKISKETVDGMNEIMTGINQINVSINHVNEMSIENKQ

SEQ ID NO: 17197 - DNA, 396 bp, Unknown
  Obtained from environmental sample
  misc_feature (1)..(396): n is a, c, g, or t
atgtctcttaatcgaccaatggattccaatatctgccttccgccgatttcctgctcttccatggcattgcggatattctgctcatgttcggaaactgtttttacgcttgagtctatcgctccaaaacgcgcctgtacatcggtggaggatttggttatcttatcgattgactcttttatcttcttcaaaacattgccaatcgtttttgattgttcgcttgatgattccgcaagtttacgaatttcatcggcgactacagcgaaaccttttcccgcttctcccgcatgggcggcttcaatcgcggcgttcatcgaaagcaggttagtctggctggctatgttttccattacggagttgatttccagcaagccttcggattctctggcgatttcctga

SEQ ID NO: 17198 - protein, 131 aa, Unknown
  Obtained from environmental sample
  misc_feature (1)..(131): Xaa is any amino acid
MSLNRPMDSNICLPPISCSSMALRIFCSCSETVFTLESIAPKRACTSVEDLVILSIDSFIFFKTLPIVFDCSLDDSASLRISSATTAKPFPASPAWAASIAAFIESRLVWLAMFSITELISSKPSDSLAIS

SEQ ID NO: 17199 - DNA, 576 bp, Unknown
  Obtained from environmental sample
  misc_feature (1)..(576): n is a, c, g, or t
atggctcttgaagttttttcagatttttccgaaaggttgaattacaatctgccaggactcccattatatgtgcgaaggggtgaattacgtaactttgatcgatatgcggcctcctgtcattggcatccggatcttgaattcctctttatattagatggcaatatggattattttgtcaataataaaattctgtatatgggtgttggtgaagggatatttgttaatagtaaacggcttcattacggttattctgaagataaatccgactgctcattcctttgcgttgttgttcaccctgccttgcttggcggagagacacttacaggaaaggaatatatagaatccaaatttagttcatcaactgaagattatatattgttaacggagaaattagattggcaaaaagaagcgttggtatccataaatcagatttatgatgaaatttacaaagaaacgtataaccctctgcgtttgatatcgcanatcacatcactttgcgcctgtataggtgataatattaaacctgctttcatgaaatcagcagatgaacgttcctggtnggcgtttgnaatatga

SEQ ID NO: 17200 - protein, 191 aa, Unknown
  Obtained from environmental sample
  DOMAIN (31)...(96): Cupin domain
  misc_feature (1)..(191): Xaa is any amino acid
MALEVFSDFSERLNYNLPGLPLYVRRGELRNFDRYAASCHWHPDLEFLFILDGNMDYFVNNKILYMGVGEGIFVNSKRLHYGYSEDKSDCSFLCVVVHPALLGGETLTGKEYIESKFSSSTEDYILLTEKLDWQKEALVSINQIYDEIYKETYNPLRLISXITSLCACIGDNIKPAFMKSADERSWXAFXI

SEQ ID NO: 17201 - DNA, 330 bp, Unknown
  Obtained from environmental sample
  misc_feature (1)..(330): n is a, c, g, or t
atgggtgctactatggcagctcccatagaaataaccgtaaacataagcggcgaagacggtcgctacctcaaatgcggaattcagttagagtatgatggtacagatgagcaactaggcactgaactggaagcgcgtaaagctcgcataaaagacatagtcatagacataatgagttctaaagtgctttctgaccttatgtcaaatgatggtaaaaaagctataagagagcaaattgttgccgcagtaaataatattttgccggaagatgtagggggcaagcctttgggaaaggttcgccgcagttattttgactcttttgttatgcagtga

SEQ ID NO: 17202 - protein, 109 aa, Unknown
  Obtained from environmental sample
  misc_feature (1)..(109): Xaa is any amino acid
MGATMAAPIEITVNISGEDGRYLKCGIQLEYDGTDEQLGTELEARKARIKDIVIDIMSSKVLSDLMSNDGKKAIREQIVAAVNNILPEDVGGKPLGKVRRSYFDSFVMQ

SEQ ID NO: 17203 - DNA, 414 bp, Unknown
  Obtained from environmental sample
  misc_feature (1)..(414): n is a, c, g, or t
gtgggcgaaattctatcacagtcagaaatagatgcaatgttgtcggggctttcgacagcccctgctgctactgctgctccagctccaaccctagcctataaaccttttgctccagttgcaacctcaaacaaaaaaataaatctctacgatttcacacgcccagatcgcatttcaaaagaccaaataagcacactgagaaatttgcacgaaggttatgctaggttactcacaaccacacttacaagcctgctcagaacggttgtggatattagcctgcaaaatgtggaacagctcacttatggcgaagttattaaaagcatatccactccaagctgtatttatgtgtttcaaatggaaccgctagaatcgagcgcatttttgatgttagcccctcgctcatattcattatgctag

SEQ ID NO: 17204 - protein, 137 aa, Unknown
  Obtained from environmental sample
  SIGNAL (1)...(25)
  DOMAIN (49)...(136): Flagellar motor switch protein FliM
  misc_feature (1)..(137): Xaa is any amino acid
MGEILSQSEIDAMLSGLSTAPAATAAPAPTLAYKPFAPVATSNKKINLYDFTRPDRISKDQISTLRNLHEGYARLLTTTLTSLLRTVVDISLQNVEQLTYGEVIKSISTPSCIYVFQMEPLESSAFLMLAPRSYSLC

SEQ ID NO: 17205 - DNA, 876 bp, Unknown
  Obtained from environmental sample
  misc_feature (1)..(876): n is a, c, g, or t
gtggacggcgacccgcccgcggccatgaggtacaccgaggcgcgtttgagtgcaataagcaacgaattgctgcgcgaaatcgacaaaaacacggtcaatttcatgccgaatttcgatgaaaccgaacaacaacccgttgtgttgccaagccgttttccgaacctgttggttaacggttccgacggtattgcggtcggtatggcgacgaatattccgccgcataaccttaacgaagtcatcgacggcgtcatcgcggttattgacgattccgaggtttccattgatgcattgatgaaaattattcctgcgcccgattacccgacaggtggggttattatgggccgcgcggccattcgacacgcgtacaaaaccggccgcggcggggtggttatccgcagtaaatgcgagattgaagaggtcaaaggccgccagcaaatcgtggtttcggaattgccctatcaagtcaacaaggccaaattgattgaaagcatcgcgaatttggtcaaagacaagcgcatcgacggcattaccgacgtcaacgaagaatccgaccgcgaaggtatgcgtattgttattcagattaaaaaagaggcgcaaccccaggttgtgttgaatgcgttattcaaacatacgcaattgcaaatttcgaccggaattattttcttggcgttggtgggcaacgaacccaagtttttgaatttaaaagagatgcttgttcattaccttgaccaccaaaaagaagttattgtgcgccgaaccaaattcgatttggaaaaagccngaagaacgcgcacatattttggaaggtcttgtcattgcgcttgcaaacatcgacgaagtcattgcaaccatcaaaaaatccgacgaccgcgatga

SEQ ID NO: 17206 - protein, 291 aa, Unknown
  Obtained from environmental sample
  DOMAIN (1)...(290): DNA gyrase/topoisomerase IV, subunit A
  misc_feature (1)..(291): Xaa is any amino acid
MDGDPPAAMRYTEARLSAISNELLREIDKNTVNFMPNFDETEQQPVVLPSRFPNLLVNGSDGIAVGMATNIPPHNLNEVIDGVIAVIDDSEVSIDALMKIIPAPDYPTGGVIMGRAAIRHAYKTGRGGVVIRSKCEIEEVKGRQQIVVSELPYQVNKAKLIESIANLVKDKRIDGITDVNEESDREGMRIVIQIKKEAQPQVVLNALFKHTQLQISTGIIFLALVGNEPKFLNLKEMLVHYLDHQKEVIVRRTKFDLEKAXRTRTYFGRSCHCACKHRRSHCNHQKIRRPR

SEQ ID NO: 17207 - DNA, 771 bp, Unknown
  Obtained from environmental sample
  misc_feature (1)..(771): n is a, c, g, or t
atggacagattcngcacgaggcgcgcacgcaaggatttgattcggcgcaaatcgtcgctcgaatccacgaccctgcccggaaagttggcggattgcacggaaaaaagcgcggacttgtgcgaaatatacattgttgagggcgagtctgcgggcggtaccgcaaaacagggtcgcgacaggcggttccaggcaattttaccgttgcgcggcaagattttaaacgttgaaaaggcacgtcttgccaaggttttggaaaacgccgaaatcaaaaatatgattaccgcgttcggctgcggcattcaagaggactttgacgaggcaaaactgcgctacggcaaaataatttgtatgacagatgcggacgtggacggcagccacattcgaattttgcttctgacgtttttctatcggtttatgcgtcctttaatcgaaaaaggccacgtttacattgcccagccgccgctttacaaggtcacgcgcggcaaggttgacacctatgtttacagcgattccgatttggaaaaattgatgaaagccggcggcaaaagcggcactgcggttcaacgatacaaaggtcttggcgagatgaacgcggaacaactttgggatacgactatgtcgcccgcgaacaggacattgctgcaagtatcgatggaagacgcatttatggccgacgagattttttcaacgttgatgggcgaaaaacccgagttgcgccgcgactttatcgccgaacatgcggcggcgtatgttgagaacttggatatatag

SEQ ID NO: 17208 - protein, 256 aa, Unknown
  Obtained from environmental sample
  DOMAIN (70)...(151): Toprim domain
  misc_feature (1)..(256): Xaa is any amino acid
MDRFXTRRARKDLIRRKSSLESTTLPGKLADCTEKSADLCEIYIVEGESAGGTAKQGRDRRFQAILPLRGKILNVEKARLAKVLENAEIKNMITAFGCGIQEDFDEAKLRYGKIICMTDADVDGSHIRILLLTFFYRFMRPLIEKGHVYIAQPPLYKVTRGKVDTYVYSDSDLEKLMKAGGKSGTAVQRYKGLGEMNAEQLWDTTMSPANRTLLQVSMEDAFMADEIFSTLMGEKPELRRDFIAEHAAAYVENLDI

SEQ ID NO: 17209 - DNA, 660 bp, Unknown
  Obtained from environmental sample
  misc_feature (1)..(660): n is a, c, g, or t
ttggtgcgcgacggcgacacagtggaagcgggagaactgctctgtcagggcgctatcaatccgcatgacgttctatatatactcggcgaaggaaaattacagcgttatctgatggatgaaattcaaaacgtataccgcctgcagggcgtatctataaatgacaagcatatcggcgtaattatcaggcagatgatgcgtaaagttgaaataagatttgtaggagacacaaaatttatttatggttcttccgtggacaagtaccgtttccacgaagaaaacgcccgcgtaatggcggaaggcggacagcctgcaatcgctcagccaatgttccagggaataacaaaagcgtcgcttaatatagattcgttcctttccgccgccagtttccaggaaacgacaagggttcttacaaacgccgctattgctggttctacggactaccttcgcggcctaaaggaaaatatcatcataggtcatccgatcccggcgggaaccggaatgaaacgttatcacaatgttaaactttttgatgaagacagccaggatctggatgaatatatgcaggaaattcttaacaggcgcaaagaggaagctgaagcgatttcaggtaacgaaaacactcaggaagaatacaacactgttgaagatcccgaggattag

SEQ ID NO: 17210 - protein, 219 aa, Unknown
  Obtained from environmental sample
  DOMAIN (2)...(126): RNA polymerase Rpb1, domain 5
  misc_feature (1)..(219): Xaa is any amino acid
MVRDGDTVEAGELLCQGAINPHDVLYILGEGKLQRYLMDEIQNVYRLQGVSINDKHIGVIIRQMMRKVEIRFVGDTKFIYGSSVDKYRFHEENARVMAEGGQPAIAQPMFQGITKASLNIDSFLSAASFQETTRVLTNAAIAGSTDYLRGLKENIIIGHPIPAGTGMKRYHNVKLFDEDSQDLDEYMQEILNRRKEEAEAISGNENTQEEYNTVEDPED

SEQ ID NO: 17211 - DNA, 381 bp, Unknown
  Obtained from environmental sample
  misc_feature (1)..(381): n is a, c, g, or t
ttgaaagcanccaaggaaaaatttcttttccgtaaaatagacaatgtgcgggtaaaaggcaaggataagcctgtcggcatatacgccgtatattcgggtnttcacggcgctgacggaaaaaaactgcgttcaggagaaaccgccgatataacttcagtggattctcttctgattaaccgtgacactctgataaattataataaagggcttagggttttttacctgcgcgaatggaaactcgcgcaggagtattttaacaatgcgttggaaagcgataaaaacgactatctgtcaaaactttaccttgaacgttcagctaaactgtcagaggcgaatgtaggcgacgattgggacggagtaattacttttacagaaaaataa

SEQ ID NO: 17212 - protein, 126 aa, Unknown
  Obtained from environmental sample
  misc_feature (1)..(126): Xaa is any amino acid
MKAXKEKFLFRKIDNVRVKGKDKPVGIYAVYSGXHGADGKKLRSGETADITSVDSLLINRDTLINYNKGLRVFYLREWKLAQEYFNNALESDKNDYLSKLYLERSAKLSEANVGDDWDGVITFTEK

SEQ ID NO: 17213 - DNA, 885 bp, Unknown
  Obtained from environmental sample
  misc_feature (1)..(885): n is a, c, g, or t
ttgagccagaaggccggcgaggcggccgaggaaaggcttctggacctccttctgcccggcggccgcgccgcgccgccggccggggcggagaagccggaagccacccgggagaagctccgggccttattgcacgcgggccgcctggacgaccgggaagtggaactggaaacccgggagggcggcgccatgccggtggcccgcattttcaccggcttgggcctggaggacatggaaaagaacctgagcgaagccatgagccagttcttccccaaaaaacctcaagtgcgccgcctcacggtcaaggaggcctggagcgtcctggcggccgaggaggccgcccgcctggtggacatggacaaggtcacggccgaggccaaggcccgggtggaacagcacggcctggtcttcatcgatgaactggacaaggtggccggccgggaaagccgatccgggccggacgtgagccgggaaggggtgcagcgcgacctcctgcccctggtggagggctcgaccgtgcccaccaagtacggcccggtcaagaccgatcacatcctcttcatcgccgccggggcctttcacgtggccaagcccagcgacctcatccccgaactgcagggccgcttccccatccgggtggaactggcgcccctgaccaaggacgatttcgtgcgcatcctgaccgagccggaaaacgccctgacccgccaataccaggctcttctggccaccgaggaggtggaactggatttttcgccggaagccgtggagaccctggccgaaatggcctgcctggtcaatgaaaaaaacgagaacatcggcgcccggcgcctggncaccataatggagaaactcctggatgaagtctccttcgaggcccggacataa

SEQ ID NO: 17214 - protein, 294 aa, Unknown
  Obtained from environmental sample
  DOMAIN (62)...(211): ATPase family associated with various cellular activities (AAA)
  misc_feature (1)..(294): Xaa is any amino acid
MSQKAGEAAEERLLDLLLPGGRAAPPAGAEKPEATREKLRALLHAGRLDDREVELETREGGAMPVARIFTGLGLEDMEKNLSEAMSQFFPKKPQVRRLTVKEAWSVLAAEEAARLVDMDKVTAEAKARVEQHGLVFIDELDKVAGRESRSGPDVSREGVQRDLLPLVEGSTVPTKYGPVKTDHILFIAAGAFHVAKPSDLIPELQGRFPIRVELAPLTKDDFVRILTEPENALTRQYQALLATEEVELDFSPEAVETLAEMACLVNEKNENIGARRLXTIMEKLLDEVSFEART

SEQ ID NO: 17215 - DNA, 504 bp, Unknown
  Obtained from environmental sample
  misc_feature (1)..(504): n is a, c, g, or t
ttgtgggcgggcacccgatggcgggcaccgaacactcgggngtttaaacacagcaaggcgaatatgttcaaaggcgcgtccatgatcatagtgccgccggtgtatgacgacattcagtttcttgagaagatcaagaccctgctcgcgccggcggaattcggcagactgaccgtcaccaccgcggaaaagcacgacgcgatgatcgcgtttacatcgcagatggcccatctggtatccaacgcgtttattaaaagcccgaccgtatttgagcacaaggggttttccgccggcagctacaaagacctgacccgggtggcatggctcaacgagcggatgtgggcggagctttttctggagaataaggagtatctgctccacgagcttgatctgtttctggccgccctccgggagtacaggaacgcgctgcaggatgaggattctcccaagctccagtcccttcttctcgacggcaagcgccttaaagaagaggtcgaccgccgatga

SEQ ID NO: 17216 - protein, 167 aa, Unknown
  Obtained from environmental sample
  DOMAIN (3)...(161): Prephenate dehydrogenase
  misc_feature (1)..(167): Xaa is any amino acid
MWAGTRWRAPNTRXFKHSKANMFKGASMIIVPPVYDDIQFLEKIKTLLAPAEFGRLTVTTAEKHDAMIAFTSQMAHLVSNAFIKSPTVFEHKGFSAGSYKDLTRVAWLNERMWAELFLENKEYLLHELDLFLAALREYRNALQDEDSPKLQSLLLDGKRLKEEVDRR

SEQ ID NO: 17217 - DNA, 504 bp, Unknown
  Obtained from environmental sample
  misc_feature (1)..(504): n is a, c, g, or t
atgagttccagagacgttctttccgcaattaatgaaaagaaggccgatttaaccgtaagacttaacgacagaaaagtacgcatgattcctaacatggtatctttagaaaatattttaagggcgggacctgcaggagaaggctggaatcgtagagcggcggtcgtttctactcttcaacgtgataccgccgcccttgaatccatttcggatgacagatcccttactatccatgtaattgaaatatacaggaaattttccgttccccttggcgcgttttgttttgtttttctcgcggtttctttagggctaatggcgaagaaaagcgggcagaccgtaggttttatttttggcaatattatcgccgtgttatactggtccatgctctttatagggcagacgatgggtctgcgcgctggaaccccgccttttttatcgatgtggacgccaaattttttctttttaattatagggcttgttcttgccgttattaaggttcaaaaatga

SEQ ID NO: 17218 - protein, 167 aa, Unknown
  Obtained from environmental sample
  misc_feature (1)..(167): Xaa is any amino acid
MSSRDVLSAINEKKADLTVRLNDRKVRMIPNMVSLENILRAGPAGEGWNRRAAVVSTLQRDTAALESISDDRSLTIHVIEIYRKFSVPLGAFCFVFLAVSLGLMAKKSGQTVGFIFGNIIAVLYWSMLFIGQTMGLRAGTPPFLSMWTPNFFFLIIGLVLAVIKVQK

SEQ ID NO: 17219 - DNA, 546 bp, Unknown
  Obtained from environmental sample
  misc_feature (1)..(546): n is a, c, g, or t
atggccggaatctttgaggattccgccagatttatttcattcaatattctaaaaaataaaatctccgggattgacgccggattttattatggaatcggtcacggcggaatagaagcaatacttcttgtcggttttacaatgataaacaatataatattcagtattattataaataccggcaaattgggcaacataacatcaaacattcaagtaacggaagcgcttaatcaagtaactatttatatgggtacgcttacaacaacagccccatatatgtttcttataagcggtattgagcgtatatttgcaattggcatacaaatgtccctgtcaattatcgtgtattattcggttttcggcaaaaataaaatatggttgtaccctttggcgatattattccacgctattgttggtattcccgccgccgcaatgcaagcgggaatactaaaaaacatttttttggtagaaggtattatatttttatgttcaatattattaatacttttcacaaaatatttgcatgataaattaagtaaagatgtgtaa

SEQ ID NO: 17220 - protein, 181 aa, Unknown
  Obtained from environmental sample
  misc_feature (1)..(181): Xaa is any amino acid
MAGIFEDSARFISFNILKNKISGIDAGFYYGIGHGGIEAILLVGFTMINNIIFSIIINTGKLGNITSNIQVTEALNQVTIYMGTLTTTAPYMFLISGIERIFAIGIQMSLSIIVYYSVFGKNKIWLYPLAILFHAIVGIPAAAMQAGILKNIFLVEGIIFLCSILLILFTKYLHDKLSKDV

SEQ ID NO: 17221 - DNA, 789 bp, Unknown
  Obtained from environmental sample
  misc_feature (1)..(789): n is a, c, g, or t
atgggcggatcaggctcggaagaatttatggtagaaagcgaaatcggcgacaatacgctgatcctctgcaaaaattgcgattacgccgccaacgtggagaaagccgcctgcaaaagcgattttacggcgcataacacgatagaagccgcaaaagacgccgccaaaggaactaaaagttttgaaaaaatagacacgcctaacgcaaaaacaatcgaagaactttgcgccttcttaaaaacagaatccaaagcgtttattaaaacactaatatatcgcgccctcaatgtcgagcttgatctctcctccgccccgggctgcgctaaacttgaacggaaaaaaccatcgtccgacgcgcccgccgtctaccccgaagcctttttcgcagtggcaatccgaggcgaccttgacgtgaacgaagtaaaactggcggctgtgttaaaagcaagcgaagtcgccctcgcctcagacaccgatgttacacgccttacaaacgcccccgtcggttttgccggtcccgtcggattaacaggactgccggttataatcgatcacaccgttacgggaatgaatgacgcagtaacgggagcgttggcgaaagacctgcactacaagcacgtcgcatacggcagagattttgaaggctgggcgattgacggacaaacatccgtcgatgtccgcacagtgaaagcgggagaacattgtccgcaatgcggcggcgaattgtacacaaaaatgggcaacgagttagggcacattttcaactcggatacaaatacacacgtttcatga

SEQ ID NO: 17222 - protein, 262 aa, Unknown
  Obtained from environmental sample
  DOMAIN (56)...(212): YbaK / prolyl-tRNA synthetases associated domain
  misc_feature (1)..(262): Xaa is any amino acid
MGGSGSEEFMVESEIGDNTLILCKNCDYAANVEKAACKSDFTAHNTIEAAKDAAKGTKSFEKIDTPNAKTIEELCAFLKTESKAFIKTLIYRALNVELDLSSAPGCAKLERKKPSSDAPAVYPEAFFAVAIRGDLDVNEVKLAAVLKASEVALASDTDVTRLTNAPVGFAGPVGLTGLPVIIDHTVTGMNDAVTGALAKDLHYKHVAYGRDFEGWAIDGQTSVDVRTVKAGEHCPQCGGELYTKMGNELGHIFNSDTNTHVS

SEQ ID NO: 17223 - DNA, 789 bp, Unknown
  Obtained from environmental sample
  misc_feature (1)..(789): n is a, c, g, or t
atgtttaaccgtaaacttgacaccataaaagtctcgcgcatatacggaagcagaaaagtattggacgcgggcaacggtatcgcggtctattttgaaaaggagtccttaatctgcaagggcgcgaacatggtatacggggtgattaaccattggattccgttttcctccggctcaaagtcttttataaccgttggagatacgatctccgtggttgagaaaggggctgttgtcaatagatataaattaacggaagacgatttcgggtatggcgatgcccttatgccgccgccgagcaaggagattttttcagaatgggtgaattttaatttttacgggaattgtattttgagttattcgataaaaaagaataagttttacagcgcatcggagatggaagccgaaaaagaacgggtcaaagaagatgttaaggggtctaacgtcaactatggcacgctcgccgactcgcgggacggcaagaagtataggacggtaaagataggcgataatacgtggatggcggagaacatgaattataaacctgtgacgggcgaatcttggtgtatcgacgacgccgagtccaattgcgctaaatacggcaggctctacgactggttagcggcgcggacggtgtgccctaaggggtggcgtctgtcatcccgcgcggattgggattatctgggtaaggcggcaggcggttttgcggcggggctgaacagtcgcggcgaaatggcgactaatgtncacgacctgagcgggaacttcggttggttcggcgtgggtaaaagctga

SEQ ID NO: 17224 - protein, 262 aa, Unknown
  Obtained from environmental sample
  misc_feature (1)..(262): Xaa is any amino acid
MFNRKLDTIKVSRIYGSRKVLDAGNGIAVYFEKESLICKGANMVYGVINHWIPFSSGSKSFITVGDTISVVEKGAVVNRYKLTEDDFGYGDALMPPPSKEIFSEWVNFNFYGNCILSYSIKKNKFYSASEMEAEKERVKEDVKGSNVNYGTLADSRDGKKYRTVKIGDNTWMAENMNYKPVTGESWCIDDAESNCAKYGRLYDWLAARTVCPKGWRLSSRADWDYLGKAAGGFAAGLNSRGEMATNVHDLSGNFGWFGVGKS

SEQ ID NO: 17225 - DNA, 744 bp, Unknown
  Obtained from environmental sample
  misc_feature (1)..(744): n is a, c, g, or t
atgcgagctgatttttcaaagataaaaaacggtgatatatcaccagaagatgctttatcaaaattatgcactcaaccgtttgaggatttggggtacgcaaaattagaccaccaccgcgaattgcgaaagggcattcccgaagttatatacggcacaggaaaatcacaggagcaaataaagggtatcgtaaaggcgatgctcgcaaaagggcagaatttgatactcataactagactgcaatctaaaaaagccgagatacttcaaaaaaatttgcccttgatatattacgaaacagcacagataggaataataggcgaaataccaaaaccaaatggcataggcaaaattgtggttgccacaggtggcacaagcgatattccagtggcagaagaagccgcggtcacagcagaagttctcggcaatgaagttgtgcgtttatacgatgtgggtgttgcgggaatgcacaggcttctctctaagttaaacgatattatagatgcgcaggttgttatttccattgccggaatggaaggtgcattaaccagcgttataggcggtcttgttgaatgtccagttattggggttcccacaagcgtaggttatggctcttcattcaagggagtagccgccttgctatctatgctcaattcctgtgcaagcggtgtgagcgtagttaatatcgataacggttttggagcgggatatttggcaagcataataaatcaccaaaaaggtgtgaaatga

SEQ ID NO: 17226 - protein, 247 aa, Unknown
  Obtained from environmental sample
  DOMAIN (114)...(246): AIR carboxylase
  misc_feature (1)..(247): Xaa is any amino acid
MRADFSKIKNGDISPEDALSKLCTQPFEDLGYAKLDHHRELRKGIPEVIYGTGKSQEQIKGIVKAMLAKGQNLILITRLQSKKAEILQKNLPLIYYETAQIGIIGEIPKPNGIGKIVVATGGTSDIPVAEEAAVTAEVLGNEVVRLYDVGVAGMHRLLSKLNDIIDAQVVISIAGMEGALTSVIGGLVECPVIGVPTSVGYGSSFKGVAALLSMLNSCASGVSVVNIDNGFGAGYLASIINHQKGVK

SEQ ID NO: 17227 - DNA, 405 bp, Unknown
  Obtained from environmental sample
  misc_feature (1)..(405): n is a, c, g, or t
atgacagattggccgagatacggtcaaggctacgccgcccacgagcagcaggtttacagcgatatcgcgaacgcgcgttcccggcttgccggggcgcaaactgtggaggagaaagcagcgggctacaacgatatgcagtccgcgcttgcccggttattggttgtggtagagcagtaccccgatctgaaggccaatcaaaatttcatcgcgctacaggatgagctggcaggtacggaaaaccgtctcgctgtggcgcgtaaacgctacaacgacagcattaccaccttcaacgtgcgtatacgccagttccccggttccatagtagcgggcaggatgggtttcgtcccccacgcctattttgaaattgccgaaaccgcgcgccaggttccgacgctacagttttag

SEQ ID NO: 17228 - protein, 134 aa, Unknown
  Obtained from environmental sample
  DOMAIN (1)...(134): LemA family
  misc_feature (1)..(134): Xaa is any amino acid
MTDWPRYGQGYAAHEQQVYSDIANARSRLAGAQTVEEKAAGYNDMQSALARLLVVVEQYPDLKANQNFIALQDELAGTENRLAVARKRYNDSITTFNVRIRQFPGSIVAGRMGFVPHAYFEIAETARQVPTLQF

SEQ ID NO: 17229 - DNA, 813 bp, Unknown
  Obtained from environmental sample
  misc_feature (1)..(813): n is a, c, g, or t
atgaaaccagccgttatttacataattttcgaaaacgtacgcattatcgcagtcaacaaagctgccggaatttctgtgggcggcgaccggtgggacgaaaccaaagaacggctggataaactggtcgcggaatctattatccccccggcgaaaatttttactgtccaccgtatagactgcgatacttccgggctggtggtatttgcgaaaaatgaggaagctcaccgccgtctttcaatcgcttttgaggggcgggatgttaccaagcggtacattgccattgttcacggacgcccttcctggcaggaaacggcctgcgatcttccccttattcccaatggcaacaaactccaccagactataattgacaaataccagggtaaaaagtctcttacccgctttgtgctgctgggcagcgcggggaattacagcgtaattgaagccctgccggaaaccggcagaacccaccagatacgcgttcatgccgccgctttgggccatcccgttgtctgtgactcaatgtacgggaagggcaagccggttatgctttcggaaataaagaggaactggcatggcgacccttatgatgaaaaaccccttttggcgcggcttggccttcatgccgctgaacttgcggtgccaactcagataacagagaacagagaacagagaacagagatgccaacggaattcattagcctacaagcgccgcttcctagggatatggcggctctaatcaatcagatggcgaagaaaattaggaaggaggaaggaggaattaggaataaatcgtggtttacaagcggaaaatga

SEQ ID NO: 17230 - protein, 270 aa, Unknown
  Obtained from environmental sample
  DOMAIN (14)...(164): RNA pseudouridylate synthase
  misc_feature (1)..(270): Xaa is any amino acid
MKPAVIYIIFENVRIIAVNKAAGISVGGDRWDETKERLDKLVAESIIPPAKIFTVHRIDCDTSGLVVFAKNEEAHRRLSIAFEGRDVTKRYIAIVHGRPSWQETACDLPLIPNGNKLHQTIIDKYQGKKSLTRFVLLGSAGNYSVIEALPETGRTHQIRVHAAALGHPVVCDSMYGKGKPVMLSEIKRNWHGDPYDEKPLLARLGLHAAELAVPTQITENREQRTEMPTEFISLQAPLPRDMAALINQMAKKIRKEEGGIRNKSWFTSGK

SEQ ID NO: 17231 - DNA, 690 bp, Unknown
  Obtained from environmental sample
  misc_feature (1)..(690): n is a, c, g, or t
atgttatgcacacagggaaaaacggattgcaagccaagcgaggttggctatgatgaacaacggcttgatgtgctgaaccgccacctgcaacgcgtaattgatggtggtgaaatccaatgcgctacctactgtatatcccgcaagggcaaagttttcgcgcatggcgcaatagggaaaaaattgttccgtaaagatgacaatactcctgttcagccggattctatccgttacatagcctcgataaccaaagtatttaccgctgttgcgataatgaaactggtcgaggacggcattacgcggctggacgtgccggtgggcgaaatcctgccgcagttcaacacaccgccatataacggcgttacattgtttcagcttttaacccacacctcgggaatgcacgcagacgaagggtgttttgaaaacaaataccagtccagttactggaaaattattgatgacgcgtacaagctttgcgaaagcgataaaaaaaacgaatttgactggttagccgccatgttaggcacaataggaaatggtttccgcgtcaagcccgataccgagtgggcttattgcagttttggctttgctgttcttggcgcggttatcgaaaaattgactggtatccacgctcataagtatatcgaagacaatatttgtaaaccgttggggagaaggnccggtattgactaa

SEQ ID NO: 17232 - protein, 229 aa, Unknown
  Obtained from environmental sample
  DOMAIN (25)...(223): Beta-lactamase
  misc_feature (1)..(229): Xaa is any amino acid
MLCTQGKTDCKPSEVGYDEQRLDVLNRHLQRVIDGGEIQCATYCISRKGKVFAHGAIGKKLFRKDDNTPVQPDSIRYIASITKVFTAVAIMKLVEDGITRLDVPVGEILPQFNTPPYNGVTLFQLLTHTSGMHADEGCFENKYQSSYWKIIDDAYKLCESDKKNEFDWLAAMLGTIGNGFRVKPDTEWAYCSFGFAVLGAVIEKLTGIHAHKYIEDNICKPLGRRXGID

SEQ ID NO: 17233 - DNA, 303 bp, Unknown
  Obtained from environmental sample
  misc_feature (1)..(303): n is a, c, g, or t
atgcctagcacccttgaagccaccgaagtgtttttaaagaacaaggtgctgtttgcccccggtaaagcggctaacgccggaggcgttgcgacatccgcgctggaaatgtgccagaattccatgagattgtcctggtcatttgacgaagtagatcaaaagctcaagagcatcatggtgaatatctacaacaacattgccgccgccgcaaaagaagccggttccgaggataattttgtcgtgggggcgaatatcgccggttttaagaaagtcgcggaggccatgaggcagcaagggactgtttag

SEQ ID NO: 17234 - protein, 100 aa, Unknown
  Obtained from environmental sample
  DOMAIN (1)...(98): Glutamate/Leucine/Phenylalanine/Valine dehydrogenase
  misc_feature (1)..(100): Xaa is any amino acid
MPSTLEATEVFLKNKVLFAPGKAANAGGVATSALEMCQNSMRLSWSFDEVDQKLKSIMVNIYNNIAAAAKEAGSEDNFVVGANIAGFKKVAEAMRQQGTV

SEQ ID NO: 17235 - DNA, 486 bp, Unknown
  Obtained from environmental sample
  misc_feature (1)..(486): n is a, c, g, or t
atgtcccttctggccgattttcataaccattcctgcctttcaccctgcggttctcttgatctttctccacgggcgctggcggatctggctgccctccgtggggtcagggtgcttgccttaacggatcacaattccagccttaactgcccggctttcgctaaagtctgtctcactcgcggcattcttccaatatttggcatggaggctaccacccaggaggaaatccacgtcctctgcctttttacaagcctccaggccagcctggacttcagcgaatatgcttacagcctgcttatgcccttttttaacaatcccgacaaaacaggagaccaggtgtttgtcgacgaggatgacaatatcgagggcgaagtggaatactaccttgtgaaccccctggaactaagcatcgaatcaatagaggcaaaggtagcggaatatggcggcattgctattcccgcccatgtggagcgcccggcttttccatga

SEQ ID NO: 17236 - protein, 161 aa, Unknown
  Obtained from environmental sample
  misc_feature (1)..(161): Xaa is any amino acid
MSLLADFHNHSCLSPCGSLDLSPRALADLAALRGVRVLALTDHNSSLNCPAFAKVCLTRGILPIFGMEATTQEEIHVLCLFTSLQASLDFSEYAYSLLMPFFNNPDKTGDQVFVDEDDNIEGEVEYYLVNPLELSIESIEAKVAEYGGIAIPAHVERPAFP

SEQ ID NO: 17237 - DNA, 687 bp, Unknown
  Obtained from environmental sample
  misc_feature (1)..(687): n is a, c, g, or t
atgaacgaccggaccttcactgccgagcagttcattggaatgcaggtgtctagggacttcgtgaaggatcccggcgaaatagagaccgcgccgccggagagtttcttgtatcaatccggttacctgacgtgnagggagggcgtctccggcgacttttcgctggactaccccaacatcgaggtgctgaactccatgtcgcggctggtctgcgcaaatataatgcgccgcagagacgacggcgattggaatataagcattccgctttgggagtcgctgaacgacggcgacgtcggcctatttatcgagacgataaaccgccttctggcaagcatcccctacgacgattacgcaaagtcggcgcagtcggctataaggcggtccggcgttcccgcgcgggagtggctctatcgctcgaccatcttagcgttcctgcgcggttgcggcgtaatgacgttcagcgaagtccacactagcgtcggacgccccgatctgctgctctgccacaaaggcgcggcgtgggtaatcgagataaaagtggcctacagcaacgacggcgaagcgctggcaaaagaggtgctggaacagattcgcggacggcggtatgccgaccaattcaaaacggccaaaaaggtggggatagctattgacgacggggagaggcagatcaaggattgggtggagggatga

SEQ ID NO: 17238 - protein, 228 aa, Unknown
  Obtained from environmental sample
  misc_feature (1)..(228): Xaa is any amino acid
MNDRTFTAEQFIGMQVSRDFVKDPGEIETAPPESFLYQSGYLTXREGVSGDFSLDYPNIEVLNSMSRLVCANIMRRRDDGDWNISIPLWESLNDGDVGLFIETINRLLASIPYDDYAKSAQSAIRRSGVPAREWLYRSTILAFLRGCGVMTFSEVHTSVGRPDLLLCHKGAAWVIEIKVAYSNDGEALAKEVLEQIRGRRYADQFKTAKKVGIAIDDGERQIKDWVEG

SEQ ID NO: 17239 - DNA, 489 bp, Unknown
  Obtained from environmental sample
  misc_feature (1)..(489): n is a, c, g, or t
atgaaattcctgcacctgtccgacctgcacattgggaaaagcgtgaacggtttttcgatgaccgaagaacaagaacacgcttttgggcagatccttgggtatgttaaaagcgaaagtcccgccgccgttttaatcgccggggatgtgtacgaccgcaccattccaagtgttgaagcggtgcgcgtgttcgatgatttccttacggcccttgccgccaaagaggtaacggtgatgctcatttccggtaaccatgattcccaggaacgcttaaattacgcgagccgcctgttgtccgataaacggctgtatctttacggcgccttcgacggcgcaatgcgtaaagtcacactgactgacacacacggtgaggtacatttttggctcctgccgttcataaaacctcaggcggttcagggattgttcggcgagcgtgaaatcaacagctatgacgacgcgcttaccgcggcgatagaaaccgcgngggattga

SEQ ID NO: 17240 - protein, 162 aa, Unknown
  Obtained from environmental sample
  misc_feature (1)..(162): Xaa is any amino acid
MKFLHLSDLHIGKSVNGFSMTEEQEHAFGQILGYVKSESPAAVLIAGDVYDRTIPSVEAVRVFDDFLTALAAKEVTVMLISGNHDSQERLNYASRLLSDKRLYLYGAFDGAMRKVTLTDTHGEVHFWLLPFIKPQAVQGLFGEREINSYDDALTAAIETAXD

SEQ ID NO: 17241 - DNA, 357 bp, Unknown
  Obtained from environmental sample
  misc_feature (1)..(357): n is a, c, g, or t
gtgatagtacccatgccatgcgaatttttcgcgatggacggcttggctgagcttgtggagactatccgccgcatacaggggggttcaaaccccaatttggtactcggcggcatcttgctgactatggcagaagagcgcaccaatttgggggccgctgtggcaactgaggtcaggcaggcgttccctggaaaagtttttcaaacgtcaattccgcgcaacattcggctggccgaagcccccagccatgggaagcccgtggccttttacgacttgaagtccaagggcgcccaagcatacctcaaccttgcaaaggaatggctgggaatggatttcacggtttctaaggattcattatga

SEQ ID NO: 17242 - protein, 118 aa, Unknown
  Obtained from environmental sample
  misc_feature (1)..(118): Xaa is any amino acid
MIVPMPCEFFAMDGLAELVETIRRIQGGSNPNLVLGGILLTMAEERTNLGAAVATEVRQAFPGKVFQTSIPRNIRLAEAPSHGKPVAFYDLKSKGAQAYLNLAKEWLGMDFTVSKDSL

SEQ ID NO: 17243 - DNA, 813 bp, Unknown
  Obtained from environmental sample
  misc_feature (1)..(813): n is a, c, g, or t
gtgggcgataattttacttttaccgcaaaagaattaatcggagcggatatttttcttgacgaagcttctgtaacggcaacggaaaacgccataatggcggcggctttggcaaagggaaaaacaattttgaataacgccgcaagcgaaccccatgtgcaggatttgtgcaggatgttagctgcaatgggcgctcaaattgaaggtatcggctccaatatacttacaattaccggagcggaaaaactttcaggctgtgattttgaaataggcgctgattttatggaagtcggctcctttatcggtcttgccgccgtaacaggcggagacctgcacatagaaggcgcgcgtcctcaggatatgcgccccgcgaaaatcgccttcgggaaattgggcattgtttgggcgcatgagggaactgttatccatgtgccgaaaaatcaaagcatggaagtaaatcacgacctcggcggtatgattccgaaaatagacgatgccccttggcccggcttccctcccgatcttgtaagcataataatcgttgtggctacgcagataaaaggcacggtgctggttcatgaaaaaatgtacgagtccagaatgttctttgtggacaaacttatcggcatgggagcgagaattgtgttatgcgatccgcacagagccgttatttcaggaccggcaaaacttcacggttcggaattgataagccccgacgtgagagcgggaatgtccatgctgatcgccgctatgtgcgccgaaagcaaagagtgtatacgcaatgtttaccagattgaaggggctatgagcagttag

SEQ ID NO: 17244 - protein, 270 aa, Unknown
  Obtained from environmental sample
  DOMAIN (1)...(268): EPSP synthase (3-phosphoshikimate 1-carboxyvinyltransferase)
  misc_feature (1)..(270): Xaa is any amino acid
MGDNFTFTAKELIGADIFLDEASVTATENAIMAAALAKGKTILNNAASEPHVQDLCRMLAAMGAQIEGIGSNILTITGAEKLSGCDFEIGADFMEVGSFIGLAAVTGGDLHIEGARPQDMRPAKIAFGKLGIVWAHEGTVIHVPKNQSMEVNHDLGGMIPKIDDAPWPGFPPDLVSIIIVVATQIKGTVLVHEKMYESRMFFVDKLIGMGARIVLCDPHRAVISGPAKLHGSELISPDVRAGMSMLIAAMCAESKECIRNVYQIEGAMSS

SEQ ID NO: 17245 - DNA, 819 bp, Unknown
  Obtained from environmental sample
  misc_feature (1)..(819): n is a, c, g, or t
ttggctgctcccggaaactggacaaggtatcatataggcgccaatccgctgacgaccattaactttgaaatcccgttgggcgacaccagacntgatggcatgtattggatagacatcatggtttacgaccgcgttggtaatcccgaaacgctcttgaacagcgcctntacgctggaccggaaaaaaccggtgctgagtttgtcgggaccctccaataatatcttcaaatccgatgcgggctttaccctgtccggaaatgtcgtggaaggaaacttgcgaaatatgggcataaaggtggatgatggcgctgaaactgactatccgttgacgggcagcggtttctggggaacgccgaccgggtcaccggctgacacctatccctggacctggaccatcagcgaagatgtctttgacgccataacgcccgacgggacacattccataaccgtaacggcctacgactatgccggcaagacggactataagacctacacctttaccaaggataccactccgccggtgataacgctgaacaatgttctgtcggacggcagcagcataattcgtgaagctgacgccgcgattcgggtgtcgtttaacgacgagtattccaacattggctctactgctccgacctccggtgaattcgccaacaggtactcctttacctaccgtattggcaatgcctcgaataccaacccggatacgaagaccttctatttcccggtgacaccgacagtaggcaagtcgatcaatgctgacatcctgatcgccaacaccactgccaatatctggccgcccaccggaacggcgacatga

SEQ ID NO: 17246 - protein, 272 aa, Unknown
  Obtained from environmental sample
  misc_feature (1)..(272): Xaa is any amino acid
MAAPGNWTRYHIGANPLTTINFEIPLGDTRXDGMYWIDIMVYDRVGNPETLLNSAXTLDRKKPVLSLSGPSNNIFKSDAGFTLSGNVVEGNLRNMGIKVDDGAETDYPLTGSGFWGTPTGSPADTYPWTWTISEDVFDAITPDGTHSITVTAYDYAGKTDYKTYTFTKDTTPPVITLNNVLSDGSSIIREADAAIRVSFNDEYSNIGSTAPTSGEFANRYSFTYRIGNASNTNPDTKTFYFPVTPTVGKSINADILIANTTANIWPPTGTAT

SEQ ID NO: 17247 - DNA, 378 bp, Unknown
  Obtained from environmental sample
  misc_feature (1)..(378): n is a, c, g, or t
ttggatgacgatgaaaaacagccggccgctcccggtaaaaaagccgatccgatgaagaccagcgccctcaagatcaaatctgacatcgtgcntgaagggaagaccgtcgatgagtacatcgcgctgctggaagaccgctggtgcagccttcgtgacgatgatacccgcaagaacctgatcgttggcgtcaaggcgctgatgaaagacaaacttcgccaagccatcaaattaaagaaaatgacattaataaggcggagcgatctgagggaaatagccgactacattatcagtcagaacggcaccctggttaaactgaaagaccaggaatccctccgcacgtatatggaactgtatatgctgaagctggtgctgagatag

SEQ ID NO: 17248 - protein, 125 aa, Unknown
  Obtained from environmental sample
  misc_feature (1)..(125): Xaa is any amino acid
MDDDEKQPAAPGKKADPMKTSALKIKSDIVXEGKTVDEYIALLEDRWCSLRDDDTRKNLIVGVKALMKDKLRQAIKLKKMTLIRRSDLREIADYIISQNGTLVKLKDQESLRTYMELYMLKLVLR

SEQ ID NO: 17249 - DNA, 390 bp, Unknown
  Obtained from environmental sample
  misc_feature (1)..(390): n is a, c, g, or t
gtggttaacgagcttatacagtacggcaaagtgcggcgcggctggctggacgctacaatggtgcagctttttcccgcgctggtgcgttatgcgaaattccccgtcagtacgggccttcttgtttcgcgtacccgccggggcgggcttgcggacagggccgggctgaggcagggcggcgatcccgtgcagtacggacgcagcgtaatctacatcgggggcgatattatcacttcggtggacggcatgaagatcgccaccctgtccgatctctattctgcccttgaacacagcaagcccggcgacaaggtaaaagtcggggtactgcgcggcgacaccaacattacgctggaaataccgctggcggatcgcgaggaggtaatgaataattga

SEQ ID NO: 17250 - protein, 129 aa, Unknown
  Obtained from environmental sample
  misc_feature (1)..(129): Xaa is any amino acid
MVNELIQYGKVRRGWLDATMVQLFPALVRYAKFPVSTGLLVSRTRRGGLADRAGLRQGGDPVQYGRSVIYIGGDIITSVDGMKIATLSDLYSALEHSKPGDKVKVGVLRGDTNITLEIPLADREEVMNN

SEQ ID NO: 17251 - DNA, 435 bp, Unknown
  Obtained from environmental sample
  misc_feature (1)..(435): n is a, c, g, or t
gtggtgaatgaggatgagatacacaaaatcgaggaaaagcccggcgtaaaatgttttatagaagacctttccgattccggctgttgcataacagtcggagggaaagcccagccgggtttgcgggtgaaggcccagtttcatctgaataattccattatatgtatagcaggtactgtccgcatggctgagtataaagaagaattgaacagatcgaagcttcatattgaggctgacccattgcccatagaaataaggaatcagatattgggagatgttttcggtatgcttccggaagaagaggaagagcttcctttcaggatactgggagaggaagctgaagctgaagaaagagaatcaggagcggagccggaagaagaagcggaagtactgtcggaggatgacgacgatgaatctgaggtttctgaagccgggtaa

SEQ ID NO: 17252 - protein, 144 aa, Unknown
  Obtained from environmental sample
  misc_feature (1)..(144): Xaa is any amino acid
MVNEDEIHKIEEKPGVKCFIEDLSDSGCCITVGGKAQPGLRVKAQFHLNNSIICIAGTVRMAEYKEELNRSKLHIEADPLPIEIRNQILGDVFGMLPEEEEELPFRILGEEAEAEERESGAEPEEEAEVLSEDDDDESEVSEAG

SEQ ID NO: 17253 - DNA, 357 bp, Unknown
  Obtained from environmental sample
  misc_feature (1)..(357): n is a, c, g, or t
ttgtgcagaccgcccatctgccagcttactgctcttactacccgctcggttttctcatgctcgtcttttactacctgccatcctgccttccactcggtataccgtttctcggcctcttcggcttctttctgccgttgttcggcttctttttgccgttcggcttcacgttcagcggcttctttctgccgttcggcttcacgttcagcggcttctttctgccgttcggcttcacgttcagcggcttctttctgccgttcggcttcacgttcagcggcatctttctgccgttgttcggcttctttctgccgttcggcttcacgttcagcggcatcttctgccgtgtcgctctcgccataa

SEQ ID NO: 17254 - protein, 118 aa, Unknown
  Obtained from environmental sample
  misc_feature (1)..(118): Xaa is any amino acid
MCRPPICQLTALTTRSVFSCSSFTTCHPAFHSVYRFSASSASFCRCSASFCRSASRSAASFCRSASRSAASFCRSASRSAASFCRSASRSAASFCRCSASFCRSASRSAASSAVSLSP

SEQ ID NO: 17255 - DNA, 468 bp, Unknown
  Obtained from environmental sample
  misc_feature (1)..(468): n is a, c, g, or t
gtgggcagcgagggcgcgaggctgtacatggagtcacgttacggagcggactccgccgaatacaggaatatgctctccgaccaggcggacaacaaacgttatgtgtcattcatccaggaattaatcagggagcttaatgaactgtatgaaagcgaaagaagcgtcgaagaaaagctaagcgaaaaggaaaagattattaacgcggcaaaggaacgctttacggcggagtatgaaaaaattttttctggcgaaggctacaggagctttttacagatgcctgtaaacaacgcctaccttgaattgtaccgcctgtattacaccgaggattcctatattgccggcctgttcgcgggctccggaaagagcctgcccgattttatttccgcggcaaaatctattccccaaaaaggcaacggaagagaaatgctcgcccgcgcccttggaaaagaaattagaaatgatgaataa

SEQ ID NO: 17256 - protein, 155 aa, Unknown
  Obtained from environmental sample
  misc_feature (1)..(155): Xaa is any amino acid
MGSEGARLYMESRYGADSAEYRNMLSDQADNKRYVSFIQELIRELNELYESERSVEEKLSEKEKIINAAKERFTAEYEKIFSGEGYRSFLQMPVNNAYLELYRLYYTEDSYIAGLFAGSGKSLPDFISAAKSIPQKGNGREMLARALGKEIRNDE

SEQ ID NO: 17257 - DNA, 714 bp, Unknown
  Obtained from environmental sample
  misc_feature (1)..(714): n is a, c, g, or t
atgcctttaacatacnaaccatttctgctaaaatgcagggtcaaaacaccgaatcccgatattgttgaagcactaggtaatttaagggaatgcaaggacttagatgttgtttgcataataaggggtggtggctcaaaaaccgatttggttttttttgacagctatgccctttgcaaggctgtggcaattttccccttgcccgtgctaaccggaataggtcacgaaattgatgaatctcttttggacaaggttgcccatacccatttgataaccccaaccgattgcgcaaactttttaatagcaagggcagatgccgctctgcaaaggctacaaaccatatcttatgagttcgcaaactttatgcagcttttcgcaagagagcgagataaactgagttacaaatctttgcagatttcaaatatatgcgaaaataggtttgctcacgaaaaagaaaggcttgctagaaacctgctcggattaaggcgtggggttccaaaaataatggattaccaaaagcagacactcaaattattggaagaaaaaacaaaagcggcaaaccccgaagttcaactaaagagaggttacaccataaccaaaaacaaaaacgggaatattctacgctcggcaaaagaagccgccaaaacacctgtattgaaaactgtgttttttgatggagaggtggagacggtaaacaagcatcctatactttactaa

SEQ ID NO: 17258 - protein, 237 aa, Unknown
  Obtained from environmental sample
  DOMAIN (34)...(208): Exonuclease VII, large subunit
  misc_feature (1)..(237): Xaa is any amino acid
MPLTYXPFLLKCRVKTPNPDIVEALGNLRECKDLDVVCIIRGGGSKTDLVFFDSYALCKAVAIFPLPVLTGIGHEIDESLLDKVAHTHLITPTDCANFLIARADAALQRLQTISYEFANFMQLFARERDKLSYKSLQISNICENRFAHEKERLARNLLGLRRGVPKIMDYQKQTLKLLEEKTKAANPEVQLKRGYTITKNKNGNILRSAKEAAKTPVLKTVFFDGEVETVNKHPILY

SEQ ID NO: 17259 - DNA, 630 bp, Unknown
  Obtained from environmental sample
  misc_feature (1)..(630): n is a, c, g, or t
ttggaaccggtactgtatcagtccaaccnggatgttatacaaatgagcattacgctaagtaatgttgctctaacaactaaaagggctcaagaagaagtaagcaaaatggttaggcaggcgctgaacatattaaaagaagcagaaattgaagataaaaatataaataccgcgtcgttgacatttaattctgaatatgaatacacaaataagcgtactcttgttgggcaaagagcccagcaaactataactttttctattgaagatattactaatgacgcagaaaaagcgtcatggataatagatcaacttattcaaatcaacggaatagagttaaatcaggtaaattatagcgtaaaaaataccactgaatattatgttaaatcgcgcgagcttgcgtatcaaaaagctgttgaaaaagctaatcaatatgcggaattgtctaaacttaaaattgtcaaagtgttaagcatatccgatcaaggaacacaacaagtttcaccgatgagcaatagatttagccggcaattagctgatgaaatggtttttaatacgtctagtgcttcaacagtattgccaataggtgaattagaaattacgactaatatattggtattgtttttattagaataa

SEQ ID NO: 17260 - protein, 209 aa, Unknown
  Obtained from environmental sample
  DOMAIN (1)...(209): Protein of unknown function (DUF541)
  misc_feature (1)..(209): Xaa is any amino acid
MEPVLYQSNXDVIQMSITLSNVALTTKRAQEEVSKMVRQALNILKEAEIEDKNINTASLTFNSEYEYTNKRTLVGQRAQQTITFSIEDITNDAEKASWIIDQLIQINGIELNQVNYSVKNTTEYYVKSRELAYQKAVEKANQYAELSKLKIVKVLSISDQGTQQVSPMSNRFSRQLADEMVFNTSSASTVLPIGELEITTNILVLFLLE

SEQ ID NO: 17261 - DNA, 480 bp, Unknown
  Obtained from environmental sample
  misc_feature (1)..(480): n is a, c, g, or t
atgatcagatcggccgagattaggccgcgcttcgatttttatgacgagcccaagccaatttatacccacatgagaaaccttccgccctcaaagatgaacttttcaaacatgaaccagtccattgccgccgaaggctgtattattaccaacgccaatattaccaattcaattgtcggtatccgtacaatcatagaaacaggctcaagcctgaacggcgtagtctgcatgggcgccgactactatgagacggaagcgcaaaaaatgaaaaacgccgaatcaagaattcccaacgtgggaatagggcgcggcgctattgtcaaaggcgcgattatagacaaaaacgtatgcgtgggcgaaggctgccgcataggcgtagacgacataaaacgcaccgacggcaactacggccattatcatgtagtggacggaattattgttattccgaaaaacactattttgtatcccggaacagttatttga

SEQ ID NO: 17262 - protein, 159 aa, Unknown
  Obtained from environmental sample
  misc_feature (1)..(159): Xaa is any amino acid
MIRSAEIRPRFDFYDEPKPIYTHMRNLPPSKMNFSNMNQSIAAEGCIITNANITNSIVGIRTIIETGSSLNGVVCMGADYYETEAQKMKNAESRIPNVGIGRGAIVKGAIIDKNVCVGEGCRIGVDDIKRTDGNYGHYHVVDGIIVIPKNTILYPGTVI

SEQ ID NO: 17263 - DNA, 525 bp, Unknown
  Obtained from environmental sample
  misc_feature (1)..(525): n is a, c, g, or t
gtgacgggcgtgggatactatccgccggtagacccgcatgaccgccgctccatcgcgagcaagaccccgtggcccggctacttgattggcggaccgcacagcggtaacctcaaggagaccaacggcgcccctatcgcccccccgggcgcgacatgcgcctccgccgcggtatgttatttcgactactacgaggactacgcgagaaacgaaatagccataaactggaacggatccatgatttacgctctgtcgggatacgtctccacactcggcaatccgtcaggcactttaccggagcgcggcgtgaaaaccacggctaccgcgccgaaattcaaaacaacgcgcttgatacaagtgagaaacggcaagacagtgtcgatcatcccgcccggagcaaagatatacggcctcaacggtaaactcgtaactcaaagaaaagcgggcgacgcgagcgttccggtgatcgggagaaacggggtattcatcatgaaagtggacgcgagcaaaacggacgcgtcacgttag

SEQ ID NO: 17264 - protein, 174 aa, Unknown
  Obtained from environmental sample
  misc_feature (1)..(174): Xaa is any amino acid
MTGVGYYPPVDPHDRRSIASKTPWPGYLIGGPHSGNLKETNGAPIAPPGATCASAAVCYFDYYEDYARNEIAINWNGSMIYALSGYVSTLGNPSGTLPERGVKTTATAPKFKTTRLIQVRNGKTVSIIPPGAKIYGLNGKLVTQRKAGDASVPVIGRNGVFIMKVDASKTDASR

SEQ ID NO: 17265 - DNA, 837 bp, Unknown
  Obtained from environmental sample
  misc_feature (1)..(837): n is a, c, g, or t
atgccggtggccggcaaaacgggaaccccccagaactggtcggacgcatgggcggtaggctacagcccctactataccacagcggtatggtttggttttgacaagccgggtaactctctgggcgtagagcttaccggttccactttggcgggcccggtctggggcgactttatgcgggagattcatcaaggacttgcccgccgggactttgtccggcctgccgccggaatcattgacgtaaccgtttgcgccaagtcagggcttcttaaaaccccatcttgtaacgaaggcgaagttactctgcctttcctgatgggaacacagccctcgcagtcctgcaatatacacggcggcgccacagggcttgccaccacagcgcttaatactatgcgcaaagatacgctgggaatggatgataatattctgatcggctccctgaaaatgcccagtttgtcatcggaccttttccccgatcttccgtccgcccgcagtcaaaacaaccggaacaacaacgccaacaaccgcagaaacagccagcctaaccgcaataccaactcaagaccaccggttcaagattcgctttcctggtattataataatcccctccttgatggggatattgatacgggtactccacccgcaaatagctcacccgagtccggaagtccgcaggaatattcaggatttattcgtgaaaacccgaacgcggcgtatattgaaaatacgggaagaaacaggcaaaacggcacatcangcgccaatgcgatgacacataacgctcangaagaagattcgggttacggttggagatccntcatacaccctctgttggattag

SEQ ID NO: 17266 - protein, 278 aa, Unknown
  Obtained from environmental sample
  misc_feature (1)..(278): Xaa is any amino acid
MPVAGKTGTPQNWSDAWAVGYSPYYTTAVWFGFDKPGNSLGVELTGSTLAGPVWGDFMREIHQGLARRDFVRPAAGIIDVTVCAKSGLLKTPSCNEGEVTLPFLMGTQPSQSCNIHGGATGLATTALNTMRKDTLGMDDNILIGSLKMPSLSSDLFPDLPSARSQNNRNNNANNRRNSQPNRNTNSRPPVQDSLSWYYNNPLLDGDIDTGTPPANSSPESGSPQEYSGFIRENPNAAYIENTGRNRQNGTSXANAMTHNAXEEDSGYGWRSXIHPLLD

SEQ ID NO: 17267 - DNA, 429 bp, Unknown
  Obtained from environmental sample
  misc_feature (1)..(429): n is a, c, g, or t
atgattgaaaagcagaattcaccggaagaagaaattgatgaaatagcggatcttttaaatatggataaaaaccatattaaagaaatcgttaatatttccaaagaaattctttcgctggataacaaatctaacagtcaggttcagccgttattggaactcatcgaagacaagcagtatcaatctcctgaaaaacacgcggaatatgtctgcatgaaagacgaccttaacgatatgcttgatacgctgaacaaagacgaagccgagattattcgctgtcattacgggcttggacggcaagaaatgtcattaaacgaaatcggcgcgtgttacaacctaagcaaagagcgtattcgccagatcgaagaaaaagccattgcaagacttagaaaccccaaacgcgccgagcaattaagggggtatgtggcataa

SEQ ID NO: 17268 - protein, 142 aa, Unknown
  Obtained from environmental sample
  DOMAIN (78)...(130): Sigma-70, region 4
  misc_feature (1)..(142): Xaa is any amino acid
MIEKQNSPEEEIDEIADLLNMDKNHIKEIVNISKEILSLDNKSNSQVQPLLELIEDKQYQSPEKHAEYVCMKDDLNDMLDTLNKDEAEIIRCHYGLGRQEMSLNEIGACYNLSKERIRQIEEKAIARLRNPKRAEQLRGYVA

SEQ ID NO: 17269 - DNA, 612 bp, Unknown
  Obtained from environmental sample
  misc_feature (1)..(612): n is a, c, g, or t
ttgtgtatcagtatttcagcaaacggctggagcttaaggaaggaatgtccatccatgcggaaaaaaactaaaaaccttctgcttttgctgttaattttcgcgccgctcgcaccgccgcttttttcgcatgaagcggaaattaaaattgaaggcgagagcaattacaaatcgatacggctgattcccggaatttacaatgaggcgcacaggaacctttccgatcttttgataaagaacggcgatgagaatattccttactttattaattcaagtaccgggaaaacagacgaaaccagagaaacatatttaatgaggcagatcaactcttttataaaagacgacaatttttactttgatttcgagctggattccgcccgtgaaagcgatataatcgcgacttccatggagttatccacaagtaactccggttttgccaaaccggtggacgtattaggcagctatgataatattcattgggaattcgtgcagagcgatatgctttatgtcgttgacagtaaatcaaagcttgagattaattttatccgtccgcagaaatacacgcattacaggttaaggttagcgaacaatcttgaacagatttcttttaaatag

SEQ ID NO: 17270 - protein, 203 aa, Unknown
  Obtained from environmental sample
  misc_feature (1)..(203): Xaa is any amino acid
MCISISANGWSLRKECPSMRKKTKNLLLLLLIFAPLAPPLFSHEAEIKIEGESNYKSIRLIPGIYNEAHRNLSDLLIKNGDENIPYFINSSTGKTDETRETYLMRQINSFIKDDNFYFDFELDSARESDIIATSMELSTSNSGFAKPVDVLGSYDNIHWEFVQSDMLYVVDSKSKLEINFIRPQKYTHYRLRLANNLEQISFK

SEQ ID NO: 17271 - DNA, 918 bp, Unknown
  Obtained from environmental sample
  misc_feature (1)..(918): n is a, c, g, or t
ttgataagacccgaacagcactgtcgtatgggaaatgcgcaacccggttcgaaccacatataccggaataccacccgttatatagaatggttcgacggaagaactgtccaaatacagcattcggttgatataacagaagtaattgccgcaaaagaacaggcggaacagagcagccgttacaaaagccaattcctgtcccgtatgagccacgaagttcgcacgcccatgaacgcgattctgggcatcacggaaattcaacttcaggacgaaaaaatgccgcccggcaaacgtgaagccctggaaaagatttttaattcaggttatttgctgttgggcatcatcaacgacattttggacttgtccaaaatagaggccggtaaactggaaatctctcccacaggctataacatactaaacctcatcaatgacacggttcctctcaccgtcatgcagtacgaacataagcctgttaaatttaatattgaaataaatgaaaatatacctttaacccttttaggcgatgaaatacgaataaagcagattctgaacaacctgctttctaacgcatttaaatatacggataacggcgaggtttcactgtccgttaacgccgaatattcatcgcggcaattggcgcagttaacgcttatattccgcgtcgccgattcaggacatggaatgacagaagagcaggtggaaaaactgtttgatgagtacacccgctttagcatggagtccaaccggaaagccgagggcgttggccttggtatgagcataacanaacaacttgtgcgtatgatgaacggggatattaaggtgaaaagcgaattanngcaagggtcggtttttaccgtatgtctgccccagggaattctcggcactgaagtgttagggaaagaatggctgaaacgccagtaa

SEQ ID NO: 17272 - protein, 305 aa, Unknown
  Obtained from environmental sample
  DOMAIN (60)...(126): His Kinase A (phosphoacceptor) domain
  misc_feature (1)..(305): Xaa is any amino acid
MIRPEQHCRMGNAQPGSNHIYRNTTRYIEWFDGRTVQIQHSVDITEVIAAKEQAEQSSRYKSQFLSRMSHEVRTPMNAILGITEIQLQDEKMPPGKREALEKIFNSGYLLLGIINDILDLSKIEAGKLEISPTGYNILNLINDTVPLTVMQYEHKPVKFNIEINENIPLTLLGDEIRIKQILNNLLSNAFKYTDNGEVSLSVNAEYSSRQLAQLTLIFRVADSGHGMTEEQVEKLFDEYTRFSMESNRKAEGVGLGMSITXQLVRMMNGDIKVKSELXQGSVFTVCLPQGILGTEVLGKEWLKRQ

SEQ ID NO: 17273 - DNA, 801 bp, Unknown
  Obtained from environmental sample
  misc_feature (1)..(801): n is a, c, g, or t
ttgtttaggattctgcccaaagcaatcgcgtcggacgtatttgcctatatggacagcgaccatcagcagattattgtcgaagcccttaccgatacggaaatcggcgaaattatgaataagcttttcgtggacgacgctgtagactttattgaagaaatgcccgccaacgtggtcaaccgcgtacttaaaaacgtacaacctgaaaaacgaaaactaatcaaccattttttacagtaccccgatgattccgccggcagtattatgactacggaatatgtcgatctccgcgaagacgccaccgtgcgcgaggcttttgacaccatccgcagtacgggcattaataaagagacaatttacaactgttatgtgatacgaagggaccgtcttcttgtaggcgcgatttccgcgaaaacgcttatgctcgccaaaccgcaggagcgcatcggcgatataatggacaccaatctttttttcgcgcatacaacggatgatcaagaggccattgcggaacaatttaaaaaatattctcttttggcgatgcccgtggttgacaaagagcagaggcttgtgggcattataacggtagacgacattgtagacgttatcgttgaggaaagcacggaagacatcgaaaaaatgaacgccctcgccccgtctgacgatccgtatcttaaaacgggcgttttccgtcttgcaagaaaccgtataatctggcttttggttttgatgctttccgcgactataaccggcattatcatttccgatttgaaaacggacttgcggctttgcccattcttgtag

SEQ ID NO: 17274 - protein, 266 aa, Unknown
  Obtained from environmental sample
  DOMAIN (2)...(84): MgtE intracellular domain
  misc_feature (1)..(266): Xaa is any amino acid
MFRILPKAIASDVFAYMDSDHQQIIVEALTDTEIGEIMNKLFVDDAVDFIEEMPANVVNRVLKNVQPEKRKLINHFLQYPDDSAGSIMTTEYVDLREDATVREAFDTIRSTGINKETIYNCYVIRRDRLLVGAISAKTLMLAKPQERIGDIMDTNLFFAHTTDDQEAIAEQFKKYSLLAMPVVDKEQRLVGIITVDDIVDVIVEESTEDIEKMNALAPSDDPYLKTGVFRLARNRIIWLLVLMLSATITGIIISDLKTDLRLCPFL

SEQ ID NO: 17275 - DNA, 804 bp, Unknown
  Obtained from environmental sample
  misc_feature (1)..(804): n is a, c, g, or t
ttgatggtcacgggtattccggtaagccggattgatgaagtaaaactccacaaggattacaatgtcagcccgcagctcggcacctactattacgtgattaataacaaggatcacaaacccctgaatgacatacgcgtccgcaaggcgctttcgatggccattgaccgccaggaacttgtcacaaaagtgacaaaagccggccagatcccggctacggcgctggttccccccatgcccggttatactccgaccacaggcaacggtttcaatttgaccgaggcaaagcgcctcctcgccgaggcgggcttcccgaacggccagggcttcccctctttcaccgttatttataacactaacgaaggccacaggatcatagcagaatacatccagcaggcctggaagactaacctgggaattaccgtcaatctgcagaacatggaatgggcaagcttccttgatttccgcagaacttccgggatgcaaattggccgcgccggctggatcgccgactacatggatccccagaacttccttgaactccttatctccaataccggcaataatgacggtcaatacagcaacgcgcaatacgatagtctgttacgccaggcggcgacaatgcccggcggagcgcagcggaacgcgataatgcgccaggctgaggatatcgccattactgaggaacaggccatgattcccatttactggtatgtatcccagcagatgatcgaccttaccaaatgggatggctggtatgcgaacccgttggatgcacacccttacgtaggtctgaaacgcaaataa

SEQ ID NO: 17276 - protein, 267 aa, Unknown
  Obtained from environmental sample
  DOMAIN (1)...(189): Bacterial extracellular solute-binding proteins, family 5 Middle
  misc_feature (1)..(267): Xaa is any amino acid
MMVTGIPVSRIDEVKLHKDYNVSPQLGTYYYVINNKDHKPLNDIRVRKALSMAIDRQELVTKVTKAGQIPATALVPPMPGYTPTTGNGFNLTEAKRLLAEAGFPNGQGFPSFTVIYNTNEGHRIIAEYIQQAWKTNLGITVNLQNMEWASFLDFRRTSGMQIGRAGWIADYMDPQNFLELLISNTGNNDGQYSNAQYDSLLRQAATMPGGAQRNAIMRQAEDIAITEEQAMIPIYWYVSQQMIDLTKWDGWYANPLDAHPYVGLKRK

SEQ ID NO: 17277 - DNA, 831 bp, Unknown
  Obtained from environmental sample
  misc_feature (1)..(831): n is a, c, g, or t
atgagagaggcttacctggcaaagctcatggccagggagaatcgcagcgggtacacagcccttgaaaaagaagaacttgagaacttgcgccgtgaggccgaaaccaatcccgtgaataaaaaggtctatatttttggtacggatgtcctgggccgggatcttttaacccgcgtaatatacggaggccgcatctcaataggcattgggttagtaggcactcttactgcgatgctctttgggactttttacggcgccttggcgggctttatcggcggtaaaacagataacattatgatgaggatagttgatgttatttacagccttccgtatttaatgcttgtaatagtcatgatggccttgtttggcggcaagagcatctttatccttttcatcgctatcgcgatgatttcgtggctggaccttgccagggtagtccggggccagataatgtcgttgaaaaattcggagtttatcgaggcggcaaggtccgccggcgcgggaacgggacgtattatctggaagcacctgcttcccaatattgtgggactgataatcgtctactcttccctgcaactgcctactttcattataaatgaggcttttctttccttcctgggcctgggcgtttccgctccgatgacttcctggggagttttgattgatgacggcacgaaggttatggaattgtacccctggctcctggtaataccggctgtaaccatgtcgttttttatcttttgcatgaatttccttggcgacggccttagggacgcttttgatccccaggccaagaacaggctgagttatggaggagaaacagatggcggatga

SEQ ID NO: 17278 - protein, 276 aa, Unknown
  Obtained from environmental sample
  DOMAIN (62)...(265): Binding-protein-dependent transport system inner membrane component
  misc_feature (1)..(276): Xaa is any amino acid
MREAYLAKLMARENRSGYTALEKEELENLRREAETNPVNKKVYIFGTDVLGRDLLTRVIYGGRISIGIGLVGTLTAMLFGTFYGALAGFIGGKTDNIMMRIVDVIYSLPYLMLVIVMMALFGGKSIFILFIAIAMISWLDLARVVRGQIMSLKNSEFIEAARSAGAGTGRIIWKHLLPNIVGLIIVYSSLQLPTFIINEAFLSFLGLGVSAPMTSWGVLIDDGTKVMELYPWLLVIPAVTMSFFIFCMNFLGDGLRDAFDPQAKNRLSYGGETDGG

SEQ ID NO: 17279 - DNA, 687 bp, Unknown
  Obtained from environmental sample
  misc_feature (1)..(687): n is a, c, g, or t
atgtatgtacgaggaagaaatatttggaaggggagccggcgagctgtaccgcataggaaatacaggcggccaatgaggcgcaaaaaacttcttggctttttaattcttgttgttcttttttgcgtaggttgtttgctcttccgttttcccgagcttgatgcctttagacacaggtcgtggggaacggttatcagcgatcggaacggggtcgtcctgcgcgttctgcctgccgataacggcgtcaagcgcgagtgggtaccgttaagcgaaattccccccggcgcggtaaggatttttatacgggctgaagacaggcgcttttattttcattctggggttgacgttttttcgcttgtagccggcttctataggaatctgaaagccggacgcaccgtatccggggcatccaccatcacgatgcaactggcgcggctggtacacccgcactcaggcggtatgcggggaaaaatcgttgaagcctgggacgccattcggcttgaagccaatctttcaaaaaaagagatccttgagctgtacctgaacagcattcccttcggcagcaacatagaggggctggccgcgataaccagagccagatttggcagctctgtcaaagagctggacgacaacagggccgcgctccttgcgtcggttcccaggcggccgctcctttacgaccccgcctaa

SEQ ID NO: 17280 - protein, 228 aa, Unknown
  Obtained from environmental sample
  DOMAIN (62)...(227): Transglycosylase
  misc_feature (1)..(228): Xaa is any amino acid
MYVRGRNIWKGSRRAVPHRKYRRPMRRKKLLGFLILVVLFCVGCLLFRFPELDAFRHRSWGTVISDRNGVVLRVLPADNGVKREWVPLSEIPPGAVRIFIRAEDRRFYFHSGVDVFSLVAGFYRNLKAGRTVSGASTITMQLARLVHPHSGGMRGKIVEAWDAIRLEANLSKKEILELYLNSIPFGSNIEGLAAITRARFGSSVKELDDNRAALLASVPRRPLLYDPA

SEQ ID NO: 17281 - DNA, 774 bp, Unknown
  Obtained from environmental sample
  misc_feature (1)..(774): n is a, c, g, or t
atgcctcctgacgcgttttcgcgtatggataaaaattttcaatatattaaggtaaaaagcgataaatcgaccgtgcgcatattagtccctgaaaaaatgataccgggtatggctccgtttcaattaccgcaaaaatccttaagcgaatatagggaagaaatagaaaaacttaatcttgatttacaagaaataaatactgaaataggacattttgcggatcgccgtcaggctctgcttaaagaaatggaacttgttgaatatgacattgaatttgaatcggcggtcgccggtttgaataaagtggaagatattcccgaagattttgggctttgctggtttacaggttatgtgccggccgaagatgttagcattgtaaaaaaggtagcgtccgaaaacggatgggcgttatccgttgatgaaccggctgaaactgatgaagtagtgccgacaaaattgaagaacaacaaatttgtacagcttattacccccattacgggcttccttgacattaaccccggataccgcgaggtcgatatatcgccgatttttataacctttttttgtatcttcttcgccatgctcttcggagacgcggcatacggtttgattatttcaactatggcgataatcggaattatgctcgcgttaaaaaacaaaaaggctgtctcgacaccgttaaaaatgcttttattgttgggggcgcttaacacgctatggggcgtgcttacatgttcatggttcgcaatggataccaagtatctccctgatttttaa

SEQ ID NO: 17282 - protein, 257 aa, Unknown
  Obtained from environmental sample
  misc_feature (1)..(257): Xaa is any amino acid
MPPDAFSRMDKNFQYIKVKSDKSTVRILVPEKMIPGMAPFQLPQKSLSEYREEIEKLNLDLQEINTEIGHFADRRQALLKEMELVEYDIEFESAVAGLNKVEDIPEDFGLCWFTGYVPAEDVSIVKKVASENGWALSVDEPAETDEVVPTKLKNNKFVQLITPITGFLDINPGYREVDISPIFITFFCIFFAMLFGDAAYGLIISTMAIIGIMLALKNKKAVSTPLKMLLLLGALNTLWGVLTCSWFAMDTKYLPDF

SEQ ID NO: 17283 - DNA, 627 bp, Unknown
  Obtained from environmental sample
  misc_feature (1)..(627): n is a, c, g, or t
atgggttatgaacactggagcgcgcgcgaaataaaagtccgtctgccggatggagccgttagcgggaatcttgaagtaagaacgcctcacggcaaatcgcgcagtttcttttttgatgtcagcgggaaaccaggatttaaaaacataagagataaacgcggctacacaataacatactcggttgatatcagagtaacggacgcttcaagacccaatatgctttatctgtggataccaaaaccggtaaattccccttcccaaagaaatgttacccttatctcgcgttctattgaaccgtttatggaaaattacaagggtgtcagcctttataaattggataatcttatcgctggaacaagtcaatctatcaatctttcataccgcgtagaagtatattccgtaggatcggtaataagaccgctttccataaaacaggaagcgacggaactttccgcggcgcataccaaaagctcaagtttaattccaagcgatgttcctcaaataaagacggcggcaaatttaattgtaaacagagaacaaaatccgtatatcaaggcaaaagccatatatgactggataataaacaatatgcagatttcagactcggagacttcaaaaagtctgtga

SEQ ID NO: 17284 - protein, 208 aa, Unknown
  Obtained from environmental sample
  misc_feature (1)..(208): Xaa is any amino acid
MGYEHWSAREIKVRLPDGAVSGNLEVRTPHGKSRSFFFDVSGKPGFKNIRDKRGYTITYSVDIRVTDASRPNMLYLWIPKPVNSPSQRNVTLISRSIEPFMENYKGVSLYKLDNLIAGTSQSINLSYRVEVYSVGSVIRPLSIKQEATELSAAHTKSSSLIPSDVPQIKTAANLIVNREQNPYIKAKAIYDWIINNMQISDSETSKSL

SEQ ID NO: 17285 - DNA, 759 bp, Unknown
  Obtained from environmental sample
  misc_feature (1)..(759): n is a, c, g, or t
atgagccagcttttcgatgagcccgacctctatgcttcttctcccctctggaaagccgcgtttttagatcgtgtccgccgcacggttctccaggagtttaaccatccttcggtggttatctggtctctgggcaacgaaagcggctacggccccaactttgcagccgccgcggctctggttcatgaaatggacagcagccgcccggtacattacgaagaagaccgccaggccgaatctgccgatgtgttcagcagtatgtatacccgccacgacaagctacgcgaactgggggaacagaatcttccaaagccccacattgtctgcgaatacgcccacgccatgggcaatggccccggaagccttgaagattactgggatatcttttgggccttccccaggctgcagggcggctttatatgggaatggcgcgatcacactatccgcatgaaaggttccggcttggcttgttacggcggcgatttcggcgatatgcccaacaacggggatttctgcgccgatggcctgacctcgggggacggaaccctttcgcccgccatggcccaggtaaagcacgttttgtcccctgttcgcgccgaagaactggacaaagggcgatcgcaggtttgtatatggaacaggaatgatttttccgccacggacatatacgcaatggtttgggaatactcatcaggcggaaaagttcttcanagcggacagacagacctgcccgccataaggcccggcgaaaagaatggatga

SEQ ID NO: 17286 - protein, 252 aa, Unknown
  Obtained from environmental sample
  DOMAIN (1)...(198): Glycosyl hydrolases family 2, TIM barrel domain
  misc_feature (1)..(252): Xaa is any amino acid
MSQLFDEPDLYASSPLWKAAFLDRVRRTVLQEFNHPSVVIWSLGNESGYGPNFAAAAALVHEMDSSRPVHYEEDRQAESADVFSSMYTRHDKLRELGEQNLPKPHIVCEYAHAMGNGPGSLEDYWDIFWAFPRLQGGFIWEWRDHTIRMKGSGLACYGGDFGDMPNNGDFCADGLTSGDGTLSPAMAQVKHVLSPVRAEELDKGRSQVCIWNRNDFSATDIYAMVWEYSSGGKVLXSGQTDLPAIRPGEKNG

SEQ ID NO: 17287 - DNA, 387 bp, Unknown
  Obtained from environmental sample
  misc_feature (1)..(387): n is a, c, g, or t
gtgcccttgctttgcctttccgccagaaacgggcattttgatatcctggaactactgcttcgttccggagctcaagtgaatatggtttccgaagacaggggctctaccgctattcttgacagcgcgattggaaggcacaaagacctggtagaagcccttataaaagcgggggcggatgtagatataccgagcaaggaaggccaaaccgcactgattgtcgtggtaggcgccggagatgatgcaattgttgaaatgttggttaatgccggagcagaccctgacattgaagactctcttggtgtcagcgcaaggaagtatgccgccctttttaggaagaattcaatgatagcgctttttaacgcctatgagtcaaaaaaggcatcttag

SEQ ID NO: 17288 - protein, 128 aa, Unknown
  Obtained from environmental sample
  DOMAIN (66)...(98): Ankyrin repeat
  misc_feature (1)..(128): Xaa is any amino acid
MPLLCLSARNGHFDILELLLRSGAQVNMVSEDRGSTAILDSAIGRHKDLVEALIKAGADVDIPSKEGQTALIVVVGAGDDAIVEMLVNAGADPDIEDSLGVSARKYAALFRKNSMIALFNAYESKKAS

SEQ ID NO: 17289 - DNA, 504 bp, Unknown
  Obtained from environmental sample
  misc_feature (1)..(504): n is a, c, g, or t
atgcaagacatggcgcaggaaaacggcatggcgcgtatgaccttcaaaatccccacaaggggtcttttgggctacaaggcggagttcatgaccgacaccaaaggcatggggataatgaactacgtattcttggagtacgccccctacgccggcgacatccgcacgagggcgaacggcgtgctgatagccaaagagccgtgcacgtcggtggcctacgcgctgttcaatttgcaggatcgcggaaagatgttcgttggccccggcgttaagatatacagggggatgatagtcggcgagcactgccggtcgaacgatttggttgtcaaccccggcaaagagaaaaaactgtcgaacatgagggcggcgggttcggacgaaaacgtgatccttacgccgccggtagacatgagcttggaagattgcattgcctatatcaatgaagacgaattggtagaagtcacgccgcagtctataagattgcggaagagggacaataagtattaa

SEQ ID NO: 17290 - protein, 167 aa, Unknown
  Obtained from environmental sample
  DOMAIN (1)...(57): Elongation factor G C-terminus
  misc_feature (1)..(167): Xaa is any amino acid
MQDMAQENGMARMTFKIPTRGLLGYKAEFMTDTKGMGIMNYVFLEYAPYAGDIRTRANGVLIAKEPCTSVAYALFNLQDRGKMFVGPGVKIYRGMIVGEHCRSNDLVVNPGKEKKLSNMRAAGSDENVILTPPVDMSLEDCIAYINEDELVEVTPQSIRLRKRDNKY

SEQ ID NO: 17291 - DNA, 504 bp, Unknown
  Obtained from environmental sample
  misc_feature (1)..(504): n is a, c, g, or t
ttggaagaactctatcaagtcgcccttgtgtttacccagggacttgacagcgcgctcaagacggcggacaattcttccaaaatgcttctgggtttatccctgaacgatcttcttttttcatggtcgggaaatgaatttgcggtttttgggctggaagggcggcctcatcctatttacatgattcaaattgccgatgagaaaaaacggcagagtatatttgatcgcgcgtttaaatccgccgcgcttaacgaaaatgtcagattaaatcttgacggagtccgtattccccgcattgaggttcccgaatttcttcaatctcttttaagacgctgggatatttttataccttccccttattacactatttataaagattattttcttgtcagcgaatcggcggaggctctccttgccgcgttacgcgccatgcanagaaacgaggtgctgccgaaaccgccgtttggcgcagcattgccggcggaaaaatgttgcaagctcttttag

SEQ ID NO: 17292 - protein, 167 aa, Unknown
  Obtained from environmental sample
  misc_feature (1)..(167): Xaa is any amino acid
MEELYQVALVFTQGLDSALKTADNSSKMLLGLSLNDLLFSWSGNEFAVFGLEGRPHPIYMIQIADEKKRQSIFDRAFKSAALNENVRLNLDGVRIPRIEVPEFLQSLLRRWDIFIPSPYYTIYKDYFLVSESAEALLAALRAMXRNEVLPKPPFGAALPAEKCCKLF

SEQ ID NO: 17293 - DNA, 414 bp, Unknown
  Obtained from environmental sample
  misc_feature (1)..(414): n is a, c, g, or t
atgatgagaaatcctgtagaaacgatcggtaacttaattgataaacagggtgttagttttataagttctgtggatgaaaacggtttccccaatactaaagcaatgttagctccttgtaaaagagagggtataaaaatattctattggcatacaaacagtccatcaatgagaataggacattatagaaaaaacccaaaggcttgtatctatttctatgacaaaagattttttcgaggtgtaatgttaataggtaaaatggaggtattggatgacaaaaaaaataaaaaggaattatggaaagatgaatatgaaaaatattatacaggaggaaaagatggtggagactttattgtaaataaatttacggcagaaaccggaagatattacagtaattttagttcggaggatttttaa

SEQ ID NO: 17294 - protein, 137 aa, Unknown
  Obtained from environmental sample
  DOMAIN (9)...(93): Pyridoxamine 5'-phosphate oxidase
  misc_feature (1)..(137): Xaa is any amino acid
MMRNPVETIGNLIDKQGVSFISSVDENGFPNTKAMLAPCKREGIKIFYWHTNSPSMRIGHYRKNPKACIYFYDKRFFRGVMLIGKMEVLDDKKNKKELWKDEYEKYYTGGKDGGDFIVNKFTAETGRYYSNFSSEDF

SEQ ID NO: 17295 - DNA, 612 bp, Unknown
  Obtained from environmental sample
  misc_feature (1)..(612): n is a, c, g, or t
gtggccattgcttgtcttttcctcgccactgtcgccatttctctggaacgcgcgttctatcttatttaccacaatctgcgcgttgatgacattgcggcaaaagtttcggattatgtcaaatcttcgaattattccgccgcctgcgagtatctttccggcattacaggcaggcggatgggggcgaggattcttctcgccttgtttacgcgcgtaaaacagggaaaggatttctcggaacacagcgccgagcgcattgtagagacagaagccatgaactgcatcaattcacttgagaacggttttaattttcttaccgcccttggttccgtctccccattaacgggcttcctgggaacagtttccggaatgatcggcgcgttccgctcaatagccgaagctacggaagtaaacgcccagattgtcgcaaacggcatttacgaagcccttattaccaccgtattcggtcttgtaatagctattatcgcgatggtatttcattccatttttacccaccttgttgacaagttttcaagcaacatggaaagcatctgctccgatttaataatccggctggcggaacagcaggagcaaaaaaacaaacaccgggaataa

SEQ ID NO: 17296 - protein, 203 aa, Unknown
  Obtained from environmental sample
  DOMAIN (51)...(185): MotA/TolQ/ExbB proton channel family
  misc_feature (1)..(203): Xaa is any amino acid
MAIACLFLATVAISLERAFYLIYHNLRVDDIAAKVSDYVKSSNYSAACEYLSGITGRRMGARILLALFTRVKQGKDFSEHSAERIVETEAMNCINSLENGFNFLTALGSVSPLTGFLGTVSGMIGAFRSIAEATEVNAQIVANGIYEALITTVFGLVIAIIAMVFHSIFTHLVDKFSSNMESICSDLIIRLAEQQEQKNKHRE

SEQ ID NO: 17297 - DNA, 711 bp, Unknown
  Obtained from environmental sample
  misc_feature (1)..(711): n is a, c, g, or t
atgcggatacaggcacgagaattatttaagcaggccaaaggccctgcacagtcaaggttttcttcgctcattggtcaatatgacgattatatcaacaagctgatgagggataaccggacatggcagcttgtcgggctttgcgcggttgtaatgctggtattgacggttatcggctggttttacatttcaagccggaaagcggaaacggtgatggtcatagaggtaaatgagttgggaagggcgaagtacgctggaaaagtttcgggcggaacctttctggacggttatggcataaaagactacatgatagaaagcgtcatttcggattttattgaatatacccgcggtatttataccgacggcgacgtgatgaacaataattaccgcagggccgcaaaccaccttagcaatgaattaaaagaaaaactgcgtaatgaacttatagaagaagaccctttttcacagattggcaggaccaaaaggacagtggttattgaaagcgccataaggatgacaaaggccacatggcaatacgattggtatgacgttgtaaccgatatatcggggagggaattgcgccgcgcgaggatgaggggaatgtttactgtcgcgacgcaggaaccgcagagcgaaacagaacgcgtaaataacccgttgggtatatttatcgttgattacaatattatccaggtgcatgaggtgctgagatga

SEQ ID NO: 17298 - protein, 236 aa, Unknown
  Obtained from environmental sample
  DOMAIN (13)...(232): Conjugal transfer protein
  misc_feature (1)..(236): Xaa is any amino acid
MRIQARELFKQAKGPAQSRFSSLIGQYDDYINKLMRDNRTWQLVGLCAVVMLVLTVIGWFYISSRKAETVMVIEVNELGRAKYAGKVSGGTFLDGYGIKDYMIESVISDFIEYTRGIYTDGDVMNNNYRRAANHLSNELKEKLRNELIEEDPFSQIGRTKRTVVIESAIRMTKATWQYDWYDVVTDISGRELRRARMRGMFTVATQEPQSETERVNNPLGIFIVDYNIIQVHEVLR

SEQ ID NO: 17299 - DNA, 423 bp, Unknown
  Obtained from environmental sample
  misc_feature (1)..(423): n is a, c, g, or t
gtgcgcgggctgaggggcgtaaaggccgccgagattgatttcggagcgccgattccgaacggagccggaacaaaaatccgcatagccgtcgcccatcagatgggaaacatcgccgcggtgctggatcaaatccgtgaagcaaggaccgcgggtaaagagccgccgtatcactttatagaggttatggcctgcaggggcggatgcgtagccggaggcggccagccttacggcgctattgacgaagtccgcagcaagcgcgcgaagggtctttaccttgatgacgaaaaatcccagtaccgttgttcgcatcagaaccccttcataaaccaggtgtacaaggaatttcttgatgagcctaacggccataaggcgcatcaactcctgcacaccaaatatacagaacggaagctgtatatacaataa

SEQ ID NO: 17300 - protein, 140 aa, Unknown
  Obtained from environmental sample
  DOMAIN (77)...(136): Iron hydrogenase small subunit
  misc_feature (1)..(140): Xaa is any amino acid
MRGLRGVKAAEIDFGAPIPNGAGTKIRIAVAHQMGNIAAVLDQIREARTAGKEPPYHFIEVMACRGGCVAGGGQPYGAIDEVRSKRAKGLYLDDEKSQYRCSHQNPFINQVYKEFLDEPNGHKAHQLLHTKYTERKLYIQ

SEQ ID NO: 17301 - DNA, 867 bp, Unknown
  Obtained from environmental sample
  misc_feature (1)..(867): n is a, c, g, or t
atgcttattgatggaacgagttttgatggcagtgatactctattatatccagacatatactttagccttgatctttcggggagtacactaacaactatttcgaataatgcttttaccaattgtaccaaccttaccgaggtaacaatgccgtacggaattaacagcattggggatgaggcttttggcgcttgtaccaaccttaccagcataacaatacccgacagcgttaccagcattgggtatgcggcttttggcacttgtaccaaccttaccagcataacaatacctgacggcgttaccagcattggggatgaggcttttggctcttgtacaaaccttaccagcgtaacaatacctgacggcgttaccagcattggagataatgctttttcttattgtaacagccttaccagcgtaaccataccgaagagcgttaccagtattgggaagtcaccttttcgggattgtaccaatcttactacaataaatgttgcttctgataatccctcatataccgctgataatggcgtattgtatgacaaagccaaaacaacattgatccaatatccgaaaggaaaaacagacgcttcttttgctataccggacggcgttaccgacattgggtatgaggctttttactgttgttccagccttaccagcgtaaccataccgaacagtgttaacaacattggagattgggcttttattcgcaccggtcttaccagcataactatacctggcaacgttaccagcattggaatatatacttttcacggttgttccagccttaccagcgtaactataatggaaggcgttaccaacattgggagtaccgcttttggttattgtaccaacctaccagtgtaa

SEQ ID NO: 17302 - protein, 288 aa, Unknown
  Obtained from environmental sample
  misc_feature (1)..(288): Xaa is any amino acid
MLIDGTSFDGSDTLLYPDIYFSLDLSGSTLTTISNNAFTNCTNLTEVTMPYGINSIGDEAFGACTNLTSITIPDSVTSIGYAAFGTCTNLTSITIPDGVTSIGDEAFGSCTNLTSVTIPDGVTSIGDNAFSYCNSLTSVTIPKSVTSIGKSPFRDCTNLTTINVASDNPSYTADNGVLYDKAKTTLIQYPKGKTDASFAIPDGVTDIGYEAFYCCSSLTSVTIPNSVNNIGDWAFIRTGLTSITIPGNVTSIGIYTFHGCSSLTSVTIMEGVTNIGSTAFGYCTNLPV

SEQ ID NO: 17303 - DNA, 741 bp, Unknown
  Obtained from environmental sample
  misc_feature (1)..(741): n is a, c, g, or t
gtgctngggggagggaggaacatcagacccggcgaaataaccttggctcactttgggaccctctttctcgatgaagcccctgaattccgcctgccagtactccaatcgctaagggaaccactggaagataaagtcatcaccatagtccgcgccgaaagctgccacaggctgcctgccgattttcagctaatccttgcggcaaatagctgtccctgcgggcggctgggcgcggtcggagccagcggcgatgaaaccgatactgcctgctccgccgactctggctgcctctgctcgcccgacgaaatccgccggtactggaaaaaactgggaggcgctcttcttgaccggattgaccttagggttcccgtccgcgcccccggggtactaaagccagccggagaaggcggcgaaaaaagcgatgaaataaggcggagggtaattgaagccgtagaaacgcagagggtacgctttaagggctcaaacatacggcgcaattcaaggatgctcccgcagcaaattgacaagttttgtcagatgactaaaagagccgaagaagcgtttattattgcctcgtccaaactgggcctgtccggccgagcctgccatggcatactaaaaatctcccgtaccatagccgaccttgaaaaaacagacgccattgatactgcccacattctggaagccgttcagcaccgccgcttcggcgacgacccatatgatattctatctattgaatgttaa

SEQ ID NO: 17304 - protein, 246 aa, Unknown
  Obtained from environmental sample
  DOMAIN (1)...(131): Magnesium chelatase, subunit ChlI
  misc_feature (1)..(246): Xaa is any amino acid
MLGGGRNIRPGEITLAHFGTLFLDEAPEFRLPVLQSLREPLEDKVITIVRAESCHRLPADFQLILAANSCPCGRLGAVGASGDETDTACSADSGCLCSPDEIRRYWKKLGGALLDRIDLRVPVRAPGVLKPAGEGGEKSDEIRRRVIEAVETQRVRFKGSNIRRNSRMLPQQIDKFCQMTKRAEEAFIIASSKLGLSGRACHGILKISRTIADLEKTDAIDTAHILEAVQHRRFGDDPYDILSIEC

SEQ ID NO: 17305 - DNA, 816 bp, Unknown
  Obtained from environmental sample
  misc_feature (1)..(816): n is a, c, g, or t
atgccttttgtggcggtggatcacgaaggcggcgtggtgcatcgttttggcccaggcgtggaaaggctgccctcggcgttttctttttgggagctagcccaaaaggagggtagggaagcatcccttgcgagggcggagaccctttaccggcgttcagctcaggaaatccgggagcttgggatcacgatggttttgggacctgtggcggaaaccctcgacaacgagaaccggagatttttggagacccgctcttatggaagcgaccatgattttaccgcggcagcggcctcggcgtttgttagaagcatgaacgcttccggaatagccagcgcggtcaagcattttccgggcaacggcgcagccgatcctcacgataaaaacgcctccattggggccggtaaaacagctctggacgaaatggtcaggccctttgccgctttaatccgcggctttagcccccctgtaataatgctttcacatgttatggttcctgctctggacagccagaaaaacgcaagcctttcaagcaaagtgatcaaagactggctgcgcggggaattgggctttaagggaatagtactggccgatgatttttcaatgggcgctgttgcggccagaggtcttagcccaggggccgccacggtggaagcgctcaatgccggagtggatatgatcattgtctggccgaaagacgtgataaccgttcactctttaattctgaacgccctaagagagcggcgactttcacgggaaaggcttgtggaagccgcgagccgcatcattgcagaanagctccgttatgaaatttccaaatga

SEQ ID NO: 17306 - protein, 271 aa, Unknown
  Obtained from environmental sample
  DOMAIN (3)...(227): Glycosyl hydrolase family 3 N terminal domain
  misc_feature (1)..(271): Xaa is any amino acid
MPFVAVDHEGGVVHRFGPGVERLPSAFSFWELAQKEGREASLARAETLYRRSAQEIRELGITMVLGPVAETLDNENRRFLETRSYGSDHDFTAAAASAFVRSMNASGIASAVKHFPGNGAADPHDKNASIGAGKTALDEMVRPFAALIRGFSPPVIMLSHVMVPALDSQKNASLSSKVIKDWLRGELGFKGIVLADDFSMGAVAARGLSPGAATVEALNAGVDMIIVWPKDVITVHSLILNALRERRLSRERLVEAASRIIAEXLRYEISK

SEQ ID NO: 17307 - DNA, 606 bp, Unknown
  Obtained from environmental sample
  misc_feature (1)..(606): n is a, c, g, or t
ttgcggcttttgccgtcgagggcggcgtttaacgcgccgttggccacgctctgcctgttcttagcctcgccgaggctgtttatcagctctatctggttgcgccctatctcgtccgcctcgcgccgcttcgcgctcagatgggcgtcgaaagcgctcagctcctcgcccgcgccagccgccctctcggagctctcgcgcaacagcgtttcgcgctccaccacgctcttctcaatctgcgtcttaagctgcgaggcctcctccgactccctgtcgagctgcgccgcctcgccgtcgagccgcgcaacggcggccttcaggttgctcacccgctccgccgccaccgagaggtcgcggtctatcgcggcgatgccctcccccgcttccgctacgctgcgcgaggcggcgccgagttcgttctccttctcaagcgcgtccagattcattttctccacacgagactccgccgaagcgatcgacgcccgtagcgcctcacggcgcgactgcgcctccgcaatcgacgacccgcgctccaatatagcccccgtaagcaccgcgtaccgcctgctctcaaaagcggtctctatggctttcagcgcgtcgtggtag

SEQ ID NO: 17308 - protein, 201 aa, Unknown
  Obtained from environmental sample
  SIGNAL (1)...(22)
  misc_feature (1)..(201): Xaa is any amino acid
MRLLPSRAAFNAPLATLCLFLASPRLFISSIWLRPISSASRRFALRWASKALSSSPAPAALSELSRNSVSRSTTLFSICVLSCEASSDSLSSCAASPSSRATAAFRLLTRSAATERSRSIAAMPSPASATLREAAPSSFSFSSASRFIFSTRDSAEAIDARSASRRDCASAIDDPRSNIAPVSTAYRLLSKAVSMAFSASW

SEQ ID NO: 17309 - DNA, 543 bp, Unknown
  Obtained from environmental sample
  misc_feature (1)..(543): n is a, c, g, or t
gtgggcaactacgacttgtccgcaagaatcgccaatgaagccgcctggctggccaaacagtctgatgtacatgtcgccattaccgcggcaaaacgctatcttgaccaggctgccgcttccggtgtttccgcgcggtttccccaggaatacaaagaagcggaaaattggtataagcaaagctcaaaagcaagagacgacgaagaatgggacatcgccattgaagccgccggcatgacggcgcaattgcttggagggcttgtaagctcaagttccggaaccctgtccggcgctttgcccgcgacttacaccgtgcagtcatggtctgtctcaaaggactgcctttggaatattgccggcctcgccggggtctatgggaatcctcacctatggacggtgctttacaacgccaacaaattaaaactgcctgatccgaataacccggacaaccttgagccgggcattgttttggacatccccagcataaagggcgaagtgcggcagggcgcgtgggagagcggcaaggcctacgagcctatccggtaa

SEQ ID NO: 17310 - protein, 180 aa, Unknown
  Obtained from environmental sample
  misc_feature (1)..(180): Xaa is any amino acid
MGNYDLSARIANEAAWLAKQSDVHVAITAAKRYLDQAAASGVSARFPQEYKEAENWYKQSSKARDDEEWDIAIEAAGMTAQLLGGLVSSSSGTLSGALPATYTVQSWSVSKDCLWNIAGLAGVYGNPHLWTVLYNANKLKLPDPNNPDNLEPGIVLDIPSIKGEVRQGAWESGKAYEPIR

SEQ ID NO: 17311 - DNA, 633 bp, Unknown
  Obtained from environmental sample
  misc_feature (1)..(633): n is a, c, g, or t
atgaaagcggtaacaacgtcaaaaatcgaaaattttactttcaactttctgaacacctgttttttgctcctcctttcatttataaccctgtaccctttctggactaccatagctatatcattcaatgacgcgatggacacgatgcggggcggcattacttttttcccgagaagattttctctttttaattatcaggttcttttccagacaggggctattccccacgctttcatgatttccgtagcaagaacttcgattaatcttgtaaccagcgtgttttttacggcgatggtcgcttatgccctttcccggcgcgaatttgtgctgttaaaaccccttacctttattttgatactttccatgtatataaacgcgggccttattcccacatttttattatacctgcgtcttggtatgtataattcgttctttgtatatatagttcccgggattgtaaacgcttttaattttgtcgtaatgagaacgtatatgcgaaccattcctgaaagcattattgagtccgcccgtatggacggttacggggatttttatatatttgtccgcattattttacccttaagccttcccgtccttgccacaatagggcttttgtctcctctcgtgccgatctga

SEQ ID NO: 17312 - protein, 210 aa, Unknown
  Obtained from environmental sample
  misc_feature (1)..(210): Xaa is any amino acid
MKAVTTSKIENFTFNFLNTCFLLLLSFITLYPFWTTIAISFNDAMDTMRGGITFFPRRFSLFNYQVLFQTGAIPHAFMISVARTSINLVTSVFFTAMVAYALSRREFVLLKPLTFILILSMYINAGLIPTFLLYLRLGMYNSFFVYIVPGIVNAFNFVVMRTYMRTIPESIIESARMDGYGDFYIFVRIILPLSLPVLATIGLLSPLVPI

SEQ ID NO: 17313 - DNA, 897 bp, Unknown
  Obtained from environmental sample
  misc_feature (1)..(897): n is a, c, g, or t
gtggccgctgtaccagccgcaatgcagacaggcacagggttttcatcttttgcggaaatttttaataaccgtttttttgatgtcggaataacggaggaacacgctgttacttttgctgcaggccttgccgcgaaggggttaaagcctgtagtcgcgatttactcaactttcacgcaacgcgctgtcgatcaggtgatccacgacgcagcgcttcaaaaacttccggttgttttcgcacttgacagatcaggttttgtcgccgcggacggtgaaacccatcaggggttgtttgacatcgctcttttcaggtgtgcgccgaatacggcaatcctctgtcccgcaagcgaaatagaacttcggcttatgcttgactgggcgctggaacaaaaatcaagccccgccataatacgttatcctaaagcatattgcccgcaggaaaatgccgctttttcaacgcccattgaaacaggacggggtgttttgttatcaaaaagcggcgggaatatctgccttttttttacaggcagcctttacagggaagttcaggaagcagcgtcaattctgaaaaaacagggacttgacactgatctttataaccttaggtttgtaaaaccggttgacgaaaattattttgtcagtttgattaatgaatataaacttgccgtcttcattgaggaaggcattaaagaaggcggcttcggtgaatacgcatccgctttggcgcggcagtatgattgtaaagcaaggacaatagcgctttgcgcgaagagcgacttcattgaaaacgatcaagccttgggaacaagggaagagcttttagctgttaacggtctgacggaaagagcatcgcggaacagattccctcgtgcnaatctgatcgtgggnnnnnnaaattga

SEQ ID NO: 17314 - protein, 298 aa, Unknown
  Obtained from environmental sample
  DOMAIN (157)...(272): Transketolase, C-terminal domain
  misc_feature (1)..(298): Xaa is any amino acid
MAAVPAAMQTGTGFSSFAEIFNNRFFDVGITEEHAVTFAAGLAAKGLKPVVAIYSTFTQRAVDQVIHDAALQKLPVVFALDRSGFVAADGETHQGLFDIALFRCAPNTAILCPASEIELRLMLDWALEQKSSPAIIRYPKAYCPQENAAFSTPIETGRGVLLSKSGGNICLFFTGSLYREVQEAASILKKQGLDTDLYNLRFVKPVDENYFVSLINEYKLAVFIEEGIKEGGFGEYASALARQYDCKARTIALCAKSDFIENDQALGTREELLAVNGLTERASRNRFPRANLIVGXXN

SEQ ID NO: 17315 - DNA, 522 bp, Unknown
  Obtained from environmental sample
  misc_feature (1)..(522): n is a, c, g, or t
ttggaaccatcatgcatagataacgaacaaaaattcgactcccgacttccgccctcccagtccctagtccctttgttaagcatttccaatggaagtatcgtggcggttgtcggctgcggcggcaagacttctcttattgagcttatggctgacaggctgcgtgataagaaggtgctggtttcaaccactacgaaaatatttcccccaaaaatgaaagatatcatgttatgcgaaactctgcggcaatgcgaagagcatgagccgcagacaggcatccagtgcatgggagtactgaacagcgcgagcgggaaactggaagcgttgccgcaggagtccctcgcggaattgcagcccctctatgatattgtcctgctggaagccgacggttcgcggggactgccatgcaagggctggctggcaaacgagcctgtggttcccgattactgcacgcacacgatagggctgatcactatggctgcgttgggcaacaagctggagaaacacagtgcaccgtttgcctga

SEQ ID NO: 17316 - protein, 173 aa, Unknown
  Obtained from environmental sample
  misc_feature (1)..(173): Xaa is any amino acid
MEPSCIDNEQKFDSRLPPSQSLVPLLSISNGSIVAVVGCGGKTSLIELMADRLRDKKVLVSTTTKIFPPKMKDIMLCETLRQCEEHEPQTGIQCMGVLNSASGKLEALPQESLAELQPLYDIVLLEADGSRGLPCKGWLANEPVVPDYCTHTIGLITMAALGNKLEKHSAPFA

SEQ ID NO: 17317 - DNA, 642 bp, Unknown
  Obtained from environmental sample
  misc_feature (1)..(642): n is a, c, g, or t
atgatacaaacatatccgaaagaacacctgctgtttgccgaaggcgaaaccgggaataccatgtatatcattcaggacggttcggtaaaaataacaaagattgttgacaataaagaaattatccttgcggttctcggcaaaggcgatattttcggcgaaatggcgttgttggaagacaaaccccgcgccgccaccgccgaaatttacgaagactgcacattattggcggttaaccgcgataacttctcaaacctcataaaggagcaacccgatatggtagtccgtatggcaaccttaatgtctgaacgcatttggctgctctaccgtcagcttgataacacattcataaaagatccgttagggcgcgtttatgacgctctgcttatccagcttgaaaaaaaccgcgttgacataaacagcgacgaaccgtatcagtgtaacttcggtattaaagaattaattggcatggcgggtatgcaagaatccgagaacaaacagcttgaccgtaaaatcgccggtgacggaaaactgacctttaaagacgataaaatccagatagtcaaaatctcggacatactcaaagaatccacattctaccgcanagcgcanaaaatagccgaaaacagaaaagggaagctttaa

SEQ ID NO: 17318 - protein, 213 aa, Unknown
  Obtained from environmental sample
  DOMAIN (2)...(91): Cyclic nucleotide-binding domain
  misc_feature (1)..(213): Xaa is any amino acid
MIQTYPKEHLLFAEGETGNTMYIIQDGSVKITKIVDNKEIILAVLGKGDIFGEMALLEDKPRAATAEIYEDCTLLAVNRDNFSNLIKEQPDMVVRMATLMSERIWLLYRQLDNTFIKDPLGRVYDALLIQLEKNRVDINSDEPYQCNFGIKELIGMAGMQESENKQLDRKIAGDGKLTFKDDKIQIVKISDILKESTFYRXAXKIAENRKGKL

SEQ ID NO: 17319 - DNA, 747 bp, Unknown
  Obtained from environmental sample
  misc_feature (1)..(747): n is a, c, g, or t
atgcccgatgttctagccgaatttctagcccaagccgaaagcaagggattgcagctttaccctgctcaggaagaagcggttttggagcttttggagggcaaaaacgttattcttgccaccccaacaggttctggaaagtctttggtagccagttttttgcaccgccttatgctttccaaaaatatgcgctcggtttatacctgtccaataaaagccttggtaaatgaaaaatggatggcgctttgcaaggagttcggagcgcaaaacgttgggctttccaccggagatgcaaccgttaatcacaatgctcccattctgtgttgcacggcggagattttggagcaaatcgcgctaagagaaggggaaaattcaaatataggtgcggtggcaatggatgaattccattattacagcgacaaagaaaggggagtggcgtggcaaattcccttgctcacaatgaagcacacccaattccttttaatatctgcaacccttggcgatacctctttttttgaaaccgaaatgacaaaattgaacggtttgcaaagcgtgtgcataagaaatgcggagcgacccgttcccttggaattcacgtattcagaaagtccgctagcaaacgaaattcaaaaattgcttaacgaaggcaagggtccagtttatgtggtgcatttcacgcagagcgaggcggcagaaaacgcgcaggctttcacgagcttggatatagcggggcttgcttnaaaaagataa

SEQ ID NO: 17320 - protein, 248 aa, Unknown
  Obtained from environmental sample
  DOMAIN (16)...(167): Type III restriction enzyme, res subunit
  misc_feature (1)..(248): Xaa is any amino acid
MPDVLAEFLAQAESKGLQLYPAQEEAVLELLEGKNVILATPTGSGKSLVASFLHRLMLSKNMRSVYTCPIKALVNEKWMALCKEFGAQNVGLSTGDATVNHNAPILCCTAEILEQIALREGENSNIGAVAMDEFHYYSDKERGVAWQIPLLTMKHTQFLLISATLGDTSFFETEMTKLNGLQSVCIRNAERPVPLEFTYSESPLANEIQKLLNEGKGPVYVVHFTQSEAAENAQAFTSLDIAGLAXKR

SEQ ID NO: 17321 - DNA, 702 bp, Unknown
  Obtained from environmental sample
  misc_feature (1)..(702): n is a, c, g, or t
atggaggtatacatgttttctgacttgctaagtccacataaggcttcgtttaaggattacactgagctgcgcgcgcaggtgaacacgaccagagcggtaacttttctggccggtaatatggttacgaacacgcaaaattccataggcggggtgtccgcgcgggtttacaggggcggtacttacggatttgcctcgggcgcggagtactccgatgagagcatcaaaaatgtgttggccgccgccgccaaaaacgcggcgtttatgaacacccatgttaataagggccttgagcccctgccgactgtcgcgccgggcaaagtcggattaaagaaagacctttcggaagatgtagagcagagcgtattaatcgaattcgcaaaggcgctggattccctgcttgttgagcgatacaagaacctgtcaagccgggtggttactgtaaattgtcttgacatagaaaaactccttgcggtaagcgacggcgcggacagccatttttaccagccacgctcatttgtctatgtgcaaatgtctgttgaaactgacgacaagatgcccgtagagctcttttatccgataggcgggtttggccgctttagcgatttgttttccgatccggcgttgctaacggagcgactggacaagcagtacgaacagcttatgcaaaaacngcgaagngtgtttattccagcgcggggttaa

SEQ ID NO: 17322 - protein, 233 aa, Unknown
  Obtained from environmental sample
  misc_feature (1)..(233): Xaa is any amino acid
MEVYMFSDLLSPHKASFKDYTELRAQVNTTRAVTFLAGNMVTNTQNSIGGVSARVYRGGTYGFASGAEYSDESIKNVLAAAAKNAAFMNTHVNKGLEPLPTVAPGKVGLKKDLSEDVEQSVLIEFAKALDSLLVERYKNLSSRVVTVNCLDIEKLLAVSDGADSHFYQPRSFVYVQMSVETDDKMPVELFYPIGGFGRFSDLFSDPALLTERLDKQYEQLMQKXRXVFIPARG

SEQ ID NO: 17323 - DNA, 321 bp, Unknown
  Obtained from environmental sample
  misc_feature (1)..(321): n is a, c, g, or t
atgaaattatccttaaacgctatatcggcaaacttcaacagtttcagggctttgccgcccccgcttgatataggctcgcttaccccgccaggcatagtaatagtgttaggcgacattagccgccttgtcaagcttgagcagattcgcaaggattttgccgccaatgtttcccatgaactgcgaacgcccattcaggtaattcagggatttgccgaaaacattattaattctccgcccgatgactataagcagattctccattttgccgaaattatcagaaaaaacgccagagcgatggacgatcttacaagcgatctgtaa

SEQ ID NO: 17324 - protein, 106 aa, Unknown
  Obtained from environmental sample
  DOMAIN (48)...(106): His Kinase A (phosphoacceptor) domain
  misc_feature (1)..(106): Xaa is any amino acid
MKLSLNAISANFNSFRALPPPLDIGSLTPPGIVIVLGDISRLVKLEQIRKDFAANVSHELRTPIQVIQGFAENIINSPPDDYKQILHFAEIIRKNARAMDDLTSDL

SEQ ID NO: 17325 - DNA, 699 bp, Unknown
  Obtained from environmental sample
  misc_feature (1)..(699): n is a, c, g, or t
atggaaacaagctacattcaaatgttttctgcggaaaatttgcagactataccggggatactcctgtggggaatcgaagtaatcagggttattcaaaggttaaaaaaccctgccctgacggcggtactgaaacttattacagagttgggaaccgataaattttatctacctgcaattttatttattttctggtggattgatgaaaagaagggattccgcctgggaattcttatgcttttatccgcctggataaataccgttttaaaatccactttcaaacagcccaggccttttaatctggatccttctttgggcctggcttacgaagggacttacggcgctccgtcagggcacgcccagtatgcgctttctttttgggttccgatggcagcgtggcttgccgggggaaaacccggccgcaagcgtattgttgtctgggccgcggcaatatttttagttctattgattggctttacccggctttatttgggcgtacacttcccgaccgatcttttggccggctggagcgtgggcgctataatccttcttttaatgtacgtcctaagcccgttttttataaaacacctgtccggccagacacgctcacaaaacattttggctgcccttgcggcgcttgtcatgatcagcctttatccggccgacagatcccttcccgccgttcctgggctttcgcgataa

SEQ ID NO: 17326 - protein, 232 aa, Unknown
  Obtained from environmental sample
  DOMAIN (70)...(194): PAP2 superfamily
  misc_feature (1)..(232): Xaa is any amino acid
METSYIQMFSAENLQTIPGILLWGIEVIRVIQRLKNPALTAVLKLITELGTDKFYLPAILFIFWWIDEKKGFRLGILMLLSAWINTVLKSTFKQPRPFNLDPSLGLAYEGTYGAPSGHAQYALSFWVPMAAWLAGGKPGRKRIVVWAAAIFLVLLIGFTRLYLGVHFPTDLLAGWSVGAIILLLMYVLSPFFIKHLSGQTRSQNILAALAALVMISLYPADRSLPAVPGLSR

SEQ ID NO: 17327 - DNA, 894 bp, Unknown
  Obtained from environmental sample
  misc_feature (1)..(894): n is a, c, g, or t
atggagttgcagataacgcaggaatacacaggccaccagatagacttatgttttttgccgtatatgtgggaagacgttatgcgctatgacagcgcgcatggggaaaaaagcagtatcagggaattggtggaaaaaagaagggaaggccgggacggaattgagggattttcggctgtagtaaacgcagggcttgataaaaactggacagggcacactttagcgcaggcgaacctttacggttacgggcgcatggcgtgggacccggcaattacagcgaaggaaatcgcatgggaatggagcgcgctttcattcggaaaaggtgaagcggcgcaaacagcggcgcaaacagcagaaaatatccttcttaaatcatatcccgcttatgaaaaatacaacgcccccttcggcgtttgcttcatggtaactccgaacactcattacggtccgaatatcgaaggttacgaattcagccgctggggaacataccaccgcgccgacgcaaacgctatcggtattgaccgtacgccatcgggaaccggctacacaacccagtattctcagaaaaacgccgccctcttcgccgacccttcaacctgccctgaaaatttaatcctgttttttcaccgtctccgctacgattataaaatgaagaacggccagacccttttacagaatatatacgatacacattttgaaggatataatgaagttgaatcaatgttggaagactggaaaagtttgaaggatttacttgaaagtgaagtgtataattctgtgctttcacgctttgagcgccagcttgcgaacgcccgcgaatggcgagatcaaattaacacttattttaggcgcaaaacgggaatagatgatgggaagggaagaaaaatttacgattaa

SEQ ID NO: 17328 - protein, 297 aa, Unknown
  Obtained from environmental sample
  DOMAIN (69)...(296): Glycosyl hydrolase family 67 C-terminus
  misc_feature (1)..(297): Xaa is any amino acid
MELQITQEYTGHQIDLCFLPYMWEDVMRYDSAHGEKSSIRELVEKRREGRDGIEGFSAVVNAGLDKNWTGHTLAQANLYGYGRMAWDPAITAKEIAWEWSALSFGKGEAAQTAAQTAENILLKSYPAYEKYNAPFGVCFMVTPNTHYGPNIEGYEFSRWGTYHRADANAIGIDRTPSGTGYTTQYSQKNAALFADPSTCPENLILFFHRLRYDYKMKNGQTLLQNIYDTHFEGYNEVESMLEDWKSLKDLLESEVYNSVLSRFERQLANAREWRDQINTYFRRKTGIDDGKGRKIYD

SEQ ID NO: 17329 - DNA, 855 bp, Unknown
  Obtained from environmental sample
  misc_feature (1)..(855): n is a, c, g, or t
atgaggggcaggggcaggcagttggccagcgacatggaggctctggaaaaggaaataacggcgaagaacggcgacgttgccggaacccaggacagcatacgcaggcgcatggcggaactgaccaaagcccaggaagcgatggaaagaattcaccttgaactggttcagtccgaaacggaaataaaaaacattctggacaacttccgcgaaacacactcacgcgaccttatggaatttgaagagaggacttttacaatcaccgcgacaacaggcgagctaagggaaaaccttgccaggggcaggcaggcccttaaagacctgggagcggtgaacctggcggccccggaggaattcgcggaaacgaaggaacgcttcgattttctttcaggccagctggccgacctttcagcagcaagggcggatctggaaaagctaaccaccgagctaagaacagaatcgtccgctttattcatggccgcctacgacaaaataaaaaagaattttcacaacatatttcgcaggctttttggcggcggcagggcggaactgcgccttttggatctgaaccacgttctggaatccggaattgaaatcttcgcccagcctcccggcaagaaacttgaaaacatcaacctcctttccggcggcgaaagatcaatgaccgcggtggccctcctctttgccacctacctggtcaagccgtcgcctttttgcctgttagacgaaattgacgccgccctcgacgaggaaaacgtaggccgctttgtcatgctcctccgggaattcggcaggaagagccagttcgtcgtcattacccacaacaaaagaacgatgctgcgccaacactcgccataa

SEQ ID NO: 17330 - protein, 284 aa, Unknown
  Obtained from environmental sample
  DOMAIN (84)...(281): ABC transporter
  misc_feature (1)..(284): Xaa is any amino acid
MRGRGRQLASDMEALEKEITAKNGDVAGTQDSIRRRMAELTKAQEAMERIHLELVQSETEIKNILDNFRETHSRDLMEFEERTFTITATTGELRENLARGRQALKDLGAVNLAAPEEFAETKERFDFLSGQLADLSAARADLEKLTTELRTESSALFMAAYDKIKKNFHNIFRRLFGGGRAELRLLDLNHVLESGIEIFAQPPGKKLENINLLSGGERSMTAVALLFATYLVKPSPFCLLDEIDAALDEENVGRFVMLLREFGRKSQFVVITHNKRTMLRQHSP

SEQ ID NO: 17331 - DNA, 720 bp, Unknown
  Obtained from environmental sample
  misc_feature (1)..(720): n is a, c, g, or t
gtgcatagggcaggggacggggcaatcctgagcgacaggctgacccatgccgccgtttttttccctggcgctttttccgtggatttgatgtccggccttccccttcaaagcaaaagcatccttcttgatgacatagccaaagtggttagctataaaccggcgcacatttccctttacgccctaagcgggaaaaaagcggcggacaaaaatcgcgacgaagcggatgagctctggctttacggttgtgacgcccttgaaaaaacaggatacagccggtacgaggtttccaatttctgccttcccggcggtgaatgtaagcacaacatacgctactggcagatgcggaactggcttgccctagggccttccgcttcgggaaccattattgacgatgagaccggaacaggttttaggtttacctacccccctgacacagataactggctggaatgtgaaaaagagcggttggatgcccttacgctgattaaggaaacgttcctgatgggttttcgctgtctcgaaggccctgacgagggctcctttctgcgccgttttaaaaggcccgcaacagatataatacccaaaacccttggcgtgtggggaagccgcggccttttaagtaaaaacaaactcgccctgancaaagangggttgctttttctgaatcggtttttgcttgatgtgtttggagagctggacttgtcatttatgacaatataa

SEQ ID NO: 17332 - protein, 239 aa, Unknown
  Obtained from environmental sample
  DOMAIN (109)...(219): HemN C-terminal region
  misc_feature (1)..(239): Xaa is any amino acid
MHRAGDGAILSDRLTHAAVFFPGAFSVDLMSGLPLQSKSILLDDIAKVVSYKPAHISLYALSGKKAADKNRDEADELWLYGCDALEKTGYSRYEVSNFCLPGGECKHNIRYWQMRNWLALGPSASGTIIDDETGTGFRFTYPPDTDNWLECEKERLDALTLIKETFLMGFRCLEGPDEGSFLRRFKRPATDIIPKTLGVWGSRGLLSKNKLALXKXGLLFLNRFLLDVFGELDLSFMTI

SEQ ID NO: 17333 - DNA, 663 bp, Unknown
  Obtained from environmental sample
  misc_feature (1)..(663): n is a, c, g, or t
ttggggatgcataaaaaggccggttaccttatatgcaataacggcaccttaatacaggaaagccataccggaaaagtcgtctacgagattagaatggacgtacaagccgcgcttaccgcctttgatttagccgacgccgagggctttcccgtacaaatttatgaagacgatataatgtatgtgtcgcgccataatgaatatacaagctatgatcagaagcttaccggcctaaggcaggtagtagttgagcatttcagagccatggtggcaagcggctgccataaactgcttatccccggagacccgaagctccttcccccattggaaagtattttacgaacctatcttggagacagcattaccatctttaccagcaaaccgtattttctggagatactgccagccaataccaacaaagggacggctctggaaaaggttgcggatttacttgggattaatcaaaaagacgtgatggccatcggagattcaatgaacgacgaagccatgctcaaatgggccggcatgggcattgcgatggcaaacagcgatgacaggataaaaaatatcgccgatctggtgacaacaagagacaatgatgatgacggtgttgccgaagtcatcgaaaaatatatcctctccaaaacggcggcttccaatgagtaa

SEQ ID NO: 17334 - protein, 220 aa, Unknown
  Obtained from environmental sample
  DOMAIN (2)...(207): haloacid dehalogenase-like hydrolase
  misc_feature (1)..(220): Xaa is any amino acid
MGMHKKAGYLICNNGTLIQESHTGKVVYEIRMDVQAALTAFDLADAEGFPVQIYEDDIMYVSRHNEYTSYDQKLTGLRQVVVEHFRAMVASGCHKLLIPGDPKLLPPLESILRTYLGDSITIFTSKPYFLEILPANTNKGTALEKVADLLGINQKDVMAIGDSMNDEAMLKWAGMGIAMANSDDRIKNIADLVTTRDNDDDGVAEVIEKYILSKTAASNE

SEQ ID NO: 17335 - DNA, 393 bp, Unknown
  Obtained from environmental sample
  misc_feature (1)..(393): n is a, c, g, or t
atggaaaccgcctgcacaaagataaaggaaatgcaaatattcgggaacgattacgacactcaggacggaacctgtatacgcggttatgtgcatgtaagcgatcttgccgcgggtcatgttctggcgttagattacatcagtaaaaataacaagagcctgactgtaaatcttggaagtgaaacaggcttctccgtaactgaagtaattgaagcggcgcgaaaagtaaccggaaaaactatacccgcgaaagtcacgggaagaaggctgggcgaccccgctgccctatacgattcgtcgtccctcgcgtttgaaatactcggctggaaagcgcgttactccgacatggaaacaatactaaaaacaagctgggaagcgtataaaaatgaaagataa

SEQ ID NO: 17336 - protein, 130 aa, Unknown
  Obtained from environmental sample
  misc_feature (1)..(130): Xaa is any amino acid
METACTKIKEMQIFGNDYDTQDGTCIRGYVHVSDLAAGHVLALDYISKNNKSLTVNLGSETGFSVTEVIEAARKVTGKTIPAKVTGRRLGDPAALYDSSSLAFEILGWKARYSDMETILKTSWEAYKNER

SEQ ID NO: 17337 - DNA, 771 bp, Unknown
  Obtained from environmental sample
  misc_feature (1)..(771): n is a, c, g, or t
ttgcaggaacaaattgaaaactcaggctattacagaagagaagccgcgatttcttctgttctggccggtcttggtttttccgcttcagatataaaccgcgaaacaggcgaattttccggcggctggcagatgagaatcgccctcgcgaaggttcttctggaacagcccgacattctgcttttggacgagccgacaaattaccttgatattgaggcaaggacttggctggaaaaatggctggaaagtttttccggcggctatcttttagtttcgcatgacaggtattttttagatgtctgtgttaacgaagtatacgaactgtttcagggaaatttgaaacgttacgccggaaattacacttcttacgaaaaagtacgcaaaattgaacttgcttctcttgttaaacgctatgaggaacagcaggaagaaatcgtcaaaaccgaggcccttatccgccgtttccgctacaaggcaagcaaagcggctttcgctcaggagttgatcaaacgccttgataaaatggaacgaattgaaattcccgaatcattaaaaaagataaacatcacttttccgccgcctccccattcagggaacatcgcgcttacgctggaaggcatagggaaatgttacggagaacacagggtgctttcangcgtcgaattgtgccttgaaagcgggagaaaggcttgtcgtcgcgggtccaaacgtgccngaaaagcacgcttttgcgtattatcgcaggtacagacaangattttgaagggaatgtaa

SEQ ID NO: 17338 - protein, 256 aa, Unknown
  Obtained from environmental sample
  DOMAIN (2)...(110): ABC transporter
  misc_feature (1)..(256): Xaa is any amino acid
MQEQIENSGYYRREAAISSVLAGLGFSASDINRETGEFSGGWQMRIALAKVLLEQPDILLLDEPTNYLDIEARTWLEKWLESFSGGYLLVSHDRYFLDVCVNEVYELFQGNLKRYAGNYTSYEKVRKIELASLVKRYEEQQEEIVKTEALIRRFRYKASKAAFAQELIKRLDKMERIEIPESLKKINITFPPPPHSGNIALTLEGIGKCYGEHRVLSXVELCLESGRKACRRGSKRAXKARFCVLSQVQTXILKGM

SEQ ID NO: 17339 - DNA, 432 bp, Unknown
  Obtained from environmental sample
  misc_feature (1)..(432): n is a, c, g, or t
ttgctgaactggccgctcgttaagcggctctgtgaaagggtcataatcagtatntacgatgaatacgncggggcaaagcggcggttatccgccctggaaaaagacggggtcgtgtttttccctcattatgatcagggcgggcgcctcgcgcctgaattgaaagagctttccgccgaactcgcccgcatagcttcggatgcggggatggaaacgcgctcatgcgccgaagctgaagatttatccgcgctggggatcaagcccggcgcctgcatagacggcgatcttatccgtgaaatttccgggcattctcttccgcaaattggaagcaaagataaaaaccagcggcgtaattgccgctgtgtttccagcgtggatatcggcagttacggttcctgtcctgccggatgcgtttattgttatgcgcaacgatga

SEQ ID NO: 17340 - protein, 143 aa, Unknown
  Obtained from environmental sample
  misc_feature (1)..(143): Xaa is any amino acid
MLNWPLVKRLCERVIISXYDEYXGAKRRLSALEKDGVVFFPHYDQGGRLAPELKELSAELARIASDAGMETRSCAEAEDLSALGIKPGACIDGDLIREISGHSLPQIGSKDKNQRRNCRCVSSVDIGSYGSCPAGCVYCYAQR

SEQ ID NO: 17341 - DNA, 426 bp, Unknown
  Obtained from environmental sample
  misc_feature (1)..(426): n is a, c, g, or t
gtgatcgcgaggatgaggagaccccgacgtaaggcgcaggctcagagccgttaccgggaattgctgtcacggaattggttgagcgccgtccccaatgcggatgtggttattacaaacccaacccattattccgtggccctcgaatttaatactgagcgcgatgatcctgcgcccgtggtggttgccaagggggaagacgaacttgcgctcagaatccgggaggtagcgaaggcaaatggcgtgcccgtgtatccatatccgcccttggcccgtgccctctatgacggaaccgaagtgggggacgcgataccagccaggtactataaagtggtgatcgatgttttgttaaaattttacagtttcgatcaagagttaacaaaaaccaggcgcgccactgccggcgaagccaacaggatgggggcttag

SEQ ID NO: 17342 - protein, 141 aa, Unknown
  Obtained from environmental sample
  misc_feature (1)..(141): Xaa is any amino acid
MIARMRRPRRKAQAQSRYRELLSRNWLSAVPNADVVITNPTHYSVALEFNTERDDPAPVVVAKGEDELALRIREVAKANGVPVYPYPPLARALYDGTEVGDAIPARYYKVVIDVLLKFYSFDQELTKTRRATAGEANRMGA

SEQ ID NO: 17343 - DNA, 741 bp, Unknown
  Obtained from environmental sample
  misc_feature (1)..(741): n is a, c, g, or t
gtggggaaaagcataatcagaatgcgttattacctctgtattaatcccggaacagtcaaagaagaaatatccggggaaaagacaacggatcccgcatttggtcttcctgctatctgggttagcgaagaaaagcgggacgaggctgaacgggcgggctataccgtggtggatcctccaacgataatagccacccaccttaccgagataatcaaacgccacgcagcagagcttttgggccgccaggaaacccaggtaataatagacgggcttaaaaaggattatccggcggtggttgatgaagtaaccatgggcagagacggaaaggggcttaccatggggaacatacagaaggtgcttcaggggcttttaaaagagcaggtttcaatcaggaacatggtttccattctggagtcaattgccgatttcgccccccttactaccgatacgcggtttttggttgaaaatgcaaggcaggctctttcaagccagatctgccaccaatacgcggatgaggctcgcactcttcatgtgctgatcctggatccgcccctggagcagaaaatcattgaaagcaaagcaaagagcagctccggtgaaattttttccgcccttgagcctgcgctgcaaaacgcatggatgagggctcttgaaaagtctgcgctttcagtgcgcgatcatggttatttccctgttattttatgttctaccccggcgcgttaccttgtgagaacgcgcccttga

SEQ ID NO: 17344 - protein, 246 aa, Unknown
  Obtained from environmental sample
  DOMAIN (1)...(246): FHIPEP family
  misc_feature (1)..(246): Xaa is any amino acid
MGKSIIRMRYYLCINPGTVKEEISGEKTTDPAFGLPAIWVSEEKRDEAERAGYTVVDPPTIIATHLTEIIKRHAAELLGRQETQVIIDGLKKDYPAVVDEVTMGRDGKGLTMGNIQKVLQGLLKEQVSIRNMVSILESIADFAPLTTDTRFLVENARQALSSQICHQYADEARTLHVLILDPPLEQKIIESKAKSSSGEIFSALEPALQNAWMRALEKSALSVRDHGYFPVILCSTPARYLVRTRP

SEQ ID NO: 17345 - DNA, 687 bp, Unknown
  Obtained from environmental sample
  misc_feature (1)..(687): n is a, c, g, or t
atggatattaaaatcgccggggtcagccctgaaattatgcgcaaggccctggatcaggcgaagcggggcaggatgcacatcctttcgattatgaacaaaacgatcagccgccctgcggaagagatcagcgaatacgcgcctaaaatcgttaccctgcgtattgacatcgacaagataggcacgcttatcggtcccggcgggaagaacatcaaggccctgtgcgagcagtacagcgtaaagatcaataccgaagatgacggcactgttacgatttttggcagaaacaccaaagacgcggaagaagccaaaattgccgttatgggtgttacatccgacccggaaataggcagggtgtacaacggtacggtaaaacggattatggattttggcgcctttgtggagatattgcccggcagggaagggctggtgcatatcagtaagctttcccgccagcgcatagccaatgtcaccgacatactaaaggaggggcaggagattcctgttaagcttaccgagattgacaaaatgggcaggcttaacctttcgtatattgatgctatcgatccggacggtgccgattccggcgcctctcacggcggcggtgcccgtggctcaggcggccattcggaaaaccgccacgacaacaagggatttaacaaatccggcagggatcgaccccggcattaa

SEQ ID NO: 17346 - protein, 228 aa, Unknown
  Obtained from environmental sample
  DOMAIN (49)...(106): KH domain
  misc_feature (1)..(228): Xaa is any amino acid
MDIKIAGVSPEIMRKALDQAKRGRMHILSIMNKTISRPAEEISEYAPKIVTLRIDIDKIGTLIGPGGKNIKALCEQYSVKINTEDDGTVTIFGRNTKDAEEAKIAVMGVTSDPEIGRVYNGTVKRIMDFGAFVEILPGREGLVHISKLSRQRIANVTDILKEGQEIPVKLTEIDKMGRLNLSYIDAIDPDGADSGASHGGGARGSGGHSENRHDNKGFNKSGRDRPRH

SEQ ID NO: 17347 - DNA, 324 bp, Unknown
  Obtained from environmental sample
  misc_feature (1)..(324): n is a, c, g, or t
atgggaaatattgccgcggttttagacaaactacgcgaggcgaagaaagccggtaaagagccgccgtatcactttatcgaagtaatggcgtgcagaggcggatgtatcgcgggcggaggacagccctacggttgtaccgatgatattcgcaaacagcgcacgggcggcctttatgtggacgatcaaaagtcccagtaccgctgttcgcatcaaaatccatatataggccaggtttacaaggaattccttggtgagccaggcggtcacaaagcgcataagctgctccacaccaagtatgtggaacggccactgtatattaagtga

SEQ ID NO: 17348 - protein, 107 aa, Unknown
  Obtained from environmental sample
  DOMAIN (44)...(103): Iron hydrogenase small subunit
  misc_feature (1)..(107): Xaa is any amino acid
MGNIAAVLDKLREAKKAGKEPPYHFIEVMACRGGCIAGGGQPYGCTDDIRKQRTGGLYVDDQKSQYRCSHQNPYIGQVYKEFLGEPGGHKAHKLLHTKYVERPLYIK

SEQ ID NO: 17349 - DNA, 555 bp, Unknown
  Obtained from environmental sample
  misc_feature (1)..(555): n is a, c, g, or t
gtgaatattgttggctacggctccatgatgggttcgggtggcatgatagtaatggacgaggacgactgcgtggttgacgtgtcgcgcttctacatggacttctgcgtcgatgaaagttgcggcaaatgctctccctgccggattggtactacgcaaatacttaaaatccttgaaaaaatagcaaagggcaacggcgaggacgaagaccttgtaaaacttgaagctatcggaaacgcgatgacgaaggcgtcgctttgcatgctcggctgtacagccgcaagtcccgtaatgtccacccttaaaaatttccgcgaagaatacatggagcatatacacgataaaaagtgccgtgccggcaaatgcagaaaaatggtcagctttaccattgacgctgagaagtgcataggttgcggagtgtgcgcgaaaaaatgtcccggcgactgcattgtcgtggaagacgcgtcaaggtatccgaataaaaaacgtccgccttacagaattatcaatgataattgcgtaaagtgcggcgagtgcgtggtttcatgtaaattttaa

SEQ ID NO: 17350 - protein, 184 aa, Unknown
  Obtained from environmental sample
  DOMAIN (127)...(150): 4Fe-4S binding domain
  misc_feature (1)..(184): Xaa is any amino acid
MNIVGYGSMMGSGGMIVMDEDDCVVDVSRFYMDFCVDESCGKCSPCRIGTTQILKILEKIAKGNGEDEDLVKLEAIGNAMTKASLCMLGCTAASPVMSTLKNFREEYMEHIHDKKCRAGKCRKMVSFTIDAEKCIGCGVCAKKCPGDCIVVEDASRYPNKKRPPYRIINDNCVKCGECVVSCKF

SEQ ID NO: 17351 - DNA, 540 bp, Unknown
  Obtained from environmental sample
  misc_feature (1)..(540): n is a, c, g, or t
ttgcagcagcttgacatggaatccaatggcaagcgggtaaaccgcgacgggcagccgattgcgtatgaaacgggaccggtggtctttggcgagccgggaaccaatgggcagcattcgttctatcaactgcttcaccagggaaccagcataattcccctgcaatttatcggctttgccctcagtcagcggggcgccgatgtaattgtggacggttcctccagtcaaaccaaactcaacgcaaatcttgccgcgcagatagtagcttttgccaaagggcagagtgatgataccaacctgaacaaagattttcccggcgggcggccttccagccttatttacggacaatcgctgacacctgcggtcatgggcagtcttcttgcccattttgagaacaaggtaatgtttcagggctttgtgtggaacgtcaacagctttgatcaggaaggggtgcagttgggcaagatactcaccaaaaaggtacttgccggcagatcaggcgattccgcgctggacgcatacggtaaattactggggatgtaa

SEQ ID NO: 17352 - protein, 179 aa, Unknown
  Obtained from environmental sample
  misc_feature (1)..(179): Xaa is any amino acid
MQQLDMESNGKRVNRDGQPIAYETGPVVFGEPGTNGQHSFYQLLHQGTSIIPLQFIGFALSQRGADVIVDGSSSQTKLNANLAAQIVAFAKGQSDDTNLNKDFPGGRPSSLIYGQSLTPAVMGSLLAHFENKVMFQGFVWNVNSFDQEGVQLGKILTKKVLAGRSGDSALDAYGKLLGM

SEQ ID NO: 17353 - DNA, 669 bp, Unknown
  Obtained from environmental sample
  misc_feature (1)..(669): n is a, c, g, or t
atgatgagcgatggcgcactttcgcaggatgagatagacgcattattgtccggtgtagattcatcgtctaacagtcatggcggtcacggcggcgcgcccgcggcgacaatggcgcctccggcttccgcagcctcttttgacgttgactcgctggaaaagtttttctcttcaactacgggcgctctttcttccaatcttgccgcccttacaggcaccaccgtaactcttgtcggtcctgaagtccaggctacatcgcgcgacagtatgctgactctgctgcccagtatggttactgttgtaaattccaattttacttcaggtttccccggcgagcattgtttcattttttctgaagaatcagccaaggctatcgcaagccttatgttgaaagaaactgacgcacagcttgatgagatggcgatgtccgttattggagaagctgtttcacaaattgccggtactcaaattacagctcttaccgataaaaccggaaataaatcaatagcttccgcttctccgactgcggcaaatgttccaaaagccgcggcggcgcttcctgcgggcacttttgccgttatgacttatggtcttgatatgggcgatggtctttcccaccaaatatgggaagttttaggtccgtcaccggccgctgatatttcagcggtttag

SEQ ID NO: 17354 - protein, 222 aa, Unknown
  Obtained from environmental sample
  misc_feature (1)..(222): Xaa is any amino acid
MMSDGALSQDEIDALLSGVDSSSNSHGGHGGAPAATMAPPASAASFDVDSLEKFFSSTTGALSSNLAALTGTTVTLVGPEVQATSRDSMLTLLPSMVTVVNSNFTSGFPGEHCFIFSEESAKAIASLMLKETDAQLDEMAMSVIGEAVSQIAGTQITALTDKTGNKSIASASPTAANVPKAAAALPAGTFAVMTYGLDMGDGLSHQIWEVLGPSPAADISAV

SEQ ID NO: 17355 - DNA, 402 bp, Unknown
  Obtained from environmental sample
  misc_feature (1)..(402): n is a, c, g, or t
ttgcctcgtcctgaactcatcggcgttccctacaccgccgcttactcggtgagcctgacactgcgctacatacctgacgttcagagggactttgaaacaattacccaggctcagcaggcccgaggccttgagctttccaagaaagcatcgtggttcaaaaggctgaaaaggaccgccccccttctattgcccttgatcttctcgtcgctggatcgcattgacgtaataagccgcgccatggaactgcgtggcttcggcaaaaacacccgccgaagctggtattcgcaaaaacccttcagccgccgcgacaagcttgtccttgtaataagcgtcctgctttttgccgccgggatatggcttacttttcgcagaggcagcaggttcttaagtcctttccggtga

SEQ ID NO: 17356 - protein, 133 aa, Unknown
  Obtained from environmental sample
  misc_feature (1)..(133): Xaa is any amino acid
MPRPELIGVPYTAAYSVSLTLRYIPDVQRDFETITQAQQARGLELSKKASWFKRLKRTAPLLLPLIFSSLDRIDVISRAMELRGFGKNTRRSWYSQKPFSRRDKLVLVISVLLFAAGIWLTFRRGSRFLSPFR

SEQ ID NO: 17357 - DNA, 444 bp, Unknown
  Obtained from environmental sample
  misc_feature (1)..(444): n is a, c, g, or t
atggtggacatatttcaaagcgttatcacatggattaaaagcacatcccccaattaccgaagtgtgatgaaaggcgttgaatggggaacgctttacaacaaattcaaaaataaaaaccttaatcccaaaacattggaagaaaaagtgtcgctcttaatgcttgatgatgaagtcgaaaataaaaaaggaatttactcttatgttttagatggtgaggaacgccatttgaatctccgggcatttagcgaaaaggtaaagcgtgaaacatacgaaaaacaaaagagcaaatgcgccaacccgaaatgcccgaacagcgacaaggaattttcttttgaagaaatggaaggcgatcatatagatccctggagcaaaggcggaaaaacagttcctgaaaactgccaaatgctctgcaggccttgcaaccgcagaaaaagcgggaaataa

SEQ ID NO: 17358 - protein, 147 aa, Unknown
  Obtained from environmental sample
  DOMAIN (100)...(147): HNH endonuclease
  misc_feature (1)..(147): Xaa is any amino acid
MVDIFQSVITWIKSTSPNYRSVMKGVEWGTLYNKFKNKNLNPKTLEEKVSLLMLDDEVENKKGIYSYVLDGEERHLNLRAFSEKVKRETYEKQKSKCANPKCPNSDKEFSFEEMEGDHIDPWSKGGKTVPENCQMLCRPCNRRKSGK

SEQ ID NO: 17359 - DNA, 846 bp, Unknown
  Obtained from environmental sample
  misc_feature (1)..(846): n is a, c, g, or t
gtggatacnatgttagcaactgttttgtcttccgaatccgcgcaaatgacgccttggcaggcgtgtcagcgttatatagagggaaaagtacccgcatctacctttgaaacatggttccgggccaccgaattggccgtccgcgacgacgggtgcgcctgcatacaggtgcccaacaagttcaccgccgacataatagaggccaacttctccgaactcatcaaggaggcgctcgccgcctgcgccgtcagcttctccgccctcgcttttgagcatgtcaataaggagtgggcggtcgtcaagcagctggcggagcaagccgccgagacccaaagccgccaaattccgcaaacggtctccgggaagacggggcgcttctaccccggctacaccttcgatacctttgtggagggcgacagcaacgtcatggcgctaaccgcggcgcgatcggtggcggaagctccggggaacaccaagttcaacccgctcatcatctacggcgggactgggctgggcaagacccacctcctacaggccatcgggcactacgctcaggcggagtgtacggtcgggcaggtggtatatataacgagcgaggagttcttaaacgagtacacggaatttctgcgcgacaaaaaatcgtcggtttctttctacaaaaaatttatggacaccgatctgctcctagtggacgatatacagtttttcagcggcaagaaggagactcaggagcagttttacctcattttcaacaagctgctgcaagaaaacaagcagatagtgctctcttccgactgtttgcctcaaaacattccggacatgatggagcgcatntctcggccgatctga

SEQ ID NO: 17360 - protein, 281 aa, Unknown
  Obtained from environmental sample
  DOMAIN (125)...(280): Bacterial  dnaA  protein
  misc_feature (1)..(281): Xaa is any amino acid
MDTMLATVLSSESAQMTPWQACQRYIEGKVPASTFETWFRATELAVRDDGCACIQVPNKFTADIIEANFSELIKEALAACAVSFSALAFEHVNKEWAVVKQLAEQAAETQSRQIPQTVSGKTGRFYPGYTFDTFVEGDSNVMALTAARSVAEAPGNTKFNPLIIYGGTGLGKTHLLQAIGHYAQAECTVGQVVYITSEEFLNEYTEFLRDKKSSVSFYKKFMDTDLLLVDDIQFFSGKKETQEQFYLIFNKLLQENKQIVLSSDCLPQNIPDMMERXSRPI

SEQ ID NO: 17361 - DNA, 633 bp, Unknown
  Obtained from environmental sample
  misc_feature (1)..(633): n is a, c, g, or t
atgcgagccctttcgaccgaacacgtgctggaatcgggcatcgaaatattcgcgcagccgcccggcaagaagctggaaaacatcaacctcctttcgggcggtgaacgatccatgaccgccgtggccctgctcttcgccacctacctggtcaaaccttcgcccttctgcctgctggacgaaatcgacgccgccctcgacgaaaacaacgtgggccgcttcgtccagcttctccacgaattcggccgcaggagccagttcatcgttatcacccacaacaaaaaaaccgttacctgcgccaaaaccctccttggcgtaaccatggaagaatcgggcgtgacgaaactcatctcggtcaggctggaacacgcgcccgagaaatccggtgacctctgggcaggcgatctgtcttccgaagagacggcttactccgaaccggaaccgccccagcaggaattttttgaggaagaggacgttgagcccgaagagggccgggagctgccccccggagtggacgatccttccaaggtaagcgaggaggaactcaggccgatcaggacgaggaacaggaaccgcaatgcgccggttccgcaagagggtgacggtaaaacctcagaaaacgccgacggacggtaa

SEQ ID NO: 17362 - protein, 210 aa, Unknown
  Obtained from environmental sample
  DOMAIN (1)...(114): RecF/RecN/SMC N terminal domain
  misc_feature (1)..(210): Xaa is any amino acid
MRALSTEHVLESGIEIFAQPPGKKLENINLLSGGERSMTAVALLFATYLVKPSPFCLLDEIDAALDENNVGRFVQLLHEFGRRSQFIVITHNKKTVTCAKTLLGVTMEESGVTKLISVRLEHAPEKSGDLWAGDLSSEETAYSEPEPPQQEFFEEEDVEPEEGRELPPGVDDPSKVSEEELRPIRTRNRNRNAPVPQEGDGKTSENADGR

SEQ ID NO: 17363 - DNA, 513 bp, Unknown
  Obtained from environmental sample
  misc_feature (1)..(513): n is a, c, g, or t
atgagtgttgcaatgggcagggtaggggagaaattccagaaacaggaaattttcgtctcggagatgctgcttgcagcccgtgtcatgaaacttggggtagaggtgcttaaacccaaactggcgggccaggctaatgttagcaggggaaaatgcatcatcgggacggtacacggagaccttcacgatatcggaaaaaaccttgtggctctgatgatcgagagcagcggctttgaggtgatcgatcttggcgtggatgtggcggtggacaaattcatctcgacgattaaagaaaacccggatgttaaagtggtagccctgtcgtgcctgttaacaactaccatgccggccatgcaggagacggtggcggcgataaaatcaagcggcctgagcgggttcaaggttattgtaggcggagcccctgttacaaaggcgttcagcagcgagataggcgcggacggttattctcctgacgcgggcggcgccggacagcttgccagggaactggcggcttag

SEQ ID NO: 17364 - protein, 170 aa, Unknown
  Obtained from environmental sample
  DOMAIN (49)...(167): B12 binding domain
  misc_feature (1)..(170): Xaa is any amino acid
MSVAMGRVGEKFQKQEIFVSEMLLAARVMKLGVEVLKPKLAGQANVSRGKCIIGTVHGDLHDIGKNLVALMIESSGFEVIDLGVDVAVDKFISTIKENPDVKVVALSCLLTTTMPAMQETVAAIKSSGLSGFKVIVGGAPVTKAFSSEIGADGYSPDAGGAGQLARELAA

SEQ ID NO: 17365 - DNA, 639 bp, Unknown
  Obtained from environmental sample
  misc_feature (1)..(639): n is a, c, g, or t
atgatgggcatcatcgagttccagaagaaattcggcacggaggagcagtgccgcctccacctgttcagggcgcggtggccgaagggcttcgtgtgcccgaagtgcggcggcggggagcacttcgacatcaggtcgcgccgcctgttccagtgcaagtcctgcggccaccaggcgtcggtcacggccgggacgataatggacaagacgcgcaccccgctggccaagtggttcatggcgatctacctgatggccgccgacaagcggggcgtaagcgcgctggccctggcgaagcacataggcgtcgcctaccacaccgcgtggacgatgtgccacaaaatccgccactcgatgggcgcgagggacggcggccgcaagctgggcggcacggtcgaaatggacgagaccttcttcggtgcgcccgagggggggcaagcgcgggcgcggcgcggagaaaacgccggtgctggtctcggtgtcgctcacgggcggaggcaagccaaaggccgcaaggatgaaggtggtgggggccgcggggaggtgaaagagttcgccgaggccgcagtcagcggatgtcacttgaagacgtggcccttagcccttggaacatcctcgacagccttggcaccgaagaagacatag

SEQ ID NO: 17366 - protein, 212 aa, Unknown
  Obtained from environmental sample
  misc_feature (1)..(212): Xaa is any amino acid
MMGIIEFQKKFGTEEQCRLHLFRARWPKGFVCPKCGGGEHFDIRSRRLFQCKSCGHQASVTAGTIMDKTRTPLAKWFMAIYLMAADKRGVSALALAKHIGVAYHTAWTMCHKIRHSMGARDGGRKLGGTVEMDETFFGAPEGGQARARRGENAGAGLGVAHGRRQAKGRKDEGGGGRGEVKEFAEAAVSGCHLKTWPLALGTSSTALAPKKT

SEQ ID NO: 17367 - DNA, 921 bp, Unknown
  Obtained from environmental sample
  misc_feature (1)..(921): n is a, c, g, or t
atggccgangcgatcaatggaggattattacccgacgaggcggtggaaattttccgtattgtcaagtccaagattaatgacgcaaagttcggtgtacacatgcacaacgattccggctgcgccgaggcgtcgtcttgcctctgcgtgatagagggagcctcccatgttcaggggacgatgaacgggctgggggagaggtgcggcaacgcgaatctctgtacgataattcccaacttgcaactcaagcgcgggtttaacctagtaactcccgaacagttgaaaaatctaacgcccgcttcgctctacgtggcggagttagccaacacgacgcccaacatccgccacccttacgtcggcgaggccgcgttctcccacaaggccggcgcccacgccgatggtgtacgcaaagtgcgccagtcgttcgagcacaccgacccagaaacggtcggtaacagccgccaattcgttgtcagcgatcaggccggggcgagtacgatattggagaagttgtcaaagatcaaaaacggtcttgacaagaaagatcccgtcgtcaaaaaagtattggcgaagataaaagagatggaggcctccggttaccaattcgaggccgccgacgcctcgttcgaacttatcgtccgtaaagtactcggcgagttcaaagaaccgtttaccgtcaaagccttcagggtaatcgaagagaaacgagaaagcggcgaaacctactccgaggcgacgatacaggtaatcgaggacggggtgctggaacacaccgccgccgaaggcgacggcccggtaaacgctcttgacaacgcgctgcgtaaggcgctcgtgaaattcttcccgtcgctgaaaggtgtgaagttggacgattacaaagtaagagtgctangacggcaagacggcaccgcccgccaaaagtag

SEQ ID NO: 17368 - protein, 306 aa, Unknown
  Obtained from environmental sample
  DOMAIN (202)...(306): LeuA allosteric (dimerisation) domain
  misc_feature (1)..(306): Xaa is any amino acid
MAXAINGGLLPDEAVEIFRIVKSKINDAKFGVHMHNDSGCAEASSCLCVIEGASHVQGTMNGLGERCGNANLCTIIPNLQLKRGFNLVTPEQLKNLTPASLYVAELANTTPNIRHPYVGEAAFSHKAGAHADGVRKVRQSFEHTDPETVGNSRQFVVSDQAGASTILEKLSKIKNGLDKKDPVVKKVLAKIKEMEASGYQFEAADASFELIVRKVLGEFKEPFTVKAFRVIEEKRESGETYSEATIQVIEDGVLEHTAAEGDGPVNALDNALRKALVKFFPSLKGVKLDDYKVRVLXRQDGTARQK

SEQ ID NO: 17369 - DNA, 717 bp, Unknown
  Obtained from environmental sample
  misc_feature (1)..(717): n is a, c, g, or t
ttgagggagcggctttggaagcgtccttggtataatgccatgaaaagcggccccgacccgaatttcccctatttaaccgaacaagactactacagttttcgaaatcccaaagaatggaccgataacataatagcggtaggcgggaatctttcgcccggaatgctgttgtccgcgtacgagcaggggattttcccctggtacaaccccgaagaccccatactttggcagtcgcccgacccgcgttgcgtgatttttcccgataaattacatatttccgcctctatgcggaaaattcttaaaaacggcgtatacaaagtcacatttaacgaagattttgtgggcgtaatgaacggttgtgcacacacaaagcgccgaaatcagaatggaacatggatttccgatgatattatcaaggcgtatacagaaatgcaccgtcttggatgggcacattccgcggaaacgtggcaaaacggggaacttgtcggcggctgttacggggtattgatgggcagggcttttttcggggaatccatgttttccgtaaggccgaacgcgtccaaaaccgcttttttaagccttgcggtaacgctttttgagcacggaatcgcatttatcgactgccaggtgcctaccccgcatttgctcagcttaggcggcgaggtaatgccgcgaaaggaatttctggcgcttttaaagttgtctaaaatttcacgttaa

SEQ ID NO: 17370 - protein, 238 aa, Unknown
  Obtained from environmental sample
  DOMAIN (51)...(224): Leucyl/phenylalanyl-tRNA protein transferase
  misc_feature (1)..(238): Xaa is any amino acid
MRERLWKRPWYNAMKSGPDPNFPYLTEQDYYSFRNPKEWTDNIIAVGGNLSPGMLLSAYEQGIFPWYNPEDPILWQSPDPRCVIFPDKLHISASMRKILKNGVYKVTFNEDFVGVMNGCAHTKRRNQNGTWISDDIIKAYTEMHRLGWAHSAETWQNGELVGGCYGVLMGRAFFGESMFSVRPNASKTAFLSLAVTLFEHGIAFIDCQVPTPHLLSLGGEVMPRKEFLALLKLSKISR

SEQ ID NO: 17371 - DNA, 411 bp, Unknown
  Obtained from environmental sample
  misc_feature (1)..(411): n is a, c, g, or t
atgtataaaattattattgatactaatttatggatttcttatcttcttggcaaaaaactaataaaattaaaagatttatttttaaatgaaaacgtttcagtcattacttgtcaagaacttattgaagaatttgttgatgtaagctctagaaattacataactaaatatgtagaaaaaaagaatattcttgaagctttggatttaatgagagaattttccgttcaagttcaattagaaaacattaccgttccagaattaaacgatccagacgatttatttttgttcgctttatcggatgctgttaaagcagattttatacttactggtgataaaggactttgggctttaaaaaaatataaaggaacggaaattgtttcttattctgattttatatctaggttagaattatag

SEQ ID NO: 17372 - protein, 136 aa, Unknown
  Obtained from environmental sample
  misc_feature (1)..(136): Xaa is any amino acid
MYKIIIDTNLWISYLLGKKLIKLKDLFLNENVSVITCQELIEEFVDVSSRNYITKYVEKKNILEALDLMREFSVQVQLENITVPELNDPDDLFLFALSDAVKADFILTGDKGLWALKKYKGTEIVSYSDFISRLEL

SEQ ID NO: 17373 - DNA, 933 bp, Unknown
  Obtained from environmental sample
  misc_feature (1)..(933): n is a, c, g, or t
atgatggcgngaaccgcgcggcagatggattatcgcgtaagcagagtattgaacgcgcaaaagcagatatttctgggcgacggcccgcacgagtggataagcgagatggacggcgaaacttacctctccaataccgtgcccatctacgatgccgacggaaacgtcgtgggcattaccggtaccacagacaacataacggagatcgtaaaactcagcaaggaactggaagcggcgcttgaagacgccgaagccgccaaccgcgccaagtccgccttcctcgccaacatgagccacgagatacggacgccgatgaacagcatcataggcttctccgaactcgcgctcgattgcgaaatacccgaagagcccaaatcgtacctgcgcctgataatggaaaactctaaggggcttctgcagataatcaacgacatactcgacgtctccaagatagaggccggcaagatggatctggagagcatacccttcgacatgcacgaggtgttcgccctctgccgctcggcgaccattcccaaggcgatggagaaagggctgctgctccacttctacgcggagccggtcatcaacaagaggctcataggagatcccacgaggctgcgtcaaatattcatcaacctcatctccaacgcggtgaagtttacgaacagcggcgtagtaaaagtattggccaccatcatgtcgaccacccccgactccatcaccatacgcttcgaggtgaaagattcgggaataggcatgacggccgaggagctgaagagggtgatggagccgttcacgcaagccgaccacagcaccacgcgaaaatacggcggcacggggctcggcctctcaatagtcaatagccttgtggagatgatgggcggaaaactggaagtggagagcacccccggcataggcagcaggttccgcttttga

SEQ ID NO: 17374 - protein, 310 aa, Unknown
  Obtained from environmental sample
  DOMAIN (88)...(153): His Kinase A (phosphoacceptor) domain
  misc_feature (1)..(310): Xaa is any amino acid
MMAXTARQMDYRVSRVLNAQKQIFLGDGPHEWISEMDGETYLSNTVPIYDADGNVVGITGTTDNITEIVKLSKELEAALEDAEAANRAKSAFLANMSHEIRTPMNSIIGFSELALDCEIPEEPKSYLRLIMENSKGLLQIINDILDVSKIEAGKMDLESIPFDMHEVFALCRSATIPKAMEKGLLLHFYAEPVINKRLIGDPTRLRQIFINLISNAVKFTNSGVVKVLATIMSTTPDSITIRFEVKDSGIGMTAEELKRVMEPFTQADHSTTRKYGGTGLGLSIVNSLVEMMGGKLEVESTPGIGSRFRF

SEQ ID NO: 17375 - DNA, 693 bp, Unknown
  Obtained from environmental sample
  misc_feature (1)..(693): n is a, c, g, or t
ttgaaaaaacgcgaagcccgttcaaacgttacttacgaagaagcgtccgagcttgcgtattacggcgcgcaggtgctccaccccagagcgatgcagccctgcatgaaaacgggaacgccggtgcttgtaaaaaattcctacaatgtagaagcgcccggcacgcggattgaacacgcgcaggccgcttccgcgaaaaacaagccggtgcgcgcgattacttcacgccgcaatataacgcttgtcgacattgtatcgacaaggatgcttggccagtacggattcctggcggaagttttttcaattttcgcaaggcacaatatttccatagacatggtagccacaagcgaagtttcggtttctattactctggacaccaactacgatcttaccgaggtaaaaaaagaattgagcaagatcgcgcatgtggaagttaaaaccggaaaggcgattgtttcgatcataggggatgtcaggcgctcttcggagattttggtcagggcgttcaggatatgccagtttatcggcgttactgtgcagatgatttcacagggagccagcaaagtgaacataggatttattgtggaagataccgaagcggcggaagtcgttaaatcccttcatcttgatttttttgaagggtcggaaaaatccgtggaaaaaccggcggagaaaactccggagaaacctcggtaa

SEQ ID NO: 17376 - protein, 230 aa, Unknown
  Obtained from environmental sample
  DOMAIN (84)...(150): ACT domain
  misc_feature (1)..(230): Xaa is any amino acid
MKKREARSNVTYEEASELAYYGAQVLHPRAMQPCMKTGTPVLVKNSYNVEAPGTRIEHAQAASAKNKPVRAITSRRNITLVDIVSTRMLGQYGFLAEVFSIFARHNISIDMVATSEVSVSITLDTNYDLTEVKKELSKIAHVEVKTGKAIVSIIGDVRRSSEILVRAFRICQFIGVTVQMISQGASKVNIGFIVEDTEAAEVVKSLHLDFFEGSEKSVEKPAEKTPEKPR

SEQ ID NO: 17377 - DNA, 498 bp, Unknown
  Obtained from environmental sample
  misc_feature (1)..(498): n is a, c, g, or t
atggcctcacgcacagggcgtaatattcccacacccttaatggaaaaaatttcccgtatcccgaacatttacggcgtaaaggaagcgtccggcgatataaaccagatgggcgacgtaatcagggaaatcgcaataccgcgcagagcggaaggcggaaacttctgcgtcctctccggcgacgacggccttaccctgccgttaatctctcttggcggcgagggcgttatctcggtaatttccaacctgttacccgcaaaagtgaaggcaatgaccaaagccgcccttgacggcgatttcgaaaaagcgcgcgctattcattttgaacttctcccatttataaaagcggctttcatagaaaccaaccccgcgccgattaagcaagctctgaattgggcgggacttcccgcgggtccggcgcgtctgcctttgggcaaacttgcacctgccagtgaagcggtgttgaaaaaggctatgattgatttggggtttaaagtttaa

SEQ ID NO: 17378 - protein, 165 aa, Unknown
  Obtained from environmental sample
  DOMAIN (2)...(162): Dihydrodipicolinate synthetase family
  misc_feature (1)..(165): Xaa is any amino acid
MASRTGRNIPTPLMEKISRIPNIYGVKEASGDINQMGDVIREIAIPRRAEGGNFCVLSGDDGLTLPLISLGGEGVISVISNLLPAKVKAMTKAALDGDFEKARAIHFELLPFIKAAFIETNPAPIKQALNWAGLPAGPARLPLGKLAPASEAVLKKAMIDLGFKV

SEQ ID NO: 17379 - DNA, 339 bp, Unknown
  Obtained from environmental sample
  misc_feature (1)..(339): n is a, c, g, or t
ttgacacgctggcttggatggcgatattggttggggattgacgagagcgaccgtctccaagacttgagtcagctcggtgatccgctggagaagctcaatcgagttattgattggggtatattccagccgaccttaaacaaagtattcaagaaagaacgcaaaggagtccaaggctggccgccgtatccgtatttgatgatgttcaaaatactgatattgcaacggctatacaacatctccgatgatcagaccgaatatcagataaaagatcggatgactttcatgcgttttttaggtttatccataagcgaccgcgtcccgacccaaaacccgcgataa

SEQ ID NO: 17380 - protein, 112 aa, Unknown
  Obtained from environmental sample
  misc_feature (1)..(112): Xaa is any amino acid
MTRWLGWRYWLGIDESDRLQDLSQLGDPLEKLNRVIDWGIFQPTLNKVFKKERKGVQGWPPYPYLMMFKILILQRLYNISDDQTEYQIKDRMTFMRFLGLSISDRVPTQNPR

SEQ ID NO: 17381 - DNA, 552 bp, Unknown
  Obtained from environmental sample
  misc_feature (1)..(552): n is a, c, g, or t
gtggaggccggcacactcaaggccggattagacaccgttgaaacgaacttcaacatccagatgaggctggcaaaagagttgaccgacgagcgcatgaggacggatctgatagcgagcaaagcctacctagacaacgtgatggagacgctggccggcataggcttcgtggttgggacggaaccggaagagatagtaaaaaagtacaaggaaaaccgcgagacttacgtggccgcctacctgcaagaaaaaccatacgtcctggaaaacttcgtggtaaacgaattcttcgcgcatctgatgcccttcggcaccggcgaaacgacgtgggactcatacttgtttctttgcgtcttgtacggtatggtaaagttgcacataaacggagtcgccggttgccgcaaagggctcaccgacgaggctgtgacgcgcatcatccaaaccttctcaaagacggtgctgcacaacgggaagttcatcccgaacatgatcaagcgcctcaaggagaacgggtttgacacgctggcttggatggcgatattggttggggattga

SEQ ID NO: 17382 - protein, 183 aa, Unknown
  Obtained from environmental sample
  misc_feature (1)..(183): Xaa is any amino acid
MEAGTLKAGLDTVETNFNIQMRLAKELTDERMRTDLIASKAYLDNVMETLAGIGFVVGTEPEEIVKKYKENRETYVAAYLQEKPYVLENFVVNEFFAHLMPFGTGETTWDSYLFLCVLYGMVKLHINGVAGCRKGLTDEAVTRIIQTFSKTVLHNGKFIPNMIKRLKENGFDTLAWMAILVGD

SEQ ID NO: 17383 - DNA, 612 bp, Unknown
  Obtained from environmental sample
  misc_feature (1)..(612): n is a, c, g, or t
atgaacccgcnttattcacaggcaaaaaccagagctacgcagcacttagccgaaatcagttttatagaacatctgctggattgtatgagtgcaaactcgcgcgttgtggttatagttccgcagtcaaccatggtaggcaaaaccaaagaaaccagagcggtgaaaaaatccatattggaaaaacataccttaaaaggcgtgataacattgaacaagcagacattttatcgtataggcacaagcccgtgcatagcgatatttaccgcaggaattccgcacaaaaaggaaaaacttgtaaagtttataaactacgaagatgacggctatattgtaaataaaaatatagggcttgtaaggacggaacgcgctcaggcgcaacatcaaaaacttatggatgtctggcgcaatgaccgagatgttgaaataaaatttatggtcaaggcacggataaaagccgatgacgaatggctgcactctttctattgctttaacgacgaaattccaaccgatgcggattttgaaaaaacaatggcggattatctcacctttgagttcaatatgatttctcacaaccgaggatatttattcggtatggaggagaaaaatgagtaa

SEQ ID NO: 17384 - protein, 203 aa, Unknown
  Obtained from environmental sample
  misc_feature (1)..(203): Xaa is any amino acid
MNPXYSQAKTRATQHLAEISFIEHLLDCMSANSRVVVIVPQSTMVGKTKETRAVKKSILEKHTLKGVITLNKQTFYRIGTSPCIAIFTAGIPHKKEKLVKFINYEDDGYIVNKNIGLVRTERAQAQHQKLMDVWRNDRDVEIKFMVKARIKADDEWLHSFYCFNDEIPTDADFEKTMADYLTFEFNMISHNRGYLFGMEEKNE

SEQ ID NO: 17385 - DNA, 732 bp, Unknown
  Obtained from environmental sample
  misc_feature (1)..(732): n is a, c, g, or t
ttgatttttgccgaccctccgtataatatgcagttggagaataccctttacaggccgaataacacaaaagttgacggtgttgatgatgaatgggacaaattcggctcattctccgaatatgatgatttttgcgaagcgtggttaaaagaatgcaggcgcgtattaaaagatacgggaacaatatgggtaatcggcagttatcataatattttccgcgtcggcgccattatgctcaatctgggttactggattttgaacgacgtgacatggcacaagaccaatccaatgcccaatttcatgggcacgcggtttacaaacgccacggaaacgcttttatggtgttcgaaaaaaaaggaaaataaaaaatatacgtttaaccacagaataatgaaaaaatacaatggcggcaaacaaatgacgtccgtttggcggatacgtctgtgtgtcggggaagaacgcctgaagggtgaagacgggaagaaagcccattccacccaaaaacctgaggagcttcttaaaagggtgattttatccacgacaaaacagggggatgtcgtgcttgatccgttttttggaaccggcacaaccggcgctgtcgctaaaaagttaaaacgaaattatatagggatagagagggagccggaatatataaaactcgcgcaaaacaggatcgctaatattaacgaatattttgaagaagctgattgggaagaaggatgcctcacacgttaa

SEQ ID NO: 17386 - protein, 243 aa, Unknown
  Obtained from environmental sample
  DOMAIN (1)...(222): DNA methylase
  misc_feature (1)..(243): Xaa is any amino acid
MIFADPPYNMQLENTLYRPNNTKVDGVDDEWDKFGSFSEYDDFCEAWLKECRRVLKDTGTIWVIGSYHNIFRVGAIMLNLGYWILNDVTWHKTNPMPNFMGTRFTNATETLLWCSKKKENKKYTFNHRIMKKYNGGKQMTSVWRIRLCVGEERLKGEDGKKAHSTQKPEELLKRVILSTTKQGDVVLDPFFGTGTTGAVAKKLKRNYIGIEREPEYIKLAQNRIANINEYFEEADWEEGCLTR

SEQ ID NO: 17387 - DNA, 690 bp, Unknown
  Obtained from environmental sample
  misc_feature (1)..(690): n is a, c, g, or t
atgaacgcccccgacctgatggacgccgaactctcgctgacggactccgccggcgcgaatttcggcacggcggacgcggtaaacgaccacgtagaggcggctaagatgttccgcccggactacctgcaagccttcatgcaagcgcaaaaaggagagctagacctagtacagacaaagaacggcctgctgccgcgcctagacttccacgcctcgctctccggagtgacggacgcgaaatcgttcccgtccgcgcttgcaccggccgcaggcggcgacatctcaccggtaatagcggccggcctgacgctccaactgcccataaagaacggctcggccaaagaacgctaccgccgctcggaattctccatggagcaacaacgcctatcaatagacaactacgtccgccttatagactacgaaatccgcagcgcccacacggaagtattgcgagcgcggcgtcagatagaaacggccaagactgtaagcgcgctacaactgcaaaagttagaagccgaacacgaaaaaatgagcgccggaaaatcaaccggctacgccgtcctgcaagtacaacgcgacctagtatccgcccacctagacgaagcccaagccaaaacagcctacgtatcggcattaataacactatacttgaaagacgggacgtttttgcaaaggagggggattaagttttga

SEQ ID NO: 17388 - protein, 229 aa, Unknown
  Obtained from environmental sample
  DOMAIN (27)...(219): Outer membrane efflux protein
  misc_feature (1)..(229): Xaa is any amino acid
MNAPDLMDAELSLTDSAGANFGTADAVNDHVEAAKMFRPDYLQAFMQAQKGELDLVQTKNGLLPRLDFHASLSGVTDAKSFPSALAPAAGGDISPVIAAGLTLQLPIKNGSAKERYRRSEFSMEQQRLSIDNYVRLIDYEIRSAHTEVLRARRQIETAKTVSALQLQKLEAEHEKMSAGKSTGYAVLQVQRDLVSAHLDEAQAKTAYVSALITLYLKDGTFLQRRGIKF

SEQ ID NO: 17389 - DNA, 687 bp, Unknown
  Obtained from environmental sample
  misc_feature (1)..(687): n is a, c, g, or t
gtgttcccggcgactgcggcgaccgtaaacaacaacgccatagcgggcgttaccgccccggttgccggggaggctccggttgctgccgttaccgaaacggcacaatataccggaacggtaacgtggttgcccaaccactcaacctttgccgcagcaacgcaatacacggcaactattactctgacggcaaaagcgggttacacgctgcatggcgtggcgcagaacttctttacggttgcgggggcggcatcggccagcaacgcagccaattccggcgttgttacggcggtgttcccgcaaactgcgccgaccgtaagcatagccgccatagcgggcgttaccgttccggtagccggcgggattccggttacggtcattgcagaaaatgagcagtacagcgggacggtaacgtggaacggcaatgcctttgccgcaggaacgcaatacacggcaaccattaccttgacggcgaaagcaggttacacgctgcaaggcgtggcgcagaacttctttacggttgcgggggcaacatcggtgagcaatcccgccaattccggggttgttacggcgatattcccgcggactgcgggggcgctgagttttacgttgaattacaacggcactgcctattcngtttccaagggcacggcggatttcgccgaagtggtaataccgggcctcgtataa

SEQ ID NO: 17390 - protein, 228 aa, Unknown
  Obtained from environmental sample
  misc_feature (1)..(228): Xaa is any amino acid
MFPATAATVNNNAIAGVTAPVAGEAPVAAVTETAQYTGTVTWLPNHSTFAAATQYTATITLTAKAGYTLHGVAQNFFTVAGAASASNAANSGVVTAVFPQTAPTVSIAAIAGVTVPVAGGIPVTVIAENEQYSGTVTWNGNAFAAGTQYTATITLTAKAGYTLQGVAQNFFTVAGATSVSNPANSGVVTAIFPRTAGALSFTLNYNGTAYSVSKGTADFAEVVIPGLV

SEQ ID NO: 17391 - DNA, 594 bp, Unknown
  Obtained from environmental sample
  misc_feature (1)..(594): n is a, c, g, or t
atgtcggccagctcggtctgggcgacgacacggatcgggatgccccagtccgcgtgggctatgacggcgactggaagagcgtgtcggcaggcgcatactacacgctcgccctcagggcggacggcagcctctgggcgtgggggcaaaacacttatggtcagctcggcctcggcgacagcggcagtgacacaaacaggaacgcccccacccgcgtgggcaatgacagcgagtggaagagcgtgtcggctggctatggacacacgctggctatcagggcggacggcagcctctgggcgtggggggacaactggaacggtcagctcggcctcggcgacagcggtttttacacagcacggaacacccctatccgcgttggctatgacagcgactggaagagcgtgtcggccggtgccggcgcgtatcacacactcgccctcagggcggacggcagcctctgggcgtgggggaacaacacttccggtcagctcggaatcggcaccagcgactacgatgcacaccctatcccagtccgcgtgggcacggacaccaactgggcggtcgtgtcggccggaggttcccacacgctcgccctga

SEQ ID NO: 17392 - protein, 197 aa, Unknown
  Obtained from environmental sample
  SIGNAL (1)...(20)
  misc_feature (1)..(197): Xaa is any amino acid
MSASSVWATTRIGMPQSAWAMTATGRACRQAHTTRSPSGRTAASGRGGKTLMVSSASATAAVTQTGTPPPAWAMTASGRACRLAMDTRWLSGRTAASGRGGTTGTVSSASATAVFTQHGTPLSALAMTATGRACRPVPARITHSPSGRTAASGRGGTTLPVSSESAPATTMHTLSQSAWARTPTGRSCRPEVPTRSP

SEQ ID NO: 17393 - DNA, 756 bp, Unknown
  Obtained from environmental sample
  misc_feature (1)..(756): n is a, c, g, or t
atggcttcttcctatcctatgaccgttcttgttggccccagagtccattaccgctttacccagccgagctggggtattagtgttcaccagaacggctccggcggcagcagggtgttgagctatgattatgccaaaaagaccttctttgccggagcgatcagcgatcagtaccgcgaatatatgaggtattggcgcaagctttacgcggaggggctttttgatccggaaatggcggagcctattagcagcgacgtgtggtcccgcaaactggcgacagggaacgcgattgctacctacgcttactacgatcaaatcggcggggtagaagccgccagcaccatccccggctttaaactccagatgtatgctcctctgtccggtcccggcggggcccacacgtttcagaaaaacagaaccggtgacggaataattttcccgattggcgtttccaggcggcctgactttgagcaggtagtgcgcgcggtagacaagatgttcttcagcgaagaagcggcaaacatctggtgcctgggcgtggaagggcaaacctataccatgcatggcaatacgatcaaatatgcggacagcatccttacagcgcccgacggcatctacaaatccatgcagctccactatggctgcggagcagctggtacgcaactggtttgggtaaccgcctgggaaagaccaagtacaatgccaattatgcggagatcaacaatcaggtactcgccatggatacggcaactcaggtaa

SEQ ID NO: 17394 - protein, 251 aa, Unknown
  Obtained from environmental sample
  misc_feature (1)..(251): Xaa is any amino acid
MASSYPMTVLVGPRVHYRFTQPSWGISVHQNGSGGSRVLSYDYAKKTFFAGAISDQYREYMRYWRKLYAEGLFDPEMAEPISSDVWSRKLATGNAIATYAYYDQIGGVEAASTIPGFKLQMYAPLSGPGGAHTFQKNRTGDGIIFPIGVSRRPDFEQVVRAVDKMFFSEEAANIWCLGVEGQTYTMHGNTIKYADSILTAPDGIYKSMQLHYGCGAAGTQLVWVTAWERPSTMPIMRRSTIRYSPWIRQLR

SEQ ID NO: 17395 - DNA, 591 bp, Unknown
  Obtained from environmental sample
  misc_feature (1)..(591): n is a, c, g, or t
gtggttatcatgcaaaaccaaaggtcgcggcttgcaataatccacctcgcaaaaaagcagctcggcctcgatgaatacgcgtaccgcgccattctttccggggcaggcgtttcaagcgcgaaggatatcgaaacggatttgcagttcaacacggttatgggcgcgttcacgcggcttggcttttttccttcgggacgcagtgggggcaaacaacggagtaccgtttccggcagcaaccccgccatgatcagccgccggcaggagtattacatcaaagggctttggtcgctggccagccgcgccaaggacgagaagagcctgcggcgcatggtgaagcgcgtcggcaaggttgacgacatatcttttttatccagacggtccgcgtcggcgctcatactcgccctgcgggacatctgctggaaagccgggttcaatcccgacgaggagggggcttatgtttctgacggtaaaagaagcggcgcaaacgctgcgcctggaccttcatcaggtgtactatctcctgacgatgggggaaatcgaatcggtcaaagtcggcaaagcatggcggctggcgccggaagccgtggctga

SEQ ID NO: 17396 - protein, 196 aa, Unknown
  Obtained from environmental sample
  DOMAIN (7)...(145): Protein of unknown function (DUF1018)
  misc_feature (1)..(196): Xaa is any amino acid
MVIMQNQRSRLAIIHLAKKQLGLDEYAYRAILSGAGVSSAKDIETDLQFNTVMGAFTRLGFFPSGRSGGKQRSTVSGSNPAMISRRQEYYIKGLWSLASRAKDEKSLRRMVKRVGKVDDISFLSRRSASALILALRDICWKAGFNPDEEGAYVSDGKRSGANAAPGPSSGVLSPDDGGNRIGQSRQSMAAGAGSRG

SEQ ID NO: 17397 - DNA, 315 bp, Unknown
  Obtained from environmental sample
  misc_feature (1)..(315): n is a, c, g, or t
atgggcagaacaatcataagcgaagatggacgttttgaatgggatgaaaataaagaccggttaaataaaaaaaaacacgggttttcattcaacgaaattcttgaaatctttgatgatcctgcttttcttgaaggttatgatcaagaacactctaaacaagaagagcgatattatggtatgggatgtcttaatagtaccctttatgtaattactttttacacatacagagagaggataagaattatatccgcacgtcaggcggataatgatgaacaagaggaatacaatgattacttcaaaaaaattaagtcctga

SEQ ID NO: 17398 - protein, 104 aa, Unknown
  Obtained from environmental sample
  DOMAIN (11)...(98): Protein of unknown function (DUF497)
  misc_feature (1)..(104): Xaa is any amino acid
MGRTIISEDGRFEWDENKDRLNKKKHGFSFNEILEIFDDPAFLEGYDQEHSKQEERYYGMGCLNSTLYVITFYTYRERIRIISARQADNDEQEEYNDYFKKIKS

SEQ ID NO: 17399 - DNA, 765 bp, Unknown
  Obtained from environmental sample
  misc_feature (1)..(765): n is a, c, g, or t
gtgatcgcgggcatctccggtatttcttatcaacggcgtttggctttcaaatggtctcttatattcggggagtactcgtcgagcaatccggctatcgggttttcggtgtttacaacctgcgcaatgattgttttgacgctgcttatcgccgcgccgctttctattttttgcgcggtttatttgacggagtacgctaagcgcaagaacaggctcgtggcgtggatcaggctcgccacggagacgcttgcggggataccgtctatcgttttcgggcttttcggggctatattctttgggacggtgatgcgtttcgggtactctatacttacaggctgcctgacggtcgcgataatgcttttgccggttatcatccgtcagacggaggaggccgtaaagtccgtgccggatatgtacagggaggggagttacgggctgggggcgtctaagctgcggacggtttttcgtatagttctgccgtcagccatgccggggattctatctgcggtgattttgagcatgggcaggataatcggtgagacggccgcgctgatattcacgctgggttccgtggcgcagtttcctacgagtttgctcgacagcagccgctcgctcgcggtgcacatgtatatatcgacgcgtgacggcggggcggcggggcgcgaggtggcgttcttcacgggcgcggttctgatcgtcgtcatattgcttatgaatataggggcgtcctatttgggcggaaaggtgggtaaagactttgaaaattaa

SEQ ID NO: 17400 - protein, 254 aa, Unknown
  Obtained from environmental sample
  DOMAIN (36)...(250): Binding-protein-dependent transport system inner membrane component
  misc_feature (1)..(254): Xaa is any amino acid
MIAGISGISYQRRLAFKWSLIFGEYSSSNPAIGFSVFTTCAMIVLTLLIAAPLSIFCAVYLTEYAKRKNRLVAWIRLATETLAGIPSIVFGLFGAIFFGTVMRFGYSILTGCLTVAIMLLPVIIRQTEEAVKSVPDMYREGSYGLGASKLRTVFRIVLPSAMPGILSAVILSMGRIIGETAALIFTLGSVAQFPTSLLDSSRSLAVHMYISTRDGGAAGREVAFFTGAVLIVVILLMNIGASYLGGKVGKDFEN

SEQ ID NO: 17401 - DNA, 447 bp, Unknown
  Obtained from environmental sample
  misc_feature (1)..(447): n is a, c, g, or t
atgctatttcgccgccaacagctcacccaggatcttggcagagacccaagcaatgaggaattatcggagcaattggggctcccagtttccaaggtgaaggaaatcgtgaaattgtcccaggaaaccacaagccttgatacaattgttgataaggggaatcttacccgcctcgccgacctcataaaagacgaaaaccttacagagccttttgaggctgtcttttcaatgaccatacaggacacaataggggatattctttccagcctttccgaaagggaaatgaaaattatacagctccgcttcggcctgacaggggaggggcccctgaccctggaagaaacaggcaagcttctgggcataacccgcgaacgcgtgcgccagatccaggaaaaagccacatacaagcttagaggtctaagggaattaaacgagctgaaagacgcatag

SEQ ID NO: 17402 - protein, 148 aa, Unknown
  Obtained from environmental sample
  DOMAIN (85)...(138): Sigma-70, region 4
  misc_feature (1)..(148): Xaa is any amino acid
MLFRRQQLTQDLGRDPSNEELSEQLGLPVSKVKEIVKLSQETTSLDTIVDKGNLTRLADLIKDENLTEPFEAVFSMTIQDTIGDILSSLSEREMKIIQLRFGLTGEGPLTLEETGKLLGITRERVRQIQEKATYKLRGLRELNELKDA

SEQ ID NO: 17403 - DNA, 366 bp, Unknown
  Obtained from environmental sample
  misc_feature (1)..(366): n is a, c, g, or t
atgcagacaactgtcgagtcaaagtacgttttcctgctgctcctcaacctggcattgctgtgggttggctgccttatggacatctattcggccattctggttgtactgccgctgatcataccgttaagtcaggtttacggaatcgatccggttcatctgggcatcatttttattgtcaacctggaagtaggtttcctcacgcctccggtcggcatgaatcttttcctggcaagctaccgcttcaaaaagcccttcaccgaaatctgccattgcgtgctgccattcttggccgtgcaattggcggtggttctactggtaacttatgtgccggcgctatcgacattgctcccagggctgtttaagtaa

SEQ ID NO: 17404 - protein, 121 aa, Unknown
  Obtained from environmental sample
  misc_feature (1)..(121): Xaa is any amino acid
MQTTVESKYVFLLLLNLALLWVGCLMDIYSAILVVLPLIIPLSQVYGIDPVHLGIIFIVNLEVGFLTPPVGMNLFLASYRFKKPFTEICHCVLPFLAVQLAVVLLVTYVPALSTLLPGLFK

SEQ ID NO: 17405 - DNA, 882 bp, Unknown
  Obtained from environmental sample
  misc_feature (1)..(882): n is a, c, g, or t
atggaacaccagattacccaggagtataccggccatcaaatagatttgtgctacctgccctggctctgggaagacatcatgcgctttgacaccgcgggagaaccgcagggacgcattaaagacctagtcggtccttactccgccggacattcgcgcatagagggcttcgcggctgtggtaaatacaggaagggatcgcaactggacaggccatacactggcgcaggcgaacctttacggttacgggcgaattatctggaacccttccctttccgccggagaaatcgcccgcgagtggagtgtcctttcctttggctcggatcccgcaacgaaaaccgtaacggaactgctgcttaaatcctatcccgcatacgaaaagtacaacgccccgtttggagtgtgtttcatggtaacgcccggcctgcattacggaccgaacatagaaggttacgagttcagcagatggggaacatatcaccgtgccgatgcccgcgcgatcggcattgaccgcacgccctccgggaccggctacaccgcccagtaccaggcaaaaaacgctgctatgttcgccgaccccgcgacctgcccggaaaacttaatcctgttttttcaccgccttgcctacgactacaagatgaaaaacggcgaaacccttttgcaaaatatctatgacactcattttgagggctatgaggaagtggcgaccatgcttgaaaagtggaaaagcctgaaagcttcgcttaaagaagaagtgtaccaatcggtactttcccgctttgagcgccagcttgtcaacgcgcgcgagtggcgggatcagatcaacacctatntttggcgcaagaccggcatagcggacaaacagggacgaaaaatttaccactaa

SEQ ID NO: 17406 - protein, 293 aa, Unknown
  Obtained from environmental sample
  DOMAIN (69)...(292): Glycosyl hydrolase family 67 C-terminus
  misc_feature (1)..(293): Xaa is any amino acid
MEHQITQEYTGHQIDLCYLPWLWEDIMRFDTAGEPQGRIKDLVGPYSAGHSRIEGFAAVVNTGRDRNWTGHTLAQANLYGYGRIIWNPSLSAGEIAREWSVLSFGSDPATKTVTELLLKSYPAYEKYNAPFGVCFMVTPGLHYGPNIEGYEFSRWGTYHRADARAIGIDRTPSGTGYTAQYQAKNAAMFADPATCPENLILFFHRLAYDYKMKNGETLLQNIYDTHFEGYEEVATMLEKWKSLKASLKEEVYQSVLSRFERQLVNAREWRDQINTYXWRKTGIADKQGRKIYH

SEQ ID NO: 17407 - DNA, 756 bp, Unknown
  Obtained from environmental sample
  misc_feature (1)..(756): n is a, c, g, or t
ttgacaaactttgccgagtntgctgtgtacgatacacggatcaagccgaacaaggacgacaaggcaagtacggctcgcattttctactgtacttttgatcagtacgaacaacattttgaatttgtcaacagcattttttcaaaagaagccatactgacaggcagctttgataagtacattgaggataataaaaacaaaaagggaacatccgaagttgacgctgaaattttggcgcttgttgaagaatggcgcgtagagctggcaaaaaacatcgccaagaataatccagacctttcggtatacgatcttaataccgtcgtacaaaaaattatagaccgccttatatttctgcgaattgccgaagacaagggcattgaagatgagaacctgttgctttcggttgccaaaagccagaatatttacgaaaaacttattctgctttttatcaaagcgaacgccaaatacaattcaggtctctttatcggagttgattggatcgacagggttagtattgaagatagggtgttgtcgcatatcattgtaaatttatattaccctgagtgtccctatgaattttccgttctacctgttgaaattcttggtagtatttacgagcgttttctcggtaagacgattcgttttcgtgctgttaaaggtgatattcataccgcgattatcgaagaaaaacccgaagttaagaaagcaggaggcgtttattatactccgcaatacatagtgatacatctctcgcgataa

SEQ ID NO: 17408 - protein, 251 aa, Unknown
  Obtained from environmental sample
  misc_feature (1)..(251): Xaa is any amino acid
MTNFAEXAVYDTRIKPNKDDKASTARIFYCTFDQYEQHFEFVNSIFSKEAILTGSFDKYIEDNKNKKGTSEVDAEILALVEEWRVELAKNIAKNNPDLSVYDLNTVVQKIIDRLIFLRIAEDKGIEDENLLLSVAKSQNIYEKLILLFIKANAKYNSGLFIGVDWIDRVSIEDRVLSHIIVNLYYPECPYEFSVLPVEILGSIYERFLGKTIRFRAVKGDIHTAIIEEKPEVKKAGGVYYTPQYIVIHLSR

SEQ ID NO: 17409 - DNA, 315 bp, Unknown
  Obtained from environmental sample
  misc_feature (1)..(315): n is a, c, g, or t
atgctcggcgcgtcggccagcgacaaaaagacaacgacgttggcaagaactcctgaactctcgaaatcgtccagaaagaagcgggccacgtcgtattttactcccattgcacaaaaaacgatgacgaattgttccgcagctttggaggaatcggcgtttcctgcttcgattatttttgcctggcgcacgatctgggcagcaaggcggttatggggaagtccgttgcctgaaaaaatcgggagcttctggccccttatcagggtgttcattccgtctatggccgaaatgcctgtctggataaaatccttggggtaa

SEQ ID NO: 17410 - protein, 104 aa, Unknown
  Obtained from environmental sample
  misc_feature (1)..(104): Xaa is any amino acid
MLGASASDKKTTTLARTPELSKSSRKKRATSYFTPIAQKTMTNCSAALEESAFPASIIFAWRTIWAARRLWGSPLPEKIGSFWPLIRVFIPSMAEMPVWIKSLG

SEQ ID NO: 17411 - DNA, 744 bp, Unknown
  Obtained from environmental sample
  misc_feature (1)..(744): n is a, c, g, or t
ttggcggctctgcctacgcctgtccccgccaacaacggcgagacgttcaagggttggttcaccgcgcccgcgagcggcgagagggtgacggcaagcacggtgttcaccggcgacgccacgctctacgcccagtggtcgcccgccgcggtgtcttacactgtgacgttcaacgccaacggtggtttggtaaatccgacctcccgcgtaacgaccggcgacggaacgctcgcggcgctgccgactccggcgagagagaattacgcctttaccggctggttcacgtcggcgacggtaggcagcacggaggtgacgacggattacgtgttcaccggaaacacgacgatctacgcccgttggacgcctatctatacggtaacgttcaaccccaacaacggcactgtcaacccgacgtcggctaaggtcaacatcgaagggctgattgagggaacattgccgacgccgacgagggccggttacaagttcgacggctggttcacgacgtcggcggcgaccggcggtttggaggtgacggaggattacgtgttcagcgcgaacaccacaatctacgctcggtggacgcttgttgtgtacacgataattttcgatcccaacggcggtacggttaccgtatcctccggcgtgaccggaaccggcggcaggttatcctcattgcccacgccggcggcgagaaccggttacgtatttgacgggtggttcaccgaggaggttggcggcacgaggtaa

SEQ ID NO: 17412 - protein, 247 aa, Unknown
  Obtained from environmental sample
  misc_feature (1)..(247): Xaa is any amino acid
MAALPTPVPANNGETFKGWFTAPASGERVTASTVFTGDATLYAQWSPAAVSYTVTFNANGGLVNPTSRVTTGDGTLAALPTPARENYAFTGWFTSATVGSTEVTTDYVFTGNTTIYARWTPIYTVTFNPNNGTVNPTSAKVNIEGLIEGTLPTPTRAGYKFDGWFTTSAATGGLEVTEDYVFSANTTIYARWTLVVYTIIFDPNGGTVTVSSGVTGTGGRLSSLPTPAARTGYVFDGWFTEEVGGTR

SEQ ID NO: 17413 - DNA, 876 bp, Unknown
  Obtained from environmental sample
  misc_feature (1)..(876): n is a, c, g, or t
atgtcgccgggtttgttttaccgggaccaaataatcaatgtaagcgaaaccgacttgcgtttcacggaaaacgagctcagccggtatttccgccgggtcggtgtttcatttcagccggacagcctgcgcgagattatgcaggataccgaaggctgggctttcgcgatcaaccttatcgcgcggtcgtcccaaaaagcgcccggctacggcggttatgtgcgtaacgcgatgaagcagaatatcttccggcttctggaaacggaaatatgggacgggttcccggaacaaatgaagaattttctggttcgtctgtctctcattgatcatctgtctgttgacttgattatggaacttgccgccgggaacaaaggtttgatttccggaatggagaagcaaagcgcgtatatccggctggacagttatataaacgcgtacctcattcatcccctgtttcttgaattcctgactacaaaacaaacattgcttacggaagaacaaaaacatgaaacctacaaaatcgccggaaactggtgcgagaggaacggcttcaggattgacgcgctttcatattatgaaaagatacgggactatcaggcaataataaacatgtttttttatttacctcttcaggtgcctctggatttttcacgcagcgcgggggcaatactcgaccacgcgctgcctgaagaattttacaaggtggaatttttcgcggaaatgcacctgcgtacctatatgtgccaggggccgctgcanaaatcgcttgagctggtgaaatactatgaatccaaattccttgagctgccggatgataaccccataaaaaacgcacactggcgtggcttttatcagctggacttttatagcggcttatga

SEQ ID NO: 17414 - protein, 291 aa, Unknown
  Obtained from environmental sample
  misc_feature (1)..(291): Xaa is any amino acid
MSPGLFYRDQIINVSETDLRFTENELSRYFRRVGVSFQPDSLREIMQDTEGWAFAINLIARSSQKAPGYGGYVRNAMKQNIFRLLETEIWDGFPEQMKNFLVRLSLIDHLSVDLIMELAAGNKGLISGMEKQSAYIRLDSYINAYLIHPLFLEFLTTKQTLLTEEQKHETYKIAGNWCERNGFRIDALSYYEKIRDYQAIINMFFYLPLQVPLDFSRSAGAILDHALPEEFYKVEFFAEMHLRTYMCQGPLXKSLELVKYYESKFLELPDDNPIKNAHWRGFYQLDFYSGL

SEQ ID NO: 17415 - DNA, 957 bp, Unknown
  Obtained from environmental sample
  misc_feature (1)..(957): n is a, c, g, or t
ttgccgagaggaggcatgcacatagccgggtttccgcgccggactgaccaaaccctgaacgattacgccagaaaattcaacctgctcaaggaaaacgataaaaacctgtccggtgacgacgttagggaaggcctcgcggctgtcctgagcattaagatcatggatccgcagtttgagggccagactaaaacgaaactgggtaacagcgaggccaggacggcggtggaatccgtagtcagcgagcatctgacgtattttctggaagaaaaccccgccgtcggaaaaattatcatagaaaaatccctgatggcggccagggcaagggacgcggctaaaaaagcgagggaactggtcaggcgtaaatccgtgcttgacagcgggcggctgccgggcaagctggcggactgttccgaaaaggatcccaaaaaatgcgagatatacctggtggagggcaattccgccggagggtcggcaaagtccgccagaacctcaaaaacccaggcggttctgcctttgaggggcaagataatgaacgtggaaaaagcgcggctggacagggtgcttggttacgaggagatcaagaatatgatcacggccttcggcacgggcattcatgaagaatttgacatggaaaagctgcgctaccataagatcatcatcatgacggacgcggatgtggacggcctgcatattcggacgctgctgcttacttttttataccggtatatgtctcccctcattgatggcggcaagatatttatcgcccagccgcccctttataaagtggaaaaaggcaaaaatgagtattatgcctacagcgataaggaactggaacagaccctgagcgaaatcggcagggacgggataaagcctatccagcggtataaaggtcttggagagatggacgcggatcnattatgggataccaccatggaccccgcgaaancgactttataa

SEQ ID NO: 17416 - protein, 318 aa, Unknown
  Obtained from environmental sample
  DOMAIN (286)...(318): DNA gyrase B subunit, carboxyl terminus
  misc_feature (1)..(318): Xaa is any amino acid
MPRGGMHIAGFPRRTDQTLNDYARKFNLLKENDKNLSGDDVREGLAAVLSIKIMDPQFEGQTKTKLGNSEARTAVESVVSEHLTYFLEENPAVGKIIIEKSLMAARARDAAKKARELVRRKSVLDSGRLPGKLADCSEKDPKKCEIYLVEGNSAGGSAKSARTSKTQAVLPLRGKIMNVEKARLDRVLGYEEIKNMITAFGTGIHEEFDMEKLRYHKIIIMTDADVDGLHIRTLLLTFLYRYMSPLIDGGKIFIAQPPLYKVEKGKNEYYAYSDKELEQTLSEIGRDGIKPIQRYKGLGEMDADXLWDTTMDPAKXTL

SEQ ID NO: 17417 - DNA, 396 bp, Unknown
  Obtained from environmental sample
  misc_feature (1)..(396): n is a, c, g, or t
gtgttcgacgacccgataaaggctgaaatctgggcgatggtgaacgccatgaacgatgcttggatcaaaggcgaacctgaccgtttggtcaactacttccacgcggacatggtggccgtcacgcccgttgcgcgtcaccgcctagatggcggtcccgcctgcgtggaggggtggaagtcctttgtggagaagaccacggaaatctactacatgagaatcatctaccccgtaatccacgtctatggcgatgcggccgtggtcgcctacgactacgacatagccttcgatgtgggcggagaggagttcaaggcgttggggcgcgacctcctgtatgtggcgaaggaaaacggccgctggtgggtggttgccgaccagtactcgccttatccgtcgtga

SEQ ID NO: 17418 - protein, 131 aa, Unknown
  Obtained from environmental sample
  DOMAIN (6)...(130): Calcium/calmodulin dependent protein kinase II Association
  misc_feature (1)..(131): Xaa is any amino acid
MFDDPIKAEIWAMVNAMNDAWIKGEPDRLVNYFHADMVAVTPVARHRLDGGPACVEGWKSFVEKTTEIYYMRIIYPVIHVYGDAAVVAYDYDIAFDVGGEEFKALGRDLLYVAKENGRWWVVADQYSPYPS

SEQ ID NO: 17419 - DNA, 885 bp, Unknown
  Obtained from environmental sample
  misc_feature (1)..(885): n is a, c, g, or t
gtggcatcgggcatcctgcgcaaataccagatgcaggttgacgttttaaacaacgggccggccgccattgaccggatacgcgagggaaagcccgtatacaacgccatattcatggaccacatgatgcccggtatggacggcatagaaacagtggataatatccgcgcccttgacacggaatacgcgaaaaagattcccattatcgcgcttacagctaacgccatacagggaaccgacaagatgtttttcgcgcatgattttcaggcgtttattaccaagcccattgatataatggagatggattctattcttagaaaatgggtgtatgacagcaaacgcgcggatgaatctgtttcaaacgggcctgtcacaggcgactcttccgaagatgagaatgaaaatatagtgatagaaattcccggagtggatacgaaaaaaggacttgatctgtacgccggcgagacggatatttatctgcccctgctgcgatcctatgccgccaacacgccggcggctttaaacaaactgagttctgtttcggcgcagaatttgtctgactatgttataaccgtacacgggttaaaaggcaccagcgccggaataggggcggaacaaatacgcgcggcggctctggaactggaaaacaagtcaagagcaggcgacttgcggggtgttttagagaaaaacggcaaactaattgccgatactgaagttatcgtagcgaatataaacgcgtggctgcgggagtatgactccaaaaatgctaaaccgcgcctgaaagcccccgataaggatcttctggccaggttgaaggaatactgcgataattacgatatgagcggcatagacgaagccatttgcgaacttgaaagaacgatacgatga

SEQ ID NO: 17420 - protein, 294 aa, Unknown
  Obtained from environmental sample
  DOMAIN (160)...(235): Hpt domain
  misc_feature (1)..(294): Xaa is any amino acid
MASGILRKYQMQVDVLNNGPAAIDRIREGKPVYNAIFMDHMMPGMDGIETVDNIRALDTEYAKKIPIIALTANAIQGTDKMFFAHDFQAFITKPIDIMEMDSILRKWVYDSKRADESVSNGPVTGDSSEDENENIVIEIPGVDTKKGLDLYAGETDIYLPLLRSYAANTPAALNKLSSVSAQNLSDYVITVHGLKGTSAGIGAEQIRAAALELENKSRAGDLRGVLEKNGKLIADTEVIVANINAWLREYDSKNAKPRLKAPDKDLLARLKEYCDNYDMSGIDEAICELERTIR

SEQ ID NO: 17421 - DNA, 813 bp, Unknown
  Obtained from environmental sample
  misc_feature (1)..(813): n is a, c, g, or t
gtgatcgcggcggcgatgcgttgtttatctgataccgatattatactcagcgacggcgccggcggccaaaacacctccggcgggaaagggcttcttttccgctccggcggcgtcaacgccgacgccggcctcccccgcggcgccaacgtcaaccacgcacggcaagataaacgccgtcctcacccgcttcggcgaggagggctaccgtgcgccgccggagatggtcgagcgcgtcgaacactacctaaggctataccaaggctccatgcgcggcactatcgcgctttggctggaacgctcccggcgctacctcccgatgatccgtaccgtattctccgaaaaaaacattccgctcgaactcgcctacgtctctatgctcgagagcggcttcaacacggcggcggtctctcacgcgggcgcggcgggtatgtggcagttcatgccgaacaccgcccgacactacggactgcgcgtcggggacggcgtcgacgagcgcaacgacccggaaaaggccacccgcgccgccgccgcctacttcaaagacctcatagcgatcttcggctcgcgcagctccgtgctactctgcatggccgcctacaacgccggcgaacaacgcgtgataaaagccctcaaacgcatagacgaccccgtgcgcgaccgcgacttctggcacctgtaccgcatgggctggctcgcccaagagacaaacgagtatataccgcaggttatcgcgctgataataatttcggacaatccggaggagtatgggttcaaacattagcagtatcaacggtattaataattaacttttaa

SEQ ID NO: 17422 - protein, 270 aa, Unknown
  Obtained from environmental sample
  misc_feature (1)..(270): Xaa is any amino acid
MIAAAMRCLSDTDIILSDGAGGQNTSGGKGLLFRSGGVNADAGLPRGANVNHARQDKRRPHPLRRGGLPCAAGDGRARRTLPKAIPRLHARHYRALAGTLPALPPDDPYRILRKKHSARTRLRLYARERLQHGGGLSRGRGGYVAVHAEHRPTLRTARRGRRRRAQRPGKGHPRRRRLLQRPHSDLRLAQLRATLHGRLQRRRTTRDKSPQTHRRPRARPRLLAPVPHGLARPRDKRVYTAGYRADNNFGQSGGVWVQTLAVSTVLIINF

SEQ ID NO: 17423 - DNA, 561 bp, Unknown
  Obtained from environmental sample
  misc_feature (1)..(561): n is a, c, g, or t
atggtcgagcgcgtcgaacactacctaaggctataccaaggctccatgcgcggcactatcgcgctttggctggaacgctcccggcgctacctcccgatgatccgtaccgtattctccgaaaaaaacattccgctcgaactcgcctacgtctctatgctcgagagcggcttcaacacggcggcggtctctcacgcgggcgcggcgggtatgtggcagttcatgccgaacaccgcccgacactacggactgcgcgtcggggacggcgtcgacgagcgcaacgacccggaaaaggccacccgcgccgccgccgcctacttcaaagacctcatagcgatcttcggctcgcgcagctccgtgctactctgcatggccgcctacaacgccggcgaacaacgcgtgataaaagccctcaaacgcatagacgaccccgtgcgcgaccgcgacttctggcacctgtaccgcatgggctggctcgcccaagagacaaacgagtatataccgcaggttatcgcgctgataataatttcggacaatccggaggagtatgggttcaaacattag

SEQ ID NO: 17424 - protein, 186 aa, Unknown
  Obtained from environmental sample
  DOMAIN (32)...(149): Transglycosylase SLT domain
  misc_feature (1)..(186): Xaa is any amino acid
MVERVEHYLRLYQGSMRGTIALWLERSRRYLPMIRTVFSEKNIPLELAYVSMLESGFNTAAVSHAGAAGMWQFMPNTARHYGLRVGDGVDERNDPEKATRAAAAYFKDLIAIFGSRSSVLLCMAAYNAGEQRVIKALKRIDDPVRDRDFWHLYRMGWLAQETNEYIPQVIALIIISDNPEEYGFKH

SEQ ID NO: 17425 - DNA, 867 bp, Unknown
  Obtained from environmental sample
  misc_feature (1)..(867): n is a, c, g, or t
atgggaaggcggacaatgcccaaaaacattgattccgtttcatcgggaaaataccgcaatcttccgaccgtagtccttgtaggccgcccgaatgtggggaaatccacgctttttaaccgcctgctgcgcaagcgcaggaccatcaccgacccgacgccgggcgttacccgcgaccccatagaagcggacgcccttatcaacggcaaaccggtcaggctcattgacaccgggggctttaagcttgatcgcctgacgggaaacaaaaaaactgaaaacagcaacaacattgacgatcttgtagtcgggaaaaccctgtccacgattgagaaagccgacctcatcgtactgcttctggaagcgggcgaaataaccagcgaggacgaggaattcataaaggtactgcggccttaccgtgagcggcttattgtcgcggtcaacaagaccgagggaggcaggcgggaggcggacgcgtggaacctgctgtcttatggatttgaaaaagtctttatgatctccgccgagcacggcgacaatatagccgggcttagcgaagagatcgttaacaggattgatttttccggggtcgccgctttagcgggcggggaagaagaaaatactcaccgccctattcgcataacgatcctggggaaacccaatacgggcaagtccacattatccaacaggctcacgtcgtctaacgcttccattgtcagcgacattcccggcaccacgcgcgatgtaattgagggaagctttcgctggaaatcccgcgattttaccatcctcgacacggccggcatccgccgcagaaccaaagtaaacgaaaatatcgaatattactcggtgaaccgcgccataaaaccatga

SEQ ID NO: 17426 - protein, 288 aa, Unknown
  Obtained from environmental sample
  DOMAIN (22)...(196): AIG1 family
  misc_feature (1)..(288): Xaa is any amino acid
MGRRTMPKNIDSVSSGKYRNLPTVVLVGRPNVGKSTLFNRLLRKRRTITDPTPGVTRDPIEADALINGKPVRLIDTGGFKLDRLTGNKKTENSNNIDDLVVGKTLSTIEKADLIVLLLEAGEITSEDEEFIKVLRPYRERLIVAVNKTEGGRREADAWNLLSYGFEKVFMISAEHGDNIAGLSEEIVNRIDFSGVAALAGGEEENTHRPIRITILGKPNTGKSTLSNRLTSSNASIVSDIPGTTRDVIEGSFRWKSRDFTILDTAGIRRRTKVNENIEYYSVNRAIKP

SEQ ID NO: 17427 - DNA, 768 bp, Unknown
  Obtained from environmental sample
  misc_feature (1)..(768): n is a, c, g, or t
ttggatttccccgatgatggggcgattgaccagaagggtaactatgtgtactccatacccgccctggagcagaaaggacgaccggggctgaattgtccggttttgcccaaatggctggtggacggcatactcagaccgatcaccggcgagaggctggaaatacccccgttgaaagaaccctatgggaacgggggatcgtcatttactgatatatgggagaaacagagggataccttcttcgggcttgactggatacggaaccttgcgtctaccgtgtggtcaaaactgctttcgccggctttcggaaaccttgacgaaatagaagtgcgcggcgatcgtttttcccagctaaccctcagaaccagaaacaataaaactgaatattcctatccgggttttctggaaaacgccggatacggagtcgaggggttgctgcccctgctctatacgctggctattgacgagccgggcaagttctaccttgccgcggtaaacaacgagacaggcccgccggcaactgaggataatcccagaggcccgccccggatgcgtcaatatttccatatagtggcgtttgtcccttactttagcgaaagccgcgtcttccacgtcgccgtgtttgaaagcgcggcggaaacatccatcggcgacttcagaaaccgttatccgctcagcgaaaaaacagttgacggggagaagagactcttccccaacgggcactacgtcaatctggtgcgcatccccgtagaagcggcatttgaaccctaa

SEQ ID NO: 17428 - protein, 255 aa, Unknown
  Obtained from environmental sample
  misc_feature (1)..(255): Xaa is any amino acid
MDFPDDGAIDQKGNYVYSIPALEQKGRPGLNCPVLPKWLVDGILRPITGERLEIPPLKEPYGNGGSSFTDIWEKQRDTFFGLDWIRNLASTVWSKLLSPAFGNLDEIEVRGDRFSQLTLRTRNNKTEYSYPGFLENAGYGVEGLLPLLYTLAIDEPGKFYLAAVNNETGPPATEDNPRGPPRMRQYFHIVAFVPYFSESRVFHVAVFESAAETSIGDFRNRYPLSEKTVDGEKRLFPNGHYVNLVRIPVEAAFEP

SEQ ID NO: 17429 - DNA, 900 bp, Unknown
  Obtained from environmental sample
  misc_feature (1)..(900): n is a, c, g, or t
ttgnnnnngggttatcgcgaccgaagaacgcccggtttcataatgggcgttgagcctgattacatcatcgcgcggaactataggatcaatgccggagtcttttttgatgaagatgatttgagtaaccgcagtatggtggcggttttggggccaaccacggcaaataacttgtttggcaacgctgaaagtgcgctgtcacagagaatacgaatagggacaaattattttaccgtcattgggattttggagagcaaaggcgcaggcatgggcatgggcggcggcaatcaggatgatattgtcatgattcccctggacacggcaatgaccagactgagcaatactcaaagtatatcccaaattgtaatgagcgtaaaaagcaaagaatacatggacgcagcacagaaagaggcaatagcgatactgtgcgaatccaggaaaatcgccgatacagcaaacgccgattttgacattatgaaccaggctgacatgatcgacatggcatcggcaactatgaaaacactgacaacgctgcttgccgcgattgccggggtatcgcttttggtaggcggcatcggcatcatgaacatcatgctggtttccgtaaccgaacgtacgcgcgagatcggaattagaatggcaataggcggtcgcaaacgggatatactttttcagttccttaacgaatcggtgatcttaagccttatgggaggcctgcttggcataggtatagccttccttgcctgccgtgtactgtctgtaatgggaataccagcggcaatcaatccgcttattgtggctatatccactatttttgcagcgcttgtaggagttgtttttggctattaccccgcaatgaaagcggcacggctgtacccgatagacgcgctaaggtacgaataa

SEQ ID NO: 17430 - protein, 299 aa, Unknown
  Obtained from environmental sample
  DOMAIN (117)...(292): Predicted permease
  misc_feature (1)..(299): Xaa is any amino acid
MXXGYRDRRTPGFIMGVEPDYIIARNYRINAGVFFDEDDLSNRSMVAVLGPTTANNLFGNAESALSQRIRIGTNYFTVIGILESKGAGMGMGGGNQDDIVMIPLDTAMTRLSNTQSISQIVMSVKSKEYMDAAQKEAIAILCESRKIADTANADFDIMNQADMIDMASATMKTLTTLLAAIAGVSLLVGGIGIMNIMLVSVTERTREIGIRMAIGGRKRDILFQFLNESVILSLMGGLLGIGIAFLACRVLSVMGIPAAINPLIVAISTIFAALVGVVFGYYPAMKAARLYPIDALRYE

SEQ ID NO: 17431 - DNA, 855 bp, Unknown
  Obtained from environmental sample
  misc_feature (1)..(855): n is a, c, g, or t
atggttcctcaggtaacctaccaaacattgatagaacatgacatagtcaatcaggttgttatacagcggcttcctcccgaagttatccacgatacgatcataaaagaggttgaaaaagatgtgccggtttatatcttccagacgattatagagaaagttcctgaaattgtttatgttactattacaaataatacagactatatgacaattaacaatacaataaatgataacgccaaagaaactgttcccgatcccactgaagaagatattattaaatatattaaagagcataccgataatgttctgaatataataaaagataacctcaactggaaggatatcttaaaagaaattatacagaatattcctcccgaagagcttataacatatcttactgatgatcagattaaatatatcatacaacagcagcctccccagataattctgcagaccatagatattattgatattgaatatattatttttgcgggtaatgcgataatttataatgggccccacgtgacgggagcgaatacagatcttactactcaggaaaaaagctccaatgatgcgacaatcgccgctatggctcaatccctcaaggatcatcccgactatttgatgattttacatggtcatgccaatcctacttcttccagcccgtctgaagttgaagatttgatgactataagcaaggctcgggcagacgcggtaaatgcggtgcttaaaaccaagttttcgcagcttggcggggatgtaaccggctgggacacgcgggtatccgccaaaggctacggcggagaaaaaaatcttacggtaactgattccacgtattccgggcttaaccgcgcgtag

SEQ ID NO: 17432 - protein, 284 aa, Unknown
  Obtained from environmental sample
  misc_feature (1)..(284): Xaa is any amino acid
MVPQVTYQTLIEHDIVNQVVIQRLPPEVIHDTIIKEVEKDVPVYIFQTIIEKVPEIVYVTITNNTDYMTINNTINDNAKETVPDPTEEDIIKYIKEHTDNVLNIIKDNLNWKDILKEIIQNIPPEELITYLTDDQIKYIIQQQPPQIILQTIDIIDIEYIIFAGNAIIYNGPHVTGANTDLTTQEKSSNDATIAAMAQSLKDHPDYLMILHGHANPTSSSPSEVEDLMTISKARADAVNAVLKTKFSQLGGDVTGWDTRVSAKGYGGEKNLTVTDSTYSGLNRA

SEQ ID NO: 17433 - DNA, 630 bp, Unknown
  Obtained from environmental sample
  misc_feature (1)..(630): n is a, c, g, or t
atggtatgggcgtataatcccggaaaaaacaacaagaacagcgttcccgattcctttaatgattttgcaaataacgcaagcgtaaaaggcgctctatctataagtaatcctcttacatcaggaaccaccctgtcggcgcttgccgcccttaaagataaatacggttatggttattttgacgctctgggcagacaaaatgtcaaaattgattccggcgcggcggctatcgcaaaactggaaaccggagaatacaaagtgatcatggttctggaagaatcaatattgaaaaaacggatggaagaaaaatccaaactggaagtaatttatcccgcagacggaaccatcatcattccttctaccattatgatcatcgcggataaatggagcgcccacaacaatactaaaaccgccgaattaataaccgactggttcctcggcccggcggggcaaaaagccattgttgccggctggatgcatccggtgagaaaagattttgacgcaattcccttcgactcgattcctaccggcgaaattcaagctaacgctctaccgctgaattgggaaaatgctttccgccagaagaatgaaatcctgagcaaatttgaaggatccgtaaccaacaaaaaatag

SEQ ID NO: 17434 - protein, 209 aa, Unknown
  Obtained from environmental sample
  misc_feature (1)..(209): Xaa is any amino acid
MVWAYNPGKNNKNSVPDSFNDFANNASVKGALSISNPLTSGTTLSALAALKDKYGYGYFDALGRQNVKIDSGAAAIAKLETGEYKVIMVLEESILKKRMEEKSKLEVIYPADGTIIIPSTIMIIADKWSAHNNTKTAELITDWFLGPAGQKAIVAGWMHPVRKDFDAIPFDSIPTGEIQANALPLNWENAFRQKNEILSKFEGSVTNKK

SEQ ID NO: 17435 - DNA, 561 bp, Unknown
  Obtained from environmental sample
  misc_feature (1)..(561): n is a, c, g, or t
gtgaagaaggtgcccggcttcggcgataaaaagttcanaatgtcggcgggctttctgcgtataccggcgggcaaaaacccgcttgacaactccgccgtccacccggagtcntacggcatagtgaaaaaaatggcggagaggctaagcgtggatataggcggcctcgtgggaaataaggcgctgcttaccggtataaacaaggccgagttcgtgacggatgaggcgggcctgcccacgataaccgacatcgtggaggaactggagaaaccgggccgcgacccaagagaagagttcaagtacgctaagttcgacgaaaacgtgacggagatagcgcacttgcgtgagggaatgattttagaaggcgtagtgacaaacgtggccaacttcggcgccttcgtagacataggcgtccaccacgacggcttggttcacatatcggagttgtcgaatacctatgtcacggatcctaaaaaagtagtcaaagtcggtcaggcggtgcgagtaaaagttctgaaaatagacgcggaggcgaagagaattgcgctatctatgaaattatga

SEQ ID NO: 17436 - protein, 186 aa, Unknown
  Obtained from environmental sample
  DOMAIN (112)...(185): S1 RNA binding domain
  misc_feature (1)..(186): Xaa is any amino acid
MKKVPGFGDKKFXMSAGFLRIPAGKNPLDNSAVHPESYGIVKKMAERLSVDIGGLVGNKALLTGINKAEFVTDEAGLPTITDIVEELEKPGRDPREEFKYAKFDENVTEIAHLREGMILEGVVTNVANFGAFVDIGVHHDGLVHISELSNTYVTDPKKVVKVGQAVRVKVLKIDAEAKRIALSMKL

SEQ ID NO: 17437 - DNA, 522 bp, Unknown
  Obtained from environmental sample
  misc_feature (1)..(522): n is a, c, g, or t
ttggagattgttatggcagaagaattgcaacatttgatagataaaatcaaaaccgaagccgtggataaggctgaggcggaggcttctcgcatattggcggaggcaaaggctaaagcggctcaaatagtgaaagaagcggaggcaaatgccgcatctaaactcgaaaaagccgataaagattcgcaggcttacgcagagcgcagcgaaaagacccttgcacaggcggctcgagacgttgtgcttgctgtttctcagggagttgagaaatccgtgcttggggtgttagctctaaatgtggaaaagtctttgacaccagagcttatgcaaaaattgctcttaacgcttgcaagcggctatgcaggcaagcaggcaacggtttcgctttcagaagaagattcaaaaaagctagcctcgttcgtaaccggagaattccaaaaaaagctaggagcaggggttactgtccaaagcgacagcggaattttcgcagggtttaggctttcttttgaaaagcggcaaagttag

SEQ ID NO: 17438 - protein, 173 aa, Unknown
  Obtained from environmental sample
  misc_feature (1)..(173): Xaa is any amino acid
MEIVMAEELQHLIDKIKTEAVDKAEAEASRILAEAKAKAAQIVKEAEANAASKLEKADKDSQAYAERSEKTLAQAARDVVLAVSQGVEKSVLGVLALNVEKSLTPELMQKLLLTLASGYAGKQATVSLSEEDSKKLASFVTGEFQKKLGAGVTVQSDSGIFAGFRLSFEKRQS

SEQ ID NO: 17439 - DNA, 420 bp, Unknown
  Obtained from environmental sample
  misc_feature (1)..(420): n is a, c, g, or t
atgagcgaaatagaaaacttactgccgcaccgggttccgtttctttttgttgatgaaattgtagaagcaagcaatgaaagaattgtggcaaagcatgtgttcacagaaaatgaatttttctttaaaggacatttcccagaataccccgtagtaccgggtgttattcttgttgaaacaatggctcagtcaggcggagcgggactgcgtaaaatcggcgctctcagcgcggacgggctgttcttttttgcaactgtagacaaggtaaaattccgccgtcaggttcgcccgggtgatgagcttcgttcggaaattgtaaacttgcgtgtttccgcgaagatgataaaacaatcgggaaaggcttatgtcggcgatgaacttgccgctgaagccgagtggatgtgtcttgtaggtaacaaataa

SEQ ID NO: 17440 - protein, 139 aa, Unknown
  Obtained from environmental sample
  DOMAIN (8)...(131): FabA-like domain
  misc_feature (1)..(139): Xaa is any amino acid
MSEIENLLPHRVPFLFVDEIVEASNERIVAKHVFTENEFFFKGHFPEYPVVPGVILVETMAQSGGAGLRKIGALSADGLFFFATVDKVKFRRQVRPGDELRSEIVNLRVSAKMIKQSGKAYVGDELAAEAEWMCLVGNK

SEQ ID NO: 17441 - DNA, 828 bp, Unknown
  Obtained from environmental sample
  misc_feature (1)..(828): n is a, c, g, or t
atggaaaagaccgttggtaaagaacatcccgcttatgcgacggcggtaaacaatctgggattgctgtatttcggaatgggcgattacgccaaagcggaaaattattatttggaggctaaagccgtctgggaaaaggcgcttggtaaaaaacatccttcttatgccttatcattggataatttatattgcttgtatttgactaaaaaagaatattccaaagcgttcgcgtataaacaggaacagataaaaacaaataccgatcttgtaaataaaaatttctctttccaaacggagcggcagcgtaattcttattggaacgccaactcctattccttcgagttatcttattccctgtctctctacaaccccgttcctgcaagcaatatcctcaactacgacaacgccctcttttcaaagggactgctgctccgcaccgtcaacgccgtgcgggacgctgtctacgcttcaggcaacagagccctcatcaggcaatttgaagaacttggccttttacgccaacaaataaacgcattgcgtcaaaaggaaggaaacagcgaagcgtatattcaaagccttgaaacaaaagcggaagcccttgataaatcccttacccagtcatccgccgctttcagggaattacaggcggatttggccgtcaactggcagagcgtgcgggaaaaactgcaaagaaatgaagcggcggttgaattcgtcagttttcaggtttatgacaaaaaatggacaaacaagctccagtacgccgcgctgctcgtaaaaccgagcatgaacgcgcccgcctgggttcccctgtgcgatgaggaagcgtga

SEQ ID NO: 17442 - protein, 275 aa, Unknown
  Obtained from environmental sample
  DOMAIN (13)...(46): Tetratricopeptide repeat
  misc_feature (1)..(275): Xaa is any amino acid
MEKTVGKEHPAYATAVNNLGLLYFGMGDYAKAENYYLEAKAVWEKALGKKHPSYALSLDNLYCLYLTKKEYSKAFAYKQEQIKTNTDLVNKNFSFQTERQRNSYWNANSYSFELSYSLSLYNPVPASNILNYDNALFSKGLLLRTVNAVRDAVYASGNRALIRQFEELGLLRQQINALRQKEGNSEAYIQSLETKAEALDKSLTQSSAAFRELQADLAVNWQSVREKLQRNEAAVEFVSFQVYDKKWTNKLQYAALLVKPSMNAPAWVPLCDEEA

SEQ ID NO: 17443 - DNA, 615 bp, Unknown
  Obtained from environmental sample
  misc_feature (1)..(615): n is a, c, g, or t
gtggaatggaaaaacgaagacgtaaatcccgatccggtgctgttaaaatccgacggctttcctacctaccacctcgccaacgtggtggacgatcactttatgggtataacccacattctgagggcgcaggaatggctcccctccgttccccttcacgttatcatgtacaacagttttggctgggaaccgcccgctttctgccatctcccgatggtcatgggccaggacggaaaaaagctttccaaacgccacggttccaccggaattgacgaattcagaaagcagggctgcctgcccgaagcactgattaactacatagccctggtgggctgttcctatgaagagggaaaagacatttacacgctggaagagctggcgcagcgcttcagcctggaaaaacttgccaaggccccggcaatcttcgactacaaaaagctggaatggtttaacggccagtatatcagacgtaaaaccaacacggaacttgcggccctttccctgcccctggctattgaacaggggctttttggaagcccgtcccanaaacccgatcccgcccaggaaactctttacattgccgccatgccgctggtaaagaacgcgcggtatttttga

SEQ ID NO: 17444 - protein, 204 aa, Unknown
  Obtained from environmental sample
  DOMAIN (1)...(148): tRNA synthetases class I (E and Q), catalytic domain
  misc_feature (1)..(204): Xaa is any amino acid
MEWKNEDVNPDPVLLKSDGFPTYHLANVVDDHFMGITHILRAQEWLPSVPLHVIMYNSFGWEPPAFCHLPMVMGQDGKKLSKRHGSTGIDEFRKQGCLPEALINYIALVGCSYEEGKDIYTLEELAQRFSLEKLAKAPAIFDYKKLEWFNGQYIRRKTNTELAALSLPLAIEQGLFGSPSXKPDPAQETLYIAAMPLVKNARYF

SEQ ID NO: 17445 - DNA, 969 bp, Unknown
  Obtained from environmental sample
  misc_feature (1)..(969): n is a, c, g, or t
atgcgagccctttacctaagcccgtgcttatacactatttccatgggcatggctgtagctttgcttggttttcagataaaaaaatggaaaggcggatacaggaagcagcttctaaccatacttctatttttgcttgtccccctggtgattgatgttattttttatgtgagcgtaataacaggaataaacaagtaccagatttattttacatctccctcgctggcaatcatgaatttctttctgtttcacgaggttatgaagcctaatgtttttgaaattatttctgtggctactgaaaccgctatggagtacatcaaagaaggcttcatcctggtggatataaacaataatttcttgttgtccaatcctgccgcggcagaaatactgccggggctctttttacttatgaaggggaactccatattttctacccttggctggccggccgagctgaaggatttgggaagagatacggtagaattctctatagatggcgaaaaagacgacaaaaatgccagatatttcagggctagtataggtccggtgtacgctaagaatagagcccaagtggccaggattattcttttggcggagattactgacagtgtgaaattaatgaaagaattggagaatgcggcctatatagacggccttactggcctttataaccggaaacatttttctgaacttgtaaacgcggatgtagaaagggcgcagaggcttgatcaaacagtttataccgccatgctggatctggatttttttaagagagtaaatgatacctatgggcatcttgccggggatatggtattaaagaccacagcgggagttatccggcagacaatcagggcctatgatcttttgtgccgttacggaggcgaagaatttgcctttttgattttagacctggacaccattgatgcttttaatctggtggaaagatccggnaaaatgttgaatcggcagtaa

SEQ ID NO: 17446 - protein, 322 aa, Unknown
  Obtained from environmental sample
  SIGNAL (1)...(20)
  DOMAIN (209)...(321): GGDEF domain
  misc_feature (1)..(322): Xaa is any amino acid
MRALYLSPCLYTISMGMAVALLGFQIKKWKGGYRKQLLTILLFLLVPLVIDVIFYVSVITGINKYQIYFTSPSLAIMNFFLFHEVMKPNVFEIISVATETAMEYIKEGFILVDINNNFLLSNPAAAEILPGLFLLMKGNSIFSTLGWPAELKDLGRDTVEFSIDGEKDDKNARYFRASIGPVYAKNRAQVARIILLAEITDSVKLMKELENAAYIDGLTGLYNRKHFSELVNADVERAQRLDQTVYTAMLDLDFFKRVNDTYGHLAGDMVLKTTAGVIRQTIRAYDLLCRYGGEEFAFLILDLDTIDAFNLVERSGKMLNRQ

SEQ ID NO: 17447 - DNA, 909 bp, Unknown
  Obtained from environmental sample
  misc_feature (1)..(909): n is a, c, g, or t
gtgctaggtaaggacattaccggagaggcggttacggttgacctcgtacagatgccgcatctactaatagcgggagccacaggagctggaaaatccgtgtgcgtaaattccatgatcctgacgctattgtatcaaaagtccccggcggaatgcaggcttatcctgatcgatcccaagatcgtggaattaaaactttacaacgacattcctcatcttcttacgcctgtgattacagagcctaaaaaagctttccaagccctgcaatactgtatttatgaaatggaacggcgctatagctgcctggactcaatgggagtcagggacattaggagctataacaagcgcatcgtggaaagggaaatcgctgcggaatacatgccctatatagtggttgtaattgacgagttcgcggatctgatggcaaccacgggaaaagagctggaaagcaccgtggcgcggcttgcagcgatgagccgggcggtgggcatacacctggtactggccacacagcgtccctcgattgatataataacggggcttataaaggcaaatatacccagccgcatcgcttttatggtggccagcaaaatggacagcaggatcataatcgacatggtgggagcggaaaaacttttgggaaagggtgatatgctttacgccggcgcggtggatccgttcccggtacgtatgcagggagcctttgtctctgaagaagaagtcgagagggttgtcgattacgttaagggcctcggcgagcctgattacatcgacgatgaaatattttacgacgaggaagaagaagacgccgatccgtcccttttctccgaaggcgatgatccgctttatgaaaagctttggaaatgtcatgcagcaggnaagagccagcgcagttatttcagcggcggctga

SEQ ID NO: 17448 - protein, 302 aa, Unknown
  Obtained from environmental sample
  DOMAIN (2)...(174): FtsK/SpoIIIE family
  misc_feature (1)..(302): Xaa is any amino acid
MLGKDITGEAVTVDLVQMPHLLIAGATGAGKSVCVNSMILTLLYQKSPAECRLILIDPKIVELKLYNDIPHLLTPVITEPKKAFQALQYCIYEMERRYSCLDSMGVRDIRSYNKRIVEREIAAEYMPYIVVVIDEFADLMATTGKELESTVARLAAMSRAVGIHLVLATQRPSIDIITGLIKANIPSRIAFMVASKMDSRIIIDMVGAEKLLGKGDMLYAGAVDPFPVRMQGAFVSEEEVERVVDYVKGLGEPDYIDDEIFYDEEEEDADPSLFSEGDDPLYEKLWKCHAAGKSQRSYFSGG

SEQ ID NO: 17449 - DNA, 600 bp, Unknown
  Obtained from environmental sample
  misc_feature (1)..(600): n is a, c, g, or t
atggatataaaaatcgccggagtcagtcaggaaattatgcgtaaagcgctggatcaggcgaaacgcggaagaatgcatatcctttcgataatgaatcaatgtctggataaacccgttgaggaaatcagcgaatacgctccgaagattgtcaccttacggattgatatcgataaaatcggcgctcttatcggtcccggcggaaagaatatcaaggcgttatgcgaacaatattctgttaagattaacacggaagacgacggcactgtgacgattttcggcaaaacttcaaaagacgcggaagacgctaaagcggcggttgtcggaatagcctgcgatccggagattgacaaggtatacaacggcactgtaaagcgcataatggactttggcgcgtttgtggagattctccccggtaaggaaggacttgtccacataagcaaactttcaaggcagaggatcgagaaagttaccgacgtgttaaaggaaggtcagcagatacccgttaaattgcttgaaattgacaaacagggtcgtctcaatctttcgtacatagacgcgattgatccctcgggcgctcccggcggtcaacgcaagaattaa

SEQ ID NO: 17450 - protein, 199 aa, Unknown
  Obtained from environmental sample
  DOMAIN (49)...(106): KH domain
  misc_feature (1)..(199): Xaa is any amino acid
MDIKIAGVSQEIMRKALDQAKRGRMHILSIMNQCLDKPVEEISEYAPKIVTLRIDIDKIGALIGPGGKNIKALCEQYSVKINTEDDGTVTIFGKTSKDAEDAKAAVVGIACDPEIDKVYNGTVKRIMDFGAFVEILPGKEGLVHISKLSRQRIEKVTDVLKEGQQIPVKLLEIDKQGRLNLSYIDAIDPSGAPGGQRKN

SEQ ID NO: 17451 - DNA, 489 bp, Unknown
  Obtained from environmental sample
  misc_feature (1)..(489): n is a, c, g, or t
ttgtgttccaagggaggatttcaggtgttacaaacacagtctatcggaaagccccttttggatctcctgaaacatctgcaaaaagatgagacattttcaaattactttcttgttggcggtactgcattggcgttacagcttgggcatagaatatcaaacgacattgatctgtttacgaggggtgatataaacaaagatgaaatatttgggtttttgaacagagaatttaacggaaactatcagatacacaatatacaaaacagtattttgcagataagcattaatgatattaaggttgatttcgtaaaatataattatactttgcttgaagacataaaatcagaagacggaataaaatatttggggaaaaaagatatttccgcaatgaagcttatggctgttgcaaatagaggcgatcaggcaaaggattttgttgacatttattatttattaaaagaaataagtttaagggatatgttgattacataa

SEQ ID NO: 17452 - protein, 162 aa, Unknown
  Obtained from environmental sample
  misc_feature (1)..(162): Xaa is any amino acid
MCSKGGFQVLQTQSIGKPLLDLLKHLQKDETFSNYFLVGGTALALQLGHRISNDIDLFTRGDINKDEIFGFLNREFNGNYQIHNIQNSILQISINDIKVDFVKYNYTLLEDIKSEDGIKYLGKKDISAMKLMAVANRGDQAKDFVDIYYLLKEISLRDMLIT

SEQ ID NO: 17453 - DNA, 594 bp, Unknown
  Obtained from environmental sample
  misc_feature (1)..(594): n is a, c, g, or t
atgagcgatttgatagaaaaaaagacggctacacgtggagtgcacaccaggcgtgtaagcgaatatgtcgctattttgctaagggaattggcccgccgcggctatcaatttaccgaatcggaaattcaaagaatagcggaatcttcccttctgcatgatatgggcaaaatcgcggtacctgacagtatccttcttaaaaacggggagttagacgatgacgagtttggcgtaatgaaaagccacagcacgaaaggggcggattccctggaaaaatcaatgcagtttgcgaaggataacgactttttgaaaaacgcgtttgtaatggccaagcaccaccatgaaaagtggaacggctcaggctatcctgacggaaaaaaggaaacggagataccgcttcttgcccgtgtaatcgccattgccgatgtgtatgacgcgctgcgttcggaacgctcgtataaaacgccgttcagccatgaaaaggcaaaatcaatcatattggaagaaaccggacagcaattcgatcccgaactggtagatgcttttctggcggtagagtctatgtttgacgagttttgtaaatctactcaatcctga

SEQ ID NO: 17454 - protein, 197 aa, Unknown
  Obtained from environmental sample
  DOMAIN (12)...(146): HD domain
  misc_feature (1)..(197): Xaa is any amino acid
MSDLIEKKTATRGVHTRRVSEYVAILLRELARRGYQFTESEIQRIAESSLLHDMGKIAVPDSILLKNGELDDDEFGVMKSHSTKGADSLEKSMQFAKDNDFLKNAFVMAKHHHEKWNGSGYPDGKKETEIPLLARVIAIADVYDALRSERSYKTPFSHEKAKSIILEETGQQFDPELVDAFLAVESMFDEFCKSTQS

SEQ ID NO: 17455 - DNA, 699 bp, Unknown
  Obtained from environmental sample
  misc_feature (1)..(699): n is a, c, g, or t
atggtggagttctcaagccctaataccaacaaacccctgcatctgggacacttacgtaacgatgttcttggcgagagcgtatcacgaattctaaaatcgtgcggcgccgatgttcgaaaagtttgtattatcaacgacaggggcattcatatttgcaagtctatgctcgcctatattgaacacggacatggaaaaactccgcagtcggaaaacgttaaaagcgaccgttttgtcggcgactggtacgtttgtttcagcaaagagttaaaagaggaagttgacgagctggtaaaaaaaggcgttaaaaaagaagaagcggaagcgcgggcgccgttaatgaaaaaagcgcaggagttgctgcgcaaatgggaagcgcaggacggcgagacaatagagctttggaaaaaaatgaacagttgggccatagaaggaatgaaaaaaacttatgagagaacgggagtttcttttgataaatactattttgagagtgaaacctatatgcttggcaaggatgaggttcttaaaggccttgaaaagggaatatttttccgccaggaagacggctctgtagcggtggatttaagcggcgaaaatttagataaaaagattttattaagaagcgacgggacttcaatttatattacgcaggatttcgggacggcgattaacaggcacaaagactggccgtttgataaatga

SEQ ID NO: 17456 - protein, 232 aa, Unknown
  Obtained from environmental sample
  DOMAIN (1)...(228): tRNA synthetases class I (R)
  misc_feature (1)..(232): Xaa is any amino acid
MVEFSSPNTNKPLHLGHLRNDVLGESVSRILKSCGADVRKVCIINDRGIHICKSMLAYIEHGHGKTPQSENVKSDRFVGDWYVCFSKELKEEVDELVKKGVKKEEAEARAPLMKKAQELLRKWEAQDGETIELWKKMNSWAIEGMKKTYERTGVSFDKYYFESETYMLGKDEVLKGLEKGIFFRQEDGSVAVDLSGENLDKKILLRSDGTSIYITQDFGTAINRHKDWPFDK

SEQ ID NO: 17457 - DNA, 792 bp, Unknown
  Obtained from environmental sample
  misc_feature (1)..(792): n is a, c, g, or t
ttgaacctgttattatgtcgggnctttgaaacaaccccctggtccctgtcattaggcatccccgtagaggatataaacaggccaattaatactatgataaggtttgtcattgtcttcgttattatccttctggcattagcggtggttattaccctgttagtcgccaacggcattgttaaaccgattctcggcgtgaccgccacgttaaaagacatatccgaaggcgaaggagatctgacgcggactgtcgccatcacttctaaagatgaggtgggtgatcttgccacatactttaacaagacgcttgaaaaaatcaaaggcctggttcttattattaaaaagcagacgaatgtgctgtcagatatcggtaacgatctgtccagcaacatgactgaaaccgccgcggcgataaaccaaatcaccgccaacatccagagtatcaaaaaccgcgtcataaaccagagcgccagcgttaccgaaaccaacgcgactatggaacaggttatcgccaatataaacaaactcaacaaccatgttgagaaccaaagccgcaatgtttcccaggcgtcgtccgccattgaggaaatggtagccaacataagttctgtcaccagcacgctggtcagcaacgccgccaatgtaaattcattaaaagaagcatccgaagtaggacgggccggattgcaggaagtggcaacgaacattcaggaaatatcccgcgagtccgagggtcttttggaaattacgcggttatggagaatatcgcgagccagaccaatctgctttcgatga

SEQ ID NO: 17458 - protein, 263 aa, Unknown
  Obtained from environmental sample
  DOMAIN (36)...(107): HAMP domain
  misc_feature (1)..(263): Xaa is any amino acid
MNLLLCRXFETTPWSLSLGIPVEDINRPINTMIRFVIVFVIILLALAVVITLLVANGIVKPILGVTATLKDISEGEGDLTRTVAITSKDEVGDLATYFNKTLEKIKGLVLIIKKQTNVLSDIGNDLSSNMTETAAAINQITANIQSIKNRVINQSASVTETNATMEQVIANINKLNNHVENQSRNVSQASSAIEEMVANISSVTSTLVSNAANVNSLKEASEVGRAGLQEVATNIQEISRESEGLLEITRLWRISRARPICFR

SEQ ID NO: 17459 - DNA, 792 bp, Unknown
  Obtained from environmental sample
  misc_feature (1)..(792): n is a, c, g, or t
atgagagcctggcagagcctggactattccgaattgaccaagggtgtgaagcctgaaaaatctcttacggagggaaggaaggaaagggccggccgggatagtaacggaaggatcagcgtccgtcacaaaggcggcggccacaagcggctttacaggatcatagatttcaagcgtgacaagataggcgttcccggcaaggtagcgaccatcgaatacgatcccaaccgcagcgcaaacatcgccctcatcaaatataccgacggcgaaaagcgctatatcattgcccccaaagggcttgtagtaaacgccaaggtaatcagcgggccgaacgtccccatcgaaaccgggaacgcccttcctctggaaaacattcctcttggctttacggttcacaatgtggagcttaccctcggaaagggaggtcagattgtgcgttccgccggcggcggggcgttggttgccgccaaggaaggggattatgttacgcttaagctcccctcaggcgaaatgcggatgatctttaaaaagtgttatgcaaccataggcacggtcggtaacgaagaccacatgaacgtgcagataggaaaagcaggccgtaagcgctggatgggaataaggccgacagtccgcggtatggccatgaatccggtcgatcacccccatgggggcggcgagggaaagagcaaaggtattcatccggtgaccccttggggtcagccgaccaagggatataaaaccaggaacaagcataaaccttcgtccaggttcattgtcagccggggcaagaaatag

SEQ ID NO: 17460 - protein, 263 aa, Unknown
  Obtained from environmental sample
  DOMAIN (31)...(107): Ribosomal Proteins L2, RNA binding domain
  misc_feature (1)..(263): Xaa is any amino acid
MRAWQSLDYSELTKGVKPEKSLTEGRKERAGRDSNGRISVRHKGGGHKRLYRIIDFKRDKIGVPGKVATIEYDPNRSANIALIKYTDGEKRYIIAPKGLVVNAKVISGPNVPIETGNALPLENIPLGFTVHNVELTLGKGGQIVRSAGGGALVAAKEGDYVTLKLPSGEMRMIFKKCYATIGTVGNEDHMNVQIGKAGRKRWMGIRPTVRGMAMNPVDHPHGGGEGKSKGIHPVTPWGQPTKGYKTRNKHKPSSRFIVSRGKK

SEQ ID NO: 17461 - DNA, 441 bp, Unknown
  Obtained from environmental sample
  misc_feature (1)..(441): n is a, c, g, or t
atgtcagagtatcaaggtgacgcaatggataacgataaaaaaaatactgtacttgttgcagacgatgaaaagatcaatcgtgaaattctgaaaaatatattaggttctgatcataatgtctatatggcaaaagacgggccttcgaccattaaaatggccgataatttggcgcctgatgtcattttactggacattgtaatgccggacatgaacgggtatgatgtgctaaaaatactaaagcagaacgaaaaaacaaaaaatattccggtaatatttattacggggcttgacagtgttgaggatgaggaaaaaggattggctctggatgctgttgactttatacataaacctttcagcgctatggatgtaaaattaagggtgaataaacaactgcaaaaagaaaatcaaagcccggaatcggataatatacacacagcttga

SEQ ID NO: 17462 - protein, 146 aa, Unknown
  Obtained from environmental sample
  DOMAIN (15)...(128): Response regulator receiver domain
  misc_feature (1)..(146): Xaa is any amino acid
MSEYQGDAMDNDKKNTVLVADDEKINREILKNILGSDHNVYMAKDGPSTIKMADNLAPDVILLDIVMPDMNGYDVLKILKQNEKTKNIPVIFITGLDSVEDEEKGLALDAVDFIHKPFSAMDVKLRVNKQLQKENQSPESDNIHTA

SEQ ID NO: 17463 - DNA, 420 bp, Unknown
  Obtained from environmental sample
  misc_feature (1)..(420): n is a, c, g, or t
ttgttacggggatttgtaaaaagcaggtacatcggacgcagttttatttatccgacacagagccagcgcgacaacgccgtaagactaaaactcaatcccctggctgcaagtatccgcggaaaacggattgtgcttgtagatgattcgattgtacgcggcacaacaagcgaaaaaattgtaaagagcctgaaaaatgcgggagcaaaggaagttcacttgaggatttcttcgcctccgttccgtcatgtttgtcattacggaacagacattgacaacgaagaaaacctgatcgccaacacaatgagtttagatgatatatgccgaaaaatcggcgcagacagtcttggatacataagccttgaagggttaaaaaaagcgtgcggtcaatgcacccttccgttttgcaccgcttgtttttaa

SEQ ID NO: 17464 - protein, 139 aa, Unknown
  Obtained from environmental sample
  misc_feature (1)..(139): Xaa is any amino acid
MLRGFVKSRYIGRSFIYPTQSQRDNAVRLKLNPLAASIRGKRIVLVDDSIVRGTTSEKIVKSLKNAGAKEVHLRISSPPFRHVCHYGTDIDNEENLIANTMSLDDICRKIGADSLGYISLEGLKKACGQCTLPFCTACF

SEQ ID NO: 17465 - DNA, 657 bp, Unknown
  Obtained from environmental sample
  misc_feature (1)..(657): n is a, c, g, or t
atggattttaaaaacggtacggacgttgcaagcctcacaaattccccccaaattctcacttttcccccgaaaaaacagccttctaaattgcctatagatataggtgataaagatgcaagggaattttaccagaataactacccaacggttaaaggcgtctgtatgtgcatccttcataacaaggaagacgccgaggacatggcccaggaagtctttgcctatgtctataaaaattttaataaagaaaaacagtccagcctcaaagaatcttatctgttcaaggcggcaaaaaacatgagcttaaacaaaaaaaagagagaaaaagcaagagtaagaaaggaattggacgcaatctatatcatggccgcttacggcagtctgaaatggtgcattgacagagcggatgaagaaggcaaagaaaaatgggaagctggcattgtagacaacggctatgaccaggtagaagcggaaattatcgtaaaagccattcttgacgaacaagacgaaacaaaccgcaagatttatttctataaataccactttgatatgacccttgagcaaataggcgaagccgtagggcttggaatagcggcggtacatcacagactggaagttctgagggagcaagtcaggttgagaacagggagggtggaataa

SEQ ID NO: 17466 - protein, 218 aa, Unknown
  Obtained from environmental sample
  DOMAIN (42)...(110): Sigma-70 region 2
  misc_feature (1)..(218): Xaa is any amino acid
MDFKNGTDVASLTNSPQILTFPPKKQPSKLPIDIGDKDAREFYQNNYPTVKGVCMCILHNKEDAEDMAQEVFAYVYKNFNKEKQSSLKESYLFKAAKNMSLNKKKREKARVRKELDAIYIMAAYGSLKWCIDRADEEGKEKWEAGIVDNGYDQVEAEIIVKAILDEQDETNRKIYFYKYHFDMTLEQIGEAVGLGIAAVHHRLEVLREQVRLRTGRVE

SEQ ID NO: 17467 - DNA, 618 bp, Unknown
  Obtained from environmental sample
  misc_feature (1)..(618): n is a, c, g, or t
ttggtccccatcttgtgttataattcaaaaactatggttaataacgcaaaatatactctgaaatccatccgttggcggcagagttatttccggcggacttggatgttgtacgcgatgcttgttctgccaatggcttttttcgtgatattccgttatatgcccatgacgaatatcgtaatcgcctttaagaattacaatttctttttcggggtatgggattcttcacattcgccctgggtgggtcttaaatggtttgagcaggcgtttagaagggcggatttttatgacagtctgcgtaatacgctggtgctgaatgttcttgaccttattatgggctttccggcgcccattatcctcgccattctgctgaacgagcttgtttttaagcgttacaaaaaatttacccaaaccgtagtataccttccacacttcctttcatggataataatcgccggtattgccagagagctttttgcgccggcgggcggcgtggtaaacatcatgctgggaaaattgggcatcgggcctataggcttccttatgacgcccggcaagtggattgccacttatatcgggcttggcgtaggaaggagatgggctgggctctgccgaatctga

SEQ ID NO: 17468 - protein, 205 aa, Unknown
  Obtained from environmental sample
  misc_feature (1)..(205): Xaa is any amino acid
MVPILCYNSKTMVNNAKYTLKSIRWRQSYFRRTWMLYAMLVLPMAFFVIFRYMPMTNIVIAFKNYNFFFGVWDSSHSPWVGLKWFEQAFRRADFYDSLRNTLVLNVLDLIMGFPAPIILAILLNELVFKRYKKFTQTVVYLPHFLSWIIIAGIARELFAPAGGVVNIMLGKLGIGPIGFLMTPGKWIATYIGLGVGRRWAGLCRI

SEQ ID NO: 17469 - DNA, 318 bp, Unknown
  Obtained from environmental sample
  misc_feature (1)..(318): n is a, c, g, or t
atgctgcgcaagggtggtgtggttatgcccgttatttttgctgtgggttggctggcttggattttggttttaacgagaaaaaagaaacaagcaaaaaatatcgctgcgcttgccgctgttgctccgttactcggtcttttgggaacggttatgggcatggttcacacctttgaaacaatacagcgttttggctttggcaaccccgctctgctcgcagacggaatttccgaagccctgctcaccacccaagctggcttgctggtagccttccctttactcttagcaaatacttatataaaaagaaacggtattgaatag

SEQ ID NO: 17470 - protein, 105 aa, Unknown
  Obtained from environmental sample
  DOMAIN (3)...(105): MotA/TolQ/ExbB proton channel family
  misc_feature (1)..(105): Xaa is any amino acid
MLRKGGVVMPVIFAVGWLAWILVLTRKKKQAKNIAALAAVAPLLGLLGTVMGMVHTFETIQRFGFGNPALLADGISEALLTTQAGLLVAFPLLLANTYIKRNGIE

SEQ ID NO: 17471 - DNA, 804 bp, Unknown
  Obtained from environmental sample
  misc_feature (1)..(804): n is a, c, g, or t
ttgataaagcgctggagaaaaatattattatttatattttgtataacgttgctttctaatataaccttggcttgtaaatcaaaccctaaatctaaagaacctaaacaggttcctttgtatacaaaatggccgttcccggtcggagcggcggctcccaacggggcatttacctcaaaaaaagaacaatacagcctgctttctcattttaatgttctggcggcggaaaatgaaatgacgccggaagccctgctgcccccggcggaaaaaggagcttacaggtgggctaaagcggatacgctggttaattacgcgcaggataaaaatgtaaaaatccgcgggtcttcgcttgtttgtcacaaacaaactcccgcgtggttctttgaaggatccggaaaagaatctctcgcgtcaaaggaacagctttacgccagaatggaaaattacataaaggctatgtttgaaaaatacgggggcaaaataagctggtggaacgtctgcagcgaagttgtgggcgacgacggaactccccgctccgccgcaagttcaaaatataccgcgatcatgtcaaattccggacttaccggcatgaacaggtatgagtatgtccttcaggctttcatctgggcgcgaaaatacgccgacgcaaacggcggtaaaaacgtaaaactctatcttaacgattacaatatagaatacgacggcgcgaaacaaagcgagtttatcaaactggcaaactggctgatagaaaataacgcccctatagacggtataggcctgagctcggccgaatctgatcttggttaa

SEQ ID NO: 17472 - protein, 267 aa, Unknown
  Obtained from environmental sample
  SIGNAL (1)...(24)
  DOMAIN (36)...(267): Glycosyl hydrolase family 10
  misc_feature (1)..(267): Xaa is any amino acid
MIKRWRKILLFIFCITLLSNITLACKSNPKSKEPKQVPLYTKWPFPVGAAAPNGAFTSKKEQYSLLSHFNVLAAENEMTPEALLPPAEKGAYRWAKADTLVNYAQDKNVKIRGSSLVCHKQTPAWFFEGSGKESLASKEQLYARMENYIKAMFEKYGGKISWWNVCSEVVGDDGTPRSAASSKYTAIMSNSGLTGMNRYEYVLQAFIWARKYADANGGKNVKLYLNDYNIEYDGAKQSEFIKLANWLIENNAPIDGIGLSSAESDLG

SEQ ID NO: 17473 - DNA, 420 bp, Unknown
  Obtained from environmental sample
  misc_feature (1)..(420): n is a, c, g, or t
atggctgagacacatcttttacgcggtttgaataccgaacaaaaacaggcggttttgcattcacatgcagaggaaggtcctttgctcattttggctggggctggttctgggaaaacttcggttttaaccaagagaattctgtaccggattgggcagggggtgaattctgcaaatatactggctttgacattcaccgcgaaagctgccggggagatggatgagagggtaaaggagcttgcgccggattccaaagccttgctctgcacatttcattcacttgcccttagaattttgaaaatgcaaattcaaggcgttgaaaattggaaacgcgtgggattccaaaaaattcctatgccaaaggagcaaagcgattttgagtttcaagactggcttatggaactgaacataaaagcgtggtag

SEQ ID NO: 17474 - protein, 139 aa, Unknown
  Obtained from environmental sample
  misc_feature (1)..(139): Xaa is any amino acid
MAETHLLRGLNTEQKQAVLHSHAEEGPLLILAGAGSGKTSVLTKRILYRIGQGVNSANILALTFTAKAAGEMDERVKELAPDSKALLCTFHSLALRILKMQIQGVENWKRVGFQKIPMPKEQSDFEFQDWLMELNIKAW

SEQ ID NO: 17475 - DNA, 351 bp, Unknown
  Obtained from environmental sample
  misc_feature (1)..(351): n is a, c, g, or t
atgacgccgcttgtagagaagaactggcacttggtagaagagatgaccgagcgtctcaaggcgctgaacccgtacaaggtcattctgttcggctcatacgcctcgggcaacccgacggaggacagcgaccttgacgtcgccgttattttagactcggacgagattgtggagaattttgatgaacggatggagcgggtagatccggtatccaccgcggtccgtgaaatcaattaccaaattgcgatggatattctcgtgtattcaaaagccgagatagactatctgagggaagacggaaacagttttatcgaggaaatagagagcacgggaaaggttttatatgaaaaatga

SEQ ID NO: 17476 - protein, 116 aa, Unknown
  Obtained from environmental sample
  DOMAIN (9)...(97): Nucleotidyltransferase domain
  misc_feature (1)..(116): Xaa is any amino acid
MTPLVEKNWHLVEEMTERLKALNPYKVILFGSYASGNPTEDSDLDVAVILDSDEIVENFDERMERVDPVSTAVREINYQIAMDILVYSKAEIDYLREDGNSFIEEIESTGKVLYEK

SEQ ID NO: 17477 - DNA, 396 bp, Unknown
  Obtained from environmental sample
  misc_feature (1)..(396): n is a, c, g, or t
atgaaaaatgaaacatcgggttgggtgttttttgcgaacaacgatatgcttacggcggaactgataattgaccatgcggaattatcgggagaaatcgcgtttctttgccagcaggctattgagaaatactttaagggctatttgacggaacacggcaagaagttcaagaaaatccatgacctattgatgttgtactcggaagtaaagagtatcaaagattggaatctggacgaaatcatgcttagaggcattagcaacctatatacggtaacacgttatcccggtaatatcggcacgatgcccgacggacagctgccgtccatagaaaaagcccgaagttattgggagtttgccaagaaagtcaaggctatttttacggagttagtcgaaaaataa

SEQ ID NO: 17478 - protein, 131 aa, Unknown
  Obtained from environmental sample
  DOMAIN (5)...(128): HEPN domain
  misc_feature (1)..(131): Xaa is any amino acid
MKNETSGWVFFANNDMLTAELIIDHAELSGEIAFLCQQAIEKYFKGYLTEHGKKFKKIHDLLMLYSEVKSIKDWNLDEIMLRGISNLYTVTRYPGNIGTMPDGQLPSIEKARSYWEFAKKVKAIFTELVEK

SEQ ID NO: 17479 - DNA, 573 bp, Unknown
  Obtained from environmental sample
  misc_feature (1)..(573): n is a, c, g, or t
gtggacggagacgacatggacgaacctgtagcggatacagcgcgcggaattctggacgggcatatagttctttcaagggatctcgcgcaagcctatcattatccggctattgacgtgctgcaaagcatctcccgtctcgcgtccaaagtatcgggctcggcgagcaaacaggcggccggtgttatacgaaaaaatatggcgtcttatgctaacgctgaggaccttatcaatgtaggcgcgtaccgcaacggttccaaccctgatatagacgaagctatagccaaacacggcccgatagaggaatttcttatgcaggcggttgacgagccttccccgcttgaagatacccttagggcaatgtcggaaataacaggcgttcaaatacctcctgaagagatggcagataataacgcgaaacttaattctcaagaccgtcccgctcaagttaagaaagagaaacaacaggcgcaaaatacaagcaaggcgcaggatactgcaaacgcccttaacagcgtcgccgccctgttctcatcaattccgggtatgggcagtttgggaatgaataaccaatga

SEQ ID NO: 17480 - protein, 190 aa, Unknown
  Obtained from environmental sample
  misc_feature (1)..(190): Xaa is any amino acid
MDGDDMDEPVADTARGILDGHIVLSRDLAQAYHYPAIDVLQSISRLASKVSGSASKQAAGVIRKNMASYANAEDLINVGAYRNGSNPDIDEAIAKHGPIEEFLMQAVDEPSPLEDTLRAMSEITGVQIPPEEMADNNAKLNSQDRPAQVKKEKQQAQNTSKAQDTANALNSVAALFSSIPGMGSLGMNNQ

SEQ ID NO: 17481 - DNA, 933 bp, Unknown
  Obtained from environmental sample
  misc_feature (1)..(933): n is a, c, g, or t
atggccgaggggacggcatgggatcaaagccccctgtttaaacgtttttacgaagatgagtacggaaccgcgggcggcgaaccttacggcgccttgatcggggactactactttaaccatactccccaggacgtggaggtactcaagggcatagcgcagatcgcttcggcggcccacatgcctttcatttccgcggcggatccttcaatcctgaatttaggctcatggcaggaactggctaaccccagggacataggtaaaattttctccacgccggaatacgcaagctggcggagtttccgggattccgatgacagccgctatgtggctctggcgcttccccgcgttttaagcagagttccttacggttccaagaccaatcccgtggaagagtttgattttgaggaagaagtaggagcgggggacagcggcaaatacaactggatgaacgcagcctacgcgatgggggtcaatgttaccagatcttttgccgactacggctggtgcgccaatatccgcggagtggaatcgggcggcgcggttcagggcctgcccacccatactttcctctcggaagacggcggcatggtgcagaagtgccctacagagatcgccattaccgaccggcgggaagccgagctttcaaaaaacggcttcctcccgttgatccactggaagaacaccgattacgcggtcttcctcggcgggcaaacgctgaacaatcccgcgcaatacgattccgccgacgcgacagccaacgcgtccctgtcggcgcggctgccctatatttttgccgccagcaggttttcacatttcctgaaatgcattgtcagggacaagatcggttcctttaaggaacgggctgatatggaacgtttcctgggncactggattcccagtatgttccggcgatccaatgccctcgagaagtaa

SEQ ID NO: 17482 - protein, 310 aa, Unknown
  Obtained from environmental sample
  DOMAIN (1)...(310): Protein of unknown function (DUF877)
  misc_feature (1)..(310): Xaa is any amino acid
MAEGTAWDQSPLFKRFYEDEYGTAGGEPYGALIGDYYFNHTPQDVEVLKGIAQIASAAHMPFISAADPSILNLGSWQELANPRDIGKIFSTPEYASWRSFRDSDDSRYVALALPRVLSRVPYGSKTNPVEEFDFEEEVGAGDSGKYNWMNAAYAMGVNVTRSFADYGWCANIRGVESGGAVQGLPTHTFLSEDGGMVQKCPTEIAITDRREAELSKNGFLPLIHWKNTDYAVFLGGQTLNNPAQYDSADATANASLSARLPYIFAASRFSHFLKCIVRDKIGSFKERADMERFLGHWIPSMFRRSNALEK

SEQ ID NO: 17483 - DNA, 738 bp, Unknown
  Obtained from environmental sample
  misc_feature (1)..(738): n is a, c, g, or t
gtgggcgtgggctccgccacaataactgtcactacactggacggcggctggactgctacctgccaagtcacagtcacggcctcgaccgtccccgtcaccggcgtgacgctcaacaagacatcgcttgcacttggcgtgggcggacaggagcaactgaccgcgacggtggcgcccagcgacgcgaccaacaagaccgtcgcatggtcaagcagcagcaccgccgtggccacggtggcaaacggcctggttaaggcggttgcccccggcactgccacgataaccgtgacgacacaggacggctcaaagacggccacctgcgccgtgaccgtcagcgccacgggcaccatctccataaccgggcccaccggcatgttcgtcgggaagaccgcagcatttaccgccaccgttacaggcatctccgacaacgccgtaacctggtcggccaccggcggctcgttcagcggcagcacctacaccgcgccccagacggcggggttttacacaataaccgccaccagcgtccttgaccaggcggtcaaacaatccgtccaggtgaaggtcaatgaggcgtctgcggcgtccgttgacggcaacacaaagaccagcccctcccttttggggctggtaaggacattcggctcgactaacagcgccgaccttgaaaagtacgacttcgacaacagcggcagggttgacgacggcgacctgacgctcctattcgctgaaatggggtggtga

SEQ ID NO: 17484 - protein, 245 aa, Unknown
  Obtained from environmental sample
  DOMAIN (31)...(108): Bacterial Ig-like domain (group 2)
  misc_feature (1)..(245): Xaa is any amino acid
MGVGSATITVTTLDGGWTATCQVTVTASTVPVTGVTLNKTSLALGVGGQEQLTATVAPSDATNKTVAWSSSSTAVATVANGLVKAVAPGTATITVTTQDGSKTATCAVTVSATGTISITGPTGMFVGKTAAFTATVTGISDNAVTWSATGGSFSGSTYTAPQTAGFYTITATSVLDQAVKQSVQVKVNEASAASVDGNTKTSPSLLGLVRTFGSTNSADLEKYDFDNSGRVDDGDLTLLFAEMGW

SEQ ID NO: 17485 - DNA, 813 bp, Unknown
  Obtained from environmental sample
  misc_feature (1)..(813): n is a, c, g, or t
ttgataccggtgancaaggcgcagaagtcgttcgtgttcgtgggcgcgccgaacgcggggaaaagcacgctgctgtccatagcgcaggatgtcctgctcggcccagacaatgtcagcaatatcccgtggcaggcgctgggggacaggttcaacaaggctgaactatttggcaagctggccaacatattcgccgacctgccctcgaaagccatagaagacggcggcggcatgttcaaggctctgacgggcgaggacagcatttcggcggagcataagaacaaggacccgttcagcttcaggccttacgcgaggctcctgttctcctgcaacgacatacccaagaactacgccgacaggagcgacggcttttacagacggctcattatcatccgtttcgataagtccgtgccgcaggagaagcgcgacccgaacctccgcgagcgcatcgccgccgaagcggacggcatactggcgtgggcgctggacgggttgcgtcgtctgatgggcaacaattacgttttcgccgaaaccgagcggacgaattccgagataacgcggtacagaatcgaaagcaactcggtgctggcgttcgtggacgaatactgcgccgtcgggagcgggttcattgcccgcgaggagctttattcgcggtacaaggattattgcgccagtaatggcatgaaggctatggcgcagacacgcttcaacagcgagattgacggtaatttccccgacgtgaagcgcggtcaggacaaggtttccgggcgcagggtctggcgcgggatcatgttcgtggagggcgggaaggagtga

SEQ ID NO: 17486 - protein, 270 aa, Unknown
  Obtained from environmental sample
  DOMAIN (2)...(245): Poxvirus D5 protein-like
  misc_feature (1)..(270): Xaa is any amino acid
MIPVXKAQKSFVFVGAPNAGKSTLLSIAQDVLLGPDNVSNIPWQALGDRFNKAELFGKLANIFADLPSKAIEDGGGMFKALTGEDSISAEHKNKDPFSFRPYARLLFSCNDIPKNYADRSDGFYRRLIIIRFDKSVPQEKRDPNLRERIAAEADGILAWALDGLRRLMGNNYVFAETERTNSEITRYRIESNSVLAFVDEYCAVGSGFIAREELYSRYKDYCASNGMKAMAQTRFNSEIDGNFPDVKRGQDKVSGRRVWRGIMFVEGGKE

SEQ ID NO: 17487 - DNA, 786 bp, Unknown
  Obtained from environmental sample
  misc_feature (1)..(786): n is a, c, g, or t
atgataataaccctggccggaattgttttttttcaggcgcttgccttgctgttttcccttccccccgaactcaaaacccaaaaaggggagagggccgtcgcggtcacgatgcttttactgctgatttccgcagggggcctgctttttcttaaaccgtcccagcagagggccgcgcagaagggcggggggcttttggagccgaaactgttcagttttgatttttcacaggttctcaggctggacagcgagatcagcatgaacgacgatctggtgctcatcgttaaaaaagaccctgatgataaccacatcctgatgcgccgctcggtgatgtcgggttacggcaagaaacagggtttttaccgcatggaggaaattgacgagaaaatacatcctcagcgcctgccctcgcgttccgttctgttcccgagggaggactttagaatgtcgcggcagctcagacaggaatattttatcgttaattttgacgccgccgcttttataggcatgaaggaacctcttgaaattatcccctatgaaacatgggactcttcctcgtttaagtccgcctatctggtagagagcctcgtgagcgactccggttatgaacaatattcagactcgacatacgatgaggatggcgtacttttctggccggatccggcctcccttggngtaggcgacagggaatacgccttgtacacagcctacggggacgatgagcggattccggcgctggcggaagaaataccgcgggttatgatcgttacggcgacnaggtggaagtga

SEQ ID NO: 17488 - protein, 261 aa, Unknown
  Obtained from environmental sample
  misc_feature (1)..(261): Xaa is any amino acid
MIITLAGIVFFQALALLFSLPPELKTQKGERAVAVTMLLLLISAGGLLFLKPSQQRAAQKGGGLLEPKLFSFDFSQVLRLDSEISMNDDLVLIVKKDPDDNHILMRRSVMSGYGKKQGFYRMEEIDEKIHPQRLPSRSVLFPREDFRMSRQLRQEYFIVNFDAAAFIGMKEPLEIIPYETWDSSSFKSAYLVESLVSDSGYEQYSDSTYDEDGVLFWPDPASLGVGDREYALYTAYGDDERIPALAEEIPRVMIVTATRWK

SEQ ID NO: 17489 - DNA, 711 bp, Unknown
  Obtained from environmental sample
  misc_feature (1)..(711): n is a, c, g, or t
atgaaaaaaacatttaatgtggttgatatgttctgcggcgcgggcggcgaaagttccggcattatgcgcgccgcggctgaaaaagatttgaatataaatcttctggccataaaccattgggaacgcgcaatggaaacccatgccgccaattatccgagcgcgaatcatctttgcgagtccgttgaacgcatagatccgacaaaggttgtaaagggcgggaaaataaatcttctttgggcttctcctgagtgtactcatttttcacttgcccgcggcggcaggccgagaagcgatcaaagccgcgcatcaccctggctgatactcaaatggttatgcgaattacaggttgagcgcgtaataatcgaaaacgtaagggagtttacccagtggggaccgctggataaaaacggaaagcccattgaaaaattaaaggggcagactttcctcgcgttcatagccgcgattaaatccctcggttataaagttgattggagaattctcacctgcgccgattacggagatccgactacccggcaaagattattcattcaggctgttaaaggctataaaaaaatcttgtggccgcggataacccacataaatggggacgcgggaaatgtcaaagggtgcaagccgtgngtatcagcgaaagaaataattgattggagcattcccggaaggtcgatattcgacaggaaaagccgcttgtag

SEQ ID NO: 17490 - protein, 236 aa, Unknown
  Obtained from environmental sample
  DOMAIN (5)...(235): C-5 cytosine-specific DNA methylase
  misc_feature (1)..(236): Xaa is any amino acid
MKKTFNVVDMFCGAGGESSGIMRAAAEKDLNINLLAINHWERAMETHAANYPSANHLCESVERIDPTKVVKGGKINLLWASPECTHFSLARGGRPRSDQSRASPWLILKWLCELQVERVIIENVREFTQWGPLDKNGKPIEKLKGQTFLAFIAAIKSLGYKVDWRILTCADYGDPTTRQRLFIQAVKGYKKILWPRITHINGDAGNVKGCKPXVSAKEIIDWSIPGRSIFDRKSRL

SEQ ID NO: 17491 - DNA, 405 bp, Unknown
  Obtained from environmental sample
  misc_feature (1)..(405): n is a, c, g, or t
ttgaacaaggtcgctaaagcaattgaatatgtgcagaaggtaaacgccgagaacaccgttctttcagccgagagagcgggtttacagcagaaactggaaacaaatcaaaagcggcttgatgaattggaactgcttgttatgcgctttaaggaagatcaggggcggattgaagacggcatcgtcgccgcccttgataggcttaatcagtttgaagaagcgtttgaaaacagcctgaacgaaaaaacgacgcaaaaaaaaactcacgctaaaaaagagaaacctgccgaagcggaagattcaaaagaattttttgagatttcggcaaaaaaaacaaaggaaaatgccgagctcgccggttctttagataccgatccggatataaataccgagctggatattttttag

SEQ ID NO: 17492 - protein, 134 aa, Unknown
  Obtained from environmental sample
  misc_feature (1)..(134): Xaa is any amino acid
MNKVAKAIEYVQKVNAENTVLSAERAGLQQKLETNQKRLDELELLVMRFKEDQGRIEDGIVAALDRLNQFEEAFENSLNEKTTQKKTHAKKEKPAEAEDSKEFFEISAKKTKENAELAGSLDTDPDINTELDIF

SEQ ID NO: 17493 - DNA, 348 bp, Unknown
  Obtained from environmental sample
  misc_feature (1)..(348): n is a, c, g, or t
atgaccaatgaaatttgtttggatattcttggaacttcatttacaataaaagccgatgaggacgaagaatatcttaagaaggttttttcccaataccgcgcggctgtaaataatacgcagaatatttcgggaattaaagacccgctgaacatagctattttaacgggttttattttatgcgatgaatataacaagataaaacaaaggttagacgaagaaacggaatccggaaaaatcgaacaaaacgagaacagctgggaagagcaggaagttgaggatcgaaccaatcgtcttatatcaaaactggagcatgcgttaaatttattcggaaatgacaaaaatatataa

SEQ ID NO: 17494 - protein, 115 aa, Unknown
  Obtained from environmental sample
  misc_feature (1)..(115): Xaa is any amino acid
MTNEICLDILGTSFTIKADEDEEYLKKVFSQYRAAVNNTQNISGIKDPLNIAILTGFILCDEYNKIKQRLDEETESGKIEQNENSWEEQEVEDRTNRLISKLEHALNLFGNDKNI

SEQ ID NO: 17495 - DNA, 483 bp, Unknown
  Obtained from environmental sample
  misc_feature (1)..(483): n is a, c, g, or t
atggacagcatcaaattaaccgtatccgagcgcggacagcttgcggactttgcctttgaacaaagccttaccancgaggaaaacgccgatttgtccgctctgcgttacgaggccgtaaaggctcttacacaactgcgctggacaagggcgaacaatctggctatcaggcatttttaccgcgtgcagaccgaatatcagcaccaaaccgcttccagggaaaatttattggaagcgattgcgctattgggcgctgttggaaattcggacgcggcccttgctctttgtttgcagttgggactgataaacgcgcgtacggaaagaacgggcgaatttgacgaggaaataactctggctattgtcaggtctttgggccttatcggcgataaggcggcttttgatcttttattaaacgtcagtaatttaatgtatcccgagaatattctggcggcagccggggaggctatagaccgcctcaggtggtaa

SEQ ID NO: 17496 - protein, 160 aa, Unknown
  Obtained from environmental sample
  misc_feature (1)..(160): Xaa is any amino acid
MDSIKLTVSERGQLADFAFEQSLTXEENADLSALRYEAVKALTQLRWTRANNLAIRHFYRVQTEYQHQTASRENLLEAIALLGAVGNSDAALALCLQLGLINARTERTGEFDEEITLAIVRSLGLIGDKAAFDLLLNVSNLMYPENILAAAGEAIDRLRW

SEQ ID NO: 17497 - DNA, 657 bp, Unknown
  Obtained from environmental sample
  misc_feature (1)..(657): n is a, c, g, or t
ttgcgtgttatcagatatgacatcaattttcaaaattacaggagtggtgctatgcacaacgattttactttgttttccagggtggttccttcggggaaaaaagtggtctattactacgcttatgacagcgagggtaaacgcttggggccgtggactacgggacagactaccgtgacggcggcaagaaattattgcaacttgctgaaccggaaggggaaattgttaccggaattgaaaggtatgccgacatttgccgaatttgcagccttgttttgggattgggataaaagcgaatacctgaaagaacgccggaaacgccggaagctgacgcaatcctatacggacaaaaacaaaaagacggtcgaaaatattttagttccgtattttgggaaaatgaagctggacgctataaccggaaaggaaattgataactggctcgattacctgatttccaaaaagtacaagaactcgaccgctaacggcttttacggctctttgcagactatgttgaaatgggcggttaaaaaacacattattgagcgcgcccccttcaatgacgtggaaaaattactgcaagagcaaagaacaaaaaaaattattacccatgaggaattttgggctttgttttgcgacgattggaaaaaagttgggatataa

SEQ ID NO: 17498 - protein, 218 aa, Unknown
  Obtained from environmental sample
  misc_feature (1)..(218): Xaa is any amino acid
MRVIRYDINFQNYRSGAMHNDFTLFSRVVPSGKKVVYYYAYDSEGKRLGPWTTGQTTVTAARNYCNLLNRKGKLLPELKGMPTFAEFAALFWDWDKSEYLKERRKRRKLTQSYTDKNKKTVENILVPYFGKMKLDAITGKEIDNWLDYLISKKYKNSTANGFYGSLQTMLKWAVKKHIIERAPFNDVEKLLQEQRTKKIITHEEFWALFCDDWKKVGI

SEQ ID NO: 17499 - DNA, 315 bp, Unknown
  Obtained from environmental sample
  misc_feature (1)..(315): n is a, c, g, or t
atgagaaaaattatagcgaaacttgtttgtccgtttattccgtccgaaacccttcgttcgtgggtgaattcggcgatctatttcggaatacgcgataccgtcaggaccataaggggcgatggggtgtgggagtccgataaacgcgggtacgcgcattttctgtccgtcgccgcgattataaaaaacgaggggccgtatcttaaagagtggcttgaatatcatcttttggtcggcgtggaaaaattttatatttacgacaacgcgtcgaccgacgacacgaaggagattctgcggccgtacgctcggccgatctga

SEQ ID NO: 17500 - protein, 104 aa, Unknown
  Obtained from environmental sample
  misc_feature (1)..(104): Xaa is any amino acid
MRKIIAKLVCPFIPSETLRSWVNSAIYFGIRDTVRTIRGDGVWESDKRGYAHFLSVAAIIKNEGPYLKEWLEYHLLVGVEKFYIYDNASTDDTKEILRPYARPI

SEQ ID NO: 17501 - DNA, 333 bp, Unknown
  Obtained from environmental sample
  misc_feature (1)..(333): n is a, c, g, or t
atgcacaaccgcgacgaccttatgcaagagctttccaaaatagacagggtaataaagaaaatcgacgcggcgtcgcccaccgacgtatggcttgtacttgacgggaccgcgggccaaaacgcgcttacgcagatagaatatttcaaccgcgccgtttcgctgaccggtctggtcgtcacgaaaatggacgggacaagcaggggcggatttctaataggctatgccgcgcgggaaaaaaatccgcttgccgtcgcgtacgtcggatacggcgaaaaaatcggcgatcttcgtccgttcgatgcgaaagaatacgtcgataaacttatgaaataa

SEQ ID NO: 17502 - protein, 110 aa, Unknown
  Obtained from environmental sample
  DOMAIN (1)...(110): SRP54-type protein, GTPase domain
  misc_feature (1)..(110): Xaa is any amino acid
MHNRDDLMQELSKIDRVIKKIDAASPTDVWLVLDGTAGQNALTQIEYFNRAVSLTGLVVTKMDGTSRGGFLIGYAAREKNPLAVAYVGYGEKIGDLRPFDAKEYVDKLMK

SEQ ID NO: 17503 - DNA, 789 bp, Unknown
  Obtained from environmental sample
  misc_feature (1)..(789): n is a, c, g, or t
atgcttctgatgaacgccagagcttatgccgctgcctattttcctagctcacaagctgatggaaaatatagttgccctgcgcgaaaagggagttttaaaatggctgcgccccgatgcaaaaagccaggggtcaccgttgaatacaacagaaaccaagagcctgtacgtgtggatactgttgtgatttcaactcagcacaagcctgacataacccatgcgaaaatcaaaaaagagatcatagaaaagctcatcaaaaaaacaatcccagcaaaacttttagacaaaaaaactcgctatttggtaaacccaactggaaaatttgtcgttggcggccctcatggtgatagcggtttaacgggacgtaaaatcatagttgatacttacggtggtatgggcaggcatggtggtggcgcattcagcggcaaagacccatcaaaggtggatcgctctgcggcttatgcggctcgctatgttgcaaagaatatagtcgctgcaaaactcgcaaaaagatgcgaagtacaggtagcctacgccataggctatccagacccagtttccataaatgtcaatacatttggcacaggcaaaattggcgaccataaattggaagcccttgtacgcaagcactttgacttaaaacccgcagccataattaaacatttggaattgctaaaaccaggttataaatcaacggcaaagcacgggcattttggccacaagggagctcgcttcacttgggaaaaaaccgataaggcagaagcattaaaaagaagcgcgcagaatatatga

SEQ ID NO: 17504 - protein, 262 aa, Unknown
  Obtained from environmental sample
  DOMAIN (9)...(107): S-adenosylmethionine synthetase, central domain
  misc_feature (1)..(262): Xaa is any amino acid
MLLMNARAYAAAYFPSSQADGKYSCPARKGSFKMAAPRCKKPGVTVEYNRNQEPVRVDTVVISTQHKPDITHAKIKKEIIEKLIKKTIPAKLLDKKTRYLVNPTGKFVVGGPHGDSGLTGRKIIVDTYGGMGRHGGGAFSGKDPSKVDRSAAYAARYVAKNIVAAKLAKRCEVQVAYAIGYPDPVSINVNTFGTGKIGDHKLEALVRKHFDLKPAAIIKHLELLKPGYKSTAKHGHFGHKGARFTWEKTDKAEALKRSAQNI

SEQ ID NO: 17505 - DNA, 456 bp, Unknown
  Obtained from environmental sample
  misc_feature (1)..(456): n is a, c, g, or t
atgactataaatgatttaaaattttcaccggtagaaaaaaccgcagccggcggaaatttctcccttacgccgactgtaattgattggggattggagattccccctgtaaaaatcgacgccaacggccggattattgtagataacaagtatatacaaaacagggagtggcttaaaaaaacaaatataaaaccctgggatgaactaataaaaaacaacggcggagcgatggtaggcgaatggggagcgcataacaagacacctcatgatgttgtcttgcgctggatggaagataatttgattaactttaaggaagccggcctgggttgggctctctggaacttaaacggttctttcggcgttttgaacagcggaagagacgatgtgaactatgaaaatttcaacggttacaagcttgacagaaagatgctgagtcttttacaaaagtatattgattaa

SEQ ID NO: 17506 - protein, 151 aa, Unknown
  Obtained from environmental sample
  misc_feature (1)..(151): Xaa is any amino acid
MTINDLKFSPVEKTAAGGNFSLTPTVIDWGLEIPPVKIDANGRIIVDNKYIQNREWLKKTNIKPWDELIKNNGGAMVGEWGAHNKTPHDVVLRWMEDNLINFKEAGLGWALWNLNGSFGVLNSGRDDVNYENFNGYKLDRKMLSLLQKYID

SEQ ID NO: 17507 - DNA, 333 bp, Unknown
  Obtained from environmental sample
  misc_feature (1)..(333): n is a, c, g, or t
atgcaggacggtgatcagcttgcccacctcgtgcatgtgcaggcccgcggtcggctcgtccagaatgtacagcgcgccgggcagggagcgtttgccgagttcccgagaaatcttgatgcgctgcgcctcaccgccggagagggtggttgcgggctgtccaaggcgcagatagccgagtcccacgtcctccagcaccgccagacggcgctccagaccgggatagacctcgaaaaaggcgcgggcgcggcttacaggcagatcaagcacttcggcgatgttcagccccttgtagcggacttccagggtttcgtggttatagcggcggcctactag

SEQ ID NO: 17508 - protein, 110 aa, Unknown
  Obtained from environmental sample
  misc_feature (1)..(110): Xaa is any amino acid
MQDGDQLAHLVHVQARGRLVQNVQRAGQGAFAEFPRNLDALRLTAGEGGCGLSKAQIAESHVLQHRQTALQTGIDLEKGAGAAYRQIKHFGDVQPLVADFQGFVVIAAAY

SEQ ID NO: 17509 - DNA, 486 bp, Unknown
  Obtained from environmental sample
  misc_feature (1)..(486): n is a, c, g, or t
gtgcttgatctgcctgtaagccgcgcccgcgcctttttcgaggtctatcccggtctggagcgccgtctggcggtgctggaggacgtgggactcggctatctgcgccttggacagcccgcaaccaccctctccggcggtgaggcgcagcgcatcaagatttctcgggaactcggcaaacgctccctgcccggcgcgctgtacattctggacgagccgaccgcgggcctgcacatgcacgaggtgggcaagctgatcaccgtcctgcataaattggtggacaaaggagcctcacttgtggttatagaacatagcaccgatgtcatcctcgctgcggattacgtcattgaccttggtccgggcgggggcgaaaacggcggacgcatcatctcccagggaacccccgaagccattgtcgcggatccgaattccgtctccgggcgcttcctgatgcacgaacgcgtggcgcggcgcatgcagcgccggtaa

SEQ ID NO: 17510 - protein, 161 aa, Unknown
  Obtained from environmental sample
  DOMAIN (1)...(120): ABC transporter
  misc_feature (1)..(161): Xaa is any amino acid
MLDLPVSRARAFFEVYPGLERRLAVLEDVGLGYLRLGQPATTLSGGEAQRIKISRELGKRSLPGALYILDEPTAGLHMHEVGKLITVLHKLVDKGASLVVIEHSTDVILAADYVIDLGPGGGENGGRIISQGTPEAIVADPNSVSGRFLMHERVARRMQRR

SEQ ID NO: 17511 - DNA, 915 bp, Unknown
  Obtained from environmental sample
  misc_feature (1)..(915): n is a, c, g, or t
ttggcacttgcttttttttcctgttctacccgacccccagtgcatgaaggccgggaggaatcccctcccccaggccgattggaaattccgcccccgccggaaagtttttttctgaccattgttgccgccggagacaacatcatccacgatcccatacttaaagccaactataataacaacgtttacagttttgattccatatatgaaaaaatcagggcttacacggtcccgtccgatatagcgtttgtaaatcaggaaacaatcctaggaaacaaggctttgggttattccggctacccattattcagcaccccacgggaaacaggagcggctttagcggcagcaggctttgatgttgtcagccacgccacaaaccacgccatggacaaaggagaagccggtgtgctgagtacaatggaatattgggaatcgcttgaggaaattcattatttgggaatacaccgaagcgaggatgataaagcaaaccatccagtcataatcgacaagaacaattttaaagtgggctttttggcttacacatatggcacaaacggcattgcccttccacgcggaaaaccatacctggtatccctaataaacaacgcaaccatggcaaaagagattgacgccctgcgccccttgtgtgattatcttgttgtttcagtccactggggggatgaatacagtccggaaccaaattctaaccaaacaaaccttgcggcttttttcgcggagcataatgtcgatcttgttataggccatcatcctcatgtacttcaacgatttgaaaccctgcgaagagccgacggtaaaagtaccctttgcttttattcgctgggcaatttcctttccgcgcatttcaatccggaaaaagaagcgctcctggcgggtctcggccgatctgatcaatgctaa

SEQ ID NO: 17512 - protein, 304 aa, Unknown
  Obtained from environmental sample
  misc_feature (1)..(304): Xaa is any amino acid
MALAFFSCSTRPPVHEGREESPPPGRLEIPPPPESFFLTIVAAGDNIIHDPILKANYNNNVYSFDSIYEKIRAYTVPSDIAFVNQETILGNKALGYSGYPLFSTPRETGAALAAAGFDVVSHATNHAMDKGEAGVLSTMEYWESLEEIHYLGIHRSEDDKANHPVIIDKNNFKVGFLAYTYGTNGIALPRGKPYLVSLINNATMAKEIDALRPLCDYLVVSVHWGDEYSPEPNSNQTNLAAFFAEHNVDLVIGHHPHVLQRFETLRRADGKSTLCFYSLGNFLSAHFNPEKEALLAGLGRSDQC

SEQ ID NO: 17513 - DNA, 828 bp, Unknown
  Obtained from environmental sample
  misc_feature (1)..(828): n is a, c, g, or t
ttgtgtatcaatatttcagcaaacggctggagcttaaagaaggaatgtcaattcatgccgaaaaaaattaaaagttttctgttttttctgctgcttttcgcctcgccgctgttttcgcatgatgcggatattaaaatagaaggcgaaaacaaatacaagtcggtgcggttaattccccaagtttacaatgcggcgcatcgcagtctttccgatcttttaataaaaaatggaagcggcgaaaatgttccgtactttatcaattcaagcgagggaaaaacaaacgagaccagagaaatatatttaatgaagctgattaattcctataaagagaacgataattttttctttgattacaaacttgccgttgaccgtaacagcgatataatagcgacctcgcttgaattttccacaaggaatgccggtttcgctaaacaggtaaatgtattcggcagttatgataatattcactgggaatttgtgcagaacgatatactttatgctgttgacagcaaatcgaagcttaatattgattttagccgtccgcagaaatacactcattacaggctgaaactggaaaataaccttgaacagatttcttttaccgctgttaatcttatttatagtctgcggataagcgaagaaacatattttattgaaacttttacgccggaattttccgttgaaaccgaagacaagaagacaaagatactcattgaaggactgaaaaatcttcgtttatgcgacattcaaatagaaaccgacagtatgtttataaggaaagcaaaagctttcaagggaaatgaaaaagagcttacaatttatccgtaa

SEQ ID NO: 17514 - protein, 275 aa, Unknown
  Obtained from environmental sample
  misc_feature (1)..(275): Xaa is any amino acid
MCINISANGWSLKKECQFMPKKIKSFLFFLLLFASPLFSHDADIKIEGENKYKSVRLIPQVYNAAHRSLSDLLIKNGSGENVPYFINSSEGKTNETREIYLMKLINSYKENDNFFFDYKLAVDRNSDIIATSLEFSTRNAGFAKQVNVFGSYDNIHWEFVQNDILYAVDSKSKLNIDFSRPQKYTHYRLKLENNLEQISFTAVNLIYSLRISEETYFIETFTPEFSVETEDKKTKILIEGLKNLRLCDIQIETDSMFIRKAKAFKGNEKELTIYP

SEQ ID NO: 17515 - DNA, 822 bp, Unknown
  Obtained from environmental sample
  misc_feature (1)..(822): n is a, c, g, or t
atgaaaaaaataaccctcgcagcaatagcctgcatttgcactctctcccttgccgctctcccagagctaaaggtaagcaccaagaacaacgccgcaataacatctcctgcggcaaatctacttacgcaagcccagcaaagtgccaacaactgccagaaccatcttattttcgtacacaagtacatcccaacaacaactatcacgcttagtggcgcggcaaatccagaacacaatttttccgtggcatctggcagagattccatccgtgggcgtggtaattccacttgggctggggacaaaaagccttacagaataaaatttgattcagctcaatctgttttcgggtccaaaaaacacaaaagctgggcattgctcgcaaattggtacgaccaaacctttgccctcaacgccgttggatttgaactcggcaaacgcattggaattccgggtacccctagccagtatcttgtggatttctatttaaacaatgaatacaaaggaatttaccaaataacagacatagtccatgtgaacaaaggcaggctagaaatagacgaaaaagagggctggcttgttgagtttgactaccactgtcccagcaccgcagacgaaattgattttgcaaccgattacccaacttcgccatccggttccaagctgcacacattcataaaatcaccagaagatttgccaaaactgtccgactacgattttgtgaaaaaagacgtaaataatcttatgaccactatgttcaataaatcgggttttccaataacggctacagagatttggtggacttgnaaagtgttgccaaatacttaa

SEQ ID NO: 17516 - protein, 273 aa, Unknown
  Obtained from environmental sample
  SIGNAL (1)...(18)
  misc_feature (1)..(273): Xaa is any amino acid
MKKITLAAIACICTLSLAALPELKVSTKNNAAITSPAANLLTQAQQSANNCQNHLIFVHKYIPTTTITLSGAANPEHNFSVASGRDSIRGRGNSTWAGDKKPYRIKFDSAQSVFGSKKHKSWALLANWYDQTFALNAVGFELGKRIGIPGTPSQYLVDFYLNNEYKGIYQITDIVHVNKGRLEIDEKEGWLVEFDYHCPSTADEIDFATDYPTSPSGSKLHTFIKSPEDLPKLSDYDFVKKDVNNLMTTMFNKSGFPITATEIWWTXKVLPNT

SEQ ID NO: 17517 - DNA, 777 bp, Unknown
  Obtained from environmental sample
  misc_feature (1)..(777): n is a, c, g, or t
atgaaggtacattttgagactaaattgcctgtgacagtactggaagcaggacccgcaacggtgtttggggatagatttttgggtattataagttcttttccggaaggggaaatggagtttgagtacaatgagaacaaagtaaaaataaaaacaacggttaaaaaatccaatttccagcttaagagcatttcttccgataaatttcctgaatttcctttatcaaacagggattattttgagatacccgtaaaaattttcaaggaaatgataaatcagactgtctttgcggtatctgatgatgagacacggttttttatgaacggggttttccttgaaaaaagagaaggaaagataataatggtagcgacggatgggcgcaggctttcttatattgataaagatgcaaataacattgaagattttaatggggttataattccccctaaaatcttaaatgttgttacaaaaagggccggagatgaagggcttataggaatttctgtaattgataaaatgatctttatccgttttgggttttataaccttgcttcggtattaattgacggacaattccccaactacaggaaagttataccggaagaacataaaagttcttttcttgttgacagactggaactgctggatgcccttcgtcgcatatctcaggctgttgaacaaaaatcgcaccgggtatatataggacttaaaccgggaataatggagatttattctgaggaaggtgaaattgcggaaggaaagacggaaattcccctgtaa

SEQ ID NO: 17518 - protein, 258 aa, Unknown
  Obtained from environmental sample
  DOMAIN (80)...(193): DNA polymerase III beta subunit, central domain
  misc_feature (1)..(258): Xaa is any amino acid
MKVHFETKLPVTVLEAGPATVFGDRFLGIISSFPEGEMEFEYNENKVKIKTTVKKSNFQLKSISSDKFPEFPLSNRDYFEIPVKIFKEMINQTVFAVSDDETRFFMNGVFLEKREGKIIMVATDGRRLSYIDKDANNIEDFNGVIIPPKILNVVTKRAGDEGLIGISVIDKMIFIRFGFYNLASVLIDGQFPNYRKVIPEEHKSSFLVDRLELLDALRRISQAVEQKSHRVYIGLKPGIMEIYSEEGEIAEGKTEIPL

SEQ ID NO: 17519 - DNA, 387 bp, Unknown
  Obtained from environmental sample
  misc_feature (1)..(387): n is a, c, g, or t
ttgtcgattttaatggtnttggccctgccaaggtgtgaaagctcggtgttttccagcttcatgccaagctcttcggtgataacctgcccgcccgtgaggaccgcgatgtcttccagcatggcttttctgcggtcgccgaaaccgggggctttaaccgccacggttttaagggtctgcctcagactgttcagcaccagggtggagagggcttcgccgtccacgtcctccgcgatgatgagcaggggcttgccgctttgggcaactttttccagcaggggcagcatttccctcatgccggagattttcttgtcatggataagaatgtacacgtcctcgtacacggtggtcatggtgtcgcggtcggtaacaaaatacgcggaaatatag

SEQ ID NO: 17520 - protein, 128 aa, Unknown
  Obtained from environmental sample
  SIGNAL (1)...(28)
  misc_feature (1)..(128): Xaa is any amino acid
MSILMVLALPRCESSVFSSFMPSSSVITCPPVRTAMSSSMAFLRSPKPGALTATVLRVCLRLFSTRVERASPSTSSAMMSRGLPLWATFSSRGSISLMPEIFLSWIRMYTSSYTVVMVSRSVTKYAEI

SEQ ID NO: 17521 - DNA, 870 bp, Unknown
  Obtained from environmental sample
  misc_feature (1)..(870): n is a, c, g, or t
ttgaatttacggagccctcccggcgaaagggttccaatttttccggaattgttttccctgattttcaagattgtgttcgacaactgtccacaccatttgagttgggtcgcattttcattgaaatcttgccattgggaacttgagaaagcaagactatattatgcaaatgatgctattgcaaaaaatttgggtattcgagaattgcgtaatcaaatctctagaaaagcctatgaacggcgggaaatcgccaactcacagctaagcaaggagtctactgttcccttcaatgtttttaaggatccttacttgttggatactttaggcttaaaagaaaattttctggaagccgatcttgaaaaagcaatactgacagaacttgaagccttcattttggaatttgggcatggtttcacatttgtagaacggcacaaacgcatgacaatggacggtgatgattttatacttgatttattgttttatcaccgcatactgaaaaggcttgtcgctgtcgaattaaaaattgggaaattcgtacctcattataaagggcagatggaattttacttaaaatggctcaatagatatgaacgacaggacgatgaaaatgaaccaataggaataatcctttgtacaaaggcaagtcgaaatcagatagaattgatggaattggataaatctggcattgcggttgcagaatactggattaatttgcccccaaaagaggaatttgaaagaaaaattaaagagatattaatcgaagcgcaggaacggcttgaacgcagaaaatcgcttccaaaaggcaaagcgcaaaaacaaattgattacttctacgattcaaaggatacggacatagaggacaaacagcaatga

SEQ ID NO: 17522 - protein, 289 aa, Unknown
  Obtained from environmental sample
  DOMAIN (9)...(250): Protein of unknown function (DUF1016)
  misc_feature (1)..(289): Xaa is any amino acid
MNLRSPPGERVPIFPELFSLIFKIVFDNCPHHLSWVAFSLKSCHWELEKARLYYANDAIAKNLGIRELRNQISRKAYERREIANSQLSKESTVPFNVFKDPYLLDTLGLKENFLEADLEKAILTELEAFILEFGHGFTFVERHKRMTMDGDDFILDLLFYHRILKRLVAVELKIGKFVPHYKGQMEFYLKWLNRYERQDDENEPIGIILCTKASRNQIELMELDKSGIAVAEYWINLPPKEEFERKIKEILIEAQERLERRKSLPKGKAQKQIDYFYDSKDTDIEDKQQ

SEQ ID NO: 17523 - DNA, 786 bp, Unknown
  Obtained from environmental sample
  misc_feature (1)..(786): n is a, c, g, or t
gtgcaaatgctccagcaaaaatacgcgctgcacaatgattaccataaaaccgccatagaagacggcctcaagcggcttttgtctcccgcgctgatccgcgagatacggggggatcagagcgacgctgcggacgatcacggcattggcgtgttcagcgaaaatttaaagaacctgctcctccagcaaccgatcaagggaacgcgggtattgggtattgaccccggcatccgcacaggaaccaaatgcgccttccttgacgataccgggaaatatcttgcgagtatcgttatctataaccataaagttgaggaagcgaaaaaagcgcttcttgaggggatacggctttacgacatacagttgattgccgtgggaaacggaactggcagccgcgaagtccaggaaatcgtcaccgccttaattgcggataacaaccttgaggctctgtacaccgtggttgacgaggacggcgcttcagtgtattccgcaagcgacattgcacgcgaggaattccccgatctcgacctcaccatcaggggggccatttccatagggcgtcgtttgcaggatccgcttgctgaattggtaaaaatcgatcccaaatccatcggcgtcgggctttaccagcacgatgtaaaccagaaaaaactctccgataccctggacgaggttgtctcatcggtggtgaacaatgtgggcgtcaaccttaacaccgcaagcgcttcgcttttgaaatacgtctccgggatcaacagctctcttgccaggaaatcgtcaaatacgcgatga

SEQ ID NO: 17524 - protein, 261 aa, Unknown
  Obtained from environmental sample
  misc_feature (1)..(261): Xaa is any amino acid
MQMLQQKYALHNDYHKTAIEDGLKRLLSPALIREIRGDQSDAADDHGIGVFSENLKNLLLQQPIKGTRVLGIDPGIRTGTKCAFLDDTGKYLASIVIYNHKVEEAKKALLEGIRLYDIQLIAVGNGTGSREVQEIVTALIADNNLEALYTVVDEDGASVYSASDIAREEFPDLDLTIRGAISIGRRLQDPLAELVKIDPKSIGVGLYQHDVNQKKLSDTLDEVVSSVVNNVGVNLNTASASLLKYVSGINSSLARKSSNTR

SEQ ID NO: 17525 - DNA, 393 bp, Unknown
  Obtained from environmental sample
  misc_feature (1)..(393): n is a, c, g, or t
ttgcctgacagtgaattcaccctgattgaacggaaaggccgaaggtcgggcttcctgagggatacccttgcggctttagcgaataaaaactataggctttccaatgtttcagtggaagaacaggaaatggaaaaagtaaaaccccaccgttttacaatggtgacattccgggcttttaagcctctggatccaaaaattctgaaaaaactcttcaggctttgtgtagacggaggagtattggccgcgtacaaaggacgacagagcaaggtcgaggcagaaatggctgagcttgaaaggcaaatgccaaatcaaaccatacgatgggaacttataccctgccctgtcccgatgttagacgaagaaaggcatgtacttttaataaataacaaataa

SEQ ID NO: 17526 - protein, 130 aa, Unknown
  Obtained from environmental sample
  misc_feature (1)..(130): Xaa is any amino acid
MPDSEFTLIERKGRRSGFLRDTLAALANKNYRLSNVSVEEQEMEKVKPHRFTMVTFRAFKPLDPKILKKLFRLCVDGGVLAAYKGRQSKVEAEMAELERQMPNQTIRWELIPCPVPMLDEERHVLLINNK

SEQ ID NO: 17527 - DNA, 759 bp, Unknown
  Obtained from environmental sample
  misc_feature (1)..(759): n is a, c, g, or t
ttgggccaagaaccggatatttcccttgaagctcttgcagagattaacgtaattagcgatgcaaacattagctggtatgaagacaggatttttgaagaaagcaaaaagcgcctttttataaaagccttaaagctcgctaatgaagaaataaacagtaacaccgacaccgacacggttattaaaaaccttatgcccgaactggccgcagtaacaacggcgcgtaatgaggcgggaattaaaagcgcggctgaattattgaaaatgcaattcccggaaatacgctggatcattaaagggcttataggggaaggactgacgatgatcaacggagcgcccaaaatcggcaagtcatggtttgtccttaacctggctattgccgccgcttccggcacatactttttgggcgagcttccggcaacaaaaacaggcacgctataccttgcgcttgaagacacagagcgccgcatacacagccgccttaaaaagctgaaggcccctgaaaccgacaatcttaaaatcacaacgctatggcgggacggctatatagggcttgaaaactacctgaaagccaacacggagatcgggcttgtcatcatcgacaccctggcccgcttcgcgcacatcgaggacatgaacgactacaccatgaccactaccgcaatggcccggctgaaacggatcgccgatgacctgaatgtcgccattatcctgatacaccacgcaaaaaaaacaggaagaaaagctcgcggcactgactga

SEQ ID NO: 17528 - protein, 252 aa, Unknown
  Obtained from environmental sample
  misc_feature (1)..(252): Xaa is any amino acid
MGQEPDISLEALAEINVISDANISWYEDRIFEESKKRLFIKALKLANEEINSNTDTDTVIKNLMPELAAVTTARNEAGIKSAAELLKMQFPEIRWIIKGLIGEGLTMINGAPKIGKSWFVLNLAIAAASGTYFLGELPATKTGTLYLALEDTERRIHSRLKKLKAPETDNLKITTLWRDGYIGLENYLKANTEIGLVIIDTLARFAHIEDMNDYTMTTTAMARLKRIADDLNVAIILIHHAKKTGRKARGTD

SEQ ID NO: 17529 - DNA, 477 bp, Unknown
  Obtained from environmental sample
  misc_feature (1)..(477): n is a, c, g, or t
atgcccttaggcagacacgaagattttgcgataaataccattatcggtcccgacagcaccctgaaaggaaatattgacactcccggtttcacccgcatcgacggaagcatcacgggggatgtgaacgcagccggcagggtggtaatcggcgagcgggcgcggatgaagagcaatgtcctggggactgccgtaaccataggcggggttgtgtacggcaacgtgattgcaggggaatccctcgttgtcctttccactgcgcttgttttgggcgatataataacgcgccggatcaaagcggatgagggatgccttattcacggcaagataaaggtttgccctgatgaggaaagctgggccagcgctgtcagcgagtaccgcgacgcccagaagataaaatcggctttgcctgttttttcaaagaaaacagccagggacggattattaaaagacaagtccccgcccaagggcgaggtttaa

SEQ ID NO: 17530 - protein, 158 aa, Unknown
  Obtained from environmental sample
  DOMAIN (3)...(115): Protein of unknown function, DUF583
  misc_feature (1)..(158): Xaa is any amino acid
MPLGRHEDFAINTIIGPDSTLKGNIDTPGFTRIDGSITGDVNAAGRVVIGERARMKSNVLGTAVTIGGVVYGNVIAGESLVVLSTALVLGDIITRRIKADEGCLIHGKIKVCPDEESWASAVSEYRDAQKIKSALPVFSKKTARDGLLKDKSPPKGEV

SEQ ID NO: 17531 - DNA, 762 bp, Unknown
  Obtained from environmental sample
  misc_feature (1)..(762): n is a, c, g, or t
atgatcagatcggccgagtcgatcgaggagctggggatgccgccggtggtcaagtacctcaccgagcgtccgaacggtttggtgctggtcaccggccccaccggcagcggcaagagcacgacgctcgcctccatggtagacaagatcaacaccgagcaggaggggcacattttgacggtggaagaccctatagagttcgtgcaccagcacaagaggtgcatcatcaaccagcgcgaggtgaaccaggacacgaagagtttcgccgccgccctgcgcgtggcgttgaggcaggaccccgacgtggtgctcataggcgagatgcgcgatttggagacgatccaggccgccctgagcatagccgagacgggccaccttacgctggccaccctgcacacgaactcggcggcgcagacgatcaaccgaatcatcgacgtattccccgccgacatgaaggagacggtgcgggcgcagctctcaatggtccttgaaggcatcataagccaggcgctcctgccgcgcataggcggcggtcgcgtaatggcctgcgagatcatggtggccacgatggcggtccgctccatgatccgcgaagacaaggtgcaccaactccaaggcatcatagaaataggccaacaacacggtatgcaaaccatgaacagccaattagccgccctgttcaacagacggctgatcacaaaaaaggacgcctttggaagaagcccggatcccgacagtttgaagaagctgatcggggagccctaa

SEQ ID NO: 17532 - protein, 253 aa, Unknown
  Obtained from environmental sample
  DOMAIN (1)...(174): Type II/IV secretion system protein
  misc_feature (1)..(253): Xaa is any amino acid
MIRSAESIEELGMPPVVKYLTERPNGLVLVTGPTGSGKSTTLASMVDKINTEQEGHILTVEDPIEFVHQHKRCIINQREVNQDTKSFAAALRVALRQDPDVVLIGEMRDLETIQAALSIAETGHLTLATLHTNSAAQTINRIIDVFPADMKETVRAQLSMVLEGIISQALLPRIGGGRVMACEIMVATMAVRSMIREDKVHQLQGIIEIGQQHGMQTMNSQLAALFNRRLITKKDAFGRSPDPDSLKKLIGEP

SEQ ID NO: 17533 - DNA, 855 bp, Unknown
  Obtained from environmental sample
  misc_feature (1)..(855): n is a, c, g, or t
atggacagggtaggcaaggacggggtcatcaccgttgaagagtccaagacaatggataccacaattgactttgtggaaggtatgcagtttgaccgcggctatatttccgcgtattttgttactgaccgcgacaccatgaccaccgtgtacgaggacgtgttcattcttatccacgacaagaaaatttccggcatgagggaaatgctgcccctgcttgaaaaagtggcccagagcggcaaacccctgctgatcatcgccgaggatgtggacggcgaagccctctccaccctggttctgaacagcctcaggcagacactcaaaaccgtggcggtaaaagcccccggtttcggcgaccgcagaaaagccatgctggaagacatcgcagtactgacgggcgggcaggttatcaccgaagagcttggcatgaagctggaaaacaccgagctttcccaccttggcaaggccaagactattaaaatcgacaaggacaatacaacaatcatcaatggcggcggaaaacccaaggatatcaaggaccgcatcgcccagatcaaagttcagattgaagacacgacaagcagctacgacaaggaaaaactccaggaaaggcttgcgaaactcgccggcggcgtcgcggttatcaatgtaggcgcggccacggaggtcgagctgaaagagaagaagcaccgcgtggaagacgccctgtcggccacccgcgccgcaatcgacgaaggcattgtttcaggcggcggcatcgccctcattcaggcttcccttgccctggacaaggccgataccaaaggccttaccgatgatgaaaaagtcggcttcaaaatcgtaaagcgcgccctttga

SEQ ID NO: 17534 - protein, 284 aa, Unknown
  Obtained from environmental sample
  DOMAIN (1)...(284): TCP-1/cpn60 chaperonin family
  misc_feature (1)..(284): Xaa is any amino acid
MDRVGKDGVITVEESKTMDTTIDFVEGMQFDRGYISAYFVTDRDTMTTVYEDVFILIHDKKISGMREMLPLLEKVAQSGKPLLIIAEDVDGEALSTLVLNSLRQTLKTVAVKAPGFGDRRKAMLEDIAVLTGGQVITEELGMKLENTELSHLGKAKTIKIDKDNTTIINGGGKPKDIKDRIAQIKVQIEDTTSSYDKEKLQERLAKLAGGVAVINVGAATEVELKEKKHRVEDALSATRAAIDEGIVSGGGIALIQASLALDKADTKGLTDDEKVGFKIVKRAL

SEQ ID NO: 17535 - DNA, 456 bp, Unknown
  Obtained from environmental sample
  misc_feature (1)..(456): n is a, c, g, or t
ttgatctgggcgatgcggtccttgatatccttgggttttccgccgccattgatgattgttgtattgtccttgtcgattttaatagtcttggccttgccaaggtgggaaagctcggtgttttccagcttcatgccaagctcttcggtgataacctgcccgcccgtcagtactgcgatgtcttccagcatggcttttctgcggtcgccgaaaccgggggcttttaccgccacggttttgagtgtctgcctgaggctgttcagaaccagggtggagagggcttcgccgtccacatcctcggcgatgatcagcaggggtttgccgctctgggccactttttcaagcaggggcagcatttccctcatgccggaaattttcttgtcgtggataagaatgaacacgtcctcgtacacggtggtcatggtgtcgcggtcagtaacaaaatacgcggaaatatag

SEQ ID NO: 17536 - protein, 151 aa, Unknown
  Obtained from environmental sample
  misc_feature (1)..(151): Xaa is any amino acid
MIWAMRSLISLGFPPPLMIVVLSLSILIVLALPRWESSVFSSFMPSSSVITCPPVSTAMSSSMAFLRSPKPGAFTATVLSVCLRLFRTRVERASPSTSSAMISRGLPLWATFSSRGSISLMPEIFLSWIRMNTSSYTVVMVSRSVTKYAEI

SEQ ID NO: 17537 - DNA, 603 bp, Unknown
  Obtained from environmental sample
  misc_feature (1)..(603): n is a, c, g, or t
atgaaacaattttacgacaacggcataaatttaaagctggtacccatcggcagggaagcctttgtgttttttgttagtaaaaataacaccatagacaatttaacgataaaaaacattcaggacatttattccggtaaaatcaagaattggaaagaattaaacggaacaaatcaaagaatcatggctttccaaagacctgaaaattcgggaagccaaacgatgctgaaaaaagtaatggccgatattcccgttatgcagcctcgcagagaaaacgtatccagcggtatgggtgacatcataaaccaggtcgcggtatatagaaatttttcaaacgcgataggttattcgtttttgttttattcaactgaaatggtaaaaaatgatcaaatcaaattgttgtctattgagggtatacatccatcaggagaaacaatacaaaacggaacttatcctttttctgacgatttttacgcgatatttattgatagtgacaataaaattgaaaatattgagctgtttattgaatggatgctttccggtcagggacaaattttggtttcaaggacagggtatacaccaataaagcctgaaaccacatattga

SEQ ID NO: 17538 - protein, 200 aa, Unknown
  Obtained from environmental sample
  misc_feature (1)..(200): Xaa is any amino acid
MKQFYDNGINLKLVPIGREAFVFFVSKNNTIDNLTIKNIQDIYSGKIKNWKELNGTNQRIMAFQRPENSGSQTMLKKVMADIPVMQPRRENVSSGMGDIINQVAVYRNFSNAIGYSFLFYSTEMVKNDQIKLLSIEGIHPSGETIQNGTYPFSDDFYAIFIDSDNKIENIELFIEWMLSGQGQILVSRTGYTPIKPETTY

SEQ ID NO: 17539 - DNA, 366 bp, Unknown
  Obtained from environmental sample
  misc_feature (1)..(366): n is a, c, g, or t
ttgatggccgagnttttcctaaagcatgggatgaaaaaaaattacccaactttagatgaatcacattataatcatattctaaatattactattgttgatgattttcttaataagaaaaagataaaagataagcctccatctaaatatatatgtgactttcacgaaaacaacacattattaagcgattctttaaaatcacatttcatcggagatgtaaatgaatttggaatatatacggatgattatgaattattttttgataaaagagcagaattagttcaaaatgaattaaggaaaagaataattgaacagcaaacgggaaatgatatccaaattgaaaatataggtgacaatcctgatgaataa

SEQ ID NO: 17540 - protein, 121 aa, Unknown
  Obtained from environmental sample
  misc_feature (1)..(121): Xaa is any amino acid
MMAEXFLKHGMKKNYPTLDESHYNHILNITIVDDFLNKKKIKDKPPSKYICDFHENNTLLSDSLKSHFIGDVNEFGIYTDDYELFFDKRAELVQNELRKRIIEQQTGNDIQIENIGDNPDE

SEQ ID NO: 17541 - DNA, 837 bp, Unknown
  Obtained from environmental sample
  misc_feature (1)..(837): n is a, c, g, or t
atgtggatcaatcaaaaattccttgacgcccttgggatgaaagcgcccaccactaccgaagagttctatcagtacctcgtagcggttcgcgatcgcgatcccaacaagaacggccaaaaggatgaagttcctttcatgagtgccaggaatggatggaattcaggggtcgaagcgttcctaatgaacgcctttgcgtttgatgaccaaagcgcttacgggaccagcgcccgtcgtatgtaccttacaccccagggcaaagtagaggtaagttacaacaaaccggaatggcggcagggcctggaatacttctacaggcttggttccgaaggccttttggatcccttatcgtttacccagaacgaaacagatctccgcgcttttgtggaacaagccaatgtccccaacagattgggcgccgtcacggctggtcagcccggtacattctcagagctcaccggcgaacgccggaaagactttagtccgcttgctccccttaagggccctaatggccgccaggccgcatggtacgataggttcaggccagtaatgggcggacgcttcgcaatttcaaaagactgcgagatacccgatatcgcaatgaaatgggcagacgcatgctatacaactgactggtggtcaaggaaccgtttcggcgttctcggccgggactgggttgttccgcctgcgggaacggtggctgtagacggcggaccggcgaagtacgaagaaattctgaaatggggcgaaccccagaaagcgttctgggcctataataatttctccgtgtcaggctgggcttcctataaccgcgccaaatcattaactgaccccctttga

SEQ ID NO: 17542 - protein, 278 aa, Unknown
  Obtained from environmental sample
  misc_feature (1)..(278): Xaa is any amino acid
MWINQKFLDALGMKAPTTTEEFYQYLVAVRDRDPNKNGQKDEVPFMSARNGWNSGVEAFLMNAFAFDDQSAYGTSARRMYLTPQGKVEVSYNKPEWRQGLEYFYRLGSEGLLDPLSFTQNETDLRAFVEQANVPNRLGAVTAGQPGTFSELTGERRKDFSPLAPLKGPNGRQAAWYDRFRPVMGGRFAISKDCEIPDIAMKWADACYTTDWWSRNRFGVLGRDWVVPPAGTVAVDGGPAKYEEILKWGEPQKAFWAYNNFSVSGWASYNRAKSLTDPL

SEQ ID NO: 17543 - DNA, 618 bp, Unknown
  Obtained from environmental sample
  misc_feature (1)..(618): n is a, c, g, or t
atgaggacgtgcttgcccctgtgcataaagaattcggctactgcggtccctgcgagggcgcagcggaggcggagcagggggggctggtccgaagtggccactaccaccacgcttcggcgcagcccttctgtcccaaggtcattctcgatgaactccttcagctcgcggccgcgctccccaacaaggacgaggacgtttatgtccgcgctggtgtttctggcgatcataccgagcagcgttgacttgcccacgcccgaccccgagaaaatgcccacccgctgtcccttccccagcgttaacattccgtctatagccctcaccccggtggacagcacctcgcggatgcgcctccgcttcatggggtttggcggcgcgttgtttacgggcaccttggcttgngcgtccagcggggggccatcgtccagtgggttcccaagcgggtctattattcttcccagcagttgctccgagactggcagaaggggcatactccccgtggcctccacacacatgccgggcctcaccccctctatattttcgacgggcatcagcaggacttttttgccgttgaacccacgacctcggacgatattagtctgccgccctcgccgtgtatga

SEQ ID NO: 17544 - protein, 205 aa, Unknown
  Obtained from environmental sample
  misc_feature (1)..(205): Xaa is any amino acid
MRTCLPLCIKNSATAVPARAQRRRSRGGWSEVATTTTLRRSPSVPRSFSMNSFSSRPRSPTRTRTFMSALVFLAIIPSSVDLPTPDPEKMPTRCPFPSVNIPSIALTPVDSTSRMRLRFMGFGGALFTGTLAXASSGGPSSSGFPSGSIILPSSCSETGRRGILPVASTHMPGLTPSIFSTGISRTFLPLNPRPRTILVCRPRRV

SEQ ID NO: 17545 - DNA, 408 bp, Unknown
  Obtained from environmental sample
  misc_feature (1)..(408): n is a, c, g, or t
atgaactgctactggtgttccactcagaggcggactgagcttatcaagtacgcgctggaaaacggctttaacaaaatcgccctgggccatcatttggacgacatcatcgaaactttctttatgaatttgacaggggaggggacattctcggccatgcccatgtaccttgcctaccgaaagtatccgctggctattatacggcccctcggctatctggaagagcggcagatcattgcctgcgccgaggagcagaactttctgtcggcagtttgcacctgcccttacggtcttaattcccgccgccgcgatattcgggcccgtatagccgcgttcacgcggaactccggcgcggaaaaacgccgcatccttgcggcgctgttgtcagaagggctgcttagggaggaatag

SEQ ID NO: 17546 - protein, 135 aa, Unknown
  Obtained from environmental sample
  misc_feature (1)..(135): Xaa is any amino acid
MNCYWCSTQRRTELIKYALENGFNKIALGHHLDDIIETFFMNLTGEGTFSAMPMYLAYRKYPLAIIRPLGYLEERQIIACAEEQNFLSAVCTCPYGLNSRRRDIRARIAAFTRNSGAEKRRILAALLSEGLLREE

SEQ ID NO: 17547 - DNA, 333 bp, Unknown
  Obtained from environmental sample
  misc_feature (1)..(333): n is a, c, g, or t
atgctgctggaatcgtcatctcctgatntagggcatcagcttgaaaatatcgtgtatctggaactgcttcgccgcggacgcagagtcagcataggaaaacttgccgaaaaggaaattgactttgtggtgacagacaccggtttggtctactatcaagtggctgcttctgttcttgacccggcaacacttgcccgtgaacttgaggggctaaaaaaaatcaaagacaattatcccaaatatttactcacattggacgatatcccttcaagcgcaaaccacgacggcattattcagatgaatttgatagaatggcttttaaagcataatatgtga

SEQ ID NO: 17548 - protein, 110 aa, Unknown
  Obtained from environmental sample
  misc_feature (1)..(110): Xaa is any amino acid
MLLESSSPDXGHQLENIVYLELLRRGRRVSIGKLAEKEIDFVVTDTGLVYYQVAASVLDPATLARELEGLKKIKDNYPKYLLTLDDIPSSANHDGIIQMNLIEWLLKHNM

SEQ ID NO: 17549 - DNA, 330 bp, Unknown
  Obtained from environmental sample
  misc_feature (1)..(330): n is a, c, g, or t
atgagagaacaacctcgtgatttggaacgcctccaacatatgttggaggccatagacgacatcgccgaattcgtagagcataaaacttttgaagattttaaatctacaaagatgcttaaacacgccatttttcgcaatcttaccatcattggcgaggccgccaatctgctgaccaaagagtataaggatgcgcatagcgttatcgaatggcataagattgttggtatgcgacatattttggtgcatggttattatgatgccgatgacaagattgtttggcaaacggtaacggaagatttgccaaaattgcgtgccaatctgaaagtgtaa

SEQ ID NO: 17550 - protein, 109 aa, Unknown
  Obtained from environmental sample
  DOMAIN (31)...(107): Protein of unknown function DUF86
  misc_feature (1)..(109): Xaa is any amino acid
MREQPRDLERLQHMLEAIDDIAEFVEHKTFEDFKSTKMLKHAIFRNLTIIGEAANLLTKEYKDAHSVIEWHKIVGMRHILVHGYYDADDKIVWQTVTEDLPKLRANLKV

SEQ ID NO: 17551 - DNA, 513 bp, Unknown
  Obtained from environmental sample
  misc_feature (1)..(513): n is a, c, g, or t
atggacgaagcctccttattagccctacaaaatgaaattgctgaattagagcaaaagttagctgataaaaaacaccggcttgaggaagcgcgaacatctctcgaaaaacaaactgccgatgcggcgacaatacaaaaaccgctgtcagggaattcatctcaagcctcctttattgagattaacaaccattccccgccggaaatcaagatcgccctgtttcgctctctgttcaaggggcgtgaggatgtttacgcaaaacgttttgaaagcaagaccggaaaatccggctaccggcccgcctgccggaatgaatgggttagaggtgtctgtgaaaaacccagaacaaactgcggcagttgcaatcaacgctcgtttgaaccgataactgatgatgtggtcagaaatcatctttccgggtctattgtcatgggagtatatcctttgctgccaagtgagacctgtaattttctggcgattgatttgacaaagagatgggcggaagctcgccgataa

SEQ ID NO: 17552 - protein, 170 aa, Unknown
  Obtained from environmental sample
  misc_feature (1)..(170): Xaa is any amino acid
MDEASLLALQNEIAELEQKLADKKHRLEEARTSLEKQTADAATIQKPLSGNSSQASFIEINNHSPPEIKIALFRSLFKGREDVYAKRFESKTGKSGYRPACRNEWVRGVCEKPRTNCGSCNQRSFEPITDDVVRNHLSGSIVMGVYPLLPSETCNFLAIDLTKRWAEARR

SEQ ID NO: 17553 - DNA, 318 bp, Unknown
  Obtained from environmental sample
  misc_feature (1)..(318): n is a, c, g, or t
atgctcaagtgttttgtggttattgatttaaaaaccggcaagttgagctatcaggatattggacaaattgatttttatgtccggtactttgatgaccaaattaagttaccggaagacaatcctacattgggtattattctgtgcgccgataaaaatgaaactatggcaaagtattcggtattatcggacaaagaaaacttgttagcctcaaaatatatgctctatttgccaacggaggaagaactgaaaaaagaattggaacgggagaggctacgtattgaaagtaagctggaagaagatagcgatagtgtaaagtaa

SEQ ID NO: 17554 - protein, 105 aa, Unknown
  Obtained from environmental sample
  DOMAIN (1)...(89): Protein of unknown function (DUF1016)
  misc_feature (1)..(105): Xaa is any amino acid
MLKCFVVIDLKTGKLSYQDIGQIDFYVRYFDDQIKLPEDNPTLGIILCADKNETMAKYSVLSDKENLLASKYMLYLPTEEELKKELERERLRIESKLEEDSDSVK

SEQ ID NO: 17555 - DNA, 696 bp, Unknown
  Obtained from environmental sample
  misc_feature (1)..(696): n is a, c, g, or t
ttgtacagaccttcgcgcgctacggcgcaggttttaagtttcagatggtggagcaatctcggaagcacatgtcttccagcgcttggacgctctcttttacttgctttcctgtccgcgacaaccgcctgtatcctggcgttcttcgcggcgggcgcggtaaaactccttgaatcggacatcaaagaaacttccctcccttctaatttaatccgcttttttgccgcttctccgataatatcatcgggcattgttttgggattgggctggattattatttacggaagaagtttttcccgctctcccgccgcgctggtattacttcacggggtaagcgctatgcctttcgcttttaattttatttccgaaggtttccgctctcttcccgccaacacattgaatgcggcggcagttttaggcgctgaccccttacgcgggcttttaaccgccgccctgccgctttcgctgtccagagtacgttccgcgtggggtttcgccgcggcgctcagtcttggagaacttaacgcggtgatgatgcttggcatggaaggctgggaaactttacccctgtatatctaccgcgccgttgccgcttatcgttacgggactgcatgcgccgccgggaccctgctgattctttgctgcgcagcctgttttttgttttcggaaacagggggaacacaatatgctcgaagttaa

SEQ ID NO: 17556 - protein, 231 aa, Unknown
  Obtained from environmental sample
  misc_feature (1)..(231): Xaa is any amino acid
MYRPSRATAQVLSFRWWSNLGSTCLPALGRSLLLAFLSATTACILAFFAAGAVKLLESDIKETSLPSNLIRFFAASPIISSGIVLGLGWIIIYGRSFSRSPAALVLLHGVSAMPFAFNFISEGFRSLPANTLNAAAVLGADPLRGLLTAALPLSLSRVRSAWGFAAALSLGELNAVMMLGMEGWETLPLYIYRAVAAYRYGTACAAGTLLILCCAACFLFSETGGTQYARS

SEQ ID NO: 17557 - DNA, 702 bp, Unknown
  Obtained from environmental sample
  misc_feature (1)..(702): n is a, c, g, or t
ttgattcttgaaaccatggaagattatttgccaggttttttccgccaatccctagtttacatttccggtccaagtcatgccgaggaagtatcgcggggaaaagttaccggtcttatagccgccagtgaaaatcccaagaactccatccgttttagggatttaataagaggccctcatttactagtttattcatcgcttgatgtcaggggggtacaggcggcggcggcggcaaagaatgttattgcaatttcatttgggttgttagacgcaatgaaaaccattggcaaaatggatatgttcggtgacggcactgaatcccttctgcttgcggcgggactaaacgagatacagattctaggcaaagcgttgggtgcgactcataccgagacatttacttccatttccgggattggcgatttagacgttacgtgccgttctatttatggaagaaacaggcgttttggcagggaaataatcgagaaaaatattcttaaaccgtttaaaaatatcgatgatcttctttcccgaatcggcgaaattggctatttgccggaaggcgttgccgcggcaaaatatgtccatattctggcggagaaacacaagcttaaaatgcccgtctccatcggattatgcagacttttaaacagggaaattgatccgcaggagtactgtgaaactcttttggcggattgggttaaataa

SEQ ID NO: 17558 - protein, 233 aa, Unknown
  Obtained from environmental sample
  DOMAIN (66)...(227): NAD-dependent glycerol-3-phosphate dehydrogenase C-terminus
  misc_feature (1)..(233): Xaa is any amino acid
MILETMEDYLPGFFRQSLVYISGPSHAEEVSRGKVTGLIAASENPKNSIRFRDLIRGPHLLVYSSLDVRGVQAAAAAKNVIAISFGLLDAMKTIGKMDMFGDGTESLLLAAGLNEIQILGKALGATHTETFTSISGIGDLDVTCRSIYGRNRRFGREIIEKNILKPFKNIDDLLSRIGEIGYLPEGVAAAKYVHILAEKHKLKMPVSIGLCRLLNREIDPQEYCETLLADWVK

SEQ ID NO: 17559 - DNA, 360 bp, Unknown
  Obtained from environmental sample
  misc_feature (1)..(360): n is a, c, g, or t
gtgaaaatcaccggcggcggagcgcattacgccatcgacaccagcggcgtgccggactttgtgcgcaaagctttaaattgcgtgcggatgctgggtacggcggtggtcttgggcgctaccggcgacttgaccttcaacgtgcagatggaactgatgggtccggccaaatccctgatcggcgttattgagggcaattcggtaccgcgattgtttattccacagatgctgcggtattacaaggaagggcgcttccctgtcgacaggttgattcaatactacgattttgcggatatcaatcaggcattggccgattccagcgcaggcaaggtgatcaaagcagtggtgaaaatgccgcactaa

SEQ ID NO: 17560 - protein, 119 aa, Unknown
  Obtained from environmental sample
  misc_feature (1)..(119): Xaa is any amino acid
MKITGGGAHYAIDTSGVPDFVRKALNCVRMLGTAVVLGATGDLTFNVQMELMGPAKSLIGVIEGNSVPRLFIPQMLRYYKEGRFPVDRLIQYYDFADINQALADSSAGKVIKAVVKMPH

SEQ ID NO: 17561 - DNA, 678 bp, Unknown
  Obtained from environmental sample
  misc_feature (1)..(678): n is a, c, g, or t
atggccatagcggggctgncaatctacggcattttcacggcctcgtgggcctccaacaacaagtattcgatgctttccggtatgcgcgcgtcggcccacatggtcagctacgagatagggctggtcatggcagtgatagccgtctttgtgcaggccggcgcctatgacccgcacaagatcatcgagatgcagacgggcctctggaacgtgtttggatggaacgtgttccgccaaccccttggcttcctggtgttcatggtctgcgccttcgccgagaccaaccgcctgccctttgactttgcggagggcgaatccgaaatcatcgccggcttcctcacggagttcggcggtatgaagctgggctttttgtggctgtccgagtacatccacatggtcacggcgtccgcgctgatggtgacgctctactgcggcggctggcatgtgccctttgtgccagaccccgtcggtcttttggggccactcttcgggccggccctgaccttcgcggtcttcgccattaagctgctgttcttctgctgggtgttcatctgggtgcgctggacgctgccccgcttcaggtacgaccagctcatgtcccttgggtggaaggtcatgttccccttgggccttgcaaacctgctcttttgcgcctggctgatatacggccgggtggtctga

SEQ ID NO: 17562 - protein, 225 aa, Unknown
  Obtained from environmental sample
  DOMAIN (1)...(221): NADH dehydrogenase
  misc_feature (1)..(225): Xaa is any amino acid
MAIAGLXIYGIFTASWASNNKYSMLSGMRASAHMVSYEIGLVMAVIAVFVQAGAYDPHKIIEMQTGLWNVFGWNVFRQPLGFLVFMVCAFAETNRLPFDFAEGESEIIAGFLTEFGGMKLGFLWLSEYIHMVTASALMVTLYCGGWHVPFVPDPVGLLGPLFGPALTFAVFAIKLLFFCWVFIWVRWTLPRFRYDQLMSLGWKVMFPLGLANLLFCAWLIYGRVV

SEQ ID NO: 17563 - DNA, 411 bp, Unknown
  Obtained from environmental sample
  misc_feature (1)..(411): n is a, c, g, or t
atgcacgctctggtcaacctgcttggccacttccgtgccggccttggactgctccaaggtggcgtccaccgcggccttcgtgcggacggcgaactgatccaagttttcctttatcttgccaaggatttccacggtctggcccaccatctcctcgccgcgctcaacggcgttcttggcgtctatgttgtgctgggcgatctccttggcggaggcgccgctgcgctcggccagctttctgacctcttctgcgaccaccgcgaagcccttgccctgctcgccggccttggcggcctcgatggcggcgttcagcgaaagcaggttggtctggttggcgatctcctgaatcacgccgatggcggccgcgatcttggtcgtggtctgcgtgatgccgttcatggcctccttggttga

SEQ ID NO: 17564 - protein, 136 aa, Unknown
  Obtained from environmental sample
  misc_feature (1)..(136): Xaa is any amino acid
MHALVNLLGHFRAGLGLLQGGVHRGLRADGELIQVFLYLAKDFHGLAHHLLAALNGVLGVYVVLGDLLGGGAAALGQLSDLFCDHREALALLAGLGGLDGGVQRKQVGLVGDLLNHADGGRDLGRGLRDAVHGLLG

SEQ ID NO: 17565 - DNA, 897 bp, Unknown
  Obtained from environmental sample
  misc_feature (1)..(897): n is a, c, g, or t
ttgaaaactgaggctggggggggtgttttttgggcccagaacgggcccagattgaaacaaggggtctttttttttccgggccggctttttttgccggcaagcgtccaggtcaaggcaagccagttttgggtttccaacagggggctgggtaattcaagagcccaggacgcccagggaagaaaaaatcctggccgaattcaagaaagacgaccgcaaataagccaaaaggcgggagggccaatcagatccacgcccgggccgcggaattcaatttttttgcagatatctgagggacggcacgacatgaccagacatctactcggcgttgtgcccggcgacggcatcggccctgaagtggtgggtcagacccgtcggacggcagaagccgcggccgcgcttttcggctttgaacttatgtggcgggaattcccctttggggccggttattacctggaacacggcctcgttctgccgccttcggccttgggcgatatgggggaaaccgaagccctgctcctgggggccgtgggcgacccccgggtcaaacccggccccttggaacaggaactcctcttggccatgcgctttcatttcgaccaatacctgaacctccgcccggcccggagctttaatggagcgcccactacggtgcccctgcctttcggccgcagcctggacgcggtggtggttcgggaaaacaccgaggatttttacatgggctctggggggccggagccagggaaggctggaaaccggcctcaaaacccggcgcggcctctacgcgctgaccggccgcttgagcctgggcctggacccggcgtcagaggccgccgtctccatcggcctattgagccggccgggagtggcccgcatcaccctccgggacaggagagctga

SEQ ID NO: 17566 - protein, 298 aa, Unknown
  Obtained from environmental sample
  DOMAIN (106)...(283): Isocitrate/isopropylmalate dehydrogenase
  misc_feature (1)..(298): Xaa is any amino acid
MKTEAGGGVFWAQNGPRLKQGVFFFPGRLFLPASVQVKASQFWVSNRGLGNSRAQDAQGRKNPGRIQERRPQISQKAGGPIRSTPGPRNSIFLQISEGRHDMTRHLLGVVPGDGIGPEVVGQTRRTAEAAAALFGFELMWREFPFGAGYYLEHGLVLPPSALGDMGETEALLLGAVGDPRVKPGPLEQELLLAMRFHFDQYLNLRPARSFNGAPTTVPLPFGRSLDAVVVRENTEDFYMGSGGPEPGKAGNRPQNPARPLRADRPLEPGPGPGVRGRRLHRPIEPAGSGPHHPPGQES

SEQ ID NO: 17567 - DNA, 324 bp, Unknown
  Obtained from environmental sample
  misc_feature (1)..(324): n is a, c, g, or t
gtgcgtaccgcaaaaagcaagggcgcagacagcttatatattctgcgccgccatgtttttaaaaactcggtaatcccggcaattaccgtttttggcatgattattgcggatgttttttccggaagcataatcatagaaaatgttttttccgttcccggaattggaaggctccttattaccgcaattagctcaagggattatcctttaattcaggcgttaatggtttacattgcctttattgtcgttattgcaaatacgttagccgacattacaattttaattattgatcccagaattaagttgtcaaacacggaaatacaatga

SEQ ID NO: 17568 - protein, 107 aa, Unknown
  Obtained from environmental sample
  misc_feature (1)..(107): Xaa is any amino acid
MRTAKSKGADSLYILRRHVFKNSVIPAITVFGMIIADVFSGSIIIENVFSVPGIGRLLITAISSRDYPLIQALMVYIAFIVVIANTLADITILIIDPRIKLSNTEIQ

SEQ ID NO: 17569 - DNA, 534 bp, Unknown
  Obtained from environmental sample
  misc_feature (1)..(534): n is a, c, g, or t
atgtacgtgctgctcaacaagcccaaaggctacgttaccaccgttgaagacccccacgccgataaaacggtgatggacttgatagacggcgcgtgtaaggagcgcgtgtaccctgtggggcggttggacaagaacaccacaggcgtgctgctcttcaccaacgatggcgagctgaccaagcagcttactcaccccagctacaacaagcgtaaggtatatcacgttgtgttggacaaaacgctgaaaaagcccgatatggacaagctggtaagcggcattgagttggaggacggtttagcggtggcagatgaggtgggctacgccaaccttgaggacaaaaccgaagttggcattgaaattcactcggggcgcaatcgcattgtgcgccgtatgttcgaggcgttgggctacgaggtgaaaaaactcgaccgcgtgtactttgcaggcttaacaaaaaagtcgttggagcgtggcaagtggcgcatactttcgcccaaagaggtgagcatgctcaaaatgggagcgtatgagtag

SEQ ID NO: 17570 - protein, 177 aa, Unknown
  Obtained from environmental sample
  DOMAIN (1)...(134): RNA pseudouridylate synthase
  misc_feature (1)..(177): Xaa is any amino acid
MYVLLNKPKGYVTTVEDPHADKTVMDLIDGACKERVYPVGRLDKNTTGVLLFTNDGELTKQLTHPSYNKRKVYHVVLDKTLKKPDMDKLVSGIELEDGLAVADEVGYANLEDKTEVGIEIHSGRNRIVRRMFEALGYEVKKLDRVYFAGLTKKSLERGKWRILSPKEVSMLKMGAYE

SEQ ID NO: 17571 - DNA, 852 bp, Unknown
  Obtained from environmental sample
  misc_feature (1)..(852): n is a, c, g, or t
atgaaccttcttttgaaggttcgggaaaaaactattttggagataatcatggaaacggacaatcaaaatcccgctcagtacgagtggggacccttctctttcggggacggggagcatatctttgacatccgttatgacccggtgttcaaagccgtattcactaaagacacatatgaatcaagaggcgcattatccgccctgatttcaacgcttatcggtcatactgtcgcagtagaggcaataaccgctaatgagccgcctattgacgatctgaggcagagatacatacgcttcgatgtatcctgcagaacaaaggaaggcgagcttgtcaatgtagaaatgtcatttaatcccggcgcggatgaacaggcgcgtattgagtattatactgcaaggctgtttaccggacaggatatacatggaaaaaataaaaattataatgatttgaaaaaaacttatcaaatcaccattcttgcaaaggaaatatttttcccggatgaagaacttatacatgacttttcatacagtgatcttaaaacccatgtctcatttgccggaaaaacaagaataataactgttgaattggaaaagacgaaacccatagccgaaaaacctgttgataaaatgacaaaaacggaattttgggcggtattttttgaatatttgacagatcccgaaaagaggactaaaatcattgatatatccaatcgagaggagggcatagcgttggcgataaaaactatgacaggttttacgcaaaaagaattagattacatgcgagaaactgctcgtataanaagcgaactggnatatcanagtttaaatgacaacgccgaacgtaaaggtctttga

SEQ ID NO: 17572 - protein, 283 aa, Unknown
  Obtained from environmental sample
  misc_feature (1)..(283): Xaa is any amino acid
MNLLLKVREKTILEIIMETDNQNPAQYEWGPFSFGDGEHIFDIRYDPVFKAVFTKDTYESRGALSALISTLIGHTVAVEAITANEPPIDDLRQRYIRFDVSCRTKEGELVNVEMSFNPGADEQARIEYYTARLFTGQDIHGKNKNYNDLKKTYQITILAKEIFFPDEELIHDFSYSDLKTHVSFAGKTRIITVELEKTKPIAEKPVDKMTKTEFWAVFFEYLTDPEKRTKIIDISNREEGIALAIKTMTGFTQKELDYMRETARIXSELXYXSLNDNAERKGL

SEQ ID NO: 17573 - DNA, 840 bp, Unknown
  Obtained from environmental sample
  misc_feature (1)..(840): n is a, c, g, or t
gtgccgtatggcagcacgcaagacgcgggggttggaatgaaagtcggcggctgggggcttgtcgctttaggcgcgttatctttccttataccgggcgtcggggggtttttaggctccgcgctcatcggcactggcctttccatggcgctcggcggaacggtactgctgaacgtcaacgtgccgtcgctgaaggacagggaaaaaccggagcaggatccttcaatccgtggcggcaaaaaccaaatgaggcaaagcggcagaatcccagtgctgttcggacgacaccgagtatatccagacctcgccgccaatccgcacacccaaatcattgacggcaggcagtattacacgcaacttttttgcggcggctacaaagactgcataatcgataaaagcagctttaagttaggcgaaacttatttgaccgatttgtcgcagacaaaaaatataaactcgattctttcaggcgcggatccggtcgtcaggatggaaatactgcagaacggcgaagcgtctggcatttacccgcactgcgtccacgaggacgcggtaaacgcgcccttgcaaaacctgattgacgatgccaacggcgataaaatatccggcgaacttatccgctcaacgccggacggcaccgacgcggttaacgtggatattttcttctacaacgggctgggaaaatatgacgacaaaggcaaggtggtgtccgcgacggtggaggtaagggcttcgtacaaacctttcggcgcggcggattccgcttacgcgctccttggatacttcagcaacgggagcaacgccgtctccggagcggaattaaaacaaaacgctgccagataa

SEQ ID NO: 17574 - protein, 279 aa, Unknown
  Obtained from environmental sample
  misc_feature (1)..(279): Xaa is any amino acid
MPYGSTQDAGVGMKVGGWGLVALGALSFLIPGVGGFLGSALIGTGLSMALGGTVLLNVNVPSLKDREKPEQDPSIRGGKNQMRQSGRIPVLFGRHRVYPDLAANPHTQIIDGRQYYTQLFCGGYKDCIIDKSSFKLGETYLTDLSQTKNINSILSGADPVVRMEILQNGEASGIYPHCVHEDAVNAPLQNLIDDANGDKISGELIRSTPDGTDAVNVDIFFYNGLGKYDDKGKVVSATVEVRASYKPFGAADSAYALLGYFSNGSNAVSGAELKQNAAR

SEQ ID NO: 17575 - DNA, 657 bp, Unknown
  Obtained from environmental sample
  misc_feature (1)..(657): n is a, c, g, or t
gtgaaaaaacacagcgcaataatggatgaattcgatcccggaaaaaaagtggggctcatagttgacgaatggggaacctggttcgatgtggagcctgggacaaatcccggtttcctttatcaacagaacaccatgcgggacgctctggtagcgggcattcatttcaatatattcaataaccacgcggaaagggtacatatggcgaacatagcccagaccatcaatgttttgcagtccgttattcttaccgaggggccgaacatggttctgacgccgacctaccatgtttatgacatgtacaaggttcatcaagacgccgtgaaactgcctgtgtatgttgaaagtgaaacggttcgtgattttgcggctgtcagcgcaagcgcttccatagacggcgataataaaatacacatttcccttaccaacgccgatccggtaaaacagcagtccgccgaggttgaattgcgcggctggaacataggcgcgtcgacaacggtgaaagggcaaatagttacatctgacaggatgcaggatcataatacgttcacaaagcccgatacggtaacgttaaaggatttttcaagcgcgaaaatttccggcagcatcgtaaacgcggaactgccgccccggtctgtggtaaccctggaacttgcctga

SEQ ID NO: 17576 - protein, 218 aa, Unknown
  Obtained from environmental sample
  DOMAIN (22)...(211): Alpha-L-arabinofuranosidase C-terminus
  misc_feature (1)..(218): Xaa is any amino acid
MKKHSAIMDEFDPGKKVGLIVDEWGTWFDVEPGTNPGFLYQQNTMRDALVAGIHFNIFNNHAERVHMANIAQTINVLQSVILTEGPNMVLTPTYHVYDMYKVHQDAVKLPVYVESETVRDFAAVSASASIDGDNKIHISLTNADPVKQQSAEVELRGWNIGASTTVKGQIVTSDRMQDHNTFTKPDTVTLKDFSSAKISGSIVNAELPPRSVVTLELA

SEQ ID NO: 17577 - DNA, 654 bp, Unknown
  Obtained from environmental sample
  misc_feature (1)..(654): n is a, c, g, or t
atgagcaaaaggtaccggttcgccattatcatagtgatagtggcggtatgttttgtattcctctggccgagtctgcgctggtattttctggttcccagggatcaacaagccaaagcgctacaatcccgcgagcagataaaaaactacgcgtctcagacagcgcaagcggattatcagcggctaattacaatcgcgcaggaagacggcgatattccagaagaactgtctttccttattaagcaggcgaaaaagataaacaaggatacaaaacagccctcccctaacaaatgggatgccagaacaacgctttccgctttttccagcagaagggaggtcctggaagccattgagactaaacaccgggaagaaatttttgcgttgaaggatttgcaaaagaacgccgtacagcttgggcttgatctttccggcggtttaagcattgtcctgcaggctgattttaacgcccttcagcaaaagctggatcgccccctgactgacaaagataaggaagacgcggttaacagcgcgctggaagtgcttaacaaccgcatagaccgcttcggccttacagagcctgttataaggaaacaggggccggatcaaatttacctggaaatcccggcaccgccgacccggaacggatncacgacataa

SEQ ID NO: 17578 - protein, 217 aa, Unknown
  Obtained from environmental sample
  SIGNAL (1)...(21)
  misc_feature (1)..(217): Xaa is any amino acid
MSKRYRFAIIIVIVAVCFVFLWPSLRWYFLVPRDQQAKALQSREQIKNYASQTAQADYQRLITIAQEDGDIPEELSFLIKQAKKINKDTKQPSPNKWDARTTLSAFSSRREVLEAIETKHREEIFALKDLQKNAVQLGLDLSGGLSIVLQADFNALQQKLDRPLTDKDKEDAVNSALEVLNNRIDRFGLTEPVIRKQGPDQIYLEIPAPPTRNGXTT

SEQ ID NO: 17579 - DNA, 387 bp, Unknown
  Obtained from environmental sample
  misc_feature (1)..(387): n is a, c, g, or t
gtggaaactgggtttctcttccctcggagggaaaggctaaagggaagagacaacatacgggaagttttcaataagaaaaaggctttttcctgccccggcgccaggcttttgatgagcgggaacgggctaaaatacaacaggattgccttttctttcccccgtaagtacggaaacgcggtggagcgcaaccattcccggcgtttaagcagggaagcttaccgccttttacggagccaacttcgtcaaggatacgacctggtattgctggtgtattcaagcagggataatttttctgcaagaatgggacagttgcgggcattgttcttgaaagcggggttgctcagttttaactccggacagtcagaaataaacatttcgggaatgtaa

SEQ ID NO: 17580 - protein, 128 aa, Unknown
  Obtained from environmental sample
  DOMAIN (7)...(112): Ribonuclease P
  misc_feature (1)..(128): Xaa is any amino acid
METGFLFPRRERLKGRDNIREVFNKKKAFSCPGARLLMSGNGLKYNRIAFSFPRKYGNAVERNHSRRLSREAYRLLRSQLRQGYDLVLLVYSSRDNFSARMGQLRALFLKAGLLSFNSGQSEINISGM

SEQ ID NO: 17581 - DNA, 687 bp, Unknown
  Obtained from environmental sample
  misc_feature (1)..(687): n is a, c, g, or t
gtgccaattgagataagggttaccgataccggcataggtattgcaaaagaagaacagggaaagctgtttcattctttcgttcaggttgactcaagtacctcgcgcaaatacggcggtaccgggcttggccttgcaatcacaagaaaaatcacggaaatgatgcagggcaatattcgcattgaatcggaattgggcaagggcgccacatttatcgtttcaatcaaagcagatctgaaaaagcaggatgcagcagcggatcaatcaaattcggccgagacatcagcggcgtcaacagaagaattcaaggggaaacatatactactggtagaagatgtagaaattaaccgggaaattgtcattgctttacttgaaaattttgaaattgaaattaccgaggcggaagatgggcagcaggcgcttgataaatttgccgcagctcccgataaatttgatttgatttttatggacatccatatgcccggcttaaacggctacgaatcgaccaagcttattcgcgctcttgatcatcccaaggcaaaaagcattcctataatcgccatgacagccaatgtgttcaaggaagacattgaacactgcctggcggccggaatgaacgaccatttgggaaaaccactcgattttaacgatgtggtaaaagttttaaacaaatatctggggaaaagttaa

SEQ ID NO: 17582 - protein, 228 aa, Unknown
  Obtained from environmental sample
  DOMAIN (1)...(77): Histidine kinase-, DNA gyrase B-, and HSP90-like ATPase
  misc_feature (1)..(228): Xaa is any amino acid
MPIEIRVTDTGIGIAKEEQGKLFHSFVQVDSSTSRKYGGTGLGLAITRKITEMMQGNIRIESELGKGATFIVSIKADLKKQDAAADQSNSAETSAASTEEFKGKHILLVEDVEINREIVIALLENFEIEITEAEDGQQALDKFAAAPDKFDLIFMDIHMPGLNGYESTKLIRALDHPKAKSIPIIAMTANVFKEDIEHCLAAGMNDHLGKPLDFNDVVKVLNKYLGKS

SEQ ID NO: 17583 - DNA, 675 bp, Unknown
  Obtained from environmental sample
  misc_feature (1)..(675): n is a, c, g, or t
ttgcccgcggatatacatctggcggcggattgggcgggcgcgcgncaagtcaaggtctggcagccgcaaagcggtttccgctacgactttgtgcaaatgggaatccataacgcccgcaaatatttacaggaacgtattatgaatcaactccgtgaagcttcgcccgccgacggattaaaacgcctgcaggaaatttttaaattggaatctctgccgcggcgtattgagtgctacgacatctcgcatattcagggcagtgaaaccgtcgcttcgcaagcggtatttctcgacgggctgccgggcaaaagcgagtaccgcaaatacattatcaatcaagaccaccccgacgactttgcctctatggaagaagttttgacccggcgctgcatgcggctagacgacaacaaccgcccggatttggtagtcatcgacgggggcaaaggacagctcggcatagcggtacgcgtctggaaaaactttaacttaaatattccgctctgcgcgctagccaaacgcgaggaggaaatttttgttccgcgccgcagtgagccgttggttttgccgcggcgtgacccggggctgcgcctgcttcagaccgtccgcgacgaggcgcaccgcttcgccgtgtctttccaccgtctccggcggaaaaagagaacactggccgagaaataa

SEQ ID NO: 17584 - protein, 224 aa, Unknown
  Obtained from environmental sample
  DOMAIN (62)...(209): UvrC Helix-hairpin-helix N-terminal
  misc_feature (1)..(224): Xaa is any amino acid
MPADIHLAADWAGARQVKVWQPQSGFRYDFVQMGIHNARKYLQERIMNQLREASPADGLKRLQEIFKLESLPRRIECYDISHIQGSETVASQAVFLDGLPGKSEYRKYIINQDHPDDFASMEEVLTRRCMRLDDNNRPDLVVIDGGKGQLGIAVRVWKNFNLNIPLCALAKREEEIFVPRRSEPLVLPRRDPGLRLLQTVRDEAHRFAVSFHRLRRKKRTLAEK

SEQ ID NO: 17585 - DNA, 732 bp, Unknown
  Obtained from environmental sample
  misc_feature (1)..(732): n is a, c, g, or t
atgacaagaattataaacagcggctatagtgttgtccagtcagacgacaggcatgagcaggtcgggctgaatgaaaaaaggattatcattgccacgagtgaagacagagttgccggatggctgatggaattaatacaaccttgtatgagaaagttctatacactgaagtatgccgcaacagagagggagtttaattcattggcgcgtaaactgaagatggaggctgcgtttattgagattggtttctttggggaagcgatgatcaactgtcttgaacgtatacacaagctatatcctgaattacgggttattctgttcacggtttccgatatacagtctgacgaagccgcccgttatatttattggtgcggtggtaactttgtttccctgcgggataagccggagcggatagagaagcggctcaaggttctattggagggtaaaaagtacataccggaaaatttgctgttgggtgtgaaagattttgagcatatctccggaataccgccgtatttgacgcataaggagattgaaattgtccgttgtatagcacatgaaaaaacggatatggaaatgacatattgtttgcgagtgagtattagtacgcttaataaccatctgactaatattttccgaaagtttaggatacgtaacagggttgggatagtcaaactggcagtagcaaaggggattttgccggaaagggagttgcggttaagcttattgaagtga

SEQ ID NO: 17586 - protein, 243 aa, Unknown
  Obtained from environmental sample
  DOMAIN (169)...(226): Bacterial regulatory proteins, luxR family
  misc_feature (1)..(243): Xaa is any amino acid
MTRIINSGYSVVQSDDRHEQVGLNEKRIIIATSEDRVAGWLMELIQPCMRKFYTLKYAATEREFNSLARKLKMEAAFIEIGFFGEAMINCLERIHKLYPELRVILFTVSDIQSDEAARYIYWCGGNFVSLRDKPERIEKRLKVLLEGKKYIPENLLLGVKDFEHISGIPPYLTHKEIEIVRCIAHEKTDMEMTYCLRVSISTLNNHLTNIFRKFRIRNRVGIVKLAVAKGILPERELRLSLLK

SEQ ID NO: 17587 - DNA, 801 bp, Unknown
  Obtained from environmental sample
  misc_feature (1)..(801): n is a, c, g, or t
atgggaagggacaaactaaggataagggagtatttttcagaagtcgagacggaaaaagagcacaacggctatttctgcagcgtaggggaggcgctgacaatagcaatattgggttcaatatgcggcttgcgaaacacctgtcaaatccatcaatgggcatcaagccagcgcgtcagcgagtttctgtcggtgcattttctgataaacgacatcccttgttattactggcttttatgccttttaaagctgataaagcctgactcgcttaacagatgcttcatgaaatgggcgcagtcgctaaggccaggtggagatggaagtgaagcctataccatttcattcgacgggaaaacaatccgttcaactggaaagatggacagctatgaaaacccgctgcatatactaagcgcgcacttggccgaacttggcataacaataggccaaaagacagtcggggaaaagagcaacgagattcctgcgatgagggagcttatagggcttttaaagatacagggctgcatgatagtcgccgacgcgcttaactgccagaaagaaacggctaaagctgtaatagaaggcaagggagactatttgttttcggttaaggacaaccagcagacattgaaggaagacatagaaggctatgttcaggacaggcatctgcagaaaacaatggacacggccgcaactgtcgaaaaaacgagcggcagggtcgaacggaggacagcgtatacaagcggcgacataggatggctttccggaaaggaggaatgggagggcctggcttgcatggagctgtga

SEQ ID NO: 17588 - protein, 266 aa, Unknown
  Obtained from environmental sample
  DOMAIN (111)...(266): Transposase DDE domain
  misc_feature (1)..(266): Xaa is any amino acid
MGRDKLRIREYFSEVETEKEHNGYFCSVGEALTIAILGSICGLRNTCQIHQWASSQRVSEFLSVHFLINDIPCYYWLLCLLKLIKPDSLNRCFMKWAQSLRPGGDGSEAYTISFDGKTIRSTGKMDSYENPLHILSAHLAELGITIGQKTVGEKSNEIPAMRELIGLLKIQGCMIVADALNCQKETAKAVIEGKGDYLFSVKDNQQTLKEDIEGYVQDRHLQKTMDTAATVEKTSGRVERRTAYTSGDIGWLSGKEEWEGLACMEL

SEQ ID NO: 17589 - DNA, 897 bp, Unknown
  Obtained from environmental sample
  misc_feature (1)..(897): n is a, c, g, or t
atggcgaggttagttcgacagcttttgcctgagctatatttcgccatgctcaaagacggcggggggactgcctgcaaagcgctgatgttcctgcgcatagacatccccgaattcaagcatgttttggaaagttccataccccgaatccccggtcttataatacgcggcgaagtgccgccctccaaacgcacaaaaaatatgctggacattgccacggaagaggcaagggcaatgggatgcgactatcttggtacggagcatcttttgtttgccgctatgcgagaacaggattccagcgttcaggtttaccttaaccagcgcgcggtggataccgacatgatgagggtgataatacagaccacattcagttggcctcataacaaaaacgacggcgaatatgttgccgccgaaaaatatcagacttacaacttccacagggaaaaagaacgcgtgcccattcactcaggacgcggcggtgaaaatgccgcgaagattaaaccggcggcatatccggtgctgactcctactctggataattatgcgcgcgatcttaccgcccttgccagagccggcaagatggaccctgtcgtcgggcgcaagtcggaaattaaccgtgcggttagaatcctcgcaaggcggacaaagaacaacccggttttaatcggagagccgggagtagggaagaccgccattgtggaaggtatcgcccagcttttggcaagcgaggtcgttccagagtcgctcgcgggcaagcgcattctttcgcttgatatgggtatgctggttgctggcactaaataccgcggcgagtttgaagagcgaataaaaaaaataatccgtgagggtaatcaggcgggaaacataattctgtttatagacgaaattcattcgatatag

SEQ ID NO: 17590 - protein, 298 aa, Unknown
  Obtained from environmental sample
  DOMAIN (71)...(123): Clp amino terminal domain
  misc_feature (1)..(298): Xaa is any amino acid
MARLVRQLLPELYFAMLKDGGGTACKALMFLRIDIPEFKHVLESSIPRIPGLIIRGEVPPSKRTKNMLDIATEEARAMGCDYLGTEHLLFAAMREQDSSVQVYLNQRAVDTDMMRVIIQTTFSWPHNKNDGEYVAAEKYQTYNFHREKERVPIHSGRGGENAAKIKPAAYPVLTPTLDNYARDLTALARAGKMDPVVGRKSEINRAVRILARRTKNNPVLIGEPGVGKTAIVEGIAQLLASEVVPESLAGKRILSLDMGMLVAGTKYRGEFEERIKKIIREGNQAGNIILFIDEIHSI

SEQ ID NO: 17591 - DNA, 633 bp, Unknown
  Obtained from environmental sample
  misc_feature (1)..(633): n is a, c, g, or t
atgaattcatacgattanaaagaagcggttacccttgttaagaaaatggcttacgcgaagtttgacgaatcggtagacctntccatcaagctgaatctgaaaaagagccaggctgtgcgcgacacggtggttcttccccaccagttccggggcgataaaaaggtgcttgtnttctgcaagcccgaaaaagaaaaggaagcgcaggaagccggagccgcgtttgtcggagccgacgacttaatcgaaaaggttaaaggcggctggacggattttgacattgccgtagcaacccccgacatgatgaaagatgtcggtaagcttggtatggtgttaggtcgcaaaggtcttatgcccaatccaaaaacaggaaccgttactttcgatcttaagggtactttagccgaacttagaaaaggccgcgttgagttcagagcggacaaaaccggcgttgtgcatcttgttgtcggcaaggtttccatggagccggaaaaagttgcggaaaatattgatgtagtggtaaccgaaattaaacgtaaacgtccgcctgatgttaagggcgagtttattcagtcggtatcggttgcgtctacaatggggcccggcgtttgggttgccatgagggatcaggagtag

SEQ ID NO: 17592 - protein, 210 aa, Unknown
  Obtained from environmental sample
  DOMAIN (2)...(201): Ribosomal protein L1p/L10e family
  misc_feature (1)..(210): Xaa is any amino acid
MNSYDXKEAVTLVKKMAYAKFDESVDLSIKLNLKKSQAVRDTVVLPHQFRGDKKVLVFCKPEKEKEAQEAGAAFVGADDLIEKVKGGWTDFDIAVATPDMMKDVGKLGMVLGRKGLMPNPKTGTVTFDLKGTLAELRKGRVEFRADKTGVVHLVVGKVSMEPEKVAENIDVVVTEIKRKRPPDVKGEFIQSVSVASTMGPGVWVAMRDQE

SEQ ID NO: 17593 - DNA, 381 bp, Unknown
  Obtained from environmental sample
  misc_feature (1)..(381): n is a, c, g, or t
gtgtccggcataccgtcagtcgtagaaatgcggaacacccaatggcaaaatgacaaagtnttcagcgccctgcgggagcgcaaaacaggctggtgtatcaccgacaacccaaacctgaaaaacttaatgaaacttgattttatatgcacaagcgagatagcctacatacgctttcacggacgcaacgcccaaatgtggtacaaaggcgacaacgtaacccgctatgactacctctacaccgacacggaattacagactttcataaatcccataaaagaactattgaaacacgcaaaaatcgtccagttatttttcaataaccacgccaaaagccaggccaccgtaaacgctaaaaagatggaattactgttaaaacagtga

SEQ ID NO: 17594 - protein, 126 aa, Unknown
  Obtained from environmental sample
  misc_feature (1)..(126): Xaa is any amino acid
MSGIPSVVEMRNTQWQNDKVFSALRERKTGWCITDNPNLKNLMKLDFICTSEIAYIRFHGRNAQMWYKGDNVTRYDYLYTDTELQTFINPIKELLKHAKIVQLFFNNHAKSQATVNAKKMELLLKQ

SEQ ID NO: 17595 - DNA, 510 bp, Unknown
  Obtained from environmental sample
  misc_feature (1)..(510): n is a, c, g, or t
atgctaatgcacattgatggtaattccttttacgccgcttgcgagcgcgtattccgccctgatttataccgcagccccatagccgtattaagcaacaatgacggtataatcatagctttaaacgcggagtgtaaaaatttaggctttaagcgaggcgatgttttctatcaagtcaaacacaacatggaaaaaaagggagtacagattttttccagcaattacaccctttatgccgatatgtccgcaagaatgaatttgatatataaccgtttcgcccccgaagtagaagcctactccatagacgaaagttttttattttttccttcatggaacaacgccgattttaccgaaatcgggtataacataaaaacagcggtatccaaagaaaccggaatacctgtatcaatagggattgcgcctaacaagacgcttgccaaaatgtgtaacacattggcaaaaaagcgcgaaggtattggacaataccgggtttatgncactggcangaactaa

SEQ ID NO: 17596 - protein, 169 aa, Unknown
  Obtained from environmental sample
  DOMAIN (5)...(169): impB/mucB/samB family
  misc_feature (1)..(169): Xaa is any amino acid
MLMHIDGNSFYAACERVFRPDLYRSPIAVLSNNDGIIIALNAECKNLGFKRGDVFYQVKHNMEKKGVQIFSSNYTLYADMSARMNLIYNRFAPEVEAYSIDESFLFFPSWNNADFTEIGYNIKTAVSKETGIPVSIGIAPNKTLAKMCNTLAKKREGIGQYRVYXTGXN

SEQ ID NO: 17597 - DNA, 783 bp, Unknown
  Obtained from environmental sample
  misc_feature (1)..(783): n is a, c, g, or t
gtgaaaaacaccgctgacaacacatacgccagggcggtggtcacttcttctgctgatgctgcggtaaccatttcaggcggaacagtttcggcaacaggtaaggcagtgtacagccgttcaggcggcccgataactatctccggcggcacagtttcgacaacgggggaatcgggttatacggtgcactcttccggaacactgaccatttcaggcggaacagtttcggcaacaggagcgtcgggctactcaatttaccacaattcctacgatgcgctgaccatctccggcggcacgatttcggcgacagggggcaggacggtgaacaacaatagttccggcgcagtaaccatctccggtggaacggtttcggcaacaacgggcacagcggtgtggaacaataacttcggtaaaataaccgtgtcgggaacggcaaaggttagctcagcaaacacaaatgccgcacaaggcacgattcatctttacggtaccagcggagccactgaccggctaatcattgaaggcggtactatagaaaacacctcaaccaccactggcaacacgatttacaacgcttccgtcggcgcggtaaacatttccggcggcacggtttcagcaacgggaacatcggtcagggcgattcacaacaatactaccggcgcggtaaacatttccggcggtacggtttcagcaacgggagcgtcgggctactcaatttacaacaattccaccggagtggtaaccgtcgatccggcggcgactattgtgggggcgagatacccgtaa

SEQ ID NO: 17598 - protein, 260 aa, Unknown
  Obtained from environmental sample
  misc_feature (1)..(260): Xaa is any amino acid
MKNTADNTYARAVVTSSADAAVTISGGTVSATGKAVYSRSGGPITISGGTVSTTGESGYTVHSSGTLTISGGTVSATGASGYSIYHNSYDALTISGGTISATGGRTVNNNSSGAVTISGGTVSATTGTAVWNNNFGKITVSGTAKVSSANTNAAQGTIHLYGTSGATDRLIIEGGTIENTSTTTGNTIYNASVGAVNISGGTVSATGTSVRAIHNNTTGAVNISGGTVSATGASGYSIYNNSTGVVTVDPAATIVGARYP

SEQ ID NO: 17599 - DNA, 429 bp, Unknown
  Obtained from environmental sample
  misc_feature (1)..(429): n is a, c, g, or t
ttgttcgacaaatccccttctctggacgtaagcgttccgttgaattacgagcgtcttgcgtcattttacgcggaagccccggccattatgcgcaatatagtatatcccgcctcgataaatgatgatttgactttgcagacaatggaactggtttataaaaaatacggtatttatattgattcaaataccgcagttgcctttgcctcggcgcgtgaaattgcggacgaatataaattgaacgggcatgcacacacaattgttctggcgacaggacatccggcaagggaagcaagccttacaggggatgccgtggggcagagcataaatgttcccgaagctatattggcgcttaaaaaaagatgcgatccaatcgcgattattcagccccagttagatgcggtagaaagcgccatcgcaagctgtttttaa

SEQ ID NO: 17600 - protein, 142 aa, Unknown
  Obtained from environmental sample
  misc_feature (1)..(142): Xaa is any amino acid
MFDKSPSLDVSVPLNYERLASFYAEAPAIMRNIVYPASINDDLTLQTMELVYKKYGIYIDSNTAVAFASAREIADEYKLNGHAHTIVLATGHPAREASLTGDAVGQSINVPEAILALKKRCDPIAIIQPQLDAVESAIASCF

SEQ ID NO: 17601 - DNA, 858 bp, Unknown
  Obtained from environmental sample
  misc_feature (1)..(858): n is a, c, g, or t
gtgatggaccgcttcgacaagcgacttatacgcgtccgagaacccgtgatattttgcgacgattccgacgacgacttcctttttcgccgcggccacggattcgttgatttcgcgccacgcggaaaggtccggttccggcgcggtcatgccgaaatgcgcaagtattcgcccgtcaagcccttcgtcgtgatagacaagcgggatttcgtgaatatccttgacgtcgggcgccgatatgacgtcttcgggcgcgacgttgcagaacatcgcgatttttttcttttccggcatcgggacgcgcgcctcggaccggcaaaggattatatgcggcgaaagcccgtcttcaagaagaagccgcacggactgttgggtcggttttgttttgatttcttcgctgggcttgaaatacggcacatatgtaagatggataagcatcgcgttcgcgcgcccgacttcgtttatgaactgccgcatgccttcgacgaacacaaggccctctgcgtcgccgattgtgccgccgatttcatagattataaaatcttcgccttgggcgtccgaccgaagaaagtttttgacttcgtcggttatttcggggataagctgaacattgcggccgttatatccgccctgcctttcgcgcgtaagcacgttccagtatatgcggccgcttgtgacggaatccgttcgtcgcgtgcatgtgtcggtgaatcgctcgtaatgcccaaggtcaaggtcggtttcggcgccgtcgtcggtgacgaacacttcgccgtgctgaaacggcgaaagagttccggggtcgacgttgaaataggggtccattttgcggttgcggactttgaatccgcgcgcctttaa

SEQ ID NO: 17602 - protein, 285 aa, Unknown
  Obtained from environmental sample
  misc_feature (1)..(285): Xaa is any amino acid
MMDRFDKRLIRVREPVIFCDDSDDDFLFRRGHGFVDFAPRGKVRFRRGHAEMRKYSPVKPFVVIDKRDFVNILDVGRRYDVFGRDVAEHRDFFLFRHRDARLGPAKDYMRRKPVFKKKPHGLLGRFCFDFFAGLEIRHICKMDKHRVRAPDFVYELPHAFDEHKALCVADCAADFIDYKIFALGVRPKKVFDFVGYFGDKLNIAAVISALPFARKHVPVYAAACDGIRSSRACVGESLVMPKVKVGFGAVVGDEHFAVLKRRKSSGVDVEIGVHFAVADFESARL

SEQ ID NO: 17603 - DNA, 420 bp, Unknown
  Obtained from environmental sample
  misc_feature (1)..(420): n is a, c, g, or t
ttggtttatggccganagcgacttgtcggcacggtggattccccccgatgtccggctggtccgcagcgcgggcggcgacctggtggtgatgagccgcaagggggaaatcgtcatccgcgacgacaacaacctgccccgggaaaagcacgagttgatctacggcgcccacttgaagctcaagagcctcaagagcgaggtcgccgggttgttgccggccgagggaatcttgagcgacgacgaactgccgcgctacgccgaggaactgaaaaaaggggccgcccaaatcttgaaagccatgaaagacaaggacgccctggcccggctgcgcggcgagctggcccccgtccaccgccgcctggcggcctggggtgcggcccgaggcttcatgacccccgaaggccaactcaccgaagagggtga

SEQ ID NO: 17604 - protein, 139 aa, Unknown
  Obtained from environmental sample
  misc_feature (1)..(139): Xaa is any amino acid
MVYGRXRLVGTVDSPRCPAGPQRGRRPGGDEPQGGNRHPRRQQPAPGKARVDLRRPLEAQEPQERGRRVVAGRGNLERRRTAALRRGTEKRGRPNLESHERQGRPGPAARRAGPRPPPPGGLGCGPRLHDPRRPTHRRG

SEQ ID NO: 17605 - DNA, 864 bp, Unknown
  Obtained from environmental sample
  misc_feature (1)..(864): n is a, c, g, or t
atgatgccagggatggatggcatagaaacggctgacaggattcgcgcgttaggtacggaatacgcgaagaagatacctataatcgcccttacggccaacgccatacacggaaccgataagatgttctttgaacacgattttcaggcgtttataaccaaacccatagacgtaatggaaatggatgccgttctcagaaaatgggtacgcgacgataaacatgaagaagtgccggttaccgaggagtcttccgaggccgacaagaaaattgaaaccatgctaatagagataccgggagtggatactaaaaaaggactttccctgtacgccggctccaggaaaatttatctgccactgttgcgctcctataccgcaaacacgccgggcattttggacaagctgcggactgtctccgcggagaccctgcctgactatgttattacagtgcacgggttaaagggcacgagcgctggcataggcgcggaggcggtacgggaagcggctttgaatcttgaaacaatgtccagggctggcgacttgcagggcgttttggctaaaaacgacaaactaattgccgatgctgaaatcattgtggcaaatgtaaaagcctggctccagcggtatgacgccaatagcgaacaaaagccccgcctgaaagcccccgaccgagagctcttggcgcaactgcggcagagctgtgaaagctacgatatggacggcattgataaagtcatgtcggaactggaaaaagccgattacgaagaagacgccgaattaataccatggctaanggaaaaaatcgaaacatcggaattcgacgcggcggcggaaagccttaaaaaatatttggaggaaatgangcaatga

SEQ ID NO: 17606 - protein, 287 aa, Unknown
  Obtained from environmental sample
  DOMAIN (117)...(192): Hpt domain
  misc_feature (1)..(287): Xaa is any amino acid
MMPGMDGIETADRIRALGTEYAKKIPIIALTANAIHGTDKMFFEHDFQAFITKPIDVMEMDAVLRKWVRDDKHEEVPVTEESSEADKKIETMLIEIPGVDTKKGLSLYAGSRKIYLPLLRSYTANTPGILDKLRTVSAETLPDYVITVHGLKGTSAGIGAEAVREAALNLETMSRAGDLQGVLAKNDKLIADAEIIVANVKAWLQRYDANSEQKPRLKAPDRELLAQLRQSCESYDMDGIDKVMSELEKADYEEDAELIPWLXEKIETSEFDAAAESLKKYLEEMXQ

SEQ ID NO: 17607 - DNA, 510 bp, Unknown
  Obtained from environmental sample
  misc_feature (1)..(510): n is a, c, g, or t
atgagcaacgggaagatatataatgaaataaagcagaagcagaacaccggcaagacggtaaagttccgccagcggcgcgacgcgatgaacaccgagccccctatcctgccggcgctcgacgatctgtcggttttcgacgaggggtttgcggcgttgcttggaaagaacggctacggcaacatcggaaagctcgtgcctacgctgcatgtcttcttcaaccgcctgacctttttgaacaaccatttcgccgagaggatgacgcttgacctcggcttgggctacggcttcggcggtacggagcttaagctcaacgaaacggcgatagtggagcttaaacgcgagcgcggcccggagcaaaccgtggcccaagggtatttccgctccatacacaagtgcccgagcggattttcaaagtatactatcggtatatcattaacacacggggaggcgaagaaaaaccgcttcttgcccaaaataagacacttagcctttgaaaggagtgcggcgtga

SEQ ID NO: 17608 - protein, 169 aa, Unknown
  Obtained from environmental sample
  misc_feature (1)..(169): Xaa is any amino acid
MSNGKIYNEIKQKQNTGKTVKFRQRRDAMNTEPPILPALDDLSVFDEGFAALLGKNGYGNIGKLVPTLHVFFNRLTFLNNHFAERMTLDLGLGYGFGGTELKLNETAIVELKRERGPEQTVAQGYFRSIHKCPSGFSKYTIGISLTHGEAKKNRFLPKIRHLAFERSAA

SEQ ID NO: 17609 - DNA, 813 bp, Unknown
  Obtained from environmental sample
  misc_feature (1)..(813): n is a, c, g, or t
gtgcacgcgatctatccgtatttaaaagaaatacaggagttgttaaagacggacgtaaaactgccgcagttgatcgactgccttaactgcgagaagggctgcatcggcgggccggggacgggaaacgcggaaaaaccgcaggccctgcttgaagacccggtacgcaagcgcatagaggagcttgagaaagagcacaatttcagcgagggaaagaacgcttacacaaaataccacactgaattgaaaaagttctggaagaagaacctttacaaccgcagttaccgcgacctttccgggaacaatacgctcaagaagccaagtgaggctgaaatagagaatatctaccatagtctgaaaaagtacaaaaaggaagatttatacaactgtacctgctgcggctacggaagctgccggtcaatggctgtcgcgatctacaacaagctgaacaaaccggaaaactgcgcccattatatccttgctttgcttaaagaagagaaaagcgtggaggaactgaacaggcagcttcaggaacatatcaaaaccgcgtcggagcttatcgagggaataaacagtctgataaacaaactgaactccgcaatcagttcgcaggcgcagacaatctcccagtcctcggtctctaccgagaaaatgatcgactctatcagggaaacatcggagctttcgcggagcaaacacgagtcaataaaggaactgatagccaacaccgccaaaagccaggaatcaatgcggggaacaatccagtcggttgaggccatctcaaaatcggtgaaggcatgcgctcggccgatctga

SEQ ID NO: 17610 - protein, 270 aa, Unknown
  Obtained from environmental sample
  misc_feature (1)..(270): Xaa is any amino acid
MHAIYPYLKEIQELLKTDVKLPQLIDCLNCEKGCIGGPGTGNAEKPQALLEDPVRKRIEELEKEHNFSEGKNAYTKYHTELKKFWKKNLYNRSYRDLSGNNTLKKPSEAEIENIYHSLKKYKKEDLYNCTCCGYGSCRSMAVAIYNKLNKPENCAHYILALLKEEKSVEELNRQLQEHIKTASELIEGINSLINKLNSAISSQAQTISQSSVSTEKMIDSIRETSELSRSKHESIKELIANTAKSQESMRGTIQSVEAISKSVKACARPI

SEQ ID NO: 17611 - DNA, 885 bp, Unknown
  Obtained from environmental sample
  misc_feature (1)..(885): n is a, c, g, or t
atgtacgacattatgcggcttagggaaaaacgcgcggacgctgttcctgacgcggtgctgtatccggattcaaaagaacaaattgaacaaatagtcgcctactgctccgaaaaaaaaataccgatgtatgtttacggcggcggctcttctgttacgcgtggagtggaatgtacaaagggcggcgtatcgctggatatgcggctgcggtttaacaaggtaattaattttaacgagaccgatcagattattacggtgcaggcgggcatgagcggacctcagcttgaggaaactttgaacaacgctgtaaaactttttaaagcgaaacgcccctatacctgcggacattttccacagagttttgaatattcttctgtagggggatgggttgttacgcgcggggcagggcagaactcgacttattacggagtgatagccgatattgtaattggtcaggagtacgccactcctataggcgttatcaaaaccgacctttacccaagaaaagcgacaggcccggatattgggcatatcatgatgggaagcgaaggagcattcggcgttttgactcatgtatcgctgcggtttttccgtcatactccgcaaaccattaaacgtttttcttttatgttcgcggattgggagaccgcgcaggaagcggcgaaagagatcatgcagtcagaagcgggatacccttccgtattcagagtgtccgatccggaagaaacggaacttatgatgaggatgtatagcgtggacgaaagccctttgcgtcatctgttcaagctgaaaggtttcaaaaaaaacgaaatgtgcctgtaccttggatttacaaacggcgaaaaaatgttttccaaaaattgcgcgaaggtcgtacacaaggtatga

SEQ ID NO: 17612 - protein, 294 aa, Unknown
  Obtained from environmental sample
  DOMAIN (16)...(163): FAD binding domain
  misc_feature (1)..(294): Xaa is any amino acid
MYDIMRLREKRADAVPDAVLYPDSKEQIEQIVAYCSEKKIPMYVYGGGSSVTRGVECTKGGVSLDMRLRFNKVINFNETDQIITVQAGMSGPQLEETLNNAVKLFKAKRPYTCGHFPQSFEYSSVGGWVVTRGAGQNSTYYGVIADIVIGQEYATPIGVIKTDLYPRKATGPDIGHIMMGSEGAFGVLTHVSLRFFRHTPQTIKRFSFMFADWETAQEAAKEIMQSEAGYPSVFRVSDPEETELMMRMYSVDESPLRHLFKLKGFKKNEMCLYLGFTNGEKMFSKNCAKVVHKV

SEQ ID NO: 17613 - DNA, 549 bp, Unknown
  Obtained from environmental sample
  misc_feature (1)..(549): n is a, c, g, or t
atgcccttcggcgagcgaatgccaggccccgattggataagggttcccttggaaaagctcgcaggcttctccagctgggacgcaggggagttgagcgccgatagcagtttccgcgtccccgatcaaaagggcgggctagtcatcgtccatcctttgatatgcagcgaatcgctcctgccgcaaagagctagggccggccttaaattggccggcggggacttgttgacagaacacaccaatgatggctggtttgaaaacagcatcgcggcgggcctgcatgcatctctggcgcggttgagggcgatggagacgggtctgcccctcgtgcgtgcgacgatgagcgggctatcagggttggtcatggaagatgggcagtggacgcatttcagtggaacgatggaagagggggcatggtctttcgaactaaagtggaggccaatcaatgcgccggcgagaaccatgtggccgttctattcattgttgctgatcctagtttgcggtttctgcataattgccgtgccgcgcatcgcaaaaaagagatgcgcatga

SEQ ID NO: 17614 - protein, 182 aa, Unknown
  Obtained from environmental sample
  misc_feature (1)..(182): Xaa is any amino acid
MPFGERMPGPDWIRVPLEKLAGFSSWDAGELSADSSFRVPDQKGGLVIVHPLICSESLLPQRARAGLKLAGGDLLTEHTNDGWFENSIAAGLHASLARLRAMETGLPLVRATMSGLSGLVMEDGQWTHFSGTMEEGAWSFELKWRPINAPARTMWPFYSLLLILVCGFCIIAVPRIAKKRCA

SEQ ID NO: 17615 - DNA, 561 bp, Unknown
  Obtained from environmental sample
  misc_feature (1)..(561): n is a, c, g, or t
atgcggctagccagaagcatccctgaacttagggtacttttgaaatcctcgaaacagcgcggggaccgcataggccttgttccaacgatgggctatttgcatcaggggcacgaatccttgatcaagcactgcaagtcgaggtgcgattccgtaattgtttcggtgttcgtaaatcccattcagttcggcccggatgaagacttgggccgctatccgcacgacccagaccacgaccagtcgctttgcttgaacaacggcgtgaacattttgttcatcccagagcccaaagagatgtattcaacggggttcaatactttcatagatccaggccctatcggccaggtgctgtgcggcaagtacaggccggggcacttcaggggggtagccaccgtcgttgcaaagctcttcaacatcattcagccagacttggcttttttcgggcagaaggacttgcagcaaactgcgataatacgcaggttggtctgggatttgaacatacccttggagttggtcgtgacccccacggtgcgcgaccaagacggctggcaagagttcgcgtaa

SEQ ID NO: 17616 - protein, 186 aa, Unknown
  Obtained from environmental sample
  DOMAIN (1)...(186): Pantoate-beta-alanine ligase
  misc_feature (1)..(186): Xaa is any amino acid
MRLARSIPELRVLLKSSKQRGDRIGLVPTMGYLHQGHESLIKHCKSRCDSVIVSVFVNPIQFGPDEDLGRYPHDPDHDQSLCLNNGVNILFIPEPKEMYSTGFNTFIDPGPIGQVLCGKYRPGHFRGVATVVAKLFNIIQPDLAFFGQKDLQQTAIIRRLVWDLNIPLELVVTPTVRDQDGWQEFA

SEQ ID NO: 17617 - DNA, 843 bp, Unknown
  Obtained from environmental sample
  misc_feature (1)..(843): n is a, c, g, or t
gtgaaagagcttcaagccaagggtttgttggtgaatagccaagagagagacgttgtgcttttagacgaattatccttgcctccttgcctcataagaaaaagcgatggcagcactctttatgcaacaagagatttggcggcggcaatttacagaaaaaaagaattcaattttgacaagtgcctttacattgtggataacggacagtctttgcatttcaagcaggtgttcgccgtgcttggcaaaatgggctgcgagtggaacaacgattgcgagcatattccctttggtttaattctccataaaaacgaagagggaaaatgggaaaagggcaaaacaagagctggcactgcaagccttttgagagatgttatagaggcagcttccgaaaaaatactagcggtgataaatgaaaaaaatcccgctcttgaaaataaagaggatatagccacaaaaatcggagttggggcaatagtctttaacgatttgaaaaacagacgcttgatggatgtgaaatttgactgggacggagctttaagttttgacggagccacaggtccctatgttcaaaacgcacacgttaggctttgcagcattttgagaaaaagcaataaaaacgctttggaactagaattcaaaagcgaagaacttttagaccaaaactcttacgatttaataaaagcactttcatgcaaagaagaaaaaataaacatagcctgcgaaagcagggagccttgcactctggctcaatactcactggagctggctgaagccgctcatagatttattcacaataatagggttatagggagcagcgaggaaaatcccaggctgttctcgcgataa

SEQ ID NO: 17618 - protein, 280 aa, Unknown
  Obtained from environmental sample
  DOMAIN (1)...(174): tRNA synthetases class I (R)
  misc_feature (1)..(280): Xaa is any amino acid
MKELQAKGLLVNSQERDVVLLDELSLPPCLIRKSDGSTLYATRDLAAAIYRKKEFNFDKCLYIVDNGQSLHFKQVFAVLGKMGCEWNNDCEHIPFGLILHKNEEGKWEKGKTRAGTASLLRDVIEAASEKILAVINEKNPALENKEDIATKIGVGAIVFNDLKNRRLMDVKFDWDGALSFDGATGPYVQNAHVRLCSILRKSNKNALELEFKSEELLDQNSYDLIKALSCKEEKINIACESREPCTLAQYSLELAEAAHRFIHNNRVIGSSEENPRLFSR

SEQ ID NO: 17619 - DNA, 822 bp, Unknown
  Obtained from environmental sample
  misc_feature (1)..(822): n is a, c, g, or t
ttgttttcaaaaggcggtttgntaagcgtgcctccctgcgcggcggcttcctctttgggcataaaagtctttacgcacgagtctgactttagtccggggctagcgacgaaaatcaacgcccgctatgccgtgcgtacaaagggaagaatttttaccgcttacgaagaaacaggacgttttttccgcgaatcatatagaaattatataacggttagcggcaatcccgtgagggatatttttcacggcgcggacgctggaaaaggcaggacattccttggagtagaggaagacgcgcgtatacttctggttcttggcggcagtcagggagccgtcgaaataaacgagcttatccgcgctgttttacctgaattaataaaaacatacaccgtagtacatcaaacagggccgaatcttgcatgggatattccggcaggcgaaaaatacaaaccttttccgtacattaaagatgaaatgccccatgtaatggcttgcgctgaacttgtgatgggcaggagcggcgcgggtatttgggaatgggcggttttgggaaagcccatgctgttaatccctttgagaggttcaggcacaaggggcgatcaagtagagaatgcccgttattttaatgagacgggagccgcgcttgtattatcaggagatgaagcgaatcccgaatcgctgttaagcgccattaattcattggcgcaggataacggaaaacggacggctatggcggaagcttccttaaaaatcggaaaaaaagccggcgccgtctttattgcgcaaacgctggcggatgaaattaataaattgggcggaggatga

SEQ ID NO: 17620 - protein, 273 aa, Unknown
  Obtained from environmental sample
  SIGNAL (1)...(16)
  DOMAIN (100)...(259): Glycosyltransferase family 28 C-terminal domain
  misc_feature (1)..(273): Xaa is any amino acid
MFSKGGLXSVPPCAAASSLGIKVFTHESDFSPGLATKINARYAVRTKGRIFTAYEETGRFFRESYRNYITVSGNPVRDIFHGADAGKGRTFLGVEEDARILLVLGGSQGAVEINELIRAVLPELIKTYTVVHQTGPNLAWDIPAGEKYKPFPYIKDEMPHVMACAELVMGRSGAGIWEWAVLGKPMLLIPLRGSGTRGDQVENARYFNETGAALVLSGDEANPESLLSAINSLAQDNGKRTAMAEASLKIGKKAGAVFIAQTLADEINKLGGG

SEQ ID NO: 17621 - DNA, 651 bp, Unknown
  Obtained from environmental sample
  misc_feature (1)..(651): n is a, c, g, or t
atggcttaccgccgaaaaacggagcggaatttttacaatggacgatgttctaaaggaattgctgaaatgaaaaatttaactggcgcgtttaccgcccttgttaccccgatgaaagaaaacggagacgtggactacgacggcttcaggaggctggtaaatttccagctggaacagggaatagacgggctcgttcccctgggcactaccggggaaacccccacattggatgaggacgaagaagaaaagcttatccgtatcgccgttgacgaagttaagggcgctgtcccggttattgtcggcacaggatccaacgatacaaaacacatggttatatataccaggagggccaaagacatgggggcggacgccgccctggtggtaactccctattacaacaagccaaacgatgacggcctttacaggcattttgaggccgccgccaccgtgggcattccaattgtggtttacaacattgcctcgcggacagggcggaacatccccacccccctgatggaaaaaattgccaccataagcggcattgtgggcgtcaaggaagcgtccggcgacctgaaccagatgggggatgttctgcaaaacattgctttgccgcgaaaaggcggggcaaacccatttacgtcgtcatgtcgataa

SEQ ID NO: 17622 - protein, 216 aa, Unknown
  Obtained from environmental sample
  DOMAIN (25)...(216): Dihydrodipicolinate synthetase family
  misc_feature (1)..(216): Xaa is any amino acid
MAYRRKTERNFYNGRCSKGIAEMKNLTGAFTALVTPMKENGDVDYDGFRRLVNFQLEQGIDGLVPLGTTGETPTLDEDEEEKLIRIAVDEVKGAVPVIVGTGSNDTKHMVIYTRRAKDMGADAALVVTPYYNKPNDDGLYRHFEAAATVGIPIVVYNIASRTGRNIPTPLMEKIATISGIVGVKEASGDLNQMGDVLQNIALPRKGGANPFTSSCR

SEQ ID NO: 17623 - DNA, 462 bp, Unknown
  Obtained from environmental sample
  misc_feature (1)..(462): n is a, c, g, or t
gtggcccaaccgcaaattatcacgctgaacaacaaggaagcaaatatatccatcggcgaacaaagatccgttcgcagtacggacgagaacggcgtcggaattacgcaaatggtcaacgccgccacccaactgacggttaccccctacgtctccggcgagggaaaaataatgctgacgcttagcacgagcaaggaggacttcttaaccgctgtcggcgaaaatctcgcgctaagccaaaaaagcgccaaaacgaacgtccttgtcaacaatggagagaccgtggtcatagccggcctcacgtcaaacgaaaagagaaacgcaagtaccggcataccgttcttgaaagacataccgattttgggatacttatttaaacattccgaaaaaggtaccaacaagaaggatttgataatattcgtcacgccgcacatcatccactcggagatcggtccgtcgaaataa

SEQ ID NO: 17624 - protein, 153 aa, Unknown
  Obtained from environmental sample
  DOMAIN (1)...(146): Bacterial type II and III secretion system protein
  misc_feature (1)..(153): Xaa is any amino acid
MAQPQIITLNNKEANISIGEQRSVRSTDENGVGITQMVNAATQLTVTPYVSGEGKIMLTLSTSKEDFLTAVGENLALSQKSAKTNVLVNNGETVVIAGLTSNEKRNASTGIPFLKDIPILGYLFKHSEKGTNKKDLIIFVTPHIIHSEIGPSK

SEQ ID NO: 17625 - DNA, 681 bp, Unknown
  Obtained from environmental sample
  misc_feature (1)..(681): n is a, c, g, or t
ttggttattataatcgctttttttatgctgctgccggcgattaaaagaaatttaaaacctggcacgcagacggcggaccccgaacaacagcaggaacaggtggcagagagcccgcaggccgaaaaaccggcaacgccccagaagacccctccgccaaagactcctgaaaaagcacctaacggcaaacctcaagaaccagaaaaaaaaccgcagccagaaaaaccaacaacctccgcccaaccttctgcaccgcctgcccctgtttctacgccgcctgtcaaacctgtagaaacccgtgacagaagtatctatcttttacagaaatcaaacatgatgctggtaaaagtgaacaggaactttaatgctaccctgacggacagtattaacgcgctgcttgccgggcccacgcctgatgaaatcatgcgcgacatagaaagttttgtgcctgaaggctcaaggctcatatcagcgaaagtcgagggaagtacagccgtccttgattttaatcaggagttcaggtacaacccgcgcggcagggaaggatgcgccgcccagataaaacaaatcgtctggacagccacggagtttcccaatgtcacggatgtgcagtttcttatcgagggacaaaaggtagattttctcagcgagggcgtggttattcgtaaccccatcggtcggtga

SEQ ID NO: 17626 - protein, 226 aa, Unknown
  Obtained from environmental sample
  misc_feature (1)..(226): Xaa is any amino acid
MVIIIAFFMLLPAIKRNLKPGTQTADPEQQQEQVAESPQAEKPATPQKTPPPKTPEKAPNGKPQEPEKKPQPEKPTTSAQPSAPPAPVSTPPVKPVETRDRSIYLLQKSNMMLVKVNRNFNATLTDSINALLAGPTPDEIMRDIESFVPEGSRLISAKVEGSTAVLDFNQEFRYNPRGREGCAAQIKQIVWTATEFPNVTDVQFLIEGQKVDFLSEGVVIRNPIGR

SEQ ID NO: 17627 - DNA, 696 bp, Unknown
  Obtained from environmental sample
  misc_feature (1)..(696): n is a, c, g, or t
gtggattttgccgtggtgaacggcgaaaactcggcggacggctttggcatgacagaagcggctttgaagcggattatcgccgccggcgcggacgcggtgacatcggggaaccatgtctgggaaaagcgggaattctggcccgcgcttgaaaccggcgatcgcatattgcgcccggcgaattatcccgccggctgcgcgggcaagggctggctttgcgttgaaaaggccggactgcgctggtttgtcattaatttgcagggcagagaactgatgacgcccattgactgtcctttccgttgttttgacaatattgttaaagatattaacaatctttcacccctcatcatcgttgatttccatgctgagtcaagccgtgaaaaagaagcgatgggccattacattgacggccgggccgcgctggtcgcgggaacccatacccacgtccaaaccgcggacgagcgtattctgcccaaagaaaccgcctacatcaccgatttgggaatgaccggggttactaacagcattattggcatggataccgaaatctgcatggacaggatacgcaaacaggtgctttaccgcatggaacccgccgttgacaaaaagattaacggaaaaagcggcgccggggtgcagggcgttatcgcggaaattaacactgaaacaggaaaagccttatccattagacgaatttaa

SEQ ID NO: 17628 - protein, 231 aa, Unknown
  Obtained from environmental sample
  misc_feature (1)..(231): Xaa is any amino acid
MDFAVVNGENSADGFGMTEAALKRIIAAGADAVTSGNHVWEKREFWPALETGDRILRPANYPAGCAGKGWLCVEKAGLRWFVINLQGRELMTPIDCPFRCFDNIVKDINNLSPLIIVDFHAESSREKEAMGHYIDGRAALVAGTHTHVQTADERILPKETAYITDLGMTGVTNSIIGMDTEICMDRIRKQVLYRMEPAVDKKINGKSGAGVQGVIAEINTETGKALSIRRI

SEQ ID NO: 17629 - DNA, 336 bp, Unknown
  Obtained from environmental sample
  misc_feature (1)..(336): n is a, c, g, or t
atgggcgaaggcgtaaaaatcatcgcgctgaaccgtaaggcgcggcacgattattcagttgatgagacctatgaatgcggcatagagttattggggactgaggtaaaatcgttccgtgacggtaaaatttcattcccggattcgtgggcagaagtaataaacggtgaaatttggctgcgttcattgatagttgcggaaaatcccttttcatcagtttttaatcatgaacctgacagaaaaaagcgattgcttttgcataaagaggaaattaaaaggattcatcggaaagtggaagaaaagngggtatacccttattccactgtcattttattttaa

SEQ ID NO: 17630 - protein, 111 aa, Unknown
  Obtained from environmental sample
  DOMAIN (6)...(73): SmpB protein
  misc_feature (1)..(111): Xaa is any amino acid
MGEGVKIIALNRKARHDYSVDETYECGIELLGTEVKSFRDGKISFPDSWAEVINGEIWLRSLIVAENPFSSVFNHEPDRKKRLLLHKEEIKRIHRKVEEKXVYPYSTVILF

SEQ ID NO: 17631 - DNA, 786 bp, Unknown
  Obtained from environmental sample
  misc_feature (1)..(786): n is a, c, g, or t
atgtcaaaacaagtagtgacccgctttgccccatcgcccacgggcatgctgcacattggcggcgtgcgaacggccctcttctgctggctctacgccagaaggcacggaggcaggttcatcctcaggatagaagacaccgacttagagagaaacacagacgacaacatccgcatcatagaagatgggatgtcatggtgcggcctagactgggacgaagggcccatacctggcaaaccaaaagagtggaagggccccaatggcccatataggcagatgcagcgcatggagtcgcactataggccggcgctagagaaactggtggagatgggccaagcctaccgctgccgctgcacaaaagagagcctagaagagaggcggaagaaagctgagactgccggaattccctttcagtacaacagaggcgcggacgctggcaatgggtgccgcgacaaaaactacgacgccagccagcccttttccgtgcgcctcaaaatgcccagcggaagcgaaccatggctggaaaatggctgcatagtcctacacgacaagataaagggccgcatagacttccccgcccagagcctagacgactgggtgatggcccgcacgggcgagggcggccaagcgggggtgcccacctacaatttttgcgtcgtccaagacgacatangcatggaagtgacgcacgtgatcaggggggacgaccacgtagccaacacgccaaagcagatagccctctaccagccattggcagcgagccgccaatctttgcccatgtgccaatga

SEQ ID NO: 17632 - protein, 261 aa, Unknown
  Obtained from environmental sample
  DOMAIN (4)...(258): tRNA synthetases class I (E and Q), catalytic domain
  misc_feature (1)..(261): Xaa is any amino acid
MSKQVVTRFAPSPTGMLHIGGVRTALFCWLYARRHGGRFILRIEDTDLERNTDDNIRIIEDGMSWCGLDWDEGPIPGKPKEWKGPNGPYRQMQRMESHYRPALEKLVEMGQAYRCRCTKESLEERRKKAETAGIPFQYNRGADAGNGCRDKNYDASQPFSVRLKMPSGSEPWLENGCIVLHDKIKGRIDFPAQSLDDWVMARTGEGGQAGVPTYNFCVVQDDIXMEVTHVIRGDDHVANTPKQIALYQPLAASRQSLPMCQ

SEQ ID NO: 17633 - DNA, 555 bp, Unknown
  Obtained from environmental sample
  misc_feature (1)..(555): n is a, c, g, or t
atgccccaggaaaaattgacggcgttagccggtagcctgcataacagggaaacaagaaagaccctggccctcctgggagctttttgtcttttcctttctaccatagagtacatgatacccaaaccaatgccgttcatgcgtatcggcatcgcaaatctgccgcttatgctggccctggatatttttccgctccatgtttttttggtccttgtggccatcaaagtgctgggacaggcattgattacgggaaccatgttttcatatatctttcttttttcatttgctggaacctttttatctgcggtatccatgtacatacttcgccgccttctgggatcgggacgaattagctttataggactcggtacgatgggggcgatggtttcaaatgttgcacagctggcacttgcccggatttttatcttcgggaacagcgtgcggtacattgccccgccttttttggcggcgggacttgttaccggaacagtgctgggttttttttgtgaaacgtttacccgccgttcacagtggtacgccgagcgcaaaacaaggtga

SEQ ID NO: 17634 - protein, 184 aa, Unknown
  Obtained from environmental sample
  DOMAIN (25)...(171): Heptaprenyl diphosphate synthase component I
  misc_feature (1)..(184): Xaa is any amino acid
MPQEKLTALAGSLHNRETRKTLALLGAFCLFLSTIEYMIPKPMPFMRIGIANLPLMLALDIFPLHVFLVLVAIKVLGQALITGTMFSYIFLFSFAGTFLSAVSMYILRRLLGSGRISFIGLGTMGAMVSNVAQLALARIFIFGNSVRYIAPPFLAAGLVTGTVLGFFCETFTRRSQWYAERKTR

SEQ ID NO: 17635 - DNA, 348 bp, Unknown
  Obtained from environmental sample
  misc_feature (1)..(348): n is a, c, g, or t
atgtggcgatattatccttgccctctgtttgaccgggtttacgtttttttcgactatttaaaaccgcataataatctacaagtattgatcgagggacaaaaccagaaatggatattccccctggacgccgaggaaactgtaaatgtgcgtgggccgctgggaactacagtggtacgaatatatggaagccaggcctgggtggaatcatccccctgcgataataaaatttgcgtgggcgcgggccacctgaatagcaacggggaatttgccgcctgctttccaaacaacgttttggtagtgatagaaggaaacgatgccccaggaaaaattgacggcgttagccggtag

SEQ ID NO: 17636 - protein, 115 aa, Unknown
  Obtained from environmental sample
  DOMAIN (13)...(108): Protein of unknown function (DUF1312)
  misc_feature (1)..(115): Xaa is any amino acid
MWRYYPCPLFDRVYVFFDYLKPHNNLQVLIEGQNQKWIFPLDAEETVNVRGPLGTTVVRIYGSQAWVESSPCDNKICVGAGHLNSNGEFAACFPNNVLVVIEGNDAPGKIDGVSR

SEQ ID NO: 17637 - DNA, 888 bp, Unknown
  Obtained from environmental sample
  misc_feature (1)..(888): n is a, c, g, or t
ttgaaccgcacagcggaacttgaaataacattgaacaaaaacgatttcagaaacggcgaggaaattgaattgatgataaaagcgccgtacgccggagcggggcttatcaccattgagcgcgacaaagtttacgcgtaccgctggttcagaagcggcggggaaacttccatgcagaccatcacggttcccgccgatcttgaggggaacggttatgtgaacgttcactatttaagatcgcaggattcgcccgagatttttatgtctccattaagttacggagctgttcctttctctatcagcaaagaaaaccgcaccaacaggatcaagctggacattccgggcgaagcaaaaccgggcgaggattttgtaataaaatactccgccgcccgcaaaggaaagataattgttttcgccgtggacgagggcatacttcagcttgccggataccgcacccccgatccgctggcgttctttttcaggaaacgcgctcttgaagtgcgaaccgcccaaatactcgacatggtgcttccccgttattccattgttcaaagcctggcggcaatgggcggcggcgccggttatgaagaacttgcgggcaaccttaacccgttcaagcgcaagcagaatgttccggttgcttactggtcggggataattgacgccggccctgaagtaaaagaattgcgttaccgcgtgccggattactttaacggaacaataagggttatggccgtcgccgtaaacgacagcgcgataggcgcggccgaggaacaggctctgatccgcagcacatttatcatttcacctaacgcgcctatgctggcggctactgnagacgagtttgacgtttcgtttacggtaacccaacaccagaangggcgccggtga

SEQ ID NO: 17638 - protein, 295 aa, Unknown
  Obtained from environmental sample
  DOMAIN (3)...(149): Alpha-2-macroglobulin family N-terminal region
  misc_feature (1)..(295): Xaa is any amino acid
MNRTAELEITLNKNDFRNGEEIELMIKAPYAGAGLITIERDKVYAYRWFRSGGETSMQTITVPADLEGNGYVNVHYLRSQDSPEIFMSPLSYGAVPFSISKENRTNRIKLDIPGEAKPGEDFVIKYSAARKGKIIVFAVDEGILQLAGYRTPDPLAFFFRKRALEVRTAQILDMVLPRYSIVQSLAAMGGGAGYEELAGNLNPFKRKQNVPVAYWSGIIDAGPEVKELRYRVPDYFNGTIRVMAVAVNDSAIGAAEEQALIRSTFIISPNAPMLAATXDEFDVSFTVTQHQXGRR

SEQ ID NO: 17639 - DNA, 699 bp, Unknown
  Obtained from environmental sample
  misc_feature (1)..(699): n is a, c, g, or t
atgaaagacttttttaggagtatagatttacaaggtgaaaagacatttaaaagacaggaattatataattggtttaataaatattatccgaaccttaaaaagaatactttatatttacatcttgtaaaattatccgtaaacgctcccagtcgtaagcatcatagtcctcgtacagatggatcagacgatattttatttcaaacagatacagatacatttaggttatatgacaaagaaaaagacaaagttgagacatcaataccaccagttgaatctgctgatgaagaaaaaggacagggatttgtattagaaaaacacctgcaggattttttagcaaaaaatatgtcaattattgaacctggtttaagattatatgaagatgaagaaaataacaaaattggattggagtatcctgttgatggaagatacattgatattttggctttagataaaaatgacaattttgttgtcattgaacttaaagtttcaaggggttatgatagagttgttggacaacttttaagatacaaaaattggataaaaagaaatatggccgaaaacaatcaaaatgtaagaggaataattatttgtaaagaaataactaatgatttattacttgcttgttatggattaaatgatattgagctatttgaatacgatttatatgtaaaattgcataacatggagattgaaaaatga

SEQ ID NO: 17640 - protein, 232 aa, Unknown
  Obtained from environmental sample
  DOMAIN (34)...(228): Protein of unknown function DUF91
  misc_feature (1)..(232): Xaa is any amino acid
MKDFFRSIDLQGEKTFKRQELYNWFNKYYPNLKKNTLYLHLVKLSVNAPSRKHHSPRTDGSDDILFQTDTDTFRLYDKEKDKVETSIPPVESADEEKGQGFVLEKHLQDFLAKNMSIIEPGLRLYEDEENNKIGLEYPVDGRYIDILALDKNDNFVVIELKVSRGYDRVVGQLLRYKNWIKRNMAENNQNVRGIIICKEITNDLLLACYGLNDIELFEYDLYVKLHNMEIEK

SEQ ID NO: 17641 - DNA, 561 bp, Unknown
  Obtained from environmental sample
  misc_feature (1)..(561): n is a, c, g, or t
atggaatataaatcccgcagagactgtttgaatgaatttgccaagagtgaaaaattggcgcttacgtctgttgatgaatatgggttaagggaattcctaaacgaaatttattcacagacagacggaactgcccgaaagttaagaattaaccacgaaccacacgaaccaacacgaacgaagataagacgtgtacaaaaagttcgtgaaagtaccgaaggtactattcgtgtggttcgtggtaaaaatttcttcttggatagctcccagccgcagagatgcaaaaaatgttaccgtatgcggcttgaaaaaactgccttcttcgccaagcaggaaggattttccgcctttagcacaactttgctcataagcccgtatcaggagcatgaggagataaagcgacaaggcgaagagacggcggaaaaatacggggttgaatttttatacagggatttccgtccgctcttccgcgaagggcaaactaacgcccgcgcggcgaatatgtacatgcagaaatactgcgggtgtgtgttcagcgaggaagagcggtatcgaaaggagtag

SEQ ID NO: 17642 - protein, 186 aa, Unknown
  Obtained from environmental sample
  DOMAIN (23)...(184): Uncharacterized BCR, COG1636
  misc_feature (1)..(186): Xaa is any amino acid
MEYKSRRDCLNEFAKSEKLALTSVDEYGLREFLNEIYSQTDGTARKLRINHEPHEPTRTKIRRVQKVRESTEGTIRVVRGKNFFLDSSQPQRCKKCYRMRLEKTAFFAKQEGFSAFSTTLLISPYQEHEEIKRQGEETAEKYGVEFLYRDFRPLFREGQTNARAANMYMQKYCGCVFSEEERYRKE

SEQ ID NO: 17643 - DNA, 705 bp, Unknown
  Obtained from environmental sample
  misc_feature (1)..(705): n is a, c, g, or t
atgccggatgattcgtcacaaaaaatttccgtcctagcgctaacctccgtctatccgcgttcccacgaagacacagaggttccttggttgcgaatatccatgcgcgaactcgcgggacgcgggtgcgacgcggcggtcgtagccccgtcgtacaaagggctcaaaaaccaccgcgtagacggcatacccgtttaccgctatcggtacgctccggcgggtttggagtttttgacccacgacgagggggcaccatcaaaaatcgctcgtaacccgttcttacagttgttagcgattccctacctgatttccggctcgctgaaaacgctctttctgtgcctcaaacggaagcccgcgattatccatgtgcactggccgttcccacacgcgtttatggcatttttcgcgagatttttttataggcgcgccaaaattgtgctgaccttctatagcgccgaacttctgttggccaagaaaaagaaatggataaaaccgatattgaagagattcataaaacgggccgactcggtcatagcgataagcgcattcgccaaagataccgtgagcggtatttacgatagagaaatagaaatactgccctacggaacgacgctgcgcaattcctcaggcgcggcgatcgccgaccgctccccatccgacaagttccgtatcctcttcgtcggcaggcacatcgagagaaaaggatag

SEQ ID NO: 17644 - protein, 234 aa, Unknown
  Obtained from environmental sample
  misc_feature (1)..(234): Xaa is any amino acid
MPDDSSQKISVLALTSVYPRSHEDTEVPWLRISMRELAGRGCDAAVVAPSYKGLKNHRVDGIPVYRYRYAPAGLEFLTHDEGAPSKIARNPFLQLLAIPYLISGSLKTLFLCLKRKPAIIHVHWPFPHAFMAFFARFFYRRAKIVLTFYSAELLLAKKKKWIKPILKRFIKRADSVIAISAFAKDTVSGIYDREIEILPYGTTLRNSSGAAIADRSPSDKFRILFVGRHIERKG

SEQ ID NO: 17645 - DNA, 894 bp, Unknown
  Obtained from environmental sample
  misc_feature (1)..(894): n is a, c, g, or t
ttgaacatttgggggagtagccattcggttcaaggcacgtgcccgggggcctattccaaaatgcattcccgcgtgagcaaaggcaggtcgtctgcgatttttttggacatttcgttatccaaaaaattttgcccaaatctgcggagcgtttttctatctttatccataatgctaaaaagtttcctaaagcctattcgttttattcaaaaaaaaatagctctgcggcataagggaaagttaaaaaatataattgagcaaaaaaaatttgagccgttgcaaagcaccccaaaaaaatccccattgctaatagttacgcttacaagctatgggaaaagaacagaagacaccgccccctacgcgatatggtctttatttgagcaacatacgaagcctgataaaataatcctttggctggacaaggagaattggaatttgagcaacattccaagtcttttgaaaacggaagcagagatgggcttggagataaagttctgcgatgatttaaaatcctataaaaaactgaatttcgcattgcaggaatttccaaacgacattctgataaccgtggatgacgatgcgtattaccccagagactggctggaaaaacttttgcagacgcacagggaaaatccgcaaaaaatttgctgccacagagcgcatataattaagaatggtttgccatacaacaaatggaaatggcgtgccaccgagaaagacgatgcggaattgcttttcccaaccggcataggtggtgtgctttacccaccgcagtccttggatttaacgcatctgagcgagataatggaactcgccccccaagcagacgatattgcgtactgggctatggcaaagttgaagggcacaaaatacgctctgttccaaacggttatttga

SEQ ID NO: 17646 - protein, 297 aa, Unknown
  Obtained from environmental sample
  misc_feature (1)..(297): Xaa is any amino acid
MNIWGSSHSVQGTCPGAYSKMHSRVSKGRSSAIFLDISLSKKFCPNLRSVFLSLSIMLKSFLKPIRFIQKKIALRHKGKLKNIIEQKKFEPLQSTPKKSPLLIVTLTSYGKRTEDTAPYAIWSLFEQHTKPDKIILWLDKENWNLSNIPSLLKTEAEMGLEIKFCDDLKSYKKLNFALQEFPNDILITVDDDAYYPRDWLEKLLQTHRENPQKICCHRAHIIKNGLPYNKWKWRATEKDDAELLFPTGIGGVLYPPQSLDLTHLSEIMELAPQADDIAYWAMAKLKGTKYALFQTVI

SEQ ID NO: 17647 - DNA, 837 bp, Unknown
  Obtained from environmental sample
  misc_feature (1)..(837): n is a, c, g, or t
atggtgataaaaaaccccggtgtagcccccgattctccttttttacagaccgcgcgactcgcttcccggcgcattgaaaccgatatttctttatttcttgacgcttcccctgcccgattaacggcggtaaccggttccaaaggtaaatccacaaccgcatccgcccagcactgggtactggagcattccggtgaaaagaaaaccggcggtaaagcgtacctgggcggtaatatcaccgtgtcgcctctcacatttctggacgatctgcgggaagacgatgatgtagtgctggaattgtccagttggcagttgggggatttgagggttcggcgcaaggccgactacaaagccagtgaaaaccatgctaatagcatgttactcagaccgaaagttgccgtgctaaccgcaattatgcccgatcatttagaccgttacagttcaatggaagcatacgttgacgataaacgggttatctatcaggggcaggattctgccgattttaccgttgccgccaatgatgagtgggggaggggattccttgccgaaagcagggcttttcccctgatgtattccaacgtccccttgccggaaggtatttcaggcggctggcttgaggggtcggacagccccggctatgcccgtttaagcgatggaaagcgggttgaactggttccggcgcagccccttgttccgggccgccatcaaaaacagaatcttctcgccgccggccttgctctgcttggtctgggtctgcctgcggaaactatcaggaagagtctggaaactttcccggtgttgaacaccggctggaattgtttcatcangcgggaggaataa

SEQ ID NO: 17648 - protein, 278 aa, Unknown
  Obtained from environmental sample
  DOMAIN (41)...(246): Mur ligase middle domain
  misc_feature (1)..(278): Xaa is any amino acid
MVIKNPGVAPDSPFLQTARLASRRIETDISLFLDASPARLTAVTGSKGKSTTASAQHWVLEHSGEKKTGGKAYLGGNITVSPLTFLDDLREDDDVVLELSSWQLGDLRVRRKADYKASENHANSMLLRPKVAVLTAIMPDHLDRYSSMEAYVDDKRVIYQGQDSADFTVAANDEWGRGFLAESRAFPLMYSNVPLPEGISGGWLEGSDSPGYARLSDGKRVELVPAQPLVPGRHQKQNLLAAGLALLGLGLPAETIRKSLETFPVLNTGWNCFIXREE

SEQ ID NO: 17649 - DNA, 480 bp, Unknown
  Obtained from environmental sample
  misc_feature (1)..(480): n is a, c, g, or t
atggcaataataaatgaagggctttcggaattaatcaggaagggcggcctttacccgaatctgcgtggaacaagcccaagggaagttttggatgcctttatcggggctctgtcccctattccttcgattttgccggataaattgcttaccgcggtgctagaaagagaagcgctaatgtcaaccggcataggcggcggcatcgctcttccccatccgaggaacccccttgccgcgacggagggcgaacggtttgtagcccttgcctttttggaaaccgcggtggactggaattccctggacggggtaaaggtggatacgctcctgctcattgtttcttcttcggccaaacagcaccttcaaactctgtcggaaataacatttttttgccgccaaaaagatttttatcggcttttgaaagagcgcgccccgcttgaagatatgctgagctttataactgaagctgaaaaaaactggaagtaa

SEQ ID NO: 17650 - protein, 159 aa, Unknown
  Obtained from environmental sample
  DOMAIN (6)...(154): Phosphoenolpyruvate-dependent sugar phosphotransferase system, EIIA 2
  misc_feature (1)..(159): Xaa is any amino acid
MAIINEGLSELIRKGGLYPNLRGTSPREVLDAFIGALSPIPSILPDKLLTAVLEREALMSTGIGGGIALPHPRNPLAATEGERFVALAFLETAVDWNSLDGVKVDTLLLIVSSSAKQHLQTLSEITFFCRQKDFYRLLKERAPLEDMLSFITEAEKNWK

SEQ ID NO: 17651 - DNA, 321 bp, Unknown
  Obtained from environmental sample
  misc_feature (1)..(321): n is a, c, g, or t
atggctatgactggcgagatagacctgcggggggacgccttgcccataggcggtctaaaggagaaggcccttgcggcactgcgggcgggcgtgttcgagataatcatcccagccgccaatatgaaggacttagaggaaattggtccagaggcccgcgggcagttggtgttccgccccgtagggcacgtggaggaggtattcaaactggcactgatgggctgggcgccgaccaagccagccaagtcggtcaagccagcggtgccggtcatgccagccacaaaagccccgaaaaaccaaaagacaaggcaggtgacatgctag

SEQ ID NO: 17652 - protein, 106 aa, Unknown
  Obtained from environmental sample
  DOMAIN (1)...(73): Lon protease (S16) C-terminal proteolytic domain
  misc_feature (1)..(106): Xaa is any amino acid
MAMTGEIDLRGDALPIGGLKEKALAALRAGVFEIIIPAANMKDLEEIGPEARGQLVFRPVGHVEEVFKLALMGWAPTKPAKSVKPAVPVMPATKAPKNQKTRQVTC

SEQ ID NO: 17653 - DNA, 453 bp, Unknown
  Obtained from environmental sample
  misc_feature (1)..(453): n is a, c, g, or t
gtggctggcatgaccggcaccgctggcttgaccgacttggctggcttggtcggcgcccagcccatcagtgccagtttgaatacctcctccacgtgccctacggggcggaacaccaactgcccgcgggcctctggaccaatttcctctaagtccttcatattggcggctgggatgattatctcgaacacgcccgcccgcagtgccgcaagggccttctcctttagaccgcctatgggcaaggcgtccccccgcaggtctatctcgccagtcatagccatggtgttcttgacggggatgcccttcaggactgacagcagcgcggtggcgaccgccagcccagcgctcgggccgtcctttggtatcgcgccttcggggaagtggacgtggatgtcnttcttttggacatctcangctctatgccgaattcatcgcccttggagcggatgtagctga

SEQ ID NO: 17654 - protein, 150 aa, Unknown
  Obtained from environmental sample
  misc_feature (1)..(150): Xaa is any amino acid
MAGMTGTAGLTDLAGLVGAQPISASLNTSSTCPTGRNTNCPRASGPISSKSFILAAGMIISNTPARSAARAFSFRPPMGKASPRRSISPVIAMVFLTGMPFRTDSSAVATASPALGPSFGIAPSGKWTWMSFFWTSXALCRIHRPWSGCS

SEQ ID NO: 17655 - DNA, 525 bp, Unknown
  Obtained from environmental sample
  misc_feature (1)..(525): n is a, c, g, or t
atgcttgatatgacgacaaaggatgtaaaggtacgcgaagcattgcgtgtgaacccgtgtaagacttgccagcccgtgggcgccatgtatgccgcgctcggagtggctaagtgcatgccgcacagtcacggttcgcagggttgttgctcgtatcataggacggtgctgtcgcgccactttaaggagccggcgattgcgtcgtcgtcgtcgtttacagagggcgcgtcggtgtttggcggcaagagcaacctcaccacgtcggcaaagaacatattcgatatgtacaaccccgacgttatcgcggtgcataccacctgcctgtctgagacaatcggcgacgacttgacgtcgtttatcatggacttggaactgccggaaggcaaactcgtcgtgcacacaaacacgccgagttatgtcggatcgcacataaacggcttcttcaacatgatgatcggtttcatgaattacctgacaacgaagaccgagtacgtccanccgaccctcggccataaatccnnnntttaa

SEQ ID NO: 17656 - protein, 174 aa, Unknown
  Obtained from environmental sample
  DOMAIN (15)...(174): Nitrogenase component 1 type Oxidoreductase
  misc_feature (1)..(174): Xaa is any amino acid
MLDMTTKDVKVREALRVNPCKTCQPVGAMYAALGVAKCMPHSHGSQGCCSYHRTVLSRHFKEPAIASSSSFTEGASVFGGKSNLTTSAKNIFDMYNPDVIAVHTTCLSETIGDDLTSFIMDLELPEGKLVVHTNTPSYVGSHINGFFNMMIGFMNYLTTKTEYVXPTLGHKSXX

SEQ ID NO: 17657 - DNA, 528 bp, Unknown
  Obtained from environmental sample
  misc_feature (1)..(528): n is a, c, g, or t
atggccgagggtcggntggacgtactcggtcttcgttgtcaggtaattcatgaaaccgatcatcatgttgaagaagccgtttatgtgcgatccgacataactcggcgtgtttgtgtgcacgacgagtttgccttccggcagttccaagtccatgataaacgacgtcaagtcgtcgccgattgtctcagacaggcaggtggtatgcaccgcgataacgtcggggttgtacatatcgaatatgttctttgccgacgtggtgaggttgctcttgccgccaaacaccgacgcgccctctgtaaacgacgacgacgacgcaatcgccggctccttaaagtggcgcgacagcaccgtcctatgatacgagcaacaaccctgcgaaccgtgactgtgcggcatgcacttagccactccgagcgcggcatacatggcgcccacgggctggcaagtcttacacgggttcacacgcaatgcttcgcgtacctttacatcctttgtcgtcatatcaagcatttttcccctcctccgtaa

SEQ ID NO: 17658 - protein, 175 aa, Unknown
  Obtained from environmental sample
  misc_feature (1)..(175): Xaa is any amino acid
MAEGRXDVLGLRCQVIHETDHHVEEAVYVRSDITRRVCVHDEFAFRQFQVHDKRRQVVADCLRQAGGMHRDNVGVVHIEYVLCRRGEVALAAKHRRALCKRRRRRNRRLLKVARQHRPMIRATTLRTVTVRHALSHSERGIHGAHGLASLTRVHTQCFAYLYILCRHIKHFSPPP

SEQ ID NO: 17659 - DNA, 324 bp, Unknown
  Obtained from environmental sample
  misc_feature (1)..(324): n is a, c, g, or t
atgattcctgaaatgtgcgccggcgacgtggtggtggacgactacaaccactttgaaacggacgctctcatcaagaccgtgaagccggacattttcttgtcgggcatcaaggacaagcactccatacagaaggcgggcgtgtcgtcgcggcagatacactcctacgactattccggcccctattcgggttttcacggcgccgtgaatttcggcagggacgtggcgatggccatatacacaaacgcgtggcaactggtcacgccgccgtggaagcacgaacctatgcttaccggcacaattacggaggaggggaaaaatgcttga

SEQ ID NO: 17660 - protein, 107 aa, Unknown
  Obtained from environmental sample
  misc_feature (1)..(107): Xaa is any amino acid
MIPEMCAGDVVVDDYNHFETDALIKTVKPDIFLSGIKDKHSIQKAGVSSRQIHSYDYSGPYSGFHGAVNFGRDVAMAIYTNAWQLVTPPWKHEPMLTGTITEEGKNA

SEQ ID NO: 17661 - DNA, 519 bp, Unknown
  Obtained from environmental sample
  misc_feature (1)..(519): n is a, c, g, or t
atgcgggctttggaagtggagtcgcgcgaagtgcctacaggcttgggcacatggcccggcatttggatgcttcctaccgattggaagtacggcggatggccggcctcgggcgaaatagacattatggaacatgttggatataacccggacgcgctggttatgtctgtccacacggaatcatacaaccatgtaaaacagacgcaaaaaagcaaaagcgtaaaaaaggctggaatgacagataatttccatgtgtacgcgatcgaatggctgccggataaaataaaattcttttacgacggggagctggaatttacatatcaccccgtcaagttaaaggacaatcccacatataaggaatggccttttgaccggcgttttcacctgttaataaaccttgcgttcggtggaaattggggtggagccaggggtgtgaactacaatatactgcccgttacatttgaaattgattatgttcgggtataccaaagcccggaaattaacgcattgatagataaataa

SEQ ID NO: 17662 - protein, 172 aa, Unknown
  Obtained from environmental sample
  DOMAIN (1)...(159): Glycosyl hydrolases family 16
  misc_feature (1)..(172): Xaa is any amino acid
MRALEVESREVPTGLGTWPGIWMLPTDWKYGGWPASGEIDIMEHVGYNPDALVMSVHTESYNHVKQTQKSKSVKKAGMTDNFHVYAIEWLPDKIKFFYDGELEFTYHPVKLKDNPTYKEWPFDRRFHLLINLAFGGNWGGARGVNYNILPVTFEIDYVRVYQSPEINALIDK

SEQ ID NO: 17663 - DNA, 360 bp, Unknown
  Obtained from environmental sample
  misc_feature (1)..(360): n is a, c, g, or t
gtgtatccaggatatgtaataccaaaacaactgcttgaaaataccgggctgagggttacggcgattttttattataacgatgaccttgcctttcaagggcttatagcaatacagagtttaaatatgaaagtaccagacgacatttccatcgcgggctacgacgatgtcccgcgttccagcctgaaaggaatatggcttacgaccgtttctcatcccaaatcgctgatagggaactgggcggcgtcattgctccttgagcaatttgatcagatcaacaagcccatataccggaaaatggtagtacactcacctctaatatgccgcggttcgatagcttctccctctctcaggcagtgctga

SEQ ID NO: 17664 - protein, 119 aa, Unknown
  Obtained from environmental sample
  misc_feature (1)..(119): Xaa is any amino acid
MYPGYVIPKQLLENTGLRVTAIFYYNDDLAFQGLIAIQSLNMKVPDDISIAGYDDVPRSSLKGIWLTTVSHPKSLIGNWAASLLLEQFDQINKPIYRKMVVHSPLICRGSIASPSLRQC

SEQ ID NO: 17665 - DNA, 723 bp, Unknown
  Obtained from environmental sample
  misc_feature (1)..(723): n is a, c, g, or t
atgatggccgagaatagagattgtgactctatcgatgtgctttatatgaatcaaatcaacgatatagccttcgtgctggaagacaggctcatagtactcattgagcatcaatcttcgcttaacaacaatatgccgcttagaatgcttcgttatttgtcggcggaatacgacattttagttgacaggaaaaacctttacaagcagaaaaggataatgataccctcacctgagtttatagttctgtacaacggcgataaaaaattcccagattacaatgaactgaaattatccgattccttcaaatctaaaactcccgacttatatttggaacttgtggtaaggatttacaacatcaacaaaggtcataatgcagatatggcaagcagaagctcggttttaagcggttatgaggagttcatagcacagataaaagaaaatttgaaatctatggagcttcgtgatgctataaaattggcggtgaaaacttgcataagcaaaaatattttagtatcttttcttgagaggcacaactcggaggttgagaatatgatatttggtgaatggaatttggatgaagccattgcggttgcgagagaagaggctcatgaggatggcattgatataggtattggcaaggaacgcaacgaaattctagacctcataaagaaaggttatactgcagccgatattgagaaacacttgcgcaaacaaacttgcccttga

SEQ ID NO: 17666 - protein, 240 aa, Unknown
  Obtained from environmental sample
  misc_feature (1)..(240): Xaa is any amino acid
MMAENRDCDSIDVLYMNQINDIAFVLEDRLIVLIEHQSSLNNNMPLRMLRYLSAEYDILVDRKNLYKQKRIMIPSPEFIVLYNGDKKFPDYNELKLSDSFKSKTPDLYLELVVRIYNINKGHNADMASRSSVLSGYEEFIAQIKENLKSMELRDAIKLAVKTCISKNILVSFLERHNSEVENMIFGEWNLDEAIAVAREEAHEDGIDIGIGKERNEILDLIKKGYTAADIEKHLRKQTCP

SEQ ID NO: 17667 - DNA, 411 bp, Unknown
  Obtained from environmental sample
  misc_feature (1)..(411): n is a, c, g, or t
ttgnaggacaacgtgaaggtgcaagcgaacgtatcgcaggctccgtcgggccgctactccggctgggcctttgggggcaagatacttgccaacgtgtggaccaaaaacttaggcgactggttcggccctgactggtccttctggaagacgagctttgtgttaggcgcgcatttttcgtatttcctgatggaggagggcgagacgcctttgtggatgggcgagtttctgggccaatgggaagtgatcaagtcggacatgagctttttctttccgaactggaagtactttaagtcgctgtcgttttatgtggagccggggatatggatagcgccttcggatgttacttatgatcctaatgcttggaggattcgggctacgatggcttttgggctacgggtaaatctgttttaa

SEQ ID NO: 17668 - protein, 136 aa, Unknown
  Obtained from environmental sample
  misc_feature (1)..(136): Xaa is any amino acid
MXDNVKVQANVSQAPSGRYSGWAFGGKILANVWTKNLGDWFGPDWSFWKTSFVLGAHFSYFLMEEGETPLWMGEFLGQWEVIKSDMSFFFPNWKYFKSLSFYVEPGIWIAPSDVTYDPNAWRIRATMAFGLRVNLF

SEQ ID NO: 17669 - DNA, 846 bp, Unknown
  Obtained from environmental sample
  misc_feature (1)..(846): n is a, c, g, or t
atgatagcatcaccggaagcaatggcactccgcgcacccgcgagcgcatttttgagggacgcaaaggcggcggcgtccgaaaaggggctattttatccgccagacccaaattcatgggatcaatgctcctttgggggcagcttggccacaaatgccggagggccatgcgcgtgcaagtatggcgtgacgcgccattgggtgctgtcagtagatgcgctgatggaagatggcgaaattcaccgctttggggcggaaatagtaaaaaacaacgccgggcctaatatggcacaacttttggtgggcagcgagggcatatttgggataatcacgtcggcagtagtgcgcctcataccagccccaaaagagcgcgttgcgatgctgctgcccgtgtcgagctggggcgacctgctgggcctgcccagccgcctagtgggtggcggccaagtgccaagtgcactggaattttgggatcctcaagtacttcaacacttacgtcaatttggcccagaggaggccaagagcctgcccggcgaggcgctggctattctcgaatttgatgacgcaggctgcacgggcgaaatttttttgggcggcttgatggacttgctgggtccgctggctgaacacgcacaggcggctaaggacgagaggcagcgtgaggcagtttgggccgttcgccgccagacaagcacgatgctaaaggaacatttcccccacaaagtgagcgaggacatagcagtgccaaggccaaagatagaggcatttttccaaggcgcgctaaggctggggctgcccatagccacatacggccactggggacggaacctcgtgccgatctgtccatga

SEQ ID NO: 17670 - protein, 281 aa, Unknown
  Obtained from environmental sample
  misc_feature (1)..(281): Xaa is any amino acid
MIASPEAMALRAPASAFLRDAKAAASEKGLFYPPDPNSWDQCSFGGSLATNAGGPCACKYGVTRHWVLSVDALMEDGEIHRFGAEIVKNNAGPNMAQLLVGSEGIFGIITSAVVRLIPAPKERVAMLLPVSSWGDLLGLPSRLVGGGQVPSALEFWDPQVLQHLRQFGPEEAKSLPGEALAILEFDDAGCTGEIFLGGLMDLLGPLAEHAQAAKDERQREAVWAVRRQTSTMLKEHFPHKVSEDIAVPRPKIEAFFQGALRLGLPIATYGHWGRNLVPICP

SEQ ID NO: 17671 - DNA, 546 bp, Unknown
  Obtained from environmental sample
  misc_feature (1)..(546): n is a, c, g, or t
ttgcgcgagatgggaattcccgtagtgtatattcccatgagtaagagcattgataatatttataaggacattgcctttatcgccaatcttttacaggcgcaaaaaaaaggcggggaagtaatcgattccatgaaagcgcagattgccgaaatcaaccaaaaggcgtcgcgtcctgccgcgcaaagaaccgtgtattttgaaatttccgccgcgccggatatgatgacttttgggaaagacagttatattaacgaaatgatttccgttatcggggcacgcaatatttttgagaatgagaattggctggtaatgcccggcgcggagtcggtcattgaacgcaatcccgacgtgatcctgaccaatgtgaattacatacccgacccaatcaacgaaataaaaagcaggcccggctttgaacatattaacgccgttaaaaatgattgcgtctatcaaattgatacagattcctcggtgcggccttccgcccgtataatttttgctttacggcaaatgtcccgcgccgtttacccggagttgtatgaataa

SEQ ID NO: 17672 - protein, 181 aa, Unknown
  Obtained from environmental sample
  misc_feature (1)..(181): Xaa is any amino acid
MREMGIPVVYIPMSKSIDNIYKDIAFIANLLQAQKKGGEVIDSMKAQIAEINQKASRPAAQRTVYFEISAAPDMMTFGKDSYINEMISVIGARNIFENENWLVMPGAESVIERNPDVILTNVNYIPDPINEIKSRPGFEHINAVKNDCVYQIDTDSSVRPSARIIFALRQMSRAVYPELYE

SEQ ID NO: 17673 - DNA, 882 bp, Unknown
  Obtained from environmental sample
  misc_feature (1)..(882): n is a, c, g, or t
atggctttcggtaattttaccgttgaaagcggcaaagcaatgcccctgggcgcgacggttagcgacagtggcgtaaattttgccgtcttctcccggcacgctacttctgttacgttgattatttttcagtcggcggaacctgggagcctctacacagaaattaaactggatagcaaaaaaaaccgaaccggcgacatatggcactgctttatccccggtcttccagagaatacttgctacctgtaccgagcggaagggccctatgttcctgaaaaaggattccgttataatcccaacaaagcgctctttgacccgtatgccaaagccttgacagacctctccaactgggacgttaaagcctgtgttggctatgatccttacgcgccgtcaaaagacctttcgttttcttacgtcgatgacatatttacccagccaagatgtatagccattaatgatgattttgactggcagggcgatcttccccttaactaccccctgcgtttcagtatcctttacgaaacccacgtaaaaggccttaccgctaatccgaattccggcgtatcggcacccgggacatacaagggggtaattgagaaaatcccctactttaaggaccttggcattaccagccttgaattccttcctatccaggaatttaacgaanatgaactgaattcaaaaaatccactgacgggaaaaaaactgattaattactggggttattctaccctgggtttttttgcaccaaaaagctcttatgctcatgatcgcagcccangaggccaagtacgggaaattcaggagatggtaagggaactgcacaaagcagggctcgaagttattctggacattgtttttaatcacaccgcggaaaggcactga

SEQ ID NO: 17674 - protein, 293 aa, Unknown
  Obtained from environmental sample
  DOMAIN (15)...(107): Isoamylase N-terminal domain
  misc_feature (1)..(293): Xaa is any amino acid
MAFGNFTVESGKAMPLGATVSDSGVNFAVFSRHATSVTLIIFQSAEPGSLYTEIKLDSKKNRTGDIWHCFIPGLPENTCYLYRAEGPYVPEKGFRYNPNKALFDPYAKALTDLSNWDVKACVGYDPYAPSKDLSFSYVDDIFTQPRCIAINDDFDWQGDLPLNYPLRFSILYETHVKGLTANPNSGVSAPGTYKGVIEKIPYFKDLGITSLEFLPIQEFNEXELNSKNPLTGKKLINYWGYSTLGFFAPKSSYAHDRSPXGQVREIQEMVRELHKAGLEVILDIVFNHTAERH

SEQ ID NO: 17675 - DNA, 423 bp, Unknown
  Obtained from environmental sample
  misc_feature (1)..(423): n is a, c, g, or t
atggacgaaagcagttttatcattggcgtagacctggacggggttgtgggggatttttatagcgcaatgcggaaaatcgccgctgcctggcttaataaacccctggagtcccttacaactgacgtaggctttggccttgaagaatggggccttgaagaatttggcggctacgaaaggcttcaccgtttcgccgtaacacagcgtaacctttaccgtgatatggaacccatcgaagacgcgcctgccgttttacggaaactttcaaacaaacacattagaattcgcattatcactcacaggctttttctaaaatactaccacaaagccacaatcacgcagactgtggattggcttgatacctgggacattccatattgggatctatgtttcatggccgacaagggcgctgtggcgcccatgtga

SEQ ID NO: 17676 - protein, 140 aa, Unknown
  Obtained from environmental sample
  misc_feature (1)..(140): Xaa is any amino acid
MDESSFIIGVDLDGVVGDFYSAMRKIAAAWLNKPLESLTTDVGFGLEEWGLEEFGGYERLHRFAVTQRNLYRDMEPIEDAPAVLRKLSNKHIRIRIITHRLFLKYYHKATITQTVDWLDTWDIPYWDLCFMADKGAVAPM

SEQ ID NO: 17677 - DNA, 939 bp, Unknown
  Obtained from environmental sample
  misc_feature (1)..(939): n is a, c, g, or t
ttgttatcgcgggagagacccccgaaaacgaggcggcgacgtttacctgctcttgcggcaacgtcatcgagacgcgggcgaccatcggcagcacgcatatcgatatatgcaacaactgccacccctattacacgggcaagcagaagctcatcgacagcgccgggcgcgtcgacaagttccgcaaacgctacgggcaaaccgctccggcggaggcgtaaggcttttttcagcccgtctatgcgctctatcaggcagatactaacggctgcagccgcagtcccaatgacggccctcgccgccgacaggaaagacaccgtcggcgggcaggcgcttgtcgagggtgtgatgatgcgcggcaaggagaaggtggcgtgggcggtgcggcgtccaaacggggagacggtcgtcgagtcgttccctttcgtctccgtcaccaaacgcatcgccgtctgcaaaatacccgtcgtgcgcggggtgataaacctcttcgaatcgctcagttgggggtacaaggccttgtcgcggtcggtggacatctccgccgcggaggccaacgcgtcgggcaagtccttggattcgcccgccgacaccccaaaaccctcctttgccgaccgcgtcttgatgaccctgtccacgctcgtcgccttcgccatctccatcgggctcttcatgtacgcgccgatgtggacggcgtcgcgcatacattttataaacgagccgacggcgctgttcaacctcctcggagggaaaatatcgctcaacgttctccagtcgctcctcttcaaccttttcgccgggacgatacgcataacactgttcctactgtatatgtcgctggtgagtttgtggagcgagatgctgcgggtgttcgagtaccacgggggcgaagtcataaacccatcttcgccttacaaggacgggaaggcgctgaactgttga

SEQ ID NO: 17678 - protein, 312 aa, Unknown
  Obtained from environmental sample
  DOMAIN (153)...(311): Protein of unknown function (DUF1385)
  misc_feature (1)..(312): Xaa is any amino acid
MLSRERPPKTRRRRLPALAATSSRRGRPSAARISIYATTATPITRASRSSSTAPGASTSSANATGKPLRRRRKAFFSPSMRSIRQILTAAAAVPMTALAADRKDTVGGQALVEGVMMRGKEKVAWAVRRPNGETVVESFPFVSVTKRIAVCKIPVVRGVINLFESLSWGYKALSRSVDISAAEANASGKSLDSPADTPKPSFADRVLMTLSTLVAFAISIGLFMYAPMWTASRIHFINEPTALFNLLGGKISLNVLQSLLFNLFAGTIRITLFLLYMSLVSLWSEMLRVFEYHGGEVINPSSPYKDGKALNC

SEQ ID NO: 17679 - DNA, 903 bp, Unknown
  Obtained from environmental sample
  misc_feature (1)..(903): n is a, c, g, or t
atgatattcgttatttccattttattcattgccatgttaataattgtttgcaaaagaactgaaaatacaggcaagaaaaccagactgactattctggattacgcggataacaccgcggcaaacgccgccgcggatcgcaaatgggtgttttatgacactttcgcggccaataatccggatgttcagcttgaaaaggaagaccttttcaacgagcctttccacaacaaagtcgaagtttacgcggcatcggggaatatgcccgatgtaatgtacgtctggccctcgggacgctcaacttccctgcacgagaaaagactgctgaaagaccttgcgccgctaattcaaaaagataatctgaaagataaatatcttcctataacaatggatcccaaccagcaggcatcgggctatcttgccatgatcccgataggcgttaccgcctctcacgctttctatataaacatggaagtgctggaagactgcggactggaaccggccgaaacctatgccgaactgaaagcccaggtaccaatattgaaagaaaagggctacgaaaccgtaattatggccaataaagacgggtgggtcatgcagagctgcctgttttccgcaatcgccggacgtttctgcggggaggcgtgggaacaaaagatactcagaggacagacaaaatttacagatgacgattttgtagcggcccttgatttcatcagacaactttacgcagacggcgtactcgcctcctcttcgctgggcatagactacggcgacagcccgggcctgtttgccgccaacaaaggcgcctatttgatagacggcgactggcgcggcggcagcttcctcaccgatctgcacacaggcaaagcctttatcagctcggagaggcagaaaaaatcagagtaa

SEQ ID NO: 17680 - protein, 300 aa, Unknown
  Obtained from environmental sample
  misc_feature (1)..(300): Xaa is any amino acid
MIFVISILFIAMLIIVCKRTENTGKKTRLTILDYADNTAANAAADRKWVFYDTFAANNPDVQLEKEDLFNEPFHNKVEVYAASGNMPDVMYVWPSGRSTSLHEKRLLKDLAPLIQKDNLKDKYLPITMDPNQQASGYLAMIPIGVTASHAFYINMEVLEDCGLEPAETYAELKAQVPILKEKGYETVIMANKDGWVMQSCLFSAIAGRFCGEAWEQKILRGQTKFTDDDFVAALDFIRQLYADGVLASSSLGIDYGDSPGLFAANKGAYLIDGDWRGGSFLTDLHTGKAFISSERQKKSE

SEQ ID NO: 17681 - DNA, 309 bp, Unknown
  Obtained from environmental sample
  misc_feature (1)..(309): n is a, c, g, or t
atggcaagcgtcagagaggtattggcaaataacataaaagaataccgtcgcaagcgcggtttttcgcaggataaactggctgaattagccggtatttcctcgcaatatctggctactgttgaaacttgtcgtaaatttccaacacccgaagtgctggatcgccttgcggatgctttaggtattgaaccccatgagctttttacatttaccacccctcacaatgaactggaaaaactgaggcaggacattataggagaagttgtacaggcaataaaacaatcttttgcagaagaaagcaaaaataaataa

SEQ ID NO: 17682 - protein, 102 aa, Unknown
  Obtained from environmental sample
  DOMAIN (12)...(66): Helix-turn-helix
  misc_feature (1)..(102): Xaa is any amino acid
MASVREVLANNIKEYRRKRGFSQDKLAELAGISSQYLATVETCRKFPTPEVLDRLADALGIEPHELFTFTTPHNELEKLRQDIIGEVVQAIKQSFAEESKNK

SEQ ID NO: 17683 - DNA, 801 bp, Unknown
  Obtained from environmental sample
  misc_feature (1)..(801): n is a, c, g, or t
atgcagaccacagaagtcaatctgccctttatcaccgccgaccaaagcggcccgaaacacctgcaaaaatccctgacaagagcaaaattcgagcaaatggttgaagaccttcttgaacgttccaaagaaccctgtaaaaaggcgctttcggacgcagggcttaccgccgatcaaattgacgaggtaattcttgtcggcggttccacccgtatccctgctgtacagcagattgtcaaagacctattcaaaaaagaacccaacaagggcgtaaaccccgatgaagcggttgccgtaggcgctgctattcagggcggtattctcggcggcgatgtaaaagacgtactgctgctggacgttactccgctttcactcggtattgaaacgcttggcggcgttatgacaaaacttattacacgtaacacaacaattccgacccgtaagagccagattttctctacagcggcagacgggcaaaccgcagtttcaattcaggtactgcagggcgagcgtgaaatggcaaaccagaaccgcgtgcttggccgctttgatcttgtcggcattcctcccgctccgcgcggagttccgcagattgaagttactttcgacattgacgcanatggcattgtacatgtcagtgccaaggaccttggcacaggtaaagaacaaaaaatccgaatcgaaagctcaagcggcttaagcgatcaggaaattgaccgcatggtaaaagaagcggaactccacgcagaggaagataaacgggaatcgggaaaagccgaaattcgcatgaagccgactcaatga

SEQ ID NO: 17684 - protein, 266 aa, Unknown
  Obtained from environmental sample
  DOMAIN (1)...(266): Hsp70 protein
  misc_feature (1)..(266): Xaa is any amino acid
MQTTEVNLPFITADQSGPKHLQKSLTRAKFEQMVEDLLERSKEPCKKALSDAGLTADQIDEVILVGGSTRIPAVQQIVKDLFKKEPNKGVNPDEAVAVGAAIQGGILGGDVKDVLLLDVTPLSLGIETLGGVMTKLITRNTTIPTRKSQIFSTAADGQTAVSIQVLQGEREMANQNRVLGRFDLVGIPPAPRGVPQIEVTFDIDAXGIVHVSAKDLGTGKEQKIRIESSSGLSDQEIDRMVKEAELHAEEDKRESGKAEIRMKPTQ

SEQ ID NO: 17685 - DNA, 549 bp, Unknown
  Obtained from environmental sample
  misc_feature (1)..(549): n is a, c, g, or t
atgacagatcggccgagatctccacagcgcgaaaagctgctgtacagcgaaaaagcgtgggcgtacaaaatgaagctcgacgcattgaaacataagggcgtcaaatcggattgccactctgcggacgaaatcgccacgcagacgggcgacaacaagtgcaaggtgttccgaataatccgcttgacggagcttgttgaacctctgcttgataaagtggatgcccgcgaactcgcgttcaacaccgccgtcgagttgacttatctcgaatacaaagaacagttcgccgtcatcgacgctatggcgaaacacggcgtaaagccgtcactctcgcaggcagtacgcttcaagaagatgaaacaagcggggacgctgacggaggcgacgattgacgaggtgctgtccgaacccaaagaagcggcggtatccgaaacgaaaatcacgctccactaccgcaagtttttcccgcccgaatactcaccgaagcagatagaggcagtaatcatcgaactgctgcggtcgtggcgggaaacgcagttcgctaacgcttaa

SEQ ID NO: 17686 - protein, 182 aa, Unknown
  Obtained from environmental sample
  misc_feature (1)..(182): Xaa is any amino acid
MTDRPRSPQREKLLYSEKAWAYKMKLDALKHKGVKSDCHSADEIATQTGDNKCKVFRIIRLTELVEPLLDKVDARELAFNTAVELTYLEYKEQFAVIDAMAKHGVKPSLSQAVRFKKMKQAGTLTEATIDEVLSEPKEAAVSETKITLHYRKFFPPEYSPKQIEAVIIELLRSWRETQFANA

SEQ ID NO: 17687 - DNA, 357 bp, Unknown
  Obtained from environmental sample
  misc_feature (1)..(357): n is a, c, g, or t
atgagctttccgccctgtttgacaccgcgcacggcgcgtctctttcgattatttttcccgcgtggatgcgctataacatccatgaggacacaagccgcttcgcccgtttcgccgtcaaggtatggggcgttgacggcgcgttttatgatcttgagcaggcgcgctttggaaggcatattccgcatgaaaaactacttccgttcgattggtctgccggtcagccttgccgacgcgaagatcgacacttcccgcataggcgagatggcaaagcgcgccgttaaattcgggtctgtgggcaattaccgcaagcttgacgaaaaagatatagaagccatctaccggctggcggcggagtaa

SEQ ID NO: 17688 - protein, 118 aa, Unknown
  Obtained from environmental sample
  misc_feature (1)..(118): Xaa is any amino acid
MSFPPCLTPRTARLFRLFFPRGCAITSMRTQAASPVSPSRYGALTARFMILSRRALEGIFRMKNYFRSIGLPVSLADAKIDTSRIGEMAKRAVKFGSVGNYRKLDEKDIEAIYRLAAE

SEQ ID NO: 17689 - DNA, 744 bp, Unknown
  Obtained from environmental sample
  misc_feature (1)..(744): n is a, c, g, or t
gtgggattttttgaacggaaaaaggccgccgaacacacaataccggtcggcgtcgtgctgaccattccggcggcgggcagtgaatcgagcaacagctgcgtcatcaccaatgagcaggggccctggaagcgcggcgttaattccgagtgtatccgcccggtttttgccataatgaatccggaactgacttattccctgccgccgtttcagaccgcctgcggcattgccgacatgatggcgcatattatggaacgttattttacaaaagaaccccatgtcgagctgaccgacgaactgtgcgagggcgcgttacgcgcgattatacgcaacgggcgcagaattttcagcgggggagaaaaggattacggcgcccgcgccgagatcatgtgggcgggcagcattgcccacaacaaccttttagggacaggccgtgtcggcgactggggcagccacccgataggccatgagctttccgccctgtttgacaccgcgcacggcgcgtctctttcgattatttttcccgcgtggatgcgctataacatccatgaggacacaagccgcttcgcccgtttcgccgtcaaggtatggggcgttgacggcgcgttttatgatcttgagcaggcgcgctttggaaggcatattccgcatgaaaaactacttccgttcgattggtctgccggtcagccttgccgacgcgaagatcgacacttcccgcataggcgagatggcaaagcgcgccgttaa

SEQ ID NO: 17690 - protein, 247 aa, Unknown
  Obtained from environmental sample
  misc_feature (1)..(247): Xaa is any amino acid
MGFFERKKAAEHTIPVGVVLTIPAAGSESSNSCVITNEQGPWKRGVNSECIRPVFAIMNPELTYSLPPFQTACGIADMMAHIMERYFTKEPHVELTDELCEGALRAIIRNGRRIFSGGEKDYGARAEIMWAGSIAHNNLLGTGRVGDWGSHPIGHELSALFDTAHGASLSIIFPAWMRYNIHEDTSRFARFAVKVWGVDGAFYDLEQARFGRHIPHEKLLPFDWSAGQPCRREDRHFPHRRDGKARR

SEQ ID NO: 17691 - DNA, 348 bp, Unknown
  Obtained from environmental sample
  misc_feature (1)..(348): n is a, c, g, or t
atgctacaaatcccagcggccaggtcggctacgcgcatagcgaccaataccagagcggcgccgtttattacggttcctcttggaaagacaaaaccccgcccccaaccaccgtccccaccggctacatggtctggaacgccggcacctccggcctccccggcttcaccgccggttccggcacgtgggcggataactcttgggcagacaccgacgcctccaaacgcgtcgcttggattgccggcagaaacgcgctcttcaccggcgccaccggcacctataccatcaccgtcggcaccgccgccccgtcggtcggcgacatccgtttctcggccagcacctacaccataa

SEQ ID NO: 17692 - protein, 115 aa, Unknown
  Obtained from environmental sample
  misc_feature (1)..(115): Xaa is any amino acid
MLQIPAARSATRIATNTRAAPFITVPLGKTKPRPQPPSPPATWSGTPAPPASPASPPVPARGRITLGQTPTPPNASLGLPAETRSSPAPPAPIPSPSAPPPRRSATSVSRPAPTP

SEQ ID NO: 17693 - DNA, 432 bp, Unknown
  Obtained from environmental sample
  misc_feature (1)..(432): n is a, c, g, or t
atggctacatcaacggatggccaaccatggacagcggtaagcaacagcacattcggcacaaccccaatcaatgcaatcgcgtatggcaacagcaagtttgtcgcagtgggcattgacggcaaaatggcgtattcaactgacggcgtaacatggacagcggtaagcgacagcacattcggtggcacaaaccaaatcagagcaattgcttacgctaacaacatgtttatcgcagtgggctatagcggaaaaatagcgtattcgtcagacggcgtaacatggacagcggtaagcgacagcacattcggcacaagccacatcagatcaatcgcctacggcaataatacgtttgtcgtaggcggcgatgacggcaaaatggcaacttcaacggacggagtaacatggtcagccgtagcgaacacaacattcaagtaa

SEQ ID NO: 17694 - protein, 143 aa, Unknown
  Obtained from environmental sample
  misc_feature (1)..(143): Xaa is any amino acid
MATSTDGQPWTAVSNSTFGTTPINAIAYGNSKFVAVGIDGKMAYSTDGVTWTAVSDSTFGGTNQIRAIAYANNMFIAVGYSGKIAYSSDGVTWTAVSDSTFGTSHIRSIAYGNNTFVVGGDDGKMATSTDGVTWSAVANTTFK

SEQ ID NO: 17695 - DNA, 648 bp, Unknown
  Obtained from environmental sample
  misc_feature (1)..(648): n is a, c, g, or t
ttgccgctcatgcttgctgcccaggcgaatgcccaggaaatagtcacggcggaacaataccttaggacagtctccgagcgttacggcgggatacgcgattatgaagcccgtataattatccgttccggcagcagcgagatgcaggggaatgtcagttacctgtcgccttcttttctcaggattgatttcacaaggccgtcggaacaggtaatcgtgtttaacggggaacttttgacggtgtatttgcccgagtaccgcgccgttttgaatcaaagcattaccccaagccgccgtggggcctcaatggcgacttcccagggccttaacctgttacagcggaattatgtcgcttcttttgtctccagtcccgacccggtgcgccttgacgacagttcgcaggaagaagtggtcaagatcaggcttgcccggcggagcatatcggaaggtttcagggaactcattctcagcgtcagcccttccagcaaattaatacgccgcattgaggggaccagcatagcgggcgtcaatgtccgctttgatttcaccaatatcaagacaaacgtcggaattcccgaacttcgcttcctttatgattctcccgcgtccgcatatatgtataataattttttgttcagggatacggattaa

SEQ ID NO: 17696 - protein, 215 aa, Unknown
  Obtained from environmental sample
  DOMAIN (29)...(198): Outer membrane lipoprotein carrier protein LolA
  misc_feature (1)..(215): Xaa is any amino acid
MPLMLAAQANAQEIVTAEQYLRTVSERYGGIRDYEARIIIRSGSSEMQGNVSYLSPSFLRIDFTRPSEQVIVFNGELLTVYLPEYRAVLNQSITPSRRGASMATSQGLNLLQRNYVASFVSSPDPVRLDDSSQEEVVKIRLARRSISEGFRELILSVSPSSKLIRRIEGTSIAGVNVRFDFTNIKTNVGIPELRFLYDSPASAYMYNNFLFRDTD

SEQ ID NO: 17697 - DNA, 432 bp, Unknown
  Obtained from environmental sample
  misc_feature (1)..(432): n is a, c, g, or t
ttgcccaatggcgcttccatcgccatacccaatgacccgtcaaacgggggccgggcgctgctcctgctccaggcaaaagggcttattacgcttagagaaggggccggcctgtcagccactcccctcgatgtcgccggcaacccgcgcaatttcaagttccagccgcttgaggccgcccagcttccgcgctcccttaaagacgtggacgccgccaccatcaacggcaactacgcccttgaagccggccttaaccccatcaaggattcccttataattgagggcgcggattccccctatgttaacatcgtggtggtgcaaaaaggcaaggagaacgatccgcgaattgtcgctctgaaaaaagcccttctcagccagaaggtgaaggcttacatcaacagccattacgacggcggcgtcgcggcaatcttttag

SEQ ID NO: 17698 - protein, 143 aa, Unknown
  Obtained from environmental sample
  DOMAIN (1)...(143): NLPA lipoprotein
  misc_feature (1)..(143): Xaa is any amino acid
MPNGASIAIPNDPSNGGRALLLLQAKGLITLREGAGLSATPLDVAGNPRNFKFQPLEAAQLPRSLKDVDAATINGNYALEAGLNPIKDSLIIEGADSPYVNIVVVQKGKENDPRIVALKKALLSQKVKAYINSHYDGGVAAIF

SEQ ID NO: 17699 - DNA, 666 bp, Unknown
  Obtained from environmental sample
  misc_feature (1)..(666): n is a, c, g, or t
gtgtcggagttggacgcgcacggagcggatgttattgaaatcggcgtgcctttttccgatcccgtggccgatggcccggttgtggaggaggcttcccgcagggctttgtcgcagggcgtgaacgtgacatggctgctggaaaaactgaacgctctcccgcggttcagagctggactggcgctcatgggctattacaacccctttttgcagtacggacttgaacgcctggcgaaggacgccgctgaagccggggtttcgggctgcatcgtgccggatctgcctctggatgaggccggccccctgcgggccgccctgtccgcgaacggcttggatctcatcaccctggtggggcccaatacttccgacgaacgcatgcgcgcatacgccgcatccgcgtcaggctacgtgtatgcgacttctgtcatgggcactaccgggatgcggcgggaactgcctgaagcggcggaaaccgtgcgccgggccagggccgtgttcgatcttcccgtggcgctgggttttggcatcagcgggccggatcagatcgcggccatgccggtgcgcccccatgcggccgtgttcggcagcgcgcttttgcgccatttggacgccaatggcgccgcgggagcgttcatgaggacatggattgaaaaagagccaacgctttaa

SEQ ID NO: 17700 - protein, 221 aa, Unknown
  Obtained from environmental sample
  DOMAIN (1)...(219): Tryptophan synthase alpha chain
  misc_feature (1)..(221): Xaa is any amino acid
MSELDAHGADVIEIGVPFSDPVADGPVVEEASRRALSQGVNVTWLLEKLNALPRFRAGLALMGYYNPFLQYGLERLAKDAAEAGVSGCIVPDLPLDEAGPLRAALSANGLDLITLVGPNTSDERMRAYAASASGYVYATSVMGTTGMRRELPEAAETVRRARAVFDLPVALGFGISGPDQIAAMPVRPHAAVFGSALLRHLDANGAAGAFMRTWIEKEPTL

SEQ ID NO: 17701 - DNA, 843 bp, Unknown
  Obtained from environmental sample
  misc_feature (1)..(843): n is a, c, g, or t
ttgagcctccttggcgttgtcgtcctcacgtcgctcggaacgtggggcctgccgcagatggtgcaaaaattctatgcgatccggactgaaaacgcgatttcaaaaggcaccgtcatatctacgtttttcgcgctcttcgtggcaggagggtgctattttctcggcacgttcgggcggttgtatgcgaacgtgatcgatataaaggcaaacggctacgactccatcatccccacgatgctttccgggctttccccgctgcttataggcgttatcgtgatcttggtgcttgcggcgtcaatgtccacgctctcgtcgctcgtgatgacttcggcgacgacgttcacgcttgattttttgaaaggcgccgtcgtcaaggacatggatgaaaaacagcagcttcgcatcatcagggggcttgtcgccctgttcatcgtcatatcctccgcaatcgccacgattcagtataagagcagcatcacgttcattgcgcagctcatgggaatttcgtggggcgcccttgcgggagcgtttctggcgccgctgctttacgggctgtactggaagcgtgcaagcaacgcgggcgtatggtgctgttttgcattcgccaccctgttcatgacagccaacatactgtacagggacgcgtttccggcgcttctcaagtcgcccatcaacgccggcgccttcgccatgcttgccggcctggcaatcgtgccgcttgtgagcgcgttttcaaagcccagagacagcgcctctgtcgcagcctgtttttcctgctatgagcaaacgaccaccgcgaacgtgctgcaagcccttgacggcgaaaacggcgcggaaaaatga

SEQ ID NO: 17702 - protein, 280 aa, Unknown
  Obtained from environmental sample
  misc_feature (1)..(280): Xaa is any amino acid
MSLLGVVVLTSLGTWGLPQMVQKFYAIRTENAISKGTVISTFFALFVAGGCYFLGTFGRLYANVIDIKANGYDSIIPTMLSGLSPLLIGVIVILVLAASMSTLSSLVMTSATTFTLDFLKGAVVKDMDEKQQLRIIRGLVALFIVISSAIATIQYKSSITFIAQLMGISWGALAGAFLAPLLYGLYWKRASNAGVWCCFAFATLFMTANILYRDAFPALLKSPINAGAFAMLAGLAIVPLVSAFSKPRDSASVAACFSCYEQTTTANVLQALDGENGAEK

SEQ ID NO: 17703 - DNA, 588 bp, Unknown
  Obtained from environmental sample
  misc_feature (1)..(588): n is a, c, g, or t
ttgccccatcatgcgtcttttaccatagtatcgctggcggtttcatcatttgtgtttacgacgctggataccgtcgcccggctgggacggctttctnttcaggaacttttttctactaacggcgccggcggcaccgatggtgccggtggcgagcaaaaacaaaaaaagagcctatgggccctgatactcaagaacagggtagccgcttcggtttttaccctggggcccgcctaccttctggcgataatgggttatcaaaatatatgggctttattcggagcggccaaccagctccttgccgctctgaccttaattgcctgtaccctgtttttcaaaaaaaccggcaggcgtatttatatgattatcgttccaaccgtaatcatgctggctgtcacctatacttctctttgtttaagcataaaagccaaaattatgcttctgttaaacgacacattcaacacggcggttgacggtattcaaatgtgcattgccatactgcttttggtattgggaattcttgtagcggctgcatgcgctgttaaattgcttggtaaagatcaaaacaaggaaatacctgctgaattatga

SEQ ID NO: 17704 - protein, 195 aa, Unknown
  Obtained from environmental sample
  SIGNAL (1)...(20)
  misc_feature (1)..(195): Xaa is any amino acid
MPHHASFTIVSLAVSSFVFTTLDTVARLGRLSXQELFSTNGAGGTDGAGGEQKQKKSLWALILKNRVAASVFTLGPAYLLAIMGYQNIWALFGAANQLLAALTLIACTLFFKKTGRRIYMIIVPTVIMLAVTYTSLCLSIKAKIMLLLNDTFNTAVDGIQMCIAILLLVLGILVAAACAVKLLGKDQNKEIPAEL

SEQ ID NO: 17705 - DNA, 612 bp, Unknown
  Obtained from environmental sample
  misc_feature (1)..(612): n is a, c, g, or t
gtgggagcggcagacactattgcacacacagttggcaaatacttcacaaaggacaaccccgcatgtagcctgggagacgaatttggcgaagggctggtgaggacagttgtaaaatttgcccccatagccattgccaaccccaatgactacgaggccagggcagagctaatgatggcggcctctttcagtcacaacgagcttaccagcattggccgcagcggcaagcgcgggggagaacacccattggaacaccaattatccggccattacgacacagcccacggcgcggggctggcggtcatcatgcccgcatggcttcagtacataacggacaacggcacggaagagcaagttgagcgggtcgcccaattcggcgctaaagtctttgccgtcaaagcggacactgtcaaagccacggcaaacgcggggcttgatgccttccgcgcttggctgcgctcaatagggatgcctctgacgcttgccgagttggacatcccaaaagcggatcttgatgccgtaataaagcgtgcagttgatgccaacaagggaatgattagtggttttatcgatctggacgaaaaagcgataagggctatttattcttcagtataa

SEQ ID NO: 17706 - protein, 203 aa, Unknown
  Obtained from environmental sample
  misc_feature (1)..(203): Xaa is any amino acid
MGAADTIAHTVGKYFTKDNPACSLGDEFGEGLVRTVVKFAPIAIANPNDYEARAELMMAASFSHNELTSIGRSGKRGGEHPLEHQLSGHYDTAHGAGLAVIMPAWLQYITDNGTEEQVERVAQFGAKVFAVKADTVKATANAGLDAFRAWLRSIGMPLTLAELDIPKADLDAVIKRAVDANKGMISGFIDLDEKAIRAIYSSV

SEQ ID NO: 17707 - DNA, 696 bp, Unknown
  Obtained from environmental sample
  misc_feature (1)..(696): n is a, c, g, or t
ttgagcgcgggcagccttgtatggagtcaaggaggatcaccacgtcctttttatgctccacaaggcgcttcgctttttaagcgccatctccgtcacctgaacgtgccgcgaagcctgctcgtcaaaagtagacgagataacctccgcccgtaccgtgcgcttcatgtcggtaacctcttcgggacgctcgtctatcagcaggactatcaggtacacttccggatggttttgggttatcgcgttggcgatcttctgcatcatgatcgtcttgcccgtgcgcggcggcgcgacaatcagcgcgcgctggcctttcccgatggggcagaacaggttaataatccgctcgcttatggcgccggtcgtggtttcaaggtccagcttgcggtttgggtacagggaggtaaggtcgtcaaaagggatgcggttctgggcgacagtgggatcgttgtaattgaccgtctccaccctcagcatgccgaaataacgctccccttccttggggctgcgaatctggccgtaaacggtgtcgccggttttaagggcaaacaaccggatttggctggggctgatatatatgtcgtcggggccgggcaggtaggaattctgcgggctgcgaaggaagccgaaactgtcgggcagaatttcaagcgagccgaaagcgtagataatcccgccccgctccgtgtgcgcccttag

SEQ ID NO: 17708 - protein, 231 aa, Unknown
  Obtained from environmental sample
  misc_feature (1)..(231): Xaa is any amino acid
MSAGSLVWSQGGSPRPFYAPQGASLFKRHLRHLNVPRSLLVKSRRDNLRPYRALHVGNLFGTLVYQQDYQVHFRMVLGYRVGDLLHHDRLARARRRDNQRALAFPDGAEQVNNPLAYGAGRGFKVQLAVWVQGGKVVKRDAVLGDSGIVVIDRLHPQHAEITLPFLGAANLAVNGVAGFKGKQPDLAGADIYVVGAGQVGILRAAKEAETVGQNFKRAESVDNPAPLRVRP

SEQ ID NO: 17709 - DNA, 840 bp, Unknown
  Obtained from environmental sample
  misc_feature (1)..(840): n is a, c, g, or t
atgccggacttgtacggcaagcccgagccccgtggcgaccaggacaacgggaaactgcggcttacgattaacgagctttcncagcttaacatcatgggcttgcgcgagcttgccgcctgctacaacatttcncacgacgacatggtttcccagaaaagggattcgcttgtntttgccattctaagggcgcacacggagcggggcgggattatctacgctttcggctcgcttgaaattctgcccgacagtttcggcttccttcgcagcccgcagaattcctacctgcccggccccgacgacatatatatcagccccagccaaatccggttgtttgcccttaaaaccggcgacaccgtttacggccagattcgcagccccaaggaaggggagcgttatttcggcatgctgagggtggagacggtcaattacaacgatcccactgtcgcccagaaccgcatcccttttgacgaccttacctccctgtacccaaaccgcaagctggaccttgaaaccacgaccggcgccataagcgagcggattattaacctgttctgccccatcgggaaaggccagcgcgcgctgattgtcgcgccgccgcgcacgggcaagacgatcatgatgcagaagatcgccaacgcgataacccaaaaccatccggaagtgtacctgatagtcctgctgatagacgagcgtcccgaagaggttaccgacatgaagcgcacggtacgggcggaggttatctcgtctacttttgacgagcaggcttcgcggcacgttcaggtgacggagatggcgcttaaaaagcgaagcgccttgtggagcataaaaaggacgtggtga

SEQ ID NO: 17710 - protein, 279 aa, Unknown
  Obtained from environmental sample
  DOMAIN (176)...(274): ATP synthase alpha/beta family, nucleotide-binding domain
  misc_feature (1)..(279): Xaa is any amino acid
MPDLYGKPEPRGDQDNGKLRLTINELSQLNIMGLRELAACYNISHDDMVSQKRDSLVFAILRAHTERGGIIYAFGSLEILPDSFGFLRSPQNSYLPGPDDIYISPSQIRLFALKTGDTVYGQIRSPKEGERYFGMLRVETVNYNDPTVAQNRIPFDDLTSLYPNRKLDLETTTGAISERIINLFCPIGKGQRALIVAPPRTGKTIMMQKIANAITQNHPEVYLIVLLIDERPEEVTDMKRTVRAEVISSTFDEQASRHVQVTEMALKKRSALWSIKRTW

SEQ ID NO: 17711 - DNA, 678 bp, Unknown
  Obtained from environmental sample
  misc_feature (1)..(678): n is a, c, g, or t
gtggctacagcggtattgttgctgctccagtttacagttttgtttgtcgcgttaaagggcgttatggttggagtgagggcttccgtctcgcccacaacaagactaatggaggttttgtccaataatacgccggttggtgaaacaggattgacgttaacaatacaagtggcggttttattgccgtcaacagtggtagctgtgatagttgcctctcctggcgcaacggcggtaactgtgccgttatttgacaccgtggctacagtgtccttgctgctgctccatttaacgttctggtttgtcgcgttggcaggcgttatagttggggtgagggtttctgtgccgccaacgacaaagctgatggaatttttgttcaatgttacgcttgttacaggaactacatcggtaacaacgataactttacattctgcggttttattgccatcatcagtggtaacggtgatagttacctcccctggcgcaacggcggtaattgtgccgttatttgacaccgtggctacagtatccttgctgctactccatgatacgttcttatttgtcgcgttagaaggcgttatagttggggtgagggtttccgtgccgccaacgacaaagctgatggaatttttgttcaatgttacgccgttacaggaacccatcgaaaactgtcgatctgtctga

SEQ ID NO: 17712 - protein, 225 aa, Unknown
  Obtained from environmental sample
  misc_feature (1)..(225): Xaa is any amino acid
MATAVLLLLQFTVLFVALKGVMVGVRASVSPTTRLMEVLSNNTPVGETGLTLTIQVAVLLPSTVVAVIVASPGATAVTVPLFDTVATVSLLLLHLTFWFVALAGVIVGVRVSVPPTTKLMEFLFNVTLVTGTTSVTTITLHSAVLLPSSVVTVIVTSPGATAVIVPLFDTVATVSLLLLHDTFLFVALEGVIVGVRVSVPPTTKLMEFLFNVTPLQEPIENCRSV

SEQ ID NO: 17713 - DNA, 399 bp, Unknown
  Obtained from environmental sample
  misc_feature (1)..(399): n is a, c, g, or t
ttgtccgcggacgtaaagtcaaaaaaagacgaccgctcctccattgaggaattaacaagctttgaatggcttgaagaagaaaaacgcaataaacttgacgaaggtatttgtactttttcaaaaatattaatcgccggtaccgtcgaaaatattaccggtatagacgacattataaaaaaacatcttgaaaactgggatataacgcgggttaaccgcgtagatctcgcgattttaagaatatctgttttttcactgatgtttcaagaagaaattgccccatccatcgtaattgacgaagccatcggtatcagcagggaattcggaaccgacgactcctaccggtttatcaacggagttcttgacagcatacgcaaaactcttcaaggacaggaaaaatga

SEQ ID NO: 17714 - protein, 132 aa, Unknown
  Obtained from environmental sample
  DOMAIN (3)...(127): NusB family
  misc_feature (1)..(132): Xaa is any amino acid
MSADVKSKKDDRSSIEELTSFEWLEEEKRNKLDEGICTFSKILIAGTVENITGIDDIIKKHLENWDITRVNRVDLAILRISVFSLMFQEEIAPSIVIDEAIGISREFGTDDSYRFINGVLDSIRKTLQGQEK

SEQ ID NO: 17715 - DNA, 351 bp, Unknown
  Obtained from environmental sample
  misc_feature (1)..(351): n is a, c, g, or t
gtgttttcggcgcgttncggtgaattaaacggcaaaaaaccgacaagcgctcagcaaaaccttctgttacttgacgaattaggcgaaaccgaaaacagaagcgcgcgttttgtctgcgccatgactgttctgcgggaaacagagaatttttacattgttcaggaaactcttgaaggggaaatcgtaaagaagagcgggatgaagggggatggcggattcggttacgatcctgttttttggataccgtcccttgggcgtacccttgcggaactttcggcagatgagaaaaacagtttaagccatcgcggaaaagcggggaaacttgttgcaaatattttaaaaaatatttaa

SEQ ID NO: 17716 - protein, 116 aa, Unknown
  Obtained from environmental sample
  DOMAIN (1)...(113): Ham1 family
  misc_feature (1)..(116): Xaa is any amino acid
MFSARXGELNGKKPTSAQQNLLLLDELGETENRSARFVCAMTVLRETENFYIVQETLEGEIVKKSGMKGDGGFGYDPVFWIPSLGRTLAELSADEKNSLSHRGKAGKLVANILKNI

SEQ ID NO: 17717 - DNA, 864 bp, Unknown
  Obtained from environmental sample
  misc_feature (1)..(864): n is a, c, g, or t
ttgcgtttcggcccctcgggcgcgatcccccgcctgacccagataacggccatgttcaaccagcccatggtccccttgggcgcctacgaccaggttcccgccggcgtccttaacctgaccccggaccttccaggacgccgtctctggctcaatcaatataccctggccttcgtgccggaccagcccttgaccggcagcctcaaaatcaaggccgtgctccgggccgaccgcctcccggcggccatctccggtgccaggctgaaagaagacgccacggctgaaatccgcctcccgcttttaggtgtccagagcagtcagttattgggtgacggagccctggaaaccgccctgaccccaggctggcgggtggtcttcaatcagccccctgacccggccagcctggaccggcgcgcttatttcatctggtctgaaggctggtcggaacgcaaacaggcggccttggtcgaaccgagcccggaaaacgggaacctgtcttttgagttcaccgcgccggagcctctgccgcgtgacaccgcttaccgcctggttctccaggccggggccgcaaccctggccgggccggaagcggccccggaattacttttggccgaaggccgcacctatggccccttcaccatcggctggagcgaacctcgcgacccggacctggccgcctggccgccccaatgggggccgccgaccctggccttttccaacccggtcgatctggcccgcatcctgcccctcatgcacctggagccggattacgactttgagtccttcatcaaagaatacggggccaccggtgaagaagaggataacgttgaccgtttccagagcagttgtatttatacggcaacttga

SEQ ID NO: 17718 - protein, 287 aa, Unknown
  Obtained from environmental sample
  misc_feature (1)..(287): Xaa is any amino acid
MRFGPSGAIPRLTQITAMFNQPMVPLGAYDQVPAGVLNLTPDLPGRRLWLNQYTLAFVPDQPLTGSLKIKAVLRADRLPAAISGARLKEDATAEIRLPLLGVQSSQLLGDGALETALTPGWRVVFNQPPDPASLDRRAYFIWSEGWSERKQAALVEPSPENGNLSFEFTAPEPLPRDTAYRLVLQAGAATLAGPEAAPELLLAEGRTYGPFTIGWSEPRDPDLAAWPPQWGPPTLAFSNPVDLARILPLMHLEPDYDFESFIKEYGATGEEEDNVDRFQSSCIYTAT

SEQ ID NO: 17719 - DNA, 318 bp, Unknown
  Obtained from environmental sample
  misc_feature (1)..(318): n is a, c, g, or t
atggaaatatccgcattattggagccggatattggagagaagggagaaataaatatgaaacaaaaaataatttacactgaagcgccaaaagatgtttcaagggcaataaccgaaggggaaatcatcgctgattttttaccgccgccggaagaactaatcagaaaagaaccgaaagtaaaaattacaataacattaaatagcggtagtgtagatttttttaagaagtatgcccaaaaaaacaaagtaaaatatcaaacaatgataaatgaagttttggataaatatgtccaacgatataaaaaaaaggcgatagtataa

SEQ ID NO: 17720 - protein, 105 aa, Unknown
  Obtained from environmental sample
  misc_feature (1)..(105): Xaa is any amino acid
MEISALLEPDIGEKGEINMKQKIIYTEAPKDVSRAITEGEIIADFLPPPEELIRKEPKVKITITLNSGSVDFFKKYAQKNKVKYQTMINEVLDKYVQRYKKKAIV

SEQ ID NO: 17721 - DNA, 792 bp, Unknown
  Obtained from environmental sample
  misc_feature (1)..(792): n is a, c, g, or t
atgtccggtcatcaagcggcggtactcgcgcccacaaccatactcgccgcgcagcatttcgccacgttcacggagcgtatgtcgagctttccggtgcgcatagaggtgctcagccgctttcaaaaggggaaagaggtcaaggcgacgctggaaaaactcgctaccggagaggtcgacatattgatcggcacgcaccggattttatccgaagacgtcaagttcaaaaatttaggtctgctgatagtagacgaggaacagcgcttcggcgtcaaacacaaggaatcgctgaaacaactgcgctacaaggcggacgcgctctccatgaccgctacgcccataccgcgcacgctccacatgtcgcttgtcggggcgagagatctgtcaataataaacaccccgcccagaaacaggctgccaatagagacggtggtcgccgaataccacgacgatctcgtcaagagcgccatagagaacgagcttgacaggggggggcaaatctacttcgtcaacaaccgcatcagcaacattccggcgctgcaagacaggttggaaatcttagcccccaaagcaaagacgataagcgcgcacggacaaatggaagagtcggaacttgaggcgataatgaaggagttcatcgccgggcgctacgacatccttctctcaaccgtgataatagaaaacgggctggatatcccgaacgtcaacacgatcatagtgaaccgcgccgacgcgctgggcctgtcgcaactctaccagctgcgggcgcgtcgacgctctctcgcgattgtctga

SEQ ID NO: 17722 - protein, 263 aa, Unknown
  Obtained from environmental sample
  DOMAIN (2)...(120): DEAD/DEAH box helicase
  misc_feature (1)..(263): Xaa is any amino acid
MSGHQAAVLAPTTILAAQHFATFTERMSSFPVRIEVLSRFQKGKEVKATLEKLATGEVDILIGTHRILSEDVKFKNLGLLIVDEEQRFGVKHKESLKQLRYKADALSMTATPIPRTLHMSLVGARDLSIINTPPRNRLPIETVVAEYHDDLVKSAIENELDRGGQIYFVNNRISNIPALQDRLEILAPKAKTISAHGQMEESELEAIMKEFIAGRYDILLSTVIIENGLDIPNVNTIIVNRADALGLSQLYQLRARRRSLAIV

SEQ ID NO: 17723 - DNA, 741 bp, Unknown
  Obtained from environmental sample
  misc_feature (1)..(741): n is a, c, g, or t
ttgttcaggagtgagagtatgaataaaagcttgaatatgggaagcttaatcggggcattaggcgcaatgtttatgatcgtaggatccatcatattgtccggtaacagtattggagccttcatagacataccatcactcctcctcgttcttgtcggttcatatttcgcccttatgatagcgttctcattggcggacagcttgggtgtttttgcggctatcgggctttcttttcaacagcctacatttgatacatcaagtataatccagaaaatggtcgcgttctccgagaaagcccgccgcgaaggtttgcttgctttggaagacgaacttgaagaccttgaagatgaatttatgaaaaagggtctgcgtcttgtagtagacggaaccgacgcgacaattatccgcgatcttatggaattggaattaagccagatgcagagccgccattcattcaaaatcaaacttattaacatgtgggcgactcttgtacctgggttgggaatgttaggtacggttatggggttggtaggtatgttacgcaaccttgatgataaagcgtctatcggccctaacatggcacttgctcttattacaacattctacgggtctttgttttctaacgtattttttattccttttgncagtaaacttggtatatttgataatgatgaagccagtatgaaggaaatgatcatcgaaggcgttcttttcattcagcgggcgataatacgcgtattttag

SEQ ID NO: 17724 - protein, 246 aa, Unknown
  Obtained from environmental sample
  SIGNAL (1)...(28)
  DOMAIN (100)...(229): MotA/TolQ/ExbB proton channel family
  misc_feature (1)..(246): Xaa is any amino acid
MFRSESMNKSLNMGSLIGALGAMFMIVGSIILSGNSIGAFIDIPSLLLVLVGSYFALMIAFSLADSLGVFAAIGLSFQQPTFDTSSIIQKMVAFSEKARREGLLALEDELEDLEDEFMKKGLRLVVDGTDATIIRDLMELELSQMQSRHSFKIKLINMWATLVPGLGMLGTVMGLVGMLRNLDDKASIGPNMALALITTFYGSLFSNVFFIPFXSKLGIFDNDEASMKEMIIEGVLFIQRAIIRVF

SEQ ID NO: 17725 - DNA, 525 bp, Unknown
  Obtained from environmental sample
  misc_feature (1)..(525): n is a, c, g, or t
gtgatcagatcggccgaggcatacttttttcgtatgcggaaagcaacgagtctttttttactgagtgatgagagcaaaagccttcttgattttcgctggataaaagaaaaagacagtattacgcttacggaaaattcggtttatttgggtgttccaaaaaggttaaaatccaagaaagcgacagaagagtttatactatggtttttcaagattgaaaaccagcgccgcattttggagtattccagagtcaacaggataaacgagaatatctttggtatctgcggagggttttccgcgttaagccaagttaccgaacaaatttatccgcttttctaccctgaacttttgggacgaatgcccccatcggaatatttcatgctcccaaatatgttgcctgccaactggttaattatcaaagagcgcgtgataatgccctatcttcatgaacgcgccagaaaggaacactcaaacgaagtctacccccttgaacgccgccttgctgactggctgagactgaaccgttag

SEQ ID NO: 17726 - protein, 174 aa, Unknown
  Obtained from environmental sample
  misc_feature (1)..(174): Xaa is any amino acid
MIRSAEAYFFRMRKATSLFLLSDESKSLLDFRWIKEKDSITLTENSVYLGVPKRLKSKKATEEFILWFFKIENQRRILEYSRVNRINENIFGICGGFSALSQVTEQIYPLFYPELLGRMPPSEYFMLPNMLPANWLIIKERVIMPYLHERARKEHSNEVYPLERRLADWLRLNR

SEQ ID NO: 17727 - DNA, 903 bp, Unknown
  Obtained from environmental sample
  misc_feature (1)..(903): n is a, c, g, or t
atgcaagactgtttcaagcggggagtgtccggaaggaatatcaggctcttagtaataataaccgccttgattttaactgccgcnttcggcgccgccggatgcggcaaaggtcagtcctatcaatctctttcttcaatttccgaaaaatggctttctataaaaaaagagtttaacacttcggcggaaagtcttgaggggcgttacgaccttgatggccgtattgacgatttttgccttgtttttaacagctttttatcctcaccgataggttctctgtatcaagtaaaccgccccgagggaataaaatacattgaagatgtcaattcagctgtgaaccgccttaaaaccgcaatcattaacaacgacgatacaacgatctatctggcggcggctgaaatagacgcaagccttgaaaagttacaacgcattgataataatttatccgacgaaagccagagagactcttttttcctttttttcttcttttccctgctggtcataaccgttattcttgttttaatagtgcagtacacaagaattgaaaaagcggaaaaaagagaaaaacaaagtcttgccttttcgcgggaaaccataatcgcgcaggagcgggaacgtttgcgtattgcgcgcgaattgcatgatacggtcgcgcaggatttgtggcggctttcgtttcaaacggaaagcatagacaaagcaggagaaaagactgagcggagcaagctttgcgcggatgtagtaaaggagcagaaggaggtcatgcagagggtaagaaacatttgcgacaaccttatcccgccggatttccaacggcgccgtttcgatgacgcgcttcgcaacctttgttataattttgaacggcgcaccggcatgaatgtcagctttatcagatatccgcgataa

SEQ ID NO: 17728 - protein, 300 aa, Unknown
  Obtained from environmental sample
  DOMAIN (204)...(269): Histidine kinase
  misc_feature (1)..(300): Xaa is any amino acid
MQDCFKRGVSGRNIRLLVIITALILTAAFGAAGCGKGQSYQSLSSISEKWLSIKKEFNTSAESLEGRYDLDGRIDDFCLVFNSFLSSPIGSLYQVNRPEGIKYIEDVNSAVNRLKTAIINNDDTTIYLAAAEIDASLEKLQRIDNNLSDESQRDSFFLFFFFSLLVITVILVLIVQYTRIEKAEKREKQSLAFSRETIIAQERERLRIARELHDTVAQDLWRLSFQTESIDKAGEKTERSKLCADVVKEQKEVMQRVRNICDNLIPPDFQRRRFDDALRNLCYNFERRTGMNVSFIRYPR

SEQ ID NO: 17729 - DNA, 783 bp, Unknown
  Obtained from environmental sample
  misc_feature (1)..(783): n is a, c, g, or t
ttgggttcccttgaaatgcccgacgttcacatggccttgcagaacgacgcaaaccccatgaccatctcccaggtgaatccggaattgccggaaacagaactgcgccaggcggccctaaaagcaatggaagacgcatttgcgaagatgtcagaggataaacataatgccatgtattctaacgcccgctcccttttttgccttaaggagctttcttcctttttgttcgacagggtgcttttggcctttagtactgacgcgggaggaaaaggggagacctgttccgccggtattgtcagggatcttctttcaactttaaataacattttgctatctctaaagacagtcccgtcaatgacgcttttggaatcactttttattttcatactgcaggagaagtccggagaaccggggtttgatatgaaccacgagacccacgtacttttggccagagctgagcaatctttggccgtaataaaggaatttaataaaaatgtccccctgacgctgatactccgctgctgtacgcggaatacggcgcttgcaccgcatgaactgtccggtggagaagattggtacgtggtttacagggattactggaaaaaacggattgattccctctgtgccgattacctgaaggatcaccgccagaaggacctgctagactctttcagcgaatttttaaaaggcagaagcattaagccattggagaatacccaaacagatacaaatccggacggaattcccataagaggagccttgcccttcttccttacctcgcgataa

SEQ ID NO: 17730 - protein, 260 aa, Unknown
  Obtained from environmental sample
  misc_feature (1)..(260): Xaa is any amino acid
MGSLEMPDVHMALQNDANPMTISQVNPELPETELRQAALKAMEDAFAKMSEDKHNAMYSNARSLFCLKELSSFLFDRVLLAFSTDAGGKGETCSAGIVRDLLSTLNNILLSLKTVPSMTLLESLFIFILQEKSGEPGFDMNHETHVLLARAEQSLAVIKEFNKNVPLTLILRCCTRNTALAPHELSGGEDWYVVYRDYWKKRIDSLCADYLKDHRQKDLLDSFSEFLKGRSIKPLENTQTDTNPDGIPIRGALPFFLTSR

SEQ ID NO: 17731 - DNA, 816 bp, Unknown
  Obtained from environmental sample
  misc_feature (1)..(816): n is a, c, g, or t
atggctattgtgtggagcgatcgtggtcagggagtccgcgctccagtggtgttctacaaccgctccaacgaagctgcccagcagcttgcgcctgggagttttgactgggacaagatctttggcggagcgaagccgacaatacgctggtttcactcaggcggcattttcagcgccctttcgccaaccacatcacagctcgtcatagaggcgatgcaggccgcgaagaaggccggcgcggtagtgtctttcgatctgaactacagggccaagctctgggcaatcgccgcggcggaacagggcaagagcgcggcccaggcaagcgaggaagcggcaaaaaccctgcggaagattgtcagttacgtggatatattggtcggaaatgaggaagatttacagaaagggttgggccttaaaggccaggatgtggaggccaaaagctctctcgatccgtcggcgtttttcggcatgatcgaaagcgttaccagggacttccccaatatcaaggcggtggccactactttgcgagaggttcactcaaccaaccgccatacatggagcgccgttctttggatcgatggcaagcactaccaggcccccaccgccgaactggacgtttacgacagggttggcggcggcgatggttttgccgcggggctgttttacggcctcttgaccggcaaaagccacgaggaagccctgcgccttggctgggcgcacggagcgctgcttaccaccaccccgggagacactaccatggtcagcctggatcangttgaggtctttgcctccggcggctncgcgcgaatacagtcgtaa

SEQ ID NO: 17732 - protein, 271 aa, Unknown
  Obtained from environmental sample
  misc_feature (1)..(271): Xaa is any amino acid
MAIVWSDRGQGVRAPVVFYNRSNEAAQQLAPGSFDWDKIFGGAKPTIRWFHSGGIFSALSPTTSQLVIEAMQAAKKAGAVVSFDLNYRAKLWAIAAAEQGKSAAQASEEAAKTLRKIVSYVDILVGNEEDLQKGLGLKGQDVEAKSSLDPSAFFGMIESVTRDFPNIKAVATTLREVHSTNRHTWSAVLWIDGKHYQAPTAELDVYDRVGGGDGFAAGLFYGLLTGKSHEEALRLGWAHGALLTTTPGDTTMVSLDXVEVFASGGXARIQS

SEQ ID NO: 17733 - DNA, 819 bp, Unknown
  Obtained from environmental sample
  misc_feature (1)..(819): n is a, c, g, or t
gtgcgccgctatggtttccacgggacaagtttcctgtataccgcaaaacgcgcggccgttttattgggacaggatcctttcaaaacaaatgtggtaatctgccacatagggaacggcgcttcggtgaacgctgtcaaggacggctgctcttttgatacgtccatgggcattacccctcttgaggggcttgtcatggggacgcgctcaggcgatattgacgcggctctgcccttctacgttatgagaaaaacaggcatgaacgatgttgaaatggaagccaccctaaataaaaaatcggggcttttgggattgacgggcaaattcgcggacaggcgcgatattcaggccgccgcgattaacggcgataaacaggctctgctcgctcagtatatcgaagcccaccgcgtaaaaaaatatatcggcgcttattgggcggttcttggccgggtggacgctcttgttcttaccgcgggcgtcggcgagtttgcgtggtttatgcgggaaaaaattcttgacggactggaaggcataggcattgtttacgatccgcgcaagaataaaatatcctgcacaagaaataccgagacattgatcagcaagccggaatcgaaaatacctatatacatcattcctaccgacgaagagcttgtaatgacggaagacgcttacgcccttatgaaaggcacttacgatacgcatacccattttacctattccttccagagcaaggactatgtaaacaagggacgcgctgaaagccttgtgcacgatttggaaaaacatcctgaacttgcggagattattgccaagccaaaatga

SEQ ID NO: 17734 - protein, 272 aa, Unknown
  Obtained from environmental sample
  DOMAIN (1)...(220): Acetokinase family
  misc_feature (1)..(272): Xaa is any amino acid
MRRYGFHGTSFLYTAKRAAVLLGQDPFKTNVVICHIGNGASVNAVKDGCSFDTSMGITPLEGLVMGTRSGDIDAALPFYVMRKTGMNDVEMEATLNKKSGLLGLTGKFADRRDIQAAAINGDKQALLAQYIEAHRVKKYIGAYWAVLGRVDALVLTAGVGEFAWFMREKILDGLEGIGIVYDPRKNKISCTRNTETLISKPESKIPIYIIPTDEELVMTEDAYALMKGTYDTHTHFTYSFQSKDYVNKGRAESLVHDLEKHPELAEIIAKPK

SEQ ID NO: 17735 - DNA, 585 bp, Unknown
  Obtained from environmental sample
  misc_feature (1)..(585): n is a, c, g, or t
gtgcgctacattcacagcgaggtggagacaatcgaaagagtggaaatattgacccagctccgcagcgggagctttgatgtccttgtggggatcaacctgcttagggagggcattgacctgccggaagtgtcttttatagcgatcctggacgcggacaaaatcggctttttaaggtcgctgaccagccttgttcagataatcgggcgggcggcgcgtaacgcagcaggtaaggtgatcatgtacgcggacagggtaagcgacgccatgaagacagccattgccgaaaccgagcgccgccgcgccattcagatggaatacaacgaaaagcacggaattaccccaaccacggttaaaaaagcaataacggacattctacagcgccacgcggcggaagaaagggacgccgctgcctcatccatcgaagtacttaaaaagtcctacaatgtcattattcccgccgaaaggaaaaagctaatttccgctctggaaaaagagatgctggaatacgcaaaaaatctggaatttgagcaggctgccgccatcagggacgaaattcagaaaataaaagaaatcggaactaattga

SEQ ID NO: 17736 - protein, 194 aa, Unknown
  Obtained from environmental sample
  DOMAIN (156)...(191): UvrB/uvrC motif
  misc_feature (1)..(194): Xaa is any amino acid
MRYIHSEVETIERVEILTQLRSGSFDVLVGINLLREGIDLPEVSFIAILDADKIGFLRSLTSLVQIIGRAARNAAGKVIMYADRVSDAMKTAIAETERRRAIQMEYNEKHGITPTTVKKAITDILQRHAAEERDAAASSIEVLKKSYNVIIPAERKKLISALEKEMLEYAKNLEFEQAAAIRDEIQKIKEIGTN

SEQ ID NO: 17737 - DNA, 756 bp, Unknown
  Obtained from environmental sample
  misc_feature (1)..(756): n is a, c, g, or t
atggggcggctccgccctgcgcgagaagttgaacaaagccgctccggcggggcgacccataggggaatcctgggagatcagcgggtggggcgacagccagacggtggtctcgagcggcgagtacatgggcctgaccctcggcgaactcttcgccctcagccccgtcgacctggtgggcgagaggagcgccgccgccaaaggcaagggcagcttcccgctcctcttcaagttcatagacgccaacgaaaaactctcgatacaggtgcacccgaacagggaacaggcgagatcgcgcggctggggccaccgcggcaaaaccgaggcctggtacgtggtggacgccgccccaaacgccaagatcgccatcgggttcaaccgcagcggcgtaacgcgggcggaggtcgccgaggccgcaaacgccggccgcttggaaccgctcctgaacttcgttccggcacggcccggcgacgcgttcttcatccccgccggaaccgtacacgccatcctcgacagcatactgatctacgaagtccaagaggagtccaacaccaccctgcgcctgtacgactggaaccgcaaatgccccgccggaaacctaagggaactgcacatcgccgacgccgtggccatcatcaactacaacgaagacagagccctgaaaccggaaccggtggcggtttacaaaaccgagacctttgtgtacgaaacgctatgcgacaacaacaagtttttattgagccgctgcggattccttaa

SEQ ID NO: 17738 - protein, 251 aa, Unknown
  Obtained from environmental sample
  misc_feature (1)..(251): Xaa is any amino acid
MGRLRPAREVEQSRSGGATHRGILGDQRVGRQPDGGLERRVHGPDPRRTLRPQPRRPGGREERRRQRQGQLPAPLQVHRRQRKTLDTGAPEQGTGEIARLGPPRQNRGLVRGGRRPKRQDRHRVQPQRRNAGGGRRGRKRRPLGTAPELRSGTARRRVLHPRRNRTRHPRQHTDLRSPRGVQHHPAPVRLEPQMPRRKPKGTAHRRRRGHHQLQRRQSPETGTGGGLQNRDLCVRNAMRQQQVFIEPLRIP

SEQ ID NO: 17739 - DNA, 330 bp, Unknown
  Obtained from environmental sample
  misc_feature (1)..(330): n is a, c, g, or t
gtgacggagcaggaagaaaacatactaaaagcgatggaggagcagggcacggggagcaaacaggttctgaaaagcgtcggcgatttaaatgaaatcacgaggcatgtaaagagcggctccgatgaaatgcttgacggcgccaaagaagtgatccaggagagcacaaatttggaaaaggcaacccaggaaataaccggcggcattaacgaaatggcctcaggcgctgagcagattaacgtagcggttaaccacgtcaacgagataagcaacaagaaccaccagggtattgaagccctgatacgggaggtttcgcggttcaaagtagcataa

SEQ ID NO: 17740 - protein, 109 aa, Unknown
  Obtained from environmental sample
  misc_feature (1)..(109): Xaa is any amino acid
MTEQEENILKAMEEQGTGSKQVLKSVGDLNEITRHVKSGSDEMLDGAKEVIQESTNLEKATQEITGGINEMASGAEQINVAVNHVNEISNKNHQGIEALIREVSRFKVA

SEQ ID NO: 17741 - DNA, 720 bp, Unknown
  Obtained from environmental sample
  misc_feature (1)..(720): n is a, c, g, or t
gtggatgaatatcaggaccttttgcgggtttccgtcgccagcgccgctaacgatcacaggctcggcgctaacgaggcgcctccggctatcgtgtccatgttccttggcgaggaattgactgaaattatcgaggccattgaatcaggcaaggcttataaaaacaaggaaaaactcgatatgcaaataggcgtgtctgttttgccgcatttccccaaggacaccacagaccgcaaccgcacgtcgcccttcgcgtttaccggcaacaagtttgagttccgcatgctcggctcatcattctcaatcgccgggcccaacatcgtattaaacacgattgtcgccgaaaccttaagggagttcgcggattctcttgagaagtcgaagaacttcaagggagatctcgcggcgctgatcaagaaaacaatcagcgagcacaagcggatcgtttttaacggcaataactacgcggaagaatgggtagttgaggcgcaaaagcgcggattgtccaaccttaaaaccacagtggacgctctgccggaatttatttccaaaaaaagcgtggaactgtttaccaaacaccatgtctttaccgaagtagagcttcactcccggtatgaaatacttatggaagcatattgcaaaactatccatattgaggcgcttgccatggtagatatggtaaaggcggacatttttcccggccagcgtaaactaccaaaatga

SEQ ID NO: 17742 - protein, 239 aa, Unknown
  Obtained from environmental sample
  misc_feature (1)..(239): Xaa is any amino acid
MDEYQDLLRVSVASAANDHRLGANEAPPAIVSMFLGEELTEIIEAIESGKAYKNKEKLDMQIGVSVLPHFPKDTTDRNRTSPFAFTGNKFEFRMLGSSFSIAGPNIVLNTIVAETLREFADSLEKSKNFKGDLAALIKKTISEHKRIVFNGNNYAEEWVVEAQKRGLSNLKTTVDALPEFISKKSVELFTKHHVFTEVELHSRYEILMEAYCKTIHIEALAMVDMVKADIFPGQRKLPK

SEQ ID NO: 17743 - DNA, 885 bp, Unknown
  Obtained from environmental sample
  misc_feature (1)..(885): n is a, c, g, or t
atgtttactgcgccgccggagatgaactgcgcgagctggccgaaaacaaaatcccccgccgccaaaatcagcctctttgatccctctgacgaggaaggcgaggcccccacttttttcgagcttttaacgctgtacttttttctatgcgccaaacacggtaactgcggggcgatggtcgtggaaacaggcatgggcggacggctggactgtaccaatgtcgtagaccccgtggtttccgtcattacattgatagagcttgagcatacggcgattcttggcaagacaattccggcgatagcgggggagaaggcgggcatcatcaaagagggcaagccccttgttttggcaaagcagcaggcgcgggcgctggaagtattcagaaagaaagccgctgaaaagaacagccaattattttattttcccgaactcgcggagatacacaatttgagcgtgcataccgggggcacggatttttcactaaaattcagcggggaaaatgacacgcgggagttttctattcccatacccggcgcaattcaggcggaaaacgccgctttggcgatactggcgctgaaaaattttgataaaaacattaacaatgacgcgattcgccggggcttaagcgccgtaaaaatacccgcgcgttttgaaaaaatcattgacaagccgccccttatcattgacggggcgcatacgccggaaagcgcctcgctttgcgcggacaccttctgctcgctctacggcgagggaggcattctgctgttcggctgcgccgccgataaagatgccgaggcgatggcgcggctgttgctgccgcgtttttcgcaaataattatcacgatgccgggacttagatcaggagcgctgtcgattgtctgcatttaa

SEQ ID NO: 17744 - protein, 294 aa, Unknown
  Obtained from environmental sample
  DOMAIN (212)...(291): Mur ligase family, glutamate ligase domain
  misc_feature (1)..(294): Xaa is any amino acid
MFTAPPEMNCASWPKTKSPAAKISLFDPSDEEGEAPTFFELLTLYFFLCAKHGNCGAMVVETGMGGRLDCTNVVDPVVSVITLIELEHTAILGKTIPAIAGEKAGIIKEGKPLVLAKQQARALEVFRKKAAEKNSQLFYFPELAEIHNLSVHTGGTDFSLKFSGENDTREFSIPIPGAIQAENAALAILALKNFDKNINNDAIRRGLSAVKIPARFEKIIDKPPLIIDGAHTPESASLCADTFCSLYGEGGILLFGCAADKDAEAMARLLLPRFSQIIITMPGLRSGALSIVCI

SEQ ID NO: 17745 - DNA, 393 bp, Unknown
  Obtained from environmental sample
  misc_feature (1)..(393): n is a, c, g, or t
ttggacgccgccgtagacaccttaacgcagatcaccggtcagaaagcggttaagacaaaggcgaagaagagtatcgcgaatttcaagatcagaagcggtcaggaaataggagcaaaagtaactttgcgcggaacgataatgtacgagttttttgacagactggtaaatgtagcccttccgcgcgttaaggactttcacggcattaaccagaacgcttttgacggacatgggaattattcgctgggaattcaagaacagattattttcccggagattgattttgataaaattgaaaaggtagccggattaaacgttgttatcgttacatcggcgccgaccgacgaggaagcaaaggcgttcctgtcgaagttcggaatgcctttcaggaaatag

SEQ ID NO: 17746 - protein, 130 aa, Unknown
  Obtained from environmental sample
  DOMAIN (35)...(129): ribosomal L5P family C-terminus
  misc_feature (1)..(130): Xaa is any amino acid
MDAAVDTLTQITGQKAVKTKAKKSIANFKIRSGQEIGAKVTLRGTIMYEFFDRLVNVALPRVKDFHGINQNAFDGHGNYSLGIQEQIIFPEIDFDKIEKVAGLNVVIVTSAPTDEEAKAFLSKFGMPFRK

SEQ ID NO: 17747 - DNA, 573 bp, Unknown
  Obtained from environmental sample
  misc_feature (1)..(573): n is a, c, g, or t
atggatcagatcggccgagggatattgccgagatggaaattatccgtcatccgcaaagataacaatcacattcatacggcgcgtccgggagttatcatcggcgtaaagggcgctaatatagaaaagatagagagcgacttacacaagaaagttaacaaaatagtaaagataaaaattaaagaagtgcgcaacgcggataacaacgcgcagattgtggcgcagaacatcgcccgccagcttttggcgcgctcttcgttcagacgcacaatgaagcaggcgatttccaacgcgattaaaaagggcaacgctcagggcgtaaaggtaaggctctcgggaaggctcggcggagcggaaatgtcccgcaccgaagaagcgaaagaagggcggattcctcttcatacattgcgcgcggatatagattacggttttgccgaagcccacacaccctttggctcgataggcgtaaaggtatgggtttacaacggcatgaagtacggcaaagaacaaaaagaagacgcaggcgcccttgtccgcaaacggcgggacagggctcccggcggcggcaggagttag

SEQ ID NO: 17748 - protein, 190 aa, Unknown
  Obtained from environmental sample
  DOMAIN (19)...(73): KH domain
  misc_feature (1)..(190): Xaa is any amino acid
MDQIGRGILPRWKLSVIRKDNNHIHTARPGVIIGVKGANIEKIESDLHKKVNKIVKIKIKEVRNADNNAQIVAQNIARQLLARSSFRRTMKQAISNAIKKGNAQGVKVRLSGRLGGAEMSRTEEAKEGRIPLHTLRADIDYGFAEAHTPFGSIGVKVWVYNGMKYGKEQKEDAGALVRKRRDRAPGGGRS

SEQ ID NO: 17749 - DNA, 816 bp, Unknown
  Obtained from environmental sample
  misc_feature (1)..(816): n is a, c, g, or t
atgattatgactcatgaaaaccaatggcaggaacgcttgatccagggaaaatcgcgagtaatcgctctcgcacgaaaggagctttactcctaccttaacgctccggctttttacggggccgccgttttcttcctcgctttcagctccgtctggctgttttatatacagcgttacttcacattgaacgtcgccagcctaagacctttttttgtctccttccccattgtctttatcatcgttatccccgtgcttacaatgaaaagctgggccgaggaacgcaaaaccggaagcatcgagcttctccttaccatgcctttttccgaatgggaacttgtactgggcaaattcttttcgtctttcgccctcctggtgatgatgcttgtcctgaccatccccctgcccctttgcctggccccgctgggtgaatttgactggggcgttatcgcctgcgaatacataggcgcgtttttaatgggcgcttccgccgtcgctttgggcctgcttttatcgtcgctttccaaaaaccaggcgggaagcttcctcggaagcgcggtcgccatgatggcggttatgctgattaacaacctgaccttctccatgaacctgcccttctggctgagcgaatttatcaattttatttcactttcattccattttgaaagtttttccaaagggctgctcgattccagggatataatttatttcctggcaagcgcgggtttatttttgttcatcaccacgcgggtaatattattcaggaggggaactaaaatgacccgaaaacagactgctngtctcggccgaatctgtcaatga

SEQ ID NO: 17750 - protein, 271 aa, Unknown
  Obtained from environmental sample
  misc_feature (1)..(271): Xaa is any amino acid
MIMTHENQWQERLIQGKSRVIALARKELYSYLNAPAFYGAAVFFLAFSSVWLFYIQRYFTLNVASLRPFFVSFPIVFIIVIPVLTMKSWAEERKTGSIELLLTMPFSEWELVLGKFFSSFALLVMMLVLTIPLPLCLAPLGEFDWGVIACEYIGAFLMGASAVALGLLLSSLSKNQAGSFLGSAVAMMAVMLINNLTFSMNLPFWLSEFINFISLSFHFESFSKGLLDSRDIIYFLASAGLFLFITTRVILFRRGTKMTRKQTAXLGRICQ

SEQ ID NO: 17751 - DNA, 771 bp, Unknown
  Obtained from environmental sample
  misc_feature (1)..(771): n is a, c, g, or t
ttgccaaagattccaaacaaatccgtttcaaatattttaaccaaaacatttagctcagccggatttaccaaagccatattcttgccaaagccgattgaaattcttaaaaatgtaaatctttctctcgaaaaaggggacatactttgcatatcgggaaaatccggtgagggcaaaagcacgcttttgcgagtgattgccgggctggaaaaagcctcatcgggggaaatatcgctttttgatgaacgggttaagccaagtgaatggacggctctctcaatggcacagaaaggcattggctttgtgtttcaaaacaatgccttgatttccgatttgacggtaagggacaatatagctgttccgcttcgctataataaaatgggaacagaagaagaaatagagcaaaaagttgaccgcgctcttttactaatgcttgcaaggagctttgcaaacgattatccttattcgctttctcttggaatgcgaaagcgtgttgccattgcccgttcctgggcaatgaacgcaaacattcttcttttagacgagccaacttctggattggacaaaaacagccgcaacaaccttttatcccttgtaaacaacctaagggaactttacaaaaccacaatattgatggttgtaaacgatttgcttgtagctcgcgacctcaatagcaaaatatcttttttaatagataaaaaactaagtgatactatgtattacaatgatataaggaataacgaagattcacgcataagggctatggtgcagtga

SEQ ID NO: 17752 - protein, 256 aa, Unknown
  Obtained from environmental sample
  DOMAIN (45)...(232): ABC transporter
  misc_feature (1)..(256): Xaa is any amino acid
MPKIPNKSVSNILTKTFSSAGFTKAIFLPKPIEILKNVNLSLEKGDILCISGKSGEGKSTLLRVIAGLEKASSGEISLFDERVKPSEWTALSMAQKGIGFVFQNNALISDLTVRDNIAVPLRYNKMGTEEEIEQKVDRALLLMLARSFANDYPYSLSLGMRKRVAIARSWAMNANILLLDEPTSGLDKNSRNNLLSLVNNLRELYKTTILMVVNDLLVARDLNSKISFLIDKKLSDTMYYNDIRNNEDSRIRAMVQ

SEQ ID NO: 17753 - DNA, 633 bp, Unknown
  Obtained from environmental sample
  misc_feature (1)..(633): n is a, c, g, or t
atgactgcgcttgaagcgttaaagcggtttttcgggtatgacggatttcgcggcgggcaagagacgctgataaacgggattttggccggcaaagacgtgctgggcgtaatgcccacgggcgcggggaagtctatatgttttcaggtgccgtcgctcatgatggacgggatcgcgcttgtcgtgtcgccgcttatatcgcttatgaaggatcaggtgaacgccctgaccaagtcgggcgtcgcggcggcgtacatcaacacgtcgctgacgcaggggcagatagacaaggcgctccgaaacgcggcgaacggcttctacaagttgatatacgtggcccccgaacggctgcctacgtcggagttcatggcgttcgccagatcggtgaatatatccatgctggcggtcgacgaggcgcactgcatatcgcaatgggggcaggacttccgccccagctacacgcggatccccgattttatagccaaactgccgaagcgccccgtcgtgtccgcgttcacggccaccgccacgccgagggtgcgcgaagatattttgacgcagctcaagctccgcgccccgcgtattttgatcgcggggttcgaccgcaaaaactctacttcggagctcggaaactga

SEQ ID NO: 17754 - protein, 210 aa, Unknown
  Obtained from environmental sample
  DOMAIN (17)...(183): DEAD/DEAH box helicase
  misc_feature (1)..(210): Xaa is any amino acid
MTALEALKRFFGYDGFRGGQETLINGILAGKDVLGVMPTGAGKSICFQVPSLMMDGIALVVSPLISLMKDQVNALTKSGVAAAYINTSLTQGQIDKALRNAANGFYKLIYVAPERLPTSEFMAFARSVNISMLAVDEAHCISQWGQDFRPSYTRIPDFIAKLPKRPVVSAFTATATPRVREDILTQLKLRAPRILIAGFDRKNSTSELGN

SEQ ID NO: 17755 - DNA, 729 bp, Unknown
  Obtained from environmental sample
  misc_feature (1)..(729): n is a, c, g, or t
ttgggttatggcgagaatttctttcttcttagcggcggtaatgaaatgaagggaaatatattaatcatcgaagacataaaagaaatggccgatttgattaccctttacctgtccagagaaggttttgacgtaaggaccgcggaaagcgctgaaaatggttttgtaattgttgaaagctggaaaccggaactgatcatcctggacatcaacctgcccggtatggatggctttacattccttgaaaaattcagaaaatccagcgatacgccggtgttgataatttccgccagagacagcgatgaagaccagataaacggtctggggatcggcgcggatgaatacgttaccaagcccttctcccccaaagtctttgtcgcaagggtaatcgccctgttccgccgttttaaaggtttaagtgaaagtaatcataaaaacatattcaggtttggtccttatatccttgactatgactcctgtatccttaaaaagaatggtgagagaatccccctttcaacaaatgaatacggttgtctcgcgtggctaacggaacatcccggaaaacccatgcccgcagaggctatttatgccggcgtttggaaaaacaaatacggggacattaccaccgtggcggtttatatccagagactgcggaaaaaaattgaggaagacccgactaatccgatttatatagaaaccgttcacggtatgggttatcaatttaatatataa

SEQ ID NO: 17756 - protein, 242 aa, Unknown
  Obtained from environmental sample
  DOMAIN (165)...(240): Transcriptional regulatory protein, C terminal
  misc_feature (1)..(242): Xaa is any amino acid
MGYGENFFLLSGGNEMKGNILIIEDIKEMADLITLYLSREGFDVRTAESAENGFVIVESWKPELIILDINLPGMDGFTFLEKFRKSSDTPVLIISARDSDEDQINGLGIGADEYVTKPFSPKVFVARVIALFRRFKGLSESNHKNIFRFGPYILDYDSCILKKNGERIPLSTNEYGCLAWLTEHPGKPMPAEAIYAGVWKNKYGDITTVAVYIQRLRKKIEEDPTNPIYIETVHGMGYQFNI

SEQ ID NO: 17757 - DNA, 672 bp, Unknown
  Obtained from environmental sample
  misc_feature (1)..(672): n is a, c, g, or t
atgaaaatacttgtaacgcctgcttcgtttaagcagggagcgtccccgtccgtcatggacaggctggaaaattttaccgatgaacttgtttacaacaccaagggcaaaccccttaccgaggaagagcttatcgttatgcttagaggctgcgacggctgtatcgcagggcttgatcctttcagcagaatggtcattgaaagctgtgacgcgttgaaagttatttcccgttacggtaccggtattgacaatgtggacattgcggccgcgaaggaaaaagggataattgtctgcaggacgcccggagtgaattcacaggcggtcgcggagcttgcaattaccttcatgctctgtcttgcaaggcaggttcccatgctggacaggaaaacgcgtgaaggcttttgggtcagatccgtgggcgctgaattacatacaaaaacattgggcattctggggcttggcgccgtgggcaaaagaacggcgcgtattgccgccggtttttccatgaatgtgctggcctgcgatcccaatatggataaagattacgcgcaggcaaatgaaattaaaccggttgattttgacacactgttgcgggaatcggattttctcagcctgcatttgccgctaaattcggatacccgccatattatttccgcgaagcgatgcggcgcatga

SEQ ID NO: 17758 - protein, 223 aa, Unknown
  Obtained from environmental sample
  DOMAIN (112)...(223): D-isomer specific 2-hydroxyacid dehydrogenase, NAD binding domain
  misc_feature (1)..(223): Xaa is any amino acid
MKILVTPASFKQGASPSVMDRLENFTDELVYNTKGKPLTEEELIVMLRGCDGCIAGLDPFSRMVIESCDALKVISRYGTGIDNVDIAAAKEKGIIVCRTPGVNSQAVAELAITFMLCLARQVPMLDRKTREGFWVRSVGAELHTKTLGILGLGAVGKRTARIAAGFSMNVLACDPNMDKDYAQANEIKPVDFDTLLRESDFLSLHLPLNSDTRHIISAKRCGA

SEQ ID NO: 17759 - DNA, 573 bp, Unknown
  Obtained from environmental sample
  misc_feature (1)..(573): n is a, c, g, or t
atggacagaatcaacaaaagtattgacgctcttatggagacttacggaaaatacggtatggtcaaccattcgggagaggcgagtcttcccggcagggaaagcatagcccgcatagtgcgcggtctggatgagcttatatttcccggttttcgggaaaaccaggggctggatcacagcaacctgaaacttataaccgcggaaaaagttaaccacatcgcccgcgaacttattcacgaggtcgagaaaagcctcgcgtattccgcgcgggtcggcgctttaagctgcggtcagggcggctgtcatgccgcggcggagcttatcgtagagggcttttttgacgagcttcccgccatacgccgcgccctgtccctggatatgcaggcgaattttcgcggagacccggccgcaaaaagcgaagacgaggttatcctttcctaccctggttttcaggcgatcaccgtacacaggctcgccaattatttttggaacgccaatgttcccctcatcccccgcatgatgagcgaactgtacacgggaataccggcattgacattcacccgggcgcgagaatag

SEQ ID NO: 17760 - protein, 190 aa, Unknown
  Obtained from environmental sample
  misc_feature (1)..(190): Xaa is any amino acid
MDRINKSIDALMETYGKYGMVNHSGEASLPGRESIARIVRGLDELIFPGFRENQGLDHSNLKLITAEKVNHIARELIHEVEKSLAYSARVGALSCGQGGCHAAAELIVEGFFDELPAIRRALSLDMQANFRGDPAAKSEDEVILSYPGFQAITVHRLANYFWNANVPLIPRMMSELYTGIPALTFTRARE

SEQ ID NO: 17761 - DNA, 354 bp, Unknown
  Obtained from environmental sample
  misc_feature (1)..(354): n is a, c, g, or t
atggatgaaaatgtatttatagcaagacaacctattttagatagagacgaatctttatttgcatacgagctgttattccgcaaaaaacaagccgatgcggtcgccgccataataaatgatgtagaagctactgcgcaggttttggataacgcgctgaacaatgtgggcataacaaaattggttggcaaccacttggcatttataaattgcagctatgaatttttaaccagcgaaattctgtatgtgctagatagcaagatatttgttctggaaatcctggagacggtggaaattgatgataaaatagtagaggcagtaaagaatttccacagcctgggttataaaatgccatga

SEQ ID NO: 17762 - protein, 117 aa, Unknown
  Obtained from environmental sample
  misc_feature (1)..(117): Xaa is any amino acid
MDENVFIARQPILDRDESLFAYELLFRKKQADAVAAIINDVEATAQVLDNALNNVGITKLVGNHLAFINCSYEFLTSEILYVLDSKIFVLEILETVEIDDKIVEAVKNFHSLGYKMP

SEQ ID NO: 17763 - DNA, 852 bp, Unknown
  Obtained from environmental sample
  misc_feature (1)..(852): n is a, c, g, or t
atggaaaactatacatatatagatgatctagagaaaataattgaatttcgcaagtatttatatgaaaaaaatattagcaaaatagcaatggattttgaaggggaatataatcttcatagttacggagaaaagttgtgtcttatacaaatattcgatggagaaaagtattttatcattgacccattaacaattgatgataatgaaatcattaaaacactaagtaatcataaaattgtaaaatttatgtatggtattgagtctgatataaatttaatatataaacaatatggaataaaattaagtaatatttttgatcaaaaattattagttgatgttttaaattttaaaaataaaggattagatgatgttgtcaatatattattcaatattaaaaataatcataaaacaaaataccaaaaatataattggcaaaaaaggcctataaaaaatgaagctataatatatgcattaagtgatgttaaatatttatttaatattaatgaaatgctcatgaaaagaataatcaatgaaaataaagttaatgatttaattttaagaattataaaaaatgattttcattttgaaaaagataggataccaggaatttttaaaaagaagtcgtttaaagaattgtcagaaaatgataaaaaaacatttacaaaaatttatgaagtcagagagaattttgcaaaaattttgaatatgccctcacataatataatagaaaatgcatttttatttaatattgctaatcaaaaaattaatttagacacaataacttttaatgaaaaaatttcaaaagaaatttngttggaaatattagttaaaatgcgtgagataataaataaatag

SEQ ID NO: 17764 - protein, 283 aa, Unknown
  Obtained from environmental sample
  DOMAIN (4)...(175): 3'-5' exonuclease
  misc_feature (1)..(283): Xaa is any amino acid
MENYTYIDDLEKIIEFRKYLYEKNISKIAMDFEGEYNLHSYGEKLCLIQIFDGEKYFIIDPLTIDDNEIIKTLSNHKIVKFMYGIESDINLIYKQYGIKLSNIFDQKLLVDVLNFKNKGLDDVVNILFNIKNNHKTKYQKYNWQKRPIKNEAIIYALSDVKYLFNINEMLMKRIINENKVNDLILRIIKNDFHFEKDRIPGIFKKKSFKELSENDKKTFTKIYEVRENFAKILNMPSHNIIENAFLFNIANQKINLDTITFNEKISKEIXLEILVKMREIINK

SEQ ID NO: 17765 - DNA, 453 bp, Unknown
  Obtained from environmental sample
  misc_feature (1)..(453): n is a, c, g, or t
ttggtaaacgctattatcaagaaaaaatgcgaattctatcccaggcaccgttattacattgtccaggacgtttcggaattgcaatgcgagggcgaatatgccgatatgcccgttatccgctccgatcaggcgacgcttgccgttttattgtcattgcgttacacgcccaatttcatcattttcggagaggtcagaaagggcgcggttatggcggagcttctggacgcgtggaataccggccatcccggcggggtaacgacgattcacgcgaattcgtcaggcgcgaccattacaaggataaagaaactgctgctggatcattatccgaacgaatcgagcctgcctgaccttaacgaatatatagacattattatctatattcaaaaggacaaggaaacaggaattgcgattaacgagataatggagttaaaaacagtgagcagtgagcagtga

SEQ ID NO: 17766 - protein, 150 aa, Unknown
  Obtained from environmental sample
  misc_feature (1)..(150): Xaa is any amino acid
MVNAIIKKKCEFYPRHRYYIVQDVSELQCEGEYADMPVIRSDQATLAVLLSLRYTPNFIIFGEVRKGAVMAELLDAWNTGHPGGVTTIHANSSGATITRIKKLLLDHYPNESSLPDLNEYIDIIIYIQKDKETGIAINEIMELKTVSSEQ

SEQ ID NO: 17767 - DNA, 438 bp, Unknown
  Obtained from environmental sample
  misc_feature (1)..(438): n is a, c, g, or t
ttgcaaatgattttatttcggcaaatggcttttaagtttgcatcactcctcttttgcttgctgttgttttcttgcgccgttaaaacaagaaaaaagagtgacgatgaatattatttctcaggggaaaatgaatggagaaatatggcaaaggattttaaatatcctgaggaacttgaaaaacgcattgaagagtttttaggcattccttatgtatggggcggcaatgaccaaagcggtatggattgctcggcttttgttaaacaggtgtatgaaatatacggctttgatttgccaaggacttctgtgttgcagagcaaattggggattgaaattccgcgtgaggctcttttgccgggcgatttggtgttttttggcgaaacagataataattctgttacccacgttggcatttatatgggaggcaataagtttgcctaa

SEQ ID NO: 17768 - protein, 145 aa, Unknown
  Obtained from environmental sample
  SIGNAL (1)...(29)
  DOMAIN (67)...(145): NlpC/P60 family
  misc_feature (1)..(145): Xaa is any amino acid
MQMILFRQMAFKFASLLFCLLLFSCAVKTRKKSDDEYYFSGENEWRNMAKDFKYPEELEKRIEEFLGIPYVWGGNDQSGMDCSAFVKQVYEIYGFDLPRTSVLQSKLGIEIPREALLPGDLVFFGETDNNSVTHVGIYMGGNKFA

SEQ ID NO: 17769 - DNA, 753 bp, Unknown
  Obtained from environmental sample
  misc_feature (1)..(753): n is a, c, g, or t
atgatcagatggccgagaaatgaatttgtttttgatgttattgttcccgcagagcttccggcagatatcaacgccttcaagagtcagcaataccgctgggcaaagggttcaatacaaaccgccataaaagatttgccacgagttttttcttcaaaagagtctttaaaaatcaaaattcagtcttttttgcacacaacgcattatagtattcatcctttgatgttattcaccgccatttccgcattccccttgctcgcttttgggcattcaagatttgggtatatgcctatatggcttttttcggttttgtttgcagttatagcccttgcagctgtggctccctctacgctttattttattgcccaaaaattttcaggttccgttggctggagaaaacgaatggctgcccttcctttgctaatgagccttggggtggggattgccgttaataatacttgtgctgttatgtctgctgtctttgggagaaaaagctcttttattagaactccaaaacagggaggagcagttggacaaggcggggcagttagcgtaaaaaaattcaagcaaaaattcccagcaattgccttttttgaaatatgctgcggtgtttattgtgtgtttggtttgctggaatatatagacgcaagaattttccttataggtccatttttagctctttatgccgttggatttttatcggttggcgttttgagtatggttcactatttagataatttaggcggacaagcctga

SEQ ID NO: 17770 - protein, 250 aa, Unknown
  Obtained from environmental sample
  misc_feature (1)..(250): Xaa is any amino acid
MIRWPRNEFVFDVIVPAELPADINAFKSQQYRWAKGSIQTAIKDLPRVFSSKESLKIKIQSFLHTTHYSIHPLMLFTAISAFPLLAFGHSRFGYMPIWLFSVLFAVIALAAVAPSTLYFIAQKFSGSVGWRKRMAALPLLMSLGVGIAVNNTCAVMSAVFGRKSSFIRTPKQGGAVGQGGAVSVKKFKQKFPAIAFFEICCGVYCVFGLLEYIDARIFLIGPFLALYAVGFLSVGVLSMVHYLDNLGGQA

SEQ ID NO: 17771 - DNA, 840 bp, Unknown
  Obtained from environmental sample
  misc_feature (1)..(840): n is a, c, g, or t
atgacaagttcttccagcccgggcgtcagccttaagcaagaaggaatgtcttatgccgcaggagcggatgttccgctggtcatggtcaatgttgtccgaggcggtccggggcttggcaatattgctccggcgcaaagtgattattttcaggcgacacgaggcggcggacacggagactaccgctgtatagttttagctccgaagagcgtacaggaatgcgcagatcacacctatatggcttttgatctggcggacaagtaccgtgttccggtcattgttcttgcggacggaatgatcggtcagatgatagaaggggtggttctgccgcctgaaaaagaagcgcccaaaagagactggatagtcggcaatatggcggcaacgcacagggaagctaggcatattacgtcaattcaccttgtgcctgaagaacttgaaagcattacaaaagaacgctttaagcgttacgagacaattaaagccgctgagattcgttatgaagataataactgcgccggagccgatcttgtaatggttgcttacggaacatgcgcaagagtatgtttgggagcgcaaatgcttgccaaaaaagaaggaattaaactcggtatattcagacctgttaccttgtggccgttcccgtatgaagctctgggtaaagcagctaacggcaagccggttctgacagtagagatgtctcttgggcagttagttgaagatgtaaagctttccgcttatgaagcaggttcaagctccgacattagccttttgagtcattccggcggcattattccaacagaagaagaagtgtttngaaaggcaaaggaaatttttaagaaatga

SEQ ID NO: 17772 - protein, 279 aa, Unknown
  Obtained from environmental sample
  DOMAIN (1)...(153): Pyruvate flavodoxin/ferredoxin oxidoreductase, thiamine diP-binding domain
  misc_feature (1)..(279): Xaa is any amino acid
MTSSSSPGVSLKQEGMSYAAGADVPLVMVNVVRGGPGLGNIAPAQSDYFQATRGGGHGDYRCIVLAPKSVQECADHTYMAFDLADKYRVPVIVLADGMIGQMIEGVVLPPEKEAPKRDWIVGNMAATHREARHITSIHLVPEELESITKERFKRYETIKAAEIRYEDNNCAGADLVMVAYGTCARVCLGAQMLAKKEGIKLGIFRPVTLWPFPYEALGKAANGKPVLTVEMSLGQLVEDVKLSAYEAGSSSDISLLSHSGGIIPTEEEVFXKAKEIFKK

SEQ ID NO: 17773 - DNA, 402 bp, Unknown
  Obtained from environmental sample
  misc_feature (1)..(402): n is a, c, g, or t
atgcccaaagcacagacccccgcaagcgttcttcaatctcttatggacgagtatcagctaaaccccttttcacttgccaaagcgattagcctaagtaattccgctgtccgcttaattgtaatcgggaaggctaaaataactgttaccacagccctacgtctagccaagtttttcggtcaaacccctgcctattggctagacctacagcgtgaagccgacataaccgaagcttcaaaagacaaggcattacaggatattctaaaggctatacacaaagccaagaaaccagccgccactaaagagggagccgccgaaaagcctaataaattgagcaagaaatcaactgtaaccaccgccccaagaaccagaaaaagccataaaaagattgtcaaggaaaaataa

SEQ ID NO: 17774 - protein, 133 aa, Unknown
  Obtained from environmental sample
  DOMAIN (11)...(65): Helix-turn-helix
  misc_feature (1)..(133): Xaa is any amino acid
MPKAQTPASVLQSLMDEYQLNPFSLAKAISLSNSAVRLIVIGKAKITVTTALRLAKFFGQTPAYWLDLQREADITEASKDKALQDILKAIHKAKKPAATKEGAAEKPNKLSKKSTVTTAPRTRKSHKKIVKEK

SEQ ID NO: 17775 - DNA, 909 bp, Unknown
  Obtained from environmental sample
  misc_feature (1)..(909): n is a, c, g, or t
ttgaaaaatggcggaaaagattcctcctttcagggaacgctgcaaaattccgccgaaagccttgccgattatttggactttatcggggacttcggcatactgggcgagcgtttgtattactatgccgacctgaggcaaaccgaagacgagggttccggcgcggcgagaaccatgtgcggaaaaatcaccatggcggcagcaaaggcgcaggccgccggagcgtgggaagggccggagattcttgctattcccgaacaagccatggaacaatttctcgcccatccccgcattgccgattaccgtatttatttgcaacggactctgcgttaccgtccccatattttaagcgataaggaagaacggatcatcgccctccatgccgagggggaggggacaccccatgacgctttctccgtgctaaccaatgttgattttgatttcggcgcgattgacacccccgaaggaaagcggcccctttcccaatccacctggtcggtgttcatggaaaatcctgaccgcgatttgcgccgccgcgcctacgaaggtttttatcattgttttgaatcccataaaaccacactggcaagcctctattccggttcggtcaaacaggatgtaattaaagcgcggatacggggctatagttcggcgcgagcggcggcgctgttttccgatgatgtcagcgaagcggtgtatgacaacctggtcgccaccgtaggcgaaaatcttgacgcgctgcaccgttattacaagttacgcaagcgggcgctcaaactgcccgaactgcggcactatgacgtatacacgccgctggtgcagacggtcaaaagaaaaacaagctggaatgaagcggttgatctgatttccgcggcgcttgcacctctgggcgatgaatatgtctccacatga

SEQ ID NO: 17776 - protein, 302 aa, Unknown
  Obtained from environmental sample
  DOMAIN (79)...(147): Oligopeptidase F
  misc_feature (1)..(302): Xaa is any amino acid
MKNGGKDSSFQGTLQNSAESLADYLDFIGDFGILGERLYYYADLRQTEDEGSGAARTMCGKITMAAAKAQAAGAWEGPEILAIPEQAMEQFLAHPRIADYRIYLQRTLRYRPHILSDKEERIIALHAEGEGTPHDAFSVLTNVDFDFGAIDTPEGKRPLSQSTWSVFMENPDRDLRRRAYEGFYHCFESHKTTLASLYSGSVKQDVIKARIRGYSSARAAALFSDDVSEAVYDNLVATVGENLDALHRYYKLRKRALKLPELRHYDVYTPLVQTVKRKTSWNEAVDLISAALAPLGDEYVST

SEQ ID NO: 17777 - DNA, 408 bp, Unknown
  Obtained from environmental sample
  misc_feature (1)..(408): n is a, c, g, or t
atgccgtcgcccactgtattcatcttccttctgctggctgcctgtctggccggcttcattgacggcgtggccggcggcgggggcctgatctccgtccccgcgctgttcatgtgccttcccggccaccccacgacgacgctgcttggcaccaacaaactggtggccgtcacgggcaccacattcgctgcggcgcagtttgtccgcagccgcgtggtgccgtttcgggagatgctggctccgatgctgggcgccggcggcggcgcggtgttcggcgcatgggcggcctattccttcgagggcagcttcgaggcggcgatgcgcccaaccatgctggcggttatggtcgggatgctggcattcacgcttctccggcccagcatggcacgtcgtcgggacgaaccgccataa

SEQ ID NO: 17778 - protein, 135 aa, Unknown
  Obtained from environmental sample
  SIGNAL (1)...(26)
  misc_feature (1)..(135): Xaa is any amino acid
MPSPTVFIFLLLAACLAGFIDGVAGGGGLISVPALFMCLPGHPTTTLLGTNKLVAVTGTTFAAAQFVRSRVVPFREMLAPMLGAGGGAVFGAWAAYSFEGSFEAAMRPTMLAVMVGMLAFTLLRPSMARRRDEPP

SEQ ID NO: 17779 - DNA, 765 bp, Unknown
  Obtained from environmental sample
  misc_feature (1)..(765): n is a, c, g, or t
ttgcgaaccgctcggaggcgctttttaactggttttcaggtcaggcggataaggcttttttatagccataaaagcactatggaagcaaacgttatagaaattgagaatattcagtattcctataacaaaaaaagcatggtattaactgatttttacctgaaccttaaacgcggtggcataatcgccatacttgggcataatggggcaggtaagacaaccttgctccggcttcttgggaagcttattacgccaaatgcgggcactattaaatggaatttgctgccaagtgaagaaatcgggtatatgccggaaggcttgggactttatcccaggttgtcaggctatgagaacgtaaaattgcagcttctaagcgcgaataaaaagccggataaagaaacgatattgtcaattataaatagaattgaccttggggaacatacaaagaaattgacgggctattattcaaccggaatgaaacggcggttgtctttggcttgcacattggtaacaactcccgaattattgttaatggacgagccgtttttggggattgaccctgtaagccaaaaaataatgattgacatgatacatgaatacaagcaagaaaactcaaccgtgattataacaacccatgatcttaatctggtacgcaatatttgcgacagttttgtgataatacaaaatggaaaggttgtttatatttccgccgaaaatgaggatataaacaatattgaacaaatttactttcaatatgcggggaaataa

SEQ ID NO: 17780 - protein, 254 aa, Unknown
  Obtained from environmental sample
  DOMAIN (58)...(229): ABC transporter
  misc_feature (1)..(254): Xaa is any amino acid
MRTARRRFLTGFQVRRIRLFYSHKSTMEANVIEIENIQYSYNKKSMVLTDFYLNLKRGGIIAILGHNGAGKTTLLRLLGKLITPNAGTIKWNLLPSEEIGYMPEGLGLYPRLSGYENVKLQLLSANKKPDKETILSIINRIDLGEHTKKLTGYYSTGMKRRLSLACTLVTTPELLLMDEPFLGIDPVSQKIMIDMIHEYKQENSTVIITTHDLNLVRNICDSFVIIQNGKVVYISAENEDINNIEQIYFQYAGK

SEQ ID NO: 17781 - DNA, 906 bp, Unknown
  Obtained from environmental sample
  misc_feature (1)..(906): n is a, c, g, or t
ttgaaaggcagggatcaagcgccctccacgacggttgggaacggcaggacaaacgctggaacaatcgcgcctgatggaagttacgtcgcaaggctggatctggagtaccgctcgggcaacagacccacttccatttcaatggcctttaacctcagaacgacgcctccacagggtgatatttccgtgccgtacaatgtttttgcacctaacggaaacggaaaccgcgataccctgcctattcgcgttacaacagagggcaatgacgaatggaacatggtggtttcttcaagcgggaacacgccggtcagatcatggaactggacgggaagggccccggcggtttcgatagtctgggacggcaaggacgaggcgggaaacatcgtagacgacggaacctacagcataaccctcagctcaaccgatgatgccggaaacagcacacgcaaaaacataaacaatatagttgttgacgccagagttccaaagatattccttaccgcttccgtacaagccatcgctccaaaacctgaccaggccgaagccatgcactttaacatcatggcaacgccggctgaaggcgttactttctggaagcttgaattaagagacgataacaacgagctgattaaatccttcccgtcccagtcaggcggaagcgggccgctcccaacgaccatcccctggaacggcgcaaatgaaagaaacgtaataatagaggggcgcatcaccccatcactgaccgtgaattactcaaagggcgatgttgtcaatgtctcagcgccgcctgtattggtggacatcacaggcccagtcctcggcttccattctcagcctgaattcttcagtcccgacaatgacggagtagacgacgagctttcatctccttcctcggccaatctgtcatga

SEQ ID NO: 17782 - protein, 301 aa, Unknown
  Obtained from environmental sample
  misc_feature (1)..(301): Xaa is any amino acid
MKGRDQAPSTTVGNGRTNAGTIAPDGSYVARLDLEYRSGNRPTSISMAFNLRTTPPQGDISVPYNVFAPNGNGNRDTLPIRVTTEGNDEWNMVVSSSGNTPVRSWNWTGRAPAVSIVWDGKDEAGNIVDDGTYSITLSSTDDAGNSTRKNINNIVVDARVPKIFLTASVQAIAPKPDQAEAMHFNIMATPAEGVTFWKLELRDDNNELIKSFPSQSGGSGPLPTTIPWNGANERNVIIEGRITPSLTVNYSKGDVVNVSAPPVLVDITGPVLGFHSQPEFFSPDNDGVDDELSSPSSANLS

SEQ ID NO: 17783 - DNA, 687 bp, Unknown
  Obtained from environmental sample
  misc_feature (1)..(687): n is a, c, g, or t
atgaatgaaataaatgaaagcaaaatccttcttaaggtaacaaatatcgtaaaaaattatgtttcaggcgaggaaacgctaaatatactgaaaggcattaactttgaaataaatgaaggaatatccgccgcaatcagcggaaggagcggaagcggaaaaagcactctccttaacataataggcggacttgacagcgcagacgaaggcagtatcttaatcggcaatgatgaaataacttcgctttcagaaaaagaattatcagtgtacaggtctaaacgtattggttttatttttcagtttcattatttactgaaagattttaccgctcttgaaaacgtaatgcttcccgcttatatcgccggtataaagaaaaaagacgcaatggatatggcaatgtccctgttagctgatgtaaaacttgacgaccgccgcgggcattttccatcgcagctttcgggaggagaacgccagcgtgtcgccgtggctcgttctatggtaaacgatcccgctttaattcttgccgatgagcctacaggaaaccttgatccgcagaacagcgagcttgtcgcccaactgctctatgagggcgcgcaaaaaagaggcaaaaccctgattgttgttacccatgacaaaaatgtagcggcgagagcttctatacggcttttacttgaaaacgagaccagttaa

SEQ ID NO: 17784 - protein, 228 aa, Unknown
  Obtained from environmental sample
  DOMAIN (12)...(228): RecF/RecN/SMC N terminal domain
  misc_feature (1)..(228): Xaa is any amino acid
MNEINESKILLKVTNIVKNYVSGEETLNILKGINFEINEGISAAISGRSGSGKSTLLNIIGGLDSADEGSILIGNDEITSLSEKELSVYRSKRIGFIFQFHYLLKDFTALENVMLPAYIAGIKKKDAMDMAMSLLADVKLDDRRGHFPSQLSGGERQRVAVARSMVNDPALILADEPTGNLDPQNSELVAQLLYEGAQKRGKTLIVVTHDKNVAARASIRLLLENETS

SEQ ID NO: 17785 - DNA, 765 bp, Unknown
  Obtained from environmental sample
  misc_feature (1)..(765): n is a, c, g, or t
ttggacgcgctcaggcaaatacggggcaaccagcgcgtaactgatcaaaaccccgaaaacaaataccaggtgctggaacgctattgccgcgaccttaccgctcttgcgagacaggaaaaaatagaccctgtcatcgggcgggacgaggaaatacgccgctgtatgcaggtgctgtcccggcgcaccaagaacaaccctatactgataggcgagccgggcgttggcaagaccgccattgtggaaggccttgcgcggcgcatagtcgccggggacgtgccggagggcctgaaagacaaaaaactccttgcgctggatctgggcctgcttgtcgcagggacaaaattccggggcgaatttgaggaccgcctgaaaaccctgatacacgaggtgcaggccgccgagggaaagataatcctctttattgacgaactgcataccctggtcggggccggcgccgcggaaggcgcgacagacgcttccaacctgttaaagcccgcgctggcgcggggcgaactgcgctgcataggcgccaccacgctggacgagtaccgcaagcacatagaaaaagacgccgccctggaacgccgcttccagcaggtgtatacggcggagccttcggttgaagataccatcgccatactgcgcgggctgaaagaacgctacgaagtacaccacggcgtaaggattaaagacgaggcgctggtcgccgcggcaacgctgtccagccgctatattaccagccgcttatgccggacaaggccataa

SEQ ID NO: 17786 - protein, 254 aa, Unknown
  Obtained from environmental sample
  DOMAIN (65)...(253): ATPase family associated with various cellular activities (AAA)
  misc_feature (1)..(254): Xaa is any amino acid
MDALRQIRGNQRVTDQNPENKYQVLERYCRDLTALARQEKIDPVIGRDEEIRRCMQVLSRRTKNNPILIGEPGVGKTAIVEGLARRIVAGDVPEGLKDKKLLALDLGLLVAGTKFRGEFEDRLKTLIHEVQAAEGKIILFIDELHTLVGAGAAEGATDASNLLKPALARGELRCIGATTLDEYRKHIEKDAALERRFQQVYTAEPSVEDTIAILRGLKERYEVHHGVRIKDEALVAAATLSSRYITSRLCRTRP

SEQ ID NO: 17787 - DNA, 558 bp, Unknown
  Obtained from environmental sample
  misc_feature (1)..(558): n is a, c, g, or t
atggcgatggtatcttcaaccgaaggctccgccgtatacacctgctggaagcggcgttccagggcggcgtctttttctatgtgcttgcggtactcgtccagcgtggtggcgcctatgcagcgcagttcgccccgcgccagcgcgggctttaacaggttggaagcgtctgtcgcgccttccgcggcgccggccccgaccagggtatgcagttcgtcaataaagaggattatctttccctcggcggcctgcacctcgtgtatcagggttttcaggcggtcctcaaattcgccccggaattttgtccctgcgacaagcaggcccagatccagcgcaaggagttttttgtctttcaggccctccggcacgtccccggcgactatgcgccgcgcaaggccttccacaatggcggtcttgccaacgcccggctcgcctatcagtatagggttgttcttggtgcgccgggacagcacctgcatacagcggcgtatttcctcgtcccgcccgatgacagggtctattttttcctgtctcgcaagagcggtaaggtcgcggcaatag

SEQ ID NO: 17788 - protein, 185 aa, Unknown
  Obtained from environmental sample
  misc_feature (1)..(185): Xaa is any amino acid
MAMVSSTEGSAVYTCWKRRSRAASFSMCLRYSSSVVAPMQRSSPRASAGFNRLEASVAPSAAPAPTRVCSSSIKRIIFPSAACTSCIRVFRRSSNSPRNFVPATSRPRSSARSFLSFRPSGTSPATMRRARPSTMAVLPTPGSPISIGLFLVRRDSTCIQRRISSSRPMTGSIFSCLARAVRSRQ

SEQ ID NO: 17789 - DNA, 468 bp, Unknown
  Obtained from environmental sample
  misc_feature (1)..(468): n is a, c, g, or t
atgcagttcgtcaataaagaggattatctttccctcggcggcctgcacctcgtgtatcagggttttcaggcggtcctcaaattcgccccggaattttgtccctgcgacaagcaggcccagatccagcgcaaggagttttttgtctttcaggccctccggcacgtccccggcgactatgcgccgcgcaaggccttccacaatggcggtcttgccaacgcccggctcgcctatcagtatagggttgttcttggtgcgccgggacagcacctgcatacagcggcgtatttcctcgtcccgcccgatgacagggtctattttttcctgtctcgcaagagcggtaaggtcgcggcaatagcgttccagcacctggtatttgttttcggggttttgatcagttacgcgctggttgccccgtatttgcctgagcgcgtccaaaaccgcttttttggtaacgccccgtttttttag

SEQ ID NO: 17790 - protein, 155 aa, Unknown
  Obtained from environmental sample
  misc_feature (1)..(155): Xaa is any amino acid
MQFVNKEDYLSLGGLHLVYQGFQAVLKFAPEFCPCDKQAQIQRKEFFVFQALRHVPGDYAPRKAFHNGGLANARLAYQYRVVLGAPGQHLHTAAYFLVPPDDRVYFFLSRKSGKVAAIAFQHLVFVFGVLISYALVAPYLPERVQNRFFGNAPFF

SEQ ID NO: 17791 - DNA, 405 bp, Unknown
  Obtained from environmental sample
  misc_feature (1)..(405): n is a, c, g, or t
atgaacgccatacgattgatatcgcatttattaatctcgctgatgttatttacatcatgcggtaagaataattcggaagcaacggcatcatcattgtcaacgcctttacccgtaaccagaatagtctcattcgccccgagcgttaccgagattctgtatgaattgggtttgggcggcaaggtttgcggggtaacgcagttttgcaagtatccgcctgaagccgcccaaaaggagaaaatcggcggacagaccgatcgcaactacgaggctgtcgtcaggttaaagccggatttagcggtaatcctcaaagaacagcgtgatatgatcgccttctttgacaaatactccatccgccacatcaccgtaggcagcgattctgtgacgagatactgctcggccatctga

SEQ ID NO: 17792 - protein, 134 aa, Unknown
  Obtained from environmental sample
  SIGNAL (1)...(25)
  misc_feature (1)..(134): Xaa is any amino acid
MNAIRLISHLLISLMLFTSCGKNNSEATASSLSTPLPVTRIVSFAPSVTEILYELGLGGKVCGVTQFCKYPPEAAQKEKIGGQTDRNYEAVVRLKPDLAVILKEQRDMIAFFDKYSIRHITVGSDSVTRYCSAI

SEQ ID NO: 17793 - DNA, 525 bp, Unknown
  Obtained from environmental sample
  misc_feature (1)..(525): n is a, c, g, or t
ttgaacaaggcgcgggtacggatcacgcccgaagatgtgcgaanagcgtngtnggcgtcaaaaatcatctcctacgcgcaaggctttatgttgatggctaccgcgtcaaaggagtacggttgggatcttgatttgggcaatatcgcgttgctgtggcgcggcgggtgtattatcaggagcgttctcttggatgacatcaaatccgcgttcaaaaagaatccgtctttgaaaaatctgttgtttgacgataaattcagtaatatacttattgattgtcaacagtcgtggcgttcagttgccgccaccgccgcgttgtcgggaatcgccgttccggccctttcaagcgccctcagtttttacgacgcgtataggcgcaagcggtcaaccgcaaacctcattcaggcgcagagagactacttcggcgcgcatacgtacgagcgcgtcgacaggccgcgtggggagttttttcacacggattggacggggacgggcggcgacgttccttccggatcatattcggtgtga

SEQ ID NO: 17794 - protein, 174 aa, Unknown
  Obtained from environmental sample
  DOMAIN (1)...(161): 6-phosphogluconate dehydrogenase, C-terminal domain
  misc_feature (1)..(174): Xaa is any amino acid
MNKARVRITPEDVRXAXXASKIISYAQGFMLMATASKEYGWDLDLGNIALLWRGGCIIRSVLLDDIKSAFKKNPSLKNLLFDDKFSNILIDCQQSWRSVAATAALSGIAVPALSSALSFYDAYRRKRSTANLIQAQRDYFGAHTYERVDRPRGEFFHTDWTGTGGDVPSGSYSV

SEQ ID NO: 17795 - DNA, 312 bp, Unknown
  Obtained from environmental sample
  misc_feature (1)..(312): n is a, c, g, or t
atgaatctgctcacgaaagaagcctttatcgcggaaagcattaagatagccgaatcaatcctcgaatcgttaaaaacgacaatgggtgccgctataccttcccgcggtctcaaggaagaggactggtttgtcgtgcggcgcagccgtatgcccgcggtactggtagaactgggttttgtcagcaacaaggatgatgccctgctaatgaccactgatgcgcacttgcgcaaaatggtggaagcgttgtataaaggaatcgttgaatttgtaggcgattttgagcgctcaggagggtttatcgccggacgatga

SEQ ID NO: 17796 - protein, 103 aa, Unknown
  Obtained from environmental sample
  misc_feature (1)..(103): Xaa is any amino acid
MNLLTKEAFIAESIKIAESILESLKTTMGAAIPSRGLKEEDWFVVRRSRMPAVLVELGFVSNKDDALLMTTDAHLRKMVEALYKGIVEFVGDFERSGGFIAGR

SEQ ID NO: 17797 - DNA, 882 bp, Unknown
  Obtained from environmental sample
  misc_feature (1)..(882): n is a, c, g, or t
gtgccgtcctccgcgcttgcaaaactgcttttcaaaataatgtactccaagcaggatgcctacgaagcgcagctccgcaagcttggcttgactaacgacgacggcttcacctgcacctgttacatgaacgaagcgggaaacatccccaaaaaaggggacattctttcatgggccgaatcgagcgcagtggtttttgccaactccgttttgggcgccaggtgcaaccgcaattccgggataatagaattgttcggcagcgtcgcgggaaaggttccgtacttcggccttttaaccgatgagggccggaaggcgacttgggttatcgaggttaagacaaacaaaaaaccggaagcccagcttcttggcagcgccatcggtatgaaagttatggaagaagttccttttatacgcggccttgaccactggctcggaaccaatctggacaggaataccgaagaaggccgggcctcggcggattacctcaaggactttggcgctgcaactgccagtaacggtgcggtggggctttaccatgttgaaaaccttacccccgaggcgaaagatgccggtgataaactgattgcgaaaggagcgaaggtttacacgatagatgatgcggagctggaaaaagtgcggcagagttatccatgcatctggaaggacgcttccgcggagccggtagtcgcatttatcggctgcccgcatctttcccacgaccagcttgtccattggacgggccgcgtcctcggcctattggcggctaagggcaggaagaaactcgcagtacccaccgtgtttacagccgcccccaaggtgaaaagggaatttcgaataacaagcgaagctgtaagcggtcaggccggcgccgcatatcctttttag

SEQ ID NO: 17798 - protein, 293 aa, Unknown
  Obtained from environmental sample
  DOMAIN (2)...(288): Protein of unknown function (DUF521)
  misc_feature (1)..(293): Xaa is any amino acid
MPSSALAKLLFKIMYSKQDAYEAQLRKLGLTNDDGFTCTCYMNEAGNIPKKGDILSWAESSAVVFANSVLGARCNRNSGIIELFGSVAGKVPYFGLLTDEGRKATWVIEVKTNKKPEAQLLGSAIGMKVMEEVPFIRGLDHWLGTNLDRNTEEGRASADYLKDFGAATASNGAVGLYHVENLTPEAKDAGDKLIAKGAKVYTIDDAELEKVRQSYPCIWKDASAEPVVAFIGCPHLSHDQLVHWTGRVLGLLAAKGRKKLAVPTVFTAAPKVKREFRITSEAVSGQAGAAYPF

SEQ ID NO: 17799 - DNA, 750 bp, Unknown
  Obtained from environmental sample
  misc_feature (1)..(750): n is a, c, g, or t
atgcgggaggcaagcgcaaaagacgcgtttaccctgtcattcgtcaatgttgtcggcagcactatcgcaaaagattccgactactgtctgtttacgcgagcggaccctgagattgccgtggcgacaacaaaagccttttcagcgcagcttgtactgctgtatgttctggcaatctggtttgccgccagattgggaaaaataccgcctgaaacggaacgcgaactgttagctgaaattgatgccctgcccggaaaagcggagcgcctgcttaaacagatcgatgctgttcaaatgtacgcttctacctgcgtcggctgcaagagcattttcttcatcggaagaaatatcgattacgccatcgcgctggaaggctcgctcaaactcaaggaaatttcctatattcactcggaagcctacgccggcggtgaattgaaacacggcactatttctctggttgagcaggatacgctggtggttgctatttccaactgcgcccccttatacggcaaaattatgagcaacgcggagcaggtaataagccggggcgcgaaagtcctgcttatcggcaactgcccaaacgcgaaacaggacgataaactttttcatatcgctttgccggaaagccttgatttgttttctccttccctgtcggttattgttttacagcttttcagctattatgttgccgcgaacaagggtttggatatagacaaaccgaggaatttggcaaaaagcgttaccgttgaatag

SEQ ID NO: 17800 - protein, 249 aa, Unknown
  Obtained from environmental sample
  DOMAIN (100)...(235): SIS domain
  misc_feature (1)..(249): Xaa is any amino acid
MREASAKDAFTLSFVNVVGSTIAKDSDYCLFTRADPEIAVATTKAFSAQLVLLYVLAIWFAARLGKIPPETERELLAEIDALPGKAERLLKQIDAVQMYASTCVGCKSIFFIGRNIDYAIALEGSLKLKEISYIHSEAYAGGELKHGTISLVEQDTLVVAISNCAPLYGKIMSNAEQVISRGAKVLLIGNCPNAKQDDKLFHIALPESLDLFSPSLSVIVLQLFSYYVAANKGLDIDKPRNLAKSVTVE

SEQ ID NO: 17801 - DNA, 840 bp, Unknown
  Obtained from environmental sample
  misc_feature (1)..(840): n is a, c, g, or t
atgacacttgcttccgaaatagcccggcggagaacatttgcgatcatttcgcaccccgacgcgggcaagaccactctgaccgaaaaactgctgctatatggcggagccattgacagggcgggttcggtcaagggcagggagcgcggggcgatggcgcagtccgactggatgagcatagagcaagagcgcggcatcagcgtcacgtccgccgccatgcagtttgagtacaagggttttgccatcaacctgctcgacacgccagggcatcaggatttcagcgaggatacatacagggccatcactgcggcggacagcgcagtgatgttgctggactgcgccaagggggtggaagagcagaccaagaagctcttccgcgtggcatcggacagggggcttcccatctttacgttcatcaacaagctggatcgccctgggcgcgagccaatcgaattgattgacgaagtggaagagctgttcggcctttcggcggttcccatgacctggcccatcggcagcgggcccgatttcaagggcgtctatatcagggcgactgggcagatacaggtttttgaaaagaccaaggcagggcagatggcaaggcttttggggcagggggggctggacgatcccgaagtcatggggctgctcaccgccgaagagttgtcgcggctaaagggcgacattgatcttatggatacagttctgccaccttttaacagcaacgaatttctgggcggtcggcagtcgcccatgttttttggctcggccataaacaactttggcgtttcggagttttggatgaattttgggcctggccccatgcccagcccccgcccatga

SEQ ID NO: 17802 - protein, 279 aa, Unknown
  Obtained from environmental sample
  DOMAIN (11)...(142): GTPase of unknown function
  misc_feature (1)..(279): Xaa is any amino acid
MTLASEIARRRTFAIISHPDAGKTTLTEKLLLYGGAIDRAGSVKGRERGAMAQSDWMSIEQERGISVTSAAMQFEYKGFAINLLDTPGHQDFSEDTYRAITAADSAVMLLDCAKGVEEQTKKLFRVASDRGLPIFTFINKLDRPGREPIELIDEVEELFGLSAVPMTWPIGSGPDFKGVYIRATGQIQVFEKTKAGQMARLLGQGGLDDPEVMGLLTAEELSRLKGDIDLMDTVLPPFNSNEFLGGRQSPMFFGSAINNFGVSEFWMNFGPGPMPSPRP

SEQ ID NO: 17803 - DNA, 873 bp, Unknown
  Obtained from environmental sample
  misc_feature (1)..(873): n is a, c, g, or t
gtgtttcagggactcgaccataatcccaactatgaccaggcggccttctgggttcagaaagcggttttgaaagacgccggctatcccaaagtcgtcacagttgatcagttttttgatatgatagaggcctattacaagaagaacccaactattaacggccagcccgccattccctttacagtccttacccatgactggcgcgcgttcgaaatgtggaatccaccgaacttcctcgccggcaaccccaacgaggggaacggcattgttaacccgcggacctatgaatacaaaaccttctttacacaagatatttccaaacgctggttcaaaaaactcaacgatatgaacgccaagggtttagtcgacaggaccggctttaccgacaactatgaccagtattcggcgaagatttcttccggccgcgtattgggacagagcgttcagggttggcagtttatgtattcggcggatatggcgaaccgtgaccgcggccagaatatccgcaccatggccccccttcccatcgtatttgacgcgaatatcaaaccccgttaccgcaatataacgattcccaacctcctgcgcggcatggggatcagcgtaagcgccaaagacccgataaggattatccgcttcgtcaatgatctcctcgcggaagacgtacagcgcaccataaactggggtattgaaggccagcattggcagaaaaacgcccagggcgtaccgtaccgcaccgaacagcaaagggccaactggcagaatgacaactggcaggaacaaaatcgcctgaggctccttgatgatatttttctcgaaaattcagggttctttctccgacgggtatccttccgatctggggtactatttccctga

SEQ ID NO: 17804 - protein, 290 aa, Unknown
  Obtained from environmental sample
  misc_feature (1)..(290): Xaa is any amino acid
MFQGLDHNPNYDQAAFWVQKAVLKDAGYPKVVTVDQFFDMIEAYYKKNPTINGQPAIPFTVLTHDWRAFEMWNPPNFLAGNPNEGNGIVNPRTYEYKTFFTQDISKRWFKKLNDMNAKGLVDRTGFTDNYDQYSAKISSGRVLGQSVQGWQFMYSADMANRDRGQNIRTMAPLPIVFDANIKPRYRNITIPNLLRGMGISVSAKDPIRIIRFVNDLLAEDVQRTINWGIEGQHWQKNAQGVPYRTEQQRANWQNDNWQEQNRLRLLDDIFLENSGFFLRRVSFRSGVLFP

SEQ ID NO: 17805 - DNA, 465 bp, Unknown
  Obtained from environmental sample
  misc_feature (1)..(465): n is a, c, g, or t
ttggcgcaggtaacaagctccgttatccaccatggcgaggagcagcagcttgttttccagggagagaaagcccgcgtttctgcgccgtggagagtttcagccaacattggacagcccaacggttttcctgtctttggacaacaaaacgaagaattaatatcaaaactaaataatttttacgaatcgttgccaaaacttacacatacattacacgcgggacagattgaagatgtattgaccgcgcttgaaaccggaggcaagccgttgattgacggcgaagacggcaggcgaacactggaacttatctccgccatttacaaggccggcacggaacaacacgcagtggaactgccaatgcaaaaaggcgatcccttttacacggttaaaggcattatgggaaaagtgccgcatttctacgaaaagaccgtctctgtaaacgatcagggcggacaaattacattttag

SEQ ID NO: 17806 - protein, 154 aa, Unknown
  Obtained from environmental sample
  misc_feature (1)..(154): Xaa is any amino acid
MAQVTSSVIHHGEEQQLVFQGEKARVSAPWRVSANIGQPNGFPVFGQQNEELISKLNNFYESLPKLTHTLHAGQIEDVLTALETGGKPLIDGEDGRRTLELISAIYKAGTEQHAVELPMQKGDPFYTVKGIMGKVPHFYEKTVSVNDQGGQITF

SEQ ID NO: 17807 - DNA, 846 bp, Unknown
  Obtained from environmental sample
  misc_feature (1)..(846): n is a, c, g, or t
atggccgaggagcgcgttttgggaatgcagttaatgtcgggaggtttttcgtactggcccggcgaatcatatgtaaatgactggtgttcttcttatatcgggcatttccttcttgaagcgcggcgggcgggttatgaggtgcgtacaaccgcgattaaaaactggataaattaccaaaagaacgcatcggcgcaatggcaggtaagcagtaataggcataccgagcaagcgtatcgtctttacactctggctcttgcgggagaagccgaccttggatcgatgaaccgcctgcgaagccataaactgccgtttcaggcaagctggcgtcttgccgcggcgtattggctagcgggacaacgcgatacagcccgaaacatgataaaaggtttggctttgcctgaaaaagattaccgcgagctttccgcgacattcggctcgaacctcagagacaaggcgatgattcttgaaactttgcttttgttgaattctcctgaggaagcgggaagaaccaaaaagctctttgaagaaataacaagcacgctttctaaggacacatggctttccactcaagagacggcttatgcccttatcgccatagttccgtatatgtcgggtaactcaggaagcggtgcgctgactttggattattccgtagccggaaaaacgggaaacatctcttttaccgctcctgtcgcggaatgttcttttgaaaatgtaaccggaaccagcgccgctttgtcggtaactaaccgttcatcttctcctgtttatgtaagatacacggcaaaaggactgcctgttgaagggaaagaacccgcgctatccgaggtctttcgctaccgttga

SEQ ID NO: 17808 - protein, 281 aa, Unknown
  Obtained from environmental sample
  misc_feature (1)..(281): Xaa is any amino acid
MAEERVLGMQLMSGGFSYWPGESYVNDWCSSYIGHFLLEARRAGYEVRTTAIKNWINYQKNASAQWQVSSNRHTEQAYRLYTLALAGEADLGSMNRLRSHKLPFQASWRLAAAYWLAGQRDTARNMIKGLALPEKDYRELSATFGSNLRDKAMILETLLLLNSPEEAGRTKKLFEEITSTLSKDTWLSTQETAYALIAIVPYMSGNSGSGALTLDYSVAGKTGNISFTAPVAECSFENVTGTSAALSVTNRSSSPVYVRYTAKGLPVEGKEPALSEVFRYR

SEQ ID NO: 17809 - DNA, 570 bp, Unknown
  Obtained from environmental sample
  misc_feature (1)..(570): n is a, c, g, or t
atggatgaaagcagttttattttcggcgtagaccttgacggagtggttggggatttttacggcgcgatgcgaaagatcgccgcagcctggctgaacaaacccgtggaggcccttacaaccgatgtcagctatggccttgaagaatggggccttgatgaattcggcggctatgacaggcttcaccgtttcgccgtaactcagcgtaaccttttccgcgacatggagcccattaaggacgcgcctgccgttctgcgaaaaatttcaaacaatgacattagaattcgcatcatcacacacaggctttttctaaaatattcccacaaagcgacaatcacccagactgtggagtggctggattcctgggacatcccctattgggatctttgttttatggccgacaagggcgctgtaggcgctcatgtatatattgatgactccccagccaacattgtgcgtctaagggatcagggctgtaacacaattattttttccaactctactaatctgaaactggaaggcccaagggcatacaactggcaagacgcggaacgccttgttaggaagccttga

SEQ ID NO: 17810 - protein, 189 aa, Unknown
  Obtained from environmental sample
  misc_feature (1)..(189): Xaa is any amino acid
MDESSFIFGVDLDGVVGDFYGAMRKIAAAWLNKPVEALTTDVSYGLEEWGLDEFGGYDRLHRFAVTQRNLFRDMEPIKDAPAVLRKISNNDIRIRIITHRLFLKYSHKATITQTVEWLDSWDIPYWDLCFMADKGAVGAHVYIDDSPANIVRLRDQGCNTIIFSNSTNLKLEGPRAYNWQDAERLVRKP

SEQ ID NO: 17811 - DNA, 954 bp, Unknown
  Obtained from environmental sample
  misc_feature (1)..(954): n is a, c, g, or t
atgatcagatggccgagattccggcggtctgtggtcgtctccggaggtgaggtgaagggagcgggcgcaatttccaatggcggcaacgccggaccgacagtcaccatttccggcggaacaatcttggcgacatcaggcactgcgattcgtaacgcttacaccggctcgttgactatctccgacggtacgatttctgcgacggactacgcgacgattgagaacgttaatactaccggcgcggtaactatcactggtggactgatacagaacaccgggaccagctacgcgattcgcaatgataataatagctccggaacgctgaccatctccggcggccaaatctcggcgccgacaggctatgctatttataacactgccgtcggggcgctaactatttctgatggaatagtatcgacgacgaccggctacgcgatttacaacgactatggcgatataactatttccggcgggagtgttgtagaggcgacgacaggcaacgcaattaggagcttgtccggtaaaatcaccctgtcgggaacggcggtagtaacatcggcaaacacaacgccaaatgatggtacgatttctttgttggggacgtcagtcactggagaacgtcttctaattatcagcggcacggtagaaaacacagccgtagacggcaacgcggtttacaacgcttccaccggccccatcgttctagacggcaatccgaccattaccggcataattaagtataacgccggaagtttgagcgtaaacagcgcaacctttaatcccgccccagcgcaaaattatacgcttgcgttaaatgtgtatgatgtgngcacgatggcggtagttggcggagcggccagaatgataacttcaaactcgataacaaccccaccgcacgcttgcggtaagcggcagcaatcttgtggtggcggcggcggtaccgtcggggccgtatga

SEQ ID NO: 17812 - protein, 317 aa, Unknown
  Obtained from environmental sample
  misc_feature (1)..(317): Xaa is any amino acid
MIRWPRFRRSVVVSGGEVKGAGAISNGGNAGPTVTISGGTILATSGTAIRNAYTGSLTISDGTISATDYATIENVNTTGAVTITGGLIQNTGTSYAIRNDNNSSGTLTISGGQISAPTGYAIYNTAVGALTISDGIVSTTTGYAIYNDYGDITISGGSVVEATTGNAIRSLSGKITLSGTAVVTSANTTPNDGTISLLGTSVTGERLLIISGTVENTAVDGNAVYNASTGPIVLDGNPTITGIIKYNAGSLSVNSATFNPAPAQNYTLALNVYDVXTMAVVGGAARMITSNSITTPPHACGKRQQSCGGGGGTVGAV

SEQ ID NO: 17813 - DNA, 552 bp, Unknown
  Obtained from environmental sample
  misc_feature (1)..(552): n is a, c, g, or t
atgcgagtggggactctccgcgacaggcgcaggacatcaagcgcatccagttcaacgaaatcaccgccagagccgtgcgcgaggcgctggaacatccccgcgaactcaacgggcatctttttgacgcccagcaagcccggcgtgtactcgaccggctggtgggctataaaatttcccccctgctctggaaaaccatcaagcgcggcatctccgccggacgtgtgcagtccgtggcgctgcgcatcatcgtggaacgggaggaagcgcgccgcgccttcacgccggaagaatactggctgttccgggccatgcttgccggcaagaccccgccggcgttcaaggcggagttgcacaaggtggaaggcaaaaaagcccgcatcccggacgccgccgccgccgaagccctggaaaacgccatccgcaagcagcccttcgtggttgccgaggtgcaggaaaaggaacgcaccaaaacgcccgcgccgcccttcatcacctcttcgctgcaacaggccgccaaccagcgactgggctacagcgccaagcgcaccatga

SEQ ID NO: 17814 - protein, 183 aa, Unknown
  Obtained from environmental sample
  misc_feature (1)..(183): Xaa is any amino acid
MRVGTLRDRRRTSSASSSTKSPPEPCARRWNIPANSTGIFLTPSKPGVYSTGWWAIKFPPCSGKPSSAASPPDVCSPWRCASSWNGRKRAAPSRRKNTGCSGPCLPARPRRRSRRSCTRWKAKKPASRTPPPPKPWKTPSASSPSWLPRCRKRNAPKRPRRPSSPLRCNRPPTSDWATAPSAP

SEQ ID NO: 17815 - DNA, 852 bp, Unknown
  Obtained from environmental sample
  misc_feature (1)..(852): n is a, c, g, or t
atggtcagaatcggccgagaccttatcggtcctaatcccgtagacggcatttggcttggagcggctaacgatgtaataatgcgtgagcgcggaatagagtttgtggacggaacagctcccggttttgccgctattaccggagccgcgcctgataacgccacggcggtaaaaatcgcgaaggaattacagcagaaaaatctttatgtgtttatgggcggctgtacaaacggagtgcaattcgccgaacagttagccgccgaaggcgtacagcttggctgggaaacccgccttgttccattcgggcgtgatgtttccgctttaatatacgcgcttggattcgctaaccgtgccgcgctttcctttggcggagtaaagccgggcgattatgaagccaacttaaaatataacaagaacagaatattcgcttttgtcattgcgttaggtgaagtgacaaatgacaagtacgcggcggcggctggggctattaattacggcttccccgttatttcagataccgatattcctgaaattctgccgacgggcgtatgcacttatgagcatgtggtttcaaaagtgccgcatgataaaatagtggaaaaagcccttgaagtgcgcggctgtaaaataaaaatagttaatgtgccgattccagtcgcttatggcccggcgtttgaaggtgagagaatccgcaaagaggatacccaagttgaatttggcggcaacaaaacccttgcttttgaatttgttacaagcgtggaatacgactcgattaacgacggtgagattaaaattatcggccctgacattgacgctgtggaacccggtggaaactgccactcggcatttgggtag

SEQ ID NO: 17816 - protein, 283 aa, Unknown
  Obtained from environmental sample
  misc_feature (1)..(283): Xaa is any amino acid
MVRIGRDLIGPNPVDGIWLGAANDVIMRERGIEFVDGTAPGFAAITGAAPDNATAVKIAKELQQKNLYVFMGGCTNGVQFAEQLAAEGVQLGWETRLVPFGRDVSALIYALGFANRAALSFGGVKPGDYEANLKYNKNRIFAFVIALGEVTNDKYAAAAGAINYGFPVISDTDIPEILPTGVCTYEHVVSKVPHDKIVEKALEVRGCKIKIVNVPIPVAYGPAFEGERIRKEDTQVEFGGNKTLAFEFVTSVEYDSINDGEIKIIGPDIDAVEPGGNCHSAFG

SEQ ID NO: 17817 - DNA, 969 bp, Unknown
  Obtained from environmental sample
  misc_feature (1)..(969): n is a, c, g, or t
ttgcaaggacagaagtcggcacnagaaccaccgntttacaatacgacacgtcttgctgcacgtcttagggaattggcctttttgaacaaaggcgttacgcttacgattaccgacgaacgcgaagttttggaaggtggcagtttccgttccgaaacgttttattcggaaaacggtttgaaagattttatcgattatttggatgccactcgcgaaaaactgatgccggtgcctgtacatatcgaaggcgaaaaaaatgatattccggttgaactggctttgcaatataacacatcgtttaacgaaaatgttcattcgtacgttaacaatatcaacacacacgaaggcggtacgcacttggccggtttccgcagaggattaacacgtacattgaaagcttacgccgagaaatcaggacttttggaaaaaattaaattcgaaattgcaggcgacgacttccgcgaaggcttgaccgccatcatttccgtaaaggtcgccgaaccgcaattcgaaggtcaaaccaaaaccaaacttggtaacaacgaggtgatgggttgcgttgaccaagccgtgagcgaaatgctgagcaactatctggaagaaaatccgaaagaagccaaactcatcgtgaataaagttattcttgcggctactgcacgtcacgctgcacgcaaagcacgcgaattggtgcaacgtaaaaccgtgatgggtggcgccggtttgcccggaaaactggccgattgctcggaaaaagaccctgaagtttgcgaagtttacctggttgagggcgattcggcaggcggaactgccaaacaaggtcgcgaccgcaaaacgcaagccatcatgccccttcgcggaaaaatcttcaacgtggaaaaagcgatgacgcacaaagttttcgaaaacgaagaaatcaaaatatctaccccgcattgggcgttacattggcacggagacgacagcaagccttga

SEQ ID NO: 17818 - protein, 322 aa, Unknown
  Obtained from environmental sample
  DOMAIN (58)...(228): DNA gyrase B
  misc_feature (1)..(322): Xaa is any amino acid
MQGQKSAXEPPXYNTTRLAARLRELAFLNKGVTLTITDEREVLEGGSFRSETFYSENGLKDFIDYLDATREKLMPVPVHIEGEKNDIPVELALQYNTSFNENVHSYVNNINTHEGGTHLAGFRRGLTRTLKAYAEKSGLLEKIKFEIAGDDFREGLTAIISVKVAEPQFEGQTKTKLGNNEVMGCVDQAVSEMLSNYLEENPKEAKLIVNKVILAATARHAARKARELVQRKTVMGGAGLPGKLADCSEKDPEVCEVYLVEGDSAGGTAKQGRDRKTQAIMPLRGKIFNVEKAMTHKVFENEEIKISTPHWALHWHGDDSKP

SEQ ID NO: 17819 - DNA, 522 bp, Unknown
  Obtained from environmental sample
  misc_feature (1)..(522): n is a, c, g, or t
atgcggggtagatattttgatttcttcgttttcgaaaactttgtgcgtcatcgctttttccacgttgaagatttttccgcgaaggggcatgatggcttgcgttttgcggtcgcgaccttgtttggcagttccgcctgccgaatcgccctcaaccaggtaaacttcgcaaacttcagggtctttttccgagcaatcggccagttttccgggcaaaccggcgccacccatcacggttttacgttgcaccaattcgcgtgctttgcgtgcagcgtgacgtgcagtagccgcaagaataactttattcacgatgagtttggcttctttcggattttcttccagatagttgctcagcatttcgctcacggcttggtcaacgcaacccatcacctcgttgttaccaagtttggttttggtttgaccttcgaattgcggttcggcgacctttacggaaatgatggcggtcaagccttcgcggaagtcgtcgcctgcaatttcgaatttaattttttccaaaagtcctga

SEQ ID NO: 17820 - protein, 173 aa, Unknown
  Obtained from environmental sample
  misc_feature (1)..(173): Xaa is any amino acid
MRGRYFDFFVFENFVRHRFFHVEDFSAKGHDGLRFAVATLFGSSACRIALNQVNFANFRVFFRAIGQFSGQTGATHHGFTLHQFACFACSVTCSSRKNNFIHDEFGFFRIFFQIVAQHFAHGLVNATHHLVVTKFGFGLTFELRFGDLYGNDGGQAFAEVVACNFEFNFFQKS

SEQ ID NO: 17821 - DNA, 357 bp, Unknown
  Obtained from environmental sample
  misc_feature (1)..(357): n is a, c, g, or t
ttgggtgatgggcggcttattggtttcagtatcgggcacggtttaatagattcttccaccggcacggaaaacgctttttttgtggatggccgtctccataaactcgatcaggtgacatttcatatccctccgtcaaactggcttgacccctggcgttttaccagtaacgaccaccgccttgaaatggacttccatcccatccaggagcgcaccgaccgccagcggctgctgttctattctgccagccgccgtcaggtttacggtaatttttcaggcaaaattgttctggacgacggcgcagtaatgaactttagccatctgaccggctttgccgaacggaacaaaacccggttttaa

SEQ ID NO: 17822 - protein, 118 aa, Unknown
  Obtained from environmental sample
  misc_feature (1)..(118): Xaa is any amino acid
MGDGRLIGFSIGHGLIDSSTGTENAFFVDGRLHKLDQVTFHIPPSNWLDPWRFTSNDHRLEMDFHPIQERTDRQRLLFYSASRRQVYGNFSGKIVLDDGAVMNFSHLTGFAERNKTRF

SEQ ID NO: 17823 - DNA, 864 bp, Unknown
  Obtained from environmental sample
  misc_feature (1)..(864): n is a, c, g, or t
ttgcactgggcgctggcgcattccgacgaaaaggaaacggacgctcaagcgtacctgggcggcaatattaccgtgtcgcccctcacgtttctggacaaattaaaggaaggcgatgacgtagtgctggaactgtccagttggcagttgggggacttaagaggccgtcgcaagactgatgacagggccgataaaaaccatgctgatagcatgttactcaagccaaaagctgccgtgctgacggcaattatgcccgatcatttagaccgctacggctcaatggaagcctatgtcgccgacaagcgggttatctatcaggggcaggattctaccgattttactgttgccggggatgacagttggggcaggagtttcctagccgaaagcgcggctgtccctttgatatactcccacacgccgttgccgaagggagtttcaggcggctggattgatgggtcggacggccccggttatgctcatttgaatgatgaaaaactggttgaattggttccgtcgcggccccttgttccgggccgccatcaaaagcagaaccttctcgccgccggccttgctctgcttggtttgggtctgcccgcggaaattatcaggaagggtctggaaacttttcccggcgttgaacaccggctggaattgtttcatcaggcggggggcataaggttttacaatgacagcgcggccaccattcccgaagcggcggcggcggcgctggaagccttgggcggcgacaaggatggcgggcggctgattctcgttaccggcggcaccgacaaaaaccttgatttttccccgctggtacaggccgccgggcgggcaaaggctctatctcctcggccgatctgtcaatga

SEQ ID NO: 17824 - protein, 287 aa, Unknown
  Obtained from environmental sample
  DOMAIN (211)...(286): Mur ligase family, glutamate ligase domain
  misc_feature (1)..(287): Xaa is any amino acid
MHWALAHSDEKETDAQAYLGGNITVSPLTFLDKLKEGDDVVLELSSWQLGDLRGRRKTDDRADKNHADSMLLKPKAAVLTAIMPDHLDRYGSMEAYVADKRVIYQGQDSTDFTVAGDDSWGRSFLAESAAVPLIYSHTPLPKGVSGGWIDGSDGPGYAHLNDEKLVELVPSRPLVPGRHQKQNLLAAGLALLGLGLPAEIIRKGLETFPGVEHRLELFHQAGGIRFYNDSAATIPEAAAAALEALGGDKDGGRLILVTGGTDKNLDFSPLVQAAGRAKALSPRPICQ

SEQ ID NO: 17825 - DNA, 342 bp, Unknown
  Obtained from environmental sample
  misc_feature (1)..(342): n is a, c, g, or t
ttggaagacgatctttccactccccgggctttggcggaactctggggcctcctgcgggacaatgagatagaacccagggcggcgctggaagccgcgctggtaatggattcggttttaggcttgaatctggaagaatccctcgaaacgcaagagatctcacccttagaagatccgaccggggttgcggagcttacccaggaaattgaggcgcttattgcccggcggaccgatgccaaaaaagccaaaaattttgccctggccgatgagattcgtaatcagttaaaggaacgtggaatagagctttccgattcccccacaggaacaacctggaagagggtttaa

SEQ ID NO: 17826 - protein, 113 aa, Unknown
  Obtained from environmental sample
  misc_feature (1)..(113): Xaa is any amino acid
MEDDLSTPRALAELWGLLRDNEIEPRAALEAALVMDSVLGLNLEESLETQEISPLEDPTGVAELTQEIEALIARRTDAKKAKNFALADEIRNQLKERGIELSDSPTGTTWKRV

SEQ ID NO: 17827 - DNA, 501 bp, Unknown
  Obtained from environmental sample
  misc_feature (1)..(501): n is a, c, g, or t
ttgttatttattatgaaaaatgaagcaatgatggcagggtcttcggaacaaagtccagtggaacaaagttccgtgggacagagtcccttgggacaaaaaggtcctgtggggggattttcgcttaaagaattccaaaggctctacgagacggtatttcccattctgtaccgggtggcataccgaattgtgagcagtgaagaagccgcggaagacctttgccaggaaacatttttccgtctctatgaaaaagagatggtatttcccaaccctgaagaagccaagtattggctcatccgggtggttaaaaacgcggctttgaattacgccaaacgcaaaatgagagaacgtaaggcgtatcaaagggtgtttcgggaagataccanggtcgaagagacaggggagaatctgcttttaaaaaagagacccgggatgagatcctggaagcgtttaagcagctngcggagaatttgcgtatcgtgttatactgaaggaatacgctga

SEQ ID NO: 17828 - protein, 166 aa, Unknown
  Obtained from environmental sample
  DOMAIN (47)...(115): Sigma-70 region 2
  misc_feature (1)..(166): Xaa is any amino acid
MLFIMKNEAMMAGSSEQSPVEQSSVGQSPLGQKGPVGGFSLKEFQRLYETVFPILYRVAYRIVSSEEAAEDLCQETFFRLYEKEMVFPNPEEAKYWLIRVVKNAALNYAKRKMRERKAYQRVFREDTXVEETGENLLLKKRPGMRSWKRLSSXRRICVSCYTEGIR

SEQ ID NO: 17829 - DNA, 417 bp, Unknown
  Obtained from environmental sample
  misc_feature (1)..(417): n is a, c, g, or t
ttgaagttttctgtatcttccttagtaatggataatatccgcaacttttgcataatcgcacatatcgatcacggaaagtcaacgctagccgacaggcttattcagaaaggccgccttgtggatgacagggatttccagaaccagattttggacaacatggacattgaaagggagcgcggcatcacgattaagagccaggcggtttgcattccctacaccgcgcttgacggtgttgaatacaagctcaacctggtcgacaccccaggccacgtggactttagttacgaagtttcaagggcgataaattcctgcgagggggcgctgcttcttgttgacgcgacacagggcgtccaggcacagactctttccaatatgtacctggctctggaacacaatctggagataattccggtataa

SEQ ID NO: 17830 - protein, 138 aa, Unknown
  Obtained from environmental sample
  DOMAIN (11)...(138): Elongation factor Tu GTP binding domain
  misc_feature (1)..(138): Xaa is any amino acid
MKFSVSSLVMDNIRNFCIIAHIDHGKSTLADRLIQKGRLVDDRDFQNQILDNMDIERERGITIKSQAVCIPYTALDGVEYKLNLVDTPGHVDFSYEVSRAINSCEGALLLVDATQGVQAQTLSNMYLALEHNLEIIPV

SEQ ID NO: 17831 - DNA, 456 bp, Unknown
  Obtained from environmental sample
  misc_feature (1)..(456): n is a, c, g, or t
gtgagcaagtatctatacggcacatcgccgtcattctggaaaccccttgccgactggggcagttttgggcctgtcccaagcgatctggttattgagcgtatacgccagtccctcagaaggcaaatatgcatggaatataccgacgacaggcaaaatttgcgggtacttaccctggaaccaaagctggaaaaaaagatttcagaccacgacagccctctttttgaagactgcacggaagcgattttaagcgcggtgcgtggaatgaaagaaaaggggttcccgcctgtagttctctgttcgcccaaagccagattttccgtgaaggaagcgaccagaaggcaattgccggagttggcggtgctttcttatctggaaataccctcggacataagcgtggagccggttggcgaaatacgtcttgaagaaagaggggaattgggtatagtcgtaaaataa

SEQ ID NO: 17832 - protein, 151 aa, Unknown
  Obtained from environmental sample
  misc_feature (1)..(151): Xaa is any amino acid
MSKYLYGTSPSFWKPLADWGSFGPVPSDLVIERIRQSLRRQICMEYTDDRQNLRVLTLEPKLEKKISDHDSPLFEDCTEAILSAVRGMKEKGFPPVVLCSPKARFSVKEATRRQLPELAVLSYLEIPSDISVEPVGEIRLEERGELGIVVK

SEQ ID NO: 17833 - DNA, 858 bp, Unknown
  Obtained from environmental sample
  misc_feature (1)..(858): n is a, c, g, or t
ttgcttgaaagcacgttaaggcaaggaaaggagatttccggatatgaggtgaaagactatttggggaaccaatctattttatttgtgagaaaattagaaacgaatggctggtatatggcaattatgactccaagagataagtattatgaaaatttagaaaacatgatgaaggttatggttgcgctaggtatattattggctgtggtgctgagtttaattctgctccgcattatatcggcaaagattaaagcagataaactcgttcaagctatattggatgtaactccgcttgcgttgaatctctgggacaaacatctaaaaaataccaaaaccaataaagaagctgtgaagttgtttgacttgtccaataaagaggaatatttaaatagattttatgaattttcacctgtgtatcaaccggatgggcggctttctagcgagaaggctccagagtatatgaataaagcgtttgaagaaggctattgccgttttgaatgggttcatcaaaaactgaacggcgagccgattccatgcgaagtcactttaattcgcataacttatgaagacgattttatggttgtggggtacatcagggatttacgtgagcaaaaagcgatgcttgccgagatacacaaggaaaacgagaactcacgtgcaatggcccattggtataattcaatcctcaattcaatcccgctgcccatatctgttaccaatgctgatgcgagatggactttcataaatacggcggttgagagaattcttggaataacgctcaaagacgccgtaggtcagccttgcagcaattggggttcggttgtctgcaataccccggactgcggcattgcctgcnngtaa

SEQ ID NO: 17834 - protein, 285 aa, Unknown
  Obtained from environmental sample
  misc_feature (1)..(285): Xaa is any amino acid
MLESTLRQGKEISGYEVKDYLGNQSILFVRKLETNGWYMAIMTPRDKYYENLENMMKVMVALGILLAVVLSLILLRIISAKIKADKLVQAILDVTPLALNLWDKHLKNTKTNKEAVKLFDLSNKEEYLNRFYEFSPVYQPDGRLSSEKAPEYMNKAFEEGYCRFEWVHQKLNGEPIPCEVTLIRITYEDDFMVVGYIRDLREQKAMLAEIHKENENSRAMAHWYNSILNSIPLPISVTNADARWTFINTAVERILGITLKDAVGQPCSNWGSVVCNTPDCGIACX

SEQ ID NO: 17835 - DNA, 726 bp, Unknown
  Obtained from environmental sample
  misc_feature (1)..(726): n is a, c, g, or t
gtgcgcccacatatttcccgcgcgaaagattattttctctctcccgacgatcccttactcgcaaatatagacagccggaaaaaattccgcggtatctacgcaagttatgaagagcggatggcgcagatcggcaatgtcgattttggggacttaataaaaaaacctgttgatattcttcgaagtcaaccggaagtagcgcggcgtttccgcgaccgatttaaggtaataatggtggacgagtatcaagacgcgaatgtcgcgcagttccgcctgctcaaagaattatgcgaaccgcagacctatgtgtgcgtagtcggcgatgacgaccagtccatctaccgttttcgcggcgcggaagtgaaaaatattcttgagttccccgacaaattttcgggcgcggatattatccgtcttgagcaaaattaccgttccacaaaccccatcttaaaagcggcgtcttgcgttgtaaactgcaaccgcggccgtttgggaaaaactttgcgggccgagaaaggagacggtcccctgcccgttttaacctatatgcctgatcaggatgaggaagcgatgtattgcgcggatataatcgaaaagtccgtaaaaaagaaggagaccgcatggtctgactgggcaattctctaccgcaccaacgctcagtctctcggatttgaaacttttgtttctgcccagggggaataccctacccgcgttgtccggctctcttaa

SEQ ID NO: 17836 - protein, 241 aa, Unknown
  Obtained from environmental sample
  DOMAIN (1)...(241): UvrD/REP helicase
  misc_feature (1)..(241): Xaa is any amino acid
MRPHISRAKDYFLSPDDPLLANIDSRKKFRGIYASYEERMAQIGNVDFGDLIKKPVDILRSQPEVARRFRDRFKVIMVDEYQDANVAQFRLLKELCEPQTYVCVVGDDDQSIYRFRGAEVKNILEFPDKFSGADIIRLEQNYRSTNPILKAASCVVNCNRGRLGKTLRAEKGDGPLPVLTYMPDQDEEAMYCADIIEKSVKKKETAWSDWAILYRTNAQSLGFETFVSAQGEYPTRVVRLS

SEQ ID NO: 17837 - DNA, 516 bp, Unknown
  Obtained from environmental sample
  misc_feature (1)..(516): n is a, c, g, or t
atggccgaggatctgagcgttgagctttgcggggaaggagcggtttttgagtacagaagcctttccatttttggcaaagaggaaaaaacggagcaaaaaatacgagttgcgcacaacgcgcagaacacaaagagttttttatttgcaaggcatatattgagcgataattcaaaggcggtttttaacgggattatagaagttggcaaacactcttcaaacataagttcaaggcagttggtgaacagtatgttgctttctccaaacgcaaaggtaatctcaaaaccggaactcaaaatttactgcgatgatgttgaatgttcgcacggcaacacctgcggcggtttagacgaagactccctattctttttgcaatcccgtggcatagattcagaacaggcaaaaaaaattttgctacacgccttcgcaacggatatatcaaaaaaacaccccaacgaggaacaagtttctatatttaccaatctatgcctaactatgtatgcaaaggaacaaaactaa

SEQ ID NO: 17838 - protein, 171 aa, Unknown
  Obtained from environmental sample
  DOMAIN (1)...(141): Uncharacterized protein family (UPF0051)
  misc_feature (1)..(171): Xaa is any amino acid
MAEDLSVELCGEGAVFEYRSLSIFGKEEKTEQKIRVAHNAQNTKSFLFARHILSDNSKAVFNGIIEVGKHSSNISSRQLVNSMLLSPNAKVISKPELKIYCDDVECSHGNTCGGLDEDSLFFLQSRGIDSEQAKKILLHAFATDISKKHPNEEQVSIFTNLCLTMYAKEQN

SEQ ID NO: 17839 - DNA, 477 bp, Unknown
  Obtained from environmental sample
  misc_feature (1)..(477): n is a, c, g, or t
atgttcgcacggcaacacctgcggcggtttagacgaagactccctattctttttgcaatcccgtggcatagattcagaacaggcaaaaaaaattttgctacacgccttcgcaacggatatatcaaaaaaacaccccaacgaggaacaagtttctatatttaccaatctatgcctaactatgtatgcaaaggaacaaaactaaaatgctccatgggttctgagcggtcggctttggatgttgctcatccgtcaaaccctgtgtatatgcacggggaactgatggcaagcataatggattacaaacccatgataaacataaaaccatttgggcaatgcaaatcgctgggagcgccttgcgttccaaatacagtggctccctggctctccggcaaaacagatgtcttggtaaaagggcaccctgccctgatggatgattgcaaatgcgtatgcgcatgggcaggtcaaattgaagtctaa

SEQ ID NO: 17840 - protein, 158 aa, Unknown
  Obtained from environmental sample
  misc_feature (1)..(158): Xaa is any amino acid
MFARQHLRRFRRRLPILFAIPWHRFRTGKKNFATRLRNGYIKKTPQRGTSFYIYQSMPNYVCKGTKLKCSMGSERSALDVAHPSNPVYMHGELMASIMDYKPMINIKPFGQCKSLGAPCVPNTVAPWLSGKTDVLVKGHPALMDDCKCVCAWAGQIEV

SEQ ID NO: 17841 - DNA, 429 bp, Unknown
  Obtained from environmental sample
  misc_feature (1)..(429): n is a, c, g, or t
gtgaataacagcaacgcgtggattttatttgcgctcttatcggcgtttttcgcagcattgacttctattttggtgaaaatcggtattcaaaatgtaaattcaaatttagcaacggcaattagaaccgttgttgttttggttatggcttgggctatagtttttatcactggaaaacataatgagattgcaaatattgagcataaaaatttagtctttttgattttatcgggaattgcaactggcttatcttggctgtgctattacagagccttgcaactaggcgaagcatcaaaagtgatacccattgataaattcagtttggtaattggaatggcaatggcgtttataatcttaaaagaagcgataacaataaaaacaattatcggcggcatacttatcacaatcggaacttttgttttgatactttag

SEQ ID NO: 17842 - protein, 142 aa, Unknown
  Obtained from environmental sample
  SIGNAL (1)...(21)
  DOMAIN (16)...(142): Integral membrane protein DUF6
  misc_feature (1)..(142): Xaa is any amino acid
MNNSNAWILFALLSAFFAALTSILVKIGIQNVNSNLATAIRTVVVLVMAWAIVFITGKHNEIANIEHKNLVFLILSGIATGLSWLCYYRALQLGEASKVIPIDKFSLVIGMAMAFIILKEAITIKTIIGGILITIGTFVLIL

SEQ ID NO: 17843 - DNA, 849 bp, Unknown
  Obtained from environmental sample
  misc_feature (1)..(849): n is a, c, g, or t
ttgcttttgatgcgaatggtttggcagcttttgatacatttgccacatattttaaactaccgaaaagtgtataaaaaaagaaaaaaacaaccagaaaatttttctgtgattttttattccgataatttagatgaggtgaacggcatagccaatagcctgcgctccgttgtgccttacctcaattcaaaaggcaaaaaagcgcatctttggggaagcgcattccacacgcgcacaaatggcgttgttgaagatggttttgtggttctttttccccgtgctgcaagcatggaacagcttggctatgcagattccgaactagcctttccttatcttgctcctgtgataaagttcttgaaacgctaccccgcagatttaatggaacttgaaaccccaagccctggggcgtggcttgttggcgcagcggctaaaataattggcatgaaagttttgagccactatcgcacagatgttccaagctacacacgctcacttgtaaaagaagcctggatgcggcgttacgtgcttggtctcatacggattttttatcaaaataccatgcctgtaattagtccttgcgaagcatatcgcaaaattttggaaacagaaataaaagtaaatccggaacacataaaggtattgccacggggaatacctcttgaaaatttttcgccgaacctgagaaagcaaaactcaactcgtattacattcttatatgttgggcgaatttctgcagaaaagaacattgtttttttggaagagttgtggaaagaattttgcaaggaaaataaaaatgcagaacttatttttgttggcggcggctggtatttggaaaccttgaagagaatatga

SEQ ID NO: 17844 - protein, 282 aa, Unknown
  Obtained from environmental sample
  misc_feature (1)..(282): Xaa is any amino acid
MLLMRMVWQLLIHLPHILNYRKVYKKRKKQPENFSVIFYSDNLDEVNGIANSLRSVVPYLNSKGKKAHLWGSAFHTRTNGVVEDGFVVLFPRAASMEQLGYADSELAFPYLAPVIKFLKRYPADLMELETPSPGAWLVGAAAKIIGMKVLSHYRTDVPSYTRSLVKEAWMRRYVLGLIRIFYQNTMPVISPCEAYRKILETEIKVNPEHIKVLPRGIPLENFSPNLRKQNSTRITFLYVGRISAEKNIVFLEELWKEFCKENKNAELIFVGGGWYLETLKRI

SEQ ID NO: 17845 - DNA, 861 bp, Unknown
  Obtained from environmental sample
  misc_feature (1)..(861): n is a, c, g, or t
atggccgagccaatttatcctcgcagtttctgcgactctaacggcgacggcattggagatataaacggcattatttttaaacttgactacataaaaaaactgggagccgatgtaatttggatttctcctgtttacaaaagccctatgttcgataacggctacgatatcagcgattacaccaccatcaatccagagttcggaacaatggcggattttgatcgccttttaaaagacgcgcacgatcttggtttaaagattgtaatggacttggtcgtcaaccacacttccactcagcacccgtggtttctcgaaagccgaagcggcaaagacaatcccaaacgcgattattacatttggcgggacggcagggacggcagaccgccaaatgactggcaggcatggttcggcggtccggcgtggacgttagacgaaacaacagggcaatatttccttcaccttttctcgccttatcaacccgacttgaactgggaaaatcccgctacgcgatccgccgtttacgacatgatgcgtttttggctggataagggtattgacggcttccgcatggacgcaatcagtcttatttccaaacccaaagaatttattgacggcgatataaaaaaacttattcccaatggtccgcgtgtgcatgaatttttgcaggagatgaggcgcgaggtattatcaaaatatgacattatgaccgtaggcgaaacaggcggagtaaccattgacgaagcgataaaatacgctaacgcggacggcacagagcttgacatggtgattcaatttgaacaaatagaattggacggcggagaaacatttaaatggaatgatcgtaaaattaatctggtcgaataa

SEQ ID NO: 17846 - protein, 286 aa, Unknown
  Obtained from environmental sample
  DOMAIN (4)...(286): Alpha amylase, catalytic domain
  misc_feature (1)..(286): Xaa is any amino acid
MAEPIYPRSFCDSNGDGIGDINGIIFKLDYIKKLGADVIWISPVYKSPMFDNGYDISDYTTINPEFGTMADFDRLLKDAHDLGLKIVMDLVVNHTSTQHPWFLESRSGKDNPKRDYYIWRDGRDGRPPNDWQAWFGGPAWTLDETTGQYFLHLFSPYQPDLNWENPATRSAVYDMMRFWLDKGIDGFRMDAISLISKPKEFIDGDIKKLIPNGPRVHEFLQEMRREVLSKYDIMTVGETGGVTIDEAIKYANADGTELDMVIQFEQIELDGGETFKWNDRKINLVE

SEQ ID NO: 17847 - DNA, 597 bp, Unknown
  Obtained from environmental sample
  misc_feature (1)..(597): n is a, c, g, or t
ttgcttgcccctccccgcttctctcggcaaggcgttctcgacgaggtggcggaggcggtagatgtattcgtcgtaccttcgctgctctttcctgttcgccttgggcggtatcacgggcaccatgcccgcctccttcgccatctcgactatcgcgtcggcgtcgtagcccctgtcagctataaggttctccgcctctatgcccccaacaagtccgccagcctttgtacagtcagcgacgttgccagccgtaacaatgactctgaccggcataccatgcgaatccacggccagatgtacctttgtgtcgggcccccttttgtacggccaatctcttggctgccccccttggcccctgtgccgtccctgtggactttgacgtgcgtcgcgtctatcatcagccacccgtggtccggctcctgcatcagaatctccggcagcctctcccactcgccggcgtcccgccagcggcagaagcggcggtgggtgttcttccagtcgccgtggccgggcggcaggtcgcgccaaggcgcccccgtcctcagcacccacaggacgccgtttatgaacctgcggttgtctttcgcgttgccgccctag

SEQ ID NO: 17848 - protein, 198 aa, Unknown
  Obtained from environmental sample
  misc_feature (1)..(198): Xaa is any amino acid
MLAPPRFSRQGVLDEVAEAVDVFVVPSLLFPVRLGRYHGHHARLLRHLDYRVGVVAPVSYKVLRLYAPNKSASLCTVSDVASRNNDSDRHTMRIHGQMYLCVGPPFVRPISWLPPLAPVPSLWTLTCVASIISHPWSGSCIRISGSLSHSPASRQRQKRRWVFFQSPWPGGRSRQGAPVLSTHRTPFMNLRLSFALPP

SEQ ID NO: 17849 - DNA, 351 bp, Unknown
  Obtained from environmental sample
  misc_feature (1)..(351): n is a, c, g, or t
gtgctgaggacgggggcgccttggcgcgacctgccgcccggccacggcgactggaagaacacccaccgccgcttctgccgctggcgggacgccggcgagtgggagaggctgccggagattctgatgcaggagccggaccacgggtggctgatgatagacgcgacgcacgtcaaagtccacagggacggcacaggggccaaggggggcagccaagagattggccgtacaaaagggggcccgacacaaaggtacatctggccgtggattcgcatggtatgccggtcagagtcattgttacggctggcaacgtcgctgactgtacaaaggctggcggacttgttgggggcatag

SEQ ID NO: 17850 - protein, 116 aa, Unknown
  Obtained from environmental sample
  misc_feature (1)..(116): Xaa is any amino acid
MLRTGAPWRDLPPGHGDWKNTHRRFCRWRDAGEWERLPEILMQEPDHGWLMIDATHVKVHRDGTGAKGGSQEIGRTKGGPTQRYIWPWIRMVCRSESLLRLATSLTVQRLADLLGA

SEQ ID NO: 17851 - DNA, 810 bp, Unknown
  Obtained from environmental sample
  misc_feature (1)..(810): n is a, c, g, or t
atggcgaaagggcttcgtgtgcccgaagtgcgcgggcggggagcacttcgacatcaggtcgcgccgcctgttccagtgcaagtcctgcggccaccaggcgtcggccacggccgggacgataatggacaagacgcggaccccgctggccaagtggttcatggcggtctacctgatggccgccgacaagcggggcgtgagcgcgctggccctggcgaagcacataggcgtcgcctaccacaccgcgtggacgatgtgccacaaaatccgccacgcgatgggcgcgagggacggcgaccgcaggctgggcggcacggtcgaaatggacgagaccttcttcggtgcgcccgaggaggggggcaagcgcgggcgcggcgcggagaagacgccggtgccggtcccggtgtcgctcacgggcggaggcaagccaaaggccgcaaggatgaaggtggtgggggccgtggggaggcgaaagagttcgccgaggccgcggtcagcgggggcagcgaggtgcgcacggacgggctgcacgtgtacaggcagctggcggggctcggcttcagacacgtctggaagaggcacgacccgaagaaggagccggcgcacctccgctggatgcacgtcataatctcgaacgcgaaggccatggtgggcgggacgttccacgggcttgacgcgaggcacctccagcggtatctggacgagttctgctaccgcttcaacaggcggctgtcaccggaaggcatcttcggcaggctgctggacgcctgcctctgtgccggcaggatcaccgcgcgtgagctaattggatag

SEQ ID NO: 17852 - protein, 269 aa, Unknown
  Obtained from environmental sample
  misc_feature (1)..(269): Xaa is any amino acid
MAKGLRVPEVRGRGALRHQVAPPVPVQVLRPPGVGHGRDDNGQDADPAGQVVHGGLPDGRRQAGRERAGPGEAHRRRLPHRVDDVPQNPPRDGREGRRPQAGRHGRNGRDLLRCARGGGQARARRGEDAGAGPGVAHGRRQAKGRKDEGGGGRGEAKEFAEAAVSGGSEVRTDGLHVYRQLAGLGFRHVWKRHDPKKEPAHLRWMHVIISNAKAMVGGTFHGLDARHLQRYLDEFCYRFNRRLSPEGIFGRLLDACLCAGRITARELIG

SEQ ID NO: 17853 - DNA, 609 bp, Unknown
  Obtained from environmental sample
  misc_feature (1)..(609): n is a, c, g, or t
gtgtgcccgaagtgcgcgggcggggagcacttcgacatcaggtcgcgccgcctgttccagtgcaagtcctgcggccaccaggcgtcggccacggccgggacgataatggacaagacgcggaccccgctggccaagtggttcatggcggtctacctgatggccgccgacaagcggggcgtgagcgcgctggccctggcgaagcacataggcgtcgcctaccacaccgcgtggacgatgtgccacaaaatccgccacgcgatgggcgcgagggacggcgaccgcaggctgggcggcacggtcgaaatggacgagaccttcttcggtgcgcccgaggaggggggcaagcgcgggcgcggcgcggagaagacgccggtgccggtcccggtgtcgctcacgggcggaggcaagccaaaggccgcaaggatgaaggtggtgggggccgtggggaggcgaaagagttcgccgaggccgcggtcagcgggggcagcgaggtgcgcacggacgggctgcacgtgtacaggcagctggcggggctcggcttcagacacgtctggaagaggcacgacccgaagaaggagccggcgcacctccgctggatgcacgtcataa

SEQ ID NO: 17854 - protein, 202 aa, Unknown
  Obtained from environmental sample
  misc_feature (1)..(202): Xaa is any amino acid
MCPKCAGGEHFDIRSRRLFQCKSCGHQASATAGTIMDKTRTPLAKWFMAVYLMAADKRGVSALALAKHIGVAYHTAWTMCHKIRHAMGARDGDRRLGGTVEMDETFFGAPEEGGKRGRGAEKTPVPVPVSLTGGGKPKAARMKVVGAVGRRKSSPRPRSAGAARCARTGCTCTGSWRGSASDTSGRGTTRRRSRRTSAGCTS

SEQ ID NO: 17855 - DNA, 714 bp, Unknown
  Obtained from environmental sample
  misc_feature (1)..(714): n is a, c, g, or t
gtgcctcccgacagtacggcgggaggcgaaagcatgccccagatatggtacattaaaaaccttcttaagaagagaggaaacaatgttcccacctatacattcaccatatttgacggcgcaggtgaagatcacgagcatagcttagatccttcatcagccgtatgccggtacatacaagcgtctaaagcaattatcattaccctggatcccctgatactggaaaccatcagaaaaggcaacattgtagacgaagatgttatgcgaaattctcttgcggggggtgtgagcgaacataaaaacgcggttgatgttatcaatagtcttgccaactatatcaagaccgcccgcggaatagatgtgaataaaatattgaaaattcctgttgcggttgttttgaccaaattcgatactataaaaaaatcttttggccaaaatgagcttattacaagaaccagcatgaatgtaagagacaacaggatcagcatggaagaaatcaagcaggttgacgacgaaatacgcggctggcttgaaaaaataggcgaaggggcgtttattaacgcgcttagctcgcatttcaaggagttttatttctttggggtatccagttacggagagccgcccgaaaacgcggtgaaactaagcgaacgtattaatcctcaccgggtacttgacccaatcttatggctttttaagaaagcgaaatttgttgactag

SEQ ID NO: 17856 - protein, 237 aa, Unknown
  Obtained from environmental sample
  misc_feature (1)..(237): Xaa is any amino acid
MPPDSTAGGESMPQIWYIKNLLKKRGNNVPTYTFTIFDGAGEDHEHSLDPSSAVCRYIQASKAIIITLDPLILETIRKGNIVDEDVMRNSLAGGVSEHKNAVDVINSLANYIKTARGIDVNKILKIPVAVVLTKFDTIKKSFGQNELITRTSMNVRDNRISMEEIKQVDDEIRGWLEKIGEGAFINALSSHFKEFYFFGVSSYGEPPENAVKLSERINPHRVLDPILWLFKKAKFVD

SEQ ID NO: 17857 - DNA, 921 bp, Unknown
  Obtained from environmental sample
  misc_feature (1)..(921): n is a, c, g, or t
atggccgagaaatgtccgagcattcgtcctaacccaataaggagacccgggagacccatgggcacgataaacataacgaaggattggcagcgcctgagtatccccgcgcacgtcagggacatactgagcaacaaccgcggactgctcttcccggcaaaccgcgccgaactttttgagcttgccttgggcggggtcggcaacaagtcctatgatgtttgctatgacgttccgggcaagggttccgtcgtcgaggccaccgtcgtcaagtgtaagaatgggctgtccgtcaactattccgagccttatatgcgccgccgcgaccccgactgcacggtggtgggcgactccaaaccctccgacaaggagcgcttcgccgagcgcttcggcggcgatttcgacaaggtgcgcaccgacaccttcaattggcttaaggggcaggagttgacgggcctcgccttcacgctgggcgagagcaaccacggggcgctgatgatcgcgccgcgcaacgccggtttctttgtcggcgggcttgccgatcttcaggggatgctcaacccccgcgaggtgccggagaactttcaggtggactgtataatgtacgtggcgccgcccttccgtcacacgcacttcggcggcaagcaggttgtggtgcacaaccgcctcgacgagatacacgagatattttcctataatctgtaccccgggcccagcgccaagaagggcgtctacggggcgctcctcaccattggcgagcaggagaagtggcttacgctacacgccgccacggtgcaagtcgtcaccccctacgacaacatcacgactatcatgcacgagggggccagcggcagcggcaagagcgagatgcttgagcttgtccaccgcgagtgggacgggcggttgctgttgggccgcaacaactag

SEQ ID NO: 17858 - protein, 306 aa, Unknown
  Obtained from environmental sample
  misc_feature (1)..(306): Xaa is any amino acid
MAEKCPSIRPNPIRRPGRPMGTINITKDWQRLSIPAHVRDILSNNRGLLFPANRAELFELALGGVGNKSYDVCYDVPGKGSVVEATVVKCKNGLSVNYSEPYMRRRDPDCTVVGDSKPSDKERFAERFGGDFDKVRTDTFNWLKGQELTGLAFTLGESNHGALMIAPRNAGFFVGGLADLQGMLNPREVPENFQVDCIMYVAPPFRHTHFGGKQVVVHNRLDEIHEIFSYNLYPGPSAKKGVYGALLTIGEQEKWLTLHAATVQVVTPYDNITTIMHEGASGSGKSEMLELVHREWDGRLLLGRNN

SEQ ID NO: 17859 - DNA, 327 bp, Unknown
  Obtained from environmental sample
  misc_feature (1)..(327): n is a, c, g, or t
atgcccatgttcgcgccgcgccgcgtgccgccctgcttgatctgctcggtggcggtgttgaagatgcgtaaaaaggataccggcccggaagccacgccgcccgtggaacccacgcgcgactccttgggccgcagccgcgaaaaggaaaagccggtgccgccgcccgacttgtggatcatcgccgcgtgcttcaccgcgtcgaaaatctcctcgatggaatcgccgaccggcaacacgaaacaggccgaaagctgccccaagtccgaacccgcgttcatcagcgtgggggaattcggcagaaacttccaggaggtcatgagcccataa

SEQ ID NO: 17860 - protein, 108 aa, Unknown
  Obtained from environmental sample
  misc_feature (1)..(108): Xaa is any amino acid
MPMFAPRRVPPCLICSVAVLKMRKKDTGPEATPPVEPTRDSLGRSREKEKPVPPPDLWIIAACFTASKISSMESPTGNTKQAESCPKSEPAFISVGEFGRNFQEVMSP

SEQ ID NO: 17861 - DNA, 756 bp, Unknown
  Obtained from environmental sample
  misc_feature (1)..(756): n is a, c, g, or t
atgtacagattcggccgagatccagaaggcgtggactatcttttaatttcagccgccgacgcgaacggttgggatagtgttcttaaatcggcgaaggacgcgggtgtaaaagtgttcctgtttgaccgtatgatcaatactgatcagagcaattatgaagccgccgttatttccgatatggtaaatcagggcaagaacgcagtcgcatggctgaagtcattgaaccttcctgagtacaatatcgtccacattcagggacagatcggatccgccgcccagattggccgcacaggaccccttgacgatgagatcaaagccaacagtaactggactttagtgcgccgcggcacaggcggagacacatggagccccgatgaggcgaagaaaattgttgaagccgccatcgccgcaagggaaaaatttaacatcatctatgctgaaaacgacggtatggcggaaggcgcgatgaaagcgcttcaggcggccggcattacccacggcgttagcggagatgtcaagatcatgggctttgactgcaacaagttcgcgctcaggtatgtccttaacggtgattggaactttgacggtcaatgcagtcccttccaggcggacgttattaatggatttatccagaaacttcaggccggtcaatctttgggcctttccaacaaaatcgtcataaatgaagagacatactttgccaatcccggcaaaatctctcaggcggacattgacaactacggtctcggcgactaa

SEQ ID NO: 17862 - protein, 251 aa, Unknown
  Obtained from environmental sample
  misc_feature (1)..(251): Xaa is any amino acid
MYRFGRDPEGVDYLLISAADANGWDSVLKSAKDAGVKVFLFDRMINTDQSNYEAAVISDMVNQGKNAVAWLKSLNLPEYNIVHIQGQIGSAAQIGRTGPLDDEIKANSNWTLVRRGTGGDTWSPDEAKKIVEAAIAAREKFNIIYAENDGMAEGAMKALQAAGITHGVSGDVKIMGFDCNKFALRYVLNGDWNFDGQCSPFQADVINGFIQKLQAGQSLGLSNKIVINEETYFANPGKISQADIDNYGLGD

SEQ ID NO: 17863 - DNA, 888 bp, Unknown
  Obtained from environmental sample
  misc_feature (1)..(888): n is a, c, g, or t
atggcaaatgaaacaagcgcaaaagaaaaattcacatctattatggaaaaatttatcaccctcgccgctatacgcntgagcgacgatgtaatgtcccgtctgcgtgaaatgcgtgagaatgaagacactcccttgcaaaaagaaatctatgacagttatctggaaaatttgaaaatggcgctggagttaaaacgcccctgctgtcaggatacgggtcttcttcaattttacataaaggcgggaaccgcttttccgcatttggacataaccgccgaagcgttagttgaagcgacacggcgggccacggcaagcgttccgttaagaccgaacgcagtaaattactttgacgaaaaaaacacgggcgacaacatagcggaacgctctccgtggattgactgggaaattattcccaattccaggaatatggaaattacgctttatttttcgggagcgggctgcagtcttcccggacaggctaaagttttcaagccttcggacggattggaagcgattatcccctttgtgtttgacgccgtttacgggcccggaataaacgcctgtcctcccctgcttgtcggaatcgggcttgggcacaatatcgaaaacgccgcatctctttcaaaaaaagcgtgcatcaggctattgggaacaaaacacccccacgctcaaggggcggaacttgaacgccgtataatggaaggacttaacagtcttggaatgggcgctcaggggcttcaaggcaaacaggcggtattgggagtgcatatcgagtcttcggcaagacatactgctacaagagcctgcgccgtaaacacttcgtgttatatgctgcgccgcgggattatccgtttaaggaagaccctcggccgtcgcaataaatccttttaa

SEQ ID NO: 17864 - protein, 295 aa, Unknown
  Obtained from environmental sample
  DOMAIN (11)...(284): Fumarate hydratase (Fumerase)
  misc_feature (1)..(295): Xaa is any amino acid
MANETSAKEKFTSIMEKFITLAAIRXSDDVMSRLREMRENEDTPLQKEIYDSYLENLKMALELKRPCCQDTGLLQFYIKAGTAFPHLDITAEALVEATRRATASVPLRPNAVNYFDEKNTGDNIAERSPWIDWEIIPNSRNMEITLYFSGAGCSLPGQAKVFKPSDGLEAIIPFVFDAVYGPGINACPPLLVGIGLGHNIENAASLSKKACIRLLGTKHPHAQGAELERRIMEGLNSLGMGAQGLQGKQAVLGVHIESSARHTATRACAVNTSCYMLRRGIIRLRKTLGRRNKSF

SEQ ID NO: 17865 - DNA, 441 bp, Unknown
  Obtained from environmental sample
  misc_feature (1)..(441): n is a, c, g, or t
atgactacgccgtcggaatacttggagctgcaccccgaaagccacacntgcgcccccgcgttctcaagctggggcgacggcgggtactcgcaagtctggctcaacgagacgaacgagtggatatacccgcacctgcacagaatggaagacaaaatggtagactgcgccagagagttccgcctcgtaggcttcgggctcgaacaaagggcgctgaaccaaatggcgagagaactgctcctagcgcaatcaagcgactgggcgttcatcatgaaaacggggacgacggtagagtacgcgacacgcagggtgaaagaacacatagcgagctttttgaagctgtacgaccaagtgaaaggacgcagtattgacgaggcgttcgtggctcttttggagtcgcataataatatcttcccgtggattgattttagggtctactgctga

SEQ ID NO: 17866 - protein, 146 aa, Unknown
  Obtained from environmental sample
  misc_feature (1)..(146): Xaa is any amino acid
MTTPSEYLELHPESHTCAPAFSSWGDGGYSQVWLNETNEWIYPHLHRMEDKMVDCAREFRLVGFGLEQRALNQMARELLLAQSSDWAFIMKTGTTVEYATRRVKEHIASFLKLYDQVKGRSIDEAFVALLESHNNIFPWIDFRVYC

SEQ ID NO: 17867 - DNA, 675 bp, Unknown
  Obtained from environmental sample
  misc_feature (1)..(675): n is a, c, g, or t
gtggtggaggattctaaaaagtcagtgcgcgacatagcccaaaaatgggtagcctatcactttgacgacacgtctgacctgtcgccagcaaagcggattgccgatttggacgacaatcgctggcttaggcacgacgccgccaatctttccgcctttctctattggatgcaggaaaaagaaccgatctcctttcggatgcttgaagaacacgtcaggctggtagcgccattctttgatcgctttgtccttgcgccccatcatctgaacgaaaacaagatcaagctggagtggcggcaaaagggctcaaacacctattttaacgcatactccctttccagcggcacgctgcgcttcatctgcctagccgcgctgctgctgcagcccgagccaccgcccctgatattgctggacgaacccgaactgggcctgcacccttttgccatttacgcattggcaggaatgttggaggccgcggcaacgcgcagccaagtgatagcaacaacgcagtcggtcacgctgctcaaccactttgggccaaatgacgtgatagtggccgaacacgacggatcaaagacaaccttcaataggctagacagcgaanaactcaaaggctggctggaagagtacagccttggagagctttgggaaaagaacgtccttgggggcaggccatga

SEQ ID NO: 17868 - protein, 224 aa, Unknown
  Obtained from environmental sample
  misc_feature (1)..(224): Xaa is any amino acid
MVEDSKKSVRDIAQKWVAYHFDDTSDLSPAKRIADLDDNRWLRHDAANLSAFLYWMQEKEPISFRMLEEHVRLVAPFFDRFVLAPHHLNENKIKLEWRQKGSNTYFNAYSLSSGTLRFICLAALLLQPEPPPLILLDEPELGLHPFAIYALAGMLEAAATRSQVIATTQSVTLLNHFGPNDVIVAEHDGSKTTFNRLDSEXLKGWLEEYSLGELWEKNVLGGRP

SEQ ID NO: 17869 - DNA, 582 bp, Unknown
  Obtained from environmental sample
  misc_feature (1)..(582): n is a, c, g, or t
atggtgaaggtaaacggaaaaaatgtcaggatatccaaacccatcgatgccatgaagaacaaaataggttatctgccggaagaccgaaagaacgacggcattatagccgatttgtcggtgcgggacaatattattctcgcattgcaggttatgaaaggctttttcaggccgttctccaaatctgaagcaaaagcttttgccgatgaatatatcaggatgctggggatcaaaaccccttctgtaaatacccctatgaaatccctttcgggcgggaaccagcaaaaggtcattcttgcccggtggcttttaacccacccggaataccttatattggacgaacccacgcgcggcatagatgtgggcacaaaggtggagatacaaaagcttgtgctgaaactggcggaagagggcatgagcattacttttatctcgtcggagatcgaagaaatggtgcggacttgttcgcggctcatcgtcatgcgggacaggaacattgtgggcgaactccgcggcggcgaagttacgcaggataacattatgcacacgattgcagggggaacgggcgaaaatgaagctcaatga

SEQ ID NO: 17870 - protein, 193 aa, Unknown
  Obtained from environmental sample
  DOMAIN (6)...(163): ABC transporter
  misc_feature (1)..(193): Xaa is any amino acid
MVKVNGKNVRISKPIDAMKNKIGYLPEDRKNDGIIADLSVRDNIILALQVMKGFFRPFSKSEAKAFADEYIRMLGIKTPSVNTPMKSLSGGNQQKVILARWLLTHPEYLILDEPTRGIDVGTKVEIQKLVLKLAEEGMSITFISSEIEEMVRTCSRLIVMRDRNIVGELRGGEVTQDNIMHTIAGGTGENEAQ

SEQ ID NO: 17871 - DNA, 594 bp, Unknown
  Obtained from environmental sample
  misc_feature (1)..(594): n is a, c, g, or t
atgagaaaagagggcgagaccgccgtcgcatggctcaagtcattgaaccttccccaatacaatatcatccacattcagggtcagatcggatccgacgcccagattggccgctcagggccccttcaagaggcgatcgatgctaacgctaactggagtttagtgcgccgcggtacgggcggcgacacatggagcggcgatgaggcgaagaaaattgtagaagccgccatcgctgcaagagaaagttttaacgtcatctatgccgaaaacgacggcatggccgaaggcgcgatgaaagcgcttcaggcagccggcattacccacggtgtcaatggagatgtaaaaataatgggctttgacaccaacaagtatgccctcaggtatgtccttaaaggggactggaacttttctggtcaatgcagccccttcaaggcggacgctattgaaggatttatcaagaaacttcaggccggccaatctttgggtctaactggcgacaagaaagttattgatgaagagacatactttgccaatccgaatccgggtggtaaagtaatcactcaagcggacgttgacaaatacggtctcggcgactag

SEQ ID NO: 17872 - protein, 197 aa, Unknown
  Obtained from environmental sample
  misc_feature (1)..(197): Xaa is any amino acid
MRKEGETAVAWLKSLNLPQYNIIHIQGQIGSDAQIGRSGPLQEAIDANANWSLVRRGTGGDTWSGDEAKKIVEAAIAARESFNVIYAENDGMAEGAMKALQAAGITHGVNGDVKIMGFDTNKYALRYVLKGDWNFSGQCSPFKADAIEGFIKKLQAGQSLGLTGDKKVIDEETYFANPNPGGKVITQADVDKYGLGD

SEQ ID NO: 17873 - DNA, 846 bp, Unknown
  Obtained from environmental sample
  misc_feature (1)..(846): n is a, c, g, or t
ttggtagacgatattcataagctgggcggaacttttcttggaagcgcccgcggaggcggcagagaggtaagcaagatagtagattgcatggaacagctcaacattaatgtgctctttaccattggtggggacggaacacagcacggctctctggatattgcggaagaaattgaaaagcgcaagctcaagatagcgatggtaggaattcccaaaaccgttgacaacgatttcgccattatccaaaaatcttttggctttgatacggcggtggacaaagcggtagaagttgtggcggccgcgcacatggaagcaaaatccgccataaacggaattgggcttgtcaaagttatgggaagggaagccggtttcatcgcggctcatacagcccttgccagccatgaagttaattttgttcttatccgggaagtagcgttaaacctggaaggatacggcggtttcttgcaccacctggaacagcgcgttttatcgcgcggccacgcggtaattgtggttgccgagggggccatgcaggaaaggctccttaccgagaaaaaatttgacgccggcggaaatgtgaagtttgccgatgtgggtgtttatttaaaggacagaataacccagtattttgaagaaaaaaagattgaaatcaatttgaagtacatcgatcccagttatgttatacgttccgcgccggcaaatccgtcagactcaatttactgtgaaaggctgggaaacgcggcggcccacgcggcaatggctggcaagacaagcttatcgtcggccttgtacacaacgagtttgtgcatttgccggttagaatggntattgatcacgggcacaggttga

SEQ ID NO: 17874 - protein, 281 aa, Unknown
  Obtained from environmental sample
  DOMAIN (1)...(207): Phosphofructokinase
  misc_feature (1)..(281): Xaa is any amino acid
MVDDIHKLGGTFLGSARGGGREVSKIVDCMEQLNINVLFTIGGDGTQHGSLDIAEEIEKRKLKIAMVGIPKTVDNDFAIIQKSFGFDTAVDKAVEVVAAAHMEAKSAINGIGLVKVMGREAGFIAAHTALASHEVNFVLIREVALNLEGYGGFLHHLEQRVLSRGHAVIVVAEGAMQERLLTEKKFDAGGNVKFADVGVYLKDRITQYFEEKKIEINLKYIDPSYVIRSAPANPSDSIYCERLGNAAAHAAMAGKTSLSSALYTTSLCICRLEWXLITGTG

SEQ ID NO: 17875 - DNA, 792 bp, Unknown
  Obtained from environmental sample
  misc_feature (1)..(792): n is a, c, g, or t
ttgttaaacgaaagaagcgaagcgaaagtaatggtgaacgaatgtgcgggctttatcgacctttacatatcgccgctgttaaatcgcaccggtcttcttgacatttttgagctaatgccttacaaggacggctttcttttgctctttcccgccatcggcagcgggagaaaacttgagccttttgaagacagcccgaagatcttttcagtatacaacgagtataaaaaatggggccgcatagtcggcgtccaatcggtaggaagattaaaccgtctggtgtcggatcagataatcagggaatatatccgcatcgccgaagcctttcaggaaaaaaagctcgatgagattgccacgaggatttaccattgcaaagattcggtcaaggcgatcctcatagcggggccttcaagctcaggaaaaaccaccaccgccaaaagactatcgatcgcccttaaggttatgggaattgaacccatagccattagccttgacgattactacgtcgggactgaaaacacccccaaagacgagaagggagaacctgactacgaatgtcttgaggctttggacgttccttatctgaaccggcagctcctcgcgctccttgcgggagaagaagtaacgcttcccgtatttgattttaaaatcggcaaacgcagggaaaccgggggccgtaaaatccaccttgacaacagaaccatgcttgtaattgaaggcatacacggacttaacgacgcccttaccccgcagataaaaagggaaacgaaattcaagctctacgttccgctctga

SEQ ID NO: 17876 - protein, 263 aa, Unknown
  Obtained from environmental sample
  misc_feature (1)..(263): Xaa is any amino acid
MLNERSEAKVMVNECAGFIDLYISPLLNRTGLLDIFELMPYKDGFLLLFPAIGSGRKLEPFEDSPKIFSVYNEYKKWGRIVGVQSVGRLNRLVSDQIIREYIRIAEAFQEKKLDEIATRIYHCKDSVKAILIAGPSSSGKTTTAKRLSIALKVMGIEPIAISLDDYYVGTENTPKDEKGEPDYECLEALDVPYLNRQLLALLAGEEVTLPVFDFKIGKRRETGGRKIHLDNRTMLVIEGIHGLNDALTPQIKRETKFKLYVPL

SEQ ID NO: 17877 - DNA, 555 bp, Unknown
  Obtained from environmental sample
  misc_feature (1)..(555): n is a, c, g, or t
atgcgcattaccacggcatccaatatttacgcactccaggtaaagacgaaaggcgagctgaaattcatccgccaagccagcgccctgcacccggaatacgggcggctcctttccttcccccagcgatgcctcgacatcaggaagggaggggcaataaagccttccaggcttgccatattcnccgggtacgtttttttggagctgggcgcgggcgaggacgcgaaaagctgcttttgggctttcaggaaaatcgacggcttttaccgcttccttagatccaacagggacatagccccgctccaaaacagggatcttgaattggtattgcatttcataaggctggggcccgtggcggaaaagtcgaaagtttatttcaacgaccagtccaggatcgtcgtcctttgcggcccccttgccgggctcgaaggcaggatcgttaaagtcgacaggagaaagaaaagggccaaggtcgttttggacctttacgacgattctttctgcatcgatttggctttcgaggttatcgagaaatcaaaccatggaggagctatatga

SEQ ID NO: 17878 - protein, 184 aa, Unknown
  Obtained from environmental sample
  misc_feature (1)..(184): Xaa is any amino acid
MRITTASNIYALQVKTKGELKFIRQASALHPEYGRLLSFPQRCLDIRKGGAIKPSRLAIFXGYVFLELGAGEDAKSCFWAFRKIDGFYRFLRSNRDIAPLQNRDLELVLHFIRLGPVAEKSKVYFNDQSRIVVLCGPLAGLEGRIVKVDRRKKRAKVVLDLYDDSFCIDLAFEVIEKSNHGGAI

SEQ ID NO: 17879 - DNA, 789 bp, Unknown
  Obtained from environmental sample
  misc_feature (1)..(789): n is a, c, g, or t
ttgggctccgcccgatgggcggcaaggaaagacttgaaaaaagccggcctcctccaaagggacggcggcatgattatcgggcagctcggcagcgcgaaagtatccgccgcatacgaccttgaaaagaaaagcgtcattcttcatttgaaagagccggctcagaaaataatacagtcaggcatttacaacacaaacgtggcggcgcccacaaggagcggcaagggcgtttccattgtcatccctacctgcgtgtcgtaccccggcagccttatagtccttgacttcaaaggggagaatttcaagtacacttcgggcttcagaaaaaaaatgggcaaggtctaccgctgggagccgaccggcgccggggggcaccactttaacttcatggaagaaataaggagcggcgaggacgcgttcggcgacgccaaccttatcgccgacatcctcacgaccccggcttccggcagcgggaacgcgacaagcgaccacttccaaagcggggcaaaggatttccttacggctttgattctgcattgccttacttccccggactggaaaaacaagagcctcccaggctgcagggaattcctcgcacagggcgacccggtcgatcccggcaacgccgaatacatttacgaccttatgacaggcggggagcacggcgaccctttaatccaccaggcggtagtcgaaggggccaccgcgcagcgcaaccggccttccgacgaaaggggatccatgcttttcacctgttcacacgcgctgaacgtgttcgcaaactcaaaataa

SEQ ID NO: 17880 - protein, 262 aa, Unknown
  Obtained from environmental sample
  misc_feature (1)..(262): Xaa is any amino acid
MGSARWAARKDLKKAGLLQRDGGMIIGQLGSAKVSAAYDLEKKSVILHLKEPAQKIIQSGIYNTNVAAPTRSGKGVSIVIPTCVSYPGSLIVLDFKGENFKYTSGFRKKMGKVYRWEPTGAGGHHFNFMEEIRSGEDAFGDANLIADILTTPASGSGNATSDHFQSGAKDFLTALILHCLTSPDWKNKSLPGCREFLAQGDPVDPGNAEYIYDLMTGGEHGDPLIHQAVVEGATAQRNRPSDERGSMLFTCSHALNVFANSK

SEQ ID NO: 17881 - DNA, 669 bp, Unknown
  Obtained from environmental sample
  misc_feature (1)..(669): n is a, c, g, or t
gtgccgctggaatttggcgtgattggcgtctgtgacggcatcgccatgggacacgagggcatgaaatattctctggcgtcacgtgaattgattgcggattcggtcgagacaatgggcaaggcgcattgtctggacgcgctgatactgctgcccaattgtgacaaaatcgtgcccggcatgattatgggcgcctgccgtctcaatctgccgacaatagtagtgtccggcgggccaatgttagccggtaaacaccaaggccggacgctggatttgaattccgtttttgaagcagtcggacaattcgccaaaggcctgattaacgcaaaagaatttcacgctatcgaatgcaacgcctgcccgggcgcgggttcgtgcgccggcatgtttaccgccaattcaatgaactgcctctgcgaggttctcggcatcgcgctgccgggtaacggcaccataccggctgttgaccctaaacgcgccgaactggcgcggcaagccggaaagcaaattgtggaactggtgaaaaaagatctgaaaatccgggacattttaaagaaagaggcttttgataacgcgctggcggtggatatggcgctcggttgttcgactaactccgcgctgcacttaccggctatcgcttacgaagccggtgtagaattactctgcagctaa

SEQ ID NO: 17882 - protein, 222 aa, Unknown
  Obtained from environmental sample
  DOMAIN (1)...(222): Dehydratase family
  misc_feature (1)..(222): Xaa is any amino acid
MPLEFGVIGVCDGIAMGHEGMKYSLASRELIADSVETMGKAHCLDALILLPNCDKIVPGMIMGACRLNLPTIVVSGGPMLAGKHQGRTLDLNSVFEAVGQFAKGLINAKEFHAIECNACPGAGSCAGMFTANSMNCLCEVLGIALPGNGTIPAVDPKRAELARQAGKQIVELVKKDLKIRDILKKEAFDNALAVDMALGCSTNSALHLPAIAYEAGVELLCS

SEQ ID NO: 17883 - DNA, 402 bp, Unknown
  Obtained from environmental sample
  misc_feature (1)..(402): n is a, c, g, or t
atggcaaagacatacaactgcaaagtgtccgcagtctatgtcgtagatacggcgacaattaaacagcttacattgagcaagatttttttaccggaagaaggagccgaatacgaaaaaagccttgaggcaaacggcggccgttatctgacatttgtggaagagcttgcctcggcaaagggcgtaaagatcgaaaaggtaatgcgaaagggcgcgatttatacggaaatactggcaacggcggacgaaaaaaaagccgatctaatcctgcttggcggatgggaaaaagatacaaaaaccaaagatataatcggccattcccacagggaaataatggcgaacgctaaatgttcggtgcttcttgtaaaagagccggaaattgatcaaatatacaaacatttgtag

SEQ ID NO: 17884 - protein, 133 aa, Unknown
  Obtained from environmental sample
  misc_feature (1)..(133): Xaa is any amino acid
MAKTYNCKVSAVYVVDTATIKQLTLSKIFLPEEGAEYEKSLEANGGRYLTFVEELASAKGVKIEKVMRKGAIYTEILATADEKKADLILLGGWEKDTKTKDIIGHSHREIMANAKCSVLLVKEPEIDQIYKHL

SEQ ID NO: 17885 - DNA, 744 bp, Unknown
  Obtained from environmental sample
  misc_feature (1)..(744): n is a, c, g, or t
atgataagaatcaaaaacgaaaaacaaattgacggcatcagaaaatcctgcaagatgctttccgctatgtaccgcgagcttattccgcaggtaaagccgggagtccaaaccatcgacatagacaagtgggtaaccgactggataaaaaaagcggggggaaggcctgtctttctgggctacacgataaagaagaaaccctatcccgcttctatctgtatctcgattaacgaagaagtaatccacggtattccctcaaaaaggcgtatccgcgaaggagatttggtttctctggactgcgggatcgaacttggcggttatatcagcgatcaggcgataagcattgaggccggaaaagtaagcaaatcggtgcatgaccttaatgtagttactctggaatgtttatatcgcggtatcgaggcggtaagagccggagacaggcttttacaggtatcgcgcgccgtggaaagccacgcgaaaaagatgaagtacggtattgtgcaggagtactgcggacacggaacggggcttgaactgcacgaagacccgcaagtgccgaattacccccacggaccgaatcccagaatgaacaatggaatggttttcgccattgaaccgatgatcaacatggggggatcggatattgagcttcttgacgatgagtggacggtcgtaaccgccgacgggcaggtatcggcgcattgggaacacacggtcgccgttttaacggccgcacggaaattctga

SEQ ID NO: 17886 - protein, 247 aa, Unknown
  Obtained from environmental sample
  DOMAIN (11)...(243): metallopeptidase family M24
  misc_feature (1)..(247): Xaa is any amino acid
MIRIKNEKQIDGIRKSCKMLSAMYRELIPQVKPGVQTIDIDKWVTDWIKKAGGRPVFLGYTIKKKPYPASICISINEEVIHGIPSKRRIREGDLVSLDCGIELGGYISDQAISIEAGKVSKSVHDLNVVTLECLYRGIEAVRAGDRLLQVSRAVESHAKKMKYGIVQEYCGHGTGLELHEDPQVPNYPHGPNPRMNNGMVFAIEPMINMGGSDIELLDDEWTVVTADGQVSAHWEHTVAVLTAARKF

SEQ ID NO: 17887 - DNA, 435 bp, Unknown
  Obtained from environmental sample
  misc_feature (1)..(435): n is a, c, g, or t
atgatggccgaggggacttcccgcaacttattgatggttttctgcgacgcttacgacgaagaaaaggttgccgacaaaggcaacgaggacgattggagaaccgtcctgcgcttccaccccgatcttgcgccggttaccgtcgccattcttccgctgatgaaaaaagacgggcttgctgaacttgcgcaggacattcgcgcggaactgaaagaagattacgctaccgattatgatcaggcgggagcgattggcaggcgctaccgcagacaagatgaagcggggactcccttttgcgttactgtggattaccaatccaaagaagacggcactgtcaccctgcgcttccgcgattcaatggagcaggttcgcgtaccaaaagcggaacttgccacgcgtatacggcaggagattaaggcgtataagaggattaaatag

SEQ ID NO: 17888 - protein, 144 aa, Unknown
  Obtained from environmental sample
  DOMAIN (46)...(136): Anticodon binding domain
  misc_feature (1)..(144): Xaa is any amino acid
MMAEGTSRNLLMVFCDAYDEEKVADKGNEDDWRTVLRFHPDLAPVTVAILPLMKKDGLAELAQDIRAELKEDYATDYDQAGAIGRRYRRQDEAGTPFCVTVDYQSKEDGTVTLRFRDSMEQVRVPKAELATRIRQEIKAYKRIK

SEQ ID NO: 17889 - DNA, 384 bp, Unknown
  Obtained from environmental sample
  misc_feature (1)..(384): n is a, c, g, or t
ttggaacgtgcctgcgaagagatcaacaaaacctacgcaacgccgggaaaaatcgccggggcatggatatcggtaaacagggcagtggtaacccgttcaagcgcggtaattccgattatcccgctgtatatttcatgcctgtttaaggtgatgaaagaaatgggcattcacgagggctgcattgagcagattgtacggctctaccgcgacaggctttacgccgcggaaagcggagacccgganatggtgccggttgatcgcaagggccggatccgcatcgacgactgggaaatgcgggaagatgtccnanaggcggtcatgaaaaaaatgaaaaccgtaacccaggaaaatgtgcaatccgaaaccgatgtctcangcttttag

SEQ ID NO: 17890 - protein, 127 aa, Unknown
  Obtained from environmental sample
  DOMAIN (3)...(124): Short-chain alcohol dehydrogenase
  misc_feature (1)..(127): Xaa is any amino acid
MERACEEINKTYATPGKIAGAWISVNRAVVTRSSAVIPIIPLYISCLFKVMKEMGIHEGCIEQIVRLYRDRLYAAESGDPXMVPVDRKGRIRIDDWEMREDVXXAVMKKMKTVTQENVQSETDVSXF

SEQ ID NO: 17891 - DNA, 486 bp, Unknown
  Obtained from environmental sample
  misc_feature (1)..(486): n is a, c, g, or t
ttgagttttaagcttgatccgcaaatgcttattcccgtaataagtaaaaataaccttgcggatcagaatgatttggacgcatatttacagtctgtcgcgcaaaatatcgaagttcttctgcttaggttgctttcttctcagggaacagacggcgcaagactggaacagttgatgtccggaactcctgatgcggatttggataaggaaataaaaacaaatttccctgaaatttgcgatttttccattgcaattaaatcggcaaagtaccctgattttgtcctttacaggcaacttcaacaaatttacgaagcttatcttataaaacagcgtgaatataccatatcttcctttggaaaaagagcggaaaataacatggaagcccagcttcgttatgaaaaattggaacgatacggggaattactgaccaaatatcccattttgcttgaatatttgccaatggaaaaagacgaatacactanacagtaa

SEQ ID NO: 17892 - protein, 161 aa, Unknown
  Obtained from environmental sample
  misc_feature (1)..(161): Xaa is any amino acid
MSFKLDPQMLIPVISKNNLADQNDLDAYLQSVAQNIEVLLLRLLSSQGTDGARLEQLMSGTPDADLDKEIKTNFPEICDFSIAIKSAKYPDFVLYRQLQQIYEAYLIKQREYTISSFGKRAENNMEAQLRYEKLERYGELLTKYPILLEYLPMEKDEYTXQ

SEQ ID NO: 17893 - DNA, 507 bp, Unknown
  Obtained from environmental sample
  misc_feature (1)..(507): n is a, c, g, or t
gtgcagcgggcaaaagatatacagacgctggaacagatgcgcgcggcaggtgagggtgaaattggttttctatccatgccgatacaggcgctgcccggctgcgcggaactgaaacccgcgaactttgccattggcagcgcaatttttgcccgcaaacccggcgacggctccgcccgcgaacaggccgcctcctgccagcgggtactgggcgcgtcggccaatttcgccctggaatacgccaccaaacgctaccgttcgaatcttatcaactggggaattcttcccttcctcatcagtgatgaaacagctttaagcctcggcagttatattttctttcccggtatcaaaaaagccgtgaaggaaaaagccgaaaccattaccggttatgtgctgaatgaacaacccgtaaaaatcgccgtgtctctgggcgaattaaccgatgccgagcgtcagattataatcgacggctgtttgattaatcactatgcgggagtaaaaagttgttga

SEQ ID NO: 17894 - protein, 168 aa, Unknown
  Obtained from environmental sample
  misc_feature (1)..(168): Xaa is any amino acid
MQRAKDIQTLEQMRAAGEGEIGFLSMPIQALPGCAELKPANFAIGSAIFARKPGDGSAREQAASCQRVLGASANFALEYATKRYRSNLINWGILPFLISDETALSLGSYIFFPGIKKAVKEKAETITGYVLNEQPVKIAVSLGELTDAERQIIIDGCLINHYAGVKSC

SEQ ID NO: 17895 - DNA, 624 bp, Unknown
  Obtained from environmental sample
  misc_feature (1)..(624): n is a, c, g, or t
ttggagcgcgtattcaaaatgaaagaaaaaatattttcgtatatcaataattccgctgatttggcggttgagcttgagacagagcttacaaaacgtcccgccatcgcgcctgaatcgggaggagacggcgagttggaaaaatgtcttttcctcgaaaactggcttcgcacacacggtataactcagcttgaacgttttgacgcgcccgatgacagggtaaaaagcaaaacacgcccgaacttaatcgcgacaattgacggcggcgataaagacaaaggaagactttggattttaagccaccttgacgttgttccgcccggagaagataaattgtggaacagcgatccgtggactgttattcgcaaagatgactctccgggaccaagagttatcgggcggggagtggaagataatcaacaggggcttgtgtcttctgttcttaccgcgctggctttcgcaagtcagggggtaaagccttcccgaacaataaaacttttgtttgcggctgacgaagaagtgggttccgctttcggcattgagtggcttgtaaacaatcaccgcgatttattcaaaaaagacgacatggtgcttgttcccgacggcggagatacaaagggcgaatga

SEQ ID NO: 17896 - protein, 207 aa, Unknown
  Obtained from environmental sample
  misc_feature (1)..(207): Xaa is any amino acid
MERVFKMKEKIFSYINNSADLAVELETELTKRPAIAPESGGDGELEKCLFLENWLRTHGITQLERFDAPDDRVKSKTRPNLIATIDGGDKDKGRLWILSHLDVVPPGEDKLWNSDPWTVIRKDDSPGPRVIGRGVEDNQQGLVSSVLTALAFASQGVKPSRTIKLLFAADEEVGSAFGIEWLVNNHRDLFKKDDMVLVPDGGDTKGE

SEQ ID NO: 17897 - DNA, 738 bp, Unknown
  Obtained from environmental sample
  misc_feature (1)..(738): n is a, c, g, or t
gtgttggacgacaaactcattgtcctaatcgaacaccaatcaacaatcaataaaaatatgccgctacgtatgctacactatatttgcgaaatatacaatcacctataccaaaagaaagatttatacaagaaagagaagatacttatccccaaacccgtatttatcgttctctacaacggtgaggaagaatttagggattatcaagaatatttgttatccgatttattcaaagacttcgacatatcaaaagaaccgctatacttggaattgaaagtacaagtacgcaatatcaacaaaggtcacagcgcagaaatagtagagcgcagcccgttgctccgcgattacgtggcgtttgtcgaagaggtacgcgaagttagcaaagaagaagggatgagccacgaattggcgatggaaaaagccatagaaaattgtataaagaaaggaatattaacaaaatttctgaacctacataaagaggaggttatgaaaatgcttgtcgcagaatgggattacgaactagaaaaggaagtcgtaagagaggaggctattcagataggcctagcgcaaggtatatcgcaaggcctatcgcaaggcctatcgcaaggtatatcgcnaggacgggccgaagaacggcataaaaacattaaggacttgtaccggataggtgtcagtattgagactattgctaaagcgtttaacatctcggaaaaggacgtcaaagagaatcttggcttgtag

SEQ ID NO: 17898 - protein, 245 aa, Unknown
  Obtained from environmental sample
  misc_feature (1)..(245): Xaa is any amino acid
MLDDKLIVLIEHQSTINKNMPLRMLHYICEIYNHLYQKKDLYKKEKILIPKPVFIVLYNGEEEFRDYQEYLLSDLFKDFDISKEPLYLELKVQVRNINKGHSAEIVERSPLLRDYVAFVEEVREVSKEEGMSHELAMEKAIENCIKKGILTKFLNLHKEEVMKMLVAEWDYELEKEVVREEAIQIGLAQGISQGLSQGLSQGISXGRAEERHKNIKDLYRIGVSIETIAKAFNISEKDVKENLGL

SEQ ID NO: 17899 - DNA, 513 bp, Unknown
  Obtained from environmental sample
  misc_feature (1)..(513): n is a, c, g, or t
atgcaagctggccgcggtcgacgacaccggaaagtttttggagaacgcgaccatctacccgcacgaaccgaggcgagacagggatggggcgaaggcgatcctgctggcgcttatacagcgccgcaagccgcgcctgatagcgattgggaacggcacggccggccgcgagagcgaagagttcgtgcgcgccgccctgaaagaggtccccgacgaggagcggccgctatgcgtaacggtcagcgaagccggcgcaagcgtctacagcgcctccgacgcggccataaaggagttccccggtctggacgtaacggtgagaggcgccgtttccatagcccgccgccttcaagacccgctgtcggaacttgtaaagatagaccccaaatccataggcgtaggccagtaccagcacgacgtgaaccagacgcgcctgaaagagtcgctggacgaggttgtggagagctgcgtaaaccgcgtgggcgtggacgtgaacttggcgtcggaagagctgcttaa

SEQ ID NO: 17900 - protein, 170 aa, Unknown
  Obtained from environmental sample
  misc_feature (1)..(170): Xaa is any amino acid
MQAGRGRRHRKVFGERDHLPARTEARQGWGEGDPAGAYTAPQAAPDSDWERHGRPRERRVRARRPERGPRRGAAAMRNGQRSRRKRLQRLRRGHKGVPRSGRNGERRRFHSPPPSRPAVGTCKDRPQIHRRRPVPARREPDAPERVAGRGCGELRKPRGRGRELGVGRAA

SEQ ID NO: 17901 - DNA, 366 bp, Unknown
  Obtained from environmental sample
  misc_feature (1)..(366): n is a, c, g, or t
atgaaaccaggaaaaaatatgagacnnaatatnataaaatttgtcacaatggatattataaaagatactttaccaatgagtgatataatatttgttagggattgttttgttcatttatcctttaaaaatattttgnaggctattgaaaacataaagaaatcaggttcaaaatatttattaacaacaacttttacagatagagttgaaaatattaatattgtaactggcaactggaggccattaaatttagaaattaaaccatttttattccctcagcctgaaaagataataatagaaaattgtacggaaggcagtggtgaaaataaggataaatcaatggggttatggaatattgaaaaattataa

SEQ ID NO: 17902 - protein, 121 aa, Unknown
  Obtained from environmental sample
  misc_feature (1)..(121): Xaa is any amino acid
MKPGKNMRXNXIKFVTMDIIKDTLPMSDIIFVRDCFVHLSFKNILXAIENIKKSGSKYLLTTTFTDRVENINIVTGNWRPLNLEIKPFLFPQPEKIIIENCTEGSGENKDKSMGLWNIEKL

SEQ ID NO: 17903 - DNA, 888 bp, Unknown
  Obtained from environmental sample
  misc_feature (1)..(888): n is a, c, g, or t
ttggggcatgaaacgcaatgccttgccgtttcaaactgcacctcggctctgcacatggcgcttttggttttgggacttaggtcaggcgatgaagtaatcaccccggcgctgacctttattgccgatcagaatgttacgcgcatggttggcgccgaaaatgtattggccgatattacctcaatggaagactggtcaatggacggcgatgacatagaggcgcgcatcagctcaaaaacaaaggcggtgatcatcgttcattacgcgggttatgcctgcgacatggagcgtatcgccgctttgtgcaaaaaacgtaatctgttccttattgaagactgcgcccatacgcccggggctgattacaagggacagccgctgggcacgttcggcgacatagcggctttcagtttttttggcaacaagaatatcgccgcgggcgaaggcggcatggttgtcacacgcaatcctgaattgttcgcgaaattaaaaagtttacgctcgcatggaatgtccgttcaatcatttgaccgctacaaaggcagggcatcctcttacgatgtagagtcgccggggtttaattaccggattcacgaaatcgcttccgccctgggcctggttcaactgcggaaacttgaagacgccaataataaacgaaaaaatctggtagagcattatttcaggcggctggatgatgttcaatcaattacaattccatacaggcatttctcccgcggaaaaccgaattaccatattatgcctgtcctgctttccgattcgattgacagaaacgcggttatcgaatccatgaaacaggacggcgttcaaaccagcatacattatccctctattcagcgtttaccgcaacaggctcggccaatctgtcaatggtaa

SEQ ID NO: 17904 - protein, 295 aa, Unknown
  Obtained from environmental sample
  DOMAIN (1)...(292): DegT/DnrJ/EryC1/StrS aminotransferase family
  misc_feature (1)..(295): Xaa is any amino acid
MGHETQCLAVSNCTSALHMALLVLGLRSGDEVITPALTFIADQNVTRMVGAENVLADITSMEDWSMDGDDIEARISSKTKAVIIVHYAGYACDMERIAALCKKRNLFLIEDCAHTPGADYKGQPLGTFGDIAAFSFFGNKNIAAGEGGMVVTRNPELFAKLKSLRSHGMSVQSFDRYKGRASSYDVESPGFNYRIHEIASALGLVQLRKLEDANNKRKNLVEHYFRRLDDVQSITIPYRHFSRGKPNYHIMPVLLSDSIDRNAVIESMKQDGVQTSIHYPSIQRLPQQARPICQW

SEQ ID NO: 17905 - DNA, 828 bp, Unknown
  Obtained from environmental sample
  misc_feature (1)..(828): n is a, c, g, or t
atggcttacctgacggtcaaaggcggggacgggaaggaagtgaatattcttgcctcaggcgatcttggaaggccgggcaaacccatcatccgcgatccggccaagccgcctgcgccggactacataatccttgaaagtacttacggcgacaggctgcatgagaataccgaaaacgccatggataaactggctagaattacaaagcaaattgtaaaaaacaaagggaagctgcttataccgtcttttgctatcgagaggactcaggagctggtatactatttccatatactcacagatgagggcataattcccgagattcccatttttgttgattcaccaatggcgactaacgcaacaactatttttcaagtacatcccgaatgttacggagaggatatcaaagaagctttcataaagcaccacaaaaatccttttgggtttaattcgcttcattttaccaccagcgttcttgagtccaaggctttaaacgaccgccctgggccgctcattataatttctgcggacggaatgtgcgaagcaggcagaattcaacaccacctgatccacaacatcgcaagccccaacactaccgtcctgatcgtgggattcatggccgaaaataccctgggacgccgtatcctcgaaagagctgacgaggtaaagattcacggtaattggctgaaacgccgcgccgccgttgagaagattaacgctttcagcgcccacgctgattatggcgaagcgataaactggcttaaatcaatagatacttcccgcctngaaaaattttcatggntcacggagaaccaaaaagcaggccgtttttaa

SEQ ID NO: 17906 - protein, 275 aa, Unknown
  Obtained from environmental sample
  misc_feature (1)..(275): Xaa is any amino acid
MAYLTVKGGDGKEVNILASGDLGRPGKPIIRDPAKPPAPDYIILESTYGDRLHENTENAMDKLARITKQIVKNKGKLLIPSFAIERTQELVYYFHILTDEGIIPEIPIFVDSPMATNATTIFQVHPECYGEDIKEAFIKHHKNPFGFNSLHFTTSVLESKALNDRPGPLIIISADGMCEAGRIQHHLIHNIASPNTTVLIVGFMAENTLGRRILERADEVKIHGNWLKRRAAVEKINAFSAHADYGEAINWLKSIDTSRLEKFSWXTENQKAGRF

SEQ ID NO: 17907 - DNA, 357 bp, Unknown
  Obtained from environmental sample
  misc_feature (1)..(357): n is a, c, g, or t
atggccggaagagtcatcgactacggcatcatggaaaaggcggatgacgtcagcgtcgtatggggaggattctcgtgggacgacttgggttcgtgggagtccatgagccgcatcctagaggccaatgacgccggaacgtcgataagcggggacgcggtgtacgagaacggttgcggcggctcgctcttgatcaacaaatcgtcaaacctcgcgttggccgctatcggactgaacaatgtggcgttaatagcggtggacgacgcggtattggcgatagaccgctcgcgcctgccggagttaaagaaatatctgaccgagatcaaaaacagcggaaaattttcggctgatttgttttaa

SEQ ID NO: 17908 - protein, 118 aa, Unknown
  Obtained from environmental sample
  misc_feature (1)..(118): Xaa is any amino acid
MAGRVIDYGIMEKADDVSVVWGGFSWDDLGSWESMSRILEANDAGTSISGDAVYENGCGGSLLINKSSNLALAAIGLNNVALIAVDDAVLAIDRSRLPELKKYLTEIKNSGKFSADLF

SEQ ID NO: 17909 - DNA, 510 bp, Unknown
  Obtained from environmental sample
  misc_feature (1)..(510): n is a, c, g, or t
ttgataatgaaaaacgccaacccttccataatgttcatagccggcgagccctccggagacgcccacgcctcggccgtcgtcgcggctataaaggaacgacgcccttccgccgaaatttggggtatcggcgggcctaagatgcagtccgtcggatttgattccgtgctgccgttcgccaagttcaaccgtatgggctacgtggaggtgctgtcgcacctgccgttttttcttaacgccaagaagaagctgctgaagatgatggccggggcgcggcgtcccgacctcttagtctgcgtagactactccggcttcaatatgccgatgatgagggaagcgcgtgagatgggcattccggtggtatggtatatcgcgcctatggtgtgngcttggaagcgcaagcgcgccgccgtgctgggctctttggcgtcgcacatcgccgtgatataccccttcgagacgcggtacttttcgacgtacgccgcgcctgtgacctttgtgggcaaccgctga

SEQ ID NO: 17910 - protein, 169 aa, Unknown
  Obtained from environmental sample
  DOMAIN (10)...(169): Lipid-A-disaccharide synthetase
  misc_feature (1)..(169): Xaa is any amino acid
MIMKNANPSIMFIAGEPSGDAHASAVVAAIKERRPSAEIWGIGGPKMQSVGFDSVLPFAKFNRMGYVEVLSHLPFFLNAKKKLLKMMAGARRPDLLVCVDYSGFNMPMMREAREMGIPVVWYIAPMVXAWKRKRAAVLGSLASHIAVIYPFETRYFSTYAAPVTFVGNR

SEQ ID NO: 17911 - DNA, 486 bp, Unknown
  Obtained from environmental sample
  misc_feature (1)..(486): n is a, c, g, or t
ttggaaagtttcagcggttttcaaggcatccactttcatgaagaatcaatcccgtttgcccaacagcannctaagnactcggaagagtttatgatatttcatcccgaatactatttgattttgccaaatatgtttgacgaaacgctacgcggcaagttcgacgaatgggtttacattctaaaaaactccaaagtccgcgacgacttcaccgccgcagggataaaagaagccgcagaaaaactaaacgagctgaccctgccgcccgacgagcttgcggcatatcataggtacatggaaaatatcagaagcataaacagccaagctattgcggcggaaataaacggcatatccaaaggcagaacagaaggcataaggacggtcgtcttgaatatgcaccaattaggctattgtattgcagatattgccaaagctgtcgcgctatcggaacaagaagtcaaaaacatcttggattctcaaacgaagtga

SEQ ID NO: 17912 - protein, 161 aa, Unknown
  Obtained from environmental sample
  misc_feature (1)..(161): Xaa is any amino acid
MESFSGFQGIHFHEESIPFAQQXXKXSEEFMIFHPEYYLILPNMFDETLRGKFDEWVYILKNSKVRDDFTAAGIKEAAEKLNELTLPPDELAAYHRYMENIRSINSQAIAAEINGISKGRTEGIRTVVLNMHQLGYCIADIAKAVALSEQEVKNILDSQTK

SEQ ID NO: 17913 - DNA, 720 bp, Unknown
  Obtained from environmental sample
  misc_feature (1)..(720): n is a, c, g, or t
gtgctgagggttgtgcaggctgttatagcggcaaacaaggcaaatatcaatctctcttttgcagaaagcgcagccatagaccttgcgggcagaaatgttcttgaagccgtgcagatgagcgttaatccaaaagttatcaccacgccaaaggtaagcgcggttgccttggacggaattcagttgcaggcggttacaagaataaccgtgagagcaagcattcgcaagctggttggcggtgcgggcgaagaaacggttattgcccgcgttggcgagggcattgttagctccataggcagcgcgaaaaatcacaaagaggttttggaaaacccaaatatgatttccaaaaaagtgctagccagcggcttggatgccggaacagcttttgaaattctctccatagatattgcagatgttgatgttggtcataacataggggcaattctggaaaccgaccgcgccgaggcagataaaaaaatcgcgcaggcaaaggcagaggaaaggcgtgctatggctgctgccgctgaacaggaaatgaaagcaaaggttgttgaaatgcaggcaaaagttgtggaagcagaggctcaaattccgcttgcaatggcagatgccttgaaaaacgggcgcatgggagttatggattattacaatttgcagaacataaaagcagatacccaaatgcgcacgcaaatttccggcgtttcagaaaaggacttgaaataa

SEQ ID NO: 17914 - protein, 239 aa, Unknown
  Obtained from environmental sample
  DOMAIN (1)...(234): Protein of unknown function (DUF1432)
  misc_feature (1)..(239): Xaa is any amino acid
MLRVVQAVIAANKANINLSFAESAAIDLAGRNVLEAVQMSVNPKVITTPKVSAVALDGIQLQAVTRITVRASIRKLVGGAGEETVIARVGEGIVSSIGSAKNHKEVLENPNMISKKVLASGLDAGTAFEILSIDIADVDVGHNIGAILETDRAEADKKIAQAKAEERRAMAAAAEQEMKAKVVEMQAKVVEAEAQIPLAMADALKNGRMGVMDYYNLQNIKADTQMRTQISGVSEKDLK

SEQ ID NO: 17915 - DNA, 777 bp, Unknown
  Obtained from environmental sample
  misc_feature (1)..(777): n is a, c, g, or t
ttggatatcgccctctcgcaacggacattaaaaaacacagcagcagccgatccttcgcacataattcaaataggcgattattacaaaaactcaggcaaactgacatcggcgctgtacgcgtacaaccaataccttgctctgcgccccgacgcgccgaatacggacgatattaaggcaataatcaccgaaataaaaaaaacccctatcggaacaaggctggaatacccgcctgacaaaatgatacagaaatatcccaaaggacaccttctttttgccgaaggcgaacccgggcataccatgtatatcattcaggacggctcggtaaaaataacaaaaattgttgacaataaagaaattatcctcgcggttcttggcaaaggcgatatttttggcgaaatggcgcttttggaagacaaaccccgcgccgctaccgccgaagtgtacgaagactgcaccttattggcggttaaccgtgaaaattttacaaacctcatacaggatcagtccgatatggtagtccgcatggcatccttaatgtctgaacgcatttggctgctctaccgccagcttgacaacacattcatagaaaatcccttaggccgcatttatgacgccctgcttatccagcttgaaaaaaaccgggttgacattaacagccgcgaatcgtatcaatgtaatttcggtatttgggaattgatggggatggcaggtatgcccgaatccgaaaataaataccttgaccgtaaaatcatcggtgacgganaactgaccatttag

SEQ ID NO: 17916 - protein, 258 aa, Unknown
  Obtained from environmental sample
  DOMAIN (81)...(170): Cyclic nucleotide-binding domain
  misc_feature (1)..(258): Xaa is any amino acid
MDIALSQRTLKNTAAADPSHIIQIGDYYKNSGKLTSALYAYNQYLALRPDAPNTDDIKAIITEIKKTPIGTRLEYPPDKMIQKYPKGHLLFAEGEPGHTMYIIQDGSVKITKIVDNKEIILAVLGKGDIFGEMALLEDKPRAATAEVYEDCTLLAVNRENFTNLIQDQSDMVVRMASLMSERIWLLYRQLDNTFIENPLGRIYDALLIQLEKNRVDINSRESYQCNFGIWELMGMAGMPESENKYLDRKIIGDGXLTI

SEQ ID NO: 17917 - DNA, 846 bp, Unknown
  Obtained from environmental sample
  misc_feature (1)..(846): n is a, c, g, or t
atgggcgtaaatacctcatatcttataaatacggacggcgatattgtcgcggacgctgacatagacagggtaaaaacacttgtgaatctgtcgaaacaggaaattataaaacagatatgcaacagccccgacaggagcaaacagatgttagtcgatattggaaacgcgcgccactaccttgcctatacccggctgaatacggcggggagcattgtaattaccacaatcgaatatgacaaggtatttgaaggcataaacgccactacgcggcgcaacctctatctgacagccgctgttttgtttctctcgataatgtgtatctggtttttcgcgaaaagcatttccatgccgttgaaagcgctggcagccgcggcgcgtaccatcgaaggcggcgtctttgacgtggaattacagcccgcgggacgcgatgaaatcggcgtgttgacatccagctttggaaagatgtgctccgcgctgaatattttcggcaagtttaccaaccgcgacatcgcggtccaggccatgcgcggacaaattaaaccgggcggcctgccgaaacacgcgactatctttttttcggacatcaggggctttaccgaaaagtcggaaaattttgtaaaggcgttcggggatgaggcttccgaccgtatcgttttttggctcaatgaatatttaacccgcatggtagaatgtgttgaaaaaaccaacgcgccattatntgataaattcatcggggacgcggtaatggcccattggggaacggccaccacgtcgggtagtccgcagagagacgccctcaactgcgttatggcggcgctgctgatgagggtctcgtgccgaatttga

SEQ ID NO: 17918 - protein, 281 aa, Unknown
  Obtained from environmental sample
  DOMAIN (92)...(161): HAMP domain
  misc_feature (1)..(281): Xaa is any amino acid
MGVNTSYLINTDGDIVADADIDRVKTLVNLSKQEIIKQICNSPDRSKQMLVDIGNARHYLAYTRLNTAGSIVITTIEYDKVFEGINATTRRNLYLTAAVLFLSIMCIWFFAKSISMPLKALAAAARTIEGGVFDVELQPAGRDEIGVLTSSFGKMCSALNIFGKFTNRDIAVQAMRGQIKPGGLPKHATIFFSDIRGFTEKSENFVKAFGDEASDRIVFWLNEYLTRMVECVEKTNAPLXDKFIGDAVMAHWGTATTSGSPQRDALNCVMAALLMRVSCRI

SEQ ID NO: 17919 - DNA, 771 bp, Unknown
  Obtained from environmental sample
  misc_feature (1)..(771): n is a, c, g, or t
atgggtatattaaacacacaaagggttgaggcattttacaatactttcaaaggcattgacattacctttaccaaagatatgatacaagtaacgggccttattaccgaacaggtgcatttaaaatgcggcagcgatttctggccctgcgttttcttttccacttccttccagggtgcgaagattgtcgccaatataaaatccgggcttattgacaagctccagagggccaataattcggtcagcttgcgctactgtttcaagaaccctgaagacggaaccccgctgacgttttttgtggcaggccgcgtgcttggcatagctccctacaaaaattccaatgacgtttccctgctgtccatacagtttacccagcgcccgcctgatgaccttatagaaattataggcagggtttttgacgcaaacgtgaattcatcaaaacgcaaggacgagaagatactcattacaaacgactcccagagaaaattgaaattgctttccaaagaaacggtggcttttatccaggatgtgcccagacgctgcatactgagggaactgtctttctacaacgccaaagtggtaatgctgggcgtcgcanaattcattgtagacaaggaaacagcgctgcgctttgattttgatgacccaagagaaagttttttggtcaaaggaaaatttgtncattctgagggagtacaggggaaacaggagatggtagccctggccatggattatgacgagccaaagatccaatggggttacagatacggataa

SEQ ID NO: 17920 - protein, 256 aa, Unknown
  Obtained from environmental sample
  misc_feature (1)..(256): Xaa is any amino acid
MGILNTQRVEAFYNTFKGIDITFTKDMIQVTGLITEQVHLKCGSDFWPCVFFSTSFQGAKIVANIKSGLIDKLQRANNSVSLRYCFKNPEDGTPLTFFVAGRVLGIAPYKNSNDVSLLSIQFTQRPPDDLIEIIGRVFDANVNSSKRKDEKILITNDSQRKLKLLSKETVAFIQDVPRRCILRELSFYNAKVVMLGVAXFIVDKETALRFDFDDPRESFLVKGKFVHSEGVQGKQEMVALAMDYDEPKIQWGYRYG

SEQ ID NO: 17921 - DNA, 681 bp, Unknown
  Obtained from environmental sample
  misc_feature (1)..(681): n is a, c, g, or t
atggatcagattcggccgagagctgcttcattagaatataaagaagaatgtgcgccttgcatacaagctactatgccgcctaatgttgtaacacaatacaatgttgacataggcattgatcaatacactgttgatattggatattctaccgaccgaattcaaatgaacgctcaatcatctgtaacactgagagcaaatggcgggggtaatggcgcaaatacagggttgtatttgttgcctttaacttattgcattgtcgggaacacaatagacagggcgcatacatcgggcgggaacggaaccggggtaagcgaagaaataagctatacacttaatacagtggatcgtcatgctgttttcaccagctatcaagaggggaaccttcgtggctttcgccactcggttgaggttcaagaaaccgtaggctctttatgtgcaaaggacagtaaaggcattggcaatcagtatattgatgaagataaatgcatctgtaaaaataaatatgatgtccgtagattaacacctctggaatgtgagcgattgcagggctttcccgatgggtggactgaatacggacatgacggaaagctaatctctgacaatcaaagatataaagcattgggaaacagcgtagctattccatgtgttgaatttgtgcttaaaaatcagcttccatgctga

SEQ ID NO: 17922 - protein, 226 aa, Unknown
  Obtained from environmental sample
  misc_feature (1)..(226): Xaa is any amino acid
MDQIRPRAASLEYKEECAPCIQATMPPNVVTQYNVDIGIDQYTVDIGYSTDRIQMNAQSSVTLRANGGGNGANTGLYLLPLTYCIVGNTIDRAHTSGGNGTGVSEEISYTLNTVDRHAVFTSYQEGNLRGFRHSVEVQETVGSLCAKDSKGIGNQYIDEDKCICKNKYDVRRLTPLECERLQGFPDGWTEYGHDGKLISDNQRYKALGNSVAIPCVEFVLKNQLPC

SEQ ID NO: 17923 - DNA, 465 bp, Unknown
  Obtained from environmental sample
  misc_feature (1)..(465): n is a, c, g, or t
atggatagcctccgacgctttcctccgtggctgaagcggaagctggcatacgaggggcgccacggcgaagtggccggcctgctcgcggattgcaacctgcacacagtctgcgccgaggcgaagtgccccaaccggggcgagtgtttcagcaagggcagcgccgcgtttctgatcctcggcccgatatgcactcgggattgcgccttctgcggggtggcctccggggcgccaagccccgttgatattaacgagggtaagcgtctcgccgaggcggccgctaaaatggggcttaaacacgcggtaataacgtcggtgacgagggacgacctgcccgacggcggggcggcggcgtttgcggacgcggtggcttgtatacgcggtaaggttcccgaagcgactatagaggtgttggttcctgatttcaaggatcgatcaattcgcttaaacctcggccgctgtccataa

SEQ ID NO: 17924 - protein, 154 aa, Unknown
  Obtained from environmental sample
  misc_feature (1)..(154): Xaa is any amino acid
MDSLRRFPPWLKRKLAYEGRHGEVAGLLADCNLHTVCAEAKCPNRGECFSKGSAAFLILGPICTRDCAFCGVASGAPSPVDINEGKRLAEAAAKMGLKHAVITSVTRDDLPDGGAAAFADAVACIRGKVPEATIEVLVPDFKDRSIRLNLGRCP

SEQ ID NO: 17925 - DNA, 396 bp, Unknown
  Obtained from environmental sample
  misc_feature (1)..(396): n is a, c, g, or t
atgcacatatctacggtgagccgcgtggtgaacaataagtacgtgcagacgtcgcacgggattttcgagctgaggtacttcttcacggagtcggtcggggcgcaacggggcgcaaaaaagcccgggcctacgcaggccactgcggagcgcggcggcaatgtttccggcgacaacgccggggacacggcgggcggcggggttgacgttaccgccgaacgtataaagaacaaaatccggcagctcatagacggcgaggacgcggcgtctccgctctccgaccagaagatcgccgacatattggggaaagagggcctatccgcggcgagacggacggtggcgaagtaccgggagcagatgcggattcccacgacgcgtatgcggcagaaatatggatag

SEQ ID NO: 17926 - protein, 131 aa, Unknown
  Obtained from environmental sample
  DOMAIN (1)...(129): Sigma-54, DNA binding domain
  misc_feature (1)..(131): Xaa is any amino acid
MHISTVSRVVNNKYVQTSHGIFELRYFFTESVGAQRGAKKPGPTQATAERGGNVSGDNAGDTAGGGVDVTAERIKNKIRQLIDGEDAASPLSDQKIADILGKEGLSAARRTVAKYREQMRIPTTRMRQKYG

SEQ ID NO: 17927 - DNA, 402 bp, Unknown
  Obtained from environmental sample
  misc_feature (1)..(402): n is a, c, g, or t
ttggccgagttcgacggatggggagagcttatttggactaatcccgcttatattcaggaagtaagaaaccgtgatatcaggctctacccactttatcctgtttcaactccgtttgtaaaatttggcggcttcctgcttacgcgcgatgcaacccatgatggcggagactttatcgtctacttcaaagacgtaagaattatctttgacaaagctgttcttgatacagagcgcgacatagatgatgaggcgttgtggaaaattattaaagatcgcgaagatgcccgcaagacatgggaaatgcagaaattcggcgaggcacaggttcttcgttatctggaaggaatgaaacaggcaacagaacttacttttaccccacagcaacagtctgttaatgataaatag

SEQ ID NO: 17928 - protein, 133 aa, Unknown
  Obtained from environmental sample
  DOMAIN (1)...(77): Flagellar filament outer layer protein FlaA
  misc_feature (1)..(133): Xaa is any amino acid
MAEFDGWGELIWTNPAYIQEVRNRDIRLYPLYPVSTPFVKFGGFLLTRDATHDGGDFIVYFKDVRIIFDKAVLDTERDIDDEALWKIIKDREDARKTWEMQKFGEAQVLRYLEGMKQATELTFTPQQQSVNDK

SEQ ID NO: 17929 - DNA, 342 bp, Unknown
  Obtained from environmental sample
  misc_feature (1)..(342): n is a, c, g, or t
atgttttatataaatatggaaaatggcgaaaaagcaaatattaatttttcccctccggctcaggaagccatgcggaaagaatatgaaaaatatgattatatacggcataatattgtcaatgaattaaaagaaatcatagagaacttacttaaagagcttcattccaatcctgttgtcagcgggcggataaaaaattttaccagttactacacaaaatacctgcgtttattaaaaaatgatgtaaaaaacccggtaattacagacctgttgggaattagaatcatctgcccctttatcgaggatttaagtgttacagaagaaataattaanaaaaaactttaa

SEQ ID NO: 17930 - protein, 113 aa, Unknown
  Obtained from environmental sample
  misc_feature (1)..(113): Xaa is any amino acid
MFYINMENGEKANINFSPPAQEAMRKEYEKYDYIRHNIVNELKEIIENLLKELHSNPVVSGRIKNFTSYYTKYLRLLKNDVKNPVITDLLGIRIICPFIEDLSVTEEIIXKKL

SEQ ID NO: 17931 - DNA, 531 bp, Unknown
  Obtained from environmental sample
  misc_feature (1)..(531): n is a, c, g, or t
gtgcccgaagcgcagcggttaatggcagaggcaggataccccggcggaaaagggtttcctgttgttgaatatctgtacaataccaatgatatacaccgcgctgtcggtgaagctttgcagaatatgtggcgtaccgcattgggagtaaacgttactctcggtaaccaggagtggaatgtttttcttgatacaaggaaaaaaggcaactattcaatagcgcgtgacggatggatcggcgattacaatgatccgataaattttctggatatgttccttacaggcggaggaaacaacaattcacagtacgccaacagggaatttgataacctaatcgctaaagcaaaaggaactgctgttcaggcggatcggatgggatatatgcaccaggcagaagacctgcttgtaggccgcgatatggcggtcgcgcccatttacttttataccaacctctacatgatcaatccgcgtgtaaaggcattttacacgccgcttggatattacttcttcacgaattcaaaattaggtaattaa

SEQ ID NO: 17932 - protein, 176 aa, Unknown
  Obtained from environmental sample
  misc_feature (1)..(176): Xaa is any amino acid
MPEAQRLMAEAGYPGGKGFPVVEYLYNTNDIHRAVGEALQNMWRTALGVNVTLGNQEWNVFLDTRKKGNYSIARDGWIGDYNDPINFLDMFLTGGGNNNSQYANREFDNLIAKAKGTAVQADRMGYMHQAEDLLVGRDMAVAPIYFYTNLYMINPRVKAFYTPLGYYFFTNSKLGN

SEQ ID NO: 17933 - DNA, 579 bp, Unknown
  Obtained from environmental sample
  misc_feature (1)..(579): n is a, c, g, or t
atgttcatgggtgtttcaagtttccttttaaaagagcttttgccgcatccaaatgaagaagtattgctcatgaacaacgcatttacaacatttttcatagccggattgtatatgctgttttgggatatgcttgtggatggaatcaaaaacaaaagtgccataagaattgctggctcgttactgctttgccttgttccttttttaacgtcaatccctgcttatttggcactcaacatggtcggggaagaaagcataagctttacaggcatggcgatcatcagggcgacaaatctaattcccaatatgctttttgtggaaggcggcgcaaccgctgttataatcggagttttgttttacatattcagaaaatggcgatgggcgcaaatcgcggttttagtagtattttcaaccatagccttcttcgataaataccaacactttcagtggatgatggtgtttgcggcaattccaatgctcctttacaacggcgaaaaagggcgtgggatgaaaaacttcttttatatattctatcccgcgcatctttacttgctttacataatcgctgctttaatgcactaa

SEQ ID NO: 17934 - protein, 192 aa, Unknown
  Obtained from environmental sample
  misc_feature (1)..(192): Xaa is any amino acid
MFMGVSSFLLKELLPHPNEEVLLMNNAFTTFFIAGLYMLFWDMLVDGIKNKSAIRIAGSLLLCLVPFLTSIPAYLALNMVGEESISFTGMAIIRATNLIPNMLFVEGGATAVIIGVLFYIFRKWRWAQIAVLVVFSTIAFFDKYQHFQWMMVFAAIPMLLYNGEKGRGMKNFFYIFYPAHLYLLYIIAALMH

SEQ ID NO: 17935 - DNA, 972 bp, Unknown
  Obtained from environmental sample
  misc_feature (1)..(972): n is a, c, g, or t
ttgatggccgagtcgcgcggatatttntgggtcttgcaccgcggagattatcaggtaaaggtaatgccggtaaacgaggcggaaaatgaatacgggacagaagcgactaagtcatcaatcgaagtattgccctatgaccgctcaggtttcgcattctcctcagcgtctccccacgggaacgctaacggcgcttacaatgccaacgggacgcttaaagcgggcgcacaggttttgtacctgactgcggctaacgccacaacaattgaactgcctgtcatggaaagcgccaaaacaacaaccgtaggtgttggtattggcaaaatacttgcccttcgtcagaagggatatgacacgactccgctggcagtccgtataatcggtacgattaccgcaacggatatgtcagggcaaatcaacagcaaaaacctgctggacgttaaaggtaacaaaagaggcaatgtcgcaaatattaccattgaaggcgttggcaatgacgctacttgttatgggtggggagtgcatatacgctcatattacaatgtagaagtccgcaatctgggctttatgatgttccccgatgacggcgtatcgcttgaagtggacaaccaaaacatctgggtgcataacatcgatttcttctatggtaaaaacggcggcggtgataaaaacaagggcgacggttcactggacagcaagacatccggttattcaactttttcttacaatcacttctgggattcgggcaaggctaacctgttgggtaacggcaccgaagatccggaaaagctgacctaccaccacaactggtatgaccactcggacagccgacatccccgcgtgcgttttcattccgtcccacgttacaacaactactatgacggcgttgcccagtacggcataggccgcaccgataatttcttcgatctttgccgaagggaaattattnnccgtatacaaaaaaacccatgctga

SEQ ID NO: 17936 - protein, 323 aa, Unknown
  Obtained from environmental sample
  DOMAIN (118)...(307): Pectate lyase
  misc_feature (1)..(323): Xaa is any amino acid
MMAESRGYXWVLHRGDYQVKVMPVNEAENEYGTEATKSSIEVLPYDRSGFAFSSASPHGNANGAYNANGTLKAGAQVLYLTAANATTIELPVMESAKTTTVGVGIGKILALRQKGYDTTPLAVRIIGTITATDMSGQINSKNLLDVKGNKRGNVANITIEGVGNDATCYGWGVHIRSYYNVEVRNLGFMMFPDDGVSLEVDNQNIWVHNIDFFYGKNGGGDKNKGDGSLDSKTSGYSTFSYNHFWDSGKANLLGNGTEDPEKLTYHHNWYDHSDSRHPRVRFHSVPRYNNYYDGVAQYGIGRTDNFFDLCRREIIXRIQKNPC

SEQ ID NO: 17937 - DNA, 438 bp, Unknown
  Obtained from environmental sample
  misc_feature (1)..(438): n is a, c, g, or t
atggcgatccncgaagcttttctcgctgtggacgcgatcctcttgctgtatatcaacatcgcgggggggctgaccgtgtatccccggatgatggaaaggcgtctgcgcgaggaactgccgtttatggcaagtgaagatattcttatgcactgcgtgaaaaaaggcggcgacaggcaggcgctccatgagaggatacggcgtcatgcggttgaaacctcgactcggatcaagcaacatgggggagagaacgatttgatcgcccgtattgccgctgatccggcctttggggtgagcgtggaagaattgagcggcctgttgcgcgccgaacagtttacgggcagggccagggaacagaccgaggagtttttgtcggaggcgcggacagtccttgcggcgcataaggacttgttgggcgttgacgtcaacatagcggtgtga

SEQ ID NO: 17938 - protein, 145 aa, Unknown
  Obtained from environmental sample
  misc_feature (1)..(145): Xaa is any amino acid
MAIXEAFLAVDAILLLYINIAGGLTVYPRMMERRLREELPFMASEDILMHCVKKGGDRQALHERIRRHAVETSTRIKQHGGENDLIARIAADPAFGVSVEELSGLLRAEQFTGRAREQTEEFLSEARTVLAAHKDLLGVDVNIAV

SEQ ID NO: 17939 - DNA, 705 bp, Unknown
  Obtained from environmental sample
  misc_feature (1)..(705): n is a, c, g, or t
atgatgaggataaccgtcgccgccgttcttaccgtcatagccgccgtcaacctcaacgcccaatggcggacgctggagccgggcttggagttcgcgtcgttcccgtccccgctctacatctcgaagaacgactccgcgccgccgccgccggttcaaccccgtgccgcaagccaaatcaacgtactccgcgtagacgtcaaacgctacgaactgcgcctgttgaacgcatcgaaccctgcgaacggctccctgctcaccgcccgaggctgggcggtcaaggaggggatggccgccgtcaccaacgccgccatgtataaggccgactaccgcaccagcgtctcctacatgaagacctcgacgcacgtcaacaactcgcacatatccaaagacaagacgatactcctcttcgaaccgctcaaaaagggcatagcgccggcgcgcatagtcgaccttcagtgcgacgacttcaatgagatccgccccctctacggctccgccgtccagtcgatccgcatgatctcgtgcgccggcaagaacgtctggcaggagagcgagaggcgctggagcatagcggcggcggccaccgacaagtcgggaaacgtcctcctgatccaatgcacagccccccactccgtccacgagttcataaacatactgcgcgacctgcccatatccatagaccgcgcgatgtctcggccgatctga

SEQ ID NO: 17940 - protein, 234 aa, Unknown
  Obtained from environmental sample
  SIGNAL (1)...(20)
  misc_feature (1)..(234): Xaa is any amino acid
MMRITVAAVLTVIAAVNLNAQWRTLEPGLEFASFPSPLYISKNDSAPPPPVQPRAASQINVLRVDVKRYELRLLNASNPANGSLLTARGWAVKEGMAAVTNAAMYKADYRTSVSYMKTSTHVNNSHISKDKTILLFEPLKKGIAPARIVDLQCDDFNEIRPLYGSAVQSIRMISCAGKNVWQESERRWSIAAAATDKSGNVLLIQCTAPHSVHEFINILRDLPISIDRAMSRPI

SEQ ID NO: 17941 - DNA, 750 bp, Unknown
  Obtained from environmental sample
  misc_feature (1)..(750): n is a, c, g, or t
atggttgacgcaaaaaacaaagaaattatcggcatcctgtttatcggcaacgagatgacggctattacaaaggtcatacacgacaatataattaaagagattaaactaatcgcccttctcgcgtccgccattttattggcgtccattgcggtaaacgcgctgagttacaggtttatattattaaaacccattaattccgcaaccgcgatgctcagggaaatatcggaaggcgaaggcgacctgaccaaacggcttacggtttccagcaaggatgaaatcggcgttatggccaggtattttaacgatacccttgaaaaaatcaaaagcatggttattgtcatcaagaaagaaacggcaagcctcaataaaatcggcaatgacctttccagcaacatgaccgaaaccgctgcggcgataaatcagattacagccaatatccagagcatcaagggcagggtcattaaccagagcgccagcgttaccgaaaccaacgccaccatggaacagattgtcacccacattaataaactcaacggccatgtagaagaccaggctgccacaataacaaaacgatccgcctttattcaggcaatggtagacaacatcaattctgtaaaccagacccttcttaaaaacctggaaaatgtccaaaccctgaaagaagcttccgaaaagggccgcaacggattgcaggaagtggcggctgacattcaggagatagcccgcgagtccgagggcctttggagataa

SEQ ID NO: 17942 - protein, 249 aa, Unknown
  Obtained from environmental sample
  DOMAIN (38)...(109): HAMP domain
  misc_feature (1)..(249): Xaa is any amino acid
MVDAKNKEIIGILFIGNEMTAITKVIHDNIIKEIKLIALLASAILLASIAVNALSYRFILLKPINSATAMLREISEGEGDLTKRLTVSSKDEIGVMARYFNDTLEKIKSMVIVIKKETASLNKIGNDLSSNMTETAAAINQITANIQSIKGRVINQSASVTETNATMEQIVTHINKLNGHVEDQAATITKRSAFIQAMVDNINSVNQTLLKNLENVQTLKEASEKGRNGLQEVAADIQEIARESEGLWR

SEQ ID NO: 17943 - DNA, 855 bp, Unknown
  Obtained from environmental sample
  misc_feature (1)..(855): n is a, c, g, or t
ttgagccggatcagctggcgagggctacgaaagctcttttccaaaaagaccgccaccctcgttgtcggcagcaaactgtcgggccacaccctggcagacgttgacttcctttgcgacggcactgacgaccaagtagggatcaacgcggcgatacaggcgctgcccgaaggcggcgggaaggtagtcataagggaaggcacgtacagcataaccgccagcatagtgattgacgtggacaacgtaaccatcgagggcatgggcgtgtccacagtgcttaagaggatgtacgccggcggtgactgcatgttggcaagatgctcttgctgcacgattgtaaatatgcgcattgatggcaacaaagctaaatacgccggctgtggcatccgggtcagcggcaacaactgcactgtaaccggtaacacgtgcaacaacaacggcaaccacggcatcctaattcaaagtgttggctgcacgataacgggcaacacgttcaacaacaacggcggccaaggcataaacataagtagcaatgccgacaactgcactgtaaccggtaacacgtgcaacaacaacggcaaccacggcatcctaattcaaagtgttggctgcacgataacgggcaacacgttcaacaacaacggcgaacaaggcatctatataaactgtagtagccgctgcactgtaaccggcaacgcgtgcataagggggacgggactaacaaccgactatagtgcatcccagtataccatcctcgcctccggaaacaacaaccttataaccggtaatttaatattgggtaaaaattatgtcgactatggatcgggtagcacgtttgccaacaacaaatacaattaa

SEQ ID NO: 17944 - protein, 284 aa, Unknown
  Obtained from environmental sample
  misc_feature (1)..(284): Xaa is any amino acid
MSRISWRGLRKLFSKKTATLVVGSKLSGHTLADVDFLCDGTDDQVGINAAIQALPEGGGKVVIREGTYSITASIVIDVDNVTIEGMGVSTVLKRMYAGGDCMLARCSCCTIVNMRIDGNKAKYAGCGIRVSGNNCTVTGNTCNNNGNHGILIQSVGCTITGNTFNNNGGQGINISSNADNCTVTGNTCNNNGNHGILIQSVGCTITGNTFNNNGEQGIYINCSSRCTVTGNACIRGTGLTTDYSASQYTILASGNNNLITGNLILGKNYVDYGSGSTFANNKYN

SEQ ID NO: 17945 - DNA, 327 bp, Unknown
  Obtained from environmental sample
  misc_feature (1)..(327): n is a, c, g, or t
atggtgcgcgactaccagttcaggggcaaagacgccgcggggacaatcaaaatgtggtccagcgtgcaggccggcgagcgtaaacacattttcccgtaccagaataccgccgacgcggcgtttaactcggcccttgattacgagctttccgtcttgaaatactacgccgatcccctattgcgggctgtgaagcccggccagcgcgaatatgccgaggcttcgcgtctctattcatttcttgaaaacttcgccccaatatcaccccagttagtgccgggaacaagcatattgagggagtttatcggggacagcgaatttaaatactag

SEQ ID NO: 17946 - protein, 108 aa, Unknown
  Obtained from environmental sample
  misc_feature (1)..(108): Xaa is any amino acid
MVRDYQFRGKDAAGTIKMWSSVQAGERKHIFPYQNTADAAFNSALDYELSVLKYYADPLLRAVKPGQREYAEASRLYSFLENFAPISPQLVPGTSILREFIGDSEFKY

SEQ ID NO: 17947 - DNA, 765 bp, Unknown
  Obtained from environmental sample
  misc_feature (1)..(765): n is a, c, g, or t
atgacgcacggcgacgacgacgggttgatcgttccgcccagactggcgccgtcgcatatagtaatactgcctatcatacatgatgatacgtcgtcaaacgatgtatttgagtattgcgacagattggcggcggagcttggggatgtccggtacgacgataggcggcttgaggttgaggttgacaaacgcgaagggcgcggcggcgacaaggtgtggtcgtggataaagaagggcgtcccgatatatctggagatagggccgcgagacatagcggcggattcggtcttcgtaggcaggagggacaagagccggaaggagcggttcgggatgtcgagacaggagtttgtaggtaaggtgtcggatattctggccgatattcagagcaatctgttcgctagggcgaaggctttcagggacgggaatatcaaggttatcgataataaagatgagttttacgagttctttacgccgaagaacaaggagaaaccggagatccacggcggcttcgcgctgtgccattggaacgggtcggcggcggttgaggagcaagtgaagaacgatttgaacgttacgatacggtgtattccgctggatggggaagaggaggaggggaagtgtgttattagtggggaggtttctaaaaaaagaggttgtctttgggaagtcgtattaaaagataaggataatatatgcacccaacgttatttaaaatattttcgtttcctgttccctcttacggggctatgttggcgctttcttttttag

SEQ ID NO: 17948 - protein, 254 aa, Unknown
  Obtained from environmental sample
  DOMAIN (19)...(122): Anticodon binding domain
  misc_feature (1)..(254): Xaa is any amino acid
MTHGDDDGLIVPPRLAPSHIVILPIIHDDTSSNDVFEYCDRLAAELGDVRYDDRRLEVEVDKREGRGGDKVWSWIKKGVPIYLEIGPRDIAADSVFVGRRDKSRKERFGMSRQEFVGKVSDILADIQSNLFARAKAFRDGNIKVIDNKDEFYEFFTPKNKEKPEIHGGFALCHWNGSAAVEEQVKNDLNVTIRCIPLDGEEEEGKCVISGEVSKKRGCLWEVVLKDKDNICTQRYLKYFRFLFPLTGLCWRFLF

SEQ ID NO: 17949 - DNA, 867 bp, Unknown
  Obtained from environmental sample
  misc_feature (1)..(867): n is a, c, g, or t
ttggccgagtggagccagttgatcgcgaaactggaatactttaatccgctcagttccgtaaaagacagaatcgccctcgctatggtagaggacgcggaaaaaaacggaaagctggataaggatacggtaattatcgaaccgacttccggcaatacgggaataggattggcatttgtcgccgcttcgcgcgggtacaagcttatccttaccatgccggacaccatgagcgttgaaaggcgcaacttgttaaaagcgcttaacgcggagcttatgcttactcccggcaaggacggcatgaagggcgcaatcagaaaagccgaggagctttcgctcttttttgaaaaatcttttattcctcagcagtttaacaatcccgctaacgcccgcattcaccgcgaaaccaccgccgttgaaatctggaacgatcttgacggagagcttgacgtatttgtggcgggcgtcggaacaggcggcactatcacaggcgtcggcgaagttttaaaagaaaaaaatcccaagataaaaattgtagccgtggagccttttgactctcccgtactttcgggcggagttccgggaccgcacaagattcaaggcatcggcgcgggattcattccgaatgtactgaacacaaaagtaatagatgaaatatttaaagtaagaacggaacaagcctttgaaaccgcgcaggacttggcgcggacggaagggcttttagtcggcatatcttcggcggcggcggctttcgcggcggcggagattgcgaaacgttcggaatacaaaggcaagaccgttgtggctctgctgcccgacacgggagaaagatacctttccaccccgttgtttgaaagaccgncagcaatataa

SEQ ID NO: 17950 - protein, 288 aa, Unknown
  Obtained from environmental sample
  DOMAIN (2)...(272): Pyridoxal-phosphate dependent enzyme
  misc_feature (1)..(288): Xaa is any amino acid
MAEWSQLIAKLEYFNPLSSVKDRIALAMVEDAEKNGKLDKDTVIIEPTSGNTGIGLAFVAASRGYKLILTMPDTMSVERRNLLKALNAELMLTPGKDGMKGAIRKAEELSLFFEKSFIPQQFNNPANARIHRETTAVEIWNDLDGELDVFVAGVGTGGTITGVGEVLKEKNPKIKIVAVEPFDSPVLSGGVPGPHKIQGIGAGFIPNVLNTKVIDEIFKVRTEQAFETAQDLARTEGLLVGISSAAAAFAAAEIAKRSEYKGKTVVALLPDTGERYLSTPLFERPXAI

SEQ ID NO: 17951 - DNA, 720 bp, Unknown
  Obtained from environmental sample
  misc_feature (1)..(720): n is a, c, g, or t
atggatgccatttttcactgcggctatattatctttttgccctctggaaagcacatgcgaaaaaatccaaaagaaatcaaaataatcaaaagtccggtagctttgcaaaaattttcaaaaaaaatgcgagctttggggaaaagcatcggtttagttccaactatgggagccttgcacaaggggcatgcttctcttattgaaatgtctgcaaaacaaaacgatattaccattgtgagcatctttgtaaatcccacgcaattcggtgcaaacgaagattttgcaatatatccacgcaggcttaaagcagatgccaatctatgcgctatagcaggagcaaacatcatttttgctccagaacctggggctatgtaccctttgccgctccaaacctttgtgcataatccaagccttgaacacctctattgcggcaaataccgccccgtgcatttcgcaggcgttttgagcgttgtggcaaaactgttcaacatagctctacctagcaaagcatattttggcgaaaaagattttcagcagctccatctgataaaaaaaatggttcaagatttaaattttcccattaaaatcataggtacaaaaacaataagagaaaaaagcggccttgcaatatccagcagaaacgaatatatgaccccaaaagaacgagaagccgccagttccatttacgccggaatgataaccgcaaaaaattgcgccccgtag

SEQ ID NO: 17952 - protein, 239 aa, Unknown
  Obtained from environmental sample
  DOMAIN (26)...(239): Pantoate-beta-alanine ligase
  misc_feature (1)..(239): Xaa is any amino acid
MDAIFHCGYIIFLPSGKHMRKNPKEIKIIKSPVALQKFSKKMRALGKSIGLVPTMGALHKGHASLIEMSAKQNDITIVSIFVNPTQFGANEDFAIYPRRLKADANLCAIAGANIIFAPEPGAMYPLPLQTFVHNPSLEHLYCGKYRPVHFAGVLSVVAKLFNIALPSKAYFGEKDFQQLHLIKKMVQDLNFPIKIIGTKTIREKSGLAISSRNEYMTPKEREAASSIYAGMITAKNCAP

SEQ ID NO: 17953 - DNA, 474 bp, Unknown
  Obtained from environmental sample
  misc_feature (1)..(474): n is a, c, g, or t
gtgacacaaactctcggcatcccggcccggcaaggatattttccgacccctgaaccccgacccccgacccctgactgcgaagtagtcaccctctggtatgtcatcgagcatttgcgtgactgcgttccggcgctttctgaaatacggaaactgctcaaacccggcggagttctggctttcgcgacgccttcgttcacaggggtttcgggccgcggttcgctgaaacgctttcttgaaaacagcccgcaggatcactggactgtctggtccccgacagtatgcaggaaggctctgggaaaagccggcttcaaggtaaaaaaaatcattagcagcggacaccatcctgaacgcttcccgtttttgggaaaattcgcgcataacaaaaactcgctgttgtacaggctgttgatggcggtaagtaaaatttttgcgttaggcgacacaattgaggtatacgccgtcactctaccttaa

SEQ ID NO: 17954 - protein, 157 aa, Unknown
  Obtained from environmental sample
  misc_feature (1)..(157): Xaa is any amino acid
MTQTLGIPARQGYFPTPEPRPPTPDCEVVTLWYVIEHLRDCVPALSEIRKLLKPGGVLAFATPSFTGVSGRGSLKRFLENSPQDHWTVWSPTVCRKALGKAGFKVKKIISSGHHPERFPFLGKFAHNKNSLLYRLLMAVSKIFALGDTIEVYAVTLP

SEQ ID NO: 17955 - DNA, 534 bp, Unknown
  Obtained from environmental sample
  misc_feature (1)..(534): n is a, c, g, or t
atgaagaaatcactttttatttttatcgctcttgttttaaccgcggcaatggccttcgcggctggcaggcaggccggcgctggttcgcagtcgcagccggctgcaacgacttacactattgcggtgggcgggtctacctcggttaatcccctgatggaactgtttgtcgccgaatacgccaagattcgcggcaatgtcaaattcaccgtaagcgcgaccggctcgggcgacggaattaaaggcgtaccggcaggaacctgcgaaatcggtatgtccagccgggaactgacccccgccgaaatcggaaccggaattgacgagcttgttatcgctattgacggcatcgcggttatcatcaataacgcgaacccgattgcgagcctgacccaagcgcagatcaaggacatttacaccggagaaattacccgctgggaacagctaggagctgccgcgcagggcaagaccggacgtatcgctgtggtttccaggggaccgggatcgggaacacgcggcgcttttgaggagatttcttag

SEQ ID NO: 17956 - protein, 177 aa, Unknown
  Obtained from environmental sample
  SIGNAL (1)...(20)
  misc_feature (1)..(177): Xaa is any amino acid
MKKSLFIFIALVLTAAMAFAAGRQAGAGSQSQPAATTYTIAVGGSTSVNPLMELFVAEYAKIRGNVKFTVSATGSGDGIKGVPAGTCEIGMSSRELTPAEIGTGIDELVIAIDGIAVIINNANPIASLTQAQIKDIYTGEITRWEQLGAAAQGKTGRIAVVSRGPGSGTRGAFEEIS

SEQ ID NO: 17957 - DNA, 540 bp, Unknown
  Obtained from environmental sample
  misc_feature (1)..(540): n is a, c, g, or t
gtgggaaataccgggatgtttttgtccaaagggtttaatgggtttatctcaaagcccgtcgacatttttaaactcgacgaagttctgaacaaatttgtacgggataaaaagggaacagggaattcaaacaacgattccccagtccctagtccccaatccccagtcctcacttcttccaaattccctgatatccccggtgtggatgtaaaaaaaggcatttttatgaccggcggtgtggaggagagctatcggatagtgttggctacattatgcaaaaatgtggaagaaaggatgccgatattccagacgcttccggacatggataccatgtttatgtttattacccaggtacactcccttaagagcacagccgcttctatcggagcggcggaagtgtcaggccaggccgcaaagcttgaagccgccggcagggcaggggatttggcctttatccgggaacaccagggcgttttttcagaacacttaacgtcgcttataaaaaacatccgcattgctctgcaaaccccggaaagtctctga

SEQ ID NO: 17958 - protein, 179 aa, Unknown
  Obtained from environmental sample
  misc_feature (1)..(179): Xaa is any amino acid
MGNTGMFLSKGFNGFISKPVDIFKLDEVLNKFVRDKKGTGNSNNDSPVPSPQSPVLTSSKFPDIPGVDVKKGIFMTGGVEESYRIVLATLCKNVEERMPIFQTLPDMDTMFMFITQVHSLKSTAASIGAAEVSGQAAKLEAAGRAGDLAFIREHQGVFSEHLTSLIKNIRIALQTPESL

SEQ ID NO: 17959 - DNA, 414 bp, Unknown
  Obtained from environmental sample
  misc_feature (1)..(414): n is a, c, g, or t
ttgccggatgaatcaggaaaattccatgaagaattacgcctaatagaagaagaaatttttaagggccttgacatccccttcagggtggtggacacctgcaccggcgaccttggcgcgccggcctaccgcaaatgggaccttgaagcgtggatgccgggcagaaacaacggcgaatggggagaagtgacttcaacctcaaactgcacggactaccagtcccggcggctgaatatacggtacaaggacgacgacggaaaaaacaaattcgtacaccttttgaacggcacagccatcgcaatatcaagggcgattatcgccatactggaaaatttccagcaagctgacggttcggtgcgtatccccgcggcgcttgtcccctatgtcggcttcgacaccatacaaaagaaaaaataa

SEQ ID NO: 17960 - protein, 137 aa, Unknown
  Obtained from environmental sample
  misc_feature (1)..(137): Xaa is any amino acid
MPDESGKFHEELRLIEEEIFKGLDIPFRVVDTCTGDLGAPAYRKWDLEAWMPGRNNGEWGEVTSTSNCTDYQSRRLNIRYKDDDGKNKFVHLLNGTAIAISRAIIAILENFQQADGSVRIPAALVPYVGFDTIQKKK

SEQ ID NO: 17961 - DNA, 540 bp, Unknown
  Obtained from environmental sample
  misc_feature (1)..(540): n is a, c, g, or t
ttgatggcggacgatgttaccgcgaacgcgggcagaatgagcggctgcggagaaggcggaaataatcgcaaaaaccgacaacgtttctccggcaggagagatgattctcataagaatataaaaaaatttaatcagtcgaataatcacaacgatttattttttgacggaaaatcagaaaaaaaagaaagtatatatgaacgtccgaagtggacgactcccgaactgccagccaatcccataaccacacccgattgcccgtggtgcggaaaacaaattaacgatattactacttctattacggataaagacaccgggcgtcccgtacattttgattgtgtcatagcccgcattgcggaaacggaaacgctggaaacgaacgacagtatttgttacataggcggaggacgtttcggaatagttcattacaacaatccgccggatacaaaaggttttacaattaaaaaaatctttgagttggaacctaaagatactgtgagcgaatggcgtcggcctataagtgagtatttttcaatcacatga

SEQ ID NO: 17962 - protein, 179 aa, Unknown
  Obtained from environmental sample
  misc_feature (1)..(179): Xaa is any amino acid
MMADDVTANAGRMSGCGEGGNNRKNRQRFSGRRDDSHKNIKKFNQSNNHNDLFFDGKSEKKESIYERPKWTTPELPANPITTPDCPWCGKQINDITTSITDKDTGRPVHFDCVIARIAETETLETNDSICYIGGGRFGIVHYNNPPDTKGFTIKKIFELEPKDTVSEWRRPISEYFSIT

SEQ ID NO: 17963 - DNA, 780 bp, Unknown
  Obtained from environmental sample
  misc_feature (1)..(780): n is a, c, g, or t
gtggtaaccaacgactgcaccaatgaagcgacggtggaaggtactacaaaagaaacgacggcaatcagcgccaaagcgaagattaccgtaagggccgtgaacgccgagaagcccaccatttccggccagccggtaggcaaggactattatgtggttggcgatacgccggtcaatttgtcggtaacagcgacccttccgacgcagaacgtagccggtctgtcataccagtggtatagcgcggacaatgccgcgggcacgaacccaacggagattgaaaacgcgacaaacagcacctatacgccccccactgcagtgaaaggcgatacgtggtactgggtggtggtaacaaacacccttaccgataacggggacggcggcgttaaaacagcgtcagaagacagcgccaaagcgaaggttgttgttaaggctactatcagcgttgcggccatccccggcgtaaccgccccggcaaccggcaacgcaccggtagagacgattaacgcaacccagtacaccggaaccgttgagtgggctcccactattgctgccggaggcctctttgaacacagcaccgtatacacggcgaccattaccctgacggcaaaagacacttacaccctgaaaggcgtggcggcgaacttcttcagcgttgcgggcgcaaccatagtgaccggcaacgccgatgatttcggcgttattaccgtctcattcccggtgaccagcgctacggtacccactaaacctgtcgttgttgatttcaacgtggctggacccggttaa

SEQ ID NO: 17964 - protein, 259 aa, Unknown
  Obtained from environmental sample
  misc_feature (1)..(259): Xaa is any amino acid
MVTNDCTNEATVEGTTKETTAISAKAKITVRAVNAEKPTISGQPVGKDYYVVGDTPVNLSVTATLPTQNVAGLSYQWYSADNAAGTNPTEIENATNSTYTPPTAVKGDTWYWVVVTNTLTDNGDGGVKTASEDSAKAKVVVKATISVAAIPGVTAPATGNAPVETINATQYTGTVEWAPTIAAGGLFEHSTVYTATITLTAKDTYTLKGVAANFFSVAGATIVTGNADDFGVITVSFPVTSATVPTKPVVVDFNVAGPG

SEQ ID NO: 17965 - DNA, 702 bp, Unknown
  Obtained from environmental sample
  misc_feature (1)..(702): n is a, c, g, or t
atgattcgtgttttcgcgcctgcaaaaatgagaaaaataaattgtttttatatcctaagcccgtcgcattgggggctttcaactgaaccttattcattaactgacggttcatgggtaagcggttttggcattgttgactcggacaagaaaagcgtgcgcgaactggagaaatcacttaatgtaggtttggacaaaagggtattcgatgtggaacatggcgcgtcaacattaatgccatatattaaaaaatattttccaaaagcgttggtagtcgttattgcctacgatggcgaaccccctgtgaatgttccaaagagcgcacagcttgcggacgttctggaaagtctttttgataaaaacggaaaacggaaaaatttcttgctaatatcaactgacttttcacatcacggcaatctggagcttacggaaaaaagggataataattcattacggtatttaaaaaacccgtcaactgtttcctggaatatggcaggttgcgataataaacccggaattttcatcattgaccgtcttgggaaaaacaatcttgaatcatttatcctctaccataccaattcctgggaaatctccaatgaatgggaacatgatgttacaagttatttttttgtttacattggagataaatccaaagagcttcacacaaaggacacaaaggtacaaagatcacaaagaggaaattag

SEQ ID NO: 17966 - protein, 233 aa, Unknown
  Obtained from environmental sample
  misc_feature (1)..(233): Xaa is any amino acid
MIRVFAPAKMRKINCFYILSPSHWGLSTEPYSLTDGSWVSGFGIVDSDKKSVRELEKSLNVGLDKRVFDVEHGASTLMPYIKKYFPKALVVVIAYDGEPPVNVPKSAQLADVLESLFDKNGKRKNFLLISTDFSHHGNLELTEKRDNNSLRYLKNPSTVSWNMAGCDNKPGIFIIDRLGKNNLESFILYHTNSWEISNEWEHDVTSYFFVYIGDKSKELHTKDTKVQRSQRGN

SEQ ID NO: 17967 - DNA, 768 bp, Unknown
  Obtained from environmental sample
  misc_feature (1)..(768): n is a, c, g, or t
atggctcacaggctcgaattccgtataataccgtctctggttttagcgttatctgaaaatatcatgtgcgtatctgacgcttttagcccgcgttatattaaccccgcttttatttttcataactggtatgacagggacaatataaattcgcttgcccaaattgagcttgattttgttccgtataacggattccgcgtttttacccaggcggcctttgatcaaatccgcgctccctgggaaaaagacgacgaacccccggcatggggcattatcgccggctttgaacatacgcgctccgcgctccgtggtatcatgaccttttcgctggaatttgcctatactacccctttgttatacaggcgcgatatggttgattttatcaccttaagcgatacaaaaaccaattatgccgaacacagtctcgctatggattataccggctttaaatacggcggggacgcgatagttgttcaactcgacgctaactaccgctttcccggcagtactttcatttatgcgcgtctctttggcatgattcacgggaacatgaatatttttacgtcgcataacaaagacggaaataatacaggtcacgcgaatctggaaattaaaacgccgtcgggaagcgatgatcaaaaagaacaaacttttagcgtttctttgggagcgaattatttacttccgcaatttgtgtcatggaataaaatcagcgtatggacagatatttcctatatctccaaaaaaaacaagcttttatttccggaatag

SEQ ID NO: 17968 - protein, 255 aa, Unknown
  Obtained from environmental sample
  misc_feature (1)..(255): Xaa is any amino acid
MAHRLEFRIIPSLVLALSENIMCVSDAFSPRYINPAFIFHNWYDRDNINSLAQIELDFVPYNGFRVFTQAAFDQIRAPWEKDDEPPAWGIIAGFEHTRSALRGIMTFSLEFAYTTPLLYRRDMVDFITLSDTKTNYAEHSLAMDYTGFKYGGDAIVVQLDANYRFPGSTFIYARLFGMIHGNMNIFTSHNKDGNNTGHANLEIKTPSGSDDQKEQTFSVSLGANYLLPQFVSWNKISVWTDISYISKKNKLLFPE

SEQ ID NO: 17969 - DNA, 846 bp, Unknown
  Obtained from environmental sample
  misc_feature (1)..(846): n is a, c, g, or t
atgtatcagatcggcagagctcgtgccgctcgtgccgagaaagatatagaagcccttgaccttcatcccgccattcatggttatctgataaaaaaatggtacgacaggatatttattgagtatgacaagaaaaagtttttccctgtttggtatttcagggattccaaagcatataacagtttttcttttgatgaaaagaacgaactggaagccatgctggaaaaacgccgcgtaaaatccgaaaaagcgtgggatgcgcaaggcaaaaaacttctttcggtattggtcgaatcttccggcatgcttccgtgcgcggaagaccttggcgctgtaccctcctgtgttccgaaagttcttacaaaactgaaaatacttggattaagggttgtacgctggcatcgcgactggggcaaagaaggccagccctatattccttttgaagaatatcctcagttgagcgtttgtactccagcggttcacgacagttctaccgtcagggaatggtgggaaagagaggcgaatcaggggcagttttcgggctttatcggcgttccgtcgttgccgagagtatacaatcccggcaccgcaaaaattattctgtcaaaaatagctaccgcccgttcgcgtttccgtgtttttcaggtacaggatctgcttcacctttcaaacaaatggtacgccgccgatcccgcgtccgagcgcataaatgttcccggcactttaaacgattttaactggacataccgtcttccatccacaattgaagaaattgccaaagacaaggaccttgtccgggaagtcagggagcttagcaggattaaaccggcgaagaaaaagacagtttaa

SEQ ID NO: 17970 - protein, 281 aa, Unknown
  Obtained from environmental sample
  DOMAIN (1)...(271): 4-alpha-glucanotransferase
  misc_feature (1)..(281): Xaa is any amino acid
MYQIGRARAARAEKDIEALDLHPAIHGYLIKKWYDRIFIEYDKKKFFPVWYFRDSKAYNSFSFDEKNELEAMLEKRRVKSEKAWDAQGKKLLSVLVESSGMLPCAEDLGAVPSCVPKVLTKLKILGLRVVRWHRDWGKEGQPYIPFEEYPQLSVCTPAVHDSSTVREWWEREANQGQFSGFIGVPSLPRVYNPGTAKIILSKIATARSRFRVFQVQDLLHLSNKWYAADPASERINVPGTLNDFNWTYRLPSTIEEIAKDKDLVREVRELSRIKPAKKKTV

SEQ ID NO: 17971 - DNA, 813 bp, Unknown
  Obtained from environmental sample
  misc_feature (1)..(813): n is a, c, g, or t
atggggcttaacgccttttttgcctttaccgtagttttgggaatgggttactcctggcagcttgccctcacggcggtatttctggaaggtatcctgtttgtgatcctgtcacttcttaacgtccgggaagcgattatcaacgccattccgataaatctaaagagagccgttgcggtcggtatcggcctttttatcgccctgattggtttttccaatgccggcattgttgtgaatgacgcaggtactattatagggttgggtgacctttccagcccggctcctttaatggcgattatgggccttgtcctcatcattgttctttattcccttaaagtaccaggcgctattcttatcgggattctggggactacaattataagcattgctttaggaatagccgccgttcctgccggctggacccttttcagtgctcccgacgctcctcttttattcaaatttgatttttcaaatatattcacttttaagttttttacggtcttctttaccttcctctttgtggatatttttgatactgttggaaccctgatgggggtagccacacaggcgaaccttatcgacaaagacggaaatatcccgcatgtcaaacaggcgcttttgtcggacgctataggaacagtggcaggagccgcgcttgggacatctactgtcaccagttatattgaaagctccgccggcgttgccagcgggggcaggaccggccttaccgctcttactactggcgttcttttccttctggctctggtgttgtcgcctctctttcttcttgtgccgacattctcgtgcngaatctga

SEQ ID NO: 17972 - protein, 270 aa, Unknown
  Obtained from environmental sample
  SIGNAL (1)...(20)
  DOMAIN (1)...(270): Permease family
  misc_feature (1)..(270): Xaa is any amino acid
MGLNAFFAFTVVLGMGYSWQLALTAVFLEGILFVILSLLNVREAIINAIPINLKRAVAVGIGLFIALIGFSNAGIVVNDAGTIIGLGDLSSPAPLMAIMGLVLIIVLYSLKVPGAILIGILGTTIISIALGIAAVPAGWTLFSAPDAPLLFKFDFSNIFTFKFFTVFFTFLFVDIFDTVGTLMGVATQANLIDKDGNIPHVKQALLSDAIGTVAGAALGTSTVTSYIESSAGVASGGRTGLTALTTGVLFLLALVLSPLFLLVPTFSCXI

SEQ ID NO: 17973 - DNA, 477 bp, Unknown
  Obtained from environmental sample
  misc_feature (1)..(477): n is a, c, g, or t
atggacgaacaactacaattacatatgatgagagcactcggcgcattgggtgcaaccgcagctcttggcataactgccataggctcttctgttggcgttggcttggctggtgccgcagctatcggcgcgtggaaaaaggcttatgcccaaggcaaaagcgctcttttcaccttgctgatatttgtgggcgcgcctatatcgcaaacaatctacggcatgataatgctgatttctataggtaatgctatgcaacagcaccccgaaagctgggctgcctatgtgggcgcaggctttgttggcggtactggtatggctgcttctagctggttccagggctatgtaggtgcagccgcagcagatgctctaagcgaaacaggcaaaggctttgcgaactacatgatggtgcttggagttgtggaaacagtatccttgttcgtgttggtattcgtgcaaatggcatttaaaattcacggctaa

SEQ ID NO: 17974 - protein, 158 aa, Unknown
  Obtained from environmental sample
  misc_feature (1)..(158): Xaa is any amino acid
MDEQLQLHMMRALGALGATAALGITAIGSSVGVGLAGAAAIGAWKKAYAQGKSALFTLLIFVGAPISQTIYGMIMLISIGNAMQQHPESWAAYVGAGFVGGTGMAASSWFQGYVGAAAADALSETGKGFANYMMVLGVVETVSLFVLVFVQMAFKIHG

SEQ ID NO: 17975 - DNA, 720 bp, Unknown
  Obtained from environmental sample
  misc_feature (1)..(720): n is a, c, g, or t
atgcaaaaacttcttaaatccgcgatagaagggttaaaggatgataacatcaccataaccgataattacggaaatcaaattaacgattttgacgggatgaaagattttgacaagcaagcccttaccgaacgtcagcagaaattccttttggatatggaaaaaaggtacaagggtattgtcctttcgtcgattcaacaggtgtttactcaggatcgcgtaagggatcttaacataaaatttgaaatggatatgtcccaaaaaactgttgatacaaaagaaaactttcccgttacgattaaaccaagaacgcccggacttccttatgacgattcaataataaaagaatcccttatagtaggtgaagtgaattctgatacaaaatgggaaggcacaggatttaaccctgaaggtcccggcggagtggaagggcaaacgcctcccgcttttaaagatatgagtaatttatacggaagaatgaatcagacaacacagaacataaattatgagattaaccagcgtaattcacaggaagaaaaaagtcctcaaattgatcgtgtaactgtttctgtcaatattgacggggtatggaaaagaaaatttgacgaaaagagaaaccccgtaattacggcggaaggaaccattgaaagggaatatgttccggttccccctgaggagcttaaaaaggtagagggattaatacgcgacgctatcgggatataa

SEQ ID NO: 17976 - protein, 239 aa, Unknown
  Obtained from environmental sample
  DOMAIN (64)...(238): Flagellar M-ring protein C-terminal
  misc_feature (1)..(239): Xaa is any amino acid
MQKLLKSAIEGLKDDNITITDNYGNQINDFDGMKDFDKQALTERQQKFLLDMEKRYKGIVLSSIQQVFTQDRVRDLNIKFEMDMSQKTVDTKENFPVTIKPRTPGLPYDDSIIKESLIVGEVNSDTKWEGTGFNPEGPGGVEGQTPPAFKDMSNLYGRMNQTTQNINYEINQRNSQEEKSPQIDRVTVSVNIDGVWKRKFDEKRNPVITAEGTIEREYVPVPPEELKKVEGLIRDAIGI

SEQ ID NO: 17977 - DNA, 636 bp, Unknown
  Obtained from environmental sample
  misc_feature (1)..(636): n is a, c, g, or t
atggccctctataccggtaagattctactcgctgacgcttttacgcggtcgcttaactggaagaaatgctgtccgccagcaacagacattaataaatcgcttcttccccttatcgttcaatctcccgacggccagatgcttatgacgggctttaccgatgccgaagcgttagccgaaactttcatgcgtggaaacgtttgtttccacagccgcacccgaaacgagctctggatgaaaggcgaaacttcaggaagtattttgcaacttctcaaaatacgcgccgactgtgacagggatacgcttcttgccgtggcggaacctgcaggccctgtttgccatacgggcgcctggtcgtgttttgaaacgggcaggaaatttacctgggaatttttgcagagcattattgtcgaacgttttaagaacccgccgcctggttcgtacaccgcgactttggacgacaagcttgtgcgggaaaaacttatggaagaagcggaagaggtttgtactgcaaaaacacacgctgaagttgtctgggaagcagccgatctcctttattttacaactgtgcttataacccgcgaaggactcaccgttcaggaagttttggacgagcttgaccgcagacacaaaaaataa

SEQ ID NO: 17978 - protein, 211 aa, Unknown
  Obtained from environmental sample
  DOMAIN (128)...(210): Phosphoribosyl-ATP pyrophosphohydrolase
  misc_feature (1)..(211): Xaa is any amino acid
MALYTGKILLADAFTRSLNWKKCCPPATDINKSLLPLIVQSPDGQMLMTGFTDAEALAETFMRGNVCFHSRTRNELWMKGETSGSILQLLKIRADCDRDTLLAVAEPAGPVCHTGAWSCFETGRKFTWEFLQSIIVERFKNPPPGSYTATLDDKLVREKLMEEAEEVCTAKTHAEVVWEAADLLYFTTVLITREGLTVQEVLDELDRRHKK

SEQ ID NO: 17979 - DNA, 594 bp, Unknown
  Obtained from environmental sample
  misc_feature (1)..(594): n is a, c, g, or t
atgacgttgttgagcatttacttttcagcgttgacagcttacggtttacatgtatacaagtttagaggaagagcgtttttgtggacggttatcctgatcataataatgcttcccagcactctttccattatcggtttctatcaattcatgtctacgttaaggctccgcgacagttatattcccttgattattccgggaatagccgccgcgggaacggttttgttcctaagacagtatatgatgtctgttctcagcacagaacttattgacgcggctagaattgacggcgcgggcgagtacaggatattcaatgttattattcttcctattatgattcccgctcttgccgctcagtcgatctttacctttgtaggttcgtggaataactttattacgccgtttatattgattaacagcgaaaagaaatataccttgccaatgcttgtacaaagcttgcgcggtaatatttatcgcgcggaatacggcgcaatctatcttggaatagccgtttctcttataccgattttattattctattcatttatgtcgcgcttcataatttccggtattactatgggcggtattaaagagtaa

SEQ ID NO: 17980 - protein, 197 aa, Unknown
  Obtained from environmental sample
  DOMAIN (1)...(192): Binding-protein-dependent transport system inner membrane component
  misc_feature (1)..(197): Xaa is any amino acid
MTLLSIYFSALTAYGLHVYKFRGRAFLWTVILIIIMLPSTLSIIGFYQFMSTLRLRDSYIPLIIPGIAAAGTVLFLRQYMMSVLSTELIDAARIDGAGEYRIFNVIILPIMIPALAAQSIFTFVGSWNNFITPFILINSEKKYTLPMLVQSLRGNIYRAEYGAIYLGIAVSLIPILLFYSFMSRFIISGITMGGIKE

SEQ ID NO: 17981 - DNA, 552 bp, Unknown
  Obtained from environmental sample
  misc_feature (1)..(552): n is a, c, g, or t
atggttgtgcgtttcggcaacgtgcttggttcccgcggttccattgtgccgctttttcaaaaacaaatagagaagggcgggccggtcaccataacccaccccgatatgcaccgctggtttatgacaatccccgaagcctgctccctggtattaaaggccggcggcgtaggcgagaacggaaaactctaccttttggacatgggcgagcctgtacggatacgcgatcttgccgagcagatgatccgtttctacggcttcgagccagaggccgacatcaaaatcgaatatacgggcctgcgcccgggcgagcgccttgacgaacgtttatggtcggagaatgagatacctcgggaaaccgaatacagccgcatactccgactggacaaaaaaacctcaggcggcattgatcttgcccggctaatggaagaactcaaaccaatttgccgcttcgacccggctcaaccggaaaagtaccgtgacggcagcctcctgcgcgcggcgctggaaaacgcgatcccgggaatgaaggccaaggggcaattagctgtctaa

SEQ ID NO: 17982 - protein, 183 aa, Unknown
  Obtained from environmental sample
  DOMAIN (1)...(129): Polysaccharide biosynthesis protein
  misc_feature (1)..(183): Xaa is any amino acid
MVVRFGNVLGSRGSIVPLFQKQIEKGGPVTITHPDMHRWFMTIPEACSLVLKAGGVGENGKLYLLDMGEPVRIRDLAEQMIRFYGFEPEADIKIEYTGLRPGERLDERLWSENEIPRETEYSRILRLDKKTSGGIDLARLMEELKPICRFDPAQPEKYRDGSLLRAALENAIPGMKAKGQLAV

SEQ ID NO: 17983 - DNA, 759 bp, Unknown
  Obtained from environmental sample
  misc_feature (1)..(759): n is a, c, g, or t
atgaaatggatgccattgccccctctggacacttcgggcggcaatgtcacctatgcctgcctgtccatcgcggaacagttgagagcgtgtcgcataacggtctgcggggcggatttctcctatcctcttggaaggccctatgccaggggaacgtatttttatcccttatttgagcgcacgcaaaaccggctttcgcccctggaagcccgcgtatcgtcattcctctaccgcggcccctttctgccccctgaaaacggaggaagccgcagcagcgtttcaccttgttatgagacaagcagtttgcgtttttaccgcaagagttttgaggaaaaggcctccgcaatggaagcggaagttattgcggaaagaggccttggaatccctttggaaattcggaagaatgcctcatgcggaccatgcccgcgtgagcgggctccggaggcgcaaaggaagaagaaagaggaaaagagaaggaactccaacaagccgtttgcgtcaggcgggagaatagattttgcgccgaataagccgctgatggattcaagagaatttcttgatcaatacaaaaaagatattaaagcgctgccaatttttgaccgcaacatgagtctaaacgccaacgagaggcaagtttttatgacactgctcccgttacttgccgcgattaaacgtcggcgcccggaattggcagcacaagagcttattgaggcggcgaaggcgcattgtgttaaagaaatagaatatgtattgagggagtag

SEQ ID NO: 17984 - protein, 252 aa, Unknown
  Obtained from environmental sample
  misc_feature (1)..(252): Xaa is any amino acid
MKWMPLPPLDTSGGNVTYACLSIAEQLRACRITVCGADFSYPLGRPYARGTYFYPLFERTQNRLSPLEARVSSFLYRGPFLPPENGGSRSSVSPCYETSSLRFYRKSFEEKASAMEAEVIAERGLGIPLEIRKNASCGPCPRERAPEAQRKKKEEKRRNSNKPFASGGRIDFAPNKPLMDSREFLDQYKKDIKALPIFDRNMSLNANERQVFMTLLPLLAAIKRRRPELAAQELIEAAKAHCVKEIEYVLRE

SEQ ID NO: 17985 - DNA, 483 bp, Unknown
  Obtained from environmental sample
  misc_feature (1)..(483): n is a, c, g, or t
ttggaaaatacagctacaaaagagtcggcaaaaaatactcccattattaaagaaaaacgggtaaatatttctgaaattgcgcctgatactgtaatatctttttcgcatgaacaatatttaaaattgcagaaaggccttattcccaaagcaatggaagataaatggtttatatattttgaagaagactgtttgtattttcacagatcatggacaggacttggaatttatcgcgcggaaattattaaggagaatgacgccgaagaagacaaaaaatatacaattaaggaattttatcttgaaactgatgaaaaaacatataaagacggagataataaatttgatcttgatattttattacagttaatattttggggcttattggggattgatacaagaaacagttttattgaaaaatacgggtccgggacatcgggtgcaatgttaatatggtccttattcggacgcatgttttttccgcagtag

SEQ ID NO: 17986 - protein, 160 aa, Unknown
  Obtained from environmental sample
  misc_feature (1)..(160): Xaa is any amino acid
MENTATKESAKNTPIIKEKRVNISEIAPDTVISFSHEQYLKLQKGLIPKAMEDKWFIYFEEDCLYFHRSWTGLGIYRAEIIKENDAEEDKKYTIKEFYLETDEKTYKDGDNKFDLDILLQLIFWGLLGIDTRNSFIEKYGSGTSGAMLIWSLFGRMFFPQ

SEQ ID NO: 17987 - DNA, 444 bp, Unknown
  Obtained from environmental sample
  misc_feature (1)..(444): n is a, c, g, or t
ttgaggaacaagaccagaggcttgaacattgcgataaaacacctgcccataaccgctcaaaccccatataccttcttgaattctagctccaccagaatcgtttattccaactatggggaaaccgagttcgcaagcctggtcttgaaggtcgctgattttttgtgcgtgcatttgggaaagcgaaccgccgctgatggtaaagtcttggctgaacaccgaaacaggacgcccatccacattgccgatgcctgtaatcacgccatcgccggggagccttttgctggtgggttttgcttggtcaacgtgcaaaccgcgttcttgaaaagagtttttgtcgaacagggtttctaccctttcgcgagcgctgagttgcccttttgcatgacgcttttcaattttatcggcaccgccgccgagtttggcttctttgcgcctattgtttaa

SEQ ID NO: 17988 - protein, 147 aa, Unknown
  Obtained from environmental sample
  misc_feature (1)..(147): Xaa is any amino acid
MRNKTRGLNIAIKHLPITAQTPYTFLNSSSTRIVYSNYGETEFASLVLKVADFLCVHLGKRTAADGKVLAEHRNRTPIHIADACNHAIAGEPFAGGFCLVNVQTAFLKRVFVEQGFYPFASAELPFCMTLFNFIGTAAEFGFFAPIV

SEQ ID NO: 17989 - DNA, 618 bp, Unknown
  Obtained from environmental sample
  misc_feature (1)..(618): n is a, c, g, or t
gtgcatttagaagataccgttgccgcacttgaaggaggcaccgaggctattgcgttctcttctggcatggcggcggtttcaacactgatggaactattttctcctggcgaccatatcattacctccgatgacctttatggcggcacctttcgcctttttgagaaagtgtcacaaaagaacggcgtaaaattttcttatgctgccactccaaaagatatggaaaaagaaataactaaatccacaaaagccatattcatagaaacaccctccaacccgatgatgcacgtaatagacatcgctgcggttgctgaaattgctaaaaaacacaatttgatttttattgttgataacacatttttaacaccatattttcaaaaaccattttctttgggcgcagatattattttgcacagcggaacaaaatatttaggcgggcacaatgatactttgtctggatttttggttgtgaaaagcaacgaccttttagaaaaacttaggttcatagcanaaaccaccggaggatgcctttctccttttgatgctttcttaataattcgcggcataaaaacgcttgctattcgcatggaacgcagtcaagaaactgcaaaaaaaatgtga

SEQ ID NO: 17990 - protein, 205 aa, Unknown
  Obtained from environmental sample
  DOMAIN (1)...(205): Cys/Met metabolism PLP-dependent enzyme
  misc_feature (1)..(205): Xaa is any amino acid
MHLEDTVAALEGGTEAIAFSSGMAAVSTLMELFSPGDHIITSDDLYGGTFRLFEKVSQKNGVKFSYAATPKDMEKEITKSTKAIFIETPSNPMMHVIDIAAVAEIAKKHNLIFIVDNTFLTPYFQKPFSLGADIILHSGTKYLGGHNDTLSGFLVVKSNDLLEKLRFIAXTTGGCLSPFDAFLIIRGIKTLAIRMERSQETAKKM

SEQ ID NO: 17991 - DNA, 513 bp, Unknown
  Obtained from environmental sample
  misc_feature (1)..(513): n is a, c, g, or t
gtgttccttgacgagtcgggggcgaagacgaacatgaccaggctgtacgggaggtcgcccaaggggaagcgctgtttctgcaaggcccccgacagccgctgggagcgcgtgacgatgctttcggcgataaggctggacggctcggttgagagcatcgtgtccgaaggcgcgatggacagggccgcattcgacaagtacatagtaggcacgctcgcccccacgctgaggccgggggacatgcttgtcctggacaacctgagcgtccacaagtcccccgccatgcaggaggcggtcgaggcccgcggcgcggaggtcaggttcctgccggcctacagccccgacatgaacccgatagagaagatgtggagcaaggtgaaggccgccctgcgcaggattgaggcgaggacaaacgaggagcttttcgatgcgattggggtggctttggcgacggtcacggcgagcgacgcgaaagggtggttcgagtcatgtggatatatagcatctcaaagttaa

SEQ ID NO: 17992 - protein, 170 aa, Unknown
  Obtained from environmental sample
  misc_feature (1)..(170): Xaa is any amino acid
MFLDESGAKTNMTRLYGRSPKGKRCFCKAPDSRWERVTMLSAIRLDGSVESIVSEGAMDRAAFDKYIVGTLAPTLRPGDMLVLDNLSVHKSPAMQEAVEARGAEVRFLPAYSPDMNPIEKMWSKVKAALRRIEARTNEELFDAIGVALATVTASDAKGWFESCGYIASQS

SEQ ID NO: 17993 - DNA, 882 bp, Unknown
  Obtained from environmental sample
  misc_feature (1)..(882): n is a, c, g, or t
ttgtacgcaagctcagacaagcactgccgggaagtcagggccgttgttgactgtccgctgatccgcagggatttcatatttgaagagtaccaaatcgaagagagcaaaatcttgggtgcggatgcgatctacttgtctgccgcgatgctggaacctgaccgcttggccacactttcgtccctcgccgcttcaaaaaatcttgatgtggtagtcgaggtaaccaacgaggaagacatcgaaacggcgatagaggtcgaggcgcaaatcatctgcgtagttggccgcgacattgaaagttgggaagcctcttggggaaagacgatccagcttctaaaatcgatccccaaaaaatgcctcagaatggccgaagctggcatcacgtccctcaagcaaatcaaagagcttgagtccatgggcgtacacggcgcgataattggagatgcactcttgaacgagttttaccccggcaagagacttggtcagcttcttgcaggccaagagcctgcaaagaaggttatcaaaaaagagccgccgagcgatgaaccaccaaaaggaaaacagagcaaattaactaacactaaaccttcaacctcttcaccttccaaacatcctaagggaaaaaaggagaccccaatgaaccaaatcaaggctgatactcctgcgacagcagaggagctggctgaaaagaaattagctgctcccaagaaagcctcaacccccaagaagccggctgcgaaaaagcctgcggccaagaagaagcccgcagcgaagaagccagccgctaaaaagcctgcagccaaaaagcccgcagcgaagaagccagccgctaagaaggctccagttagaagacgcggccaagaaggctgcgctcggccgatctga

SEQ ID NO: 17994 - protein, 293 aa, Unknown
  Obtained from environmental sample
  DOMAIN (2)...(162): Indole-3-glycerol phosphate synthase
  misc_feature (1)..(293): Xaa is any amino acid
MYASSDKHCREVRAVVDCPLIRRDFIFEEYQIEESKILGADAIYLSAAMLEPDRLATLSSLAASKNLDVVVEVTNEEDIETAIEVEAQIICVVGRDIESWEASWGKTIQLLKSIPKKCLRMAEAGITSLKQIKELESMGVHGAIIGDALLNEFYPGKRLGQLLAGQEPAKKVIKKEPPSDEPPKGKQSKLTNTKPSTSSPSKHPKGKKETPMNQIKADTPATAEELAEKKLAAPKKASTPKKPAAKKPAAKKKPAAKKPAAKKPAAKKPAAKKPAAKKAPVRRRGQEGCARPI

SEQ ID NO: 17995 - DNA, 330 bp, Unknown
  Obtained from environmental sample
  misc_feature (1)..(330): n is a, c, g, or t
ttgatatatcacgcgggagatacctgggttaccccgtctttaatcgaagcgcttaaggtttttgaaactcttaatatagctatgcttccaattaacggcgccgactgggagaggacaaaggaaaattgcatcggaaatatgaatccgctggacgcggtaaaacttgcgcgggcattatctgttgatatggtgtttccttcccatttcgacatgatagcgcataacagcgaaaatccggcgcggttcgttgaagctatgtacgccctttgccccgaaaaacgtttccatgttttcgctttgggggaaaggtttatatacagatacaaataa

SEQ ID NO: 17996 - protein, 109 aa, Unknown
  Obtained from environmental sample
  misc_feature (1)..(109): Xaa is any amino acid
MIYHAGDTWVTPSLIEALKVFETLNIAMLPINGADWERTKENCIGNMNPLDAVKLARALSVDMVFPSHFDMIAHNSENPARFVEAMYALCPEKRFHVFALGERFIYRYK

SEQ ID NO: 17997 - DNA, 324 bp, Unknown
  Obtained from environmental sample
  misc_feature (1)..(324): n is a, c, g, or t
gtgggacttcggcggcacactgacgacatgaaggaatccctggctatgatggctcagggaaagcttaatcctgtttttatgatcacccatattggcggccttgacgcggcggttaaagcgactatagacctggataaaattcccggcggtaaaaagctaatttacacgcataaaaaaatcccgcttaccgccatagacgactttgaaacaactggcaaagccgatcctctcttcgcgaagctggcggaaatttgcggccattacgggaatctctggaatgtagaagcggaaaactaccttttggaaaacgccacggaaatctga

SEQ ID NO: 17998 - protein, 107 aa, Unknown
  Obtained from environmental sample
  misc_feature (1)..(107): Xaa is any amino acid
MGLRRHTDDMKESLAMMAQGKLNPVFMITHIGGLDAAVKATIDLDKIPGGKKLIYTHKKIPLTAIDDFETTGKADPLFAKLAEICGHYGNLWNVEAENYLLENATEI

SEQ ID NO: 17999 - DNA, 780 bp, Unknown
  Obtained from environmental sample
  misc_feature (1)..(780): n is a, c, g, or t
atggatcctccggaaaccgccgctcttgagccggattcgttatcaaaaacccatattttgctttacgatacgcataaagttacttccggcgaaaatatcagcacccttgcgataaatatgggtcttaatcaggggacgattatttccgtaaacaagataacaaatacccgcctgctgcagataggcaaagttttaagaatacccaatcaggacggcattttacacgcggtaaaaagcggggataccctcagttccatcgctgaaaaatataaagtcgaacaggaagatattaaaaccgcgaatgagcttttttccgaaaaaatcaggacaggaacagacctttttgttccgggcgctaaacttgactgggtaagccttcaggaaatcaacggcgatttatttatatggcctttaaacggcgcgattacttccccttacggttacagaagggatcctttcggcagcggccgcatgctgtttcacaccggtcttgacatcaggggaagtacgggaactcccgtcagggcggcaatgtcgggccgtgtcagccagaccggctatgacgccgtctttgggaattatgtgattatcagccaccattccggctaccgcaccttatacggccatttgaacgttatcaggacaaggaacggagcatatgtaggcaccggcgagcgtatcggcgatgtcggaagcacgggccttagcacggggccgcatctgcattttatggtttataaaaacggggttacagttaatccgcgctcgttgattaagtag

SEQ ID NO: 18000 - protein, 259 aa, Unknown
  Obtained from environmental sample
  DOMAIN (25)...(68): LysM domain
  misc_feature (1)..(259): Xaa is any amino acid
MDPPETAALEPDSLSKTHILLYDTHKVTSGENISTLAINMGLNQGTIISVNKITNTRLLQIGKVLRIPNQDGILHAVKSGDTLSSIAEKYKVEQEDIKTANELFSEKIRTGTDLFVPGAKLDWVSLQEINGDLFIWPLNGAITSPYGYRRDPFGSGRMLFHTGLDIRGSTGTPVRAAMSGRVSQTGYDAVFGNYVIISHHSGYRTLYGHLNVIRTRNGAYVGTGERIGDVGSTGLSTGPHLHFMVYKNGVTVNPRSLIK

SEQ ID NO: 18001 - DNA, 864 bp, Unknown
  Obtained from environmental sample
  misc_feature (1)..(864): n is a, c, g, or t
ttgtattcagctgcagttttaccaataaaatcgtacataccaatctggtacgcaatgtggaaagcgtttggattttctgaaatcaaaataagctccgaacttacggaaacccgcacagtgctggacaatttcgcggaatcggttcaaagtttagtcttatgcggaactaacccccataaattgactgtttataatactgatatttcaaatcatttgctttcaaaaaacagtgaatccttaagtcctaacggccctttttgttatatagaaaaatttcctgacgggcctgtattaattaacgggataggctggaaagcgccggattcatggaatcctgttgaacgtccctggtacaaagcggcgcttgccgcggacggcgcaatcgcggaatcggatccttacaaggattccgtaacaggagatattattgtttcttactcccgctgtataaaagaccttaacggaaaccgtttaggcgtagtcgctattgacgtaaaggtaagccaaatcggggaaagagtcgcgaatacatctcttgccaaaggcggtttcggagtattgatcaatcaggatttaacgataataggacatttaaatccggattttgtaggattgaaaatgtacgatccttcagttcctctttcatttttaaccgatgaattagtacgcacaggagtaatctcgggcgccgaatgggttaactggaggggagagcctgtcgtcggttttttcaagaccctttccaacgggtggcgtttaggccttttaacgccgaaaaccctttattacaggccggtatacgaaatggcgtttgtcctgtgtttattgggcaccctgcttgccgcggtgttgattatcgtttaa

SEQ ID NO: 18002 - protein, 287 aa, Unknown
  Obtained from environmental sample
  DOMAIN (131)...(210): Cache domain
  misc_feature (1)..(287): Xaa is any amino acid
MYSAAVLPIKSYIPIWYAMWKAFGFSEIKISSELTETRTVLDNFAESVQSLVLCGTNPHKLTVYNTDISNHLLSKNSESLSPNGPFCYIEKFPDGPVLINGIGWKAPDSWNPVERPWYKAALAADGAIAESDPYKDSVTGDIIVSYSRCIKDLNGNRLGVVAIDVKVSQIGERVANTSLAKGGFGVLINQDLTIIGHLNPDFVGLKMYDPSVPLSFLTDELVRTGVISGAEWVNWRGEPVVGFFKTLSNGWRLGLLTPKTLYYRPVYEMAFVLCLLGTLLAAVLIIV

SEQ ID NO: 18003 - DNA, 465 bp, Unknown
  Obtained from environmental sample
  misc_feature (1)..(465): n is a, c, g, or t
atgaaaccggaaaacattaccaatggaagtgccctaataatcccaaacgccggactttatgaatttggcatactgacttctgttatgcacatggcatggatgcgttatgtttgcggaagacttgaaatgcgttatcaatattcagcttctcttgtgtataataattttccgtggccatcagcaaatgaaaaacaaacaggaattattacagaagttgcacaaacaatattggaagctcgtgcattatttcctgacagcactcttgcggaattgtataatccgtcaaccatgccgcctaaattggtaaaagcccaccaaaaacttgacaaagcagtagaagccgcatacggtcgctcttttaccgatgacagccagcgggtggcgtatctgtttgaacagtaccaaaagttaagcggggaactgtttgttgaagagaaaaagcggggcaaggggaggaaggggtaa

SEQ ID NO: 18004 - protein, 154 aa, Unknown
  Obtained from environmental sample
  misc_feature (1)..(154): Xaa is any amino acid
MKPENITNGSALIIPNAGLYEFGILTSVMHMAWMRYVCGRLEMRYQYSASLVYNNFPWPSANEKQTGIITEVAQTILEARALFPDSTLAELYNPSTMPPKLVKAHQKLDKAVEAAYGRSFTDDSQRVAYLFEQYQKLSGELFVEEKKRGKGRKG

SEQ ID NO: 18005 - DNA, 519 bp, Unknown
  Obtained from environmental sample
  misc_feature (1)..(519): n is a, c, g, or t
atgccggggaatatcagctacctgtttccttcattcctcagaatagattttacccggcccgtcaaccaggtaatagtgtttaatggggagttattgacagtttatttacccgaataccgggcggtgcttaaccaaaatattacgcagagccgccgttctgcttcgggggcatccatggcaagcgcccaaggcctttccctgctcaggcgaaactacgtttcatcttttgtcaccggccccgaaccggtgccgctggacagtaactcacgggaaacggtggtaaagctccggcttgtccgccggaccgcctcagaaggcttccgcgaaatcattctcagcgttgatcccggtaccaggctcatccggcgcatcgaggggcggactattgccgacggcctggtgcggtttgattttaccaacatcaggaccaacctggggatacccgaaatgcggtttatttacgattcgcccgcttcggcgtatgtatacaataatttcctgttcagggattcggattaa

SEQ ID NO: 18006 - protein, 172 aa, Unknown
  Obtained from environmental sample
  misc_feature (1)..(172): Xaa is any amino acid
MPGNISYLFPSFLRIDFTRPVNQVIVFNGELLTVYLPEYRAVLNQNITQSRRSASGASMASAQGLSLLRRNYVSSFVTGPEPVPLDSNSRETVVKLRLVRRTASEGFREIILSVDPGTRLIRRIEGRTIADGLVRFDFTNIRTNLGIPEMRFIYDSPASAYVYNNFLFRDSD

SEQ ID NO: 18007 - DNA, 816 bp, Unknown
  Obtained from environmental sample
  misc_feature (1)..(816): n is a, c, g, or t
atgacagattggccgagacggtatacatggacagccgctacggaaagcgcgttatcggatgaatttgttcaggtaatcgcctttgggggcggcaagtttgtcgccggcggagataacagcagaatgtcatattcatccgacggtataacatggacagccgtagagagcgtcccgttcggaagaagaaccgatgatgtcagaacaataacctatggtaacggcaaatttcttgccggaggaccatccggccaaatattatcttcctccgacggtataacgtggacactcttaacggaaaacgcactaggcacatacgtcgtctccgcaatcgcttttggcaacggtaagtttgtcgccgggggatcgggcggcagaacggcaacttcaactgacggcggcttaacatggactaccccagtcaaagtagacgtagaagacatggacggaatcttagcaatcgcttacggcaacggcaagtttgtggtaggaggatattgcggcaaaatggcgtattcatctgacggaataacatggacagccgtaacagacagtcatttcggcgaaaccagtatttttttcagaagcagtatcgacgcaatcgcctttggcggcggcaggtttgtagcgggaggatcaagcggcaagatgataacttcatctgacggaataacatggacagccttgccggacgacacctttggtgtaagcgacaacgcccagatcgaatcaatagcctatggcaaaggcaagtttgtcgccgtgngatatagcgatatgttagagcttaccggtaaaatggtgtgtttcccatactaa

SEQ ID NO: 18008 - protein, 271 aa, Unknown
  Obtained from environmental sample
  misc_feature (1)..(271): Xaa is any amino acid
MTDWPRRYTWTAATESALSDEFVQVIAFGGGKFVAGGDNSRMSYSSDGITWTAVESVPFGRRTDDVRTITYGNGKFLAGGPSGQILSSSDGITWTLLTENALGTYVVSAIAFGNGKFVAGGSGGRTATSTDGGLTWTTPVKVDVEDMDGILAIAYGNGKFVVGGYCGKMAYSSDGITWTAVTDSHFGETSIFFRSSIDAIAFGGGRFVAGGSSGKMITSSDGITWTALPDDTFGVSDNAQIESIAYGKGKFVAVXYSDMLELTGKMVCFPY

SEQ ID NO: 18009 - DNA, 609 bp, Unknown
  Obtained from environmental sample
  misc_feature (1)..(609): n is a, c, g, or t
atgaaaagagaatataaaagtgtcgccgagatttccggcccgctgattttagtagagggcgtggagcaagccggttatgaggaattagtcgaggtcaaaacatcctccggcgagttgcgccgcggtaaagttttggaagtacacaaagactgggcgctggtgcagatgttcgaggggacgagcggcctggatcataattccagcgtgaggttcttggggcgcggcgtggaactgccggtctcgccggaaatgctcggccgtgtatacagcggttccgggcgggcgcgcgacggcggcccggagattatcgccgagaaaaatctggatattaacggcctggcgattaaccccacggcgcgcgactatcccaatgattttattcaaaccggcatctcgacaatcgacggtttaaacacgctggtgcgcgggcagaaactgccgattttttccggctccggtttgccgcacgcgcggctggcggcgcagattgcccggcaggcgcaggtgctgggcagtaagggagatttctccgtggtgttcggcgcgatgngcatcacttacgaagaagcggaattttttatgaacgatttccgcaaaccggagcgatag

SEQ ID NO: 18010 - protein, 202 aa, Unknown
  Obtained from environmental sample
  DOMAIN (8)...(73): ATP synthase alpha/beta family, beta-barrel domain
  misc_feature (1)..(202): Xaa is any amino acid
MKREYKSVAEISGPLILVEGVEQAGYEELVEVKTSSGELRRGKVLEVHKDWALVQMFEGTSGLDHNSSVRFLGRGVELPVSPEMLGRVYSGSGRARDGGPEIIAEKNLDINGLAINPTARDYPNDFIQTGISTIDGLNTLVRGQKLPIFSGSGLPHARLAAQIARQAQVLGSKGDFSVVFGAMXITYEEAEFFMNDFRKPER

SEQ ID NO: 18011 - DNA, 675 bp, Unknown
  Obtained from environmental sample
  misc_feature (1)..(675): n is a, c, g, or t
gtgcagcgcgatattttttcgtggatatgggcttccggcggtgatttctggcaggaaggggacagtccggtattaaacgtaaaaaccatatcaggcgatattacatttttcggcaaattatacaatgacaagctgcttgcgtataaaatttttgaaacaacaggagagcagcggctggaagactttgccgacggaaaaatcgccatgatgattgcctatacaagcgttattccgtttctgagggaaagaatgggagataactcatttggagtaacaaatatacccggctccggttccgcggggaaatacaataccggtatttcaagcatatacgcgggcattaatgtaaattgtgagcatcctgatgaagcattggattttcttgcgtttcttgaagaattaagacctcttttttgtgaaatgctgaaagcggttcccggcgttgtttcagatattataaccgaaagttatatcaggaacgatccgttttattccaaatcgcaggatatttttgtatcttcagcaattgttcagggtttttccgggaaaccgtccgccgaagaatatgaaaatgcttttttggaagaattgcagatatttttaaggagcagctgtaaagccgaggatacagtaaccgctattcaaaccgttgggatgaaattttttatcgtataa

SEQ ID NO: 18012 - protein, 224 aa, Unknown
  Obtained from environmental sample
  misc_feature (1)..(224): Xaa is any amino acid
MQRDIFSWIWASGGDFWQEGDSPVLNVKTISGDITFFGKLYNDKLLAYKIFETTGEQRLEDFADGKIAMMIAYTSVIPFLRERMGDNSFGVTNIPGSGSAGKYNTGISSIYAGINVNCEHPDEALDFLAFLEELRPLFCEMLKAVPGVVSDIITESYIRNDPFYSKSQDIFVSSAIVQGFSGKPSAEEYENAFLEELQIFLRSSCKAEDTVTAIQTVGMKFFIV

SEQ ID NO: 18013 - DNA, 711 bp, Unknown
  Obtained from environmental sample
  misc_feature (1)..(711): n is a, c, g, or t
atggcccgaatatgttgctatcccaacagtgtaactaccattggagtagaggcatttgccgaaaaccaacttacaaagataactattggtaaaaacttgtccatcattggtgatggggcgtttaataaaaaccaactcacaagcgttattttacctgacagtttaacttatattgggaatggggcattttttgaaaaccaactcaccgatattatcatacctaaaggcgtaactaacattggcgtggaggcatttgcggaaaatccgctgacaaaacttaccgtcgcttcagagaataccgcatttatcaccaggggcttttatctattgagcaaagatgaacaagaattagtcttttattttgggggcgaagaaaaagttaccatacctgacggcgtaccgatcatttgtggcggagcattttctgcaaaacaactcaccgatgttactattcctgatggcgtaactactattggggatagggcatttcggaaaaacaatctgaccatgattacatttcccgacagcgtgaccatgataggagatggggcgttttatgaaaaccaaattaccagtgttaccattggcgcaggcgtgaacataacaagagcgtcttttaacgattataatttttactatacttacgtcaattatggacgcagggcgggaacttacattcttcgcaacggttattggtccagacaacagtaa

SEQ ID NO: 18014 - protein, 236 aa, Unknown
  Obtained from environmental sample
  misc_feature (1)..(236): Xaa is any amino acid
MARICCYPNSVTTIGVEAFAENQLTKITIGKNLSIIGDGAFNKNQLTSVILPDSLTYIGNGAFFENQLTDIIIPKGVTNIGVEAFAENPLTKLTVASENTAFITRGFYLLSKDEQELVFYFGGEEKVTIPDGVPIICGGAFSAKQLTDVTIPDGVTTIGDRAFRKNNLTMITFPDSVTMIGDGAFYENQITSVTIGAGVNITRASFNDYNFYYTYVNYGRRAGTYILRNGYWSRQQ

SEQ ID NO: 18015 - DNA, 405 bp, Unknown
  Obtained from environmental sample
  misc_feature (1)..(405): n is a, c, g, or t
gtggaactggccaaaaagtataaactgcccagatcatcccaagacataataatgcagcaccacggcgacagctccgtctccttcttctacgaaaaggccttggagcaagatccccacaaacaagtccaggagaaggacttccgctaccccggccccataccccaaacccgcgaggcggccatcataatgctggccgactcggtagaggccgcgtcaagaagtttggcaaccagttcgcccaaactgcttcgtgaactggtcaaaaagataataagggacaaattcctggcgtctcagctagacggctgcaatttgacattgcgcgatctaaacgacattacagaagggttcatgcctatattacaagggatattccactctagaatcgagtatcctaataagtga

SEQ ID NO: 18016 - protein, 134 aa, Unknown
  Obtained from environmental sample
  misc_feature (1)..(134): Xaa is any amino acid
MELAKKYKLPRSSQDIIMQHHGDSSVSFFYEKALEQDPHKQVQEKDFRYPGPIPQTREAAIIMLADSVEAASRSLATSSPKLLRELVKKIIRDKFLASQLDGCNLTLRDLNDITEGFMPILQGIFHSRIEYPNK

SEQ ID NO: 18017 - DNA, 420 bp, Unknown
  Obtained from environmental sample
  misc_feature (1)..(420): n is a, c, g, or t
atggcctcggtacacgactataaacgcctggaaaataaactaattcataagataaaaaacgcggctatttccgccggtgtttttataggcggtgtttttaaggctataggacgtttcctctccagacgttacacccttgtttttgtcccccattcagaaaaaaaagtttacaatcttcacgttaccatattgtcaataatctgttttttctttgtcttattcggcattatcggaacatttttctggtacggggcttcgtacagcagcaccatgtacgcgatggcgagtaacgacgtgcgttatcaaaacgtgcaggcttcgctggatcagttacgcgacgagacggctctgcttttaagggaggcgcgtaattttgaaggcgcgctttccggcgttctttcggcctgggtaaaaatgtaa

SEQ ID NO: 18018 - protein, 139 aa, Unknown
  Obtained from environmental sample
  misc_feature (1)..(139): Xaa is any amino acid
MASVHDYKRLENKLIHKIKNAAISAGVFIGGVFKAIGRFLSRRYTLVFVPHSEKKVYNLHVTILSIICFFFVLFGIIGTFFWYGASYSSTMYAMASNDVRYQNVQASLDQLRDETALLLREARNFEGALSGVLSAWVKM

SEQ ID NO: 18019 - DNA, 768 bp, Unknown
  Obtained from environmental sample
  misc_feature (1)..(768): n is a, c, g, or t
atggcggcggttctcgcgaaaggaaaaacaattttgactaacgccgcgagcgaaccgcatgtgcaggatttgtgcaagatgttagtcgcaatgggcgctcaaattgaagggatcggctccaacatagttacaattaccggagtggataaactttcaggctgtgattttgaaatcggcgctgactttatggaagtgggctcctttatcggtcttgccgccgtaaccggcggagacctgcacatagaaggcgctcatcctcaggatatgcgccccgcaaaaatagcgttcgggaaattgggcattgtttgggcgcatgagggaacggttatccatgtgccgaaaaatcagagtatggaagtaaaccatgacctcggcggtatgattccaaaaatagacgacgccccttggcccggcttcccgcccgatcttatcagcataataatcgtagtggcaacacagataaagggcactgtattggttcacgaaaaaatgtatgagtcccgaatgttctttgtggataaacttatcggcatgggagcgagaatcgtgttatgcgatccgcaccgcgccgttatttcaggaccggcaaaacttcacggttcggaattaataagccccgacgtgcgtgcgggaatgtccatgctgattgccgctatgtgcgccgaaangaagagcgttatacgcaatgtttacccagatgagcgcggttatgaacagcttgcggcaagactttccagccttggcgcgaatatcgtaaggaatgattga

SEQ ID NO: 18020 - protein, 255 aa, Unknown
  Obtained from environmental sample
  DOMAIN (1)...(244): EPSP synthase (3-phosphoshikimate 1-carboxyvinyltransferase)
  misc_feature (1)..(255): Xaa is any amino acid
MAAVLAKGKTILTNAASEPHVQDLCKMLVAMGAQIEGIGSNIVTITGVDKLSGCDFEIGADFMEVGSFIGLAAVTGGDLHIEGAHPQDMRPAKIAFGKLGIVWAHEGTVIHVPKNQSMEVNHDLGGMIPKIDDAPWPGFPPDLISIIIVVATQIKGTVLVHEKMYESRMFFVDKLIGMGARIVLCDPHRAVISGPAKLHGSELISPDVRAGMSMLIAAMCAEXKSVIRNVYPDERGYEQLAARLSSLGANIVRND

SEQ ID NO: 18021 - DNA, 888 bp, Unknown
  Obtained from environmental sample
  misc_feature (1)..(888): n is a, c, g, or t
atgtacagattggccgaggtcgtttttgaatttttggaagcggtagagccgcgttatgtgcaacttcttaaaactcccgattttccggcaatttccacatttcatgacgcaatcaccggactgttaaagcagtatttctataccggaggaatgcccggggctgtgagaaaatattgcgaaacgcgcgattttggcgaagtgcgcgaagtgcaaaaaatgattcttgattcttactatgccgattttgcgaaacatattccgtcgtcatttatcgcgcggacgcgggatatttgggattcagttcccacacaacttggcagggaaaacaaacgttttctgtattccggtatgaaagaaggttcccgcgggcgcgattatgaagcggctcttaactggcttacaaataccaatctgatctataaactgtatagagtaagtttaccgaatatgccattgataggatataaagagcctgcgatctttaaactttacatgaacgatgtaggacttctttccgcgcgagccggacttgatattaaactctacattgacgacgacgacagaactttttcacactacaagggaggacttgcggaacaatttgttttgcaggaacttatcacagcaaataataaactgcctatttattactgggctgccgaaaaaaataccgccgaagttgaatttgtcgcacaatacaatgataaaatcatcccaatcgaagtaaagtcgggcaagaatgttaaatctgaaagtttaaatgtgtacagaaaagaatatactcccgtttgcgccattcgtacttctctaaaaaattacggcgttatagacgggttgtattccatacctctttatatgataggcagtttatccgctatccttcaataa

SEQ ID NO: 18022 - protein, 295 aa, Unknown
  Obtained from environmental sample
  misc_feature (1)..(295): Xaa is any amino acid
MYRLAEVVFEFLEAVEPRYVQLLKTPDFPAISTFHDAITGLLKQYFYTGGMPGAVRKYCETRDFGEVREVQKMILDSYYADFAKHIPSSFIARTRDIWDSVPTQLGRENKRFLYSGMKEGSRGRDYEAALNWLTNTNLIYKLYRVSLPNMPLIGYKEPAIFKLYMNDVGLLSARAGLDIKLYIDDDDRTFSHYKGGLAEQFVLQELITANNKLPIYYWAAEKNTAEVEFVAQYNDKIIPIEVKSGKNVKSESLNVYRKEYTPVCAIRTSLKNYGVIDGLYSIPLYMIGSLSAILQ

SEQ ID NO: 18023 - DNA, 927 bp, Unknown
  Obtained from environmental sample
  misc_feature (1)..(927): n is a, c, g, or t
atgcgaggtgcgagccgcgggctgctcggcagaatcgcgcgcaacgacctcacggtggacgtcaaagtcctttcggacgaagatgtgttgggcaattccctgaagaaaatgacggacaacctcaacagtatgttcgaagaaattaacggcgtggcccggagtgtcgcggaaggctctaggcaggtcgcggaaggctcgcagctcctcgcgcagggctctacggagcaagcctcctccattgagcagctctcagcttccatctccgaggttgcgcacaaaaccaaggacaacgccggtatggctgagcgagccgccgaactggctggcaacattatgcataacgccgaaacaggcagccaccatatggatgagctgatggctgctgtgaatgagattaatactgccagcaaaaatatcaacaaagtcatcaaggtcattgacgacctagctttccagactaacatattgtcgctgaacgcgtccgtcgaagcggcgcgcgcggggcaggcaggcaaagggttcgcggttgtcgcggaagaagtccgctcgctcgccgcgaagagcgctcaggcggcgaaagacaccgcaaacctgattgaaaactcgattgaaaaagccgaacagggtacgcacattgctgaggaaacattcgaaagcctgagcgaaattgtggagggcatcgacgaagagaaccagcttgtctccaaaattgcgcacgcctcggaagaacaggcggccggcatagagcagattaacatcggcattgaccaagtggcgcaggtcgtccagcagaatagcgcaacggctcagcagagcgccgccgccagtgaggaaatgaatagccagtcgtcaatgcttganngagtggttgatcagttcgagctcaaaaacgtgcgggatccgaccccacgccatagccagcactaa

SEQ ID NO: 18024 - protein, 308 aa, Unknown
  Obtained from environmental sample
  DOMAIN (74)...(296): Methyl-accepting chemotaxis protein (MCP) signaling domain
  misc_feature (1)..(308): Xaa is any amino acid
MRGASRGLLGRIARNDLTVDVKVLSDEDVLGNSLKKMTDNLNSMFEEINGVARSVAEGSRQVAEGSQLLAQGSTEQASSIEQLSASISEVAHKTKDNAGMAERAAELAGNIMHNAETGSHHMDELMAAVNEINTASKNINKVIKVIDDLAFQTNILSLNASVEAARAGQAGKGFAVVAEEVRSLAAKSAQAAKDTANLIENSIEKAEQGTHIAEETFESLSEIVEGIDEENQLVSKIAHASEEQAAGIEQINIGIDQVAQVVQQNSATAQQSAAASEEMNSQSSMLXXVVDQFELKNVRDPTPRHSQH

SEQ ID NO: 18025 - DNA, 636 bp, Unknown
  Obtained from environmental sample
  misc_feature (1)..(636): n is a, c, g, or t
atgcggagtttcgtaacaccgctggctggcggcatgcttaccaatttcgttacaattaaaaaatcgcttctgcggcttaaaaagcttgaaaaaatggaagtggacggaactttcgaaaaccttaccaaaaaggaaatcgcgtcgcttggcaaagaaagaatcaaactgcagaaaaacctcggcggcatcaaggaattaaaagaactgccgggcattcttttcatcatcgacacccgaaaagaagcaattgcggttgccgaagcgcaaagacagggaatccctattgtcgcggtggtagacaccaactgtaacccggacggcatagactaccccatccccggcaatgacgacgcaatcagagcgattaccctctttacccagataatcgcgaacgcggtcgtggaagcggacaacgaagtcggccttaagataatcgaaaccttaggcgatgaagacgaagatatggaaggacttttaaccgacgcttccaaaaaagaagaagacaaggaaattgatatcgaaaaatacacaaccgaagaggcataccttgcggcaaaggccgatgaacaagtacccgaagaagttgacgacaatcatatccatgtcgatgttgataaagtttataatgatgaataa

SEQ ID NO: 18026 - protein, 211 aa, Unknown
  Obtained from environmental sample
  DOMAIN (2)...(137): Ribosomal protein S2
  misc_feature (1)..(211): Xaa is any amino acid
MRSFVTPLAGGMLTNFVTIKKSLLRLKKLEKMEVDGTFENLTKKEIASLGKERIKLQKNLGGIKELKELPGILFIIDTRKEAIAVAEAQRQGIPIVAVVDTNCNPDGIDYPIPGNDDAIRAITLFTQIIANAVVEADNEVGLKIIETLGDEDEDMEGLLTDASKKEEDKEIDIEKYTTEEAYLAAKADEQVPEEVDDNHIHVDVDKVYNDE

SEQ ID NO: 18027 - DNA, 468 bp, Unknown
  Obtained from environmental sample
  misc_feature (1)..(468): n is a, c, g, or t
atgggcgtcatcgaattagcccttgcaccgctggcccagcgcaaagacgacattctcccacttttccacaaccatctcatagacatctgcaaaaaagcagggcgggcggtgccaactgttgaccgccaaattgaaaaagagctgttggccaaagaatggccggggaatgtccttgaattagtttggacagccgcagaggcggctaggacatgtaccggtagtgccttaaaagaactgccttcgcagttctcccaaatgagttcgtccatgctgttgccgaagccaaaaaatggcaagctgaccaatatgcttcaagaaataagccacagcgcagaaaagcagcttttgggggaggcccttttggaagcaaatggcgacccctcagtggcggccaaaaatttggggctggccacaaaaaactatgttcataaattgagggattacggcatatccttaaagaatgactga

SEQ ID NO: 18028 - protein, 155 aa, Unknown
  Obtained from environmental sample
  misc_feature (1)..(155): Xaa is any amino acid
MGVIELALAPLAQRKDDILPLFHNHLIDICKKAGRAVPTVDRQIEKELLAKEWPGNVLELVWTAAEAARTCTGSALKELPSQFSQMSSSMLLPKPKNGKLTNMLQEISHSAEKQLLGEALLEANGDPSVAAKNLGLATKNYVHKLRDYGISLKND

SEQ ID NO: 18029 - DNA, 891 bp, Unknown
  Obtained from environmental sample
  misc_feature (1)..(891): n is a, c, g, or t
ttgcccaaaggcgaactggacagggccatagccgacttcactcagaccattgccttaaacccaaactatgcgaatgcctataacaaccgcggaaacgcgtatgctactaaaggcgaactagacagggcaattactgactttaatcaggctattaccttaaaccctaagttagagcaggtctattccaaccgtggaagtgcttatgccacaaaaggcgaactggacagggccattgctgacttcacccaggccattgccttaaacccaaactatgcgaatgcctataacaaccgcggatctgtgtattatgataaaggcgaactggacagggcaatcgctgactttaatcgggctgctattttcgcaaacgagagtgccaatatcctcgacatctttttccaatcgtgggaattcgcgggggctgtctacaaatactatcccttcctcggcactgccctggacgcagacacctttcgccggcaatttgccaacgttgcccgcgaggctctttcattaagcatcgcgaaggctgaaaaagcccgcgccggcctgggcagccggggcgcggccctcatggcaggcctggtctaccagtactacgcctccctggactttgagtctcgcttcggttccgtagaacgcgccttcgccgtttccgaaggacttcgcagccggggctttctggagcagatgggtacggaggccgccctgcgcctgcccggtattgcgccagcagacgcggtgcgcgtgcgggaacttaccgaaaccataggcttgtttcaggaaatgctgggtaaactcaacccacagacccagcaagatcgctacgccgaggcgggccttgccctgacccgtgcgnaagaggagcttgctagtctggacagcgcataa

SEQ ID NO: 18030 - protein, 296 aa, Unknown
  Obtained from environmental sample
  DOMAIN (92)...(125): Tetratricopeptide repeat
  misc_feature (1)..(296): Xaa is any amino acid
MPKGELDRAIADFTQTIALNPNYANAYNNRGNAYATKGELDRAITDFNQAITLNPKLEQVYSNRGSAYATKGELDRAIADFTQAIALNPNYANAYNNRGSVYYDKGELDRAIADFNRAAIFANESANILDIFFQSWEFAGAVYKYYPFLGTALDADTFRRQFANVAREALSLSIAKAEKARAGLGSRGAALMAGLVYQYYASLDFESRFGSVERAFAVSEGLRSRGFLEQMGTEAALRLPGIAPADAVRVRELTETIGLFQEMLGKLNPQTQQDRYAEAGLALTRAXEELASLDSA

SEQ ID NO: 18031 - DNA, 447 bp, Unknown
  Obtained from environmental sample
  misc_feature (1)..(447): n is a, c, g, or t
atgaccattccggtcaaaggatgtgattttatgaaagggaacgatttatcttctcaacttcccaatgggaattttttcccattttgggatgatcaaacggaatataaagattttctttatgttgatggcagtagcagctcggcggatgatgccaatccgggtacaaaagacaagccttttaaaaccataaacgccgccgcacaaatcgcgaagcccggaaccaaagtaataataaatggcggcgaatacagggaaactgtaaaacccgcacggggcggcgacaatgaaaaagcgatgatatgctacgaagcggccgagggagaaaaagttgtcattaangcatccgttgtcgtgacggattttaacccagcaccgactggtgcttcagggaacggtttttcggcgagtctgctcccaaggtatgacggtttgggaaatcgacattaa

SEQ ID NO: 18032 - protein, 148 aa, Unknown
  Obtained from environmental sample
  misc_feature (1)..(148): Xaa is any amino acid
MTIPVKGCDFMKGNDLSSQLPNGNFFPFWDDQTEYKDFLYVDGSSSSADDANPGTKDKPFKTINAAAQIAKPGTKVIINGGEYRETVKPARGGDNEKAMICYEAAEGEKVVIXASVVVTDFNPAPTGASGNGFSASLLPRYDGLGNRH

SEQ ID NO: 18033 - DNA, 672 bp, Unknown
  Obtained from environmental sample
  misc_feature (1)..(672): n is a, c, g, or t
ttgagtatatcctctttacaaaaagctcgttattcttacaaacctaaattacccgccatcttatccggctctatcaatgatgtttccgtaagtttaggcgcgcctacagaagcaatctcggacaaagaaaaaattcgcgaaatttttaaaaatacatacggaaaacctatcgctacttttgcaaaaggaaaaaacgataatattaaccatgagttgaaagtcggcgtaatcctttcaggcggacaggctcccggcggtcacaatgttatcgccggtttgttcgacggactgaaaaaaggcaacccaaactctaccctctacggcttcatgggcggaccaagcggtcttatcgacaataaaacaattatcctcacgcaagaaattatcgacgaataccgtaataccggcgggtttgacataatcggatcgggacggacaaaaattgaaactaaggaacaatttgcggcttctttggaaacggcaaaaaaattaaaacttgacgctgttgtagtaatcggcggcgatgactccaatacaaacgccgcgttgttagctgaatattttgtacagaacggagcggccactcatgtaatcggctgtccgaaaacaatagacggagatttaaaaaacgagtatatcgaaacttcatttggttttgataccgccctgtaa

SEQ ID NO: 18034 - protein, 223 aa, Unknown
  Obtained from environmental sample
  misc_feature (1)..(223): Xaa is any amino acid
MSISSLQKARYSYKPKLPAILSGSINDVSVSLGAPTEAISDKEKIREIFKNTYGKPIATFAKGKNDNINHELKVGVILSGGQAPGGHNVIAGLFDGLKKGNPNSTLYGFMGGPSGLIDNKTIILTQEIIDEYRNTGGFDIIGSGRTKIETKEQFAASLETAKKLKLDAVVVIGGDDSNTNAALLAEYFVQNGAATHVIGCPKTIDGDLKNEYIETSFGFDTAL

SEQ ID NO: 18035 - DNA, 627 bp, Unknown
  Obtained from environmental sample
  misc_feature (1)..(627): n is a, c, g, or t
atgctgttttcgtatgaagacagaaatatngtaaaggagttgaaaaatgaaaaaactcttgtaattttttgcctggcgcgggccgttttaatggtaacggcctgcccatcatctcccgccgccgctcccgcggcngtcgttccggcccctgtcgccggcccgaccaacacgccggaatggctgaatgattttccccctgaagacgctctttggggtataggaaccgccaaacagtcttcccccaccatgtccatgacaaccgcggaagcccgcgcgagggttgccatagcccgccagcttagcacaaaagtacaggccatgttcacggattataaccttgacgcgggaaatgtcaggaatcaggctaacgcctctttacaggaagatgtcagccggcagatcaccaatatggacgtttccggcgcgcggcccatcaaacgctggcaagcccctgacggcacctggtggtatcttgtcgaattcaagaagtccgacgcaaagaaagcggtagcctccatactgggtaacgaggaagcggcttttgcccagttcaaagcaaagcaggcgctcgacattctggacgcccagcttgcgaaacaggaaaaaccggtgcaggttgacaactaa

SEQ ID NO: 18036 - protein, 208 aa, Unknown
  Obtained from environmental sample
  misc_feature (1)..(208): Xaa is any amino acid
MLFSYEDRNXVKELKNEKTLVIFCLARAVLMVTACPSSPAAAPAAVVPAPVAGPTNTPEWLNDFPPEDALWGIGTAKQSSPTMSMTTAEARARVAIARQLSTKVQAMFTDYNLDAGNVRNQANASLQEDVSRQITNMDVSGARPIKRWQAPDGTWWYLVEFKKSDAKKAVASILGNEEAAFAQFKAKQALDILDAQLAKQEKPVQVDN

SEQ ID NO: 18037 - DNA, 519 bp, Unknown
  Obtained from environmental sample
  misc_feature (1)..(519): n is a, c, g, or t
gtgcaaagggcgaaagacataaagacaatagaggaagcgcgccaaagtaataagcaagacccgganatcgccgcgctcctaaataaaatccagggcatacaaggcagtgccaatataagcctttcggaaaccggcataggcagcgcgatttttgctcgcaagcccggcgacggttccgcccgcgaacaggccgcttcctgccagcgcgtgttgggcgcctctgcgaatttcgccctggaatacgccacaaaacgctacagatcaaacctcataaactggggaatactgccctttattatcaccgatgaaaaagctctcggccttaacatctggattcttcttccaaacatacaaaaacaggtgcgtgaaaaagccctgacgctcaaaggttatgtgttaggcgataaaccatctgaaataaccgttacgttaggcgatcttaccgatacggagcggcagatactgctggacggctgtttgattaaccactacaaagagcaaacagcaggtagcaaatag

SEQ ID NO: 18038 - protein, 172 aa, Unknown
  Obtained from environmental sample
  misc_feature (1)..(172): Xaa is any amino acid
MQRAKDIKTIEEARQSNKQDPXIAALLNKIQGIQGSANISLSETGIGSAIFARKPGDGSAREQAASCQRVLGASANFALEYATKRYRSNLINWGILPFIITDEKALGLNIWILLPNIQKQVREKALTLKGYVLGDKPSEITVTLGDLTDTERQILLDGCLINHYKEQTAGSK

SEQ ID NO: 18039 - DNA, 804 bp, Unknown
  Obtained from environmental sample
  misc_feature (1)..(804): n is a, c, g, or t
gtggaagaccggaacggacgggtggtgctggatgtagaacgggatctgcgcctgcaacagcggcacgcgggaaacgcccaggtaatcagcccgcaaaacgcctatataatgagcagaattcttgagaagaccgtagaagagggaagccttgccaacggcgcgggatggggggccaaatttaccttcaaagacgaaaacggaaaatcgttcaggatgccggtagccggtaaaacgggaaccccccaaaactggtcggacgcgtgggcggtgggctacagttcctactataccacggcggtgtggtttggttttgacaaaccgggcaactcactgggcgtagagcttaccggttccacgctggcaggtccggtttggggtagctatatgcgggaaattcatcaaggacttgcccgccgggattttgtccggcctgcttccggaatcattgacgtgactgtctgcgccaagtcaggattgcttaaaaccccctcctgtaacgagggcgaggttaccctgcctttcttggtgggaactcaacccacgcaggcttgcgaccggcacggcagcgggtcaggatccaccatcgcaatcaacaccatgcgctacagtacgctcggaatggatgataatgtgctgctcagctccctgaaaatgcccagtttaccgacggacctcttccccgatgttccgtccacccgtaatcaaaacaaccggaacaataattccaataaccgcagaaacacccaatccggccgcaattccgcttcagccaaccggctcnaagtcgctttcatggtcttttaa

SEQ ID NO: 18040 - protein, 267 aa, Unknown
  Obtained from environmental sample
  misc_feature (1)..(267): Xaa is any amino acid
MEDRNGRVVLDVERDLRLQQRHAGNAQVISPQNAYIMSRILEKTVEEGSLANGAGWGAKFTFKDENGKSFRMPVAGKTGTPQNWSDAWAVGYSSYYTTAVWFGFDKPGNSLGVELTGSTLAGPVWGSYMREIHQGLARRDFVRPASGIIDVTVCAKSGLLKTPSCNEGEVTLPFLVGTQPTQACDRHGSGSGSTIAINTMRYSTLGMDDNVLLSSLKMPSLPTDLFPDVPSTRNQNNRNNNSNNRRNTQSGRNSASANRLXVAFMVF

SEQ ID NO: 18041 - DNA, 822 bp, Unknown
  Obtained from environmental sample
  misc_feature (1)..(822): n is a, c, g, or t
ttggatttcggcgcggggatcgcggtgaacgcgctcggttacgcgcatccggcgctacttaaggaattgggcgctcaggggggcaggataatccacacgtcaaacctttattataacgagccgcagattgaattggcggcgaagctggttaagcacagtttcgccacgaaagtttttctatgcaacagcgggacggaggcgaacgaggcggcgataaaattcgcgcggaagcgcgggaccaaggcttcggcgcagaagtttcacgtgctctccttctccgatggttttcacgggagaacttacggcgcgttgagcgcgaccgctcaaccgaagtttcacgtgggcgtcgggccgcttcccgacggttttcactacgcccccttcaacgacattcagtacgccaaggccacgcttgacaaccacgacttcgcggcgatcatagtggagccgttgcagggagagggcggggtcaacgcggcaagcgcggagtttttgcgctttttgagggaatacgccacggaacacgctatttctcttatctttgacgagatacaatgcggaatgggcaggacgggcacgctgtggtgccacgagcaagccggcgtaacccccgacatcatgacattggcaaaacccttaggcggcggcctgccattgggagctgtgctatgtatagacgaggtagcctcctgcatctcccccggagaccacggaacgaccttcggcggaaatccggtggcctgcgccttgngttcaaaggtcattgacatagtcagcgacaagaaatcttggtcaaagtacangaaaacggcgattatctga

SEQ ID NO: 18042 - protein, 273 aa, Unknown
  Obtained from environmental sample
  DOMAIN (1)...(269): Aminotransferase class-III
  misc_feature (1)..(273): Xaa is any amino acid
MDFGAGIAVNALGYAHPALLKELGAQGGRIIHTSNLYYNEPQIELAAKLVKHSFATKVFLCNSGTEANEAAIKFARKRGTKASAQKFHVLSFSDGFHGRTYGALSATAQPKFHVGVGPLPDGFHYAPFNDIQYAKATLDNHDFAAIIVEPLQGEGGVNAASAEFLRFLREYATEHAISLIFDEIQCGMGRTGTLWCHEQAGVTPDIMTLAKPLGGGLPLGAVLCIDEVASCISPGDHGTTFGGNPVACALXSKVIDIVSDKKSWSKYXKTAII

SEQ ID NO: 18043 - DNA, 390 bp, Unknown
  Obtained from environmental sample
  misc_feature (1)..(390): n is a, c, g, or t
ttgtcgctgactatgtcaatgacctttgaacncaaggcgcaggccaccggatttccgccgaaggtcgttccgtggtctccgggggagatgcaggaggctacctcgtctatacatagcacagctcccaatggcaggccgccgcctaagggttttgccaatgtcatgatgtcgggggttacgccggcttgctcgtggcaccacagcgtgcccgtcctgcccattccgcattgtatctcgtcaaagataagagaaatagcgtgttccgtggcgtattccctcaaaaagcgcaaaaactccgcgcttgccgcgttgaccccgccctctccctgcaacggctccactatgatcgccgcgaagtcgtggttgtcaagcgtggccttggcgtactga

SEQ ID NO: 18044 - protein, 129 aa, Unknown
  Obtained from environmental sample
  misc_feature (1)..(129): Xaa is any amino acid
MSLTMSMTFEXKAQATGFPPKVVPWSPGEMQEATSSIHSTAPNGRPPPKGFANVMMSGVTPACSWHHSVPVLPIPHCISSKIREIACSVAYSLKKRKNSALAALTPPSPCNGSTMIAAKSWLSSVALAY

SEQ ID NO: 18045 - DNA, 846 bp, Unknown
  Obtained from environmental sample
  misc_feature (1)..(846): n is a, c, g, or t
atgccggaacggaagataagggttcttgaactcgcncgcgccggcaagtggggcctggacgggagcgagatcacaaaacaggacatcgcggaactggcggagacaatcgccggcaaacgcccggtggtcatcggccacaacgttaccgaccgcgcccctaagttcggcgacgtgctggactgctggccgtccgcagacggcggcgcgctgatcggcccggttatgtttacggaatcgggaaacaaactctacgaggggaattactacgacggctggtcaatctccatgcccaggcgggagtcggacggcaagcgggtgctgcaccatcttgcgattctcggcgcggttccgcctaagatccccggccttgaggaactcgcgcaggtaacggtgaacttcggcgaagaagccgcgaaagacaggtatcaattttcgggagcgattccggagaaggaggataacggtactatgacagacgaagagaaaaaggctttggccgaaaaggacgcgaagattgcggaacttgaagcgcagaacaaagccttgcaggagcaggccgccaagcccgccccggcagaaacgccgcccgcgcctgaaaagccgccggcggaaacggccgccggcaacgccgcgggcgccgccacaggcggagccgaatttgccgacgtgcagaagcagttaggcgaaattaaggcggagcggcggagggaacggctggaaggcttcgggcgcgacgtggagggcaggctccccgcgggcgtggccgcgaaggctaaggctttggcggcgcaggttgaggccgtcggggcattcgattttccgacacgggaaggccacccgcaataa

SEQ ID NO: 18046 - protein, 281 aa, Unknown
  Obtained from environmental sample
  misc_feature (1)..(281): Xaa is any amino acid
MPERKIRVLELARAGKWGLDGSEITKQDIAELAETIAGKRPVVIGHNVTDRAPKFGDVLDCWPSADGGALIGPVMFTESGNKLYEGNYYDGWSISMPRRESDGKRVLHHLAILGAVPPKIPGLEELAQVTVNFGEEAAKDRYQFSGAIPEKEDNGTMTDEEKKALAEKDAKIAELEAQNKALQEQAAKPAPAETPPAPEKPPAETAAGNAAGAATGGAEFADVQKQLGEIKAERRRERLEGFGRDVEGRLPAGVAAKAKALAAQVEAVGAFDFPTREGHPQ

SEQ ID NO: 18047 - DNA, 516 bp, Unknown
  Obtained from environmental sample
  misc_feature (1)..(516): n is a, c, g, or t
ttgcctaaatttgcccatagcctatccgcgccctgcaagtgttggcccagaccgtttgtgcaatgtgatagctttgcgttccatggggctttaaacggaattgtagtggatatgggaaccgctacttcatttgatgttttgcataatggcggttttgccggtggtttgattatgcccggtataagcgcatctatggacgctttaacggaaaaggcggcaatgcttttgcctgtttccataaaatggacaaataaattcgtggcaaaaaatacaggcgatgctatgcgcgcaggtattcttcacggttttttgggtcagctagattatttgctaaacggaataaaaaaggaaataggaatagaaagcattcacgtaatagccacgggcggctggggtcaaatgctccttaaacgaacttccgtaatcaaaaaatacgacccttacttaacattagagggcattcgcttggtagcgattaacggcaacgggtttaacgacattgaggatatggagtag

SEQ ID NO: 18048 - protein, 171 aa, Unknown
  Obtained from environmental sample
  misc_feature (1)..(171): Xaa is any amino acid
MPKFAHSLSAPCKCWPRPFVQCDSFAFHGALNGIVVDMGTATSFDVLHNGGFAGGLIMPGISASMDALTEKAAMLLPVSIKWTNKFVAKNTGDAMRAGILHGFLGQLDYLLNGIKKEIGIESIHVIATGGWGQMLLKRTSVIKKYDPYLTLEGIRLVAINGNGFNDIEDME

SEQ ID NO: 18049 - DNA, 354 bp, Unknown
  Obtained from environmental sample
  misc_feature (1)..(354): n is a, c, g, or t
gtgattgattcgggcgtaaaaaccgtatcggagcagggggagaatatccgcagcgccatggaagaacaaaacgagggcagcaagtatatcctggaagccgtcgacaagttaaatgatattacccggcaggttaaggaagaatcctcggaaatgcttgatggcagccgcgaggtgattcaggaaagcaggaaccttgatagggtaacccaggagatcaccggaggaattaacgagatggcctccggagcggaacagatcaacaaggcggtaagcaggatcaacgagataagcgcaaaaaacagggaaaacatcaatcttttggtcaaggaagtttcgttgttcaaggttgattaa

SEQ ID NO: 18050 - protein, 117 aa, Unknown
  Obtained from environmental sample
  misc_feature (1)..(117): Xaa is any amino acid
MIDSGVKTVSEQGENIRSAMEEQNEGSKYILEAVDKLNDITRQVKEESSEMLDGSREVIQESRNLDRVTQEITGGINEMASGAEQINKAVSRINEISAKNRENINLLVKEVSLFKVD

SEQ ID NO: 18051 - DNA, 741 bp, Unknown
  Obtained from environmental sample
  misc_feature (1)..(741): n is a, c, g, or t
ttggagataataaagtttgaacccatgacaaaagataaagccgctcagcatatccctcccaaacgcccagtccgcttttttaacaccaccggaccatgtaatccctgggaccactatatgctgcccccggcagaccggctcgtaggggcgcaacttcatcggtatatcagggacaaactctattgggtactgcatgctcccaggcaaacagggaaaacgacgtttatacgcgactgggcaagggagattaattccgcgggcggggttatagcatgctataccagcctggaggcatgccagggcatttcagggcgggcggaagctatgataaccatgcataaagctatatgtgaatcggcccgcgcatggaatgtaccgattcccgagcttcccctggacaatcccgaactattgctctacgagacaatgcgtaaatgggcggcattaacagcgcctgaaccgcttattgtgttatttgatgaagtagacgtacttgaaagcgaaattctaatttcatttttgcgccagttacgcaacggatttgccgaacgcgataccggaaaatttcctgtgtcaatcgcgctggtgggcatgagggatttaaaggattacattactgcggcaaagggcggagtcgcccctaatccgggttcaccttttaatataaaagaagattcagtattattatccaactttacccaaatggatattgaaaaactttcgcccactcggccgatctga

SEQ ID NO: 18052 - protein, 246 aa, Unknown
  Obtained from environmental sample
  misc_feature (1)..(246): Xaa is any amino acid
MEIIKFEPMTKDKAAQHIPPKRPVRFFNTTGPCNPWDHYMLPPADRLVGAQLHRYIRDKLYWVLHAPRQTGKTTFIRDWAREINSAGGVIACYTSLEACQGISGRAEAMITMHKAICESARAWNVPIPELPLDNPELLLYETMRKWAALTAPEPLIVLFDEVDVLESEILISFLRQLRNGFAERDTGKFPVSIALVGMRDLKDYITAAKGGVAPNPGSPFNIKEDSVLLSNFTQMDIEKLSPTRPI

SEQ ID NO: 18053 - DNA, 801 bp, Unknown
  Obtained from environmental sample
  misc_feature (1)..(801): n is a, c, g, or t
ttgacagtggtaagatggctaacccttggggccctggttgcttttggcctggtcggctttcttgatgactacctgaaagtcacaaagcactcaagcgacggcctgcccgccagagcgaaactggcgtttcaatttataattgccctcgcggttatgttaattctctattgcacaggggaagaagggattaccagcctttatcttccgttttataaaaaccccgtacttgatatgggatttctctgggtacccttcggtgtgcttctcatcatggctgagtcaaacgcggttaatttttctgacgggcttgacgggctccttgccggccttttgattctggtctttattacgctttctatcctgacttacctttccggccgttcggatttttcgtcttacctgggcattccctacattccgggagcgggggagcttacggtgttttgcctcgcggcaacaggcgcctgtatcggctttctttggtttaacgctcatcctgccgatgtatttatgggggatgtaggttccctttcccttggaggggtaatcgcggttatttcgcttattattaaaaaggaagtgctgatattaattattggaggggttttcgttctggaaatagcctcggtgattatacaggtgctttcattcaaattaagaaagaagagggtgtttaaaatggcgcccattcaccatcattttgaattatccggctgggcggaaaacaaggtagtaatccgtttctggataatgggagggctgttcgcgatcatcgcgttgtcaacgctgaagatccagtaa

SEQ ID NO: 18054 - protein, 266 aa, Unknown
  Obtained from environmental sample
  DOMAIN (5)...(196): Glycosyl transferase family 4
  misc_feature (1)..(266): Xaa is any amino acid
MTVVRWLTLGALVAFGLVGFLDDYLKVTKHSSDGLPARAKLAFQFIIALAVMLILYCTGEEGITSLYLPFYKNPVLDMGFLWVPFGVLLIMAESNAVNFSDGLDGLLAGLLILVFITLSILTYLSGRSDFSSYLGIPYIPGAGELTVFCLAATGACIGFLWFNAHPADVFMGDVGSLSLGGVIAVISLIIKKEVLILIIGGVFVLEIASVIIQVLSFKLRKKRVFKMAPIHHHFELSGWAENKVVIRFWIMGGLFAIIALSTLKIQ

SEQ ID NO: 18055 - DNA, 399 bp, Unknown
  Obtained from environmental sample
  misc_feature (1)..(399): n is a, c, g, or t
atgatcggtaagctatacaaaaaaaccgtaataagagatacttggcttatgtcagcacccggttctgctttattttccaaggtatcttttttttccgatgtatatagaccagacgcgaaagtagcccgctttttatgcgttctcgtgttttctggcgtagcttacggcctctaccgtggcatccaggacaattatcttgcggaaatcattcacataacgccttttgaacgcgggattgtggaattctttcgcgaaactccggggctccttttgatcttcgtacttgcgttcatgtacaggttttcggacagccggatttttaaaatagggactgccataatgaccggaggcatccctggggctttttgctcacaaccctcaagcccggttttttcatga

SEQ ID NO: 18056 - protein, 132 aa, Unknown
  Obtained from environmental sample
  misc_feature (1)..(132): Xaa is any amino acid
MIGKLYKKTVIRDTWLMSAPGSALFSKVSFFSDVYRPDAKVARFLCVLVFSGVAYGLYRGIQDNYLAEIIHITPFERGIVEFFRETPGLLLIFVLAFMYRFSDSRIFKIGTAIMTGGIPGAFCSQPSSPVFS

SEQ ID NO: 18057 - DNA, 663 bp, Unknown
  Obtained from environmental sample
  misc_feature (1)..(663): n is a, c, g, or t
ttgatcagattggccgagacctgggataaatcccttgaaagtgaaattgaacggcttgcgggaaaaggctaccggcagtttgtgctgaacaatccggggcatttttcgttttttcgtaatttaaaagacagggataaaacgcttttattggcaggcccctggctttatattttcaacgcatggtcgctgttttttgttttgtctctgggtgtggacggctgtatttcgcctcttgagaacaaccgccagaacctggagcgcaccctaggagagcttccacattctacaggccgtcagaaagcaaacagcgttccgcgctccaggttttttattccggtttttgcccggccgccgctgtttcagattcgctcggatcttggccgggtatacgactttaacctgtttacagataacatgggcgggaatttctcgattgtttctgggcctgaaggctcccgagtttatcctgagatcccattttccataaccgataagattcctttcttaatggaagcgggcttttcccggtttataattgacttgtctggcccgccgctcaaaaaggccttttaccgcgatttaatgcgcgccgtaaacgatggcgcgccgatcaatggcgctaccaggtttaattggaaagacgggttttaccagaaaccttaa

SEQ ID NO: 18058 - protein, 220 aa, Unknown
  Obtained from environmental sample
  misc_feature (1)..(220): Xaa is any amino acid
MIRLAETWDKSLESEIERLAGKGYRQFVLNNPGHFSFFRNLKDRDKTLLLAGPWLYIFNAWSLFFVLSLGVDGCISPLENNRQNLERTLGELPHSTGRQKANSVPRSRFFIPVFARPPLFQIRSDLGRVYDFNLFTDNMGGNFSIVSGPEGSRVYPEIPFSITDKIPFLMEAGFSRFIIDLSGPPLKKAFYRDLMRAVNDGAPINGATRFNWKDGFYQKP

SEQ ID NO: 18059 - DNA, 339 bp, Unknown
  Obtained from environmental sample
  misc_feature (1)..(339): n is a, c, g, or t
gtgcggaacanagatgtgccttcgcgttttggcggagaagagtttaccgttatgctgtcccacgccgatgttgtcatcgcaaaaaaggttgccgaacggctgcgaaccaacgtggcaaagatgcgggtactctgggaagaaactgttctgcctcaagtaactatcagtctgggggtatttgcttttggaccggacagtaatttggaaccggaggaaatactccgccgcgctgacgaggctttatatatttccaaagacagcggcagaaattgcagcactatttgggaaccgggtttggttgaaaatatgcccgctgcgaaaaaaagaattattgagtaa

SEQ ID NO: 18060 - protein, 112 aa, Unknown
  Obtained from environmental sample
  DOMAIN (1)...(91): GGDEF domain
  misc_feature (1)..(112): Xaa is any amino acid
MRNXDVPSRFGGEEFTVMLSHADVVIAKKVAERLRTNVAKMRVLWEETVLPQVTISLGVFAFGPDSNLEPEEILRRADEALYISKDSGRNCSTIWEPGLVENMPAAKKRIIE

SEQ ID NO: 18061 - DNA, 837 bp, Unknown
  Obtained from environmental sample
  misc_feature (1)..(837): n is a, c, g, or t
ttgtacgaagcaccgcttatgctccacaaaaacggcttggacaatgttgtttgccgcgaattgaaattcaccgcaccagaaccggacttgagcgaatggcaaaatatgatgcaaaaagttgcaacaagaaacagagaagtttgcattgccattgttggaaaatacgtgcaactccacgatgcatacctctccattattgaaagtttgaaccacgcgggatttgaagtgagtgcaaatgtgaaaataagctggatagatagcaaaaacataactaatgaaaacgccaaagaaatgctaagcggaatagacggaatgattgttccgggtggttttggcgataggggcattgacggaaaaatagccgcctgccgctatgcaagagaaaacaatgtgccgtatttgggtatttgcctaggtatgcaaattgccgttattgaatttgcgcgcaatgtttgcgaactcaaagatgctcattccagcgaatttgacgaaacctctccgcaccgcgtaattgaccttatgccagaccaagcgggcttggtgggcagcggcggcacaatgcgtttgggtgcctacccttgcaaaaccgccccaggttccctattaaacaaactctacggccgtgacgaaataagcgaaaggcaccgccaccgttttgaattcaacaacgaataccgagaagctctcacgagcaaaggtcttgtgatttgcggaacatcgctaaacggcaaccttgttgaagcaatagaactgccgagagacagcttttttgtgggcgttcaattccaccccgaatnacaagccgcccgaataaccctcggccaatctgtcatgtaa

SEQ ID NO: 18062 - protein, 278 aa, Unknown
  Obtained from environmental sample
  DOMAIN (49)...(265): Peptidase C26
  misc_feature (1)..(278): Xaa is any amino acid
MYEAPLMLHKNGLDNVVCRELKFTAPEPDLSEWQNMMQKVATRNREVCIAIVGKYVQLHDAYLSIIESLNHAGFEVSANVKISWIDSKNITNENAKEMLSGIDGMIVPGGFGDRGIDGKIAACRYARENNVPYLGICLGMQIAVIEFARNVCELKDAHSSEFDETSPHRVIDLMPDQAGLVGSGGTMRLGAYPCKTAPGSLLNKLYGRDEISERHRHRFEFNNEYREALTSKGLVICGTSLNGNLVEAIELPRDSFFVGVQFHPEXQAARITLGQSVM

SEQ ID NO: 18063 - DNA, 438 bp, Unknown
  Obtained from environmental sample
  misc_feature (1)..(438): n is a, c, g, or t
gtgaatcgcgcattaattgtatattttgatacgtgttgctatagtcggctattcgatgttagtgatcaaataagcatgatcaaagaagccgagcggattcgctatattatacgcaatggcttttccggtaaatataccattggcggaagtgctattgtaatggctgaaatccgccaaaaccccgacgtcaaagaacgtagggaaacagaacgtctttataatgcaaccataagcggcaaagcgaaagcgtccgcacgacgcaagacacgcgcgaaagaactgcaacgaaaggggctgaaggagatggacgcgcttcaccttgcggcggctgaatcgatgagtgccgattatcttttaacagtggacaaggactttataaaaaaggcttcacagccgaattttacgacggtgaaagttataaaccctatagacttttga

SEQ ID NO: 18064 - protein, 145 aa, Unknown
  Obtained from environmental sample
  misc_feature (1)..(145): Xaa is any amino acid
MNRALIVYFDTCCYSRLFDVSDQISMIKEAERIRYIIRNGFSGKYTIGGSAIVMAEIRQNPDVKERRETERLYNATISGKAKASARRKTRAKELQRKGLKEMDALHLAAAESMSADYLLTVDKDFIKKASQPNFTTVKVINPIDF

SEQ ID NO: 18065 - DNA, 453 bp, Unknown
  Obtained from environmental sample
  misc_feature (1)..(453): n is a, c, g, or t
atgatcagatcggccgagttgatacaggagaatataatgggaatgaaacaaatttcggttttccttgaaaacacgacgggccgcctttgcgaagttacaaaaacacttgccaaggcggggatcaacctcagggcgattaatattgccgacactgccgattttggcatcctcaggattattgttgacaagacagacgaagccgccaacatcctgaacgcggcggggtttaccataaagatgaccacggtcgcggccgtggaaatcgatgacaagccgggcagccttgacaagttgattgtgcagatccagaagtccgggataaatattgagtacctgtacgcctcccttggcggcggcagcggtaaagcggtggtgattttcaaactggaagatcacgataagggttttgccatgcttgaaaaaagcggccttgttttggcggaaaaattataa

SEQ ID NO: 18066 - protein, 150 aa, Unknown
  Obtained from environmental sample
  DOMAIN (16)...(83): ACT domain
  misc_feature (1)..(150): Xaa is any amino acid
MIRSAELIQENIMGMKQISVFLENTTGRLCEVTKTLAKAGINLRAINIADTADFGILRIIVDKTDEAANILNAAGFTIKMTTVAAVEIDDKPGSLDKLIVQIQKSGINIEYLYASLGGGSGKAVVIFKLEDHDKGFAMLEKSGLVLAEKL

SEQ ID NO: 18067 - DNA, 510 bp, Unknown
  Obtained from environmental sample
  misc_feature (1)..(510): n is a, c, g, or t
ttgccatgcttgaaaaaagcggccttgttttggcggaaaaattataacgtgaaaatattaatggttgccagcgaggctgtcccctttgccaagaccggcggattggcggacatggtttccgcgctttctatcagccttgccgcccttggccatgacgtccgtattgtattgccccgttactacggcatagacagggacaaattaaaactgctgccaggcgcgctgggggttcccctgggctggggtgaggaatggggcgccgtttatacgacgacattgcccaaggcggtaaagaaaaacccggtgaacgtgtatctgattgatcacgagatacattttggcaaggacggaatctacgggatcccgtcggagccggattttctggacaacttccggcgctttacttttttatgccgggcggcgttccagctttgccggaaaatcggatggtacccggacgtggtccacgcgcatgactggccggcggcccttgcgcccgtgtacctttaa

SEQ ID NO: 18068 - protein, 169 aa, Unknown
  Obtained from environmental sample
  DOMAIN (18)...(168): Starch synthase catalytic domain
  misc_feature (1)..(169): Xaa is any amino acid
MPCLKKAALFWRKNYNVKILMVASEAVPFAKTGGLADMVSALSISLAALGHDVRIVLPRYYGIDRDKLKLLPGALGVPLGWGEEWGAVYTTTLPKAVKKNPVNVYLIDHEIHFGKDGIYGIPSEPDFLDNFRRFTFLCRAAFQLCRKIGWYPDVVHAHDWPAALAPVYL

SEQ ID NO: 18069 - DNA, 846 bp, Unknown
  Obtained from environmental sample
  misc_feature (1)..(846): n is a, c, g, or t
ttgtttcccaactggccaaagtattttcccaactgggcgctgaccctgctcggcggcacggccgccctcctgcttctgcccaaattcctgtcacttgtgcttgtgggcatcaagggaggagcgcccggttttggcggatacctgtccatgacgttgagcgcctgcggcgaagtgctgatttccacctttctcgcgccggtgcggatgctttttcacagttttttcgtggccgccacactcctcggacgcagcgtgaactggggcgcgcagaaccggggcggcaacggcacgtcctggggcgacgccgtccgttttcactggtggggcacgacgatcgggctggtttggggctggttcatgtatcttgtcaatcctggattctttctctggctggcgcccatcgtcatcggcctggccctgtccgttccgctttccgtgttgaccagccgggtgtcgcttggcgaaggcgccaggcggcttgggctgtttcttacgcccgcggatgttgatcccccccgcgaacttgactggcttgcggccaatatggccaaacccgcgcccttttgcccttttcgcctgccgcgcgacgccggttttgcgcgtgcggcggtcattccccgcgtgttcgccctgcacgccgcgctggcctccaacaagcgccgcaacccgccgggcaaaatcgccagcctcaagcaactggcggacaaagccctggcccgcgggccgggcagcctcaccgccagggaaaaaatgcgcattctcaacgagcctgactgcctgcgcgaactgcaccacaaaatatgggagctcgacgcagccgcggccgcccggtggggcatccggtaa

SEQ ID NO: 18070 - protein, 281 aa, Unknown
  Obtained from environmental sample
  misc_feature (1)..(281): Xaa is any amino acid
MFPNWPKYFPNWALTLLGGTAALLLLPKFLSLVLVGIKGGAPGFGGYLSMTLSACGEVLISTFLAPVRMLFHSFFVAATLLGRSVNWGAQNRGGNGTSWGDAVRFHWWGTTIGLVWGWFMYLVNPGFFLWLAPIVIGLALSVPLSVLTSRVSLGEGARRLGLFLTPADVDPPRELDWLAANMAKPAPFCPFRLPRDAGFARAAVIPRVFALHAALASNKRRNPPGKIASLKQLADKALARGPGSLTAREKMRILNEPDCLRELHHKIWELDAAAAARWGIR

SEQ ID NO: 18071 - DNA, 624 bp, Unknown
  Obtained from environmental sample
  misc_feature (1)..(624): n is a, c, g, or t
gtgtgcagcacagcgataagccgcggcggtgtcgagttggatttggacgactttatcgagtatgtcaacaagtacaacgaagaagtagcgtaccaactctgcgacggctacgccgtcagcaacggatactattccatacaccccaacatcggcggcactttcaattcggataaagaactgcacgaccacaaaaagcacccaatcaccttccgcttccacgtcctgggcaaaatgcgccgcctcatacagttcatcaacgtagtcatcgaaggtatcgcggacgtaaacggatacatcagcgagttttacgattacgaaattgattcgagcaacgctttattagccccgggcgaccaattcgccatacacggacataaaatcaaagtcgcgggtgacgacccctctgtaggcgtctacatagtaccggtgtccgacccctccaaaaaggtaaaattaacccgcatagccgacaacactcccacaaagataaccggcgtcatacagcctaattccggctaccaattcaaccgcatagaaatccacacccagtatgccggctccgccaataatttcctgaaaaccccgcgcgttataaccagcagttttaccttagaggaagtctga

SEQ ID NO: 18072 - protein, 207 aa, Unknown
  Obtained from environmental sample
  misc_feature (1)..(207): Xaa is any amino acid
MCSTAISRGGVELDLDDFIEYVNKYNEEVAYQLCDGYAVSNGYYSIHPNIGGTFNSDKELHDHKKHPITFRFHVLGKMRRLIQFINVVIEGIADVNGYISEFYDYEIDSSNALLAPGDQFAIHGHKIKVAGDDPSVGVYIVPVSDPSKKVKLTRIADNTPTKITGVIQPNSGYQFNRIEIHTQYAGSANNFLKTPRVITSSFTLEEV

SEQ ID NO: 18073 - DNA, 537 bp, Unknown
  Obtained from environmental sample
  misc_feature (1)..(537): n is a, c, g, or t
atgaggcagggcaaacgtctgctggcgctgcgccaaatagcgcaattcgcttttttcctgctgcaaaatccgtttcaaaagaattttattaccggcaaaatatatcggggaaatatcaaggttctttgctctccgggacttaactgctattcctgtccggcggccgcggtgtcatgcccaataggcgccatacaattcttccttaccggtttaaaatcaagcatcagcctttatatcaccggttttttgatgattatgggcgtcgtatttggacgtttcatttgcgggtatgcctgtccaatgggcctgttgcaggaccttttgtaccggatcaaaacgccgaaacttattctgcgcctgcggttcttgcggtatataaaatacgttatccttgccgttttcgtcgtactcctgccggtaatcgcaagcgggttttttgggctgggccagccctggttttgcaaatatatctgcccatcggggactatttttggcgcggtaccgttgttgttggcaaacgattttctgcgcggataa

SEQ ID NO: 18074 - protein, 178 aa, Unknown
  Obtained from environmental sample
  misc_feature (1)..(178): Xaa is any amino acid
MRQGKRLLALRQIAQFAFFLLQNPFQKNFITGKIYRGNIKVLCSPGLNCYSCPAAAVSCPIGAIQFFLTGLKSSISLYITGFLMIMGVVFGRFICGYACPMGLLQDLLYRIKTPKLILRLRFLRYIKYVILAVFVVLLPVIASGFFGLGQPWFCKYICPSGTIFGAVPLLLANDFLRG

SEQ ID NO: 18075 - DNA, 579 bp, Unknown
  Obtained from environmental sample
  misc_feature (1)..(579): n is a, c, g, or t
ttgttattgagcgcttttgccgcctaccccctttcgcgcatgcaattcaagctgaacaagcccatatacagcgccattgtcgcggccatgtccatacccattcacattacccttattcctgtgttcataatgaccattcggtttaacatgtacgaccatgtgtacgggcttataggccccaatgtggcgtttaacctgcccatatccatttttatcctgacagcgtttatgcagggtatttccaaagagatggaagaagccgccgagatagacggctgcggcaggttctcgacatttttccggataatgctccccttgtcaaaatcggggcttgcgacccttgcaatttataacggcgtcgtaatatggaacgagtttgtatttgccatggtcctgacccagagccaggacgtgcgcaccctgccgcttgcgatttgggaataccaggggcaatactcgataaacacgcctatgatcatggccctgctggttttatcctgcctgccgattattctattgtacattttcggccaggacaaactggttaaaggcatgatggccggagcggttaaaggataa

SEQ ID NO: 18076 - protein, 192 aa, Unknown
  Obtained from environmental sample
  DOMAIN (1)...(187): Binding-protein-dependent transport system inner membrane component
  misc_feature (1)..(192): Xaa is any amino acid
MLLSAFAAYPLSRMQFKLNKPIYSAIVAAMSIPIHITLIPVFIMTIRFNMYDHVYGLIGPNVAFNLPISIFILTAFMQGISKEMEEAAEIDGCGRFSTFFRIMLPLSKSGLATLAIYNGVVIWNEFVFAMVLTQSQDVRTLPLAIWEYQGQYSINTPMIMALLVLSCLPIILLYIFGQDKLVKGMMAGAVKG

SEQ ID NO: 18077 - DNA, 699 bp, Unknown
  Obtained from environmental sample
  misc_feature (1)..(699): n is a, c, g, or t
gtgcgtattcaccgcagcggtgattccggcagagttacgcacaaactgacttttgcgaaagaagaaaaggacggctggtggatttccgctcccgaaggttccaaaggagattatgtttacctgatacagataaaagagaaacaaaaacattacgctccggtaatagcgcataacagcggaagcaaaggccccggcagggaaaaagcgccgtcccctcacatattgacagcgagcgaagaaaaaagaaagaaacatggcgatccctttcctgaaggactgtatgtgtcagtctccaggcctgaagacctttatattgttcagtcttcccgcccgcaaagagtgatgcttgctttatctcaaaaaaacgctaaatatcttttagccgaagacaaaccgcccctgccttttaaaccggcggaaattattttaacgctttccccatggttcccgcaaaaaaccgctgaatacgaatctggtcttacaacgctagtgatcggagaattgattgaaatgggttatactcagtatatgttgaataacatggggcatttttcaatcttcaaaggttacgaaaaagtaaaactgatagcggggccgtggctctatatgtttaactcgtggtcgctgtcgtttatctcgtccgttggaaacggagttgacggatttgtctctccgcttaaaacaacaggcaaaacctga

SEQ ID NO: 18078 - protein, 232 aa, Unknown
  Obtained from environmental sample
  misc_feature (1)..(232): Xaa is any amino acid
MRIHRSGDSGRVTHKLTFAKEEKDGWWISAPEGSKGDYVYLIQIKEKQKHYAPVIAHNSGSKGPGREKAPSPHILTASEEKRKKHGDPFPEGLYVSVSRPEDLYIVQSSRPQRVMLALSQKNAKYLLAEDKPPLPFKPAEIILTLSPWFPQKTAEYESGLTTLVIGELIEMGYTQYMLNNMGHFSIFKGYEKVKLIAGPWLYMFNSWSLSFISSVGNGVDGFVSPLKTTGKT

SEQ ID NO: 18079 - DNA, 393 bp, Unknown
  Obtained from environmental sample
  misc_feature (1)..(393): n is a, c, g, or t
atggcggtgaatatgcccctgccggaaacagagtttgaagtctccctgcccaaatctcaagcggaaccaaaaaccggtccgcatgatctgctgattaatatacttggcacaagtttttccattacagccagtgaagatcctgcctatctggaagaggttttggcgcagtatcagattgccgtcgcgaacactcagggtatttccggcatgaaagatacgctgaaagtggcgattcttaccggctttttgctctgcgatgaaattaataaaataaaactacaggtcgaagaaaaacaagcaaaggacgatcagcagcgggcagccgaaatacaagaactcaatcacatcctgcggaatattatggctcggattgaccaagtatttcatgactag

SEQ ID NO: 18080 - protein, 130 aa, Unknown
  Obtained from environmental sample
  misc_feature (1)..(130): Xaa is any amino acid
MAVNMPLPETEFEVSLPKSQAEPKTGPHDLLINILGTSFSITASEDPAYLEEVLAQYQIAVANTQGISGMKDTLKVAILTGFLLCDEINKIKLQVEEKQAKDDQQRAAEIQELNHILRNIMARIDQVFHD

SEQ ID NO: 18081 - DNA, 348 bp, Unknown
  Obtained from environmental sample
  misc_feature (1)..(348): n is a, c, g, or t
ttgaccaagtatttcatgactagtttgtataaactgcgcaatcatattaagcattatgactggggttcgccggattttattccccggttaatgggacttgtgagtaatggcgagccatatgcggaactgtggatgagcagccatgcgggttcaccttcaatggtcagcctgccctcaggtgaaatgagtttgggggaatttatcgcccgcgatccccgccgttatctggggggaaaaacagcggaacggtacggtgtccttccctttctgtttcagctgcttgccgcggaaaaaccgctctcaattcaagcgcacccaaatctggctcaagcccgtgaagggctttga

SEQ ID NO: 18082 - protein, 115 aa, Unknown
  Obtained from environmental sample
  misc_feature (1)..(115): Xaa is any amino acid
MTKYFMTSLYKLRNHIKHYDWGSPDFIPRLMGLVSNGEPYAELWMSSHAGSPSMVSLPSGEMSLGEFIARDPRRYLGGKTAERYGVLPFLFQLLAAEKPLSIQAHPNLAQAREGL

SEQ ID NO: 18083 - DNA, 888 bp, Unknown
  Obtained from environmental sample
  misc_feature (1)..(888): n is a, c, g, or t
gtgttatacctgaaaggggaatttcttatgaaaaacacaatcgacaagccgcttttgccaatactattcggaatatttgttataacagcttgtataattggctgctcgggcaaaaaaacaggccaaagcgctgaaggaaaagcagaacagcgtcaagaggataataatggggaaattgcttcaaagccaaattcagaggagactgataatacagcgccggacggaggattaacacagaatgtgtttacacagcttgcaatgaaaaacccgcgtatgaacggccctgaagttttagcgcttcaaaaccggttactggaattacaattttatgaattaggcgaggctgacggttattatgggcccatgacagagaccgttattaaaaaaatccaggattatcgcggcttgcctgctaccgggatagttgataaaaaactctgggattttatttttgatgaggagtatcgtacaatcttatttttttctggtatacagacatacaaccgggataatcttggaagaagtgaaaacttaggtcttggtatttatggaagcggtgattatgaagataatatattcgtttattatacggtaaaagataaaaaaataaaaataatcgagtctttagatggaatgcttatgtatagtatcaggatgacatgctattttataaatgaaaatgactgtcgtattgagttcagtttttccggtgttgattattttatggaggaaaacggatttgaggaagaaaacggaaacatatattatattatcaacggcatcctttatagagatataaacggtacaagggtacggcaaaatgacgagcatggaattctcgatagaataaatcgtattaagaatgaattcaatgcaaggtatggataa

SEQ ID NO: 18084 - protein, 295 aa, Unknown
  Obtained from environmental sample
  DOMAIN (93)...(154): Putative peptidoglycan binding domain
  misc_feature (1)..(295): Xaa is any amino acid
MLYLKGEFLMKNTIDKPLLPILFGIFVITACIIGCSGKKTGQSAEGKAEQRQEDNNGEIASKPNSEETDNTAPDGGLTQNVFTQLAMKNPRMNGPEVLALQNRLLELQFYELGEADGYYGPMTETVIKKIQDYRGLPATGIVDKKLWDFIFDEEYRTILFFSGIQTYNRDNLGRSENLGLGIYGSGDYEDNIFVYYTVKDKKIKIIESLDGMLMYSIRMTCYFINENDCRIEFSFSGVDYFMEENGFEEENGNIYYIINGILYRDINGTRVRQNDEHGILDRINRIKNEFNARYG

SEQ ID NO: 18085 - DNA, 381 bp, Unknown
  Obtained from environmental sample
  misc_feature (1)..(381): n is a, c, g, or t
gtgtgccgccgggtgctgataatcaaccaggggaagatcgtggctgacggcagcccggaaactctcgcaaggcgaatccttgggggaaaccgcatccttctcagactggaagctgccgagaaggctgtccaaatgacgctgggaatggtttcttacatcagaaagctggagttcaggggatcccaggaagccggtaccattgatgtcgtagcggaagcgacggaagacgcggacatacgccgggaactgttcagggcccttgtcgctgccggtattcccattctcatgatgcgttctttggacatgagccttgaggacatcttcctcaatctgacaaccagagaggacggcagcttaagaaagaacatggaggaaaattaa

SEQ ID NO: 18086 - protein, 126 aa, Unknown
  Obtained from environmental sample
  misc_feature (1)..(126): Xaa is any amino acid
MCRRVLIINQGKIVADGSPETLARRILGGNRILLRLEAAEKAVQMTLGMVSYIRKLEFRGSQEAGTIDVVAEATEDADIRRELFRALVAAGIPILMMRSLDMSLEDIFLNLTTREDGSLRKNMEEN

SEQ ID NO: 18087 - DNA, 696 bp, Unknown
  Obtained from environmental sample
  misc_feature (1)..(696): n is a, c, g, or t
ttggggcggggaggccgccttctgataatagcgaattatcaaatcagggaactcacctgccttaacgaagttttggcaagttacgggctcgcttttacatacggaatagttcatgagacagacccttactatgtagccattgatagcagtaccgaatggccggatttatcggatcatgaaattaccaggccccttatggataagaccaaaactcccgtgattcttgcggaagccatggcgctttctgtattggataccaaacggcgatctgttgaaattatgccgctaatgacttcgtctcgtgccgcttttcttcgtaccaatctggatgagaattcagatgttaaggtggcctcggatatttccggtccctttgttctgggagcggctgtgaaggatccgtcctggatacaggacaatgagccgcaggcgcgcattgtcgcaatcggctgcggctatttattatacatggcggccatgggttttgacgccaaccgggatatttttatgaacagtattacctggcttgaagaccggcctgaaaccatatcggcaaggtccaaaagcgttttcatattgcccctgagaatgaatcttgttcagatcatcgtttttggagtgctttttatctttgtcattcccgcggctttttttattagcggcctggtagtctggttaaagcggcggcatctgtga

SEQ ID NO: 18088 - protein, 231 aa, Unknown
  Obtained from environmental sample
  misc_feature (1)..(231): Xaa is any amino acid
MGRGGRLLIIANYQIRELTCLNEVLASYGLAFTYGIVHETDPYYVAIDSSTEWPDLSDHEITRPLMDKTKTPVILAEAMALSVLDTKRRSVEIMPLMTSSRAAFLRTNLDENSDVKVASDISGPFVLGAAVKDPSWIQDNEPQARIVAIGCGYLLYMAAMGFDANRDIFMNSITWLEDRPETISARSKSVFILPLRMNLVQIIVFGVLFIFVIPAAFFISGLVVWLKRRHL

SEQ ID NO: 18089 - DNA, 417 bp, Unknown
  Obtained from environmental sample
  misc_feature (1)..(417): n is a, c, g, or t
ttgccctataagcaaataatgatgaatgttaaggaaatccttgcccggaatttgaaggaaaataggcgacggctcggaattacccaaccggaactggcggaacgggcaggtatgtctactcaatatcttgcaatgattgaaatagcccgaaaattcccgactgctgatattttggaacgtttggcagcggcattggacataaatccccatgaattgttttccgttgcggtttcacctgaaagggctatggaacaattgcaacagatgattttggataatatgaatcgatcaatggaacaattgcaacagatgattttggataatatgaatcggtcaacggaacaattacaacagatgattttaggtaatataaatcgaacaaagggacacgcaataacgcccgacactaaaatttaa

SEQ ID NO: 18090 - protein, 138 aa, Unknown
  Obtained from environmental sample
  DOMAIN (18)...(72): Helix-turn-helix
  misc_feature (1)..(138): Xaa is any amino acid
MPYKQIMMNVKEILARNLKENRRRLGITQPELAERAGMSTQYLAMIEIARKFPTADILERLAAALDINPHELFSVAVSPERAMEQLQQMILDNMNRSMEQLQQMILDNMNRSTEQLQQMILGNINRTKGHAITPDTKI

SEQ ID NO: 18091 - DNA, 567 bp, Unknown
  Obtained from environmental sample
  misc_feature (1)..(567): n is a, c, g, or t
gtggatatgtcctcggaggagttcaagaatataaaggacggcgagcaagtaaccgtcggcggactgatcgcctcggtcaatccgcgcgtcatccagagcggcaaaaacgccggtaagcaaatgtgcatntacgagttggagtcctttgacgcctctattaaaatggtcgcgtattcggacaaatacgaaaaactcaaagagacactcaccgcggacgcgatgatcttagcgcgtgggaaaatcagaagggaaaacacggaggccaagccggagttgcaagtggatagttgcgttcacctatcgcaagcgcgccttgaaatggccaagagcgtgcacataacggtatcgacaaacggactcaacacacaaacgctcgataacatccgtaaatgctcccgcgaattccccggagactgctaccttattatgcacgtaacgacgacggacaataacgcctacaagataagagccggaagcgtcagtatgtcgccgacaaacgaagccctgaacaaactgcgcgcgttggttggaaatgagaatgttagaatcgctaaaactataaaatga

SEQ ID NO: 18092 - protein, 188 aa, Unknown
  Obtained from environmental sample
  DOMAIN (17)...(100): OB-fold nucleic acid binding domain
  misc_feature (1)..(188): Xaa is any amino acid
MDMSSEEFKNIKDGEQVTVGGLIASVNPRVIQSGKNAGKQMCXYELESFDASIKMVAYSDKYEKLKETLTADAMILARGKIRRENTEAKPELQVDSCVHLSQARLEMAKSVHITVSTNGLNTQTLDNIRKCSREFPGDCYLIMHVTTTDNNAYKIRAGSVSMSPTNEALNKLRALVGNENVRIAKTIK

SEQ ID NO: 18093 - DNA, 708 bp, Unknown
  Obtained from environmental sample
  misc_feature (1)..(708): n is a, c, g, or t
ttgcggggcaaccaggttgtcaccggccttgtccttacgatttttggcaccggcgtatcgggctttatcggtaaaagcctcgccggaaagcctttgccggacgcggttcaaaaggctttttcccctgttaccgttcccctgttgggaaagatacccattatcgggcaggtcttttttatccagagtccttacgttttggccggccttatcctcggagcgctgctttatgtttattttcgctatactcgcgtggggatgaacgcgcgcgcggtcggcgagaatcccgccgttgccgacgccgccgggattccggtcatcctctataaatatgttcatgtcatgcttggcggttttttatgcggcctgggcggggcgtatctttccctggtttttgttccccgctggcaggagaacatcaccgccggagcgggctggatcgccgtcgcgctggttatcttcagcacatggaatcccctgcgtgccatttttgccgcctgtctctttggcgccctgcggggtctgggtttcaaattacagaatattgtcatgagcattgccggcgtccgcattatttttcattcccagcttctggatatgatcccctaccttgccactatcattgtccttctgatcatcacccgcaggaagaagaaagaataccaggcgcccgcttcccttggcgcctcctatttccgtgaggacaggtaa

SEQ ID NO: 18094 - protein, 235 aa, Unknown
  Obtained from environmental sample
  SIGNAL (1)...(28)
  misc_feature (1)..(235): Xaa is any amino acid
MRGNQVVTGLVLTIFGTGVSGFIGKSLAGKPLPDAVQKAFSPVTVPLLGKIPIIGQVFFIQSPYVLAGLILGALLYVYFRYTRVGMNARAVGENPAVADAAGIPVILYKYVHVMLGGFLCGLGGAYLSLVFVPRWQENITAGAGWIAVALVIFSTWNPLRAIFAACLFGALRGLGFKLQNIVMSIAGVRIIFHSQLLDMIPYLATIIVLLIITRRKKKEYQAPASLGASYFREDR

SEQ ID NO: 18095 - DNA, 798 bp, Unknown
  Obtained from environmental sample
  misc_feature (1)..(798): n is a, c, g, or t
gtgttttttggagcaggacgtgatgaaaagttcttcaagcgcccgctgccgcgccagatagagtttgcgaggctgaacctgacgcacaccgtgatgtccaagcgccgcctgctccagttggtgcaggagggcgtcgtgtcgggctgggacgacccccggatgcccaccatctgcggtctgcgccgcaggggctacacgccaggcgccgtgaaggcctttgccgagcgcgtcggtgtggcgaagcgcgacatggtggccgaagtcggcctgctggaatcttgcatacgcgaagacctagaggccaatgcgccccgcaggatggccgtgctgcgcccgctgaagctgaccattttgaacctgccccccgaccagtcctttgaagtcgttttgcccagccacacagagaagcccgaactggggacgcgtaaactgcgctttgggcgcgaaatatggatagacagggacgacttcagggaggacccgcccaaaaagtggttccgcctggcgccaggcgccgaagtcaggctgcgcggcgccgccatagtccgctgccaggaagtggtgaaggatgccagcggcgacatcatagaactgcgctgcacttgggacgaaaactcaaaaggcggcgacgcggccgacgggcgtaggatcaagggcaccatccactgggtcggcgcggacgaagccatagacgccgaagtgaggctctacgaacagctctttttggccgacgaccccatggacgtgcccgaagggcaggactggcggcagggcataaacaaagagagcctgaaatag

SEQ ID NO: 18096 - protein, 265 aa, Unknown
  Obtained from environmental sample
  DOMAIN (103)...(265): tRNA synthetases class I (E and Q), anti-codon binding domain
  misc_feature (1)..(265): Xaa is any amino acid
MFFGAGRDEKFFKRPLPRQIEFARLNLTHTVMSKRRLLQLVQEGVVSGWDDPRMPTICGLRRRGYTPGAVKAFAERVGVAKRDMVAEVGLLESCIREDLEANAPRRMAVLRPLKLTILNLPPDQSFEVVLPSHTEKPELGTRKLRFGREIWIDRDDFREDPPKKWFRLAPGAEVRLRGAAIVRCQEVVKDASGDIIELRCTWDENSKGGDAADGRRIKGTIHWVGADEAIDAEVRLYEQLFLADDPMDVPEGQDWRQGINKESLK

SEQ ID NO: 18097 - DNA, 360 bp, Unknown
  Obtained from environmental sample
  misc_feature (1)..(360): n is a, c, g, or t
atgacgattctttcacttttactgcgaatgacaggcgggctctgtatgttcctgtttggcatgaaaatgatgagcgacggactgcagaaaagcgccggcgaacgtatgcgaaaaacgctgaatttcatgaccggcaaccgctttatgggagtgttcacaggttttgccgttaccgcaatcattcagtcttcatcggcatttaccgtcattgttatatcttttgtaaacgccggacttttaacccttacgcaatttatcggagtattattcggaacanatatcggaaccacccgtacaggttggataatctctcttgttggttttaaatcagcattgatagtttggctctgccggcaatag

SEQ ID NO: 18098 - protein, 119 aa, Unknown
  Obtained from environmental sample
  DOMAIN (16)...(119): Na+/Pi-cotransporter
  misc_feature (1)..(119): Xaa is any amino acid
MTILSLLLRMTGGLCMFLFGMKMMSDGLQKSAGERMRKTLNFMTGNRFMGVFTGFAVTAIIQSSSAFTVIVISFVNAGLLTLTQFIGVLFGTXIGTTRTGWIISLVGFKSALIVWLCRQ

SEQ ID NO: 18099 - DNA, 837 bp, Unknown
  Obtained from environmental sample
  misc_feature (1)..(837): n is a, c, g, or t
gtgttcatgattgaagttacgaatctggtcaggcgctatggcccccatatcgcagtggatcatgcgaatttcaaaattgaaaagggcgaaattgtcggttttttggggcctaatggggcggggaaatccacgaccatgaatatccttacagggtatctttcttctaccgaaggaaccgtgaaagtaaatgatatggatattctggaacatcccttagaagtaaaaaaaataattgggtatctgccggaaaatcctcccctttacatggacatgacagtcagagagtacctttcctttaccggggacataaaaaaaatccccaaggcagagaaaaagaacaggatgaaccggataatggccactgtgggtattgaagacgtatccaaacggctcattaagaacctttccaaaggctataaacagcgggttggactggcccaggccatgattggagacccccaggtcctcatcatggatgagcccacggcggggcttgaccccaagcagatcctggaaattcgggatctaatcacggagttgggaaaggatcatacggttatcctcagttcccatattttgcccgaggtgagcgcggtctgtaaacgggtgctgataatcaatcgaggggtcattgtggccgacggtaccccggaaaacctggctaaaaggcttttagggggcaatcatatcctcctcagggtggatgccacagggccggaggtgtccaaggcgctgaaaacggtttccgcaatacagaaagttgaattccatgaatcccaggaagcgggaacttcggagctggtggcagaggctgcctcggccgctcggccgatctga

SEQ ID NO: 18100 - protein, 278 aa, Unknown
  Obtained from environmental sample
  DOMAIN (29)...(209): ABC transporter
  misc_feature (1)..(278): Xaa is any amino acid
MFMIEVTNLVRRYGPHIAVDHANFKIEKGEIVGFLGPNGAGKSTTMNILTGYLSSTEGTVKVNDMDILEHPLEVKKIIGYLPENPPLYMDMTVREYLSFTGDIKKIPKAEKKNRMNRIMATVGIEDVSKRLIKNLSKGYKQRVGLAQAMIGDPQVLIMDEPTAGLDPKQILEIRDLITELGKDHTVILSSHILPEVSAVCKRVLIINRGVIVADGTPENLAKRLLGGNHILLRVDATGPEVSKALKTVSAIQKVEFHESQEAGTSELVAEAASAARPI

SEQ ID NO: 18101 - DNA, 525 bp, Unknown
  Obtained from environmental sample
  misc_feature (1)..(525): n is a, c, g, or t
ttgnnntnggatgatcgacagcggttcccgcacgggaaacttgaatatatacgtctcggcacctgcagcattttcatattcactgaaccgctttcaggctggcgtcatgcgcaagcgtccttgcagcggacgaaaaaggattgggcgcaccaaatccgatggctgctgaatgaacaatatcccgaagcggaaaaaatcgtattggtgatggacaacctaaacacccatgccatttcatcgctgtatgaaaccttcccgccggaagaggcgttccgtctagcacagcgtcttgaaatccattatacgccggtacatggaagctggatgaacatagctgaaattgagttatccgctctggccgcgcagtgtttaggacagaggcgtataccgggtcttaagactctgaatgaggaactggctgcttggcatacgcagcgtaatcaatcgcagaagggcgttgattggcagtttaccgctcctgatgcatggataaaacttaaaaggctttacccattaattatgtaa

SEQ ID NO: 18102 - protein, 174 aa, Unknown
  Obtained from environmental sample
  misc_feature (1)..(174): Xaa is any amino acid
MXXDDRQRFPHGKLEYIRLGTCSIFIFTEPLSGWRHAQASLQRTKKDWAHQIRWLLNEQYPEAEKIVLVMDNLNTHAISSLYETFPPEEAFRLAQRLEIHYTPVHGSWMNIAEIELSALAAQCLGQRRIPGLKTLNEELAAWHTQRNQSQKGVDWQFTAPDAWIKLKRLYPLIM

SEQ ID NO: 18103 - DNA, 750 bp, Unknown
  Obtained from environmental sample
  misc_feature (1)..(750): n is a, c, g, or t
gtgtcggaggacgcgccgctcaacgcgccggacggcaagggggataccatttatacgccttttggcccgcaggtcgtaagcaacgacaacagcgccgacaagcccgaaaaatccggcaaatccggcaaacccgtcaagcagtccgatttgctgatgagcgagttgttaggcgagagcgactggacgttcgtggacaaaatagccgtacgattcgtgatgaacgtcgtgttcgcctacatcctaatctgcataatcttcgcgaaggagcatcggataagggagtacgctttctgtttcttcatctccaatatcctgatcttcatggtgacgtcgcttttggcctacgtgaaggtgaagaccggcttcgctttcggcctcttcgcaatcctgtccatcctgcgctaccgtacggaacagataaatatacgcgagatgacctttctgttcgcctccataataatgggcgtgataaactcgatggcgacggacggccttatgctcttagccgtgttccttgccgacgttgtgctctgcgcgagcatcgcgatatgcgacagccggttcatgggcaagacggatcaattgcttttggtctacgacaataccgggctgttggccaaagacaagaaaaaagagctgttcgaggatatcaaaaacaggtttggttacgatgttatcaaggtagtggtgactaagatgaactatttgacggacagcgcggaggtgaagctggtttataagaggaattag

SEQ ID NO: 18104 - protein, 249 aa, Unknown
  Obtained from environmental sample
  misc_feature (1)..(249): Xaa is any amino acid
MSEDAPLNAPDGKGDTIYTPFGPQVVSNDNSADKPEKSGKSGKPVKQSDLLMSELLGESDWTFVDKIAVRFVMNVVFAYILICIIFAKEHRIREYAFCFFISNILIFMVTSLLAYVKVKTGFAFGLFAILSILRYRTEQINIREMTFLFASIIMGVINSMATDGLMLLAVFLADVVLCASIAICDSRFMGKTDQLLLVYDNTGLLAKDKKKELFEDIKNRFGYDVIKVVVTKMNYLTDSAEVKLVYKRN

SEQ ID NO: 18105 - DNA, 543 bp, Unknown
  Obtained from environmental sample
  misc_feature (1)..(543): n is a, c, g, or t
atgaaattatggatattacccatgaaggcaggtgttatgagcggcagcggaaaaggcggaaataaccgaaaaaatcgtcaacgtttctcaggacggagggacgattcccaaaaacatttaaaaaaacataccacggcaaacgagcaggaaaatttattttttgacggaaaatcggaaaaaaacaaagtaagtacgcacgaacggcctcaatggacaacgccggaactacccgccaatcccatcaccactcccgattgcccctggtgcggaaagcaaataaaggatattactaccgcaatttcagataaagaaacaggccgccccgtacatttcgactgtgtgcttgcacggattaccgaatcggaaaaactggaacacaatgacagcgtttgttacattggcggcgggcgttttggaataattcattatactaatcctcttgatacaagggaatttgtcattaaaaaaatatttgaatgggaacccaaagacactgaaagcgaatggcgtcgcccaataagcgaatatttttcgattacataa

SEQ ID NO: 18106 - protein, 180 aa, Unknown
  Obtained from environmental sample
  misc_feature (1)..(180): Xaa is any amino acid
MKLWILPMKAGVMSGSGKGGNNRKNRQRFSGRRDDSQKHLKKHTTANEQENLFFDGKSEKNKVSTHERPQWTTPELPANPITTPDCPWCGKQIKDITTAISDKETGRPVHFDCVLARITESEKLEHNDSVCYIGGGRFGIIHYTNPLDTREFVIKKIFEWEPKDTESEWRRPISEYFSIT

SEQ ID NO: 18107 - DNA, 516 bp, Unknown
  Obtained from environmental sample
  misc_feature (1)..(516): n is a, c, g, or t
atggccgatccgcctaaccagattttttttccgttaaattatccggagctttttgcctcatgggcccgtttcccggaagcgtctccttttgcaggcggcacgggcctgctgcgggaacagggcaggaaaatcttcgcccttccgtccataatactttcccttgacaggcttgaggaattgcagcgcgtcagccgtaccgaacggtaccttgagattggcgcaatggcaaaactcagccaaataattgatcttggaaacctggttccgaaagcgctgaggcgctgcctggaaagcattggcgggcagcagcttcgcaatatggcgacaataggggggaatatctgttatcccggcagatgcctggacagcgccgctgttattacggctttggacggccaatatgagctgaggagcgcccaatcagcccgatgggtttcagcggcccgtttttttacttccagcgggcggaataccctgaacccgcaggagcttctcaccagaatcagggtccgctaa

SEQ ID NO: 18108 - protein, 171 aa, Unknown
  Obtained from environmental sample
  DOMAIN (4)...(171): FAD binding domain in molybdopterin dehydrogenase
  misc_feature (1)..(171): Xaa is any amino acid
MADPPNQIFFPLNYPELFASWARFPEASPFAGGTGLLREQGRKIFALPSIILSLDRLEELQRVSRTERYLEIGAMAKLSQIIDLGNLVPKALRRCLESIGGQQLRNMATIGGNICYPGRCLDSAAVITALDGQYELRSAQSARWVSAARFFTSSGRNTLNPQELLTRIRVR

SEQ ID NO: 18109 - DNA, 405 bp, Unknown
  Obtained from environmental sample
  misc_feature (1)..(405): n is a, c, g, or t
atgatttcggggctgctgggcgcgaaaaccggctgccttaccgggaagtgcgggttctgcgcggtgatattcaacggcttggtcagccatgcctgcctaatccccgcgttcaggctgcgcggcagcgaagttataaccatagaaggtttttcccagacaaacgaataccatgatattgttacaggctttacgcaggcgggcttagaaggctgcgggtattgcagcaccagcaaaatactcaacgccggggccctgttggacaggatcaagcgcccttcccggcaggaaatacttaacgcgttcagcgggattaagtgccgctgcacggataccgaaaagctgatcgaaggcatagagaaggccgcagagatccggcagcggaggctttatggccgatccgcctaa

SEQ ID NO: 18110 - protein, 134 aa, Unknown
  Obtained from environmental sample
  DOMAIN (46)...(120): [2Fe-2S] binding domain
  misc_feature (1)..(134): Xaa is any amino acid
MISGLLGAKTGCLTGKCGFCAVIFNGLVSHACLIPAFRLRGSEVITIEGFSQTNEYHDIVTGFTQAGLEGCGYCSTSKILNAGALLDRIKRPSRQEILNAFSGIKCRCTDTEKLIEGIEKAAEIRQRRLYGRSA

SEQ ID NO: 18111 - DNA, 546 bp, Unknown
  Obtained from environmental sample
  misc_feature (1)..(546): n is a, c, g, or t
ttgcagtctgtcaatcaaatagaggcttacgctatccgttcctatatcgccaataataagaatcttttggatgacgcgcgtgttgatgatgatgttaatgatgatgttgttgttgatgctaatgatatgtctgatgataccgatacagataataataccgacgcctgcccgttcctgcgtcaacaatcctgctcaatctaccccgcccgccctatcatctgccgcacccacggcctgatactgcgctcatccgaattcccgctgtcgcgccaggccgcgagctgcccatacaacttcccctccgtccacccgaacgatttcccgcccgaactcgcggtcgacgtggacgccataacaaaaaacctagtcaacctgaacctcgcgttttgcatggctagcggggttgacgttagagatgaggctggaggcggggaaagcagggtgcttttgcgcgatttggcggggattctaagccggctgtggtgcggtaaacgtagcaagtgttcaacggggcagggtcgccgtgtcggcggtctgcccttataa

SEQ ID NO: 18112 - protein, 181 aa, Unknown
  Obtained from environmental sample
  misc_feature (1)..(181): Xaa is any amino acid
MQSVNQIEAYAIRSYIANNKNLLDDARVDDDVNDDVVVDANDMSDDTDTDNNTDACPFLRQQSCSIYPARPIICRTHGLILRSSEFPLSRQAASCPYNFPSVHPNDFPPELAVDVDAITKNLVNLNLAFCMASGVDVRDEAGGGESRVLLRDLAGILSRLWCGKRSKCSTGQGRRVGGLPL

SEQ ID NO: 18113 - DNA, 822 bp, Unknown
  Obtained from environmental sample
  misc_feature (1)..(822): n is a, c, g, or t
gtgttgcgtaatattcccgacattgaagatgttcaggtaatgcttgcagtctaccgttctctcggcggcaaagctgaatcccttgggccgaatacctggcggttaagcacggggaatatcagttcttctgaaattccggcggaacatgccgtaaaaattcgggcatccatccttttcgcaggcccactgcttgccagaaccggcagggtggtactgcctccccccggcggggatgtaatcggccgccgccgcctggacacccactttctggcccttaccgagcttggagcgcaagtggaggttaaggacgcttttgtattcagcagttccggtcttaaaggggcggatattttcctggatgaggcgtcagtaactgctacggaaaacgccgttatggcggcggtgctggcgaaaggcgaaaccatcctgaccaacgccgcaagcgagccccatgtgcaggatctctgccgtatgctctgcgccatgggagctcgcattgagggaatcggctccaacatcctcacaatatggggggtagaaaaacttggcggctgcgagtttacgataggagcggactttatggaagtaggttccttcatcggccttgcggcggccacaggcggggaacttcttatcgaaggtacaaggccttccgatctcaggccggcaaaaacggcattcggcaaattggggatagtgtgggaacacgaaggcaatacccttcacgtaccctcaggacaggccttggaagtgaactgcgacctcggaggcatgatcccaaaaattgacgacgctccctggccccggtttcgccccgactaa

SEQ ID NO: 18114 - protein, 273 aa, Unknown
  Obtained from environmental sample
  DOMAIN (1)...(273): EPSP synthase (3-phosphoshikimate 1-carboxyvinyltransferase)
  misc_feature (1)..(273): Xaa is any amino acid
MLRNIPDIEDVQVMLAVYRSLGGKAESLGPNTWRLSTGNISSSEIPAEHAVKIRASILFAGPLLARTGRVVLPPPGGDVIGRRRLDTHFLALTELGAQVEVKDAFVFSSSGLKGADIFLDEASVTATENAVMAAVLAKGETILTNAASEPHVQDLCRMLCAMGARIEGIGSNILTIWGVEKLGGCEFTIGADFMEVGSFIGLAAATGGELLIEGTRPSDLRPAKTAFGKLGIVWEHEGNTLHVPSGQALEVNCDLGGMIPKIDDAPWPRFRPD

SEQ ID NO: 18115 - DNA, 705 bp, Unknown
  Obtained from environmental sample
  misc_feature (1)..(705): n is a, c, g, or t
atggaaaaagaaataacccaccgcccggctgacgacatacccgccgaatacggcaagctggaagaagaggccaaaaaagtcctcggaaccggcaccgttacgaccgaggacgtgctgacctacgccatgttcccaaaagttgcgcctaacttcttcaaaacaagggcggacggccccgtggtcttcaaaccggaagacactcccgcccccgcggcaaaagccgtacccggacaagctgaaaaatacaatgttaacgtaaacggaacagactacgcggtagtggtctcccccgccggaagcgtggcggtaacagccgcagcccctatagtcgcagccacgcctggcgcccccgcctcctccggaggcattacaatccccgcgcctgttgccggaaccatactccgctacagcgtagcggaaggcgcgcaggtgcaaaagggcgcgacaataatgatcattgaatccatgaagatggaactggaaataaagaccacggaaaccggaaaggtgcatttcatggtccccgccggaacccaggttaccgcccaacagcccatagcgcaaatcggaggtattgcaggcgccgcgcccgcagcccccgccgcgccggctgccccagtggctcccgccgcacccgcggcctcaggcggcggatccgccgtccccccccccgttggccggaacaaaccttcccctaccctgtag

SEQ ID NO: 18116 - protein, 234 aa, Unknown
  Obtained from environmental sample
  DOMAIN (2)...(99): Conserved carboxylase domain
  misc_feature (1)..(234): Xaa is any amino acid
MEKEITHRPADDIPAEYGKLEEEAKKVLGTGTVTTEDVLTYAMFPKVAPNFFKTRADGPVVFKPEDTPAPAAKAVPGQAEKYNVNVNGTDYAVVVSPAGSVAVTAAAPIVAATPGAPASSGGITIPAPVAGTILRYSVAEGAQVQKGATIMIIESMKMELEIKTTETGKVHFMVPAGTQVTAQQPIAQIGGIAGAAPAAPAAPAAPVAPAAPAASGGGSAVPPPVGRNKPSPTL

SEQ ID NO: 18117 - DNA, 570 bp, Unknown
  Obtained from environmental sample
  misc_feature (1)..(570): n is a, c, g, or t
atggggcgtcttttggacgcgactgtaaattcctctaaacgcaaagacgacagaatacagataaacgctgacaatatccgcaagttaaatcttttatcaagcgaaagcaccgttnttatagataatgttcccagacgctgtatattaagggatttatctttctcgggctctaaaataataatgatgggaataacaaaattcctccttgataaagaagccatattaagaattgattttaacgatccaagagaatctttcgcgattaaaggaaaatttgtccgcgccgaaaatgttgaaggcaaaaaagagatggtcgctcttggactgtattttaccgaaaacgcggttccaatgggttttaagctgaggattaacgatttccttaccgcgataagggcggattaccgcagcataacggaagaggagcttgaggctcaagccacggtcaaagcttccgccaaacctgccgccgctcccgccgccgcgcctgccggcgcaaaacccgccgctcccgccgccgcaaaacctgccgcgcccgccgcggccaaaccggcggcgccctcaaagtaa

SEQ ID NO: 18118 - protein, 189 aa, Unknown
  Obtained from environmental sample
  DOMAIN (12)...(130): PilZ domain
  misc_feature (1)..(189): Xaa is any amino acid
MGRLLDATVNSSKRKDDRIQINADNIRKLNLLSSESTVXIDNVPRRCILRDLSFSGSKIIMMGITKFLLDKEAILRIDFNDPRESFAIKGKFVRAENVEGKKEMVALGLYFTENAVPMGFKLRINDFLTAIRADYRSITEEELEAQATVKASAKPAAAPAAAPAGAKPAAPAAAKPAAPAAAKPAAPSK

SEQ ID NO: 18119 - DNA, 375 bp, Unknown
  Obtained from environmental sample
  misc_feature (1)..(375): n is a, c, g, or t
ttgacgcaatcgaaatactcaatgcaggttccatcgccgaaccaaaagggggtggcatcgaagcctggtggcgcgagtacaacgaactccgcctcgactggttttctctcctcagccaacagaccccagacaagttcaccaaagccctcgggttttcctccggcaagtacagccaagacacccccgtcggccttgccaggacctacctctttaccggcgacgcagaagtgtcgcacgcatcccaccgcccaatcctggacgccctcaagtctggcgccgccgttgcctccaccggccccatgctggaagtttccgttgacggcaaaggccccggtgaactcgccacaattggcgcgtcaacgtccatcgaactaa

SEQ ID NO: 18120 - protein, 124 aa, Unknown
  Obtained from environmental sample
  misc_feature (1)..(124): Xaa is any amino acid
MTQSKYSMQVPSPNQKGVASKPGGASTTNSASTGFLSSANRPQTSSPKPSGFPPASTAKTPPSALPGPTSLPATQKCRTHPTAQSWTPSSLAPPLPPPAPCWKFPLTAKAPVNSPQLARQRPSN

SEQ ID NO: 18121 - DNA, 795 bp, Unknown
  Obtained from environmental sample
  misc_feature (1)..(795): n is a, c, g, or t
gtggaagaagccggccaagagctctacagaatagcccaaggccaggacaggcgcggcctccagcacatagccgacatatttcacgaaacctaccaagaattgctggatcgcctagagggccgcggctcatccggccagtgcgtaggctttggcaggctggacgacctcacccaaggcttccagcccggcaacctcatcatcctcgccgccaggccaagcgttggcaaaacctccctcgccctcaactggctgtggctggcctccagaaagtacggcgcccactccgcatttttcagcttagagatgagccgcgaagaagtcagggacaggctaatatccgcccacgcccagcttgacctaaagacagtcgcccgcggccaaatgaccgacgccatacacagccaatggatcggcgcaagggatgaactggcccagctccccatctacatctgcgacaaagccgccataacagtaagagagatagccgccctaatagacaagcacggcacccaaggcagccccaaattggacctagtgataatcgactacctgcaattgatctccagcccccaggacagccgcgccgccaggcagaccgaagccgtccgcataggcgaaataagccgctccctaaaaataatggccaaagagcgcaacatccccgtcatcgtcctctcccagctcaaccgcgagatcgagcacagacagacaggccgcccccagctctccgacctccgcgactcaggcgccatagagcaggacgccgacatggtgatgtcatccacaaaaaaatag

SEQ ID NO: 18122 - protein, 264 aa, Unknown
  Obtained from environmental sample
  DOMAIN (42)...(245): DnaB-like helicase C terminal domain
  misc_feature (1)..(264): Xaa is any amino acid
MEEAGQELYRIAQGQDRRGLQHIADIFHETYQELLDRLEGRGSSGQCVGFGRLDDLTQGFQPGNLIILAARPSVGKTSLALNWLWLASRKYGAHSAFFSLEMSREEVRDRLISAHAQLDLKTVARGQMTDAIHSQWIGARDELAQLPIYICDKAAITVREIAALIDKHGTQGSPKLDLVIIDYLQLISSPQDSRAARQTEAVRIGEISRSLKIMAKERNIPVIVLSQLNREIEHRQTGRPQLSDLRDSGAIEQDADMVMSSTKK

SEQ ID NO: 18123 - DNA, 843 bp, Unknown
  Obtained from environmental sample
  misc_feature (1)..(843): n is a, c, g, or t
atgcgccggagcaggttacgcaaaaaccagttcggttcacgatttttaagggaatatgctgtaactacgatatggatacagctttccgaacgcgataatgtcggagcgcgtttttgggaaaattacatgcattcaatatcaaaactcaacaaaaccctggccgagtcaatttccaagattggtttccctgatacaaaggaaaaactgcaccattacaagaccgtaataaacgattacgcagtggtggaaaagcgggtgcttgtaatagacgattttcattgcatcgaagacgaggcggtgcttcgttttatggaagaaggtttctttaaaaatatgcttccggggtctacgatatttctgatttcacggtcccttagccgcttaaatgtcgccggtttgttttaccgggaccaaatattcaatgtaagtgaaaacgatttgcgtttcacggaaaacgagctcagccggtatttccgccgggtcggcgtttcattccagacggacagcctgcgcgagattatgcaggataccgaaggctgggctttcgcgatcaaccttatcgcgcgatcgtcccaaaaagcgcccggctacggcggttatgtgcgtaacgcgatgaagcagaatatcttccggcttctggaaacggaaatatgggacgagttccaggaacaaatgaagaattttctggttcgtctgtccctcatcgatcatctgtccgttgacctgattacggaactggccgccggggatgaagcattgatctccggaatggagaagcaaagcgcgtatatccggctggacagttatataaacgncgtacctcattcatcccctgtttcttga

SEQ ID NO: 18124 - protein, 280 aa, Unknown
  Obtained from environmental sample
  misc_feature (1)..(280): Xaa is any amino acid
MRRSRLRKNQFGSRFLREYAVTTIWIQLSERDNVGARFWENYMHSISKLNKTLAESISKIGFPDTKEKLHHYKTVINDYAVVEKRVLVIDDFHCIEDEAVLRFMEEGFFKNMLPGSTIFLISRSLSRLNVAGLFYRDQIFNVSENDLRFTENELSRYFRRVGVSFQTDSLREIMQDTEGWAFAINLIARSSQKAPGYGGYVRNAMKQNIFRLLETEIWDEFQEQMKNFLVRLSLIDHLSVDLITELAAGDEALISGMEKQSAYIRLDSYINXVPHSSPVS

SEQ ID NO: 18125 - DNA, 714 bp, Unknown
  Obtained from environmental sample
  misc_feature (1)..(714): n is a, c, g, or t
gtgtttacgcttatccgcgagctgtttgcgggtacgcgcgaggcgagggagcgtaattacgagagcgggcggtttagctttaacgttaagggcgggcggtgcgagcattgcgcgggcgacgggattattaagatagaaatgcactttctccccgacgtgtacgttccatgcgaggtgtgcaagggcaagcggtataacagagaaaccctgtcggtcatgtttaagggcaaaaatataagcgacgttttggatatgacggtggaggaggcggtcgggttttttgaaaatattccgtccgtatataataagattaaaacgctttacgaggtgggcttaggttacattaaattaggtcagcccgcgactaccctaagcggcggcgaggcgcaaagggtaaagttagccgcggagctaagtaagcgccaaacaggcaaaacggtctacatcttagacgagccgaccacgggcttacacatggcggacgtagataaattaataaccatactgcaaaagctggtatcgggcggcaacacggtaataacgatagaacacaacttagacgtaataaaggtagccgaccgcataatagacttaggcccggacggcggcggcgcgggcggacgtataatagcggaaggtacgccggaggaagtggcggaagtagaggggagctatacggggaagtatctaaggggggttttgaaacaaatataa

SEQ ID NO: 18126 - protein, 237 aa, Unknown
  Obtained from environmental sample
  DOMAIN (42)...(202): ABC transporter
  misc_feature (1)..(237): Xaa is any amino acid
MFTLIRELFAGTREARERNYESGRFSFNVKGGRCEHCAGDGIIKIEMHFLPDVYVPCEVCKGKRYNRETLSVMFKGKNISDVLDMTVEEAVGFFENIPSVYNKIKTLYEVGLGYIKLGQPATTLSGGEAQRVKLAAELSKRQTGKTVYILDEPTTGLHMADVDKLITILQKLVSGGNTVITIEHNLDVIKVADRIIDLGPDGGGAGGRIIAEGTPEEVAEVEGSYTGKYLRGVLKQI

SEQ ID NO: 18127 - DNA, 441 bp, Unknown
  Obtained from environmental sample
  misc_feature (1)..(441): n is a, c, g, or t
atggatatgcacgttcgcggacgtttcaaaccctgcgtggttcaagctctctattatggagaggtacgcgtcccgcagctttatgtatttgccgacgatggcgatattcaccgtcctctcccgcgagccgatcctatccgccatagactgccactccgccaaatccggctccgggacatcgagcgacagccctcggcatacgacgttgtcgagcccgtttctgtggagcatcagcggcgcctcgtaaagcgtagacaacgtaatattctcgatgacgcaatccggcttgacgttgcagaagagcgcgattttatccttgatgccgcggctgagcggctcgtcggcgcgtgttatgatgacgtccggggagatgcccatggaccggagttccttcaccgagtgctgcgtcggcttagacttgtgctcgcccgaaccctttag

SEQ ID NO: 18128 - protein, 146 aa, Unknown
  Obtained from environmental sample
  misc_feature (1)..(146): Xaa is any amino acid
MDMHVRGRFKPCVVQALYYGEVRVPQLYVFADDGDIHRPLPRADPIRHRLPLRQIRLRDIERQPSAYDVVEPVSVEHQRRLVKRRQRNILDDAIRLDVAEERDFILDAAAERLVGACYDDVRGDAHGPEFLHRVLRRLRLVLARTL

SEQ ID NO: 18129 - DNA, 573 bp, Unknown
  Obtained from environmental sample
  misc_feature (1)..(573): n is a, c, g, or t
atgaatgattttataactatcgactttgaaactgctactggaaaacctgaaagcgccatttccgtaggtcttgtaaagtaccgcaattacaagcttgtaagctcttattattcgttaatccgtccgccgaatctgtatatacgttccgattttacggagattcacggtcttacggttgatgatgtaagggacgcgcctgattttggttatttatggaaaaaggaaataaagggatttatagggaaaacaatgcttgcggcccataacgcgacgtttgacatgagagtccttaaagcggttcttgaatggcatgaacttaacgttccggaaacatcgtatttttgtacgcttaacttgacgcgacgcgcgtggtcacaactggagtctcacgcgcttgcgtcgctcgcaaagaattttgggattgtttacaacgcgcacaacgcccttgatgacgcgcttacctgcgggaaaatggtgcaacttgcggcggaaaaaatagatccgcaaaagggtattgaggaatttttggaatttatgggagttgagataaagtatttttcaaatcagaagtaa

SEQ ID NO: 18130 - protein, 190 aa, Unknown
  Obtained from environmental sample
  DOMAIN (4)...(159): Exonuclease
  misc_feature (1)..(190): Xaa is any amino acid
MNDFITIDFETATGKPESAISVGLVKYRNYKLVSSYYSLIRPPNLYIRSDFTEIHGLTVDDVRDAPDFGYLWKKEIKGFIGKTMLAAHNATFDMRVLKAVLEWHELNVPETSYFCTLNLTRRAWSQLESHALASLAKNFGIVYNAHNALDDALTCGKMVQLAAEKIDPQKGIEEFLEFMGVEIKYFSNQK

SEQ ID NO: 18131 - DNA, 495 bp, Unknown
  Obtained from environmental sample
  misc_feature (1)..(495): n is a, c, g, or t
gtgatgggtgttcgccgcaggggccgggaatacgccctacagatgctatttgcaatggatctgaccgaatacagcccagacgaagtgtttgccgggttccacgccatacaagacctcaaccacgatgctttttatcacgcccgccgcatggttgacggcattttttcgcatatggacgaaattgacgggctgctggccaactgcgccaaaaattggaagataccccgaatggccgttgttgaccgcaacctgctgaggcttgcaatatatgaactaaaatacctgaacgaaactcctttccaaataatcatcaacgaagccttggaaatagcaaaagactttggcgacgtggaaagctcgcacttcataaatggcatcctagaaacagccgcaagagagctgaggcccacagagtccgccgacaaaggggccagaaagaagagagggaaagaacccgccgcacaagccgccgatgaaaatgctgcgacagagtag

SEQ ID NO: 18132 - protein, 164 aa, Unknown
  Obtained from environmental sample
  DOMAIN (6)...(134): NusB family
  misc_feature (1)..(164): Xaa is any amino acid
MMGVRRRGREYALQMLFAMDLTEYSPDEVFAGFHAIQDLNHDAFYHARRMVDGIFSHMDEIDGLLANCAKNWKIPRMAVVDRNLLRLAIYELKYLNETPFQIIINEALEIAKDFGDVESSHFINGILETAARELRPTESADKGARKKRGKEPAAQAADENAATE

SEQ ID NO: 18133 - DNA, 345 bp, Unknown
  Obtained from environmental sample
  misc_feature (1)..(345): n is a, c, g, or t
atggattggtacaacggcaaacattttatattggaagacggcgcctatcttgataacataatatctcccgaaatctacgcccatatcgccaccgaatacggatttcgctacaagaacgagctacagaaattaaaatataatatgactatttatccgtacgccacactggccggaaatgtggcacaagccgaaaaggacacctacgccgtccacctcactcgcggaagctggcgtaatagatctcttatggcgcgtataatattgagtttaaagaggaatcccattgtaagaagattgttcgcacatacaaaaagctccagaaaatataaccgcatagttcgctaa

SEQ ID NO: 18134 - protein, 114 aa, Unknown
  Obtained from environmental sample
  misc_feature (1)..(114): Xaa is any amino acid
MDWYNGKHFILEDGAYLDNIISPEIYAHIATEYGFRYKNELQKLKYNMTIYPYATLAGNVAQAEKDTYAVHLTRGSWRNRSLMARIILSLKRNPIVRRLFAHTKSSRKYNRIVR

SEQ ID NO: 18135 - DNA, 507 bp, Unknown
  Obtained from environmental sample
  misc_feature (1)..(507): n is a, c, g, or t
ttgtcaaagccggggtatgttatcagcgcgaacggcggatcggcggtcatcagggcggaggttttcagggttttgggtgggtatgacgccaagttcttcggttacatggaagagacggatttttgtatgcgcgcttttttgagggggtggcgctgcgcgtacgccccggcctcggtcgtgtatcacatgaatgggttcagttttaaaaaaatcggcgagcgtcagttctatttattgacgcgaaaccgcttttggtttttgtataaaaatatcccgattaaagacatattaaaacgtctgccgtatattttgtcgaatgagtggcatacgtttaaagagtcgttttcaaaaccgaaaaagccgtctctttatttaaaagccaggtgggacgcattgcgcgggttgtggcgatatagaagcgttagaagagaaaatattgcgctttttaaggccaagagaaaagatttttacgaatttgaaaaaaacagaatttttaacattatttag

SEQ ID NO: 18136 - protein, 168 aa, Unknown
  Obtained from environmental sample
  misc_feature (1)..(168): Xaa is any amino acid
MSKPGYVISANGGSAVIRAEVFRVLGGYDAKFFGYMEETDFCMRAFLRGWRCAYAPASVVYHMNGFSFKKIGERQFYLLTRNRFWFLYKNIPIKDILKRLPYILSNEWHTFKESFSKPKKPSLYLKARWDALRGLWRYRSVRRENIALFKAKRKDFYEFEKNRIFNII

SEQ ID NO: 18137 - DNA, 477 bp, Unknown
  Obtained from environmental sample
  misc_feature (1)..(477): n is a, c, g, or t
gtgagagttgatcccgctatggccgccgatgataccgataaattgaaagtctgccacttcgtaacatattacctgccggttacgcagaattggatttacagccaactggcgcataatgaagagtgccgcgccgcagtgctgtgtcaacggttggtgaatccacagcaatttccatttgacgccgtgtatcccatctgtaaatcgagcggtttgccgtctgtgccggataggttgatccataaaattttgggacgctacccgctggagccgcatttatcaacagtaacgcggataaagccggatattctgcacggccatttcttgcttgaatcatggcggaattaccgcttggtcaaacgcttggatattcccttggtgacgacttgttacggtcaagacgtgacgagtttattgagaaagccgttttggacggcgcgaagcagaaaatttttgagcagggggcgcgtttatggttga

SEQ ID NO: 18138 - protein, 158 aa, Unknown
  Obtained from environmental sample
  misc_feature (1)..(158): Xaa is any amino acid
MRVDPAMAADDTDKLKVCHFVTYYLPVTQNWIYSQLAHNEECRAAVLCQRLVNPQQFPFDAVYPICKSSGLPSVPDRLIHKILGRYPLEPHLSTVTRIKPDILHGHFLLESWRNYRLVKRLDIPLVTTCYGQDVTSLLRKPFWTARSRKFLSRGRVYG

SEQ ID NO: 18139 - DNA, 828 bp, Unknown
  Obtained from environmental sample
  misc_feature (1)..(828): n is a, c, g, or t
atgggcaaggaattacccgaatacgaggaaatccccgtacagttacagatgaatgatgatgtcgccggagaatacgacaaccttgaaacaaagttcaaacatatcttttgttttcagaaagacatcgccaaaaagattctgtcggcatatctggggctgcttaccgtttaccctgatcaaccctacggccataagcctgttgttcatcctatcaccggtgataagctcgttgtgccaacaaatatgtcaagtttcaacgaactacacgaaaaagattacagcgtgcttgacgtagtgaagcgtaagacagcagaaggcgggcgtgttcttatatacacaagctgggtacggattgacagccaggagaaattatcgaaactgctgttgggaaacggttacagagtttctattctcacatccgcagtgccacccaaccggcgcgaggaatgggtaggaaaacaggttaagaacggtattcaggttttaataacaaacccaagtttggttgaaaccggattggacttgaatgactttaccacattgtatttttacaacatcgcatacaatctgtttaccctccgccaatcttcccggagatcatggcgcataaaccaaaaagcgccgaagatagaagtctatttctcctactatgaaggcaccatgcagcacagggcaatccgattgatggcgtccaagctggccgtggcagggatcattgaaggtaactttactgatgaaggtttagccgctatgtccgattgcgccgacatgactacngctctggcacgcgagcttaccagggcatcangaacgaggttgaggatttag

SEQ ID NO: 18140 - protein, 275 aa, Unknown
  Obtained from environmental sample
  misc_feature (1)..(275): Xaa is any amino acid
MGKELPEYEEIPVQLQMNDDVAGEYDNLETKFKHIFCFQKDIAKKILSAYLGLLTVYPDQPYGHKPVVHPITGDKLVVPTNMSSFNELHEKDYSVLDVVKRKTAEGGRVLIYTSWVRIDSQEKLSKLLLGNGYRVSILTSAVPPNRREEWVGKQVKNGIQVLITNPSLVETGLDLNDFTTLYFYNIAYNLFTLRQSSRRSWRINQKAPKIEVYFSYYEGTMQHRAIRLMASKLAVAGIIEGNFTDEGLAAMSDCADMTTALARELTRASXTRLRI

SEQ ID NO: 18141 - DNA, 891 bp, Unknown
  Obtained from environmental sample
  misc_feature (1)..(891): n is a, c, g, or t
ttgttcgccatcttcaaaattatctttcagttttttgactcccgcccgcacggaaaaattttcgtgcgcgtagtcccctatgtaaacagcgtgtcggacgcgctttccaacggaattatcaattttgtaatagaggtgttaaacatcttttttatcattttctttatgtacaaggtagaccctcatcttgcgacggttacggttgtcggccttccattgctcgctctttttatctggactataaaacccgcacagcgcagggcgtggcaggccgtatcaaacaagggctccaatataaacgcgtatatccaggaatccatagacggggtaagggtaacgcaggcttttgacaggcaggataaaaatcttgatataatgaacggtcttgcggacgagcgcaataatgtctggatgaaagcaatttacatttccaataccgtatggttttctacggaatccataagccagcttgtttggtcttttgtgtacatcatgggcgtttactggatgaaccccatggcaagtttcggaatgttactcgtcatgggaaactacgcgtggcgtttctggcagcctattatcaacctggcgaatatttacaacacgtttataaccgctatggcgtaccttgacagaatttttgacacaatagccgaacctataacaattaaagacattcccaacgcggtggaatttccgtttgtgcgcggacatgtcgaattcagaaacgtaagtttcagttatgacggaacgcgcaaggtattgaacaatgtatgttttaacggacatccgggacaaagtatcgccattgtagggcctacgggagcgggaaaaacaaccatcgtaaacctgctttcgcgtttttacaatattgaggaaggacaggtataa

SEQ ID NO: 18142 - protein, 296 aa, Unknown
  Obtained from environmental sample
  misc_feature (1)..(296): Xaa is any amino acid
MFAIFKIIFQFFDSRPHGKIFVRVVPYVNSVSDALSNGIINFVIEVLNIFFIIFFMYKVDPHLATVTVVGLPLLALFIWTIKPAQRRAWQAVSNKGSNINAYIQESIDGVRVTQAFDRQDKNLDIMNGLADERNNVWMKAIYISNTVWFSTESISQLVWSFVYIMGVYWMNPMASFGMLLVMGNYAWRFWQPIINLANIYNTFITAMAYLDRIFDTIAEPITIKDIPNAVEFPFVRGHVEFRNVSFSYDGTRKVLNNVCFNGHPGQSIAIVGPTGAGKTTIVNLLSRFYNIEEGQV

SEQ ID NO: 18143 - DNA, 417 bp, Unknown
  Obtained from environmental sample
  misc_feature (1)..(417): n is a, c, g, or t
atggcattgaccgagactaaagaagatgaaaactcaaaaatgctgttgaaaatcccgattgtggggacagttgcggccggtgtccctattctttcggaagagaactgggaaggcaccctgacattgcacaggccctcattgaaaaaaaacagggtgtatttcgcggtaaaagtccgcggggattcgatgatgggcgcgggaatcatggacggcgacatggcagttatagaaaaacagagcgccgccgtgaacggtgaaattgtggtagcggtagttgatgaggcggtgaccttgaaacgtttttttaaggaaagctcccggattaaacttcaggcggaaaatcccgattacaaacccatctactgccaggatgtgaggatactggggcggcttgcccagattatccgtcagtattaa

SEQ ID NO: 18144 - protein, 138 aa, Unknown
  Obtained from environmental sample
  DOMAIN (57)...(125): Peptidase S24-like
  misc_feature (1)..(138): Xaa is any amino acid
MALTETKEDENSKMLLKIPIVGTVAAGVPILSEENWEGTLTLHRPSLKKNRVYFAVKVRGDSMMGAGIMDGDMAVIEKQSAAVNGEIVVAVVDEAVTLKRFFKESSRIKLQAENPDYKPIYCQDVRILGRLAQIIRQY

SEQ ID NO: 18145 - DNA, 423 bp, Unknown
  Obtained from environmental sample
  misc_feature (1)..(423): n is a, c, g, or t
atgatgactccttacaacagtttcccgctattgacccttgatttttacgggaagggaaacctttacatactcaacgtgcccaatgattttggcgatctgttttcgctacccaaagaagttgcgggatacataaacaaaattttcgctcatggtaacctgtatatgcaatgccgcccccgaatgtgcatgttcatgtatgataacgatgttatcggcatatactcgcaaaagccttatgccgacgacgttgagattatactgccggcgaaatactccacggtgcgcgatattgaaacaggggcggagattacgcttgttcccgattcggcaaagaaaagattcattggcgagccagaagcaccgtctaaaatagcgcgggtatatattccgggcggcacttaccggttcttcaaactgacatag

SEQ ID NO: 18146 - protein, 140 aa, Unknown
  Obtained from environmental sample
  misc_feature (1)..(140): Xaa is any amino acid
MMTPYNSFPLLTLDFYGKGNLYILNVPNDFGDLFSLPKEVAGYINKIFAHGNLYMQCRPRMCMFMYDNDVIGIYSQKPYADDVEIILPAKYSTVRDIETGAEITLVPDSAKKRFIGEPEAPSKIARVYIPGGTYRFFKLT

SEQ ID NO: 18147 - DNA, 408 bp, Unknown
  Obtained from environmental sample
  misc_feature (1)..(408): n is a, c, g, or t
atgaaaaacacgtttaaggtgctgncggtaaatagagtcatattgagtttttactatgagtcgggagacaaatgggaaaataaccacagtttccgttttctgcgaatctttaaactgcttgttcccgagttggcggttggaaaaaccacggcggaaatttcccatttcctgggcgccgcgcttaatcccgagccgggcaaaactgtacgcaaggactaccccaccccgttaaataccgtcaaaaaaatcatgtcggacttatctttgttaaaacttttcagatgcaaaaataataatgaaggctcgaacgataccgatatatgggtaataaccgaatatggcagagagctttactccgccttccgcatgaggcagttgaataaagcgcttggaagaaccggcagttaa

SEQ ID NO: 18148 - protein, 135 aa, Unknown
  Obtained from environmental sample
  misc_feature (1)..(135): Xaa is any amino acid
MKNTFKVLXVNRVILSFYYESGDKWENNHSFRFLRIFKLLVPELAVGKTTAEISHFLGAALNPEPGKTVRKDYPTPLNTVKKIMSDLSLLKLFRCKNNNEGSNDTDIWVITEYGRELYSAFRMRQLNKALGRTGS

SEQ ID NO: 18149 - DNA, 672 bp, Unknown
  Obtained from environmental sample
  misc_feature (1)..(672): n is a, c, g, or t
ttgtgcggagcgctttcggaatgcggcgacggcggggagaagcacgcgtcgctgggtattctcggcgaaaatgatttcacggcgctgagggacgcgggtgttgtctgctacaaccacaatttggagacgagccgcgattatttcggtaagatagtgaccacgcacggttatgacgacagggtagacacagtccgtagggcaaaggcggctggtctgcgggtgtgttgcggtggcattttcggcgtcggggagagttgggaggataggatagcgctctgtttggagttgcgggggctgggggtagacaccgtgccgataaactttctgaacgcgatagagggcacgcgggttgagccgcccaaggaaacgccgattgagtttttgaaaatcgtttcgctgtacagattggccatgccaaaatcgacgattaaagtttgcggggggcgggagaagaatttgggggcactgcaaccgctgattttctttgcgggggctaacgggtatatcacgggcgggtatttgaccacgggcggagcggggttggaggcggacgacgggatgattggggcgctggggttgcatagagaaagtcaacatcaaaatcattttggaaaaatgaacacaccaagtggaagaaccttgccgcgtggtaacgtgattccgaccctatag

SEQ ID NO: 18150 - protein, 223 aa, Unknown
  Obtained from environmental sample
  DOMAIN (105)...(195): Biotin and Thiamin Synthesis associated domain
  misc_feature (1)..(223): Xaa is any amino acid
MCGALSECGDGGEKHASLGILGENDFTALRDAGVVCYNHNLETSRDYFGKIVTTHGYDDRVDTVRRAKAAGLRVCCGGIFGVGESWEDRIALCLELRGLGVDTVPINFLNAIEGTRVEPPKETPIEFLKIVSLYRLAMPKSTIKVCGGREKNLGALQPLIFFAGANGYITGGYLTTGGAGLEADDGMIGALGLHRESQHQNHFGKMNTPSGRTLPRGNVIPTL

SEQ ID NO: 18151 - DNA, 846 bp, Unknown
  Obtained from environmental sample
  misc_feature (1)..(846): n is a, c, g, or t
gtggatccgcatgtcgcccagggacggcacgccaagggcaaggcccgcgtcaacgcttacgaggccatgcttgcgcacgaaagcgaaaaacgcgcccctgatctggaaatctacattccgccgggtccgcgcctgggcaaatccgtgttcgaggctgacgccctgagcaaatccatgggcgacaagctgctccttgacaaggcctgcttcatcatcccggccggcgccattgtcggcgtcatcggccccaacggcgctggcaagacgacgctgttcaagatgctgacaggcgaagaaaaacccgatgccggcacgctgcgcatcggcgaaaccgtcgcattcgcctatgtggatcaacagcgcgcttcgctcgttcccggcaagaccgtatacgataccgtcagcgaaggccgggaaacgatccggctcggcgcgcgcgaaatcaacgcccgcgcctactgcacgcgctttaactttataggccaggatcaacagaaaaaggtggagaacctgtccggcggcgaacgcaaccgcctgcatctggccgccacgctcaagtccggcggcaacgtcatcctgcttgacgaaccgaccaacgacctggacgtcaacaccatgcgcgccctggaagaaggcctggagaattttgccggctgcgtgctggtcatcagccacgatcgctggtttctggatcgcatcgccacccacatcctggcctttgagggcgactccgccgttgtctttcacgagggcaactacagcgactacgaggcggatcgcanaaaacgcctgggcaaggaagccgatcagccacaccgcatcaagttccgcaagctgacgcgatga

SEQ ID NO: 18152 - protein, 281 aa, Unknown
  Obtained from environmental sample
  DOMAIN (75)...(243): ABC transporter
  misc_feature (1)..(281): Xaa is any amino acid
MDPHVAQGRHAKGKARVNAYEAMLAHESEKRAPDLEIYIPPGPRLGKSVFEADALSKSMGDKLLLDKACFIIPAGAIVGVIGPNGAGKTTLFKMLTGEEKPDAGTLRIGETVAFAYVDQQRASLVPGKTVYDTVSEGRETIRLGAREINARAYCTRFNFIGQDQQKKVENLSGGERNRLHLAATLKSGGNVILLDEPTNDLDVNTMRALEEGLENFAGCVLVISHDRWFLDRIATHILAFEGDSAVVFHEGNYSDYEADRXKRLGKEADQPHRIKFRKLTR

SEQ ID NO: 18153 - DNA, 492 bp, Unknown
  Obtained from environmental sample
  misc_feature (1)..(492): n is a, c, g, or t
ttgtggggtcacgggcatcctccatctgagcacaacccgcatgatcccgcgtggggcggttggagtaccgtgcaggctctggacgaatatctgtgggccggagtgccgcccggaaaaataacactgggcatcgggttctacggaaaagcgtggcagggagtagggaagggtgactacgaggacacccccggtctgtaccagccctacaagtcagttccaaattatccaccttttgatcaggggacgataagctggactagtattaaggaattcctgaaacccggttcgggctacaaacgctactgggacgatatgggccaggctccttatatttacaacggcgacatttggatcagctacaccgatccggaacagataaagattttaaccaagtttgttaaagaaaataaactaggcggggtctttgtctgggaatacggccatgacatgaacgccgaattgatgaaagctctggcggagagttcacaataa

SEQ ID NO: 18154 - protein, 163 aa, Unknown
  Obtained from environmental sample
  misc_feature (1)..(163): Xaa is any amino acid
MWGHGHPPSEHNPHDPAWGGWSTVQALDEYLWAGVPPGKITLGIGFYGKAWQGVGKGDYEDTPGLYQPYKSVPNYPPFDQGTISWTSIKEFLKPGSGYKRYWDDMGQAPYIYNGDIWISYTDPEQIKILTKFVKENKLGGVFVWEYGHDMNAELMKALAESSQ

SEQ ID NO: 18155 - DNA, 456 bp, Unknown
  Obtained from environmental sample
  misc_feature (1)..(456): n is a, c, g, or t
atgaaaaataaattatcaggcgtcattcatcccgccgttatcgcggtatgggccgccgtttgcgccgccggttttttactgcctaccgttcccatctggggcacgggcagcgttttttccgtttcttcagcgcttgctccgctttcgggaatttttttcggcccgatagcgggcgcgttgtgttcggcggcgggcggctttatcggcagtttaatcgccccgcataccgcgtggatgggccttggaacttttcttatcgggacggtaacggcctttaccgccggatgtatcgcatgggggaaatggccgcctgttatgataaataaaaacggaagttttattgtcagcgggggaatcattgtttatataatagggacggttctttggtttactcaggaaacaggaaggaaggcaatattactgccgctgtttcttacggactctcggccgatctga

SEQ ID NO: 18156 - protein, 151 aa, Unknown
  Obtained from environmental sample
  SIGNAL (1)...(22)
  misc_feature (1)..(151): Xaa is any amino acid
MKNKLSGVIHPAVIAVWAAVCAAGFLLPTVPIWGTGSVFSVSSALAPLSGIFFGPIAGALCSAAGGFIGSLIAPHTAWMGLGTFLIGTVTAFTAGCIAWGKWPPVMINKNGSFIVSGGIIVYIIGTVLWFTQETGRKAILLPLFLTDSRPI

SEQ ID NO: 18157 - DNA, 411 bp, Unknown
  Obtained from environmental sample
  misc_feature (1)..(411): n is a, c, g, or t
atgcaaaatccggacagccagctctttaccgactccgttttcaacgaagtttcctttgctttgaagaacgcgcgtctaccgaaaacggaaatacagaagcgggtaaatgaagcgcttgttaccgtgggacttacggaacctgacgcttttcctcactctttaagcagatctgatcgtacaaaagttgtaatcgcttccgttctggctatgggcggcaggattttaatttttgacgaagttgatataggacaggattacaaaggctgtattcatattatgaatatcgcaaaagagcttcattcaaggggctgtacaattatttttgttacgcataatatgtctcttgtatgcgaatatgcccgcagggtaattgttatgaacaggaacggaatactgcaatatgaaaaataa

SEQ ID NO: 18158 - protein, 136 aa, Unknown
  Obtained from environmental sample
  DOMAIN (4)...(130): ABC transporter
  misc_feature (1)..(136): Xaa is any amino acid
MQNPDSQLFTDSVFNEVSFALKNARLPKTEIQKRVNEALVTVGLTEPDAFPHSLSRSDRTKVVIASVLAMGGRILIFDEVDIGQDYKGCIHIMNIAKELHSRGCTIIFVTHNMSLVCEYARRVIVMNRNGILQYEK

SEQ ID NO: 18159 - DNA, 936 bp, Unknown
  Obtained from environmental sample
  misc_feature (1)..(936): n is a, c, g, or t
gtggcgggcggagatggcatacttggcggcagctttaaccctattcattacgggcatctgttccttgcggacgcggttctgtccgaattacgctatgaccgcgtgatcatggttcccgcgtatatatcccctttcaagccggcggcacccggcatggaagacagcgcgaaagatcgcctggaaatgctcgccgcttccattaacgcggatccccggctttccgttgacgattgcgagataaggcgggaaggggtttcctataccgtggacacggtcgccgacattatccgccgctacgctcctgacggcaaaccgggactcatcattggcgatgatatagccgcggaattcccaagatggtacaagagcgatgagattctcttgatggcggatataatcatcgcgcggcgcgttcattcaaacagatcggagattccttttccctatacagggataacaaatgatattatggaaatctcttcaggcgcggtcagggaaaaaatcgcgtcaaactcgtcatggcgttatcttgtgcccgacgccgcaaggataataatcgaagaccggaaactctacggctgccgcggctcggccgccaatccccgggtcgcggcgattaaaactctcatccgccgtattgaggatgaagcgcgcgaaaaccttaacctggcgcgttttctccattcccgacataccgcgctgttggcctgggatctatgctgccgtttcagaccggattacccctcccttgacccggccacaggttatttaacggggatcgcccacgatctgtgcaagcagttacgcgatgaggaacagatcangctggcgaaaatatacggcggagaaatatcgaatgtggaaaaggcaaagccgtcgttgctgcacggcagggcctgcgccgttgtgctaaaggagcgttttaacattaaatga

SEQ ID NO: 18160 - protein, 311 aa, Unknown
  Obtained from environmental sample
  DOMAIN (7)...(167): Cytidylyltransferase
  misc_feature (1)..(311): Xaa is any amino acid
MAGGDGILGGSFNPIHYGHLFLADAVLSELRYDRVIMVPAYISPFKPAAPGMEDSAKDRLEMLAASINADPRLSVDDCEIRREGVSYTVDTVADIIRRYAPDGKPGLIIGDDIAAEFPRWYKSDEILLMADIIIARRVHSNRSEIPFPYTGITNDIMEISSGAVREKIASNSSWRYLVPDAARIIIEDRKLYGCRGSAANPRVAAIKTLIRRIEDEARENLNLARFLHSRHTALLAWDLCCRFRPDYPSLDPATGYLTGIAHDLCKQLRDEEQIXLAKIYGGEISNVEKAKPSLLHGRACAVVLKERFNIK

SEQ ID NO: 18161 - DNA, 642 bp, Unknown
  Obtained from environmental sample
  misc_feature (1)..(642): n is a, c, g, or t
atgcccatgttccgccggcaaagattttttcttggttttctcaaacgccaggcggagatgaataataaaattaataaccgggccgttcttcagacgtacctgtcatttatgcaaaacaaccttaaccagcaagcaaagagccgcctgcttgaagaattcgcgaaaatagatatggacaggatcaatatacagacagtagggggaaacttgcgggaagtgtccggaaagatacagattatcccttcttatgacggaaaccttgtgaaggatattgtcaggcaggttttgagtacgttgaccaatcctgccaatattacccatggtgacagggtttatacggcggaagttcttaacgggactgctgtatccggccttgcgggaaggaccgctgaaatttatcggggctttggctatgatgtcatttctatcggcaatgccccccataccggctatgaaaataccgtactcatagatcgctcaggcgtggatggggcggcggaagtttttgccgggataatccgctgcaagattatcagccaggagactcccggcagggaaaatccggaaaatattgagtatcgttctgattttactcttataataggaagggattttaatggaaggtacgttatcggaaactga

SEQ ID NO: 18162 - protein, 213 aa, Unknown
  Obtained from environmental sample
  misc_feature (1)..(213): Xaa is any amino acid
MPMFRRQRFFLGFLKRQAEMNNKINNRAVLQTYLSFMQNNLNQQAKSRLLEEFAKIDMDRINIQTVGGNLREVSGKIQIIPSYDGNLVKDIVRQVLSTLTNPANITHGDRVYTAEVLNGTAVSGLAGRTAEIYRGFGYDVISIGNAPHTGYENTVLIDRSGVDGAAEVFAGIIRCKIISQETPGRENPENIEYRSDFTLIIGRDFNGRYVIGN

SEQ ID NO: 18163 - DNA, 864 bp, Unknown
  Obtained from environmental sample
  misc_feature (1)..(864): n is a, c, g, or t
atggaacgaacnggcatggggattgaaacaaagcataataacaacatcccgaagaattactacctgactcctgaagaagaaggggcgataatagcgtatatcattgataacccactgaaaggctaccgcgtgctgtgttatgagatgattgataaaaatatagcgtttgtatcttgttcaagcgtctataacgtcataaaacgccataatctgggtaaaaagtgggcacagatggcagaggaggcgaagaagggttttgaccagccggaaacggttcacgagcaatggcacatagatttttcatacatcaagatacaaaactcgttttattattttatcggtatccttgacggctacagccggaaaatgttgaactggaagctctgcgaaaacatggagggcattaacgctgaaatcctggtcgcgcaaaccaaggagatgtaccctgaagcggtcaacccgcggctgataagcgataacggcagccagttcatatcaaaagattttgaagaactgctctctcttttggaagtcgggcacacgcttacatccccgaaccacccgcagagcaacggcaaactggagcggttccaccgcaccttaaagactgaacacgtaaggagggcatcgtatttagaataccaggacgcctgtataaggctggcggcatggatcgcgtattacaacagcgagaggcttcacagcgcgatctggtatttaacgccgaatgacgtattttatggcagggcggcggaacggcttgcagaacgtaaagaaaaaatgcatactgcatgtatgaagagacaggaatactggcagacacaaaatgccgggttcctgacacaccttatatgcttgccttaa

SEQ ID NO: 18164 - protein, 287 aa, Unknown
  Obtained from environmental sample
  DOMAIN (88)...(247): Integrase core domain
  misc_feature (1)..(287): Xaa is any amino acid
MERTGMGIETKHNNNIPKNYYLTPEEEGAIIAYIIDNPLKGYRVLCYEMIDKNIAFVSCSSVYNVIKRHNLGKKWAQMAEEAKKGFDQPETVHEQWHIDFSYIKIQNSFYYFIGILDGYSRKMLNWKLCENMEGINAEILVAQTKEMYPEAVNPRLISDNGSQFISKDFEELLSLLEVGHTLTSPNHPQSNGKLERFHRTLKTEHVRRASYLEYQDACIRLAAWIAYYNSERLHSAIWYLTPNDVFYGRAAERLAERKEKMHTACMKRQEYWQTQNAGFLTHLICLP

SEQ ID NO: 18165 - DNA, 399 bp, Unknown
  Obtained from environmental sample
  misc_feature (1)..(399): n is a, c, g, or t
ttggagaatattttgcgcttgcagaatcactcagncttttacgcaaagcaaacagggaataaaaaagcagaaattttggcaaaaaccttagaccttgcgaatgggaacattttggaattcaaccgagttccagctcgcaaacttggcgagttggacaacaggggttcgcatttttatctggctctttactgggctacagaacttgctaaacaaaacgaagatttggagctgaaaaccaaatttgaatccattgcaaaacgtttaagcgaaaacgagcaaaaaatagttgcaaagctagccgcagaacaaggaaaacccgttgatattggtggctattatttgccagatgcggagaagctctcaggggtgatggctaatgcttatttaagcgatgtctga

SEQ ID NO: 18166 - protein, 132 aa, Unknown
  Obtained from environmental sample
  misc_feature (1)..(132): Xaa is any amino acid
MENILRLQNHSXFYAKQTGNKKAEILAKTLDLANGNILEFNRVPARKLGELDNRGSHFYLALYWATELAKQNEDLELKTKFESIAKRLSENEQKIVAKLAAEQGKPVDIGGYYLPDAEKLSGVMANAYLSDV

SEQ ID NO: 18167 - DNA, 753 bp, Unknown
  Obtained from environmental sample
  misc_feature (1)..(753): n is a, c, g, or t
atgcttgaagaattcaacgattccacgaaaagcgtagctgaaatgtccattcagctcgccaaccccgacacaattcgcgattggtcttacggcgaggtaaccaaaccagaaactatgaattaccgctcattcaaaccggaaagagacggcttgttctgcgaaaagatttttggtccctacaaaaactgggaatgcaactgcggcaaatacaaaagacgccgttttcagggcgttatatgcgaccgctgcggagttgaggttacaacatccaaagttcgccgcgagcgtatggggcatattgaacttgctattccaattgcccatatatggtttttcaaaaaccaaccttgcataataggaaatttgctaggagtttctgcaaaagatttggaaagggttatatattatgagcaatatatggtcatagacccaggcaattccaaattcaaaaagaatcagataataaccaacgaagattatgacgatgccaaaaaagaaggcatatcttttgttgccgaaatgggtgccatagccataagaaaagttttgagcgaagccaatttgaaattagatgaactctctgccgaactatctactttggcatctgaaagtggttcaaaaagcgtgaaaatagatgccttgaaaaggctcaaatttgttgaggcatttaaaaactcccccaacaaaccagaatggatgataatagatgttctacccgttattccaccggacttgcgcccacttgtgcaatag

SEQ ID NO: 18168 - protein, 250 aa, Unknown
  Obtained from environmental sample
  DOMAIN (9)...(250): RNA polymerase Rpb1, domain 1
  misc_feature (1)..(250): Xaa is any amino acid
MLEEFNDSTKSVAEMSIQLANPDTIRDWSYGEVTKPETMNYRSFKPERDGLFCEKIFGPYKNWECNCGKYKRRRFQGVICDRCGVEVTTSKVRRERMGHIELAIPIAHIWFFKNQPCIIGNLLGVSAKDLERVIYYEQYMVIDPGNSKFKKNQIITNEDYDDAKKEGISFVAEMGAIAIRKVLSEANLKLDELSAELSTLASESGSKSVKIDALKRLKFVEAFKNSPNKPEWMIIDVLPVIPPDLRPLVQ

SEQ ID NO: 18169 - DNA, 558 bp, Unknown
  Obtained from environmental sample
  misc_feature (1)..(558): n is a, c, g, or t
atgcgtcagcaaatggccgcaggtcggcccggctttaccgctgactatgcgagactggatattatttttagacatggtggcatctacctagatatagacgttgagatcatccgcaacatggacatactgctttattactcagctttttgtgggtttcagagcaccaaatatgtcaacctcggccaaggatttggcgcaatgccaaatcacccaatgattaaatcgtttcgggatgcctatgactctctgaacttttcttctactgaaatacccaatagcacaattaaatttgtaacatctccagaaattcaaacacccgtaatgcagaggcatggattgaaattgaatggcgaatttcagattatatgcgacatggctgttttgcccgcagtttatttgaacccctataaccagcatacagacagatattttgggacagaacagacattctctatgcatgaatatgctggctcatggctgacacaagaagaattgaccaagcaccatcaaaatactaaatccgcaactaccaaattccggcccttgcatggactgtag

SEQ ID NO: 18170 - protein, 185 aa, Unknown
  Obtained from environmental sample
  misc_feature (1)..(185): Xaa is any amino acid
MRQQMAAGRPGFTADYARLDIIFRHGGIYLDIDVEIIRNMDILLYYSAFCGFQSTKYVNLGQGFGAMPNHPMIKSFRDAYDSLNFSSTEIPNSTIKFVTSPEIQTPVMQRHGLKLNGEFQIICDMAVLPAVYLNPYNQHTDRYFGTEQTFSMHEYAGSWLTQEELTKHHQNTKSATTKFRPLHGL

SEQ ID NO: 18171 - DNA, 807 bp, Unknown
  Obtained from environmental sample
  misc_feature (1)..(807): n is a, c, g, or t
atgacgcataacgaaattcccgaacttgtaaataaggcgcgtaaggcgcagggtttttgggcggagctttcgtataacgaaagggcgcggcgtattaaaaaagcggggcgcagccttgccgaaaagcgcgatgaagttacggaaataatccaccgtgaaaacggcaagctgaaaattgacgctcttgctgcggaggttattcccgcgctcatggcgattccttactatgtcaaacaggggcggcgtctttgtaaaccgcagaaaataaaaggcggcaatattctgatggtttataaacaaagccgaatggtatacagcccatggggagtggttggaatcatctctccctggaactatcccttttcaattcctttctccgaagtcataatggcgcttcttgcgggtaacgcggtaattcttaaaacggcatcgcttactcccggagcgggacgcatcattgcggaaatactcaaggcggcgaatcttccggacgggctttttataaatgttgaactggcggggagtgaagcggggcctgcttttatcaacgggggaatagacaaactgttttttacaggttctaccgctgtaggcaaggaacttatggctcttgccgccaggaggcttctccccctcacccttgaactcggcggcgctgatgcggcgatagtttgcaaagacgccgatattgaccgcgctgtctcgngaattatctgggcaggtttttcaaatgccggacaatcctgcggcggagtccagcgggttttggttcatcgcgacattcacgataaatttttggaaaaataa

SEQ ID NO: 18172 - protein, 268 aa, Unknown
  Obtained from environmental sample
  DOMAIN (3)...(268): Aldehyde dehydrogenase family
  misc_feature (1)..(268): Xaa is any amino acid
MTHNEIPELVNKARKAQGFWAELSYNERARRIKKAGRSLAEKRDEVTEIIHRENGKLKIDALAAEVIPALMAIPYYVKQGRRLCKPQKIKGGNILMVYKQSRMVYSPWGVVGIISPWNYPFSIPFSEVIMALLAGNAVILKTASLTPGAGRIIAEILKAANLPDGLFINVELAGSEAGPAFINGGIDKLFFTGSTAVGKELMALAARRLLPLTLELGGADAAIVCKDADIDRAVSXIIWAGFSNAGQSCGGVQRVLVHRDIHDKFLEK

SEQ ID NO: 18173 - DNA, 324 bp, Unknown
  Obtained from environmental sample
  misc_feature (1)..(324): n is a, c, g, or t
ttgcaaactatcgccgcatcagcgccgccgagttcaagggtgagggggagaagcctcctggcggcaagagccataagttccttgcctacagcggtagaacctgtaaaaaacagtttgtctattcccccgttgataaaagcaggccccgcttcactccccgccagttcaacatttataaaaagcccgtccggaagattcgccgccttgagtatttccgcaatgatgcgtcccgctccgggagtaagcgatgccgttttaagaattaccgcgttacccgcaagaagcgccattatgacttcggagaaaggaattgaaaagggatag

SEQ ID NO: 18174 - protein, 107 aa, Unknown
  Obtained from environmental sample
  misc_feature (1)..(107): Xaa is any amino acid
MQTIAASAPPSSRVRGRSLLAARAISSLPTAVEPVKNSLSIPPLIKAGPASLPASSTFIKSPSGRFAALSISAMMRPAPGVSDAVLRITALPARSAIMTSEKGIEKG

SEQ ID NO: 18175 - DNA, 762 bp, Unknown
  Obtained from environmental sample
  misc_feature (1)..(762): n is a, c, g, or t
gtgaatgtctccgcaccgcctgtaactgtggacatttccggccccaccctcggcttccattcagagcctgaattcttcagcccggacaatgacggtgtaaacgacgaactattcatcgtcctttccgcaagggacatatccccaattgccgagtggtctttggatatatgcgaaacagaagggaccaaacagctattctaccgatttagcggcagaggcagcccgtcggaaaggataatctgggacggaaggagcagttggggtgaacttgttcaaagcgcctccgactacgaattcacctacaccgcaaaagatacgcttgggaacgccagtaccatgacgggaataatttctactgatgtgttggttatccgcgacggcgacatactgcgtatccaaatcccttcgattacattcagggcaaacgaagccgattttatcggcatacccagggaaaggcaggaaaccaatacacgcgtattaaagcggatggcggaaatcctgaacaaattcagggattacaagatcatcgttgaaggccatgcgaaccccgtgctaagaaccgccaaggaagagaacgaggtgcttaaacccctcagccttgcccgtgcccagttcgtcattgaacaccttgtaaacaacggagtaagccgcagccgcctttcgcccacaggccagggcggcacaagaaacgtggcaaacagccaggatcaaaataacaactggaaaaacaggcgggtggagtttttgttgatcaaataa

SEQ ID NO: 18176 - protein, 253 aa, Unknown
  Obtained from environmental sample
  DOMAIN (138)...(245): OmpA family
  misc_feature (1)..(253): Xaa is any amino acid
MNVSAPPVTVDISGPTLGFHSEPEFFSPDNDGVNDELFIVLSARDISPIAEWSLDICETEGTKQLFYRFSGRGSPSERIIWDGRSSWGELVQSASDYEFTYTAKDTLGNASTMTGIISTDVLVIRDGDILRIQIPSITFRANEADFIGIPRERQETNTRVLKRMAEILNKFRDYKIIVEGHANPVLRTAKEENEVLKPLSLARAQFVIEHLVNNGVSRSRLSPTGQGGTRNVANSQDQNNNWKNRRVEFLLIK

SEQ ID NO: 18177 - DNA, 813 bp, Unknown
  Obtained from environmental sample
  misc_feature (1)..(813): n is a, c, g, or t
gtgcgtttgcacaagcagtctgtttctacttcaccgggaactattccggcggttgttttatcaatccgtcttgaaggcgacccatcaaaaaaattggaaataatcgagaaagaactggctctacttagccaaaaatctttgggtgttggagagcttaacattgaaaaaggccacgcacttttcgatttaaaacggttttccgaagctgtcggcgcttttgatactgctttttcttcgggaattaacaaagtttacaaagacagttacggacaggaaagagaccgcgcctgggaacttcgcaacgcaaccggagtgaacgcgggatccctcagtctgcttggacgcgaaagcattacatggaacgactgtattgctcttgcaaaaaacgaaacgcagctttttaggtttattacaggcggcagaaatattacggatgcggaattgttcatccgccttgttgaacgcgcttttattccgtatacccaggatataacggtaactcaatggccgtcggcaaaaccaaaacccgacgaagccgtaacacgcgccggagctgctttttttatctggcatctgtacgccgaagcgcgcggggaccgtggaatgttaacccgttattccgcacgttatgcgacaggtacaaaaccccgcactccaatccccgatacgcccgcgctttcacccttctttgattcaatccttggctgtgttgagacggaactgttgtccctccccgacggacggaattttcgtcccactcagtttataaaaggcgcggaacttcttgcgatacttaaaaaaattgataattaa

SEQ ID NO: 18178 - protein, 270 aa, Unknown
  Obtained from environmental sample
  misc_feature (1)..(270): Xaa is any amino acid
MRLHKQSVSTSPGTIPAVVLSIRLEGDPSKKLEIIEKELALLSQKSLGVGELNIEKGHALFDLKRFSEAVGAFDTAFSSGINKVYKDSYGQERDRAWELRNATGVNAGSLSLLGRESITWNDCIALAKNETQLFRFITGGRNITDAELFIRLVERAFIPYTQDITVTQWPSAKPKPDEAVTRAGAAFFIWHLYAEARGDRGMLTRYSARYATGTKPRTPIPDTPALSPFFDSILGCVETELLSLPDGRNFRPTQFIKGAELLAILKKIDN

SEQ ID NO: 18179 - DNA, 366 bp, Unknown
  Obtained from environmental sample
  misc_feature (1)..(366): n is a, c, g, or t
gtgctggacatacttagggacaggcttccgccaagaggcggggtacttcactgctactccgaaaacgccgaatacgccaaaaaggccctcgacctcaatttgtacttttcctttgccggaaacctgacctaccggaacgccaaaaaccttcatgagaccgttgaagttcttccgcttgacaggattttaatagaatccgagagtccttttatggttccggcggatcaccgcggcaaaagaaatatgccgaagtacctccccctaacctcgcgtttccttgccgaaatgctggaaatggacgaagaagagctaagcgcggccctctgggacaacgcaaaccgcttcttcggcctacccaacgaataa

SEQ ID NO: 18180 - protein, 121 aa, Unknown
  Obtained from environmental sample
  DOMAIN (1)...(117): TatD related DNase
  misc_feature (1)..(121): Xaa is any amino acid
MLDILRDRLPPRGGVLHCYSENAEYAKKALDLNLYFSFAGNLTYRNAKNLHETVEVLPLDRILIESESPFMVPADHRGKRNMPKYLPLTSRFLAEMLEMDEEELSAALWDNANRFFGLPNE

SEQ ID NO: 18181 - DNA, 711 bp, Unknown
  Obtained from environmental sample
  misc_feature (1)..(711): n is a, c, g, or t
ttgaatcgcatttcacgccatttgcatatagaagagcttattctggaacaaaccgtattattgaggcaaagaactcagcagcttgagcagctgaacaccagcatcatatccattatggccgaactggtagaagacagagataagctaaccggtggccatattgaacgcacttcaagatatttaagaatgctggttgatgctatgcaggagcgtggaatttacgcagatgaattacaagattgggataaagatatgataattgcctcgtccagattgcacgatgttggcaaaattacaatttcggattcgattttgaacaaacccggtaagctcactaaagaggaatacgaacagataaagacacatgtcactgcaggagagaggattattgacaatatgattatgcaaaccagcggaggaatttttctgtactacgcaaagctttttgttgggtatcaccacgagcattgggatggctctggttatccacataaattgaaaggtactgaaattcctttgcaagggcgtctattggcattagtagatgtttatgatgctcttgtttcggaaagggtttacaaaccagccttcccgcacgaagaagcggtgcgcatcattatgtccgaaaaaggcaaaagctttgacccgcaaattgcggatgtgttttatgaaatacaagaccaattccgtgatgaggtaaaaacttcgtga

SEQ ID NO: 18182 - protein, 236 aa, Unknown
  Obtained from environmental sample
  DOMAIN (50)...(187): HD domain
  misc_feature (1)..(236): Xaa is any amino acid
MNRISRHLHIEELILEQTVLLRQRTQQLEQLNTSIISIMAELVEDRDKLTGGHIERTSRYLRMLVDAMQERGIYADELQDWDKDMIIASSRLHDVGKITISDSILNKPGKLTKEEYEQIKTHVTAGERIIDNMIMQTSGGIFLYYAKLFVGYHHEHWDGSGYPHKLKGTEIPLQGRLLALVDVYDALVSERVYKPAFPHEEAVRIIMSEKGKSFDPQIADVFYEIQDQFRDEVKTS

SEQ ID NO: 18183 - DNA, 684 bp, Unknown
  Obtained from environmental sample
  misc_feature (1)..(684): n is a, c, g, or t
ttgccggattcagattacaaatacgatccgagggtgatttttatcgaggatcgttattacattatttggtgcaacggttacttcggtccaaacctgggtataggctatacctatgattttgagaaattctatcaaatggaaaacgcgctgatgccctacaacaggaacggcgctcttttcccgcgcaaaatcggtaagaactacgccatgtacagccgtcccagtgattcgggacatacgccgttcggcgacattttctattcagaaagcccggatatgatgtattggggaaagcaccgccatgtcatggggcctgtgggcggatggcagagtaccaaagtcggcgcggggccttgcccaatcgaaaccaccgaaggctggctgttgttttaccacggggttttgacaagctgtaacggctttgtctattcatttggggccgccctgctcgatcttgaaaagccctggaagctaattgcccgcagccggccatacatcatcaacccgcgggagatatacgaattagccggagatgtgcctaacgtaacattcccatgcgccgcactggtagacaaggataccggcagggtcgcgatttactacggcgctgcggatacggtaaccggactggccttcggtaaaattgacgaaatcgttgagtgggtgatggcgaataggttataa

SEQ ID NO: 18184 - protein, 227 aa, Unknown
  Obtained from environmental sample
  DOMAIN (1)...(224): Domain of unknown function (DUF377)
  misc_feature (1)..(227): Xaa is any amino acid
MPDSDYKYDPRVIFIEDRYYIIWCNGYFGPNLGIGYTYDFEKFYQMENALMPYNRNGALFPRKIGKNYAMYSRPSDSGHTPFGDIFYSESPDMMYWGKHRHVMGPVGGWQSTKVGAGPCPIETTEGWLLFYHGVLTSCNGFVYSFGAALLDLEKPWKLIARSRPYIINPREIYELAGDVPNVTFPCAALVDKDTGRVAIYYGAADTVTGLAFGKIDEIVEWVMANRL

SEQ ID NO: 18185 - DNA, 414 bp, Unknown
  Obtained from environmental sample
  misc_feature (1)..(414): n is a, c, g, or t
atgcagcagcccgccgagccaaaggagaaagatctggcttcttctctcgacctctccgaaatgctggaccccttgctgggttccacccaaggagcagaagtattgaacgatgacaccaaggcagccgaaacgacacagaccgcagaggacttgttcaacgcctttagagacggagtcgcggcaaaagtggggagcgatgattatgacacccactacaaccttgggatcgcctacaaagaaatgatgctggccgacccagccatagaagagttcaaaaaagcgatggttgacccggagcgcacgttggattgctgttccatgctggctatgtgcgaaaagatgaatggaaacaacgctgccgccgccgattggctgcgcgtcggcatagccgcaccgggctttcccgccgattga

SEQ ID NO: 18186 - protein, 137 aa, Unknown
  Obtained from environmental sample
  misc_feature (1)..(137): Xaa is any amino acid
MQQPAEPKEKDLASSLDLSEMLDPLLGSTQGAEVLNDDTKAAETTQTAEDLFNAFRDGVAAKVGSDDYDTHYNLGIAYKEMMLADPAIEEFKKAMVDPERTLDCCSMLAMCEKMNGNNAAAADWLRVGIAAPGFPAD

SEQ ID NO: 18187 - DNA, 618 bp, Unknown
  Obtained from environmental sample
  misc_feature (1)..(618): n is a, c, g, or t
atggttccctgtgtttgtgggcagcgcccattcccttgcaatcaagtcagacggcagcctgtgggcgtgggaagcaatagccgcggacagctcggctttggcgacacnactaaccagaatgcccctgtccaagtaggcacagaaaaggactgggtggccgtgtcagctggcagcagccactcgctcgccctcaaaaccgatggcagcctttgggcgtggggaagcaatagccgcggacagctcggccttggcgacaacactaaccagaatgcccctgtccaagtaggcacagaaaaggactgggtggccgtgtcagctggcagcagccactcgctcgccctcaaaaccgatggcagcctttgggcgtgggggcgcaatgactggggccaacttggcatcagcacaaactcaaaccaaaatgcccccgttcaggtaggaactggcaaagaatgggtgttcgtgtccgctggcgacaaccatgccctcgccctcaaggcggacggcagcctttgggcttggggctacaatggcaacggccagatcggcgatggcacgaacacaaacaaggtcgttcccatccaaataggctcagagaaagctcggccgaatctgacctag

SEQ ID NO: 18188 - protein, 205 aa, Unknown
  Obtained from environmental sample
  DOMAIN (117)...(164): Regulator of chromosome condensation (RCC1)
  misc_feature (1)..(205): Xaa is any amino acid
MVPCVCGQRPFPCNQVRRQPVGVGSNSRGQLGFGDTTNQNAPVQVGTEKDWVAVSAGSSHSLALKTDGSLWAWGSNSRGQLGLGDNTNQNAPVQVGTEKDWVAVSAGSSHSLALKTDGSLWAWGRNDWGQLGISTNSNQNAPVQVGTGKEWVFVSAGDNHALALKADGSLWAWGYNGNGQIGDGTNTNKVVPIQIGSEKARPNLT

SEQ ID NO: 18189 - DNA, 393 bp, Unknown
  Obtained from environmental sample
  misc_feature (1)..(393): n is a, c, g, or t
atggctgttagcattggcaacaataaaaacaaaaagaaaattcttcttgttgatgacaacgaggtacagctttccatcgccaaaacacagctaaaaagaaaatatgaagttaccagcgccaaatccgggaaagaagcgctcgatcacctgttccatggtcttattcccaacctgattatacttgatatacttatgcccgatatggacgggtgggagacatttggcagactaagggctatcagcaagctgcatgaagtccccatagtatttctgtcttcaataaatgatcaaaaagagattgaccgtgctttcgatatgggtgccgcggattttttggtcaagccatgcagtagcaaagaatttatgggaagaattggaaaagccgtcaaatga

SEQ ID NO: 18190 - protein, 130 aa, Unknown
  Obtained from environmental sample
  DOMAIN (12)...(126): Response regulator receiver domain
  misc_feature (1)..(130): Xaa is any amino acid
MAVSIGNNKNKKKILLVDDNEVQLSIAKTQLKRKYEVTSAKSGKEALDHLFHGLIPNLIILDILMPDMDGWETFGRLRAISKLHEVPIVFLSSINDQKEIDRAFDMGAADFLVKPCSSKEFMGRIGKAVK

SEQ ID NO: 18191 - DNA, 660 bp, Unknown
  Obtained from environmental sample
  misc_feature (1)..(660): n is a, c, g, or t
ttgcgagcgggagcatcttttttttccgtgtctgttcttgccggaacatcagtggacggcctgaccttccgactggcggaacgtggattgtccggcctggaattccttgcgggaatgcccggctcggtgggcggcgctgtatggatgaacgccaggtgttacgagaaatccgtttcagacgtgcttctggaaacggaaatattgaacgaggcttttgaaaaggaaagaattccctttcgcgccgaagatttttcttacaaaaaaagcccctttcagcaaagagacgttctgattctttctgcgcgctttgccgtggaattcggggaatcaaaagacatacacaaagagatagaaggtcaccgccaggatcgtgtcagcaaagggcattaccgctttccctcagctggctcggctttcaagaacaaccgggactttatggagcccacaggccgcatcatcgatcagcttggtttgcgcggcctcaacataggcggcgcgcaggttgccccctggcacggcaacctcatcgtcaacaccggaaacgctacagccagcgacatcagagtcctaatgaaagaagttgccaagcgggtaaaagaagagcgcggttttgacctggaaagcgaagttctttttgtgggggactgggaggaacgataa

SEQ ID NO: 18192 - protein, 219 aa, Unknown
  Obtained from environmental sample
  SIGNAL (1)...(20)
  DOMAIN (110)...(214): UDP-N-acetylenolpyruvoylglucosamine reductase, C-terminal domain
  misc_feature (1)..(219): Xaa is any amino acid
MRAGASFFSVSVLAGTSVDGLTFRLAERGLSGLEFLAGMPGSVGGAVWMNARCYEKSVSDVLLETEILNEAFEKERIPFRAEDFSYKKSPFQQRDVLILSARFAVEFGESKDIHKEIEGHRQDRVSKGHYRFPSAGSAFKNNRDFMEPTGRIIDQLGLRGLNIGGAQVAPWHGNLIVNTGNATASDIRVLMKEVAKRVKEERGFDLESEVLFVGDWEER

SEQ ID NO: 18193 - DNA, 690 bp, Unknown
  Obtained from environmental sample
  misc_feature (1)..(690): n is a, c, g, or t
ttgctgccggagaaaaccgtgagcgaaggcccttacgtttcccgcctttgcgcgtgggcccccggaatagggaattccggcgaatgggatgaatgggcgcggggcaaacgcgatatatcttccgacgcgaaaggtccatcaattgattttaccgaatccatgttccgccgccgtctgagtcaaatttcaaaaatgacagtacaggttgttcatgatttactgcccgtgggagaagacacgaaaatgttttttgtctcattcaggggcgaactctcgcggcagtatcagattaacaagatgttgatagaagagaaatccctgatgccggctgccttttcgctttcggtttttaacgcgcccccggcgctggctgctatagcgttggggcttaagggaggatattcggcgctgtatccgggaaacaattctttttccgcgacgctttcagcggcatcggcgtcattttcatctggtaatcaggaggaactaatttttatttacgctgatgaacaggcgccgcccgaatacgggcgctattttaccgaaattcctcccgccgcggccttcgcccttctttttacaagggaaccccaatccctttccgttcctctttcatcacttaatgaaacagaaagttgtccgcttgattttctcaggctcctactcgggaaaatgaatgttacctcctga

SEQ ID NO: 18194 - protein, 229 aa, Unknown
  Obtained from environmental sample
  misc_feature (1)..(229): Xaa is any amino acid
MLPEKTVSEGPYVSRLCAWAPGIGNSGEWDEWARGKRDISSDAKGPSIDFTESMFRRRLSQISKMTVQVVHDLLPVGEDTKMFFVSFRGELSRQYQINKMLIEEKSLMPAAFSLSVFNAPPALAAIALGLKGGYSALYPGNNSFSATLSAASASFSSGNQEELIFIYADEQAPPEYGRYFTEIPPAAAFALLFTREPQSLSVPLSSLNETESCPLDFLRLLLGKMNVTS

SEQ ID NO: 18195 - DNA, 777 bp, Unknown
  Obtained from environmental sample
  misc_feature (1)..(777): n is a, c, g, or t
ttgcatgatcgcggttcacatgaccttacggatatggctcgccagggcaaactagaccccattataggcaggcaaaaagaggtggatagattaattcaaatcctctctcgcaaaaagaagaacaaccctatactggtaggtgaacccggcgttgggaagacagccgtcatagaaggcttagcgcaaaagattgcagcaaaagaggtgccagaaaatttagaggacaaaagacttgtatcactagatatgacaagccttgttgcaggcacaaaatacagaggtcagtttgaagagagaattatctcgctcttatcagagctgcgcaaaaacaaaaatataattatgttcatggacgagctgcacaccataataggagctggcggcggcgaaggcgggctggacgcatctaatgttatgaaacccgcgctctcaagaggtgaaattcagtgcataggcgcaaccacctacaaagaattccgcagatacgtggaaagagacgccgctttggaacgccgttttcagagcatgtccatagaaccgccatcactgagcgataccgttgaaattctgcggggattagccccaaaatacgaagctcaccacaaagttatttatgatgaaaattctttaaaagccgctacttatctctctgagcgttatttgagcgagcggcatttgcccgataaagccatagacataatggacgaagctggagcgcaaacacgcattgcaaatttaactccgccgccagaactttatgaaaaggacgtgaattaa

SEQ ID NO: 18196 - protein, 258 aa, Unknown
  Obtained from environmental sample
  DOMAIN (42)...(235): ATPase family associated with various cellular activities (AAA)
  misc_feature (1)..(258): Xaa is any amino acid
MHDRGSHDLTDMARQGKLDPIIGRQKEVDRLIQILSRKKKNNPILVGEPGVGKTAVIEGLAQKIAAKEVPENLEDKRLVSLDMTSLVAGTKYRGQFEERIISLLSELRKNKNIIMFMDELHTIIGAGGGEGGLDASNVMKPALSRGEIQCIGATTYKEFRRYVERDAALERRFQSMSIEPPSLSDTVEILRGLAPKYEAHHKVIYDENSLKAATYLSERYLSERHLPDKAIDIMDEAGAQTRIANLTPPPELYEKDVN

SEQ ID NO: 18197 - DNA, 876 bp, Unknown
  Obtained from environmental sample
  misc_feature (1)..(876): n is a, c, g, or t
atgacagattggccgagtttcatttacgcctctatgggccatgtggaacggaacgggacgaaaatcaacttttttgatacgccggggtcgtcggattttgcggggaacgtgattttgagcttccgggcctcggagtttgctttattgatggtggatggccgttcgggggtgcagattgaaaccatcaaattgtggcggagcctggacacgcaaaaaaaacccaggggcgtttttatctccaagctggacaatgaccagaccgattttaacaaagcgcttgccgatgtaaaagaaaaattcaagatggaaccggtgccgtttaccctgcctatgggctcagggaacgcgttcaaaggcgttatcgacgtgctgcacgataaggcgtatctgtcgggctgggacggagtagaaaaggaatgtcccatccccgacgaattcaaagacgctgcaaaggccgcgcggcaaaggctgatagaggccgcggcggaaggcaacgacagcctcatggaacagtacctcgaaaaagaatcccttacgccggaagaaatgaaaaaagggttaatagaagccctggctgacagtaaatatatccccgcttttgcgggttcggctctgaacaattccggcattataccgtttatagattttatcgccgatgtggggcccaacccccgcgccgcanaagacgccgttcttggcggcgacgggaagccgcaggaagtttccattgacccggacaagcctctttccgctttggttattaaaaccacttatgaccaattctcgggaaaactttcctgggtcaaggtaatctccggaaaactcgccgcggatacggaagcctttaatgtttcggaaaaaaaaaagaacgcatag

SEQ ID NO: 18198 - protein, 291 aa, Unknown
  Obtained from environmental sample
  DOMAIN (2)...(225): Elongation factor Tu GTP binding domain
  misc_feature (1)..(291): Xaa is any amino acid
MTDWPSFIYASMGHVERNGTKINFFDTPGSSDFAGNVILSFRASEFALLMVDGRSGVQIETIKLWRSLDTQKKPRGVFISKLDNDQTDFNKALADVKEKFKMEPVPFTLPMGSGNAFKGVIDVLHDKAYLSGWDGVEKECPIPDEFKDAAKAARQRLIEAAAEGNDSLMEQYLEKESLTPEEMKKGLIEALADSKYIPAFAGSALNNSGIIPFIDFIADVGPNPRAAXDAVLGGDGKPQEVSIDPDKPLSALVIKTTYDQFSGKLSWVKVISGKLAADTEAFNVSEKKKNA

SEQ ID NO: 18199 - DNA, 747 bp, Unknown
  Obtained from environmental sample
  misc_feature (1)..(747): n is a, c, g, or t
gtgcagcaatacggctcaacgctagaacacgtccccaacgcgctgaagactgaagccttctaccttgccgcagtgcaaactaacggctgggcgctggaatacgtccctgacgcgaagaagaccgaggccctctgccttgccgctgtacaacaagagggtcgtgcgctgcaatacattcccgacacgataaaaaccgaggccctctgccttaccgcagtgcaaaacaacgacgctttttacgttcccgatgtgcttcaatgcatccccgatgcgctgaagaccgaagccgtttgccttgtcgccgtacaaaaaaactactatgcgctgcaatacgtcccggagacgctgaagaccgaagccatctgccttgccgccgtgcaacaagacggccaggcactgcaatacgtccccaatgcgctgaaaaccgaagccctctgcattgaggcgatgagacattccagtgttcatataactcttctttatagggggggtatgggtatgcagacgccaccgccgcctactcatccgttacaactggtgcctgaagaactgaaaaccgaggccgtctgccttgccgcgatgctaagcgatcagcatgctgcgataccaagtaattttactgcgctggatttcatgcccgaagcgctaaggcctcaagttagatacctcgccgaagtgatcaaatccacaatttcttcagggtcaggcagttctggataccgcataaggtttaataaaccagtataa

SEQ ID NO: 18200 - protein, 248 aa, Unknown
  Obtained from environmental sample
  misc_feature (1)..(248): Xaa is any amino acid
MQQYGSTLEHVPNALKTEAFYLAAVQTNGWALEYVPDAKKTEALCLAAVQQEGRALQYIPDTIKTEALCLTAVQNNDAFYVPDVLQCIPDALKTEAVCLVAVQKNYYALQYVPETLKTEAICLAAVQQDGQALQYVPNALKTEALCIEAMRHSSVHITLLYRGGMGMQTPPPPTHPLQLVPEELKTEAVCLAAMLSDQHAAIPSNFTALDFMPEALRPQVRYLAEVIKSTISSGSGSSGYRIRFNKPV

SEQ ID NO: 18201 - DNA, 381 bp, Unknown
  Obtained from environmental sample
  misc_feature (1)..(381): n is a, c, g, or t
gtgttttttgagtctacggagaatgaaacccgtactgttacggcaaactctcttcccgcaaaggctatcgaatttgccggaggcataaacgcggcgcctaatcttcctcccatgtccccgggaagttccattgcccggttcggtacagaagccctgcttggcatagcggataacattgatgtgtatgttgtccaccagggaaccatgaacaggacttccggcatcgaagcgcttagggcgcgtcccgggtttggcgcggtaaaggccgttcgggaaggacaggttctttttatcagcgggaagcttatctcctccgttacattccggtatcttgagggtgtaagaattcttgcggattatctgtatccgggtttaaaatga

SEQ ID NO: 18202 - protein, 126 aa, Unknown
  Obtained from environmental sample
  misc_feature (1)..(126): Xaa is any amino acid
MFFESTENETRTVTANSLPAKAIEFAGGINAAPNLPPMSPGSSIARFGTEALLGIADNIDVYVVHQGTMNRTSGIEALRARPGFGAVKAVREGQVLFISGKLISSVTFRYLEGVRILADYLYPGLK

SEQ ID NO: 18203 - DNA, 390 bp, Unknown
  Obtained from environmental sample
  misc_feature (1)..(390): n is a, c, g, or t
atgtttcatgactttcggccgaatgaaaacccgtttacagggcagtactatattcacaaagggattgatatctcgacctaccggcagggcgatccaattgtggccaccgccgatggccaggttgtagctcttgagtacgactataacggattcggcaacaatgtcatcattcggcacaaacacggcttttatacccgttacgcccatatgctttcgtttaatgtacgcgccgggcagcgcgttcagcagggagaaataatcggctacataggaaacaccggcttatcaacaggcccccatcttcactatgaggttcatattggttccgatgtggtagatccttccaagtacatcactttacgtaccagcatagcgagaaacgcgcgctag

SEQ ID NO: 18204 - protein, 129 aa, Unknown
  Obtained from environmental sample
  DOMAIN (17)...(114): Peptidase family M23
  misc_feature (1)..(129): Xaa is any amino acid
MFHDFRPNENPFTGQYYIHKGIDISTYRQGDPIVATADGQVVALEYDYNGFGNNVIIRHKHGFYTRYAHMLSFNVRAGQRVQQGEIIGYIGNTGLSTGPHLHYEVHIGSDVVDPSKYITLRTSIARNAR

SEQ ID NO: 18205 - DNA, 447 bp, Unknown
  Obtained from environmental sample
  misc_feature (1)..(447): n is a, c, g, or t
atggcttcatcaaaaagcgaaagtttctccataaataccataataggccccggaaccagtgtttccggagatgtagaatcgggcgggttcacccgtgttgacggaaacgtccagggcaacgtaaaagccaaaggccgggttataatcggcgaaagggccaggatgaagagcaacataagcggtacctccataaccgtcggaggggtagtttttggcaatgtgcttgccagtgaaaggctcattgttttggctaccggtctggtaatgggggacatcatcacccggcgcatacaggccgaagaaggctgcctgattcacgggcgcgtaaaggtctgccagagcgaagaagtctggaatcgggccatttccgaatacaaggatgtggcggggctcagggaatccctgggcctgcacacccctgtcccagggtatgtaagacatggataa

SEQ ID NO: 18206 - protein, 148 aa, Unknown
  Obtained from environmental sample
  DOMAIN (3)...(115): Protein of unknown function, DUF583
  misc_feature (1)..(148): Xaa is any amino acid
MASSKSESFSINTIIGPGTSVSGDVESGGFTRVDGNVQGNVKAKGRVIIGERARMKSNISGTSITVGGVVFGNVLASERLIVLATGLVMGDIITRRIQAEEGCLIHGRVKVCQSEEVWNRAISEYKDVAGLRESLGLHTPVPGYVRHG

SEQ ID NO: 18207 - DNA, 759 bp, Unknown
  Obtained from environmental sample
  misc_feature (1)..(759): n is a, c, g, or t
gtgcttgtaccgacccgctatggccgggatctggctgaagttatacattcgattcaatgcgaagccgggcaaataccgcaggccgtcacccggattgaaaggatcgccaacgacgacgacgtatccagggctgcctcgcataaacagcaggaaaaagaagcgttcgatgtttgcaagaaaaaaatcgaagtccacaaactggatatgaagcttgtttctgttcattacattctggaagaaccgaaaatcctcttttttttcaccgccgaaagccgggttgactttagggaactcgtaaaagaccttgttaacatttttaaaaccagaatagaattacgccaaatcggagtccgggatgaatcgagggtattgggcgggcttggcgtttgcggaaggggttattgctgtcacgcggtctcggacaaactcaaacctgtttccataaaaatggcaaaagatcaaaacctgtctctgaattccacgaaaatatccgggccctgcgggcgccttctctgctgccttgcctatgaacacctgttttacggggaacaaaggcggctaattccctgcgagggaacaagaattttctgggacggctccagctggaaggtttcggaaataaatgtcgtgataggcaagctaaaacttagcagcgaagacggccgggtgatccaactgccccttgaggcgttgaaaaaaacgaaggccgctggtcaatcaacgccccaaaatagaagaataatatgcgctggcatttag

SEQ ID NO: 18208 - protein, 252 aa, Unknown
  Obtained from environmental sample
  DOMAIN (28)...(115): PSP1 C-terminal conserved region
  misc_feature (1)..(252): Xaa is any amino acid
MLVPTRYGRDLAEVIHSIQCEAGQIPQAVTRIERIANDDDVSRAASHKQQEKEAFDVCKKKIEVHKLDMKLVSVHYILEEPKILFFFTAESRVDFRELVKDLVNIFKTRIELRQIGVRDESRVLGGLGVCGRGYCCHAVSDKLKPVSIKMAKDQNLSLNSTKISGPCGRLLCCLAYEHLFYGEQRRLIPCEGTRIFWDGSSWKVSEINVVIGKLKLSSEDGRVIQLPLEALKKTKAAGQSTPQNRRIICAGI

SEQ ID NO: 18209 - DNA, 618 bp, Unknown
  Obtained from environmental sample
  misc_feature (1)..(618): n is a, c, g, or t
atgatgataattatcccctcggtattgcccggtaccattacagccatcttctgcggctacgcttttcgcaaggctcaaggtttccggggaaaaaatttctttttacccctctgcgtagtttccatgtttctaccagccatggtaccccttatacccctcttcattatgtggacaaggttcctgcatttgacagattcatacctgccgcttatactgccatatttctgcggagggggcgcttttaatatttttcttatacggcagttcatacaaactgttccgaaagagcttgacgaagcggcttttatcgacggcgccggatactggaaaatattgaccagaataataatccctgccattaagcctgcgattattgtagtatcacttcttctgtttatccttctatggggtgaccttttacagcagacgatctacatccattccatggaaaagtttaccattgccattggcttaacccaatttaaaggttccctgatgcatgattgggccaagctaatgtgcgccacatgtatgtctttcctgcccggactggttttctatctaatcggacaaaaatattttgttgagggcatcgttctgacaggaatgaaaaactaa

SEQ ID NO: 18210 - protein, 205 aa, Unknown
  Obtained from environmental sample
  SIGNAL (1)...(23)
  DOMAIN (3)...(195): Binding-protein-dependent transport system inner membrane component
  misc_feature (1)..(205): Xaa is any amino acid
MMIIIPSVLPGTITAIFCGYAFRKAQGFRGKNFFLPLCVVSMFLPAMVPLIPLFIMWTRFLHLTDSYLPLILPYFCGGGAFNIFLIRQFIQTVPKELDEAAFIDGAGYWKILTRIIIPAIKPAIIVVSLLLFILLWGDLLQQTIYIHSMEKFTIAIGLTQFKGSLMHDWAKLMCATCMSFLPGLVFYLIGQKYFVEGIVLTGMKN

SEQ ID NO: 18211 - DNA, 336 bp, Unknown
  Obtained from environmental sample
  misc_feature (1)..(336): n is a, c, g, or t
atgaccgcgtatttagttctggaaaacggtactgtaatgaaaggcgaatattttggcgctcagggagaaattacgggagaagtcgtttttgcaaccggcatgaccggctatttggagactttgacggatcaaagctactatggacagattgtcctgcaaacttttcccctcattggaaattacggagttattccgcccgattttgaaagcgcgaatgtgggagcaagggcgtatattgtcaaacatccgtgcgaaaatccgtccaacttccgatgcgagggcactcttgacgcttttttaaaagaacngcggaattacaggattatacggaattga

SEQ ID NO: 18212 - protein, 111 aa, Unknown
  Obtained from environmental sample
  DOMAIN (1)...(109): Carbamoyl-phosphate synthase small chain, CPSase domain
  misc_feature (1)..(111): Xaa is any amino acid
MTAYLVLENGTVMKGEYFGAQGEITGEVVFATGMTGYLETLTDQSYYGQIVLQTFPLIGNYGVIPPDFESANVGARAYIVKHPCENPSNFRCEGTLDAFLKEXRNYRIIRN

SEQ ID NO: 18213 - DNA, 729 bp, Unknown
  Obtained from environmental sample
  misc_feature (1)..(729): n is a, c, g, or t
ttgatattcttaataaaattcccaaagaaacccaaaataaaacatataacaacgttggctgaatttttcaagtttttagaaaaacaaggcaaggaatcatcgatcaaccgtatgtatagaggtgtacgtaactcaacgtttgagttgataccgttaatcggcaggcttaaaacatctaaaggtaagaaattcagtcgtaataaggaaatagatctttttaaggacttcaagaataaggtacacccttttatacgagaacataactataatacattagaattactttctatcgcgcaacaccatggagtacctacgcgccttcttgactggacaaaaaatcctatggtcgcggcatattttgcggttgaagaaccatttataaatgatggtaatatgacatcggaatctagttgtatttacatctataacgcgaaaaaaccgaaacaacagtatgatacattcgacccatttaaaatttgcaaggtcagatgttatgtccctaaacacatggataaaagaataattgcccaagaaggattattcactgttcataatgatccgcatacagcttggagaccaacacatttggaaaagattttaatccactgtgatgtacgtaaagaaattaaagaagcattaagtagattgggggttaatgcttgttctatctatcctgatattgacggaatagcaaaacatgtaaagtggtggcattcagacatacattga

SEQ ID NO: 18214 - protein, 242 aa, Unknown
  Obtained from environmental sample
  misc_feature (1)..(242): Xaa is any amino acid
MIFLIKFPKKPKIKHITTLAEFFKFLEKQGKESSINRMYRGVRNSTFELIPLIGRLKTSKGKKFSRNKEIDLFKDFKNKVHPFIREHNYNTLELLSIAQHHGVPTRLLDWTKNPMVAAYFAVEEPFINDGNMTSESSCIYIYNAKKPKQQYDTFDPFKICKVRCYVPKHMDKRIIAQEGLFTVHNDPHTAWRPTHLEKILIHCDVRKEIKEALSRLGVNACSIYPDIDGIAKHVKWWHSDIH

SEQ ID NO: 18215 - DNA, 591 bp, Unknown
  Obtained from environmental sample
  misc_feature (1)..(591): n is a, c, g, or t
ttggcaaagcaaaaccagaatgtcctccttttgcttatcatcatccctttctggacaaattttttgatccgcgtgttcgcatggatgaacattttggggaaccacggtttccttaacgaattcctgatccgtatcgggctgattaacgactatattcacttcctctacaatcaacgagttgtaatactggtgctggtgtatatgtacctgccctacgcgatactgccgctgttctccagtatagacaaattcgacttttcactgctggaagcggcgcgcgacctgggggcaggcaagctcaccgcattgatcagggtgatgctgcccaatatacgtggcggcattttcacggctgtgctgtttacgtttattcccatttttggcgcatacgctgtgccgcttctggtggggggcaaggactcctacatgctggggaatgtaatcgccgaccagttgtccaagtcgcgcaactggccccgggccgcggcgatttcgatggtgcttactgtggtgacaacagtcggtgtgttgctgatgatgaatgtccagcggcgggacgcatcaaggctggcggaggcgaaaaaagcatga

SEQ ID NO: 18216 - protein, 196 aa, Unknown
  Obtained from environmental sample
  misc_feature (1)..(196): Xaa is any amino acid
MAKQNQNVLLLLIIIPFWTNFLIRVFAWMNILGNHGFLNEFLIRIGLINDYIHFLYNQRVVILVLVYMYLPYAILPLFSSIDKFDFSLLEAARDLGAGKLTALIRVMLPNIRGGIFTAVLFTFIPIFGAYAVPLLVGGKDSYMLGNVIADQLSKSRNWPRAAAISMVLTVVTTVGVLLMMNVQRRDASRLAEAKKA

SEQ ID NO: 18217 - DNA, 342 bp, Unknown
  Obtained from environmental sample
  misc_feature (1)..(342): n is a, c, g, or t
atgagttttaaaagcatggtccgcaacacaattacctcgctctggccaatcaagcagggagaggccgcccgccatgcccggcgcgcaatccggcgggatttttctttctcccagtctgtatttatcgttaccatagtattcctgtttttaccccttttggtgcttatcctctattcgtttaacgattcagcgggcatgaactggaccggcctatcgctgcgctggtacaggcggctggtcgaatcgcgagagctgtggcgggcttttacaaacagcattatcgtggccgtttcttccgccttaacggcgacgtgcttggcaccgtcggcgccgtcggggtaa

SEQ ID NO: 18218 - protein, 113 aa, Unknown
  Obtained from environmental sample
  misc_feature (1)..(113): Xaa is any amino acid
MSFKSMVRNTITSLWPIKQGEAARHARRAIRRDFSFSQSVFIVTIVFLFLPLLVLILYSFNDSAGMNWTGLSLRWYRRLVESRELWRAFTNSIIVAVSSALTATCLAPSAPSG

SEQ ID NO: 18219 - DNA, 393 bp, Unknown
  Obtained from environmental sample
  misc_feature (1)..(393): n is a, c, g, or t
ttggaagtatccgttgttcccgtggatattcagcttcttcttgaacaaaaaataacgcgtaacatcagcgtatttccggtactgcggggatcggtcgcggaaggttatgagcttacaggtcagtcgctgaccccggcaagcgtaattgtcgaaggtccgcgttcaatgattgacaatcaccttgaatttaacaccgaagcaattgatcttgacgggcgaaatgtggacttctctgtcatggtgaatataaaaaatgacaaccccctgctctttattcacggaagcaatattcttgaatttcgaggctctataagacgtatatcgcgcggagtacatgaaaatattacgcatcaggcagtcgaagaagaacatttaccgggcgaggaacaatga

SEQ ID NO: 18220 - protein, 130 aa, Unknown
  Obtained from environmental sample
  misc_feature (1)..(130): Xaa is any amino acid
MEVSVVPVDIQLLLEQKITRNISVFPVLRGSVAEGYELTGQSLTPASVIVEGPRSMIDNHLEFNTEAIDLDGRNVDFSVMVNIKNDNPLLFIHGSNILEFRGSIRRISRGVHENITHQAVEEEHLPGEEQ

SEQ ID NO: 18221 - DNA, 375 bp, Unknown
  Obtained from environmental sample
  misc_feature (1)..(375): n is a, c, g, or t
atgattacgggaataggcattgatataatcgaagttaaacgcatggaacgctggcttgataaatcggaactgcttaaaagatattttcaccctcaggagataacgcttgccttctccagaaaaaaaagcgcggctcanacccttgccgcgagattcgccgcgaaagaggcgtttggcaaggctctgggaacaggtcttgccggaattgaattaaaagatattattgtaattaacaacgataaagggaagcccgacgtaaaattaacaggaaccgcggaaaatgaatttgaaaaatcgggcgctaataaagtgcatctttctcttacccatngaagagagaatgcgatagccatgatcgttttggagggggcgtaa

SEQ ID NO: 18222 - protein, 124 aa, Unknown
  Obtained from environmental sample
  DOMAIN (5)...(71): 4'-phosphopantetheinyl transferase superfamily
  misc_feature (1)..(124): Xaa is any amino acid
MITGIGIDIIEVKRMERWLDKSELLKRYFHPQEITLAFSRKKSAAXTLAARFAAKEAFGKALGTGLAGIELKDIIVINNDKGKPDVKLTGTAENEFEKSGANKVHLSLTHXRENAIAMIVLEGA

SEQ ID NO: 18223 - DNA, 669 bp, Unknown
  Obtained from environmental sample
  misc_feature (1)..(669): n is a, c, g, or t
gtgctgataagttttggcctcggcatgatgatcgccctgctctttgaagatttaaaatacaggcgccttatacggacattgcttatcgtgccttatcctattcccgtattggtttccatcatggtgtggaaggggctgcttaatgaaaacatgggactggttacaacggtaatcgccaatattttcggctcttcccccaagttctttaccgacttgaattggacccgttttgccttaatcctgatcaacgtgtatttatcgtacccctatttttatgtgctcacgtccggggcgctgaaggctatccctaaagacctctttgaagcggcgtcaattgacggcgcaagaccctttacagtggtgcgaaaaatcgttttaccgctggtaatgcgtattctttccccgctggtgattgcctctttctgtttcaacttcaataattttacccttgtctggggcttcaacgccggaggaccgccaatggcggatacggcggtgccaatgggttattcagacctgcttatctcgtttatttaccgtctcggttttagttcgtctaacgcggccgattatggtttttcagctgccattaccgtaatgctgtttattctggtggcgctgatggtgttcttccagactttgaataccaaaaccattaaggaatcataa

SEQ ID NO: 18224 - protein, 222 aa, Unknown
  Obtained from environmental sample
  DOMAIN (1)...(221): Binding-protein-dependent transport system inner membrane component
  misc_feature (1)..(222): Xaa is any amino acid
MLISFGLGMMIALLFEDLKYRRLIRTLLIVPYPIPVLVSIMVWKGLLNENMGLVTTVIANIFGSSPKFFTDLNWTRFALILINVYLSYPYFYVLTSGALKAIPKDLFEAASIDGARPFTVVRKIVLPLVMRILSPLVIASFCFNFNNFTLVWGFNAGGPPMADTAVPMGYSDLLISFIYRLGFSSSNAADYGFSAAITVMLFILVALMVFFQTLNTKTIKES

SEQ ID NO: 18225 - DNA, 405 bp, Unknown
  Obtained from environmental sample
  misc_feature (1)..(405): n is a, c, g, or t
ttgagccgtctatccagaagttcatcgtgtcgagcgccacccacttcgggcggggcgacatctggccgaccacctccaactggaggctcggggcgatgttcccaaggaacaggaacggcgagctcttgtagttgtccggcagcttgggcgcgaagtcggcgaagacgttcagttccgtcttcagcgtctgggcctcgttcaggtcgtggccgtagcgacccttccagtggaagctcctgcccttctggcggatcacgccgccaaggtctatggggcgacccctgtaggtggcctcctgctcctccccgaagtcctcccccaccaccgccaccaggcggacgggacaaaaattgctcgcgcagagtgaaaagtacgtcgcggacccgcccagcaggtcgcttctga

SEQ ID NO: 18226 - protein, 134 aa, Unknown
  Obtained from environmental sample
  misc_feature (1)..(134): Xaa is any amino acid
MSRLSRSSSCRAPPTSGGATSGRPPPTGGSGRCSQGTGTASSCSCPAAWARSRRRRSVPSSASGPRSGRGRSDPSSGSSCPSGGSRRQGLWGDPCRWPPAPPRSPPPPPPPGGRDKNCSRRVKSTSRTRPAGRF

SEQ ID NO: 18227 - DNA, 726 bp, Unknown
  Obtained from environmental sample
  misc_feature (1)..(726): n is a, c, g, or t
atgtatcgccgaaatcttgaagcaatagaaggacgtataactcaagcctgcttgcgctgcggcaggaagcgggaagaagtaacccttatgggcgtaaccaaatttcagcctgtggaaatgattgatgaagcgtggaaggcgggtttacgctgttttggggaaagcagggtgcaggaaaccgccgtcaaatttgaaagtttcagaaaagaacatcctgatacggaactgcatctgattggagccctgcagcggaacaaagcaaaacttgccgtctcgctgtttgactgcattgattgtgtggacagggaatcccttgcggcggagctggcaaaacatacggcagaccgcggcagtggttctcaaagaaaacctttgccgctgctgctggaattccgcaccggggaagattcaaaaagcggctttaccagccttgatgatcttttcagaacagttgaacttatcctttcctgcccttcgttaagcgttcggggcctgatgactatagcgcctaacacccgtgaggataaagttgtacgcgccgctttcaggcggctggcagaagtacggcaggaactggaacggcgctttccggctgaaaaccgcccggttgaaaaccggaattggtcctgcctttcaatgggaatgtccggcgattttgaaacagccattgaagaaggatcaaccctggtgcgtattggcagcgccatttttggagaaagaatttga

SEQ ID NO: 18228 - protein, 241 aa, Unknown
  Obtained from environmental sample
  DOMAIN (5)...(241): Alanine racemase, N-terminal domain
  misc_feature (1)..(241): Xaa is any amino acid
MYRRNLEAIEGRITQACLRCGRKREEVTLMGVTKFQPVEMIDEAWKAGLRCFGESRVQETAVKFESFRKEHPDTELHLIGALQRNKAKLAVSLFDCIDCVDRESLAAELAKHTADRGSGSQRKPLPLLLEFRTGEDSKSGFTSLDDLFRTVELILSCPSLSVRGLMTIAPNTREDKVVRAAFRRLAEVRQELERRFPAENRPVENRNWSCLSMGMSGDFETAIEEGSTLVRIGSAIFGERI

SEQ ID NO: 18229 - DNA, 858 bp, Unknown
  Obtained from environmental sample
  misc_feature (1)..(858): n is a, c, g, or t
ttgatggccgagagcggttgcgcaaaacttgaagtctttccgccgcgcgcgacagtcgcgtgtcagggtgtggaaggcgcgtattcgcaagccgcctgcgataaattattttctccggcggacatcacttactttaccagctttgaaggcgtttttcaggcagtggaaggcggcttgtgccgctacggcgtagtgccgcttgaaaacagcacagccggctccgttaacgaagtatacgatcttatgaaccgctatcgtttttacattatccgcagcgtaaaactgcctatagcgcatacgctgttggcggctcccggcgcgaagttagacgacataaaggaagtgttttcgcatgaacaggctatccgccaatgcagtaaatttttaaaatcatggaacggcgtaaaaataactgagtgcgcgaacacggcgttggcggcaaaagaggcggcaagctcaggcaggacagacgccgcggttatttcttcgcgcgattgcgccgaattgtacggcttacacgcgctttcgtttaacattcaaaacaccgacaacaattacacgcgttttatctgtatttcaaaaaaaccggaaatatatccgggcgcgcaaaaaaccagccttatactcgccttaaagcacaaacccggctctctgtacagcgtactcgcgaaattttacgcgcacggaatcaacatgaacaaattggaaagccgccccattttaggtcaggcttttgagtttatgttttattttgacatagacacgccggttattacggaagaattgaagctggtactggcggagttggaacaggaaacagatatgtttgattttctgggaacttatcaggagatataa

SEQ ID NO: 18230 - protein, 285 aa, Unknown
  Obtained from environmental sample
  DOMAIN (205)...(281): ACT domain
  misc_feature (1)..(285): Xaa is any amino acid
MMAESGCAKLEVFPPRATVACQGVEGAYSQAACDKLFSPADITYFTSFEGVFQAVEGGLCRYGVVPLENSTAGSVNEVYDLMNRYRFYIIRSVKLPIAHTLLAAPGAKLDDIKEVFSHEQAIRQCSKFLKSWNGVKITECANTALAAKEAASSGRTDAAVISSRDCAELYGLHALSFNIQNTDNNYTRFICISKKPEIYPGAQKTSLILALKHKPGSLYSVLAKFYAHGINMNKLESRPILGQAFEFMFYFDIDTPVITEELKLVLAELEQETDMFDFLGTYQEI

SEQ ID NO: 18231 - DNA, 498 bp, Unknown
  Obtained from environmental sample
  misc_feature (1)..(498): n is a, c, g, or t
ttgaacattgtattaatcggtatgcccggctgcggcaaaaccagcgtagggctcgcccttgccaaaaagatgaagcgtgaatttatagacaccgacaaattgataattaaagccgcaaagaaacctatagcggaaatattttcggacaacagcggcggaacctcaggcgaagaaaaattcagagaattggaaacaagcattctgcaaaccgcgtgcaggcaaagcggaaaaattatcgccacaggcggcggcattgtaacaagggacgaaaaccgccgcatcgtcaggcagaacggcgtcgttgtttacagggaaagggatctttcacttttaccggtaaaaggccgccccgtctcccagcgcgacggcatcgaagcgattgcagcggtgcgcctgcccctctaccacagctggagcgactacacagcgcagggcaacgacatagatcagacagctgaagatattaaaaaatattttgaatcagctaattgctcataa

SEQ ID NO: 18232 - protein, 165 aa, Unknown
  Obtained from environmental sample
  DOMAIN (9)...(163): Shikimate kinase
  misc_feature (1)..(165): Xaa is any amino acid
MNIVLIGMPGCGKTSVGLALAKKMKREFIDTDKLIIKAAKKPIAEIFSDNSGGTSGEEKFRELETSILQTACRQSGKIIATGGGIVTRDENRRIVRQNGVVVYRERDLSLLPVKGRPVSQRDGIEAIAAVRLPLYHSWSDYTAQGNDIDQTAEDIKKYFESANCS

SEQ ID NO: 18233 - DNA, 531 bp, Unknown
  Obtained from environmental sample
  misc_feature (1)..(531): n is a, c, g, or t
gtggccgtcagagggcgcggcggtgaaaaatctttctatccgatctgcgagaacacgcattccggcggtattctccgtcatactatttgccgtttgaacgaccctatgcagtctgtcgcggaggggctggcgagccgtttgctggaacgctttgactacgtgggcgttttggccttggaactctttgatgtaggcggcaagctgacggcgaacgagatggcgccgcgtgtccacaacaccgggcattggtcgatagacggggcgcggacgagtcagtttgaaaaccacgtccgcgccgtggcaggcctgccgctcggcgggacggaggcggtttgccgcaacgccatggtcaattttataggcgcgatgccggatgcggcggaggtgttgaaggtgaacggggcgcgtctgcacgactacgggaaagcggcgagaccggggaggaagctgggtcacgccacggtctgcggcgatggggaagacgctgtggcgacggggctggacaggttgctgggtttggcgggaaaatga

SEQ ID NO: 18234 - protein, 176 aa, Unknown
  Obtained from environmental sample
  DOMAIN (1)...(88): ATP-grasp domain
  misc_feature (1)..(176): Xaa is any amino acid
MAVRGRGGEKSFYPICENTHSGGILRHTICRLNDPMQSVAEGLASRLLERFDYVGVLALELFDVGGKLTANEMAPRVHNTGHWSIDGARTSQFENHVRAVAGLPLGGTEAVCRNAMVNFIGAMPDAAEVLKVNGARLHDYGKAARPGRKLGHATVCGDGEDAVATGLDRLLGLAGK

SEQ ID NO: 18235 - DNA, 555 bp, Unknown
  Obtained from environmental sample
  misc_feature (1)..(555): n is a, c, g, or t
gtgaagacggtggacagcgtcgcggaggcgctcggaaagggaccgctctcggcggtgcctatacatcggttgcacgggcggatgccgtccgacgagcgtgacgccgccgtatccgcgttcagggaggggccgccgggcgtcttggtgtcgaccgccatcgtggaggtcgggatcgacgtgcccgacgcggcggtgatggtcatagagaatccggagtttttcgggttggcgcagctccatcagataagggggcgggtcggcagaggcgttgccgactcctactgctttctgctgccgggcgcggacgcctgccgggacgagcggacgacggagaggctcaaatttttatgcggttgctcaaacggctttgaaatagcggagtgggacctgcgccgccgcggtcccggggatgcggcggggtacaggcagtcggggtgggacgacctcttggcggcggacattctggaggacgcggggatgttcatggggatactgtcggagatggatatccttttcgcgaaggatcaaaacggcggcgcaaatctacccgcctaa

SEQ ID NO: 18236 - protein, 184 aa, Unknown
  Obtained from environmental sample
  DOMAIN (13)...(90): Helicase conserved C-terminal domain
  misc_feature (1)..(184): Xaa is any amino acid
MKTVDSVAEALGKGPLSAVPIHRLHGRMPSDERDAAVSAFREGPPGVLVSTAIVEVGIDVPDAAVMVIENPEFFGLAQLHQIRGRVGRGVADSYCFLLPGADACRDERTTERLKFLCGCSNGFEIAEWDLRRRGPGDAAGYRQSGWDDLLAADILEDAGMFMGILSEMDILFAKDQNGGANLPA

SEQ ID NO: 18237 - DNA, 882 bp, Unknown
  Obtained from environmental sample
  misc_feature (1)..(882): n is a, c, g, or t
ttggttttacaggcagatcgccgagctgcaaatatttatcgaccacgcgggcagaagccgctttattttgaggaagaaaccaaaagaaacagcaatgatttttactggaagggcagtatattccggtaccagtattatcaggccgggaagcctgtgcgcgaccagcatatcgccgaaggtcacgcggtacgcgcgacatacctttattcggggatggctgatatcgcgcgcctgacaggcgatgctgctttaatgaaggcatgcgatgatctttggaacaatatcgtgaaccgccagatgtacattacaggcgccatcggacaatcggcttacggcgagtcgttttcttacgattacgatctgcccaacgatacggtctacgcggaaacctgcgcggcgatagggcttgcttttttcgccaggcgcatggcttccatcgcgtcaaaggggacttacggcgatgtgattgagaaagccctgttcaacggcataatcagcggaatgtccctggacgggaagtccttcttctacgttaaccctttggaggcgattcctgaagcgagccaaaaagaccatgggaagcggcatgtcagaattgaaaggcagaaatggttcggctgcgcctgctgtcctcctaatttggcgcgccttatagcctcgttgggaagctacgttcattcgttaggtgaaaacgccctgtatactcatctttttatcgggagcgatgcgaagctaanaatttcaggcgcggatttatcggttaagatcgaaaccaaatatccatgggaagaacagatcgacattagttttgccatgagcgcgaaaacaaaattcaagtattattttccgtattccccggatggtgcgggaaatacagcatag

SEQ ID NO: 18238 - protein, 293 aa, Unknown
  Obtained from environmental sample
  DOMAIN (1)...(293): Putative glycosyl hydrolase of unknown function (DUF1680)
  misc_feature (1)..(293): Xaa is any amino acid
MVLQADRRAANIYRPRGQKPLYFEEETKRNSNDFYWKGSIFRYQYYQAGKPVRDQHIAEGHAVRATYLYSGMADIARLTGDAALMKACDDLWNNIVNRQMYITGAIGQSAYGESFSYDYDLPNDTVYAETCAAIGLAFFARRMASIASKGTYGDVIEKALFNGIISGMSLDGKSFFYVNPLEAIPEASQKDHGKRHVRIERQKWFGCACCPPNLARLIASLGSYVHSLGENALYTHLFIGSDAKLXISGADLSVKIETKYPWEEQIDISFAMSAKTKFKYYFPYSPDGAGNTA

SEQ ID NO: 18239 - DNA, 369 bp, Unknown
  Obtained from environmental sample
  misc_feature (1)..(369): n is a, c, g, or t
ttgtatgattgggtcaccgcattgacagcttgccctgagggttggcatttgcctagttacaccgaatggcaaattttaataaaaaatattggcggcaaagaatttgctggcaaaaaattgaaagcatcaactggttgggacgagggcggaaatggttctaattccaaacatttttcagctttgcctggtggcttgggttattcaaatgcaattttttatagtgcgggaaccagcggcaattggtggacttccacggagcaaaattcaagcaatgcttattatataaatatgttttaccaaactagcgacatatacgaaagcgatggcaataaattgtctctttttagcgttcgttgcataaaaaactaa

SEQ ID NO: 18240 - protein, 122 aa, Unknown
  Obtained from environmental sample
  misc_feature (1)..(122): Xaa is any amino acid
MYDWVTALTACPEGWHLPSYTEWQILIKNIGGKEFAGKKLKASTGWDEGGNGSNSKHFSALPGGLGYSNAIFYSAGTSGNWWTSTEQNSSNAYYINMFYQTSDIYESDGNKLSLFSVRCIKN

SEQ ID NO: 18241 - DNA, 474 bp, Unknown
  Obtained from environmental sample
  misc_feature (1)..(474): n is a, c, g, or t
ttgcaacacgctcttgatatgaaaaacggcttggaaaacttgcgctacaacaaggtaatcatagcaaccgatgccgatgttgatggtatgcacataaggcttttgatggtatctttctttttgcagtttttcccagagcttgtggaggagaagcatctttacattttgcaaactccgctgttcagggtgcgcaacaaaaaagaaacgctctattgctacaatgaacaagaacgcgatgctgcacaggcaaagctaggcacgcaggcagaaacaacccgcttcaaagggcttggcgaaatagatcccgaagaattcggcttgttcataggcgaagatatgagggtagaacccgtgattatgcctcaagagtcaaataccaataaaatgcttgaatactatatgggaaacaacacagcctcccgtaccgagcacgttataaataatctaagaacagaagccgtggctgatttataa

SEQ ID NO: 18242 - protein, 157 aa, Unknown
  Obtained from environmental sample
  misc_feature (1)..(157): Xaa is any amino acid
MQHALDMKNGLENLRYNKVIIATDADVDGMHIRLLMVSFFLQFFPELVEEKHLYILQTPLFRVRNKKETLYCYNEQERDAAQAKLGTQAETTRFKGLGEIDPEEFGLFIGEDMRVEPVIMPQESNTNKMLEYYMGNNTASRTEHVINNLRTEAVADL

SEQ ID NO: 18243 - DNA, 612 bp, Unknown
  Obtained from environmental sample
  misc_feature (1)..(612): n is a, c, g, or t
atgtacaaacacctgggatattttcccaccgaatcgtcgggccacaactcggaatataacccctggtttcgcaagaattcaatggaaatcgaaaagtactgcactcatggcacaggctggaatcccggcgagcatgcgtatattctcaatgaatattttcggagggaagaaacatggcaggatgaaattaaaaaatggctcaatgatgatgtaacaaatctcaaacgcggagccgaatacgcggcgtttatttttaacgcggcgttcggagataacatacctttcgaattcaacggcaacgttcgtaatttcggtctcatcgacggcctgcccgagggctgctgtgttgaagtgcctgccatagcgtgtaaaagcggtattttacccatgcacgttggcaaacttccgccccagctcaatatattgatagaaaacagcgcgcaatgcgaggaactggcagttaacggctgtatttcgggggataaggaaatgattttccacgccgtgctttttgatcctttgacgacaacccagcttgatatggcttcaacccgcaaaatggtcgatgaaatgtttgaggcgaaccgaagcctgttgccgcagttttattga

SEQ ID NO: 18244 - protein, 203 aa, Unknown
  Obtained from environmental sample
  misc_feature (1)..(203): Xaa is any amino acid
MYKHLGYFPTESSGHNSEYNPWFRKNSMEIEKYCTHGTGWNPGEHAYILNEYFRREETWQDEIKKWLNDDVTNLKRGAEYAAFIFNAAFGDNIPFEFNGNVRNFGLIDGLPEGCCVEVPAIACKSGILPMHVGKLPPQLNILIENSAQCEELAVNGCISGDKEMIFHAVLFDPLTTTQLDMASTRKMVDEMFEANRSLLPQFY

SEQ ID NO: 18245 - DNA, 603 bp, Unknown
  Obtained from environmental sample
  misc_feature (1)..(603): n is a, c, g, or t
atgaaacgcagccttcaaaaatctttcgatgagcttaaacgccgcgaaaaaatgacgtccgcgctgaacagggcggccataaagtttctctcgcaaagtggtgaatcttttgaagacaacatgacggctggttttagggaaatcgccgatgtgttcggtttggacagattttcccttttgcgtaacgtaaccaatcctgacggttcacgtacggggcagcaaatttaccgctgggacaaaaaatccggcggaaccacggctccgaaaaaagaactggcgtctttctccccggacaagtatgtgcctgactgggggaaaattttgacttcaggcggagtaattaacggcccggtacgggagctgcctgaagcggacgtattgcagtcattcggcctggtgtcaatagttgttacgccggtttttatcaacaacaatttctggggcattgtcttttttgaggacctcaatatcgagcgttattttttggatgacagcgtcgaaatgttgcgttcggctgcgttttttgtgcgcgaatacagttatagaagccgagatgatgaaaagcatacgtgtgcagggcgagcagctccaagtaaggcttga

SEQ ID NO: 18246 - protein, 200 aa, Unknown
  Obtained from environmental sample
  misc_feature (1)..(200): Xaa is any amino acid
MKRSLQKSFDELKRREKMTSALNRAAIKFLSQSGESFEDNMTAGFREIADVFGLDRFSLLRNVTNPDGSRTGQQIYRWDKKSGGTTAPKKELASFSPDKYVPDWGKILTSGGVINGPVRELPEADVLQSFGLVSIVVTPVFINNNFWGIVFFEDLNIERYFLDDSVEMLRSAAFFVREYSYRSRDDEKHTCAGRAAPSKA

SEQ ID NO: 18247 - DNA, 444 bp, Unknown
  Obtained from environmental sample
  misc_feature (1)..(444): n is a, c, g, or t
atggcgatgcttgccgctttattggctgtaactgacaggaataaagttttttgcgttcatgttgaacacggtcttcgtctggcggaagaaagctgcggcgacgctgattttgtccgtaatttttgtgaaaacttagaagttaattgccgcattgtgtccataccgcccgggaaaattatgtcgtatgctaaacgcaagggcacaggtattgaagccgccgccagatttttcagacgcagggcgtttttaaaagaagcggccaggctgggagacagtactttcattttaacagctcacacggaagatgacgcgcttgaactcgcccttatgcgtattttgcggggagcggggcctgcgggtcttgccgccatgtctgtaaagcgagggcaatttattcgtccgcttcttttgatgagccgagccgatgttatttgctatctntaa

SEQ ID NO: 18248 - protein, 147 aa, Unknown
  Obtained from environmental sample
  DOMAIN (1)...(147): PP-loop family
  misc_feature (1)..(147): Xaa is any amino acid
MAMLAALLAVTDRNKVFCVHVEHGLRLAEESCGDADFVRNFCENLEVNCRIVSIPPGKIMSYAKRKGTGIEAAARFFRRRAFLKEAARLGDSTFILTAHTEDDALELALMRILRGAGPAGLAAMSVKRGQFIRPLLLMSRADVICYL

SEQ ID NO: 18249 - DNA, 435 bp, Unknown
  Obtained from environmental sample
  misc_feature (1)..(435): n is a, c, g, or t
atggcccacgccagacacatgctcggaatggcgcgccgtatgaaaaaagacggtttgctgttcttcgccgatcttgacggtctgaaagggataaacgatacctacggccacgaggagggcgacaacgcgatcacggtagtcgcggttattttgaagaaggcattccgcgacatggacataatagcaagattgggcggcgacgagttcacggtcttcgcgatgaacgcgggccccggcatgatagagacattcgagagacgcatagccggatacgtggacgattacaacaaagactccggaaagccgtacaaagtgtcggtcagtatcgggggggtgccgttcgtgcacacggacaacgtcagcatagagacgcttatgaataaggcggacgtgctgctgtatcagcagaagaaagataaaaaagctaaaaaataa

SEQ ID NO: 18250 - protein, 144 aa, Unknown
  Obtained from environmental sample
  DOMAIN (1)...(143): GGDEF domain
  misc_feature (1)..(144): Xaa is any amino acid
MAHARHMLGMARRMKKDGLLFFADLDGLKGINDTYGHEEGDNAITVVAVILKKAFRDMDIIARLGGDEFTVFAMNAGPGMIETFERRIAGYVDDYNKDSGKPYKVSVSIGGVPFVHTDNVSIETLMNKADVLLYQQKKDKKAKK

SEQ ID NO: 18251 - DNA, 723 bp, Unknown
  Obtained from environmental sample
  misc_feature (1)..(723): n is a, c, g, or t
atgggctggtcgcacgatttttttgccgaataccctggaaaatacaaacgtcccgataccattctgatggatttgggggtcagcctgtttcattatgaaaagagcgggcgtggttttagcttccgatatgacgaaaaacttgacatgagaatagacacttcgtcaggcttaagcgcagctgaattgattgagcggctttcagaaaaagatctggccgatctaatctacgcgaacagtggggaacgctattcccggcgcattgccagggcggtttgcgaggcgaaagcaggcgggatgcttacaagtaccgcgctgctcgctgaaataattgaaagcgtggttcccccggcctatcgccatgggccggtacacagcgccacaaagacttttatggctttaaagattgctgttaacggcgagctttccaggctggcggatctgcttgatgtttcgtatagaacacttgagcctggggggaggctaggggtaattagctttcattcgctggaagacaggatagtgaaaaatttctttagggagaaaaacagggactgtatatgccctccggaagcgccgatatgtaaatgcggaggtcaaagagagctgatgatccttaccaaaaaaggaatttgcgcaggggaagaagaaacacggaaaaaccccgcttcccgaagcgcccggttcagggcggttgaaaaaattctggacgaggctgggttatga

SEQ ID NO: 18252 - protein, 240 aa, Unknown
  Obtained from environmental sample
  DOMAIN (1)...(234): MraW methylase family
  misc_feature (1)..(240): Xaa is any amino acid
MGWSHDFFAEYPGKYKRPDTILMDLGVSLFHYEKSGRGFSFRYDEKLDMRIDTSSGLSAAELIERLSEKDLADLIYANSGERYSRRIARAVCEAKAGGMLTSTALLAEIIESVVPPAYRHGPVHSATKTFMALKIAVNGELSRLADLLDVSYRTLEPGGRLGVISFHSLEDRIVKNFFREKNRDCICPPEAPICKCGGQRELMILTKKGICAGEEETRKNPASRSARFRAVEKILDEAGL

SEQ ID NO: 18253 - DNA, 783 bp, Unknown
  Obtained from environmental sample
  misc_feature (1)..(783): n is a, c, g, or t
atgaaccgcaaaggggaaatcgcggaactcgccggagtgcttgatccttcttntgcgttaattacgaatattggatctgcccatatcggtattctcggcagccgccaggcaattgctgaggaaaaaaagaaaattttttcacggtttacaggggaaaacacggctctgattccggagaatgactattaccgggatttcctggcgagtgagattagtggccgcgttgtattcttcggtccttcttcgctgggcgcttgcgcccacggccccttgggtaccataagggacataggccttcgcgggactgaaattgtttgggaaggcgaagctgtccgctttggtcttccgggaaagtttaacctcgcgaacgctttagccgcctctgccctggctctggaaatgcgtcttaacgcttcttcgatccgccgtgggcttgaatcggtaaagcctctttttgggcggagtgaaattctttacggcagggcgaccgtaataagggattgctacaacgccaaccccgaaagcatggaagaagccctggatttttgcgacaacctggaatggccaggacgaaaaatatacgtaatgggctctatgctggagcttggagactcctcagaaaaagtccacgcggatcttggcaggaggcttctctcctgtaaagccggcgcggttttcctattcggtggagaaatgcaggcagccgcagatattttaaaaaagaatggaggggatttgctttttttatatacgaaagaccagggacctcgtgccgaatnctga

SEQ ID NO: 18254 - protein, 260 aa, Unknown
  Obtained from environmental sample
  DOMAIN (1)...(131): Mur ligase middle domain
  misc_feature (1)..(260): Xaa is any amino acid
MNRKGEIAELAGVLDPSXALITNIGSAHIGILGSRQAIAEEKKKIFSRFTGENTALIPENDYYRDFLASEISGRVVFFGPSSLGACAHGPLGTIRDIGLRGTEIVWEGEAVRFGLPGKFNLANALAASALALEMRLNASSIRRGLESVKPLFGRSEILYGRATVIRDCYNANPESMEEALDFCDNLEWPGRKIYVMGSMLELGDSSEKVHADLGRRLLSCKAGAVFLFGGEMQAAADILKKNGGDLLFLYTKDQGPRAEX

SEQ ID NO: 18255 - DNA, 675 bp, Unknown
  Obtained from environmental sample
  misc_feature (1)..(675): n is a, c, g, or t
atggcagacgttgttggaaaagtaattaattttttatcaggtgacaacaatgacaacctgacggataaggaaatcgtcctcaagcagaggttaaaacaactgggagaaaacaagtattccaagtttttcagggcaaaaaccgaggaatgtgacccctcgttaggccagttttttcattcgctttataagctgatagtgccgatcaggatttttatgaaggatcaggccaaaacggccaagctccggcaaattgtgctggaagccttcatggatcaggggattatcgatctggtcaaacagcttaatccgggcgttattgaacagcgttccaaaaacaccccccctgaggaattaaccgttcagattagcaaagatattgaggagctttcggcaagatttgacgcaaacaagatagccggggtaaaccgctgttacaaccttatcatgaccatttttcaactggcgcattttgactaccccgcgctgttgaaaaaatttgaccccaattttaccgaaggtccgtttgccacagacccgaaatttacccccataaaggtggccggagtggctaaagagttaagtgaattcctggctgtctcccaggccattaccccggaaaacgactggaaaacccntgttaaaacttcctgcgaatctgcgccggcgaggagatga

SEQ ID NO: 18256 - protein, 224 aa, Unknown
  Obtained from environmental sample
  misc_feature (1)..(224): Xaa is any amino acid
MADVVGKVINFLSGDNNDNLTDKEIVLKQRLKQLGENKYSKFFRAKTEECDPSLGQFFHSLYKLIVPIRIFMKDQAKTAKLRQIVLEAFMDQGIIDLVKQLNPGVIEQRSKNTPPEELTVQISKDIEELSARFDANKIAGVNRCYNLIMTIFQLAHFDYPALLKKFDPNFTEGPFATDPKFTPIKVAGVAKELSEFLAVSQAITPENDWKTXVKTSCESAPARR

SEQ ID NO: 18257 - DNA, 978 bp, Unknown
  Obtained from environmental sample
  misc_feature (1)..(978): n is a, c, g, or t
gtggtgtctgaccatcccgaagttttcgatattgtcgctttgcgcatgattactttttcaagccaacccggacaggcatttcattccgtaagccagaacgacagccagacccattgcttatgcaatgaatgtaaagcggttgatgaatacgaaggcagcccgtcaggaaccatcatccgctttttaaataaactggcggagcgttttccggacaaggaattttccactctggcttacctgtactccgtgcctccccccaggcacaccaggcccttgcccaatgttaatatcatgctctgcgacattgattgcaaacgtgaagtccccctcacggagaacgcttccggacaggagtttgtaaaatctatggaaggatgggcagccatatccaacaatattttcgtatgggattacggaattaactttgataattacgtttcgcccttcccaaatttccatatcctgcagccaaatgtacagttgtttcacaagaacaacgtaacaatgcacttctcccagataaatagcgtcaaaggcggagacttctcagagctacgtgcttatcttgtcgccaagctaatgtgggatacatccgttgaccttgattctgtcatgcagactttcttaaaggaatattacggagaaccagctaccctgtttctatatcaatatatcaaattacgcgaagaggcgcttatcagcagcaaagtacctctttggatatacgatacgccaataacgcacaaggacgggatgttgaataaggagatgatggggcgttacaaagagttgtttgataaagcggaacaggctgccgcctgcgacaaaacttttcttgacaggtttcgcgaagccagattgcccatcatgtacgccgaattggaaatagcccgtaccgagccagataaaaataaagaagaacttacggaactgttaaattgtttcggacagggcgggaatctcggccgccctcgataa

SEQ ID NO: 18258 - protein, 325 aa, Unknown
  Obtained from environmental sample
  misc_feature (1)..(325): Xaa is any amino acid
MVSDHPEVFDIVALRMITFSSQPGQAFHSVSQNDSQTHCLCNECKAVDEYEGSPSGTIIRFLNKLAERFPDKEFSTLAYLYSVPPPRHTRPLPNVNIMLCDIDCKREVPLTENASGQEFVKSMEGWAAISNNIFVWDYGINFDNYVSPFPNFHILQPNVQLFHKNNVTMHFSQINSVKGGDFSELRAYLVAKLMWDTSVDLDSVMQTFLKEYYGEPATLFLYQYIKLREEALISSKVPLWIYDTPITHKDGMLNKEMMGRYKELFDKAEQAAACDKTFLDRFREARLPIMYAELEIARTEPDKNKEELTELLNCFGQGGNLGRPR

SEQ ID NO: 18259 - DNA, 651 bp, Unknown
  Obtained from environmental sample
  misc_feature (1)..(651): n is a, c, g, or t
gtgcttttcagggacgaaagccccgccgtctgcgcgatggtattctcccgcctgccgtcaaaattgtccgcagcggcgctggcaaataccaacgcggagcggaaactggaaatcgttaaacgcatagcaaagcttaaagaaacatcgcctgaagtacttgccagggctgccgcggccataagggagaaggcgcggcacattgggcatggcgccccggcggcgggtgaggcaatagacggcaaagggctgcttacggccatactaaagcactccgacattgccttcagcggccgtcttttggaagggcttgaagcaagcgacccttctctcggcagggaaatgaaagatcgcctttattccctggaagatgtcgcanatgcgtccgaccggcccattcaggaaaaactcagagccatggacgaccgggacattgccttgcttctgaagggacattctgaagcgtttactcaaaaaatattatggaacctttcttcgggcagagccgacaggatcagggaagaatcggagatnatggggatggtgccaanaatcnaggcggaggctgtggcaagggaatttctctcctggntccgcgatagcattgacgaaagccggnattttatgctcaccgacnaggacgtactgctatga

SEQ ID NO: 18260 - protein, 216 aa, Unknown
  Obtained from environmental sample
  SIGNAL (1)...(28)
  DOMAIN (100)...(210): FliG C-terminal domain
  misc_feature (1)..(216): Xaa is any amino acid
MLFRDESPAVCAMVFSRLPSKLSAAALANTNAERKLEIVKRIAKLKETSPEVLARAAAAIREKARHIGHGAPAAGEAIDGKGLLTAILKHSDIAFSGRLLEGLEASDPSLGREMKDRLYSLEDVAXASDRPIQEKLRAMDDRDIALLLKGHSEAFTQKILWNLSSGRADRIREESEXMGMVPXIXAEAVAREFLSWXRDSIDESRXFMLTDXDVLL

SEQ ID NO: 18261 - DNA, 390 bp, Unknown
  Obtained from environmental sample
  misc_feature (1)..(390): n is a, c, g, or t
ttgactgccagggaatactgtcttgtcagcgcctttgatctcgaaaaaaaccaggtggccacctcagggccgattcaggcgtcttcggaatccatgacccacggcgcggtgtaccaggtctgtcccaatgtaaactgcgtgattcacattcactcaaaaaagatctttgacgcgatgctgaaggaacgttacgcgtgtaccccaaaagacgcggaatacggaacgccgcaaattgccctggcaatcggaaaatgcatacgggaatacggcatgaataatgaagggcaaattgtgttggccggacatgacgagggagtaatcgcctacgggccgacagtggaaagggccctggacttgatactggaactttacaataaatacggaggatga

SEQ ID NO: 18262 - protein, 129 aa, Unknown
  Obtained from environmental sample
  misc_feature (1)..(129): Xaa is any amino acid
MTAREYCLVSAFDLEKNQVATSGPIQASSESMTHGAVYQVCPNVNCVIHIHSKKIFDAMLKERYACTPKDAEYGTPQIALAIGKCIREYGMNNEGQIVLAGHDEGVIAYGPTVERALDLILELYNKYGG

SEQ ID NO: 18263 - DNA, 366 bp, Unknown
  Obtained from environmental sample
  misc_feature (1)..(366): n is a, c, g, or t
gtgcgcgtatttgacaagtggccgactccggaaactttgatgatgggagcattgtccggggcgatacttgaaacctatgtcataggcgaaatcctgaaatcatacctgcatagcggcagagaaccggcgatgtggctgtatcgtgattcaaatcaaaaagaagtcgatgttgttttggaagaaaacggcacgctgtatccgatagagataaaaaaaacatcaaacccgggggcggaatcttatcaaggatttaaggaactggcaaaactacaaaagaaggtcgggcttggcgcgatattatgcctgaagccggagcgcataccgctttcccgcgaagtagtgtcgatccccgtttgggaaatatga

SEQ ID NO: 18264 - protein, 121 aa, Unknown
  Obtained from environmental sample
  misc_feature (1)..(121): Xaa is any amino acid
MRVFDKWPTPETLMMGALSGAILETYVIGEILKSYLHSGREPAMWLYRDSNQKEVDVVLEENGTLYPIEIKKTSNPGAESYQGFKELAKLQKKVGLGAILCLKPERIPLSREVVSIPVWEI

SEQ ID NO: 18265 - DNA, 582 bp, Unknown
  Obtained from environmental sample
  misc_feature (1)..(582): n is a, c, g, or t
ttgggctttgagttcttcgattccaatgtagtggccgtttgcaggatgcctgtttcccggcgacggcagtggaggaggaggcggcggcggcggtggaggagtaggtcgaggtcgaggtcgaggcggcggcgtaggtcgaggcggcggcgtaggtcgaggcggtcgaggcgtaggtcgaggcggcggtctttccgcccggacaggaggagtttgttcctgaatgggaagggctgtctcttgaataagagaaacttccgcctgaacagaaggagctgtctcttgaatgagagaaacttctgtctgaacagaaggggctgtctcttgaacgagaagaatttcttccgcaacaaccataggttcgatctccggttcgggcaatactattctttcatcgcccgcgcttataacggttttttccatatcgaaccaggatacttgcgaaaaaccggcaaagccttcgtaagcggaaggaaaagacggctgtacccgccaataccatattccggggccaagccaggaatcgatgaaaaaaggcgctgttatttgccttcttatgtgcggattggtaaagtcctgtgttga

SEQ ID NO: 18266 - protein, 193 aa, Unknown
  Obtained from environmental sample
  misc_feature (1)..(193): Xaa is any amino acid
MGFEFFDSNVVAVCRMPVSRRRQWRRRRRRRWRSRSRSRSRRRRRSRRRRRSRRSRRRSRRRSFRPDRRSLFLNGKGCLLNKRNFRLNRRSCLLNERNFCLNRRGCLLNEKNFFRNNHRFDLRFGQYYSFIARAYNGFFHIEPGYLRKTGKAFVSGRKRRLYPPIPYSGAKPGIDEKRRCYLPSYVRIGKVLC

SEQ ID NO: 18267 - DNA, 798 bp, Unknown
  Obtained from environmental sample
  misc_feature (1)..(798): n is a, c, g, or t
atggcggtggagaataaatttcttgattggggctctcttataagggtcaaacccgtgaaattccctatatgggacaagattgaccatgaaatggaaatccccaaggacgggatcatagaaaccactgtcggaaggctggtgttcaacgaggaacagcccagggagattcctttcgtcaattatgaaatgaaagacaaggaacttcgcgcccttattgagcatgtcttcaagaaaagcggttcatggattacggtaaaaatgctggatgcgattaagtcaaccggctaccgttatgcgacagtttttggcgccaccatcggcattgatgatattgtggttcccaaagaaaagcccgaaatgatcgataaggcaaacagggaagttgaggcgattcaggcccagtggcgtaagggcattatgacccaggaggaacgctacaataaagttattgatgtatggaacaagaccaacgaggaactgaccaatatcatgatgaagaccctggaggcggatcgtgacggctttaactcgatttacatgatggccaattccggggcgcgcggaagccgcaaccagatacgccagcttgccgcgatgcggggccttatgggtaagccttccggtgaaattatcgagctgcctatacgctcaaacttcaaggaagggctttccgttatcgagttctttatttcgactaacggtgcgcgcaagggtcttgcggacaccgcccttaaaaccgccgaagccggttacctcacgcggcggcttgtggatatagccccaggacngtggtggtga

SEQ ID NO: 18268 - protein, 265 aa, Unknown
  Obtained from environmental sample
  DOMAIN (1)...(111): RNA polymerase Rpb1, domain 3
  misc_feature (1)..(265): Xaa is any amino acid
MAVENKFLDWGSLIRVKPVKFPIWDKIDHEMEIPKDGIIETTVGRLVFNEEQPREIPFVNYEMKDKELRALIEHVFKKSGSWITVKMLDAIKSTGYRYATVFGATIGIDDIVVPKEKPEMIDKANREVEAIQAQWRKGIMTQEERYNKVIDVWNKTNEELTNIMMKTLEADRDGFNSIYMMANSGARGSRNQIRQLAAMRGLMGKPSGEIIELPIRSNFKEGLSVIEFFISTNGARKGLADTALKTAEAGYLTRRLVDIAPGXWW

SEQ ID NO: 18269 - DNA, 558 bp, Unknown
  Obtained from environmental sample
  misc_feature (1)..(558): n is a, c, g, or t
atgtccgatgtttacataccgggtgtaaaaagcaggtttaataccggtcagattgttgaagatctgatgaaaattgaaaaaatccccagagacagagttcaaagtaacattgacgcattacgcgttcaaaaaggctattggcaggaagtcggcagacgaataaatactctgcgcgaaagcgcccgacaactctactcttttcaaaacccttttaacgaaagattaggcaaaagttccgatgaatccgtattaacggctatcgcgaacagagacgtccctgaacaatccttttcttttacagtaaaacaaaccgcccaggccgaccgttttctttcccaaccccttgatgaaaaaacaagaatagaagccggtacttattccttttcagtcggcaatgacgaaatttccataaattaccggggcggcactttaagaaattttgttgaaacaataaataaccgcggccgtaataaaatctccgcttcccttataaccgtaaaaagcggaacaatttcacttttaatagaatccaaattaacaggctctgaaaacagatga

SEQ ID NO: 18270 - protein, 185 aa, Unknown
  Obtained from environmental sample
  DOMAIN (10)...(109): Flagellar hook-associated protein 2 C-terminus
  misc_feature (1)..(185): Xaa is any amino acid
MSDVYIPGVKSRFNTGQIVEDLMKIEKIPRDRVQSNIDALRVQKGYWQEVGRRINTLRESARQLYSFQNPFNERLGKSSDESVLTAIANRDVPEQSFSFTVKQTAQADRFLSQPLDEKTRIEAGTYSFSVGNDEISINYRGGTLRNFVETINNRGRNKISASLITVKSGTISLLIESKLTGSENR

SEQ ID NO: 18271 - DNA, 351 bp, Unknown
  Obtained from environmental sample
  misc_feature (1)..(351): n is a, c, g, or t
atggcgatgtgtgaatatctttggactaatataaagggaaacgcaaaattattcaaaacgccgtcttttggaaaagatagaattcaccccacacaaaaaccagtaattctttataaatggttattatcaaaatacgcaaaaccaggctggaaaattctcgacacccactttggaagcggttctctcgctgtagcctgcaatgaattaggattccaattaacagcaagcgaaatcgatgaagattattttaacgcagcctgcaaacggatcgaacaagcgtataacgaacacaataatcaaccggagcttctcccagatacggctgaacgctccgccattgtgggagaatga

SEQ ID NO: 18272 - protein, 116 aa, Unknown
  Obtained from environmental sample
  misc_feature (1)..(116): Xaa is any amino acid
MAMCEYLWTNIKGNAKLFKTPSFGKDRIHPTQKPVILYKWLLSKYAKPGWKILDTHFGSGSLAVACNELGFQLTASEIDEDYFNAACKRIEQAYNEHNNQPELLPDTAERSAIVGE

SEQ ID NO: 18273 - DNA, 774 bp, Unknown
  Obtained from environmental sample
  misc_feature (1)..(774): n is a, c, g, or t
gtggacattaccggagactttaaaataaacaacgcaaatacggaattaacgctggatggttccggtgaaagcggcataaaagccgtgagtattactcttggtgacatttccgcgttgaataatgaagattttaagcttgaggcgacaggagatatttcgtttaatgggaatgttggtaccgcgagtgaatacatcggtgatattactgttgttaacgcggataatgttacattttccgaagatttatacgcggacagtatttccatcaaagcaaccggagccgtaacccaaacggcaaaaatgaacgcgaatgccctgacggtggaagcgggaacatttattactcttggtgaagataacaatgttataactgtaattttaaaaagtaatgctttaacccccgctcaaggggatattacttataatagcgatgtaggaacaaatacactgataataaagatggaaacgcttggaaatgtggtaattaatgaaaagtcaggaagtatggatgttgatgaaattaccgttggcggctatattacccttgatgtaaaaggagctataggtagtaacggttccggtaaacttgctggaaaagacataacggtaaatacggacggcaatatatctttgcttgatattaccggagattcaattgtctttaatatgggcggtaacatatctttgcttaacattgccggtgattcagttgtcttaaatgcgggttatcctgaacacacggttttggcaagccgggaacctcggccgatctga

SEQ ID NO: 18274 - protein, 257 aa, Unknown
  Obtained from environmental sample
  misc_feature (1)..(257): Xaa is any amino acid
MDITGDFKINNANTELTLDGSGESGIKAVSITLGDISALNNEDFKLEATGDISFNGNVGTASEYIGDITVVNADNVTFSEDLYADSISIKATGAVTQTAKMNANALTVEAGTFITLGEDNNVITVILKSNALTPAQGDITYNSDVGTNTLIIKMETLGNVVINEKSGSMDVDEITVGGYITLDVKGAIGSNGSGKLAGKDITVNTDGNISLLDITGDSIVFNMGGNISLLNIAGDSVVLNAGYPEHTVLASREPRPI

SEQ ID NO: 18275 - DNA, 423 bp, Unknown
  Obtained from environmental sample
  misc_feature (1)..(423): n is a, c, g, or t
atggacgattacggccaccaccctacggcggtaaaaacaacccttcagggcttgaaagaattttatccccgacgcaggctggttataagttttatgtcccatacttttacaaggacggcgacgctgtttgacgaattcgcatcgtgtttcaacgacgccgatttgatcttgttgcataaaatctacgcttccgccagagaagtctacaagggcggcgttacaggcagaacgctttttgaaaagaccaaagaaaactatggcgaaagggtactttatgccgaagaagtagatgacggttttgagcttatgaggggaatactaaagagtggggatctatttataactatgggcgcgggagacaactggaggcttggtaaaaagctttttgagttttacattaacaatcagggaatcagcctatga

SEQ ID NO: 18276 - protein, 140 aa, Unknown
  Obtained from environmental sample
  DOMAIN (1)...(73): Mur ligase family, glutamate ligase domain
  misc_feature (1)..(140): Xaa is any amino acid
MDDYGHHPTAVKTTLQGLKEFYPRRRLVISFMSHTFTRTATLFDEFASCFNDADLILLHKIYASAREVYKGGVTGRTLFEKTKENYGERVLYAEEVDDGFELMRGILKSGDLFITMGAGDNWRLGKKLFEFYINNQGISL

SEQ ID NO: 18277 - DNA, 822 bp, Unknown
  Obtained from environmental sample
  misc_feature (1)..(822): n is a, c, g, or t
gtgcgcggagtgcaagccgcttacaccgcgggaaaaataaccgcagaggaaatgatagcgacaggcatacgctggacattcgccccggtacttggcgtcgcgcaggatccgcgatggggacgcacatacgaaagttacagtgagaacgtggatattgtttcatcaatgggtgaatattttataaaaggcatacaggagaacggcggagccgcatgtatgaaacattttctcggagaggggcagaccatagacggacgcaatcaggggaacgctattttggatcaggagggaatcgataaaatccttccgccttaccgcgcggcgattaacgccggcgcaatgtctttaatgccttcattctccagcgtaaacggaattaaaatgcatcagaataaagaactgcttacagatttgttaaaagataaaatgaaatttaaaggctttgttgtttccgactggtcggcaataaaacaactgacaggcggcagttacaaaatgcaaattgcaaacgcgattaacgccggagtggatatgtgcatggcgactgacggcagagacaattggataaattatattaaatatcttactgagcttgtagaagaaggagttgtcccgatgtcgcgtattaacgacgctgttgccagaattctgcgtttcaagcaaagtataggcttatttgaaaatcctatgacaaagcaggcgggagaaatcggcacagaagcaaacagagccgccgcccgtgaacttgtttccgactcgcttgttcttttacgcaacgaaaaaaacacaatcaaaaaactttctgagtgtaaaaggatttag

SEQ ID NO: 18278 - protein, 273 aa, Unknown
  Obtained from environmental sample
  DOMAIN (1)...(181): Glycosyl hydrolase family 3 N terminal domain
  misc_feature (1)..(273): Xaa is any amino acid
MRGVQAAYTAGKITAEEMIATGIRWTFAPVLGVAQDPRWGRTYESYSENVDIVSSMGEYFIKGIQENGGAACMKHFLGEGQTIDGRNQGNAILDQEGIDKILPPYRAAINAGAMSLMPSFSSVNGIKMHQNKELLTDLLKDKMKFKGFVVSDWSAIKQLTGGSYKMQIANAINAGVDMCMATDGRDNWINYIKYLTELVEEGVVPMSRINDAVARILRFKQSIGLFENPMTKQAGEIGTEANRAAARELVSDSLVLLRNEKNTIKKLSECKRI

SEQ ID NO: 18279 - DNA, 663 bp, Unknown
  Obtained from environmental sample
  misc_feature (1)..(663): n is a, c, g, or t
ttgacgagcttttcccatgtcgcgcaagacccaatcatacagaaaaatgttcctgtacttgcggaagcggtgctgaccatcggcgggccgcagctgcgtaatatcggcactatcggcggaaacgtctgtaacggggttacgtccgcggacagcgcctcaaccctgctggcctatgacgtggtaatggaatacctgggtcccgacgggctgcggcttgttcccatttcctcccattatataagcgccggcaaaaccgccctggcccatgacgagattttgcaggctattcttatcccaaaggaaagttatgaaaattgttttggcaattatataaaatatgccatgagggaggctttggacattgcaaccctgggatgttcggcaaatgtccggctttcaaaagatcgcaaagcaattgacaggcttcgcctggcatacggcgttgccgggcctgtacccatgcgtgttcaaaccgcagaacaggcggcagccggaaaattcgtaaacacggaaaccgcctccgctattgccaaactggtgttaaacgacattaacccgcgctcaagctggcgggccagcagggaattccgtctgcatctggcggaagagcttgccaaacaggcgatttctgaatcacttaaacgcgcgggggtatcgctatga

SEQ ID NO: 18280 - protein, 220 aa, Unknown
  Obtained from environmental sample
  DOMAIN (1)...(101): FAD binding domain in molybdopterin dehydrogenase
  misc_feature (1)..(220): Xaa is any amino acid
MTSFSHVAQDPIIQKNVPVLAEAVLTIGGPQLRNIGTIGGNVCNGVTSADSASTLLAYDVVMEYLGPDGLRLVPISSHYISAGKTALAHDEILQAILIPKESYENCFGNYIKYAMREALDIATLGCSANVRLSKDRKAIDRLRLAYGVAGPVPMRVQTAEQAAAGKFVNTETASAIAKLVLNDINPRSSWRASREFRLHLAEELAKQAISESLKRAGVSL

SEQ ID NO: 18281 - DNA, 813 bp, Unknown
  Obtained from environmental sample
  misc_feature (1)..(813): n is a, c, g, or t
ttgaattttcaatatacgctaatcaacaaatacatggcggatctttttaataaagaagtggatgacatactcggaaaggatgatacaaccgctctggatttgccaggcgaaacggtgaagatcgcccatgacactgacttaagagttgtgaacgaacgacagcggatagtatatgaggaatggctgccctgcgccgatggcggtacacgactttatgaaacggtaaaatcaccgcttatactgaacgacgccgtaatcggggttttggccatcgggcgtgacataacccagcataaagagatggaagaagaactccgcgccgcttcgcacgccaagtccgcttttcttgccaacatgagccacgaactcaggactcctcttaacgtagtcatcggccttacagatttggtactggaagaaaaccaactgccggagcaggttaaggatagtctttcaaagataagcaacgccggcactacgctccttagcattgtaaacgacatccttgatttttcaaaaatcgagtcgggcaaaatcgaattaacgccggttgaataccatatgtccagcctgctcaacgacgtgatcactctggtctctacgcgccttggcgaaaaacccattacattcaagttaaacatcagtgacgatttgccaggcaaactctatggggacgaccttcgcgtaaaacagattttcaacaatctgctcagcaacgcaattaaatacacgcatagcggaaccatcgaattaagcgtaagctgcaaacgctccggcgcagatctgctggggaagatcatcagctcgcgataa

SEQ ID NO: 18282 - protein, 270 aa, Unknown
  Obtained from environmental sample
  DOMAIN (111)...(177): His Kinase A (phosphoacceptor) domain
  misc_feature (1)..(270): Xaa is any amino acid
MNFQYTLINKYMADLFNKEVDDILGKDDTTALDLPGETVKIAHDTDLRVVNERQRIVYEEWLPCADGGTRLYETVKSPLILNDAVIGVLAIGRDITQHKEMEEELRAASHAKSAFLANMSHELRTPLNVVIGLTDLVLEENQLPEQVKDSLSKISNAGTTLLSIVNDILDFSKIESGKIELTPVEYHMSSLLNDVITLVSTRLGEKPITFKLNISDDLPGKLYGDDLRVKQIFNNLLSNAIKYTHSGTIELSVSCKRSGADLLGKIISSR

SEQ ID NO: 18283 - DNA, 378 bp, Unknown
  Obtained from environmental sample
  misc_feature (1)..(378): n is a, c, g, or t
atgaatatgcaagaagctgttgaatatttaagtgaaatctccaaaaaaagcggagcggagcagtttgatatttttgctggcaaaagcgatagcaaaagcatatctgttttcaacaaagccttgcaaaacacggaaatttcaaactcgtgcggaattggcattcgcattttcaaggaacaaaaacctggctacgcttcaacagaaaaattctcaaaagaatcattggaacaaacgctcgcagatgctctttcaaacagcgaattcaccgaggttatgaacgtagagttgccaagccctgctccagaaaaagaggcactcccaacttacaatgcagaacttgaaaatgtggatataaatcgcttgctaaacactgtttaa

SEQ ID NO: 18284 - protein, 125 aa, Unknown
  Obtained from environmental sample
  misc_feature (1)..(125): Xaa is any amino acid
MNMQEAVEYLSEISKKSGAEQFDIFAGKSDSKSISVFNKALQNTEISNSCGIGIRIFKEQKPGYASTEKFSKESLEQTLADALSNSEFTEVMNVELPSPAPEKEALPTYNAELENVDINRLLNTV

SEQ ID NO: 18285 - DNA, 366 bp, Unknown
  Obtained from environmental sample
  misc_feature (1)..(366): n is a, c, g, or t
ttggactacgtctccacggctaaccacttgggcaagcccgttttttcggacttggccgaaggcaagctgacactgcccgccatttccctaatggaaaaggcccctggtgatgccgcgccattgatagaaaaaatatggtccgcagacaaatcaacggaccaagcggccagcccagaaagcgaaatcaagcacctattggaattgatgaagcagcatggaaccctagacgaaacgtgcgaattggccaaaaacgccagtcgcgccgccattgacgccctgccggacatcgaaggcgcggaagacgctaaggccgttgccgccttgttgaaagaaattccagaagtattgctggctaggacgttctaa

SEQ ID NO: 18286 - protein, 121 aa, Unknown
  Obtained from environmental sample
  misc_feature (1)..(121): Xaa is any amino acid
MDYVSTANHLGKPVFSDLAEGKLTLPAISLMEKAPGDAAPLIEKIWSADKSTDQAASPESEIKHLLELMKQHGTLDETCELAKNASRAAIDALPDIEGAEDAKAVAALLKEIPEVLLARTF

SEQ ID NO: 18287 - DNA, 498 bp, Unknown
  Obtained from environmental sample
  misc_feature (1)..(498): n is a, c, g, or t
ttgtggcgggacgatacccgcccgccgccactccgccgacggtcccctggcccttctgcgcttcggcccagcgggcgagataccccgcctgacccagattacggcgatgttcaaccagcctatggtccccttgggcgcctacgaccaggttcccgccggagtcctgaacctgaccccggatctgccgggacgccggctctggctcaaccaatacaccctggccttcgtgccggagcggcccttgaccggcagcctaaaaatcaaggccgcgctcagggccgaccgcctcccggcggccatttccggcgcccggctgaaagaagacgccacggccgaaatccgcctcccgcttttagaggttcaacgccgccagatgttgggcgacggggttttggaaaccgctctgactcccggctggcgggtggttttcaaccaacctccggacccggccagcctggagcggcgcgcttattttatctggtccgaaggctggtctga

SEQ ID NO: 18288 - protein, 165 aa, Unknown
  Obtained from environmental sample
  misc_feature (1)..(165): Xaa is any amino acid
MWRDDTRPPPLRRRSPGPSALRPSGRDTPPDPDYGDVQPAYGPLGRLRPGSRRSPEPDPGSAGTPALAQPIHPGLRAGAALDRQPKNQGRAQGRPPPGGHFRRPAERRRHGRNPPPAFRGSTPPDVGRRGFGNRSDSRLAGGFQPTSGPGQPGAARLFYLVRRLV

SEQ ID NO: 18289 - DNA, 672 bp, Unknown
  Obtained from environmental sample
  misc_feature (1)..(672): n is a, c, g, or t
atgtttattttatgcaatccgcacaatccggtcggacgtgtttggaaaaccgaagaacttacacgcatgggagaaatctgccttcgccacggcgtaacagttatcgccgatgagattcatcaggattttattttctcgggacataagcatattgtgttcgccgcattaaatcaggattttgcaaatataactgttacctgcacttcaccgtcaaaaacttttaatcttgcaggattaattagcgcaaatatttttatttccaacaaagaattgcgtgaaaaatttaaagaagagtatacaagagcggggttaagtcagccgggtgtgatggggcttatctcctgcaaggcggcgtatcaagacggcgcgcagtggctggaacagctaataaattatcttgaaggaaatatcgctttccttaaaacatatctttccaataacatcccgaaaataaaacttgtcgaaccggaaggaacatatcttgcgtggctggactttaatgaattcgatctctcctcccaaaaattggacgaagcgattactcaaaaaggaaaattatggcttagcgcgggtcatactttcggaaaaggcggaaaaggtttccagcgtatcaatgccgcctgcccccgttccgtacttcgcagcgctctggatcggttaaaaaaccattga

SEQ ID NO: 18290 - protein, 223 aa, Unknown
  Obtained from environmental sample
  misc_feature (1)..(223): Xaa is any amino acid
MFILCNPHNPVGRVWKTEELTRMGEICLRHGVTVIADEIHQDFIFSGHKHIVFAALNQDFANITVTCTSPSKTFNLAGLISANIFISNKELREKFKEEYTRAGLSQPGVMGLISCKAAYQDGAQWLEQLINYLEGNIAFLKTYLSNNIPKIKLVEPEGTYLAWLDFNEFDLSSQKLDEAITQKGKLWLSAGHTFGKGGKGFQRINAACPRSVLRSALDRLKNH

SEQ ID NO: 18291 - DNA, 567 bp, Unknown
  Obtained from environmental sample
  misc_feature (1)..(567): n is a, c, g, or t
gtggtaagggccattgccgacgccaaggccgcggccgctgacattctgcaaaaactgaaattggaagccgatttttcaacaaagccctcatgcgctgttgtcgccgatatttccgatctctattgtaaaaaaggggtgatcagcgaactgaaaccggacaacaccgacgcttaccgctgcctttcgtgtaacagcctctgcgaggtatgcgttgacgtatgcccgaatcgcgccaatgtgatggtggaattggaggattcaggaagacatcaggtcatacatatcgaccgtatgtgcaatgaatgcgggaactgcgccattttctgtccccacgccggaaagccgtataaggacaaatttacaattttctgctgtgaagaggattttgccgaaagcgaaaactcaggactgcttaaaatcggcgcagacacattcaggattcgtttggaagacaaatccacgctgacttaccgcaggggcgagaaaacgatccctaaacaatggatcgcgctgattgatgttattttgtcgaaatatgaatatttgttaaattgggagctgccatga

SEQ ID NO: 18292 - protein, 188 aa, Unknown
  Obtained from environmental sample
  misc_feature (1)..(188): Xaa is any amino acid
MVRAIADAKAAAADILQKLKLEADFSTKPSCAVVADISDLYCKKGVISELKPDNTDAYRCLSCNSLCEVCVDVCPNRANVMVELEDSGRHQVIHIDRMCNECGNCAIFCPHAGKPYKDKFTIFCCEEDFAESENSGLLKIGADTFRIRLEDKSTLTYRRGEKTIPKQWIALIDVILSKYEYLLNWELP

SEQ ID NO: 18293 - DNA, 588 bp, Unknown
  Obtained from environmental sample
  misc_feature (1)..(588): n is a, c, g, or t
gtggatgagcgagctccccgtaacagaacagattatccggtttggaaaaagatccttgcgtcccaaaatacagtttccaatgagaacaagccgcgtggtaaacttgaggcagatcagcgtaaagccgcgcagattgccgcgactgaccgcggcgatttcgacgtgcaggccgtgcgggaggcggcgtacaaagcctggcatgaagtccaccggctgatgggtcttctgcgtttctgcccagatgaaaaaggcgtatatacagcccaatgcgagccggatcattttgtgctgccggctttgggcccgcatttcatggatcgctttggcgagacgccctgggctataattgataacaagcgccgcctcagcctctgttgtgaaacggggcggacaggcgcctccggcaaaacccttgtgttttcagccggcgccgaaaacgagtcttcttttgggaaagggcagacaggtgaatgggagaatctgtggaagcattaccataaaatcattaacaatgaaagcagaaataacccggatctgcaaaaacgcttcatgcccacgaggtactggaaatacctgacagaactttaa

SEQ ID NO: 18294 - protein, 195 aa, Unknown
  Obtained from environmental sample
  misc_feature (1)..(195): Xaa is any amino acid
MDERAPRNRTDYPVWKKILASQNTVSNENKPRGKLEADQRKAAQIAATDRGDFDVQAVREAAYKAWHEVHRLMGLLRFCPDEKGVYTAQCEPDHFVLPALGPHFMDRFGETPWAIIDNKRRLSLCCETGRTGASGKTLVFSAGAENESSFGKGQTGEWENLWKHYHKIINNESRNNPDLQKRFMPTRYWKYLTEL

SEQ ID NO: 18295 - DNA, 570 bp, Unknown
  Obtained from environmental sample
  misc_feature (1)..(570): n is a, c, g, or t
atggaagtctgcgcctattcgggatttcccgcaggagccgactgcgggaaaacagcggaagcctccgttcctttaaaggctccccgtcacggaccctgtccttattgccgtatcgtggcgcttaaccgggccggagaccggcgcgttaccgtgggctccactgaggaacctgttcggctggaaaagtggtttgttcttccaccggcggaagaatggtattacaggcgctggaatctggactacaagcccctgccaccgctccgctccgatccggatgatcccggcggatcgggcatcccgtccctggccctttttaaccccgagccggaagcaaaaatttacatccccagggaactggacggcaggaaaggaaaagttgtctttcaggccgcccaccgggaaagcggcgaagtaatctattggcatctggacgatacgtatttgggggaaacttccgtttttcatgatctggaagcccggcccggccctggttttcataccatcaccctggtagacgggaagggaagccggatcagccgacgttttgaagtgctaagcgatgcggattaa

SEQ ID NO: 18296 - protein, 189 aa, Unknown
  Obtained from environmental sample
  DOMAIN (91)...(182): Penicillin-Binding Protein C-terminus Family
  misc_feature (1)..(189): Xaa is any amino acid
MEVCAYSGFPAGADCGKTAEASVPLKAPRHGPCPYCRIVALNRAGDRRVTVGSTEEPVRLEKWFVLPPAEEWYYRRWNLDYKPLPPLRSDPDDPGGSGIPSLALFNPEPEAKIYIPRELDGRKGKVVFQAAHRESGEVIYWHLDDTYLGETSVFHDLEARPGPGFHTITLVDGKGSRISRRFEVLSDAD

SEQ ID NO: 18297 - DNA, 513 bp, Unknown
  Obtained from environmental sample
  misc_feature (1)..(513): n is a, c, g, or t
ttgtactttgatgttaagggttttggcgctacttattntgatacaggactgggtttaagcttctttaatgacaatgtacgcttgcaggcccaatttggtcttgcgccgcctgatggatttaatactgcatttggtatcggcgggcgttatgtcggcactgtagtcggcataaagttattggctaatattttctatctgccttttgcctatttgttcgggcttgactgggctttctattcgatgaattttgcggtaggggcaaatttttcttactttaccatggatgaaacgccgccgcctgaaggacggagtggactgtacattggcgccgtagtggcgcagtgggatattgccaatattaatatgcaatacttctatccccagtggaagtatttcagaaactttgcattgtatctggagccggaattgtggtttgcctcttccgatgttaagacagataatgagacaattatattcaggatgaccgttggcatgagactaaattggttttag

SEQ ID NO: 18298 - protein, 170 aa, Unknown
  Obtained from environmental sample
  misc_feature (1)..(170): Xaa is any amino acid
MYFDVKGFGATYXDTGLGLSFFNDNVRLQAQFGLAPPDGFNTAFGIGGRYVGTVVGIKLLANIFYLPFAYLFGLDWAFYSMNFAVGANFSYFTMDETPPPEGRSGLYIGAVVAQWDIANINMQYFYPQWKYFRNFALYLEPELWFASSDVKTDNETIIFRMTVGMRLNWF

SEQ ID NO: 18299 - DNA, 501 bp, Unknown
  Obtained from environmental sample
  misc_feature (1)..(501): n is a, c, g, or t
gtggctggtactttaggcggtttttatgctatgggaaagagatttatccctgtgatgcaatatgtagattataaatttgcgtactggccaaactcaagcggatattgggatgaatacaggaagcaggggaaaacggggatttggtttgatgattattatggcggcaatcaaacacattggctttcctttaaggttgccaaaatgttgccgagccaagctagggaatattatcccgaatggttggcttttgccattggctgtgggttgtatgatgtgtatggcgggccaaactgggaaacggaatgggataaaatccgttatggatattatctttccctagactatgattttgatgcaatttttcatcctcaaaaaacttggagcaagaatttaattgcggttttgaaccgcataaaatttcctgcgcctgctgttcgcctgcatccgaatgcaaaattctttccgcttcacccgtggtacgggtttagcgttaatttctag

SEQ ID NO: 18300 - protein, 166 aa, Unknown
  Obtained from environmental sample
  misc_feature (1)..(166): Xaa is any amino acid
MAGTLGGFYAMGKRFIPVMQYVDYKFAYWPNSSGYWDEYRKQGKTGIWFDDYYGGNQTHWLSFKVAKMLPSQAREYYPEWLAFAIGCGLYDVYGGPNWETEWDKIRYGYYLSLDYDFDAIFHPQKTWSKNLIAVLNRIKFPAPAVRLHPNAKFFPLHPWYGFSVNF

SEQ ID NO: 18301 - DNA, 603 bp, Unknown
  Obtained from environmental sample
  misc_feature (1)..(603): n is a, c, g, or t
gtggccgcgcagcgcctcggatatcaagaacgaatcgcccttctcgtggaacagggtggtggggtggaactgtataaattccatattggcggtgctcgcccccgccctataagccatcgccacgccgtcgcctgtggctatcgccggattggtggagtgcaggtagacgcgccccgccccgccgctcgcgaggcaggtcaccttcgcgccgacggcggagatttttttattgacggagtcgagcgcgtacgccccgaaacactcgtattgattaggcacgctctttatatggtgaccggtgataagttcgatagcgcagtgattttcaaagattgtgacgttgctcagcccgcgcagttttttgagcagggtcgcctccagttcgcgccccgtgaagtccttggcgtggactatcctgttgacgctgtgccccccctcgcgcccgaggtgcagcccgtacgggttgccggcggcggcgctgtccgtcgaaaaccgcgccccgtaatcgagcagctcccgtatccgcgtaggcccctcctccacgagtatccgcaccgccccctcgtcgcaaagccccgcccccgccacgagctctcgcgataa

SEQ ID NO: 18302 - protein, 200 aa, Unknown
  Obtained from environmental sample
  misc_feature (1)..(200): Xaa is any amino acid
MAAQRLGYQERIALLVEQGGGVELYKFHIGGARPRPISHRHAVACGYRRIGGVQVDAPRPAAREAGHLRADGGDFFIDGVERVRPETLVLIRHALYMVTGDKFDSAVIFKDCDVAQPAQFFEQGRLQFAPREVLGVDYPVDAVPPLAPEVQPVRVAGGGAVRRKPRPVIEQLPYPRRPLLHEYPHRPLVAKPRPRHELSR

SEQ ID NO: 18303 - DNA, 879 bp, Unknown
  Obtained from environmental sample
  misc_feature (1)..(879): n is a, c, g, or t
gtggcgggggcggggctttgcgacgagggggcggtgcggatactcgtggaggaggggcctacgcggatacgggagctgctcgattacggggcgcggttttcgacggacagcgccgccgccggcaacccgtacgggctgcacctcgggcgcgagggggggcacagcgtcaacaggatagtccacgccaaggacttcacggggcgcgaactggaggcgaccctgctcaaaaaactgcgcgggctgagcaacgtcacaatctttgaaaatcactgcgctatcgaacttatcaccggtcaccatataaagagcgtgcctaatcaatacgagtgtttcggggcgtacgcgctcgactccgtcaataaaaaaatctccgccgtcggcgcgaaggtgacctgcctcgcgagcggcggggcggggcgcgtctacctgcactccaccaatccggcgatagccacaggcgacggcgtggcgatggcttatagggcgggggcgagcaccgccaatatggaatttatacagttccaccccaccaccctgttccacgagaagggcgattcgttcttgatatccgaggcgctgcgcggccacggcgcggtgctacgcaacgcggcgggggaagacttcatgccgagataccacccgcaagggtcgctcgccccgcgcgacatcgtggctagggcgatagacaacgagatgaaagtttcagggctgccgtgcgtctatctcgacatcaggcacaaggactcgcgggcgaccgtcgaaaactttccgcagatatacaataagtgcctgagtttcgggatagacatcacgaaggatttgatccccgtagtgccggccgcccactatatgtgcggcggcgtgttggttgaattataa

SEQ ID NO: 18304 - protein, 292 aa, Unknown
  Obtained from environmental sample
  DOMAIN (1)...(292): FAD binding domain
  misc_feature (1)..(292): Xaa is any amino acid
MAGAGLCDEGAVRILVEEGPTRIRELLDYGARFSTDSAAAGNPYGLHLGREGGHSVNRIVHAKDFTGRELEATLLKKLRGLSNVTIFENHCAIELITGHHIKSVPNQYECFGAYALDSVNKKISAVGAKVTCLASGGAGRVYLHSTNPAIATGDGVAMAYRAGASTANMEFIQFHPTTLFHEKGDSFLISEALRGHGAVLRNAAGEDFMPRYHPQGSLAPRDIVARAIDNEMKVSGLPCVYLDIRHKDSRATVENFPQIYNKCLSFGIDITKDLIPVVPAAHYMCGGVLVEL

SEQ ID NO: 18305 - DNA, 357 bp, Unknown
  Obtained from environmental sample
  misc_feature (1)..(357): n is a, c, g, or t
ttgcaaattgacaaatccgttaccagtatgcctttgacaatagctaaaaaacgttataaaaaaggaatagggactcatgcgaatggagtattgcgttataatttggatggcaaatacaaaaggttaaccgcagttatagggctggacgaagatgaattttgcagcaatggtatgcaggtaaaaatccttggtgatggcagcctgctggcagacactagaaaacttgagcgaggtgacgaatactcgctggacatccctttgagcgatgttaaacaactgatttttgaaatggatggcatgggcgatattggctgcgaccatgttgatatagcagtgcctatgttgtatgggagatag

SEQ ID NO: 18306 - protein, 118 aa, Unknown
  Obtained from environmental sample
  DOMAIN (1)...(117): NPCBM domain
  misc_feature (1)..(118): Xaa is any amino acid
MQIDKSVTSMPLTIAKKRYKKGIGTHANGVLRYNLDGKYKRLTAVIGLDEDEFCSNGMQVKILGDGSLLADTRKLERGDEYSLDIPLSDVKQLIFEMDGMGDIGCDHVDIAVPMLYGR

SEQ ID NO: 18307 - DNA, 549 bp, Unknown
  Obtained from environmental sample
  misc_feature (1)..(549): n is a, c, g, or t
atgaaatatgtcgcgcctgtacggcgtgaacttggaatacgcacaatttttaatatactgggacctttagttaatccggcaggcgctaacatggaactacttggcgtgtatgagcctgagcttattgagccaatggcaaaagttttgtgcaatcttggtgtaaaaagaggcatggttgtatttggtcatgacggactggacgaaatatcaattagctcgccgacaactgtctgcgaattacgtgacggatttatcaaaagttacgaaatagaaccggaacaattcggactaacccgctgtaaaaaagaagacctgcttggcggaacaccgcctgagaacgcacagataacaagggacattctttcaggcgttaaaggaccgaaaagggacgcagtacttataaattcagcagcggctatccatatcgctaaacctgaaatttccattaaggaaggaatcgccattgccgaagaagcgatcgattcgggaaaggcaaacgaacagttaaaacagtttatcgccctgtcgcagaaaaaagacacagcctaa

SEQ ID NO: 18308 - protein, 182 aa, Unknown
  Obtained from environmental sample
  DOMAIN (1)...(166): Glycosyl transferase family, a/b domain
  misc_feature (1)..(182): Xaa is any amino acid
MKYVAPVRRELGIRTIFNILGPLVNPAGANMELLGVYEPELIEPMAKVLCNLGVKRGMVVFGHDGLDEISISSPTTVCELRDGFIKSYEIEPEQFGLTRCKKEDLLGGTPPENAQITRDILSGVKGPKRDAVLINSAAAIHIAKPEISIKEGIAIAEEAIDSGKANEQLKQFIALSQKKDTA

SEQ ID NO: 18309 - DNA, 552 bp, Unknown
  Obtained from environmental sample
  misc_feature (1)..(552): n is a, c, g, or t
atgatggccgagacgttttcgaagttgatacctgcatactctgtgcttatcatttcaggaaccaaggcgaaaggtttttctgacaatctgattcctgaaatggtacatacggctcgtgagcgcggttgccggatcattcttgacgtcaggggacaagaccttcttaaaagcctgccctttgggccaaatctggtaaagcccaatctctacgaatttatttccacattcgcgcctgagctgcttacagaaaaaaacaccgacaccgtaaaaaaaacgatagggaagatatgggcggaactctacgaaaaatacccctgcgctctggtattgacgcggggagccgagcctttgtggtatgcggagaaaggcgaactggaggaatatgcctttgaaaaagtggagcccctcaacaccacaggatccggtgatgcctttactgccggacttgccgccgcgctggaagaaggcgcttctctgcttgacgccgttgccgagggcgcacgctgcggggcccttaacgccgccttactcaagcccggcgttatccgctaa

SEQ ID NO: 18310 - protein, 183 aa, Unknown
  Obtained from environmental sample
  misc_feature (1)..(183): Xaa is any amino acid
MMAETFSKLIPAYSVLIISGTKAKGFSDNLIPEMVHTARERGCRIILDVRGQDLLKSLPFGPNLVKPNLYEFISTFAPELLTEKNTDTVKKTIGKIWAELYEKYPCALVLTRGAEPLWYAEKGELEEYAFEKVEPLNTTGSGDAFTAGLAAALEEGASLLDAVAEGARCGALNAALLKPGVIR

SEQ ID NO: 18311 - DNA, 777 bp, Unknown
  Obtained from environmental sample
  misc_feature (1)..(777): n is a, c, g, or t
atgaacaccgcgtggccgaaagacacgtatgtccttatcccgtcgtacaaatcgataggtcagttgaggccgtttgtaagcttattgacggagacggttcctaaggagtgcgtatgcgtagtggacgacgcttccaacgacgggacgtatgaattctgtattgattccggcatagactgcgtccgccaccacaggaacaggggcaagggggcggcgttaagaacgggtttttcacatttaatcagtacaaagggtaccgataaaatagttgtaactccggaaatatcaacacaacaaaaatgtaaatggatcctaactatggacgccgacggccagcactcccccgccgacatcccccgtttcatcgccgaatccaaaaaacatccggctctgggtatatgcatcggcgcccgcgatatgcgcccccgttcgatgcccgtggcgcggattatctccaaccggctgacttcgctaatcctctccctgctcaccgggcggcgcgttacggacagtcagtgcgggtaccgcctctactcggcggatttcataaaatcaatacaaattgagcacaaccgtttccaagcggagtcggagttgatacagaaagccgccgcgaaacattttcctattcgctttacgggtgtgcagacattatatttaaatggtgggtcaagccacatctcgcaccttttggatacgttgcgctggattgcggcggtggggcgtgtgtggttcaaattaacgtttacagatggaaagcgtggttttagcgaatga

SEQ ID NO: 18312 - protein, 258 aa, Unknown
  Obtained from environmental sample
  DOMAIN (10)...(187): Glycosyl transferase family 2
  misc_feature (1)..(258): Xaa is any amino acid
MNTAWPKDTYVLIPSYKSIGQLRPFVSLLTETVPKECVCVVDDASNDGTYEFCIDSGIDCVRHHRNRGKGAALRTGFSHLISTKGTDKIVVTPEISTQQKCKWILTMDADGQHSPADIPRFIAESKKHPALGICIGARDMRPRSMPVARIISNRLTSLILSLLTGRRVTDSQCGYRLYSADFIKSIQIEHNRFQAESELIQKAAAKHFPIRFTGVQTLYLNGGSSHISHLLDTLRWIAAVGRVWFKLTFTDGKRGFSE

SEQ ID NO: 18313 - DNA, 531 bp, Unknown
  Obtained from environmental sample
  misc_feature (1)..(531): n is a, c, g, or t
gtgtatttttttgcggttaaactgcatatttttcccgggagcctgggttatggatttgatttgctccctaactggtcaaacccggcctttattctttcggttattagtcattaccgcctgcctttccttactatggtgctggtcgccatagggggacagtctttgggtatgcgcgaaatgtccatatatgaattgaatgccgattatgtaaaatactcgcggcttatgggtattaaagataaaaaaattgtctggtatgtattccgtaacgccatgctgccccagattaccggcctggccctttcccttggaaccttaatggggggcaaccttgtcgccgagattgtattttcctatcccggcgtagggatgaccgtgtatagcgcaatcaggggtcaggattatccccttatttcaggttgtactctgattattaccgttatggtcctggccgccaattttattgtggatataatctgcggcattatcgatccacgggtgcgtatgacaaatcaggaggagggcgcctag

SEQ ID NO: 18314 - protein, 176 aa, Unknown
  Obtained from environmental sample
  DOMAIN (2)...(169): Binding-protein-dependent transport system inner membrane component
  misc_feature (1)..(176): Xaa is any amino acid
MYFFAVKLHIFPGSLGYGFDLLPNWSNPAFILSVISHYRLPFLTMVLVAIGGQSLGMREMSIYELNADYVKYSRLMGIKDKKIVWYVFRNAMLPQITGLALSLGTLMGGNLVAEIVFSYPGVGMTVYSAIRGQDYPLISGCTLIITVMVLAANFIVDIICGIIDPRVRMTNQEEGA

SEQ ID NO: 18315 - DNA, 795 bp, Unknown
  Obtained from environmental sample
  misc_feature (1)..(795): n is a, c, g, or t
atgctgaatccctttattatccggaagacgctatgccaggtattatcacgaagttcgttcgatataaggagtataggaaattctaaaacggcaatttacataaatattcctgacgagaaaacaacactgcattatttagtaaccgtattcatcaaacaaacatacgaaactttagtagctcaagctcaccagcatgaagatatgagattgcctgtcagagtgaactttgttttagacgaattttgtaatattcccgctatccctgatatggcttccatgattagcgcggcaagatcgcgcaatatgcgtttttttcttatggcgcaaagcctgtggcaattaaagcagaaatatagggatgatgctaatacaataaaaggcaattgtgaaaattgggtgtttttaacatcacgtgaatatgatttattacaggagatcagcagtctttgcggtaatacaatatataaggaacctaatgacagtataaattcacgcccgttgatttcaatttcagaattacaacgtttaaagaaagaatacggcgagacgttaattcttcacgggcgtaactatccctttgtaacggaattgccggatattaatgagtataaatttaaaatttatcctcagataagaagagaagaatatcaattgccaaaaattgtgcgttataatgctgataaagttattaattcaataatagataagaaaaaacccattccattttctgttgaagtattcggaagtgagaagtattgtgatgattcgtataaaaaaaaccttggaaagaattaa

SEQ ID NO: 18316 - protein, 264 aa, Unknown
  Obtained from environmental sample
  misc_feature (1)..(264): Xaa is any amino acid
MLNPFIIRKTLCQVLSRSSFDIRSIGNSKTAIYINIPDEKTTLHYLVTVFIKQTYETLVAQAHQHEDMRLPVRVNFVLDEFCNIPAIPDMASMISAARSRNMRFFLMAQSLWQLKQKYRDDANTIKGNCENWVFLTSREYDLLQEISSLCGNTIYKEPNDSINSRPLISISELQRLKKEYGETLILHGRNYPFVTELPDINEYKFKIYPQIRREEYQLPKIVRYNADKVINSIIDKKKPIPFSVEVFGSEKYCDDSYKKNLGKN

SEQ ID NO: 18317 - DNA, 897 bp, Unknown
  Obtained from environmental sample
  misc_feature (1)..(897): n is a, c, g, or t
atgctggtcgtgttcagaatcggcgcgtgttttcccataccgggaatcaacgtcagagaactttccgcttacttcctttcgcagtcgaattccggaaaccccatagtcgactacctggacttcttcgccggcggcgcgttttccaatttctcggtgttcatgctgggcatcatgccctacatttccatgtcgattatcatgcagctgctgcttatcgtgtttcccagcctgaaaaagatatcgcaggaagacggggggcgcaagaagatacagcagtggcagcgttacggtaccgtcgcggtctgccttatccagtccttcgccgtcacccagtacgcgaaaagcatttccgccagcgttccgaatttgcttaatattggcatgctgccgtttacttttatcgcgatgcttaccgtcaccacgggaaccatgttccttatgtggataggcgagcagataaccaagcggggaattggcaacggcatttcgcttttgatcttcgccggcatcgtggcgcggcttccccacgcggtgtgggaactcggcggcagggtgcgcgacgggcagttaaacctggtgtttgtcatcgtggtattgctgatgtttgtggcggttgtcgccctggtcgtgtatgagcagcagggccagcgcaagattcccgtcaattacgccaaacgggtggtcggaaggagaatgtacggggcgcagaacacctacatacccttcaagatcaacccgtcaggcgtcattccggttatcttcgcttcgtcgatccttaccttccccctgcaaatagcgacgaccgtcggcggcaacataccctggctcgcgtccgtggcccgcgtgttaaccccgcgcggccccatgtacaatacgcgtacgtctcggccgatctga

SEQ ID NO: 18318 - protein, 298 aa, Unknown
  Obtained from environmental sample
  DOMAIN (51)...(298): eubacterial secY protein
  misc_feature (1)..(298): Xaa is any amino acid
MLVVFRIGACFPIPGINVRELSAYFLSQSNSGNPIVDYLDFFAGGAFSNFSVFMLGIMPYISMSIIMQLLLIVFPSLKKISQEDGGRKKIQQWQRYGTVAVCLIQSFAVTQYAKSISASVPNLLNIGMLPFTFIAMLTVTTGTMFLMWIGEQITKRGIGNGISLLIFAGIVARLPHAVWELGGRVRDGQLNLVFVIVVLLMFVAVVALVVYEQQGQRKIPVNYAKRVVGRRMYGAQNTYIPFKINPSGVIPVIFASSILTFPLQIATTVGGNIPWLASVARVLTPRGPMYNTRTSRPI

SEQ ID NO: 18319 - DNA, 744 bp, Unknown
  Obtained from environmental sample
  misc_feature (1)..(744): n is a, c, g, or t
atgtactattcctacgctgtaacgcttttaattctttgcccctttatttttctttcttcctttattgatgctattgccggcggcggcgggctgatttcactgccggcttatatttttgttgggattccaattcacaacgcctacgctacaaataaattttccgcctcactgggaactgcggtggcggttgctaattacctgaaaggggactgcattgattttaccgccggcatttccggaagtgccgccgcagttatcggctcattgatcggaacccagctggcgctttcgctttctcccagggctttgcaaatttgccttatggttattcttccgcttgtaggggtttttatctttgcgaagcgcggccctgggaatcaggataatgccgctccaagatcaaaacgctttaagctaatcttttcttcattgatagggctggtcttcggctgttacgacgggttcttcgggccggggacgggaatgtttatgacgcttgccctttccggccttgttcaccttgatctgatcaaatccgttgggacaacaaagctaatcaattttgcttccaacttcaccgccatgatcacctggcttattagcggcaaaatacttttcccgatagctgttccctgcatggtctgttcggtagcaggcggttttttaggttccaggatggcgattaaaacaggcaagaaattaatacgccttgtccttgctttggtttcaatcctgcttttgtaa

SEQ ID NO: 18320 - protein, 247 aa, Unknown
  Obtained from environmental sample
  SIGNAL (1)...(24)
  DOMAIN (10)...(247): Domain of unknown function DUF81
  misc_feature (1)..(247): Xaa is any amino acid
MYYSYAVTLLILCPFIFLSSFIDAIAGGGGLISLPAYIFVGIPIHNAYATNKFSASLGTAVAVANYLKGDCIDFTAGISGSAAAVIGSLIGTQLALSLSPRALQICLMVILPLVGVFIFAKRGPGNQDNAAPRSKRFKLIFSSLIGLVFGCYDGFFGPGTGMFMTLALSGLVHLDLIKSVGTTKLINFASNFTAMITWLISGKILFPIAVPCMVCSVAGGFLGSRMAIKTGKKLIRLVLALVSILLL

SEQ ID NO: 18321 - DNA, 726 bp, Unknown
  Obtained from environmental sample
  misc_feature (1)..(726): n is a, c, g, or t
gtgaaaaatcgtgttttttttatcgacgagattcacaggcttaaaccggcgattgaagaaatgctttatatcgcaatggaagattacgagctggactggatcatcgggcaggggccgagcgccagaaccatacgaatacctgttcagccctttacccttgtgggagctaccacaaaagccggaaatgtctcaagccccctgataagccgcttcggcattaccttccgtttttcgttctacgaaaacgaggacatggaagccatcgtcaggcgctcggcggggatactgggcgttgccattaacgatgacgccgcttcccttctggcaagatcagcgaggggaacgcccagagtggttaaccggcttctgcgccgcgtaagggatttcgcgcagataaaggcaaagggagcggagctgcttgtcaccagggaaattgtggaagaaagcctgaaacgcctggaaatagattcgcttggcctggaaagatacgatcgcgaaattctaaaaataataataacacggtacggaggcgggccagttggtgctgaaacgctggccatttctatcggggaatccgtggacaccctggaagattattacgaaccttatctgatacaagccggtcttatccagcgtactccgaggggcagggtagtaactgctcttgcctatgaatacctaaagctccccagggatggagaggccgaggggcttctttttncataa

SEQ ID NO: 18322 - protein, 241 aa, Unknown
  Obtained from environmental sample
  DOMAIN (152)...(230): Holliday junction DNA helicase ruvB C-terminus
  misc_feature (1)..(241): Xaa is any amino acid
MKNRVFFIDEIHRLKPAIEEMLYIAMEDYELDWIIGQGPSARTIRIPVQPFTLVGATTKAGNVSSPLISRFGITFRFSFYENEDMEAIVRRSAGILGVAINDDAASLLARSARGTPRVVNRLLRRVRDFAQIKAKGAELLVTREIVEESLKRLEIDSLGLERYDREILKIIITRYGGGPVGAETLAISIGESVDTLEDYYEPYLIQAGLIQRTPRGRVVTALAYEYLKLPRDGEAEGLLFX

SEQ ID NO: 18323 - DNA, 594 bp, Unknown
  Obtained from environmental sample
  misc_feature (1)..(594): n is a, c, g, or t
atgggcgaactgtccgcagccaaagttgtacgccatatacagacaaaaagggagctttctctttcggtttttatagctggttttgatctggaaggcgtggcggaaacaacaatggagaaagtagtctcggccgggtttaacacgcttgaaaaactcaggcaggcttcggtggaagacctggccggcgtttacggcttaggagagatcaccgcgaaagtaatagttgacggccttgcggaaacagccgcggaaatggacgaagtactcgcaaagggcgttataagcatagcagggccgccttcggaagagtcccagcccatgcggggcctttcattttgtttcaccggggaacttagctccatgaagcgtccccaggccgaagaaaaaataaaagccctgggcgctttggcaaaatcgactgtagtaaaagggctttcgtaccttgtcaccaacgaccccgcctccggctcctccaaaaacaaaaaagccagggaattgggagtaccaattatcaatgaggttgagtttcttaaactattagcggattcagttattgatggcgcaaagccagtccagggagaattgtttaagtaa

SEQ ID NO: 18324 - protein, 197 aa, Unknown
  Obtained from environmental sample
  DOMAIN (48)...(77): Helix-hairpin-helix motif
  misc_feature (1)..(197): Xaa is any amino acid
MGELSAAKVVRHIQTKRELSLSVFIAGFDLEGVAETTMEKVVSAGFNTLEKLRQASVEDLAGVYGLGEITAKVIVDGLAETAAEMDEVLAKGVISIAGPPSEESQPMRGLSFCFTGELSSMKRPQAEEKIKALGALAKSTVVKGLSYLVTNDPASGSSKNKKARELGVPIINEVEFLKLLADSVIDGAKPVQGELFK

SEQ ID NO: 18325 - DNA, 474 bp, Unknown
  Obtained from environmental sample
  misc_feature (1)..(474): n is a, c, g, or t
atgatcagatcggcacgagaactcggcaggtgcgtttttaacgatgatcttgttaacagcgaggctgaaaaggtgaacgctgcggacggaataattatcggctctccggtttactacggcagtattgccggaaactttaaatgttttttggacaggctttttttctcaggattgcggcttgaatacaaggcggcctgcgctgtagtgtcatgcaggcgcgcgggcggaattaacgcttttcaccagatgaacaattattttaaccttacaggcgcttttatcgcgccgtccgtatattgggagattgttcacggttcaagccgcaatgaatcattcagcgatgaggaaggcctttatgtcgtaaaacgttccgcgcgaagcatggcgtggctcatcaagtcccttgacatggcaaagaggcagatacctttgcctgaggttgacgtgcgcccctggaccaattttatccgttag

SEQ ID NO: 18326 - protein, 157 aa, Unknown
  Obtained from environmental sample
  misc_feature (1)..(157): Xaa is any amino acid
MIRSARELGRCVFNDDLVNSEAEKVNAADGIIIGSPVYYGSIAGNFKCFLDRLFFSGLRLEYKAACAVVSCRRAGGINAFHQMNNYFNLTGAFIAPSVYWEIVHGSSRNESFSDEEGLYVVKRSARSMAWLIKSLDMAKRQIPLPEVDVRPWTNFIR

SEQ ID NO: 18327 - DNA, 729 bp, Unknown
  Obtained from environmental sample
  misc_feature (1)..(729): n is a, c, g, or t
atgaaccttgaagaactgctatattcatggtcgggctcccgctttgcggtttacggtcttgaaggaaggccgagcccggtaattgccgtcgagatacgggacgaaaaaaaacgcaaagaggtttttgacaaagctttcagatcgatctttttgaacgagaatattaatcttacccttaacggaagccgcatcccgcagatagaaacaccggcttttcttgcttcccttttggctttaatgaacataaatatcccgtctccctattacaccgtatataacaattaccttttcatttccgaatccgccgaaaccctgcttgaggcaatcaccagtgtcaggcgcaacgaagtgctgccgaagcaggaactttggcgcgccctttcggaagacaattccggcccatcaagctttaccctgtattattcgctggaacattccattccgttttttcttaaaggccagggcatggtacccgcgatactcaggtcttaccgccacggacttgcccagcttcgctttgagaacaacacgcttaatgtttccctgttcacaatttcaggaacgggaaaaggccttacgccgattcccggctatcctttaaatctcccccggctatccgccaatgaaagaaccggaaagctcctttacgccgtctcttccggtaaagacacaagactcctcttaacccgcgggaacgcagttctggcggtgaatcccgtaaatccgtga

SEQ ID NO: 18328 - protein, 242 aa, Unknown
  Obtained from environmental sample
  misc_feature (1)..(242): Xaa is any amino acid
MNLEELLYSWSGSRFAVYGLEGRPSPVIAVEIRDEKKRKEVFDKAFRSIFLNENINLTLNGSRIPQIETPAFLASLLALMNINIPSPYYTVYNNYLFISESAETLLEAITSVRRNEVLPKQELWRALSEDNSGPSSFTLYYSLEHSIPFFLKGQGMVPAILRSYRHGLAQLRFENNTLNVSLFTISGTGKGLTPIPGYPLNLPRLSANERTGKLLYAVSSGKDTRLLLTRGNAVLAVNPVNP

SEQ ID NO: 18329 - DNA, 633 bp, Unknown
  Obtained from environmental sample
  misc_feature (1)..(633): n is a, c, g, or t
gtgcagtgcgccggatcgtcggcgtatctggcggagcgtatggaggaggagttcggaataccgtacatcaaggtcagtttcttcggcgtggaagacaccgcggcgtcgctactgcgtgccgcggacgcgctcggcaggccggacatctcggcgaacgcccgcgcctttgcggagcggcgcacggcggaggtcatgcctatcattgagaaataccgcccgcgcttggagggcaagcgcgccgctatcttcgtgggcggcggcttcaaggctatatcgctcattcgccaattcaacgaattgggtatgaagacggtggtcgtcggcacgcagacgggaaagaaggacgagtacgagatcatcgctgagcttgttgacggcgacgcggtcattttagacgacgcgaaccccgccgagctggagcgcttcatgttggagaaacacgccgatattttagtgggcggcgtaaaggagcgcccgctcgcgtataagttgggcatggcgttctgcgaccacaaccacgagcgcaaacatccgcttgccggatttgaggggatagagaattttgtcaaggaaattcatacgtctatcaacagccctgtttggaaacttgttaaaggggatgccgcggcttga

SEQ ID NO: 18330 - protein, 210 aa, Unknown
  Obtained from environmental sample
  DOMAIN (1)...(198): Nitrogenase component 1 type Oxidoreductase
  misc_feature (1)..(210): Xaa is any amino acid
MQCAGSSAYLAERMEEEFGIPYIKVSFFGVEDTAASLLRAADALGRPDISANARAFAERRTAEVMPIIEKYRPRLEGKRAAIFVGGGFKAISLIRQFNELGMKTVVVGTQTGKKDEYEIIAELVDGDAVILDDANPAELERFMLEKHADILVGGVKERPLAYKLGMAFCDHNHERKHPLAGFEGIENFVKEIHTSINSPVWKLVKGDAAA

SEQ ID NO: 18331 - DNA, 450 bp, Unknown
  Obtained from environmental sample
  misc_feature (1)..(450): n is a, c, g, or t
ttgggcgacgtcgtctgcggcgggttcgcgatgccgatccgcgagggcaaggccaaggaaatctacatcgtctgctccggcgagatgatggcgctctacgccgccaacaacatttccaagggtatctccaagtacgcgaacaccggcggcgtccgcctcggcgggcttatctgtaactcccgcaaggtagacggcgaggccgaactcgtctccgccgttgcgaaggagatcggtacgcagatgatccacttcgtcccccgcgacaacgccgttcaccgcgccgaaatcaacaagaagactgttatcgacttctcgccggaagaaccgcaggccgaagagtaccgtacgctcgcccggaagatagacgcgaatgacatgttcgtcatacccaagccgatgccgatagagaggctcgaggcgatcctgatggagcacgggatggtggcttga

SEQ ID NO: 18332 - protein, 149 aa, Unknown
  Obtained from environmental sample
  DOMAIN (1)...(149): 4Fe-4S iron sulfur cluster binding proteins, NifH/frxC family
  misc_feature (1)..(149): Xaa is any amino acid
MGDVVCGGFAMPIREGKAKEIYIVCSGEMMALYAANNISKGISKYANTGGVRLGGLICNSRKVDGEAELVSAVAKEIGTQMIHFVPRDNAVHRAEINKKTVIDFSPEEPQAEEYRTLARKIDANDMFVIPKPMPIERLEAILMEHGMVA

SEQ ID NO: 18333 - DNA, 801 bp, Unknown
  Obtained from environmental sample
  misc_feature (1)..(801): n is a, c, g, or t
ttgtttggcaccgatttggaggaatataaaaagcacatggtaggcagaaacttccgcatctttttaagccccgaatcgcccaacgtcgacaacaaggaattggctgagcaattcgtcaaaaggcttgaaaagatgaccggctaccgtttgtattggcagggagcctgccattacaacacggcgcacccccacgcccaccttctgataaacggcgtcgaccagcagggaagggaagtgaacatcccaagtgatatcgtgaaggtcttcatgcgcgaggcggccagggacatatgcacgtctcaagttgggccgcgcacccagagggaccttgaccgcgacaaggagcaggagctttccgcgcaccgcttcacaaggcttgacaattacatacaggagataggcggcgggccgggcggcctgcgcgtttccaccgaagagcctttcaaggacaaagagcgtgtccttgccaggcttgaaacattgcgcaagctaaatttatgtacctacgaaaacaacggctacactttgaaaaacaattggcaggaagacctgaaagccaattcaaggtacaacgttttcctaaaggcgcgggaggaattgcgttattccgatcagccagccatgaaaatatataccggggaacagggcattgttactgggaaagtgacaaaaatttaccgcaccgacggcgatgccagcgacaaccacgtcgtggtcctggaggctttggacggcaaggcatactttatacccctccttaaaggccggagctttacgacaaaggcagtaaaagccttttaa

SEQ ID NO: 18334 - protein, 266 aa, Unknown
  Obtained from environmental sample
  misc_feature (1)..(266): Xaa is any amino acid
MFGTDLEEYKKHMVGRNFRIFLSPESPNVDNKELAEQFVKRLEKMTGYRLYWQGACHYNTAHPHAHLLINGVDQQGREVNIPSDIVKVFMREAARDICTSQVGPRTQRDLDRDKEQELSAHRFTRLDNYIQEIGGGPGGLRVSTEEPFKDKERVLARLETLRKLNLCTYENNGYTLKNNWQEDLKANSRYNVFLKAREELRYSDQPAMKIYTGEQGIVTGKVTKIYRTDGDASDNHVVVLEALDGKAYFIPLLKGRSFTTKAVKAF

SEQ ID NO: 18335 - DNA, 702 bp, Unknown
  Obtained from environmental sample
  misc_feature (1)..(702): n is a, c, g, or t
atgattactttaacttgcgaagactgcatggatttgatgaccagatacccggacaaacactttgacctggctatagtggatcccccttacggcattgacgaagattggaaaaaaaggtggcattttaaagggaaaccttttcctaatacgacttataagaataacaatattcctacaaaagaatacttcaatgaattattccgcgtatcaaatgaacaaattatttttggctataattactttgtagagtttcttggaccgaccaactatttaataatctgggataagcttattagcaacaatcgttcttttctttattccaaagctgaaatagcgtatacgtctattcatatccctgtatctatatttcatgtcccctgggacggattctgcatgggcaaagagaccggggaacgcaagatacacccgcaccagaagcctgtagagctttatgtaaaaattttattaaagtacgcggcgccgtcatggtctatccttgatacccacatgggttcaggctcttcggtaattgcctgcaataagcttgggcttgacgtaaccgcctgcgaaatcgatccgtattactttaaggcagccaaaaaacgcatcgaagaggaaacccatcagcaagagctttttctgagcgaactgcgctccttccaggaaaactttttatttgaagaacttaaagaagcgcaatga

SEQ ID NO: 18336 - protein, 233 aa, Unknown
  Obtained from environmental sample
  DOMAIN (21)...(201): DNA methylase
  misc_feature (1)..(233): Xaa is any amino acid
MITLTCEDCMDLMTRYPDKHFDLAIVDPPYGIDEDWKKRWHFKGKPFPNTTYKNNNIPTKEYFNELFRVSNEQIIFGYNYFVEFLGPTNYLIIWDKLISNNRSFLYSKAEIAYTSIHIPVSIFHVPWDGFCMGKETGERKIHPHQKPVELYVKILLKYAAPSWSILDTHMGSGSSVIACNKLGLDVTACEIDPYYFKAAKKRIEEETHQQELFLSELRSFQENFLFEELKEAQ

SEQ ID NO: 18337 - DNA, 420 bp, Unknown
  Obtained from environmental sample
  misc_feature (1)..(420): n is a, c, g, or t
atggacagatattatattagcgatacagtcggctttattcgcaaattgccgcaccacttggtggagacattcaaaagcacccttggagttgccgccaacgcagactgcattcttgaggttatagattctgccgccgctgattacaaagagcatattgaagtcagtaaaaaaattctagacgagttggttgatccatctattccacgtttttgcgtgttcaataaaaccgatgccgcccccgatgaacgcagagaagaaatactcgcaaattatcccgatgccattttaataagtgcgttggaaaataccggaatggaaatgctaaaaaaacgccttatgaaagaacttgctaaatggacttttctccgcacacaaaaaattgccgaggaacaaattgcggcaatagagtggcttgtctga

SEQ ID NO: 18338 - protein, 139 aa, Unknown
  Obtained from environmental sample
  misc_feature (1)..(139): Xaa is any amino acid
MDRYYISDTVGFIRKLPHHLVETFKSTLGVAANADCILEVIDSAAADYKEHIEVSKKILDELVDPSIPRFCVFNKTDAAPDERREEILANYPDAILISALENTGMEMLKKRLMKELAKWTFLRTQKIAEEQIAAIEWLV

SEQ ID NO: 18339 - DNA, 828 bp, Unknown
  Obtained from environmental sample
  misc_feature (1)..(828): n is a, c, g, or t
gtgccctttaaagaagcccttgttcgctcgctcaatgttcntgcggttaaaattttatcggattacggggttgaggattttcatttttggctgaaaaacgcaggacttaacggcttatcccgcctatcggagagctatgggctttctctgattttgggtggtggggaaacatctttgcaggaactcgttccgctttattcaatgcttatgaacgaaggcaaaagaacggagttgaaatggctggaagatagcactgccgaaaaaaacgagcagttattgcagagcatcaccgcttatcacatcaaggaaattttgacatcggttaagagaccagattttgagcagtatcatttgcaattcaacaaccacattcccgttgcgtggaaaacaggcaccagctatggttcaagagatgcttgggcaataggggtaaatgagcaatggactataggcgtttgggtggggaattttgcaggcggttcggtggcgaatttgagcggcagtgctacggcggctccgttgttgttttctctgttcaacaatttaagcgataataaaaaaaggatgtggagcgaatttccacgagatgcagattttgaagaaattgaaatttgcactcttagcggctacaaagcaaaagatttttgccctcataaaaaaaatatactgctccctataaatagaatgcaaagcagaacctgccaatttcacaaagggataataatttcaaagagcacaggttttgaagtttgcagtttatgctggaacgcagaagatactttgcacatagttgaagaacactactcaccctctgtagaaacgaactag

SEQ ID NO: 18340 - protein, 275 aa, Unknown
  Obtained from environmental sample
  misc_feature (1)..(275): Xaa is any amino acid
MPFKEALVRSLNVXAVKILSDYGVEDFHFWLKNAGLNGLSRLSESYGLSLILGGGETSLQELVPLYSMLMNEGKRTELKWLEDSTAEKNEQLLQSITAYHIKEILTSVKRPDFEQYHLQFNNHIPVAWKTGTSYGSRDAWAIGVNEQWTIGVWVGNFAGGSVANLSGSATAAPLLFSLFNNLSDNKKRMWSEFPRDADFEEIEICTLSGYKAKDFCPHKKNILLPINRMQSRTCQFHKGIIISKSTGFEVCSLCWNAEDTLHIVEEHYSPSVETN

SEQ ID NO: 18341 - DNA, 507 bp, Unknown
  Obtained from environmental sample
  misc_feature (1)..(507): n is a, c, g, or t
gtgcaggaactaacagagaaaagagtactggaaataatggcaagctacgggaacgatccccagcagctcattgcaatacttctggacattcaggcagcttcaaacagaaattttgtagaacagcgatgggcggaacttgcctcgtcggttttaaatacccccctttcaaaaatttatgacgtgctgactttttacgccatgttcagcacaaaggagcgcggcgaatttgtaattgagatatgcaaaagcacgccctgccattttacaaacgcggaagaagtgaagcgctggtttgaagaagccgccggaattaatattggtgaaaccacaaaagatggcaggctttcacttttccgtaccagctgcatcggcgcttgcgacatagggccggcggtgaaaattggcgagcatgtgttcggaaacctgacggaggaaaaggtcaggatactggtaaattgctgcaaggaaagaagatcgaaggaactggaatcgttatgcaaaaactag

SEQ ID NO: 18342 - protein, 168 aa, Unknown
  Obtained from environmental sample
  DOMAIN (3)...(155): Respiratory-chain NADH dehydrogenase 24 Kd subunit
  misc_feature (1)..(168): Xaa is any amino acid
MQELTEKRVLEIMASYGNDPQQLIAILLDIQAASNRNFVEQRWAELASSVLNTPLSKIYDVLTFYAMFSTKERGEFVIEICKSTPCHFTNAEEVKRWFEEAAGINIGETTKDGRLSLFRTSCIGACDIGPAVKIGEHVFGNLTEEKVRILVNCCKERRSKELESLCKN

SEQ ID NO: 18343 - DNA, 813 bp, Unknown
  Obtained from environmental sample
  misc_feature (1)..(813): n is a, c, g, or t
atgaatatagtcacaaataactcccgtatttttggcatccgtaaaacgatcatagctctgatactctcaagccatccccatagcgattgccttgcctgcatacgcaacacaaaatgcgaactgcaatcccttgcgggaatttacagcacaagcgaatctcacttcccaaagaattcattaaaccggaattcacaaagcttaaaagaaatttcctgcaacgccctggtcagggacatgaataagtgcgtcaagtgcgggcgctgcgttgaagcttgccaggatatccagacagttagagctatcaacacatccggccgcagcgccgattacgcgatttgtacgccttacgcccaggccctttccgacagctcctgcgtcttttgcggccattgcgcagaagtgtgccctgtgggcgcgatttacgagtacgaccaaagcgccgaagtgtgggctttgcttaacgaaaaaaaacatgacatggtaataaaaatcgcgccccaggaagccaaggcagtatgcgcagaattgggacacacagtgggggcaatttcaataggcaaaattattaccggcttaaaacgaataggtttttccggcgcatatgatgcctcgtcgtttgaagtaatgagcgcaaatgaagaagccgctgaacttagagaacggatagaaagttccagccttctccccatgatctcaggctgctcagacagctgtataaagtttgtcaaagaattttttcctgacttgtcgaatcatctgtcaaaaataaaaagtccggaacaaaattcagaaattaatcctcggccgatctga

SEQ ID NO: 18344 - protein, 270 aa, Unknown
  Obtained from environmental sample
  DOMAIN (75)...(102): 4Fe-4S binding domain
  misc_feature (1)..(270): Xaa is any amino acid
MNIVTNNSRIFGIRKTIIALILSSHPHSDCLACIRNTKCELQSLAGIYSTSESHFPKNSLNRNSQSLKEISCNALVRDMNKCVKCGRCVEACQDIQTVRAINTSGRSADYAICTPYAQALSDSSCVFCGHCAEVCPVGAIYEYDQSAEVWALLNEKKHDMVIKIAPQEAKAVCAELGHTVGAISIGKIITGLKRIGFSGAYDASSFEVMSANEEAAELRERIESSSLLPMISGCSDSCIKFVKEFFPDLSNHLSKIKSPEQNSEINPRPI

SEQ ID NO: 18345 - DNA, 813 bp, Unknown
  Obtained from environmental sample
  misc_feature (1)..(813): n is a, c, g, or t
gtgtatcgctatctcgccgggcttgttataatcggcggtatcaagaggatcgctcaagttaccgagaaactggttccgtttatggcagttttctatatcattggcgctctgataattattttctccaacattacaaaaattccaggcgtatttggcatgattttctccggcgcgtttgatacaaaggcgcttgaagggggccttatgggctacattatcatgaaggccatgcgcttcggtatcgccaggggtgttttctccaatgaagccgggatgggttcagcgcctatcgcgcacgccgcttcaaatgaaaaagaccctgtaaagcaggggctttggggcatattcgaggtctttgttgacaccattattatttgcagtcttaccgggcttgtgatccttgcttccggcataagcaattttgaagcaggcataggcgccaaagattttgtcggtgggctatattcaggctatgaccttacattagcggcgttctccgcgcattttggccaggcaggcggcatatttgtaacgctcggcatccttctatttgccctttccaccatactgggttggtcatattacggcgaacagagtatccggtatttctcaaaaaacagcagtattattgacggctataaagttgtatttattgtattcaccattattggggctatgggaggactggcacttatctgggatattgccgataccctgaacgggcttatggccatcccgaaccttatcgccgtactccttctatgcaaagtggtcttagacctgacgaaagaatacgtcgcanagagcaaataa

SEQ ID NO: 18346 - protein, 270 aa, Unknown
  Obtained from environmental sample
  DOMAIN (1)...(270): Sodium:alanine symporter family
  misc_feature (1)..(270): Xaa is any amino acid
MYRYLAGLVIIGGIKRIAQVTEKLVPFMAVFYIIGALIIIFSNITKIPGVFGMIFSGAFDTKALEGGLMGYIIMKAMRFGIARGVFSNEAGMGSAPIAHAASNEKDPVKQGLWGIFEVFVDTIIICSLTGLVILASGISNFEAGIGAKDFVGGLYSGYDLTLAAFSAHFGQAGGIFVTLGILLFALSTILGWSYYGEQSIRYFSKNSSIIDGYKVVFIVFTIIGAMGGLALIWDIADTLNGLMAIPNLIAVLLLCKVVLDLTKEYVAXSK

SEQ ID NO: 18347 - DNA, 369 bp, Unknown
  Obtained from environmental sample
  misc_feature (1)..(369): n is a, c, g, or t
atgaaaagtgacatagccgaatccgatattgccgcgcttgagcagagacaggtaataatatctttaacatcattcccggcggcgataacttttgccgcagatgcgatacaatctattcttaacggttccgtgaaaccgaacaaagtcgttttatatctcacgctttcacaatttcccgatgctaaaattccaccggaaattactaaattgactgaagtgaatccattatttgaggtcagggactataaatacgacattaggtcttaccgcaagctcattccggcgttaaaagactttccaaatgacataatagtaacggttgacgatgacgtttttacagcaaaaatatgctgcctcggccgattctga

SEQ ID NO: 18348 - protein, 122 aa, Unknown
  Obtained from environmental sample
  misc_feature (1)..(122): Xaa is any amino acid
MKSDIAESDIAALEQRQVIISLTSFPAAITFAADAIQSILNGSVKPNKVVLYLTLSQFPDAKIPPEITKLTEVNPLFEVRDYKYDIRSYRKLIPALKDFPNDIIVTVDDDVFTAKICCLGRF

SEQ ID NO: 18349 - DNA, 468 bp, Unknown
  Obtained from environmental sample
  misc_feature (1)..(468): n is a, c, g, or t
atgctgcgcgatttgttgcgtttacatacgcggtacccaaacgcaataatcgcccaccgtgtaaagcgcttgaggttgggcgtttcataccgtaaatggagaaagtataggtggtacgctttttttataagggacttgcggccaaaattcggaaatatacataccggggtgggcggcgttttgtatccgcccggttctttgatgccggaaatgcttgatcctaacatctttacaaagatggccccaaccacagacgacatttggttttgggccgcggctacggcgaatggaactaaaaccgcgccggttccgttcggccattgcaaaccgcgcggacttggaaaaccgaaggaactgtcgctaaaaagaatcaacgtaaaatccggcacggatgtgaaccgcgccgttcttgagagcattatcgaaaaatatccgataattaaagagaggatagataatgaaaagtga

SEQ ID NO: 18350 - protein, 155 aa, Unknown
  Obtained from environmental sample
  misc_feature (1)..(155): Xaa is any amino acid
MLRDLLRLHTRYPNAIIAHRVKRLRLGVSYRKWRKYRWYAFFIRDLRPKFGNIHTGVGGVLYPPGSLMPEMLDPNIFTKMAPTTDDIWFWAAATANGTKTAPVPFGHCKPRGLGKPKELSLKRINVKSGTDVNRAVLESIIEKYPIIKERIDNEK

SEQ ID NO: 18351 - DNA, 324 bp, Unknown
  Obtained from environmental sample
  misc_feature (1)..(324): n is a, c, g, or t
gtgtaccgcgtcaaagatggcaatagcgccgtccagcgcccgcagggatcgctctacttccgcggtaaaatccacatggcccggagtgtcaataatattaatctggtgttttttccaataggtggtagtcgccgcgctctggatcgtgattccccgctgctgctcctgctccatccagtccatgatcgcctcgccgttgtccacctcgccaatcctgtggcttttgcctgtataaaagagaatacgttctgttgtggtggttttaccggcgtcaatgtgagccattatgccgatgttacgcatttcacgaagcatgattattga

SEQ ID NO: 18352 - protein, 107 aa, Unknown
  Obtained from environmental sample
  misc_feature (1)..(107): Xaa is any amino acid
MYRVKDGNSAVQRPQGSLYFRGKIHMARSVNNINLVFFPIGGSRRALDRDSPLLLLLHPVHDRLAVVHLANPVAFACIKENTFCCGGFTGVNVSHYADVTHFTKHDY

SEQ ID NO: 18353 - DNA, 726 bp, Unknown
  Obtained from environmental sample
  misc_feature (1)..(726): n is a, c, g, or t
atgagcgatttatggaaagacatcggtcagccggtgataggcgcgccgccggggtacgtgggatatgaagagggcggcgatctgaccgagcgcgtccgccgccgtccntatagtgtgctcttgcttgacgagatcgagaaggcgcatcccgatgtcttcaatattttgcttcaggtcatggaggacgggcagcttacggataatctcggacataccgtcgatttccgcaatctcgttatcatactcacctcaaatgtgggcgcccgcgagatcaccaaggaggccggtctgggctttgccgcctttaccgacgatgagggtgagttttccgatatgaaggaaaaggcgctgtcggaactgcgccgcgcgtttaatccggaatttctgaatcgtgttgacgaagtggttgtttttcacgcgctcagctatccgcagataagcgaaatactcggcgttatgctgcaggagttaagcgagaggctgaaggaaaagggcatgaccattgaggtgcgcccaaaggcaaaggatgagctcatcaagcgaggctacagccggaaatacggcgcccgcccattgcgccgcacgatccagaaggaaatcgaggatccgctcgcgcagacttttcttgccaggggagcgatccataatgggcgtgtgcttgtggattataatgatgaaagcggtttcgcgattgtgattgaggcggcttctgagacaggtgaatga

SEQ ID NO: 18354 - protein, 241 aa, Unknown
  Obtained from environmental sample
  DOMAIN (6)...(135): ATPase family associated with various cellular activities (AAA)
  misc_feature (1)..(241): Xaa is any amino acid
MSDLWKDIGQPVIGAPPGYVGYEEGGDLTERVRRRPYSVLLLDEIEKAHPDVFNILLQVMEDGQLTDNLGHTVDFRNLVIILTSNVGAREITKEAGLGFAAFTDDEGEFSDMKEKALSELRRAFNPEFLNRVDEVVVFHALSYPQISEILGVMLQELSERLKEKGMTIEVRPKAKDELIKRGYSRKYGARPLRRTIQKEIEDPLAQTFLARGAIHNGRVLVDYNDESGFAIVIEAASETGE

SEQ ID NO: 18355 - DNA, 711 bp, Unknown
  Obtained from environmental sample
  misc_feature (1)..(711): n is a, c, g, or t
gtgctagagggggcaaggcaggctctggcaaatggctcgactaggtattgcatgggagcctcttggaaggaagttagagacggcgaagcatttgagcaagtactacatatcgtcaaggacgtagccgcgctcggactagaagtgtgcgtgacgctaggcatgttgaacgaagaccaagccaagcgcctcaaagccgcaggatgcactgtctataaccacaacattgactccagcagggcattttaccagaccatcatttcaactcacactttcgatgaaagattgcagaccatccgcgccgtgcgcgctgcgggcctagaggtttgctgcggcggaatcgtgggtatgggcgaaaaaatcgaagacaggatgcactttcttcacgagctcacaatgatggagccgccgccggaaagcatacctatcaaccaattggtccccgtttcaggcacccccctagaaggcatcgaaccgccgccgccgctggagttcatccgcatgattgcgactgcgcgtattcttttccccaagagccgcatccgcctgagcgcanggcgagccagcatgngcgttgagatgcangcgctggcttttttggccggggccaacagcatctttacgggcgaaaaactgctggtgacgccgaaacgcgaagagtcacagaccacaaatgctggaggccctttggatgaagcccaaagcaacggttga

SEQ ID NO: 18356 - protein, 236 aa, Unknown
  Obtained from environmental sample
  DOMAIN (141)...(236): Biotin and Thiamin Synthesis associated domain
  misc_feature (1)..(236): Xaa is any amino acid
MLEGARQALANGSTRYCMGASWKEVRDGEAFEQVLHIVKDVAALGLEVCVTLGMLNEDQAKRLKAAGCTVYNHNIDSSRAFYQTIISTHTFDERLQTIRAVRAAGLEVCCGGIVGMGEKIEDRMHFLHELTMMEPPPESIPINQLVPVSGTPLEGIEPPPPLEFIRMIATARILFPKSRIRLSAXRASMXVEMXALAFLAGANSIFTGEKLLVTPKREESQTTNAGGPLDEAQSNG

SEQ ID NO: 18357 - DNA, 750 bp, Unknown
  Obtained from environmental sample
  misc_feature (1)..(750): n is a, c, g, or t
atgatgggcgagaaagggtacacgctttatcttgacggcaaagaatattcgcccgaggagttgtcggggttttaccttcgcgaattaatacgcgacgtatcagaacataacaatgttaaagtagacgccgcagtaataacttgtcccgcctattttaacgaatcacagcgccttgcaacgttaaacgccggtaaagcggcgggatttaaagtgcttaaagtaataaacgagccgacagcggctattatcgcttacggtttaactgatgccggaaaaaagaatgttatggtttacgacttaggcggcggcacattcgacgttacaatcgccgaggtagacggtaccagagtgaaagttttaactactaacggtaaccatcaattaggcggaaaaaactgggacgcggtaataaccgatgaactgaaacaacgtttctttgacgagtttaatgtaaatattgaggataatcccgaagatttttatcaacttaaagtacaatgtgaagatattaaaaaaaggcttactaatatcagctctaccacggcggtcgttcaaagccagggttatacgggtaaatacgaaataacccgcgaatttttcgattccgccacatacagccttttaaatgagacgagtcttttaattaacagatgtttttcggaacttggcgggggattttcctggaaaagtcttgatgaagttgttctggtcggcggctcgacaagaatgccgcaggtcaaagaattgtaa

SEQ ID NO: 18358 - protein, 249 aa, Unknown
  Obtained from environmental sample
  DOMAIN (1)...(249): Hsp70 protein
  misc_feature (1)..(249): Xaa is any amino acid
MMGEKGYTLYLDGKEYSPEELSGFYLRELIRDVSEHNNVKVDAAVITCPAYFNESQRLATLNAGKAAGFKVLKVINEPTAAIIAYGLTDAGKKNVMVYDLGGGTFDVTIAEVDGTRVKVLTTNGNHQLGGKNWDAVITDELKQRFFDEFNVNIEDNPEDFYQLKVQCEDIKKRLTNISSTTAVVQSQGYTGKYEITREFFDSATYSLLNETSLLINRCFSELGGGFSWKSLDEVVLVGGSTRMPQVKEL

SEQ ID NO: 18359 - DNA, 735 bp, Unknown
  Obtained from environmental sample
  misc_feature (1)..(735): n is a, c, g, or t
atgattgccgcagcttgcaaagcggtagaggcccaggtatggaaagatgttgacggcatattaaccgccgatccccgtattgttaaagaggcgaagccggtggaagccgttacctacgaggaggcctcagagcttgcttattttggcgcgcaggttctgcacccccgcgccatgcagccctgcatagttacaggaacgccggtaagggttaaaaactcgtataacatcaccgctgtcggcacgcggatagtgcccgcgttagacaagaaaagcgtccctgtacgggccattacctcccgccatgcagttaccttagttgacattgtatccacccgcatgcttgggcagtacggttttcttgccgaggttttttcaactttcgctaggcatcgcgtttccgtagacatggtggcaacaagcgaggtttcggtatcgctcacgcttgacgcggcgcatgatctaaccgcgatcaaaaaagagctttcgcgtatcgcaagcgtcgaaattaaaaccgggaaagccatagtaaccattgtcggcaatgttaagcggtcttcggagatactcgcaaaggctttcaaaacttgccagcttctcggcgtaacggttcagatggtttcccagggtgcgagcaaggtgaatatcagctttattgtaaacgataccgaagccgtggaagtggtcaaggctttgcatctggatttttttcccgccccgcgncatgaagatgaatag

SEQ ID NO: 18360 - protein, 244 aa, Unknown
  Obtained from environmental sample
  DOMAIN (109)...(172): ACT domain
  misc_feature (1)..(244): Xaa is any amino acid
MIAAACKAVEAQVWKDVDGILTADPRIVKEAKPVEAVTYEEASELAYFGAQVLHPRAMQPCIVTGTPVRVKNSYNITAVGTRIVPALDKKSVPVRAITSRHAVTLVDIVSTRMLGQYGFLAEVFSTFARHRVSVDMVATSEVSVSLTLDAAHDLTAIKKELSRIASVEIKTGKAIVTIVGNVKRSSEILAKAFKTCQLLGVTVQMVSQGASKVNISFIVNDTEAVEVVKALHLDFFPAPRHEDE

SEQ ID NO: 18361 - DNA, 720 bp, Unknown
  Obtained from environmental sample
  misc_feature (1)..(720): n is a, c, g, or t
atgatcgccggtgcggtgtttttttactgctttttcgcgaaggcgggaagggaaaaagttcagattgaaaaggagaaaattctctccatcgttcctactgttttgttggtactcatgatcgtggggcttgcggcgttctcttttctatttaacgggcttaccctggcttcgggtattctggttatggtgctgggcctattgggttttctttggtacgccctggtgcgcaaggagggaattcccaaatcaatgaagatgataaaggaactggattgggacactgtcttgttccttgtcgggatttttgtggttataggcgcggtcagccagacaggcctcctggaagagttcgccgtctttttgtcgcatatagtcggtaacaacgtgctcctgggctttttgttgatcatcgcggtttcggtgtttatttcaggctttgttgacaatgtgccgtacatcatcgccatgctgcccgttgcggcaactttagccagggagctttcccttaagccggaactcttcatgtttgccttgctgattggttcctgcctgggtggaaaccttacccccttcggcgcttcggcaaacgtggtcgctgtgggcatactccgcaagcaggatgtccagatgaacttcggtcaatggctgaaaatcggcatccccttcaccttaatcaccactgcggcttccgccctcttcgtctggctggtgtggcgttag

SEQ ID NO: 18362 - protein, 239 aa, Unknown
  Obtained from environmental sample
  misc_feature (1)..(239): Xaa is any amino acid
MIAGAVFFYCFFAKAGREKVQIEKEKILSIVPTVLLVLMIVGLAAFSFLFNGLTLASGILVMVLGLLGFLWYALVRKEGIPKSMKMIKELDWDTVLFLVGIFVVIGAVSQTGLLEEFAVFLSHIVGNNVLLGFLLIIAVSVFISGFVDNVPYIIAMLPVAATLARELSLKPELFMFALLIGSCLGGNLTPFGASANVVAVGILRKQDVQMNFGQWLKIGIPFTLITTAASALFVWLVWR

SEQ ID NO: 18363 - DNA, 576 bp, Unknown
  Obtained from environmental sample
  misc_feature (1)..(576): n is a, c, g, or t
atggcggacgcgttagagaaatatcctgagcgcaaatggacttatgccgattacaaggcatgggaattaaagccgggcgaacggtacgaaatgatctatggcgaggcttatgctatgtccgcgccaaatacagctcatcagacaatgttaatggaattgagcagacagtttgcaaacttccttgttggcaagccgtgcaaggtgtttcccgcggcctatgacgtgcggcttttctatgaagaagatgaaagcgacgatacggttgtccagccggacataaccgttatctgcgacgcgaaaaaaatcgggaaggaaggctgccggggcgcgcccgatctagttgtggaaatcctctccccttcaaataccgccattgaaatgcagcggaaattcaacctgtaccacaccgcgggcgtgcgcgaatattgggtgctggacagcgaagataaaacccttacggtctatctttttgacagtgaaaaggtaattagccgcacatacggcgaaaaagacgcagcgcctgtcagcgtgctcaacggactttcaatagagcttggctccgtttttactcaatga

SEQ ID NO: 18364 - protein, 191 aa, Unknown
  Obtained from environmental sample
  DOMAIN (46)...(156): Protein of unknown function (DUF820)
  misc_feature (1)..(191): Xaa is any amino acid
MADALEKYPERKWTYADYKAWELKPGERYEMIYGEAYAMSAPNTAHQTMLMELSRQFANFLVGKPCKVFPAAYDVRLFYEEDESDDTVVQPDITVICDAKKIGKEGCRGAPDLVVEILSPSNTAIEMQRKFNLYHTAGVREYWVLDSEDKTLTVYLFDSEKVISRTYGEKDAAPVSVLNGLSIELGSVFTQ

SEQ ID NO: 18365 - DNA, 789 bp, Unknown
  Obtained from environmental sample
  misc_feature (1)..(789): n is a, c, g, or t
atgcaggctcaggaagctaatgccgcctttatcaagaaaaaaatgaacgcggcaatgcccggcaccgtgttttaccaggaatatatcgacgagatgataaaagaagattattccaaagacggccctgccatgcgtgaagcggttcttaaagcgctgatggtcacggaagaaaaaccaaaggccgccaagcccaagatagattacaaggctatggtactgagcgggattatcgccatcggaaacgccgcaacagtgatgaacgaaataatccaaaaaattgatgaaaacgaagaagtgctggcggaccagaaaaaagggttttgggaaaaactacggcagttaattcggtctatgatgcatgcggaaccggaagaagttttttacgatctgatgtttgtcgatcaatcaacaggggtacagaaaaaagaaaccaccaatctgcaccagttcaggggagacctggaaagaaaaacaaggatccttgccggtatgaacgcgaacggtgcggttatggcaaaacttaaaaacatgaacgaggagcagtgtaccgcctatcttgaacggacaatccgtgatgtgcagaattaccatcgcatcctggccgcgcttgatgattatttcaaatcaaacataccccagagtgaacgctcgcggataaagggaataaaacccgaattggcatccgtcaagaactgtattgtcagggcaaaccaactgagggctgaatataccgccngcaaagaagaagaggaacagatgaaacgtctgggtattaatcccagcgcatga

SEQ ID NO: 18366 - protein, 262 aa, Unknown
  Obtained from environmental sample
  misc_feature (1)..(262): Xaa is any amino acid
MQAQEANAAFIKKKMNAAMPGTVFYQEYIDEMIKEDYSKDGPAMREAVLKALMVTEEKPKAAKPKIDYKAMVLSGIIAIGNAATVMNEIIQKIDENEEVLADQKKGFWEKLRQLIRSMMHAEPEEVFYDLMFVDQSTGVQKKETTNLHQFRGDLERKTRILAGMNANGAVMAKLKNMNEEQCTAYLERTIRDVQNYHRILAALDDYFKSNIPQSERSRIKGIKPELASVKNCIVRANQLRAEYTAXKEEEEQMKRLGINPSA

SEQ ID NO: 18367 - DNA, 486 bp, Unknown
  Obtained from environmental sample
  misc_feature (1)..(486): n is a, c, g, or t
atgggaaggcttttacagttcaataaaacaaaacagttcaatatgtaccaggaagccgttatggttccgatgggagattgggcgaaaacccggcttaaaaatctgagtgagacggataaagtcagagacaattcaaaagtcggaagcggttttgggaaaaatatatcaaattggctgacacgcgatatggcttatcctacaaatgtactccatttatccactgaatgcagtaataaaagccatagcgccgcttttcccatagaattaccgagttggtttattaaactttttaccaaagaatttgataccgtattggatccgtttatggggtcagggacgacgttattcgcagctgaaaaattaaaaagaaattctatcggcattgatatttcagatgaatattgtcaaatggttaaagaggagataaaagaaaaagaattgtacctgtttgaaaaggaagaaaattatgcctttgctgataaatga

SEQ ID NO: 18368 - protein, 161 aa, Unknown
  Obtained from environmental sample
  DOMAIN (5)...(140): DNA methylase
  misc_feature (1)..(161): Xaa is any amino acid
MGRLLQFNKTKQFNMYQEAVMVPMGDWAKTRLKNLSETDKVRDNSKVGSGFGKNISNWLTRDMAYPTNVLHLSTECSNKSHSAAFPIELPSWFIKLFTKEFDTVLDPFMGSGTTLFAAEKLKRNSIGIDISDEYCQMVKEEIKEKELYLFEKEENYAFADK

SEQ ID NO: 18369 - DNA, 336 bp, Unknown
  Obtained from environmental sample
  misc_feature (1)..(336): n is a, c, g, or t
ttgagcgcctttgaaaagccccctgttttggtaacgggagggaccgacaaggagctggacttcacgccgctggttctggcggcgggaaaagccaaagccatcatcctccttgccgggaccggaagtgaaaaaataaaaacccttctggattccggcggcgtaaagtacattggccccttcgattcccttgatgcggcaataagcgcagccgcggaggcggcatcgcccggcgatgccgtggtactatcgcccggctgcgcgagcttcgggatgttcctaaacgaatttgaccgcggcaggaaatggaaagagggagtaaaaagattattcacttag

SEQ ID NO: 18370 - protein, 111 aa, Unknown
  Obtained from environmental sample
  misc_feature (1)..(111): Xaa is any amino acid
MSAFEKPPVLVTGGTDKELDFTPLVLAAGKAKAIILLAGTGSEKIKTLLDSGGVKYIGPFDSLDAAISAAAEAASPGDAVVLSPGCASFGMFLNEFDRGRKWKEGVKRLFT

SEQ ID NO: 18371 - DNA, 477 bp, Unknown
  Obtained from environmental sample
  misc_feature (1)..(477): n is a, c, g, or t
atggacattgagttactgcgcgagcgctccgggatcattaggcaggtacgttccttttttgacagccgggattaccttgaaacggacacccctttgctttcgcccgacttgattcccgaatcatgccttgaagttttccagaccaccctcctttctccaaagggaagccttatgccttacaagccctgctggctcataccctcgcctgagatctggatgaagcgtctaatcgctcagcatcgggtaaacctttaccagatatgtaagtgctttagaaacggagaatcttccggccgctggcatagtcccgagttcacgatgctggagtattacaccatgcgggcggactacatggactcgctgaaactaaccgaagagcttttcaccttcctccttaacgctttacaaaaagacgaaaaatggcgcaccgagctttcacctcccttcattagaattacaatggaaagaagcccttag

SEQ ID NO: 18372 - protein, 158 aa, Unknown
  Obtained from environmental sample
  DOMAIN (1)...(157): tRNA synthetases class II (D, K and N)
  misc_feature (1)..(158): Xaa is any amino acid
MDIELLRERSGIIRQVRSFFDSRDYLETDTPLLSPDLIPESCLEVFQTTLLSPKGSLMPYKPCWLIPSPEIWMKRLIAQHRVNLYQICKCFRNGESSGRWHSPEFTMLEYYTMRADYMDSLKLTEELFTFLLNALQKDEKWRTELSPPFIRITMERSP

SEQ ID NO: 18373 - DNA, 528 bp, Unknown
  Obtained from environmental sample
  misc_feature (1)..(528): n is a, c, g, or t
atggttaaaaaaattatatgtgaaaacagcaatatcggcgaaggcgatttgaaagaaagcgattttaacggatcatcactaataagcagattcacaggaaaagggcaaatgatatttgctgacaattctttttatcaaggcgatattgtcaacggaaaccagcacggcaaaggaaaaatgatttacggaaacggatcaatctatgaaggagattgggacaatgggaaagagacaggcaaaggaaaaaaagtattaagagacggatcaatccacgaagggaattttattgacggcttattaaacggcaaaggaaaaaagatcaacaaagacggatcaatctatgaaggcgattggaaaaatgactcgttaaacggaaaaggaaaagcggtttatgcggacggagaaatctacgaaggcgattttgttaatggcggttgggaaggaataggaaaaaacacagaagctgacggcttagtaattgaaggacgctggaaaaacggcaaatataaaggcaaagaagattgttga

SEQ ID NO: 18374 - protein, 175 aa, Unknown
  Obtained from environmental sample
  DOMAIN (68)...(90): MORN repeat
  misc_feature (1)..(175): Xaa is any amino acid
MVKKIICENSNIGEGDLKESDFNGSSLISRFTGKGQMIFADNSFYQGDIVNGNQHGKGKMIYGNGSIYEGDWDNGKETGKGKKVLRDGSIHEGNFIDGLLNGKGKKINKDGSIYEGDWKNDSLNGKGKAVYADGEIYEGDFVNGGWEGIGKNTEADGLVIEGRWKNGKYKGKEDC

SEQ ID NO: 18375 - DNA, 699 bp, Unknown
  Obtained from environmental sample
  misc_feature (1)..(699): n is a, c, g, or t
ttgtgttacaggcgaaaagcncgttctaaacagggttccgctgaatcccgaaggcttaggaaaagcgggagaatccccgcggtaatctacggaagggcgggcaagtccgtttccgtcgatttggatgctgtcgattttgtgaaaggtacaaaaggtatctctgaaagtacaattgtaaaattggaagtgggagacaaatcatacgacgcttttgtaaaggatacccagcgcaatatagtcgatgggaacattcttcatatcgacttttatgaagtggaaagcggagtcgccctgcgcgccaaagtttcccttgttttcaacgggaatcctatcggcgtccgcgaaggcggaatgttggaaactccgttgcatgaaattgaaattgaatgtcttccgaaggatcttcctgaaaggatcgagattgatatttcgggtcttaaagccaatcaatcaatgcatgtcagggatattccccttgcggaaggagttaaacttcatacgaacccggatcaggttttcgcgttggttaaattcgccaaggttgaagccgccgctccgaccgccgctgatgccgcagccgctgatgccgcagccgccactgccgccggagccgcgccagccgccggagccgccggggacaagaaagccgctcctgccgccggagacaagaaagctcctggcgccggggagaagaaataa

SEQ ID NO: 18376 - protein, 232 aa, Unknown
  Obtained from environmental sample
  DOMAIN (3)...(89): Ribosomal L25p family
  misc_feature (1)..(232): Xaa is any amino acid
MCYRRKARSKQGSAESRRLRKSGRIPAVIYGRAGKSVSVDLDAVDFVKGTKGISESTIVKLEVGDKSYDAFVKDTQRNIVDGNILHIDFYEVESGVALRAKVSLVFNGNPIGVREGGMLETPLHEIEIECLPKDLPERIEIDISGLKANQSMHVRDIPLAEGVKLHTNPDQVFALVKFAKVEAAAPTAADAAAADAAAATAAGAAPAAGAAGDKKAAPAAGDKKAPGAGEKK

SEQ ID NO: 18377 - DNA, 378 bp, Unknown
  Obtained from environmental sample
  misc_feature (1)..(378): n is a, c, g, or t
atgaaagtcgtcaatgaaacgcgaaaaatcatgcaccttccgaactccgtgccaatcagctgcacggccgtccgcgtgccggtgctggtcggacattcggaggccgtggatatcgaatttgaaaagcccatcgacgaaaataccgcgcgggaaatccttgcgaacgcgtacggcgtcaaggtcgtggacgacgtcgccaacttcgtttatcccgtgccgcttgacgccgccgggacagacccggtttatgtcgggcgcataaggaaaaacatcgcgttcgaaaatggaatcgccctttggtgcgtggcggataatcttcgaatcggcgcggcattgaacgccgttcgcatcgcggagagagtcattgaattttattga

SEQ ID NO: 18378 - protein, 125 aa, Unknown
  Obtained from environmental sample
  DOMAIN (2)...(108): Semialdehyde dehydrogenase, dimerisation domain
  misc_feature (1)..(125): Xaa is any amino acid
MKVVNETRKIMHLPNSVPISCTAVRVPVLVGHSEAVDIEFEKPIDENTAREILANAYGVKVVDDVANFVYPVPLDAAGTDPVYVGRIRKNIAFENGIALWCVADNLRIGAALNAVRIAERVIEFY

SEQ ID NO: 18379 - DNA, 396 bp, Unknown
  Obtained from environmental sample
  misc_feature (1)..(396): n is a, c, g, or t
gtggactttgtttatgcacacgattggatgcaggccgagtttaagcgccttggacaaaacgaacttggtttggggcagcggcctttcggcggaatcgacaagaagcacgacgccgtcgaccatagagagaatgcgctcgacctcgccgccaaagtcggcgtgcccgggcgtgtcgacgatattgattttataatcccgccacatgacggacgtcggcttggcggaaatcgtaatgccgcgctcgcgttccaagtcgccgctgtccatgacgcactcggcgaccttttcgttttcgcggaaggtcccggcctgtttcagcattgcgtcgaccaaggtcgtcttgccgtggtccacgtgcgcgataattgcgatatttcgtatcttcatgatttataa

SEQ ID NO: 18380 - protein, 131 aa, Unknown
  Obtained from environmental sample
  misc_feature (1)..(131): Xaa is any amino acid
MDFVYAHDWMQAEFKRLGQNELGLGQRPFGGIDKKHDAVDHRENALDLAAKVGVPGRVDDIDFIIPPHDGRRLGGNRNAALAFQVAAVHDALGDLFVFAEGPGLFQHCVDQGRLAVVHVRDNCDISYLHDL

SEQ ID NO: 18381 - DNA, 348 bp, Unknown
  Obtained from environmental sample
  misc_feature (1)..(348): n is a, c, g, or t
atgcttatcaggacaaatagtaaatttaaaccaattattgacgaatactctaaatctgatgaaacaaaaatatattattccatgtggaacggctatttggataaaagtaaaccagtatttaacccgcaattatctgcttttatcgaaccgtttaagtatgaatataaacatacaagcggacacgccgatgtaaaaacattgaatttgttatttgataccgttaaaccaaaatgcggtattatcccaattcacacagaaaatccggaaagattcaaagacctatttaccgggcataatattatcttgcttcaagatggtgaagacttatgggtaacacggcgcgactga

SEQ ID NO: 18382 - protein, 115 aa, Unknown
  Obtained from environmental sample
  misc_feature (1)..(115): Xaa is any amino acid
MLIRTNSKFKPIIDEYSKSDETKIYYSMWNGYLDKSKPVFNPQLSAFIEPFKYEYKHTSGHADVKTLNLLFDTVKPKCGIIPIHTENPERFKDLFTGHNIILLQDGEDLWVTRRD

SEQ ID NO: 18383 - DNA, 744 bp, Unknown
  Obtained from environmental sample
  misc_feature (1)..(744): n is a, c, g, or t
ttgaaccgcgagttgacagaagattttgacggggaagaagcagcccttgccgaagaagcgaaaaaataccaaaacgaaaggtacattgccgaacggaaaaaagatgaggcggcgaacaatctccgcgacatacgctcggagctggcggaccttgagcggggcatactccgctaccccgacgcgccgagggaactgcgggcagcgctggaaaaggcgggcattgaggctttctttctggcggaagccgcggagattaccgcgcctgagtgggttgacgctattgaaggctggctaaacacacggcgctttgccgttctggttgaccccgttcattttcaaaaagccattgaagtatacgaccgccttccccgttccgtagccggggcctttatccccaatatcgaaaagatgcgggatgccgtggcaagacagggttcacttgccgagatcgtcaaggccgaaggttatgcccgcatttatatcaactacacattgggaaaagtaatgcgctccgatctcgcaaatcttaaaacatacgattctgcggttactaaagaatgtatgacgtacacgaaccataccgcttcacggattagggaagatatttaccgccgtcattatctgggaagggccgcactggaggagcgcaaaaaattccttactgccgatgcggcgcgtgtcgaagcggaattcgtcagcgccgaaagggaggaacgggaagcgcggggccgcgaggattgctga

SEQ ID NO: 18384 - protein, 247 aa, Unknown
  Obtained from environmental sample
  misc_feature (1)..(247): Xaa is any amino acid
MNRELTEDFDGEEAALAEEAKKYQNERYIAERKKDEAANNLRDIRSELADLERGILRYPDAPRELRAALEKAGIEAFFLAEAAEITAPEWVDAIEGWLNTRRFAVLVDPVHFQKAIEVYDRLPRSVAGAFIPNIEKMRDAVARQGSLAEIVKAEGYARIYINYTLGKVMRSDLANLKTYDSAVTKECMTYTNHTASRIREDIYRRHYLGRAALEERKKFLTADAARVEAEFVSAEREEREARGREDC

SEQ ID NO: 18385 - DNA, 876 bp, Unknown
  Obtained from environmental sample
  misc_feature (1)..(876): n is a, c, g, or t
ttgtatatcggcgtacagaaaacattgaacgaatacgcgattaaaggcgaaatacggtttgaggatttcgttccccatgactggctaaacccgtcaattccacgcaacgtctggtattacgactgcgtcaactctcccaacgagtatacgctgaatatagacgttgacaaagtaacccatacgcgccttctctggatcaaccacaaggtcatgcgggacgggaatatattgggcgtattttgcaccggcctcccgtttgacaatgtgctttataccctgttcgcccggtatgacaccgagaatgtaaagggctatgttatcgacagggaaggtattgtccaaatggacagcaccctttccattatctccgaggaagaccatagaagcatccccgaagcggattccgatcccgcgcttgccgccgcaatcgagtcgcacttaaaaaatattaatggctacttcggatcggaggaggaactgcaggtcatcaagcttgcgaaagggccgtatcaatacgtatccatcaagccaatcaccggttcagactggtcaattgtcaccttcttcagcaacaagtcactgttcagcatatggcggcttcttcccctgctgatcttcatgctgtcggcgtttgtgctgtattcgctgttgggaaatttatttataagccgtattgtagcggcgccgttgaacagcctgacaagaagcatctcccaaaccggcggaggacatgacgacatattcggcaatgaccgcagcgatgaaatcggcgaactcgcgcggactatacatgacatgcgggtaaaaatccacgaggcggacgagcgcgtaaggctcatgctggacacgacgccccctttgctgcagcctttctga

SEQ ID NO: 18386 - protein, 291 aa, Unknown
  Obtained from environmental sample
  DOMAIN (204)...(272): HAMP domain
  misc_feature (1)..(291): Xaa is any amino acid
MYIGVQKTLNEYAIKGEIRFEDFVPHDWLNPSIPRNVWYYDCVNSPNEYTLNIDVDKVTHTRLLWINHKVMRDGNILGVFCTGLPFDNVLYTLFARYDTENVKGYVIDREGIVQMDSTLSIISEEDHRSIPEADSDPALAAAIESHLKNINGYFGSEEELQVIKLAKGPYQYVSIKPITGSDWSIVTFFSNKSLFSIWRLLPLLIFMLSAFVLYSLLGNLFISRIVAAPLNSLTRSISQTGGGHDDIFGNDRSDEIGELARTIHDMRVKIHEADERVRLMLDTTPPLLQPF

SEQ ID NO: 18387 - DNA, 435 bp, Unknown
  Obtained from environmental sample
  misc_feature (1)..(435): n is a, c, g, or t
ttggaacgatccggattaatccggatcccgatttttattatcgtcatcgcggcgtttaccacggttattgattatgtgcttaaggcgtggttccccgatctttccaaagcgatgggggtgttcatcccgcttatcgtggtcaactgcatcatcatgggcagggtagagggctttgcctccaaagcgccgcttcctgacgccattgccgattcctttggcatgggcctggggtatacctgggttctcctgggcatttcccttattcgcgagctgcttggttccggtactatcctgggcgctcaggtgctgcctgacagttatgtgccaattctcttttttattatgcctccggggggctttttggtgtttgccttgtttatcagccttaacctctttattaaatcaaagttaaagggcgaggggggcgtatcatga

SEQ ID NO: 18388 - protein, 144 aa, Unknown
  Obtained from environmental sample
  DOMAIN (1)...(128): Rnf-Nqr subunit, membrane protein
  misc_feature (1)..(144): Xaa is any amino acid
MERSGLIRIPIFIIVIAAFTTVIDYVLKAWFPDLSKAMGVFIPLIVVNCIIMGRVEGFASKAPLPDAIADSFGMGLGYTWVLLGISLIRELLGSGTILGAQVLPDSYVPILFFIMPPGGFLVFALFISLNLFIKSKLKGEGGVS

SEQ ID NO: 18389 - DNA, 312 bp, Unknown
  Obtained from environmental sample
  misc_feature (1)..(312): n is a, c, g, or t
atggacatgcatcaaatgcttcgctcaatgcagaaaatgcagactcaaatgcagaagagtcaggagagcttgcagagccagagctttagttcagaagcgggcggcggcgcggttaaagtaactttggatggcaacggggctttaacagaactcaaaattgccccatctgctgtggacgcaggcgatgtggaagctctggaagaccttcttatggcagctttcaacgaagccctcgctaaaaaagacaaagcctatcaagaaagcgttggagctataaccaaaggcttgaagattccaggaatgccattttaa

SEQ ID NO: 18390 - protein, 103 aa, Unknown
  Obtained from environmental sample
  DOMAIN (7)...(99): Uncharacterised BCR, YbaB family COG0718
  misc_feature (1)..(103): Xaa is any amino acid
MDMHQMLRSMQKMQTQMQKSQESLQSQSFSSEAGGGAVKVTLDGNGALTELKIAPSAVDAGDVEALEDLLMAAFNEALAKKDKAYQESVGAITKGLKIPGMPF

SEQ ID NO: 18391 - DNA, 342 bp, Unknown
  Obtained from environmental sample
  misc_feature (1)..(342): n is a, c, g, or t
gtggacaaatgcaggatcatcggggtgatcatttcctcgatttacggcgctataggcatactaacataccagcagagctttggctttattcagctttacaacgcgccgctctacatggcctttccagcggttgcagccgtgctcctgggcggcgcttcggtgaacaaggcttcaatcctcaatgtggtggtgggaaccttcctctttcaaagcatactcacaatgaccccttcggttatcaataatatactacagaccgatatgtccgaggtaatcaggatactcatttccaacgggatgatcatttacgctctgacccggaaaacgaaggtaacaaaatga

SEQ ID NO: 18392 - protein, 113 aa, Unknown
  Obtained from environmental sample
  misc_feature (1)..(113): Xaa is any amino acid
MDKCRIIGVIISSIYGAIGILTYQQSFGFIQLYNAPLYMAFPAVAAVLLGGASVNKASILNVVVGTFLFQSILTMTPSVINNILQTDMSEVIRILISNGMIIYALTRKTKVTK

SEQ ID NO: 18393 - DNA, 465 bp, Unknown
  Obtained from environmental sample
  misc_feature (1)..(465): n is a, c, g, or t
ttggcgctgtcccctcaccttgatgtcggcggaaatatcgcctacggactttatatcaaaggtgttccgaaaaaagaacgccgccttgttgtagagcagacgctggaaattgtccgccttcaaggatatgcggcaaggcgcattgacactctttcaggcggagaacgtcagcgggtagccattgcccgcgctcttgcgtccagtccccgactgcttttgctggacgaacctttttccagtttggacgctcctttgcgaaaaaacctccgtcaggattttcttgagattcgctcccattcaaaagcgccctgcatctttattacccacgaccgggaagaagccttaatgctgggcgacaaagtaacgctcatgaaggatggacgcataatcgaaaccgccgcaagaggcgaaatgctctccgcgccgaagacggaatttgccagagaatttttcggcaaggaataa

SEQ ID NO: 18394 - protein, 154 aa, Unknown
  Obtained from environmental sample
  DOMAIN (1)...(127): ABC transporter
  misc_feature (1)..(154): Xaa is any amino acid
MALSPHLDVGGNIAYGLYIKGVPKKERRLVVEQTLEIVRLQGYAARRIDTLSGGERQRVAIARALASSPRLLLLDEPFSSLDAPLRKNLRQDFLEIRSHSKAPCIFITHDREEALMLGDKVTLMKDGRIIETAARGEMLSAPKTEFAREFFGKE

SEQ ID NO: 18395 - DNA, 804 bp, Unknown
  Obtained from environmental sample
  misc_feature (1)..(804): n is a, c, g, or t
ttgagagcggaattgctgatcagtttttatagccgcgatttttgttttaacggccctgattatgttgaaatctgccgtcgtacaggacgcaaggaagaagcagactacgccgccaaagcggttgctgccatggccgaaacaattaaaacacacggctgggacgggaactggttcctgcgggcttacgacgcatatggccataaaattggcagccatgaatgtgaggacggtcagatatatatcgaatccaacggattcgcggtgatggcggagattgggcttgacgacggacgcgctaaaaaagcgctcgactcggtaaaggagaggctggacacaaagtacggcatcgtgcttcaacagcccgcatacagggaataccaccttgagctgggcgaagtctcgtcctacccgccgggctataaagagaacgcgggtatcttctgccacaacaacccatgggttacgatagccgaaaccaagcttggccgaggcacgcgcgcgtttgaaacctacacaaaaatttgcccggcttaccgcgaggacgacagcgacctgcgtcgcctggaaccctatgtgtacgcgcagatggttgccggaaaagacgcaccgcgtttcggcgaggcaaaaaattcctggctcaccggaaccgccgcatggacttttgtcagcatttcccagtacatcctaggcgtgcgccctgtgttcgatggcttgctcatcgacccttgtatccccgctgccatgaaaggcttctccgttattcgccattttcaaaacngcggtatatcgcataactgtagataa

SEQ ID NO: 18396 - protein, 267 aa, Unknown
  Obtained from environmental sample
  misc_feature (1)..(267): Xaa is any amino acid
MRAELLISFYSRDFCFNGPDYVEICRRTGRKEEADYAAKAVAAMAETIKTHGWDGNWFLRAYDAYGHKIGSHECEDGQIYIESNGFAVMAEIGLDDGRAKKALDSVKERLDTKYGIVLQQPAYREYHLELGEVSSYPPGYKENAGIFCHNNPWVTIAETKLGRGTRAFETYTKICPAYREDDSDLRRLEPYVYAQMVAGKDAPRFGEAKNSWLTGTAAWTFVSISQYILGVRPVFDGLLIDPCIPAAMKGFSVIRHFQNXGISHNCR

SEQ ID NO: 18397 - DNA, 927 bp, Unknown
  Obtained from environmental sample
  misc_feature (1)..(927): n is a, c, g, or t
ttgagtgacccgccgcctggcaggccggccatggccattgctaggcggaaggcgaactggctgctcagactgccgtcaatgtgcaggtcaantcggctcggcacttcggctggcggcacaagaatgccaccgttgtcttcggcctcccacgatgcaccgcaggcggtaagtgccgccagcagtggggccagcgggcgctcgaagagccttttgtcgcctctgaacctgattgggccacggcagtgcagcgccgcgaggggcagcaggaagcgcagcgccgtgccagccgcggctaataccaagttgcattcaaagaatgcaacttggttgtccaccagggacccgcgcggccacggccgcgcctttccccggaccccttggacattcgctccgggcggaatgaatccgccctgcgcttcagaccaggcagtacgtattgccgctcgatggattgcggatcggttttcgtcaagccagtcatgtggggcaaagccggtgccgcccaccacgcgcagaccgccgtccacaaactctgtccctacgctcagcgcaccaagggcgcccagcatgacggtcacgtcgtccggcagaccgctgggcgcaagcccccccaacatgctctcgccaggcgcgagggccgccagcactagtgcgcggttggcgacggatttggacgggggcagggagagcatgaaatgcctattaccaaggacgcgcgacacaagaccgtatcctcaatggtatttgaaccacaccatgattcagcagatacgcgcccaggcaaagatccctcatgacaggcgacgctgtgcttcctcattgccctggtcagccgcaagacggagccacttctcggcttccttgagatcctgcggaacgccgtgcccttcgtggtacatccagccaaggtcgttctcggccatctga

SEQ ID NO: 18398 - protein, 308 aa, Unknown
  Obtained from environmental sample
  misc_feature (1)..(308): Xaa is any amino acid
MSDPPPGRPAMAIARRKANWLLRLPSMCRSXRLGTSAGGTRMPPLSSASHDAPQAVSAASSGASGRSKSLLSPLNLIGPRQCSAARGSRKRSAVPAAANTKLHSKNATWLSTRDPRGHGRAFPRTPWTFAPGGMNPPCASDQAVRIAARWIADRFSSSQSCGAKPVPPTTRRPPSTNSVPTLSAPRAPSMTVTSSGRPLGASPPNMLSPGARAASTSARLATDLDGGRESMKCLLPRTRDTRPYPQWYLNHTMIQQIRAQAKIPHDRRRCASSLPWSAARRSHFSASLRSCGTPCPSWYIQPRSFSAI

SEQ ID NO: 18399 - DNA, 654 bp, Unknown
  Obtained from environmental sample
  misc_feature (1)..(654): n is a, c, g, or t
atgaaaaaattattgtttgcgtcaatttttattttagccggactgaatgtattttgtcaggatgcctttattgaacagcttacaggcactgtggaaattaaacagccaagagataactcgtttaagacggcgaaacaaggggataaattatttcaggatactgttatatctacaagttttaaaagtttcgccgttattaaaatcggcagtacaaccataacaatacgtcccttaacaactttatcgttgatagatattcaaaaacaggaaagtaatgagaccgtaagtgtaaatttacaaacaggaagagttcgagtagacgtaaagcctccggctggaacaagagcgtcaaccacattaacttcgccgtcttcaacagcgtcggttagaggaaccaaatttgaatttgacgcctataatctttatgtaaacgaaggcaaagtaagttacaccggtaacagcgggcagagcatttctgtcagagcaggcgaaagcagtcgggtggctcagacaggacaagcaacgacgccnagggacgagagaaacgcaaaattaatgcctcccaagccttttggaatagccgataaaaacgctcccgtttccggcggagctgtaataagcgcgtattttacaatggaacttgaatttaattga

SEQ ID NO: 18400 - protein, 217 aa, Unknown
  Obtained from environmental sample
  SIGNAL (1)...(22)
  misc_feature (1)..(217): Xaa is any amino acid
MKKLLFASIFILAGLNVFCQDAFIEQLTGTVEIKQPRDNSFKTAKQGDKLFQDTVISTSFKSFAVIKIGSTTITIRPLTTLSLIDIQKQESNETVSVNLQTGRVRVDVKPPAGTRASTTLTSPSSTASVRGTKFEFDAYNLYVNEGKVSYTGNSGQSISVRAGESSRVAQTGQATTPRDERNAKLMPPKPFGIADKNAPVSGGAVISAYFTMELEFN

SEQ ID NO: 18401 - DNA, 372 bp, Unknown
  Obtained from environmental sample
  misc_feature (1)..(372): n is a, c, g, or t
ttggcgcgctcaagtttcaggcggacaatgaagcaggccattacaaacgcgataaaaaaaggcaacgctcagggtgtaaaaatccgtctttcaggccggttgggcggcgccgaaatgtcccgcacggaagaggccaaggaaggacgcattcctctgcatactctccgcgcggatattgattttggttttgccgaagcccacacaacctttggctccatcggggtaaaggtttgggtgtacaacggcatgaagtacggcagagaacaaaaggaagatgcgggggcattgctccgcaaacggcgggagcgggttcctgctcatagaaacgagggccaaagaaccgatggttccagaaccgaaggccggttttaa

SEQ ID NO: 18402 - protein, 123 aa, Unknown
  Obtained from environmental sample
  DOMAIN (2)...(79): Ribosomal protein S3, C-terminal domain
  misc_feature (1)..(123): Xaa is any amino acid
MARSSFRRTMKQAITNAIKKGNAQGVKIRLSGRLGGAEMSRTEEAKEGRIPLHTLRADIDFGFAEAHTTFGSIGVKVWVYNGMKYGREQKEDAGALLRKRRERVPAHRNEGQRTDGSRTEGRF

SEQ ID NO: 18403 - DNA, 894 bp, Unknown
  Obtained from environmental sample
  misc_feature (1)..(894): n is a, c, g, or t
atgaaattttcataccttnttcggttcataacattngggctttctacaataatatttaagcgaaaaaaaccgattttaggtacaataatagtaaccgacaaatgtaatttaacatgtaagcattgcgcggttaataatgttaagggaataatttatccctattcgcagattaagcaggaaatgaatattctctatcaacagggaatacgtattctgtttttttgcggaggagaaacatttttgtggaaagaccaaaataaaaacatacgggatctggttattgaagcaaaacaaatgggattttttatcgttaatgtcgtaacaaacggtacatttgccattgatctgccggaagccgacttgattttgcttagccttgacggcggccgtgtaaaccataatttaattcgtggggatacgtttcatatcattatgaataatatcagaactgcggcttcatccaatatatgcctatatatggctattaacaatataaatcttggcgacattcgggcagtttgcgaaattgccaaacaagaagagaatatccgcgccgtttcgtttaattttcatacgccttattcgggaacagaatccctgtcgctgacaaaaacacaaaaggaggaatgtctgggcaaaatcgcggaattgataaaacagaaatatcccatttttaacttgcgttccgccttcccggctatcgcttccaacttgtttcaaacgccgtgttatcaatgcgtggttatggaaaacggaaaacagacaatctgcggcaggtgcgtcgagattgataaattatgcgaacagtgcgggtattttttcgcggctgaatattctttgctttttcatggaaatatcaaagtgggtttgatatgcttcaactctcggccataa

SEQ ID NO: 18404 - protein, 297 aa, Unknown
  Obtained from environmental sample
  DOMAIN (29)...(177): Radical SAM superfamily
  misc_feature (1)..(297): Xaa is any amino acid
MKFSYLXRFITXGLSTIIFKRKKPILGTIIVTDKCNLTCKHCAVNNVKGIIYPYSQIKQEMNILYQQGIRILFFCGGETFLWKDQNKNIRDLVIEAKQMGFFIVNVVTNGTFAIDLPEADLILLSLDGGRVNHNLIRGDTFHIIMNNIRTAASSNICLYMAINNINLGDIRAVCEIAKQEENIRAVSFNFHTPYSGTESLSLTKTQKEECLGKIAELIKQKYPIFNLRSAFPAIASNLFQTPCYQCVVMENGKQTICGRCVEIDKLCEQCGYFFAAEYSLLFHGNIKVGLICFNSRP

SEQ ID NO: 18405 - DNA, 444 bp, Unknown
  Obtained from environmental sample
  misc_feature (1)..(444): n is a, c, g, or t
atgaaaaaagttgcattaatagcggcattaatctttattgtaacgattgtaatgcttgcgctgtactgcagaaccgatctcggtgacatggatatgcggtacacaaaattgtatgatgccaactcggggcttgatcttaccggagccggcgcatatacggtgaaagacggcgatacgctgtcggatatttcaaggcatgcttacaatgatggtttttattaccccgtcattatgcttgcttcgcggggtgtagttataaatcccgataaaatcaggcccgggatgacgctgacaatccccaatcttgaaaaaaatcttgccaacagtaaaagcaaaaaaagcatgaaaaactgccttaacggatttgccaatatcgaaaaaaccaagacaaatccgaatcaggcattgatcgacggctttaagaaacgcgcaaacgaactttaa

SEQ ID NO: 18406 - protein, 147 aa, Unknown
  Obtained from environmental sample
  SIGNAL (1)...(25)
  DOMAIN (52)...(100): LysM domain
  misc_feature (1)..(147): Xaa is any amino acid
MKKVALIAALIFIVTIVMLALYCRTDLGDMDMRYTKLYDANSGLDLTGAGAYTVKDGDTLSDISRHAYNDGFYYPVIMLASRGVVINPDKIRPGMTLTIPNLEKNLANSKSKKSMKNCLNGFANIEKTKTNPNQALIDGFKKRANEL

SEQ ID NO: 18407 - DNA, 459 bp, Unknown
  Obtained from environmental sample
  misc_feature (1)..(459): n is a, c, g, or t
ttgtttttttccctggagctgctcatccgtggactgggtatgtccctcatcgagcttaacgtgtttcggatgaaagctcgcggcggcaagtctggcggggcacagataagggccgttgtttacaaagagggagctatcggggtagaggattgtactaaagtgcatcgttcaatcctgcccaggctggagctggcttttccggggcaggacatttacctggaagtttcatccccggggatagacaggcttattaaagacggcagtgaatttgtccattacataggcaagggaataaactgctaccgcacggatatatcggattggacggcgggaatattgctcgccgctgatggtaaagaaattaagctcgccggcgggagcggagaaattgtcctgccttatgaaattatagccaaagcgcggcttaaaagcgctgggttgccagaggaaacgccatag

SEQ ID NO: 18408 - protein, 152 aa, Unknown
  Obtained from environmental sample
  DOMAIN (4)...(142): Uncharacterised BCR, YhbC family COG0779
  misc_feature (1)..(152): Xaa is any amino acid
MFFSLELLIRGLGMSLIELNVFRMKARGGKSGGAQIRAVVYKEGAIGVEDCTKVHRSILPRLELAFPGQDIYLEVSSPGIDRLIKDGSEFVHYIGKGINCYRTDISDWTAGILLAADGKEIKLAGGSGEIVLPYEIIAKARLKSAGLPEETP

SEQ ID NO: 18409 - DNA, 609 bp, Unknown
  Obtained from environmental sample
  misc_feature (1)..(609): n is a, c, g, or t
gtgtctgttctcgcggacatggttgaaaaccgggacaaggggacaggcggccatattgaacgcacttcgatttatatcaaaatactgatagaggaaatgaaagagcgcggagtttatcttgatgaaatccgcaattgggatgtggataaaatagtttcttccgcgcgtatgcacgaccttgggaaaatctccattaccgatattattgtgaacaagccggataagcttaccgatgacgaatacgagttaattaagacgcacacaatcgaaggcgagatgataattgacgaaataatttcaaaaacaggtgaagatgaatttttaaacagcgcgaggctgtttgccggctgccatcatgaacgatgggacggcaaagggtatccccgggggctgaaaggtgagaaaattccgctgcaggggcgcatcatggctattgtggacgtgtacgacgcccttgtttccgaacggccgtataaaaaagcgttttccgacgaggaagcggtacagataatattggataacgccggcgtccattatgatcctaagattgtcgaggtttttaattcggtaaaagatcagtttaaatctgtaagggctaaattattatga

SEQ ID NO: 18410 - protein, 202 aa, Unknown
  Obtained from environmental sample
  DOMAIN (15)...(152): HD domain
  misc_feature (1)..(202): Xaa is any amino acid
MSVLADMVENRDKGTGGHIERTSIYIKILIEEMKERGVYLDEIRNWDVDKIVSSARMHDLGKISITDIIVNKPDKLTDDEYELIKTHTIEGEMIIDEIISKTGEDEFLNSARLFAGCHHERWDGKGYPRGLKGEKIPLQGRIMAIVDVYDALVSERPYKKAFSDEEAVQIILDNAGVHYDPKIVEVFNSVKDQFKSVRAKLL

SEQ ID NO: 18411 - DNA, 648 bp, Unknown
  Obtained from environmental sample
  misc_feature (1)..(648): n is a, c, g, or t
atgaaaatcctgaaaaatattgtaaacgatcccaatgaaactgatgtggttaaagaagctgttattatggggttaggacaggccgagaatgaggaaagcatttcaattttggtttctgttcttgacaagcaagatgaattccgcaagcaggctgaaaaagcccttgcccaaagaacggtcaagcatgacattgtaaagcttctggaaatctttaaggacgccgagccgcagttccgggaaaaactgatcccggtattcaaggcgcagggcaggaaggccgagccgtacattgcggaaattttaaaagacgaagtcgcgtcactcaagccatatctggttacgatattggaagaaaccggctatgttgatgaattaaaaaggcggctttcaaacaggtacgcggctgtccgcagggaagcggcgcaaatgctttccttgctcgatacattgccggctttcaggggacttgtactggccgccaaagatccggatctggaggtgcgcgtgtgcgtcgtaaaagctctggagaaattaaacactccccaaggtcacgagatcctagagagccttaaaaaagacccggacaatcacattcgcaaatatacacattgggctttggaaagattggatacgctgggaagggaatag

SEQ ID NO: 18412 - protein, 215 aa, Unknown
  Obtained from environmental sample
  misc_feature (1)..(215): Xaa is any amino acid
MKILKNIVNDPNETDVVKEAVIMGLGQAENEESISILVSVLDKQDEFRKQAEKALAQRTVKHDIVKLLEIFKDAEPQFREKLIPVFKAQGRKAEPYIAEILKDEVASLKPYLVTILEETGYVDELKRRLSNRYAAVRREAAQMLSLLDTLPAFRGLVLAAKDPDLEVRVCVVKALEKLNTPQGHEILESLKKDPDNHIRKYTHWALERLDTLGRE

SEQ ID NO: 18413 - DNA, 399 bp, Unknown
  Obtained from environmental sample
  misc_feature (1)..(399): n is a, c, g, or t
atgcggagcgccgatacgaacaagctaaaagaactctatacaatcctaaaaaaagctaatttccagaaaatacgatcctttccgggtatttcacaaattgttgacggcgatgctcatcttatacagacccgttccatagaccttcaggatttacttggacgaaacccggtaacaataaacttaaaagaaagcctttcttatgtgagaggtaagcgcgtacttgttacaggggcgggcggttcaatcggcagtgaattatgccgtcagttgctttcaggcggcgcttcaaggctctaccttttcggtcatggtgaaaattccatttaccagattgacaaagaactgcatttgcttcaggaagaaggcgtcggcgaaaaagccgctatgttcctgtcatag

SEQ ID NO: 18414 - protein, 132 aa, Unknown
  Obtained from environmental sample
  misc_feature (1)..(132): Xaa is any amino acid
MRSADTNKLKELYTILKKANFQKIRSFPGISQIVDGDAHLIQTRSIDLQDLLGRNPVTINLKESLSYVRGKRVLVTGAGGSIGSELCRQLLSGGASRLYLFGHGENSIYQIDKELHLLQEEGVGEKAAMFLS

SEQ ID NO: 18415 - DNA, 819 bp, Unknown
  Obtained from environmental sample
  misc_feature (1)..(819): n is a, c, g, or t
gtgcccgccgtcatagcgcttgacggcgttgaaaattttgacgaaaccaccctgtaccggcttgacggttttatccggaacgggggaaaagccctctttaccgttaaaggcgtccacataaataccgacagcgatctcagcgcgcaggccgtgtatgacaggggccttttgcaaatgctttcctcttacggcgtgacagttctgcctgaaatcgtaatggacaggacggccctgatgatgcaataccagacccgcgccccttcaggcgccgttcaggtaaggataacccgctatccgcaatggatccgggtgttaggcgaaaacggaaaccccatgcatcccgtaagcgccaaattcagcggcctggatatgtattgggcgagcccccttgaattgcatgaagtcaatggcattgacgctgtacagctgttcaccaccacaaacgaggcctggacgataagggaaccgttttatacaagccctgaactgcccatgatgttaggcaaagacgccgatgaaaccacgggcacaaagatacttggcgtaagcctgacggggctgtttccctcatggttcgccgacaggccgaagccggagcaggaagacggttccgagcttcccgatataagcgccgaagccaaaccttcgcggcttattatcgccggcgacactgattttgccacgtctttcatgaacgtcaccaacgcccagcgcggcaataccgacttccttatccaggccgtcgactggctgggcaatgatgacgacatcattggaatacgctcaagggaatcgagatccaacaggctgacaggataa

SEQ ID NO: 18416 - protein, 272 aa, Unknown
  Obtained from environmental sample
  misc_feature (1)..(272): Xaa is any amino acid
MPAVIALDGVENFDETTLYRLDGFIRNGGKALFTVKGVHINTDSDLSAQAVYDRGLLQMLSSYGVTVLPEIVMDRTALMMQYQTRAPSGAVQVRITRYPQWIRVLGENGNPMHPVSAKFSGLDMYWASPLELHEVNGIDAVQLFTTTNEAWTIREPFYTSPELPMMLGKDADETTGTKILGVSLTGLFPSWFADRPKPEQEDGSELPDISAEAKPSRLIIAGDTDFATSFMNVTNAQRGNTDFLIQAVDWLGNDDDIIGIRSRESRSNRLTG

SEQ ID NO: 18417 - DNA, 822 bp, Unknown
  Obtained from environmental sample
  misc_feature (1)..(822): n is a, c, g, or t
atgaaagataaattattcatgtggatagacaacgctctgcctttggcgatagagcttgaaaaagggctgacaaaacaccccgcaatctcgcctgaatccggaggcgagggagaactggacaagtgcctctttcttgaaaactggctgaaagcgcagggcattacaaacctagaacgctacgacgctcccgataaaaacgcgaaaggcggaatacgccccaatttaatcgcgacaattaccggaaacagcgaaaaacaactttggattatgagccatcttgacgtagtccctcccggagaggaaaaactttgggtaagcgacccgtggactgctatacgcgaagagaatccttcgggagcgcgtcttgtcgggcgcggtacggaagacaaccagcagggaattactgcctctgttcttgccgcgcttagttttacaaagcagggaataaaacccaaccttacaataaagctgttgtttgccgcggatgaagaagtaggctccgcctacggcattgtatggcttgtaaaataccacggaaatctattcaaaaaagacgacatggttcttgttcccgacggcggagacagaaaaggcgagtttatggaaatcgccgaaaaaaacataatgtggatgcgatttgccacaagaggaaagcaggcgcacggttcaaggccggatttgggcaataacgcctttcttgccggctcatgtctagtcctgcgcctgcattcggaactttccgccaaattctccgatcatgatcccttgtttgacccggactactccactttccagcccacaaaaaaagaagcaaatggctaa

SEQ ID NO: 18418 - protein, 273 aa, Unknown
  Obtained from environmental sample
  DOMAIN (88)...(245): Peptidase family M20/M25/M40
  misc_feature (1)..(273): Xaa is any amino acid
MKDKLFMWIDNALPLAIELEKGLTKHPAISPESGGEGELDKCLFLENWLKAQGITNLERYDAPDKNAKGGIRPNLIATITGNSEKQLWIMSHLDVVPPGEEKLWVSDPWTAIREENPSGARLVGRGTEDNQQGITASVLAALSFTKQGIKPNLTIKLLFAADEEVGSAYGIVWLVKYHGNLFKKDDMVLVPDGGDRKGEFMEIAEKNIMWMRFATRGKQAHGSRPDLGNNAFLAGSCLVLRLHSELSAKFSDHDPLFDPDYSTFQPTKKEANG

SEQ ID NO: 18419 - DNA, 447 bp, Unknown
  Obtained from environmental sample
  misc_feature (1)..(447): n is a, c, g, or t
atggaagcgctttccacaaaaactctggagcttgcctcaggaaatcccccccgcgcgcggctgttctacggtaattactcgtactatctggacaggatagcctcggaaacggaagacgcgcttcccaagacagcggcaaaaacggcgcgcgcggaaaaaacaaccgaacctcagctgacttcagcggacaggcgcgcggctgacaaacagagacaggccgccgttcgcaggctggaaaggcaggaggcggagctattaaaaacgctggaagagctggaaaaaaccaaggcttctcttgaggctgaactttccctgccggaagtatactcaaacgggcagagagcgaaggaagtaaaaagcaaacttgacgattgtacggcggcaattgaagttaaaaccgccgaatgggaaaaagccgcgtccgcgttggcgaatactaccgcttga

SEQ ID NO: 18420 - protein, 148 aa, Unknown
  Obtained from environmental sample
  misc_feature (1)..(148): Xaa is any amino acid
MEALSTKTLELASGNPPRARLFYGNYSYYLDRIASETEDALPKTAAKTARAEKTTEPQLTSADRRAADKQRQAAVRRLERQEAELLKTLEELEKTKASLEAELSLPEVYSNGQRAKEVKSKLDDCTAAIEVKTAEWEKAASALANTTA

SEQ ID NO: 18421 - DNA, 564 bp, Unknown
  Obtained from environmental sample
  misc_feature (1)..(564): n is a, c, g, or t
ttgagcatactgtatgattccggcgcacgggtacaggaactttgtgatttgcgcgtccatgatgttcgtcttgaccatccgtctgtcattacactgaccggcaaagggcgtaaaacaagacatgtgcccctcatggcagacaccgtgaaactgctgcgatcctacatggaagaaaactccctattccaaaacggctgtcaagacgcgccgctgttctgtaaccagcgccgttcaaaactgacccgcggaggcgttaatcacattctgtgcaaatactccagtacattgtcgataaaatatcctgatatatcaaaaaggcttactcctcatgtgctgaggcattctaatgcaatgcatctatatcaagccggcgtgagccttgtatacatacgcgatatcctcgggcacgtagatatcgctaccactgatatctacgccagagccgacaccgagtccaaacgcaaggcacttgaaaatatttatccgggtataacgccggttgcttcttcgttgccggactggaaccgcgatctgaacctgcttgattacttgaacggcctttaa

SEQ ID NO: 18422 - protein, 187 aa, Unknown
  Obtained from environmental sample
  DOMAIN (1)...(155): Phage integrase family
  misc_feature (1)..(187): Xaa is any amino acid
MSILYDSGARVQELCDLRVHDVRLDHPSVITLTGKGRKTRHVPLMADTVKLLRSYMEENSLFQNGCQDAPLFCNQRRSKLTRGGVNHILCKYSSTLSIKYPDISKRLTPHVLRHSNAMHLYQAGVSLVYIRDILGHVDIATTDIYARADTESKRKALENIYPGITPVASSLPDWNRDLNLLDYLNGL

SEQ ID NO: 18423 - DNA, 864 bp, Unknown
  Obtained from environmental sample
  misc_feature (1)..(864): n is a, c, g, or t
ttgggcgtcgtctgtattgatgtccggattaactacataggggagcaggttgttaatacggctcttaccaaagacggttatggatttttggccgccggggatctgacctttcttgcccaccccaatccggactatgtaggtaagaaaatgtccgacccggatgttcctatttcgggtatggtcgatgaattgcaggcgaagggagtaatttcggaagttccgttgataagctggaaaggcgaaaaaaccataggctttatccgaaaacttccaaacggctggtatttgggccttttcgcgctaagaagtttctattatcaaaccgttaccgacatggccgtgatcctaagtttattgggcgccgcgctcgcggcgatactaatctacatactgaccaaccttgacgccgccaggacaaagtcggacgctgaaagcaggcacaagagcgtctttttggccaatatgagccacgaaatacgcacgcccatgaacgcgataatcggtatgaccaccatcggaaagtccgcccccgagacagaacgcaaggattattgctttacaaaaatacaggacgcctccaaccacctgctcggcgttatcaacgatattcttgacatgtccaaaattgaggccaacaagtttgaactttcacctgtggattttaatttcgaaaaaatgctgcagcgggcagtgaacgttgtcagcttccgcgttgacgaanaacggcaaaaattctctgtacatatcgatcattcattacctaaagcgctggtaggagacgaccagcgtatagtacaggtcatcaccaatttgttggggaacgcgaataaatttacgccccgaagagggtctcataagccttag

SEQ ID NO: 18424 - protein, 287 aa, Unknown
  Obtained from environmental sample
  DOMAIN (147)...(212): His Kinase A (phosphoacceptor) domain
  misc_feature (1)..(287): Xaa is any amino acid
MGVVCIDVRINYIGEQVVNTALTKDGYGFLAAGDLTFLAHPNPDYVGKKMSDPDVPISGMVDELQAKGVISEVPLISWKGEKTIGFIRKLPNGWYLGLFALRSFYYQTVTDMAVILSLLGAALAAILIYILTNLDAARTKSDAESRHKSVFLANMSHEIRTPMNAIIGMTTIGKSAPETERKDYCFTKIQDASNHLLGVINDILDMSKIEANKFELSPVDFNFEKMLQRAVNVVSFRVDEXRQKFSVHIDHSLPKALVGDDQRIVQVITNLLGNANKFTPRRGSHKP

SEQ ID NO: 18425 - DNA, 498 bp, Unknown
  Obtained from environmental sample
  misc_feature (1)..(498): n is a, c, g, or t
ttggacagttcaggaattgaaaaaattcttccgccctaccgcgcggcaattaacgcgggcgctctgtctttaatgccttcgttctcaagcgtaaacggaatcaagatgcaccagaacaaagagttgcttacggatttattaaaagatgaaatgggttataagggttttgttgtttccgactggtcagcggttaaacaactgacgggaggcagttacaggatgcagattgcgaacgctattaacgcgggcgtggatatgtgtatggcgaccgacggacgtgaaaactgggtaaattttatcagtaatctaactaaattggttgaagacggcattgttcctatgtcgcgcattgacgacgctgttatacgtattctgcgctttaagcaaaaactaaagttatttgaaacccctctgataacgcgcgcgggcgaaatcggcactgctgaaaacagggccgccgcgcgagagcttgtttcgactcgcttgttctttgcgtaa

SEQ ID NO: 18426 - protein, 165 aa, Unknown
  Obtained from environmental sample
  DOMAIN (1)...(89): Glycosyl hydrolase family 3 N terminal domain
  misc_feature (1)..(165): Xaa is any amino acid
MDSSGIEKILPPYRAAINAGALSLMPSFSSVNGIKMHQNKELLTDLLKDEMGYKGFVVSDWSAVKQLTGGSYRMQIANAINAGVDMCMATDGRENWVNFISNLTKLVEDGIVPMSRIDDAVIRILRFKQKLKLFETPLITRAGEIGTAENRAAARELVSTRLFFA

SEQ ID NO: 18427 - DNA, 783 bp, Unknown
  Obtained from environmental sample
  misc_feature (1)..(783): n is a, c, g, or t
atgaaagcattgcttgtttcttacacgcatagattgcgaactaaaacattgctcattgctcattgctcattgctcattattcattgctcattgttcatgtttgcttgttcaggcagtcccgccaaaaaacctgtcaatcctttgaaaaacgtcccgtatccgcgcgctgaggttgagccatcccccaacaaaaaacgtttgttgaactatctgaccgacgtatacggcaagtatatgatctccggccagatggacgccgcgtggacttccaacgcgtcgcaggacatgataacccgcgtgtacacagacacaggcaagtatccggcccttaagggctttgattttattaaccttccctacggcaaaagccagattgacgaggcaattgaatggtgggaaggcaaaaacaagatgaacggcgtatcgcccgccgcgcagctgctgccggacaggccggacatacacggcattgccgccttctgctggcattggcgggtaggcgaggcaaaagaattttataccaacaggacattctttttcattccatataataacggcaaactggaaacatccagccagtacttcaccgacattatcaatgatcttgacaaggctgccgccctcctgcagatactcaaggacaaggatattcccgtgctatggcggcccctgcacgaagcctcgggccgctggttctggtggggcgcaggcgggcctgaaccctacattgccctgtgggaatttatgtacgattattttacctatgtaaaagnggctgaataa

SEQ ID NO: 18428 - protein, 260 aa, Unknown
  Obtained from environmental sample
  DOMAIN (58)...(260): Glycosyl hydrolase family 26
  misc_feature (1)..(260): Xaa is any amino acid
MKALLVSYTHRLRTKTLLIAHCSLLIIHCSLFMFACSGSPAKKPVNPLKNVPYPRAEVEPSPNKKRLLNYLTDVYGKYMISGQMDAAWTSNASQDMITRVYTDTGKYPALKGFDFINLPYGKSQIDEAIEWWEGKNKMNGVSPAAQLLPDRPDIHGIAAFCWHWRVGEAKEFYTNRTFFFIPYNNGKLETSSQYFTDIINDLDKAAALLQILKDKDIPVLWRPLHEASGRWFWWGAGGPEPYIALWEFMYDYFTYVKXAE

SEQ ID NO: 18429 - DNA, 387 bp, Unknown
  Obtained from environmental sample
  misc_feature (1)..(387): n is a, c, g, or t
ttggccaacagttccaagatctttgaggcgctgcagaaggagcgcgccgacctgaagagggagcaggagagggtcgccgagcagtacgcccgccttgagctgcttaaggctgagatcgagaaggggcgcgaggagttgctgggcgagcgcgggcagttggagaagaagctggccgacataccggcggttgaggacgccaggtacaagaagctggcgaagatatatcaggcgatgaagcccggcgaggccgccgcgatcttggagacgattcaggattctcaggtagccgcgattttgggcaagatgaacgacgatcgtcagaagggcaagattctttcccttctaacaaaggaaaaagccgtccgcctaaacaagctgataaagtaa

SEQ ID NO: 18430 - protein, 128 aa, Unknown
  Obtained from environmental sample
  misc_feature (1)..(128): Xaa is any amino acid
MANSSKIFEALQKERADLKREQERVAEQYARLELLKAEIEKGREELLGERGQLEKKLADIPAVEDARYKKLAKIYQAMKPGEAAAILETIQDSQVAAILGKMNDDRQKGKILSLLTKEKAVRLNKLIK

SEQ ID NO: 18431 - DNA, 627 bp, Unknown
  Obtained from environmental sample
  misc_feature (1)..(627): n is a, c, g, or t
atgaaaggacttaatgtcctaaaagctgacttagtggaaggcgctgcagttccgactgtagaaagcgtaacagtaaaccccgcgaccattacagtcgcgataggcacaacaaatcaatttacagccacagttacaggaaaattcagtccggcagaaacggttacatggacaatcgaaacaacaggcaaaaactcaggtacttctattagtgcaacaggattacttaccgtagccgccgaggaaactcttacatcgcttacagtaagagcgacatctacacaggacgataccaagtacggagaagcggcagttaccatttcagccgaagcgccgacagtaaccagcgtaacagtaagccccacggctccttcagtcttaaaaggcgaaacacagcaatttacagctacagtagaaggaacaaactctccggcaacaacggttacctggtcaatcacgacagagggcataaacgcaggaactactatttcaaccggcgggttacttaaagttgctgtttttgaaaccaaaacgacacttaccgtanaggcgacatctacacaggacaataccaagtataaagaagtgacagtaactgttaccccaattacgcttccaccggtttcttag

SEQ ID NO: 18432 - protein, 208 aa, Unknown
  Obtained from environmental sample
  misc_feature (1)..(208): Xaa is any amino acid
MKGLNVLKADLVEGAAVPTVESVTVNPATITVAIGTTNQFTATVTGKFSPAETVTWTIETTGKNSGTSISATGLLTVAAEETLTSLTVRATSTQDDTKYGEAAVTISAEAPTVTSVTVSPTAPSVLKGETQQFTATVEGTNSPATTVTWSITTEGINAGTTISTGGLLKVAVFETKTTLTVXATSTQDNTKYKEVTVTVTPITLPPVS

SEQ ID NO: 18433 - DNA, 351 bp, Unknown
  Obtained from environmental sample
  misc_feature (1)..(351): n is a, c, g, or t
ttggcaaatgccgcaaagcgaactcttgaacacagactatcncacggtgggggacataccggctggagcagggcatggattaccaatttttgggcgaaacttggggattcggaaaaagcatctgaaaatattgatttgctcctggcaaaatctacactacctaatctttttgacaaccatcctccctttcaaattgacggaaatttcggcggaactgcggcaatagcgaatatgctgttacagagtgaacctgacagcctgataatactgcccgcacttccacgtaaatggcgcaacggggaggtaaatggactcaaagcaaaaggcgctcttgaagtcaatatagaatga

SEQ ID NO: 18434 - protein, 116 aa, Unknown
  Obtained from environmental sample
  misc_feature (1)..(116): Xaa is any amino acid
MANAAKRTLEHRLSHGGGHTGWSRAWITNFWAKLGDSEKASENIDLLLAKSTLPNLFDNHPPFQIDGNFGGTAAIANMLLQSEPDSLIILPALPRKWRNGEVNGLKAKGALEVNIE

SEQ ID NO: 18435 - DNA, 873 bp, Unknown
  Obtained from environmental sample
  misc_feature (1)..(873): n is a, c, g, or t
atgaaaacagatataacccttaaaaatttaaacgaactttttcctccggatttttccgaggacgagaaggctcaggcgaaaaccctgttccttaaacatctttccgtggaagcccatcgcttttacggcggcaaaatgcagactgttcccaagagcggagtctacgggttcaactggtttaacgtatggtatacacccggggtttcaaaaatttccacttccatacgggacgaccaggattcttcttttgccttttccaaccggggaaaccttgtggctgtggtttccgattctaccagggttctgggcgacggggactgtacgccgccgggaggcctgggcgtgatggaaggcaaggcaatgctgatgaagtatttgggcggtgttgacgcggtgtcactgtgcgttgattcccgggacgcgaacggtaaaaacaacccccaaaagatcattgactttgtgaaaatgctgcaacactcctttggagccgtgaatctggaagacataagccagcccaactgcttcaaagttctggatgatctgcgggaggcctgcgacattccggtctggcatgacgatgcccagggaaccgcctgcgtcaccctggccggtctcttaaacgcgctgaaactcgcggggaagaaactcagcgacgcgaaaatcgttcttttgggcgcgggagcttccaatactacggttgccagactcatcctggcggacggcggagatccggctaaaatgacagtctttgattccagaggcggcctgcaccggggccgggacgacattaaaagcgatacgcgaaactaccgcaaatgggagatctgcgaagcgaccaatcccgaacggataaacaccatagaagaggcttaa

SEQ ID NO: 18436 - protein, 290 aa, Unknown
  Obtained from environmental sample
  DOMAIN (194)...(289): Malic enzyme, NAD binding domain
  misc_feature (1)..(290): Xaa is any amino acid
MKTDITLKNLNELFPPDFSEDEKAQAKTLFLKHLSVEAHRFYGGKMQTVPKSGVYGFNWFNVWYTPGVSKISTSIRDDQDSSFAFSNRGNLVAVVSDSTRVLGDGDCTPPGGLGVMEGKAMLMKYLGGVDAVSLCVDSRDANGKNNPQKIIDFVKMLQHSFGAVNLEDISQPNCFKVLDDLREACDIPVWHDDAQGTACVTLAGLLNALKLAGKKLSDAKIVLLGAGASNTTVARLILADGGDPAKMTVFDSRGGLHRGRDDIKSDTRNYRKWEICEATNPERINTIEEA

SEQ ID NO: 18437 - DNA, 627 bp, Unknown
  Obtained from environmental sample
  misc_feature (1)..(627): n is a, c, g, or t
atgtcgtcccggccccggtgcaggccgcctctggaatcaaagactgtcattttagccggatctccgccgtccgccaggatgagtctggcaaccgtagtattggaagctcccgcgcccaaaagaacgattttcgcgtcgctgagtttcttccccgcgagtttcagcgcgtttaagagaccggccagggtgacgcaggcggttccctgggcatcgtcatgccagaccggaatgtcgcaggcctcccgcagatcatccagaactttgaagcagttgggctggcttatgtcttccagattcacggctccaaaggagtgttgcagcattttcacaaagtcaatgatcttttgggggttgtttttaccgttcgcgtcccgggaatcaacgcacagtgacaccgcgtcaacaccgcccaaatacttcatcagcattgccttgccttccatcacgcccaggcctcccggcggcgtacagtccccgtcgcccagaaccctggtagaatcggaaaccacagccacaaggtttccccggttggaaaaggcaaaagaagaatcctggtcgtcccgtatggaagtggaaatttttgaaaccccgggtgtataccatacgttaaaccagttgaacccgtag

SEQ ID NO: 18438 - protein, 208 aa, Unknown
  Obtained from environmental sample
  misc_feature (1)..(208): Xaa is any amino acid
MSSRPRCRPPLESKTVILAGSPPSARMSLATVVLEAPAPKRTIFASLSFFPASFSAFKRPARVTQAVPWASSCQTGMSQASRRSSRTLKQLGWLMSSRFTAPKECCSIFTKSMIFWGLFLPFASRESTHSDTASTPPKYFISIALPSITPRPPGGVQSPSPRTLVESETTATRFPRLEKAKEESWSSRMEVEIFETPGVYHTLNQLNP

SEQ ID NO: 18439 - DNA, 825 bp, Unknown
  Obtained from environmental sample
  misc_feature (1)..(825): n is a, c, g, or t
atggccgggcttttgggggtgagccgcaacgcctattaccaatgggcgcgcaacggggtgtcgcggcggcacaaggcagccgacgcagaactggtacgccttattcgggaaatagcggccaggcatcaccgccggtacggcagcccgcgggtacggcgggaactgcgcgatgtctacgggaaacgggtcagtttgaaaaaagtagcccgtctgatgcgtgaaaacggcctgaacgcacgcaggcgcagaacgtttatcaggacgaccgactcaaaccatacctttgcggtctgtgaaaacatactcaaccgtgaatttcatgctgaaaaaggcgggcggaaatgggtttcagacattacgtacttgcgtacggtaaacggctgggtgtacctgaccgtggtgcttgacctgtacgaccggaaggtcattggctgggcgctcagtgccggcatggaggcggctgacactgccgtcgccgctttggaaatggcggtaagaaaccggaggcctggggatgggctgatattccattcggacaggggtgtccagtattgcgcccaatcctttcgctgtgcgttacgcgaaaagtgtccttcggttcgtcagagcatgagccgcaagggtaactgctgggacaacgcatgcgccgaatcatttttcaaaacgctgaagagggaattggaaacgctggacgggaagcatactgaggccgatgtcaggcaatcggtgtttttctacattgaggcgtattacaatcgtatccgtatgcattcggtacttgactatgttgcgcctaatgtgttttactcgaggaaagtcgcttaa

SEQ ID NO: 18440 - protein, 274 aa, Unknown
  Obtained from environmental sample
  DOMAIN (107)...(270): Integrase core domain
  misc_feature (1)..(274): Xaa is any amino acid
MAGLLGVSRNAYYQWARNGVSRRHKAADAELVRLIREIAARHHRRYGSPRVRRELRDVYGKRVSLKKVARLMRENGLNARRRRTFIRTTDSNHTFAVCENILNREFHAEKGGRKWVSDITYLRTVNGWVYLTVVLDLYDRKVIGWALSAGMEAADTAVAALEMAVRNRRPGDGLIFHSDRGVQYCAQSFRCALREKCPSVRQSMSRKGNCWDNACAESFFKTLKRELETLDGKHTEADVRQSVFFYIEAYYNRIRMHSVLDYVAPNVFYSRKVA

SEQ ID NO: 18441 - DNA, 846 bp, Unknown
  Obtained from environmental sample
  misc_feature (1)..(846): n is a, c, g, or t
gtgatggtaagcggcacggtgcaggaggaggactgcgatggcctgtgctgggaatacattataaaggaagaaaatatcaaacctgaattcgtggtgatcaccgagccgaccgacggcaacatttatcgggggcagaggggccgcatggagatacgcgtcgaggtgaaggggatttcctgccacggttccgcgcctgaacgcggcgacaacgcgatctataaaatgggagagattatcgccgaggtcaaggccctgaacaaaaagctgaaaaaagacaagtttctcggcaaggggactctggcggtttcgcaaatttatttcagctcgccctcccgctgcgccgtcgccgacatgtgcgccatttccattgaccgccgcctgaccatgggcgaaacctacaaaagcgccctcgcggaaatcgccgccctgcctaaggtcaaagagtacaaggccaaagttaccatgtacaagtacgatctgcccagttacaccggcgtagtttatcccatcgactgttacttcccgacatgggtcataccggaagacgccaaaccggcaaaggcgatggtaaaagcctataagggaatgttcggcaagccaaaggtggacaagtggactttttcaactaacggcgtttcgatcatggggcggaacaaaatcccctgcataggtttcggccccggcaaggaagagcaggcccacgctcccaatgaaaagacctggaaagccgacctcgtccgctgcgccgccgtatacgccgcattaccgagtatttacacgggcgaagagttgaacgagaaaaagagtaaagctaagaaagcaaagagcaaaaagaatagggaatag

SEQ ID NO: 18442 - protein, 281 aa, Unknown
  Obtained from environmental sample
  DOMAIN (43)...(152): Peptidase dimerisation domain
  misc_feature (1)..(281): Xaa is any amino acid
MMVSGTVQEEDCDGLCWEYIIKEENIKPEFVVITEPTDGNIYRGQRGRMEIRVEVKGISCHGSAPERGDNAIYKMGEIIAEVKALNKKLKKDKFLGKGTLAVSQIYFSSPSRCAVADMCAISIDRRLTMGETYKSALAEIAALPKVKEYKAKVTMYKYDLPSYTGVVYPIDCYFPTWVIPEDAKPAKAMVKAYKGMFGKPKVDKWTFSTNGVSIMGRNKIPCIGFGPGKEEQAHAPNEKTWKADLVRCAAVYAALPSIYTGEELNEKKSKAKKAKSKKNRE

SEQ ID NO: 18443 - DNA, 585 bp, Unknown
  Obtained from environmental sample
  misc_feature (1)..(585): n is a, c, g, or t
atgtccagtattacaattgataaagttaccaaacacttcgaagactatgtgaaagtaataaaggaattcaacgatgtcatacacgacaaggaatttgtaacactactggggccctcgggctgcggaaagaccaccatgctgcgcatgatcgcgggttttgaaaagcccagttcaggcgagatcagaattgatgatacggtagtgagttctgccaaaaatttcgtgccgccggaaaagcgtggtattggcatggtgtttcagtcctacgcggtctggccccacatgactgtctttgaaaatgtggcctacccgctcaaaatagcaaaacgctcaaaagccgaaataaaaaccaaagttgaaaaaatacttgaaaccgtgcatcttgcccaatacgcggagaggataccgtcccagctttcaggcgggcagcaacagcgggttgctctgggccgggccctggtttgtgagcccaggctgcttcttttggacgaacccctttccaatctggacgctaaactccgggaaagcatgcgtttgaaatcaaggatttcagaaaaacttcggcataaccctcggccgatctga

SEQ ID NO: 18444 - protein, 194 aa, Unknown
  Obtained from environmental sample
  DOMAIN (30)...(192): ABC transporter
  misc_feature (1)..(194): Xaa is any amino acid
MSSITIDKVTKHFEDYVKVIKEFNDVIHDKEFVTLLGPSGCGKTTMLRMIAGFEKPSSGEIRIDDTVVSSAKNFVPPEKRGIGMVFQSYAVWPHMTVFENVAYPLKIAKRSKAEIKTKVEKILETVHLAQYAERIPSQLSGGQQQRVALGRALVCEPRLLLLDEPLSNLDAKLRESMRLKSRISEKLRHNPRPI

SEQ ID NO: 18445 - DNA, 855 bp, Unknown
  Obtained from environmental sample
  misc_feature (1)..(855): n is a, c, g, or t
atgacggcgagcaccatcgcgggcgttatcatgcgggacatttatacagtaaaactcaaagacgcgcttaaaaaggctaacgcggcaagcaaagcgaaaagcgaattcctttccaacatgagtcacgagatgcggacgcctttaaacgcgataaccggcatgacgacaatcggcaggaacgcgaaggatttggaacgcaaggactacgcgctggacaagattgaagccgcgtcaacgcacctgctcggcgtaatcaacgacgtactggacatgtcaaaaatcgaagcgaatatgcttgaactgtcgccgattgaatttgattttgaaaagatgcttcaaaaggtagtatcggtggtaaatttccgcgtggacgaaaaacatcaaaaacttgttgtacaccttgacaggaaaatcccgaaaaccctgatagccgacgatcagcgtcttgcccaggttgttacaaatcttttgagcaacgcggttaagtttacgccggaagaaggcgtaatcacccttgaaacgctttttattggggaagaaaaaggtttttgcaccgtacaagtttccgtaactgacaccggaatcgggataaacagggaacagcaaaaacgcctgtttaactcctttcaacaggcggagagcagcacgacgcgcaaatacggcggtacggggcttgggcttgcgatctcaaaaagcattgtagaactgatgggcggcaaaatttgggttaaatccgaatccgaaaaaggctcaacctttgcgtttacaattaaagcgcggcgcggcatgacaaaagaaaaaagcaaacttttgtctccggacgtgaatttaagcaatatccgcgttatggtgtag

SEQ ID NO: 18446 - protein, 284 aa, Unknown
  Obtained from environmental sample
  DOMAIN (32)...(97): His Kinase A (phosphoacceptor) domain
  misc_feature (1)..(284): Xaa is any amino acid
MTASTIAGVIMRDIYTVKLKDALKKANAASKAKSEFLSNMSHEMRTPLNAITGMTTIGRNAKDLERKDYALDKIEAASTHLLGVINDVLDMSKIEANMLELSPIEFDFEKMLQKVVSVVNFRVDEKHQKLVVHLDRKIPKTLIADDQRLAQVVTNLLSNAVKFTPEEGVITLETLFIGEEKGFCTVQVSVTDTGIGINREQQKRLFNSFQQAESSTTRKYGGTGLGLAISKSIVELMGGKIWVKSESEKGSTFAFTIKARRGMTKEKSKLLSPDVNLSNIRVMV

SEQ ID NO: 18447 - DNA, 726 bp, Unknown
  Obtained from environmental sample
  misc_feature (1)..(726): n is a, c, g, or t
gtgttcggcgatttcctcgccggcgctgccgcagcggacagggccgccctggacaataacatccgcaaaaacgccacgcttcttgacgcccttatcggcgtgtgggagaggaacttccttggttatccttataccgctatacttccctacagccaggcgctctcccgctttcccgcgcaccttcagcagctcgacatggagtccaacggaaagcgggtgaaccgcgacgggaagccaatcgcttactccacagggcctgtggtttttggggagcctggcacaaacggccagcactccttttaccagctccttcatcaggggacggacatcgttcctcttcaatttattggttttagggaaagccaacgcaaagacgacggcgtaatagacggctccacgagccaggccaagcttaaggcgaaccttgccgcccagattaccgctttcgcaaacggaaaaagcgacagcaacggcagcaaggatttccccggcgggcggccttccagcttaatttacggggaaaggcttacgccaagaaccctcggtgcgctgcttgcccattacgagaacaaggtcatgttccagggcttcctctggaacgtgaacagtttcgatcaggaaggcgtccagctcggcaaggttctggcaaaaaagatactcaccaaaacggaagcgggatcgggcgataaggtgctggatgcgtacagcgggctgttggggctgtag

SEQ ID NO: 18448 - protein, 241 aa, Unknown
  Obtained from environmental sample
  DOMAIN (1)...(239): Phosphoglucose isomerase
  misc_feature (1)..(241): Xaa is any amino acid
MFGDFLAGAAAADRAALDNNIRKNATLLDALIGVWERNFLGYPYTAILPYSQALSRFPAHLQQLDMESNGKRVNRDGKPIAYSTGPVVFGEPGTNGQHSFYQLLHQGTDIVPLQFIGFRESQRKDDGVIDGSTSQAKLKANLAAQITAFANGKSDSNGSKDFPGGRPSSLIYGERLTPRTLGALLAHYENKVMFQGFLWNVNSFDQEGVQLGKVLAKKILTKTEAGSGDKVLDAYSGLLGL

SEQ ID NO: 18449 - DNA, 744 bp, Unknown
  Obtained from environmental sample
  misc_feature (1)..(744): n is a, c, g, or t
ttggcttgggcgtatgcacgctaccagtttaaaaattatcaaggcattcaggtttcttgcaaagaagttatggagagaatgaggagcagggggttgttgaatttgcattggctgcctcttggcatagattctggtctatttaatccagcttgcaaagacgatgccctcgttgaggaattgaaggcgggcaattcaaacagattaacaatgttttttccgcatcgcttttgcaaggaaaagggagtgtcgcttttgctggatgcttacccgattgtttgcaaggagttgggcgcagagcctgcgcttgtttttgttggaaccggcaacagaattcgcctcgttgaggaagcggcaaaaaaatacgaacacgtgaaatatgcggggtttatcaaaaagcaagaggagatgacgaggtggatagcgagctgcgaaatgggttttgctcttagtggctgggaaacttttggtttttccattctagaggcgatgtcttgcgggcagtgtttgattggggcaaacaccggagcggcggcggagcatattagagaatccggtggcgggattattttgccggaaatgacacccaaagcacttgccaaggcgatttgcgaaactgcggaagacaaggagaaaatgcgagaaatgggaaaaaacggcagagcttatgccgagcgtttttcatgggacgcttgttttgagcggcagagggagttttataaatcaacaagccagggacaaagctaa

SEQ ID NO: 18450 - protein, 247 aa, Unknown
  Obtained from environmental sample
  DOMAIN (54)...(222): Glycosyl transferases group 1
  misc_feature (1)..(247): Xaa is any amino acid
MAWAYARYQFKNYQGIQVSCKEVMERMRSRGLLNLHWLPLGIDSGLFNPACKDDALVEELKAGNSNRLTMFFPHRFCKEKGVSLLLDAYPIVCKELGAEPALVFVGTGNRIRLVEEAAKKYEHVKYAGFIKKQEEMTRWIASCEMGFALSGWETFGFSILEAMSCGQCLIGANTGAAAEHIRESGGGIILPEMTPKALAKAICETAEDKEKMREMGKNGRAYAERFSWDACFERQREFYKSTSQGQS

SEQ ID NO: 18451 - DNA, 627 bp, Unknown
  Obtained from environmental sample
  misc_feature (1)..(627): n is a, c, g, or t
ttgccccaaacgaatagcgtttctccagaaatgtgctctcgcttggattggcgtggctgggtatcaaatttgctaacttcacaaataatgagtttttccccctcaatccaggaaaaagaaaaagaaattgcagaattagagcaattgttagccgacaaaaaacgccagcttgaagaaataaaaatatccacagcaacaccaacgcaggaacagataaacaaccattcctccccagaaaacaaaatcaccctatttcgctcaatgttcaaaggcagagaagacgtctatgccaaacgcttcgaaagcaagaaaaccggaaaatccggctaccagcctgtgtgccgaaacgaatgggtaaaaggagtgtgcaaaaaaccaaaggcaagctgcggcaattgcaacgggcgttcatttgaatcggtaaccgatggagtgattagaaaccacctttccggtgccatcgtcatgggagtctatcccttattgcaaaacgaaacctgccattttctagcggtggatttcgacaaggaggcgtggaaagaagatgccaaagcctttgccgaaacttgcaagctggaagggataaccaattctatcaaacgaacaaaatcgcgggaagcatattga

SEQ ID NO: 18452 - protein, 208 aa, Unknown
  Obtained from environmental sample
  misc_feature (1)..(208): Xaa is any amino acid
MPQTNSVSPEMCSRLDWRGWVSNLLTSQIMSFSPSIQEKEKEIAELEQLLADKKRQLEEIKISTATPTQEQINNHSSPENKITLFRSMFKGREDVYAKRFESKKTGKSGYQPVCRNEWVKGVCKKPKASCGNCNGRSFESVTDGVIRNHLSGAIVMGVYPLLQNETCHFLAVDFDKEAWKEDAKAFAETCKLEGITNSIKRTKSREAY

SEQ ID NO: 18453 - DNA, 483 bp, Unknown
  Obtained from environmental sample
  misc_feature (1)..(483): n is a, c, g, or t
atgactttatccggtatttgggaattaaaaaaaatagccatgcgtaaccttgcgcggcacaaggtaaaaacgattcttacctcggcggcaattatggtaagcgtagccgtgtttatttttataaacggctggctaagaggaatgataattgactcacgaaggaatattgtaaattatgagatgggcgcggctaaactgcaaacaaaactttactttgaaaaaaaggatgagatgccaagctatgaaaactttaccgattgggaaatatatcataacgcgcttgattcggaagggtatgtaagcgccccgcgttatgtgttttcaggtacgctgtcttcagtatccggttcagcgcccatagttttttacggggtagaccctgcatttgaggctgaaacaatgcgttatgtcccctatgtggattttggccgttatgtgcaaaacnggggattttggaatcgcgcttggaacatttgccgctga

SEQ ID NO: 18454 - protein, 160 aa, Unknown
  Obtained from environmental sample
  misc_feature (1)..(160): Xaa is any amino acid
MTLSGIWELKKIAMRNLARHKVKTILTSAAIMVSVAVFIFINGWLRGMIIDSRRNIVNYEMGAAKLQTKLYFEKKDEMPSYENFTDWEIYHNALDSEGYVSAPRYVFSGTLSSVSGSAPIVFYGVDPAFEAETMRYVPYVDFGRYVQNXGFWNRAWNICR

SEQ ID NO: 18455 - DNA, 750 bp, Unknown
  Obtained from environmental sample
  misc_feature (1)..(750): n is a, c, g, or t
gtgaaccagacgcgcntaaaagaatcgctcgacgaagttgtggagagctgcgtcaaccgcgtgggcgtggacgtgaacttagcgtcggaggagctgctgaaatacgtctccggcctgaacaggctcacggcggcgaacatcgttgactataggaatcggcacggggcgttttcaagccgcgccgacctaaagaaggtgccgggcctcggcgataaaaaatttcagatgtcagccggcttcctgcggatacccggagcccaaaatccactggacgactcggccgtccacccggaatcttatggcatagtgaaaaagatggccggacggctaaacgtggatataggcggcctcatcggaaacaccgcgctgcttaagagcatcaacaaaaacgacttcgtgacggacgaagccggccttccaacgataacagacatagtagaggagctggaaaaaccaggccgcgacccgagagaagagttcaggtacgcgaaattcgacgaaaacgtgacggacatagcgcacctgcgcgagggaatgatcttggagggtgtggtgacgaacgtggccaacttcggcgccttcgtagacataggagtccaccaagacggcctcgtccacatatcggaactatcaaaaacctacgtctcagacccaaagaagatcgtcaaagccggtcaagcggtgcgcgtaaaagtcctgaaggccgacgcggagacaaaacgggtgtcgctgtcaatgaagctggggtga

SEQ ID NO: 18456 - protein, 249 aa, Unknown
  Obtained from environmental sample
  DOMAIN (174)...(247): S1 RNA binding domain
  misc_feature (1)..(249): Xaa is any amino acid
MNQTRXKESLDEVVESCVNRVGVDVNLASEELLKYVSGLNRLTAANIVDYRNRHGAFSSRADLKKVPGLGDKKFQMSAGFLRIPGAQNPLDDSAVHPESYGIVKKMAGRLNVDIGGLIGNTALLKSINKNDFVTDEAGLPTITDIVEELEKPGRDPREEFRYAKFDENVTDIAHLREGMILEGVVTNVANFGAFVDIGVHQDGLVHISELSKTYVSDPKKIVKAGQAVRVKVLKADAETKRVSLSMKLG

SEQ ID NO: 18457 - DNA, 759 bp, Unknown
  Obtained from environmental sample
  misc_feature (1)..(759): n is a, c, g, or t
atgatccccgcttcgggagagaccgccgcagaaaacgcgggccagtacagcgcggtagattatgacaacaacggccccattgtcgcttattatgacgggagcaatgacaccgtgcgcgtcgccttgggaaccgggaacacgaactccggctggacacggcgttatttgctgcccaacggcaacgccctgtaccgcggctccggcaagtatatcagcatcaaggtggacaaaggcaatggcatacacctttctttctacaacagcgtctataataccgtcgtgtattactatgccgcgggcagaaataatattggctccgcccccaacggtaccacggttaaatgctacactattgacaatgttgtaaccggcggcacatggacggacatttcggtggacaacaacggcaacccctggattgtgtacggcgacagctcccgcaccggcagctacgacggcgtccgcatggcataccagagcagcgctcaaaccggcatacggttcaccggagagctgttctgtccggtcacgggcgcggacattacaggctgggaagccctgaccatgccggcgaactacacggtaggcaacgaccgcctcaacatagaggcatggccgccgaccgtccgcggcggctcgctcggtaccgcccccggctggaacgccgccatcggctataccagcgacctgttccgcgtagggtatttcttctatccggcgtggaaggggtatggcagcaatacagtgaatgcgccgtag

SEQ ID NO: 18458 - protein, 252 aa, Unknown
  Obtained from environmental sample
  misc_feature (1)..(252): Xaa is any amino acid
MIPASGETAAENAGQYSAVDYDNNGPIVAYYDGSNDTVRVALGTGNTNSGWTRRYLLPNGNALYRGSGKYISIKVDKGNGIHLSFYNSVYNTVVYYYAAGRNNIGSAPNGTTVKCYTIDNVVTGGTWTDISVDNNGNPWIVYGDSSRTGSYDGVRMAYQSSAQTGIRFTGELFCPVTGADITGWEALTMPANYTVGNDRLNIEAWPPTVRGGSLGTAPGWNAAIGYTSDLFRVGYFFYPAWKGYGSNTVNAP

SEQ ID NO: 18459 - DNA, 855 bp, Unknown
  Obtained from environmental sample
  misc_feature (1)..(855): n is a, c, g, or t
atgtctatatgcgctcaatctatttccataggaaatgacggttttaataaggacgccaagcgccggattatgcactactcactactttctgaaaagattgaagaaataaaagccanctgttcccaggacaaccccaaaccggaatatcctattgataaggagcgggcttttcttgacgttcttggacgcggggacaatgaatcggcaaagcaaatactaaacgagatcctggccatcctaattttcacaaaccccaatcagttcaaatatattcaatacagagtgattgaattggcagtccttatctcccgtcttggcgctaattttagctttaccatgaacgccatgctggaaaacggaaacctgtacacaaaactaatcctggaaacaaagaacgcggaagaactcgccgatgccatgtaccgcatcaccgatgacatggcggagcagatacacggcctgcagggaatacagcatgtgtcggtgcttaaaaaggcggaagattttattcttgaaaatttatcgaggaaaatcagcctgaaagaaatttccagcgcggcgggattctcatccccgtactttagcaccctgttcaaggaagagatgggcgaaaacttttcaagctacctgaaccggttaagggtaaaaaaagcgtcagcgctgctaaccgacacaaatattagcttgggcagaatagccgcgtcatgcggtttcaaggatcaaagctggttctcaaaaatattcaagcactataccggaatatgccccggaaaataccggagtcaaggcggaaaaataacgccgaaaattcctgagaccagatttgcggatgatttcccggttgaaagagtgtaa

SEQ ID NO: 18460 - protein, 284 aa, Unknown
  Obtained from environmental sample
  DOMAIN (217)...(261): Bacterial regulatory helix-turn-helix proteins, AraC family
  misc_feature (1)..(284): Xaa is any amino acid
MSICAQSISIGNDGFNKDAKRRIMHYSLLSEKIEEIKAXCSQDNPKPEYPIDKERAFLDVLGRGDNESAKQILNEILAILIFTNPNQFKYIQYRVIELAVLISRLGANFSFTMNAMLENGNLYTKLILETKNAEELADAMYRITDDMAEQIHGLQGIQHVSVLKKAEDFILENLSRKISLKEISSAAGFSSPYFSTLFKEEMGENFSSYLNRLRVKKASALLTDTNISLGRIAASCGFKDQSWFSKIFKHYTGICPGKYRSQGGKITPKIPETRFADDFPVERV

SEQ ID NO: 18461 - DNA, 858 bp, Unknown
  Obtained from environmental sample
  misc_feature (1)..(858): n is a, c, g, or t
atgatcagatggccgaaattgactggctttgaagattttttaaatgatgtggctccaggtttggatttgggtagtattcaacaaaaacttgcggagatacaacaaaaagtcacaaacaaagatgtgtttgcttcgacgcctgctgcggagacctccaccgataacaacgacacaaacggcggcacaaagacatctgttatcaccattgacacagggtcaaatgcaaaaaacatttttttccctacaaaggctggaatagcgctgacttatgcgcagaaagatgccaaaggaaataccgagggctatgcggtgcacaccatcaaagatgttgtaggctcgggtaaaaacatgaccatcacctacgggatgaccactctggataaaaaccgtaacccccccaagggttcacccggtgaattgaccttccaggtggttataaaagacggcgttttgatcatggatattaaccagatgattccggctcaagtgagagagcagggtgccttaaagatggacattagaggctcaccgatggagctgccaggtaacctgcagcccggtcaatcgctcaagccttccgaggtaaccatagcaatagacgttggcattatgaagatgaacaccgtggtaaagaccgagggaaaatgcctggccattgaagaagtaaaagtcccggcagggacattcaaatgccacaaaatcacccaaaaaattaccaccgccgccatgatcattaccacaactcagaccatggtttcgtggtatgcgcccaatatcggcaatgtaaaaagcgaaacctatgacgacaagaacaagctgatttccggttcggaaatggtggagataaaaggcaagtaa

SEQ ID NO: 18462 - protein, 285 aa, Unknown
  Obtained from environmental sample
  misc_feature (1)..(285): Xaa is any amino acid
MIRWPKLTGFEDFLNDVAPGLDLGSIQQKLAEIQQKVTNKDVFASTPAAETSTDNNDTNGGTKTSVITIDTGSNAKNIFFPTKAGIALTYAQKDAKGNTEGYAVHTIKDVVGSGKNMTITYGMTTLDKNRNPPKGSPGELTFQVVIKDGVLIMDINQMIPAQVREQGALKMDIRGSPMELPGNLQPGQSLKPSEVTIAIDVGIMKMNTVVKTEGKCLAIEEVKVPAGTFKCHKITQKITTAAMIITTTQTMVSWYAPNIGNVKSETYDDKNKLISGSEMVEIKGK

SEQ ID NO: 18463 - DNA, 735 bp, Unknown
  Obtained from environmental sample
  misc_feature (1)..(735): n is a, c, g, or t
ttgtgggtcgcaagccaaatacaactcggcctccttccgccgaaactgccgcatttcgacaatatgcggatagatatgtcctacaagccaatcgccgacgtgggcggcgacttgtacgacttcatacgtatagacgatacacacttgggagtgttcataggcgacgcctccgggcacgggcttgcgtcgtctcttatcggcaccctctccaagatgtcgctctacaatcatacgcacgcgtggctgcccaccgcggaactgctcggactgatgaacaccgacctcaaggcgcacatccacacaagccactatctgaccgccttctggtgcgtcttcgatttcgagagcaacaaactgacatacagcagggccgggcaccccgctcaaatcgtgctgcgcaaagacgggacgctccacttcctctccggcgacggaatattcctagggatcaccgacgacgcctcctacgaacaaaaggagttcgtattcgaggacggagacagattcttctggttcacagacggtatctacgacgtattcaaggagaacggcagcgacaatgacgacgacnaggagtttcttgggtacgacaagttcgctgaactcataaaactgacggtaaaactaccgttcaacgcgatcatcgggtcgataaagaagagcctagtcgaatttatgcacaaggacgactacacgttgatcgtcgcggagatcggcaatgcgcaagagcgttag

SEQ ID NO: 18464 - protein, 244 aa, Unknown
  Obtained from environmental sample
  DOMAIN (45)...(239): Stage II sporulation protein E (SpoIIE)
  misc_feature (1)..(244): Xaa is any amino acid
MWVASQIQLGLLPPKLPHFDNMRIDMSYKPIADVGGDLYDFIRIDDTHLGVFIGDASGHGLASSLIGTLSKMSLYNHTHAWLPTAELLGLMNTDLKAHIHTSHYLTAFWCVFDFESNKLTYSRAGHPAQIVLRKDGTLHFLSGDGIFLGITDDASYEQKEFVFEDGDRFFWFTDGIYDVFKENGSDNDDDXEFLGYDKFAELIKLTVKLPFNAIIGSIKKSLVEFMHKDDYTLIVAEIGNAQER

SEQ ID NO: 18465 - DNA, 765 bp, Unknown
  Obtained from environmental sample
  misc_feature (1)..(765): n is a, c, g, or t
atgggggcggagcttggggtgaaacccggcgaagaaatgaaggcggccctggatatcgcttccgagcttggcattccgtacgctctntgcgacagggaagtacagactaccttgcgaagggcctggagcggttgcgggctttggagcaaaagcaaactcctttcggcgctcctggcaagcgcttttaccaccgaaaagttgagtgccgaggaaatagaaaatctgaaaaaccgcagcgagcttgacggtatgatggaagaacttgcgagctatcttcccgaagttaaagaaacccttatcaacgagcgggatcagtaccttgccgcgaaaatctgggccgccgcgccggcggaagcgaagcgcattgtagctgtggtcggggccgggcatatgcagggcataaaagcctggatggaaaaaatagcggcgggggaaaaagacgtggatgtttcctccttgaataaaatgccgccccgaggctttctttcaaaggcgctgccgttcattattccgttggccattctcgctctttttgtcagcggctttataaggggcggcgcgggggtaagcctctccatgctgcgcacctacattttgtggaacggctcacttgcggctctaggagctatcatcgccctgggccatcctcttgctatactggcggcctttttgttcgcccccattacgacttttacgcctttcatcggagtggggcttttctcgggcgttattcaggtcagccttaaaaagnccccgggtaattga

SEQ ID NO: 18466 - protein, 254 aa, Unknown
  Obtained from environmental sample
  DOMAIN (1)...(147): TraB family
  misc_feature (1)..(254): Xaa is any amino acid
MGAELGVKPGEEMKAALDIASELGIPYALCDREVQTTLRRAWSGCGLWSKSKLLSALLASAFTTEKLSAEEIENLKNRSELDGMMEELASYLPEVKETLINERDQYLAAKIWAAAPAEAKRIVAVVGAGHMQGIKAWMEKIAAGEKDVDVSSLNKMPPRGFLSKALPFIIPLAILALFVSGFIRGGAGVSLSMLRTYILWNGSLAALGAIIALGHPLAILAAFLFAPITTFTPFIGVGLFSGVIQVSLKKXPGN

SEQ ID NO: 18467 - DNA, 828 bp, Unknown
  Obtained from environmental sample
  misc_feature (1)..(828): n is a, c, g, or t
gtgccgcccgcctncgctgggagcgcggccgccgaccgtccggcgccgcataagggcgggctcttttctatcactatcgtcgccgctatgttgaacaacgtgctgcctatccgtnccggggaggcggcgcgggccgccctgctctggaagcgcaacggctttcccgtttcgatctgcataggctcgctcctcatagagcgcgccctcgatatcatcgcctatttgtcgttcctttttgttcctccattgttatcgccggaaattttctctaagctgcgtgccttccatccggccgtgacggcggtgatatggctctccgtcgcggcgtttgccgtattggtcgggctgtttttcctatacgctctaatgccgaggatattcaggggcgcgtctgaacggatagttaggcggctgccgcagaaaatcaacacgggggcgcggagaataggcgcggagatcgagtccaatttaaactggacggcctcccctggcaaagccgcctgcgtggcggcgctgaccttcgcgacggcgctctgctactcgtctatgctgctgattttagtatccgatattacgcttaaaggttttatgaacagcatattctcccaggctttcgccgccttcggcgccgccatcccgctggccccgggaagcgtggggacgctgcacgccgtgctgttgcagggaatgacgataaccggttgccccgcgccgaaagcaagggcggtcatagtggtttaccacgctgtgcagtacgttatgattacgggggttgggttgatgtgtatgcttaggttgaagttgaaagataaaggtcaaatgggttga

SEQ ID NO: 18468 - protein, 275 aa, Unknown
  Obtained from environmental sample
  DOMAIN (31)...(270): Uncharacterised protein family (UPF0104)
  misc_feature (1)..(275): Xaa is any amino acid
MPPAXAGSAAADRPAPHKGGLFSITIVAAMLNNVLPIRXGEAARAALLWKRNGFPVSICIGSLLIERALDIIAYLSFLFVPPLLSPEIFSKLRAFHPAVTAVIWLSVAAFAVLVGLFFLYALMPRIFRGASERIVRRLPQKINTGARRIGAEIESNLNWTASPGKAACVAALTFATALCYSSMLLILVSDITLKGFMNSIFSQAFAAFGAAIPLAPGSVGTLHAVLLQGMTITGCPAPKARAVIVVYHAVQYVMITGVGLMCMLRLKLKDKGQMG

SEQ ID NO: 18469 - DNA, 903 bp, Unknown
  Obtained from environmental sample
  misc_feature (1)..(903): n is a, c, g, or t
ttggattttccgccaaaccaccctgcaatagcacaagctctttacgagaggcacaagctcaccacatatcccagaaccgatagcaaattcttgccagacgattatgttgcaaccgtgaaaagaacaatgggagccttaactggaggcattgcaagacacgcagaatttgctctaaaaaacaattatgttcacaaagacccgcgaattttcaacaccgcgaaggtaagcgaccaccacgctataatcccaaccggactcgcaccctcggctttaagcgaggcggagaataaaattttcaacctgatatgccaaagatttgttgccgttttttaccccgtggctgaatacttgcacacaacacgcataacctccgttgagggcgaaaccttcgtttccgagggcaaaattctaaaagaaccgggctggaaagccgtgtatggcaaagagagcgaagaagacgaagacattatgccaaagctatcttctccagatgcaaagcccattgcaaaagaagtggaaatggcagaagatgccacaaagccccctgcgcgctacacggaaagttcgttgctttctgcaatggaaggcgcaggcaagctgatagaagacgaggatttgcgcgatgccatgaaggaacgcggtcttggaactcccgcaaccagagccgcaaccattgaaaaactcatttccgacaaatacatagtgagggaaggcaaagaacttttgccaacaggaaaggcttttgatttgataaacatggctgtttcccatgcaatagaaaacctaacaagccccgaactcacgggcgaatggggatataagctcggtttgatggaaaaggcaaagtttccagaaacagctttatgcacgacattgaaagctaaacaagcctatggtggataa

SEQ ID NO: 18470 - protein, 300 aa, Unknown
  Obtained from environmental sample
  DOMAIN (5)...(251): DNA topoisomerase
  misc_feature (1)..(300): Xaa is any amino acid
MDFPPNHPAIAQALYERHKLTTYPRTDSKFLPDDYVATVKRTMGALTGGIARHAEFALKNNYVHKDPRIFNTAKVSDHHAIIPTGLAPSALSEAENKIFNLICQRFVAVFYPVAEYLHTTRITSVEGETFVSEGKILKEPGWKAVYGKESEEDEDIMPKLSSPDAKPIAKEVEMAEDATKPPARYTESSLLSAMEGAGKLIEDEDLRDAMKERGLGTPATRAATIEKLISDKYIVREGKELLPTGKAFDLINMAVSHAIENLTSPELTGEWGYKLGLMEKAKFPETALCTTLKAKQAYGG

SEQ ID NO: 18471 - DNA, 534 bp, Unknown
  Obtained from environmental sample
  misc_feature (1)..(534): n is a, c, g, or t
atggcgagcaaagcggttgagacaagatttactgctgcggacaaagtaacccctgcttttaaggcgatggaaggcggcgcgagcaaattctccgtcgccgccaaagccgccttccgctccgtagtccccgaaacatcgaaactcggcagggcgttaagcgacataactaaaggcgttgtgctgggaaacctcataaccaaaggaatatctatagcggcgcggcagataagaaacatcgccgcttcaatacctgaatttgccgcaagagcagacgagataggaaaaacagcggaaaaattgggattgactactgacgctctacaacgataccgttatgcggctgcacacgccaacgtggaaagttcaacattaaacaccgctttccagacaatggcaaaaggtataggctcaggaacactttacaaatctcttgaaaaaattgacgcaggtttagcggcacaggtaaaacaagcgaaaacggtggacgaagcgtttaggatgataacaggagcggcaaacattactccgatgtaa

SEQ ID NO: 18472 - protein, 177 aa, Unknown
  Obtained from environmental sample
  misc_feature (1)..(177): Xaa is any amino acid
MASKAVETRFTAADKVTPAFKAMEGGASKFSVAAKAAFRSVVPETSKLGRALSDITKGVVLGNLITKGISIAARQIRNIAASIPEFAARADEIGKTAEKLGLTTDALQRYRYAAAHANVESSTLNTAFQTMAKGIGSGTLYKSLEKIDAGLAAQVKQAKTVDEAFRMITGAANITPM

SEQ ID NO: 18473 - DNA, 543 bp, Unknown
  Obtained from environmental sample
  misc_feature (1)..(543): n is a, c, g, or t
atggcaattttagcgagaaaattacaagaaagtaaaaccaaagctattggcgaactcaaagatacattaaaagccgcaaacgactttatctttacggaataccgaggtcttactgtcgagcagatcacagagttaagaaaacaactgcggacaaagggcgtagtttataaagttgtaaaaaataattacgcgcaaattgtttttaaagagttgtcggatcaggacgtatccaaataccttgtaggacctaccgcggtagcgattaccccgaaggattccaacgaagtagcgaagatactctttgagttcttaaaagaagttccagctttaaaggtaaagggcgcgttactaagcaacgctgtatacgataccgcccaaaccgaggcgttctccaaactgccgggcagactggaacttatttctatgcttatgtcggtaatgaacggtcccgcgcgcggtcttgtttccgcgctcaacgacattccttcaagattggtgcgcacagttaaagctgtcgccgatcaaaaggaaaaagcgggttga

SEQ ID NO: 18474 - protein, 180 aa, Unknown
  Obtained from environmental sample
  DOMAIN (7)...(105): Ribosomal protein L10
  misc_feature (1)..(180): Xaa is any amino acid
MAILARKLQESKTKAIGELKDTLKAANDFIFTEYRGLTVEQITELRKQLRTKGVVYKVVKNNYAQIVFKELSDQDVSKYLVGPTAVAITPKDSNEVAKILFEFLKEVPALKVKGALLSNAVYDTAQTEAFSKLPGRLELISMLMSVMNGPARGLVSALNDIPSRLVRTVKAVADQKEKAG

SEQ ID NO: 18475 - DNA, 462 bp, Unknown
  Obtained from environmental sample
  misc_feature (1)..(462): n is a, c, g, or t
atgggaatttttaattcgataagcgttgcggcgacaggtttaaccgcaaacagaatgaggctcgacgttatcgccaacaacatggctaacgtaaatacgacaagaacgaccgaaggcggtcccttcagacgcagccgcgtagttatgcgccctgttactgaaagtccgttttggcgttctccattccttcccgattccatggacgacggaattggcaggggagtgcgcgttgtggaagttcaaaaggatcttaaaacagagcctcgttatgtttatgatcctacgcaccccgacgcgattctttcaggtcctcgggagggctatgttgaaatgcccaatgtagacgttgttaccgaaatgacggatatgatttcagcttcgcgatcttatgaagcgaacgccgccattattgaaggatcaaaatccatgttccaaagagctttggacataggatcaaaatag

SEQ ID NO: 18476 - protein, 153 aa, Unknown
  Obtained from environmental sample
  DOMAIN (7)...(37): Flagella basal body rod protein
  misc_feature (1)..(153): Xaa is any amino acid
MGIFNSISVAATGLTANRMRLDVIANNMANVNTTRTTEGGPFRRSRVVMRPVTESPFWRSPFLPDSMDDGIGRGVRVVEVQKDLKTEPRYVYDPTHPDAILSGPREGYVEMPNVDVVTEMTDMISASRSYEANAAIIEGSKSMFQRALDIGSK

SEQ ID NO: 18477 - DNA, 519 bp, Unknown
  Obtained from environmental sample
  misc_feature (1)..(519): n is a, c, g, or t
ttgtacaattaccgcggctacgcaagggcggaattggcggcaggcaaggcgtccgaaataaggctcgcaatcgaagattattcaaaggcaatttccattaccgccaattacaccgatgcccttatcaaccgttcgcaggctttactggaaatcggcgaatacaggagggtaatcgacgactgcacccgcattatcgccctagagcccaaaaactcctacgcatggaacaggcgcggcagcgcgtggtacgccctcggagacgacgacaaagcaattaacgacttttccgaggcaataaaaataagaaacaatcacgcctccgcctggcacaaccgcggcaacgcctggtacagcaagggagaccacgaaaaagctctttccgacataacccgctctatctcaataaacccgtcctatgccgaagcctacgccagccgcggcaacatacaccgctcccttggaaacaccgaaagcgccgccgcagacttcgcggaagccaagcgtttaaaacaacgctga

SEQ ID NO: 18478 - protein, 172 aa, Unknown
  Obtained from environmental sample
  DOMAIN (106)...(139): Tetratricopeptide repeat
  misc_feature (1)..(172): Xaa is any amino acid
MYNYRGYARAELAAGKASEIRLAIEDYSKAISITANYTDALINRSQALLEIGEYRRVIDDCTRIIALEPKNSYAWNRRGSAWYALGDDDKAINDFSEAIKIRNNHASAWHNRGNAWYSKGDHEKALSDITRSISINPSYAEAYASRGNIHRSLGNTESAAADFAEAKRLKQR

SEQ ID NO: 18479 - DNA, 525 bp, Unknown
  Obtained from environmental sample
  misc_feature (1)..(525): n is a, c, g, or t
gtgatcgcgaggagcctatcgatcttaaaattgggctatcaggtagggtgcggcttcatggtcggctcgccgggtcaaacgccgaaccatcttgttgacgacctgttgttcataaaagatctgcgcccgcacatggtcggcataggccccttcatcccgcactccgacacgccgctcggcggggagaagcaaggcgatctgcgtctgacgctgaaccttttgtcaatcctgcgactgatgcaacccaacctactcatcccggcgacgaccgctttggggacgatcgatcccacgggacgggaacgcggaattctcgccggcgcgaacgtggtcatgccgaacctgtcgcccgtggaggtgcgcggcaagtatttgctctatgataataaaatctgcaccggcgacgaggctgccgagtgcgtgaactgtatgcggatgagaatcagaagcatagggtacgagcttgcggtgtcgcggggagactttaaagacgcggcagagccttatccttgtccgacaatatag

SEQ ID NO: 18480 - protein, 174 aa, Unknown
  Obtained from environmental sample
  misc_feature (1)..(174): Xaa is any amino acid
MIARSLSILKLGYQVGCGFMVGSPGQTPNHLVDDLLFIKDLRPHMVGIGPFIPHSDTPLGGEKQGDLRLTLNLLSILRLMQPNLLIPATTALGTIDPTGRERGILAGANVVMPNLSPVEVRGKYLLYDNKICTGDEAAECVNCMRMRIRSIGYELAVSRGDFKDAAEPYPCPTI

SEQ ID NO: 18481 - DNA, 363 bp, Unknown
  Obtained from environmental sample
  misc_feature (1)..(363): n is a, c, g, or t
gtgattcgcgggctgcactttcagaagccgccgttcgagcagagtaaactggtgcgcgtgattcgcggttcaatatttgacgtggcggttgacatccgccgcgaatcgtctacttacggtcaatggcttgggtttgagctaagcgagcgcaattttgatatgctattaattccgcgcggtttcgcccacggtttctgtacgcttgaggaggggacggaggtcgtctacaaagtggacaacgtatattctcgcgaacacgatgccgggattatttggaacgatccgtctatcggggtcgactggccgctgaacggagctgagcctatattgtcggacaaggataaggctctgccgcgtctttaa

SEQ ID NO: 18482 - protein, 120 aa, Unknown
  Obtained from environmental sample
  DOMAIN (1)...(116): dTDP-4-dehydrorhamnose 3,5-epimerase
  misc_feature (1)..(120): Xaa is any amino acid
MIRGLHFQKPPFEQSKLVRVIRGSIFDVAVDIRRESSTYGQWLGFELSERNFDMLLIPRGFAHGFCTLEEGTEVVYKVDNVYSREHDAGIIWNDPSIGVDWPLNGAEPILSDKDKALPRL

SEQ ID NO: 18483 - DNA, 912 bp, Unknown
  Obtained from environmental sample
  misc_feature (1)..(912): n is a, c, g, or t
atgatcgccgagantctgcanggcccggcgatcaggatagcaaaggattgtgggttgtataccgtggtagtggacggcagttccacggccccgtgcgtctctatggccgatcaattcgagcagattgaccttaaagacaaggaaggcatcgaagccctggcacgctcgctgcaaaataacggcggcctggcggggattatgactgcgggaacagatttttcagccacggtcgcctgggttgccgaaaaactcgggctgccgggcataccctacgatgcggcgctgaatgcctcggataaggcccgcatgagggcatgcttcaaaaaagcgggactgccttcgccggaatttatcagtattaccgagtcggaactacagggaaaaccgtccctgcctttcccccttgtggtaaaacccgtggacaatatgggggggcggggctgccgacgcgtagacaatatggaagaataccgcgaagcggcggcagaggcgattcatttttcccgttccggaagggctattgtggaagcgtttatggacgggccggaattttccgtggacgcgattgtgtaccacgacgagatcataatttgcggccttgccgaccggcatatttttttccccccttactttattgagatggggcataccatgccgaccgccatcgcgcctgaacaacgggaagcgcttctggagacgttttgcgccggggcgcgagcccttggtttgacaggagacgtgaacgtgggtgcggcaaagggcgacatcaaactgacatcttccggtccaatgatcggcgaaatcgcggcaaggctttcaggcgggtatatgtcgggctggacgtacccgtattcgtccgggaataaaggttgtccgcgctgcgatttttgctggcattggccgcaagcctga

SEQ ID NO: 18484 - protein, 303 aa, Unknown
  Obtained from environmental sample
  DOMAIN (99)...(284): Carbamoyl-phosphate synthase L chain, ATP binding domain
  misc_feature (1)..(303): Xaa is any amino acid
MIAEXLXGPAIRIAKDCGLYTVVVDGSSTAPCVSMADQFEQIDLKDKEGIEALARSLQNNGGLAGIMTAGTDFSATVAWVAEKLGLPGIPYDAALNASDKARMRACFKKAGLPSPEFISITESELQGKPSLPFPLVVKPVDNMGGRGCRRVDNMEEYREAAAEAIHFSRSGRAIVEAFMDGPEFSVDAIVYHDEIIICGLADRHIFFPPYFIEMGHTMPTAIAPEQREALLETFCAGARALGLTGDVNVGAAKGDIKLTSSGPMIGEIAARLSGGYMSGWTYPYSSGNKGCPRCDFCWHWPQA

SEQ ID NO: 18485 - DNA, 648 bp, Unknown
  Obtained from environmental sample
  misc_feature (1)..(648): n is a, c, g, or t
gtgaatatcaacggaaaaatgcaagatatagttgaaaaagatattaccttaaacgcgtcaaagatattaagggatatgctggcaaaggcatatcccgacaagcgcgtgctgatgacccgcgaaagcgacatcaccatgagcttggaggaacgccccctcattgccaacgccgtccctataagaaaaaacgaggcgattatttatatctccatacacgccaattacgtgtctgaccaaagagtcaggggttttgaagtgtggcatctgcccccggaataccggcggactgtgctggacgattcctacttttcagattcgccggaactgcggaaaataatgaacacccttacggaagaggcgttcctggcggaaagcatcaggatcgcccagtcaatcctcgattccatgaaaaccgcgatgggagggagtatgccttcacgcgggcttaaggcggaagagtggtttgtcgtccggcgcagcattatgcccgcggtgcttgtggagcttggctttgtcagcaataaagacgatgccttgctaatgaccaccgacagggacttgcgcagaatggtcgaagcggtgtataaaggaattgcggatttcataacagtctttgagcgttcaggaggattcatcgcttcacgatga

SEQ ID NO: 18486 - protein, 215 aa, Unknown
  Obtained from environmental sample
  DOMAIN (3)...(200): N-acetylmuramoyl-L-alanine amidase
  misc_feature (1)..(215): Xaa is any amino acid
MNINGKMQDIVEKDITLNASKILRDMLAKAYPDKRVLMTRESDITMSLEERPLIANAVPIRKNEAIIYISIHANYVSDQRVRGFEVWHLPPEYRRTVLDDSYFSDSPELRKIMNTLTEEAFLAESIRIAQSILDSMKTAMGGSMPSRGLKAEEWFVVRRSIMPAVLVELGFVSNKDDALLMTTDRDLRRMVEAVYKGIADFITVFERSGGFIASR

SEQ ID NO: 18487 - DNA, 351 bp, Unknown
  Obtained from environmental sample
  misc_feature (1)..(351): n is a, c, g, or t
gtggcaaatgtaaaggaaattctggctcaaaatttgaaaaaacataggaagcggctcggaattacccagcctgaattggcggaaaaagctggtttgtctaccaattatataggcatgattgaagttgcccgaaattttccaaccgctgatgtgctggatcggctggctgcggcattggaaataaaatcgaatgagttgttttctgtgtcggattcccctgaaattgctatggaacaactgcaaatggctattctgggtaaattagaccaaaaaatggttgatatcgatcaagttataaaacgcgctgtgaaagaagccattgaggaaaacgcggacaaaatgtccggctga

SEQ ID NO: 18488 - protein, 116 aa, Unknown
  Obtained from environmental sample
  DOMAIN (12)...(66): Helix-turn-helix
  misc_feature (1)..(116): Xaa is any amino acid
MANVKEILAQNLKKHRKRLGITQPELAEKAGLSTNYIGMIEVARNFPTADVLDRLAAALEIKSNELFSVSDSPEIAMEQLQMAILGKLDQKMVDIDQVIKRAVKEAIEENADKMSG

SEQ ID NO: 18489 - DNA, 744 bp, Unknown
  Obtained from environmental sample
  misc_feature (1)..(744): n is a, c, g, or t
atgcttggcgaagctgtacggcgggggcttattccggctaacccttgtgaaaaagtgaagcggcttaaaaacgataagaaaaaaattgagattctcaaggttgaggaagttcaaaaacttttccccaaaaattataaaaccgtttggggtgataataaactcgcttatgtcgcttgccgtctggcttcggttactggtatgaggattggggaaattctcgggcttcggggtgaatatgtctttgatgattatattcacgtttgcggtcaaagtgggagtggcggcggctataagccatacactaagaccaaacaaaaccgcaatattcccctagttcctgaaataatcgcgctgttgcgggggcttaataacggcaaggggtttgtgttctcaaaggacggcggggctacctcgattacagaatgtactgtccgcttggattattatcaagcattggaaaaaatcgggataagcgaagatgagagggagcgaagggctatcactatacacggctggcggcatttcctgaataccgaattgttaaggcagggtttgtctgtcatgcaggtacagggcgtaactgggcataaatccttgagaatgaccgaattgtataaccatccgggcgaagggcaaaaaagcgatgttatgaaagcgcaagaaaaaattcttgggactaaaaaaactgaaaaggtcgaaaagggtttgaagctggttaaaggtactggacggaaatcagcataa

SEQ ID NO: 18490 - protein, 247 aa, Unknown
  Obtained from environmental sample
  DOMAIN (31)...(215): Phage integrase family
  misc_feature (1)..(247): Xaa is any amino acid
MLGEAVRRGLIPANPCEKVKRLKNDKKKIEILKVEEVQKLFPKNYKTVWGDNKLAYVACRLASVTGMRIGEILGLRGEYVFDDYIHVCGQSGSGGGYKPYTKTKQNRNIPLVPEIIALLRGLNNGKGFVFSKDGGATSITECTVRLDYYQALEKIGISEDERERRAITIHGWRHFLNTELLRQGLSVMQVQGVTGHKSLRMTELYNHPGEGQKSDVMKAQEKILGTKKTEKVEKGLKLVKGTGRKSA

SEQ ID NO: 18491 - DNA, 885 bp, Unknown
  Obtained from environmental sample
  misc_feature (1)..(885): n is a, c, g, or t
atggttcctccgttgatgaggcgttgtcctttttccggcagcctgagcgttcaacggccttgcggcaaaaaaagcaaaagccctggcgcagaaatacaaacaactaatgggagaataatgatgtttaccgaaggcttatcttatgacgatgttcttttagtaccgggccattccgagaccctgccaaaggactgcgatatcaggaccaacttgtgcggcgatatacagttgaatgtgccaattatttccgcggcaatggacaccgttaccgaggaaaaacttgccatcgccatcgcgctggaaggcggcgtgggtgtcattcaccggaatctcgcgccggaagagcaggcccggcaggtatcacatgtaaagcgctttcttaactggataattgattcgcctgtaacagttcccgaaggagcgcgcatacaggacgtcaaagatctgatcgataaacacggcgtttcgggaatgccggttctggacagcgaaggaaagctcaaggggatcattaccggaagggatctgcgtttttgccgggataattctctgccggttattgaggtgatgaccaaaaacccggtagtgctacagagggaaccgactgttgccgatgccctggaaaaattcgacaagtaccggatagaaaaactcccggtagtggacgacgaggggcgacttacggggctcatcaccgtaaaggatatggagaaacatgaaagtttccccagggccgcggttgacaagacgggcaggcttattgtgggtgccgctgtttccccggcagactacccggtgcggatgcccctgctcaagaaagcaaaaattgattttgtgggtcttgataccgcccacggcgattcaaaaatgttatggaagccgtaa

SEQ ID NO: 18492 - protein, 294 aa, Unknown
  Obtained from environmental sample
  DOMAIN (44)...(291): IMP dehydrogenase / GMP reductase domain
  misc_feature (1)..(294): Xaa is any amino acid
MVPPLMRRCPFSGSLSVQRPCGKKSKSPGAEIQTTNGRIMMFTEGLSYDDVLLVPGHSETLPKDCDIRTNLCGDIQLNVPIISAAMDTVTEEKLAIAIALEGGVGVIHRNLAPEEQARQVSHVKRFLNWIIDSPVTVPEGARIQDVKDLIDKHGVSGMPVLDSEGKLKGIITGRDLRFCRDNSLPVIEVMTKNPVVLQREPTVADALEKFDKYRIEKLPVVDDEGRLTGLITVKDMEKHESFPRAAVDKTGRLIVGAAVSPADYPVRMPLLKKAKIDFVGLDTAHGDSKMLWKP

SEQ ID NO: 18493 - DNA, 426 bp, Unknown
  Obtained from environmental sample
  misc_feature (1)..(426): n is a, c, g, or t
ttgtcaaccgcggccctggggaaactttcatgtttctccatatcctttacggtgatgagccccgtaagtcgcccctcgtcgtccactaccgggagtttttctatccggtacttgtcgaatttttccagggcatcggcaacagtcggttccctctgtagcactaccgggtttttggtcatcacctcaataaccggcagagaattatcccggcaaaaacgcagatcccttccggtaatgatccccttgagctttccttcgctgtccagaaccggcattcccgaaacgccgtgtttatcgatcagatctttgacgtcctgtatgcgcgctccttcgggaactgttacaggcgaatcaattatccagttaagaaagcgctttacatgtgatacctgccgggcctgctcttccggcgcgagattccggtga

SEQ ID NO: 18494 - protein, 141 aa, Unknown
  Obtained from environmental sample
  SIGNAL (1)...(28)
  misc_feature (1)..(141): Xaa is any amino acid
MSTAALGKLSCFSISFTVMSPVSRPSSSTTGSFSIRYLSNFSRASATVGSLCSTTGFLVITSITGRELSRQKRRSLPVMIPLSFPSLSRTGIPETPCLSIRSLTSCMRAPSGTVTGESIIQLRKRFTCDTCRACSSGARFR

SEQ ID NO: 18495 - DNA, 675 bp, Unknown
  Obtained from environmental sample
  misc_feature (1)..(675): n is a, c, g, or t
atgncgtggggcaggcgcgatcttattctgcgttccgcgcggcggatgttcgcattaatggaagatagcccgtttgcctatatcatgtctggcagctaccgcaagctgaaagaccgcaacattcaccgcacattttttgagggagacttaaaatacttttgccggggattcaacgcttgttacgctaaatatggaaccctggaaaaattgtttgcttccgccgcggatatctgggagggaatagccctgtttcgtgaggaaatggcggccgcgaataaaggccgctattccgggcacattgccaatccgggcgcgggtaccggttccgcctgcaaacgaagcaatttagccctgcgctggctggtcagaaaaaagccggtagacctgggcctttggaaaagcatcagggcatcggcgctgtacatccccctggatatccatgttgcccggacagcccgccgccttgggctattgaaacgcaaatccaacgataaaaaagcggttgttgagcttacggaaaaactcaaggctttctgccgggaagacccggtaaagtacgattttgcgctttttggaatgggcctgtccgcaaacttgtcggcttcacagacatcggcttcgcagacgtcagcttcgcggacatcggcttcccggacaaatccaatgcctatctag

SEQ ID NO: 18496 - protein, 224 aa, Unknown
  Obtained from environmental sample
  misc_feature (1)..(224): Xaa is any amino acid
MXWGRRDLILRSARRMFALMEDSPFAYIMSGSYRKLKDRNIHRTFFEGDLKYFCRGFNACYAKYGTLEKLFASAADIWEGIALFREEMAAANKGRYSGHIANPGAGTGSACKRSNLALRWLVRKKPVDLGLWKSIRASALYIPLDIHVARTARRLGLLKRKSNDKKAVVELTEKLKAFCREDPVKYDFALFGMGLSANLSASQTSASQTSASRTSASRTNPMPI

SEQ ID NO: 18497 - DNA, 513 bp, Unknown
  Obtained from environmental sample
  misc_feature (1)..(513): n is a, c, g, or t
gtgagcacatggctcctgaaaccgggcgagcttacccttaaaggggaaaaccgcaaaagttttgaacatgtactgaagcgaaatttattgaggatgctgaatcccccgccgcaaagggataatgaacatggcggcgattccccttccggcggcattagggccgaatttgaaatgacaagcggccgcttttatttacactgcgatgacaaagacagcgaaaaagtcgaaagtgttctctcccgccttataggcatcgcgggctgggcaaaggccaaaatatgtgagaaaaacgtggaagcggtgttgcgcctgtgcgttgaagaaggcaaaaaactgtccgctcggggcataaaaacttttaagatagaggcccggcggaccgacaagagtttcccccttgattcatacggtttatgcagccgggcgggagatgctgttttgggcgcggctggccttacagtcgatatccataacccggacagcgtatcggatagagaacggaaactgtcataa

SEQ ID NO: 18498 - protein, 170 aa, Unknown
  Obtained from environmental sample
  misc_feature (1)..(170): Xaa is any amino acid
MSTWLLKPGELTLKGENRKSFEHVLKRNLLRMLNPPPQRDNEHGGDSPSGGIRAEFEMTSGRFYLHCDDKDSEKVESVLSRLIGIAGWAKAKICEKNVEAVLRLCVEEGKKLSARGIKTFKIEARRTDKSFPLDSYGLCSRAGDAVLGAAGLTVDIHNPDSVSDRERKLS

SEQ ID NO: 18499 - DNA, 354 bp, Unknown
  Obtained from environmental sample
  misc_feature (1)..(354): n is a, c, g, or t
atgcccacgcggctaccgatgaaaaaactcacaagcgcccttaggggaatggaccgctgcgttttcatccctcaggacaggaacgaaaatgatttttctccctatattttacaggccgctttcaggggcatccccggcgaggtaatggcccgcgcccttgacgatcttggttttgcggtttccaccggctcggcctgttcctcctcttctcccgaacgcccggtacttgccgccatgggcattgaggaaagcctcagccttgaaggcattcgcatttcccagggctggacgaccacggatgaggaaatcgacattcttcttgaggcaatcgcggaggttttgaaatacctgtga

SEQ ID NO: 18500 - protein, 117 aa, Unknown
  Obtained from environmental sample
  misc_feature (1)..(117): Xaa is any amino acid
MPTRLPMKKLTSALRGMDRCVFIPQDRNENDFSPYILQAAFRGIPGEVMARALDDLGFAVSTGSACSSSSPERPVLAAMGIEESLSLEGIRISQGWTTTDEEIDILLEAIAEVLKYL

SEQ ID NO: 18501 - DNA, 585 bp, Unknown
  Obtained from environmental sample
  misc_feature (1)..(585): n is a, c, g, or t
atgtcgcgaggtttcaaacgttttcatgttccgccatatatagctatgttgtttattttgggcattctttggactgtggtggagcttcttggcagaaggcatcaggttcttccgcaacgccttaatatttaccatgtgataaaagaggttgatgtgccgagcgttttgttttttgccggtattttgctcgcagttggggtgttgggcgcaacgggccagcttgcctcgcttgccaaaatactggaagacagcataggccataccagcataatagttcttataataggtgtgctttccgctgtggttgataatgtacctttggttgctgctacaatgggtatgtatagccttcaagagttcccaatggataattttttatgggaatttatagctttctgtgctggaacaggcggttctatgctggtgataggttctgcggctggtgtcgcggcaatgggcatagatagaaatctgtcttttggctggtatttgagaaagataaccccgttagcagcgctgggttacggctcaggcgccggaacttacttgctgctttcagagtttatttttcatactgttaaataa

SEQ ID NO: 18502 - protein, 194 aa, Unknown
  Obtained from environmental sample
  misc_feature (1)..(194): Xaa is any amino acid
MSRGFKRFHVPPYIAMLFILGILWTVVELLGRRHQVLPQRLNIYHVIKEVDVPSVLFFAGILLAVGVLGATGQLASLAKILEDSIGHTSIIVLIIGVLSAVVDNVPLVAATMGMYSLQEFPMDNFLWEFIAFCAGTGGSMLVIGSAAGVAAMGIDRNLSFGWYLRKITPLAALGYGSGAGTYLLLSEFIFHTVK

SEQ ID NO: 18503 - DNA, 891 bp, Unknown
  Obtained from environmental sample
  misc_feature (1)..(891): n is a, c, g, or t
atgaggctatcccgcaacagcacattgtatgtcgatggttcggcggattacgatccccgtcaaatccaggcaaacatccggatggattctttcgccgtgggagacatgctgagttttgttgagccttttcttccgttttccgccataccttccctgcttcgttatgccgcggatgatctgtctataaccaccgagatcttttttataaccgattatgccaatattgtttacgacgcgccccgcgtaattgcctcttatgaaggtttgcaggatattcgtgccgctgtttccctttccggaacggatagagccgtggaattgagtgccgccagtattacctggaatggcgtgtccgcggaatttaacggcaacgcagatttttccaatagggatgacatttcattttcgcttgtggccagctcacaaaacctgacatattcttttgaagggatgatccaggatcttaaaaacatagtcatcaggggctcttacggaattcaagtaatgattgtcgccgacgagttcggagtacgtaccggatatgccaggggggacttaataccgataccgtccggaaataaatttgcctcgcttagttttcttttttccattttttatgattctcccgagtattggcggaccaggatagaaaagtttgaactatcgggccttactactccttcgtcgtcttctgcccttgtaaggtttaccggggaagccggcgaaaaaggcataaagattcccaacctggttttcgatgacggccgcggggccctgtcaggggaggtttccattaattgggatgccgcgtacgaaaattacactttcaagactgaaatcgcttcccacaccgcagtgagtattacgccctggatggggatacagggataa

SEQ ID NO: 18504 - protein, 296 aa, Unknown
  Obtained from environmental sample
  misc_feature (1)..(296): Xaa is any amino acid
MRLSRNSTLYVDGSADYDPRQIQANIRMDSFAVGDMLSFVEPFLPFSAIPSLLRYAADDLSITTEIFFITDYANIVYDAPRVIASYEGLQDIRAAVSLSGTDRAVELSAASITWNGVSAEFNGNADFSNRDDISFSLVASSQNLTYSFEGMIQDLKNIVIRGSYGIQVMIVADEFGVRTGYARGDLIPIPSGNKFASLSFLFSIFYDSPEYWRTRIEKFELSGLTTPSSSSALVRFTGEAGEKGIKIPNLVFDDGRGALSGEVSINWDAAYENYTFKTEIASHTAVSITPWMGIQG

SEQ ID NO: 18505 - DNA, 432 bp, Unknown
  Obtained from environmental sample
  misc_feature (1)..(432): n is a, c, g, or t
gtgattcttgaggatgaattccgcgccgttgcccatgagtttgaccttatgagtgacgacggaagctgcggtaggaaagggcttgtcaccgaagcgttgaaagcgtctcttgacaagggcgaaaaatacgacgaagtaatcgccattgggcctctgattatgatgaaatttgtggccgccaccacaaaaccttacggcgtaaaaacgacggtcagcatgaaccccatcatgatcgacggaacgggaatgtgcggcgcgtgccgcctgagcgtgaaccacaaaatgaggtttgcctgtgttgacggcccggactttgacggtcatgaggttgattttgacgaagcgatggcaaggggcggcaggtaccggccttttgaggcgaaggcctacgaggcggcctgcaatctatttaaaaaggcggtggcacaatga

SEQ ID NO: 18506 - protein, 143 aa, Unknown
  Obtained from environmental sample
  misc_feature (1)..(143): Xaa is any amino acid
MILEDEFRAVAHEFDLMSDDGSCGRKGLVTEALKASLDKGEKYDEVIAIGPLIMMKFVAATTKPYGVKTTVSMNPIMIDGTGMCGACRLSVNHKMRFACVDGPDFDGHEVDFDEAMARGGRYRPFEAKAYEAACNLFKKAVAQ

SEQ ID NO: 18507 - DNA, 759 bp, Unknown
  Obtained from environmental sample
  misc_feature (1)..(759): n is a, c, g, or t
ttgaacgcagaaggctttgaagcactgaaggctcaagctgttgccgcaagaacttatgcctacatacatttaggttccagaaaatctcaaggctttgatgtttacgcagatacccgcgaccaagtttacaacggaagaaacgacgaagactcccttgtgaatgaagctattttggcaacgagcaatgtggttatcaaatacaacggcaatttgatagaagcctattaccattcaacctgcggcggcaaaacagaatcttctgaagtgtgggaaaaagagagcaaaccatatttggcagccgttttggattccacagaaggcggcatattttgcgagctttcaagatacaaaaaatgggaagagaaattcagcaaaacagaacttgtgaaactctttcaaaaaaacgcgacgaatgcaaaagcagataaaatttttcccttcaacaaaatagagcggattttaataaccgaaaaattcccaagcggcagggtgaaaaggcttgttgttttcacagacagaggttcttttgaagtttttggcgacaaggcaagatggctttttcaaagagatggaaaaattttgccaagcgcattgtttagcatttctcaaaacggcaacgattatataatcagcggttctggttttgggcacggcattggtatgtgccaatttggggttattgcaagggcaagagctggccagaaatttgacgatattttgaaggcatattatacgggtgttagcgtggagaggtattag

SEQ ID NO: 18508 - protein, 252 aa, Unknown
  Obtained from environmental sample
  DOMAIN (1)...(67): Stage II sporulation protein
  misc_feature (1)..(252): Xaa is any amino acid
MNAEGFEALKAQAVAARTYAYIHLGSRKSQGFDVYADTRDQVYNGRNDEDSLVNEAILATSNVVIKYNGNLIEAYYHSTCGGKTESSEVWEKESKPYLAAVLDSTEGGIFCELSRYKKWEEKFSKTELVKLFQKNATNAKADKIFPFNKIERILITEKFPSGRVKRLVVFTDRGSFEVFGDKARWLFQRDGKILPSALFSISQNGNDYIISGSGFGHGIGMCQFGVIARARAGQKFDDILKAYYTGVSVERY

SEQ ID NO: 18509 - DNA, 570 bp, Unknown
  Obtained from environmental sample
  misc_feature (1)..(570): n is a, c, g, or t
atgacatatcggcacgaggcttgcggtattttacgcggaataatgaaattgttccgtaacagcggaataataacccgtcaataccagaataattacctgcttgcgcgcatttcaggatacgcgtttgaccttatgataataaccggcatctgcacgataaattttgaaaaactcgctggtttgtggcttccttttgcccttatgtgtattctgggcgctattggtactttcttctaccttaaatggatctgcaaaaaaatatatcccgattattattatgagggttttttgtccatgttcgggatgatgacgggcgttatcagttcgggtgttttgcttctgcgcgaaatcgatccgaattttgaaacgcccgcggcgggcaatctggttttaggaagttcattcggaatagggttcgggataccgatgctgcttcttatcggtatggctccaaaatccgaccttatggttgtaattactcttggctgctgcgccgcctactttttcgtcctgttgggctatatttttcttgtcaaacccaaagagaaaaaaaccatacaagctcagtga

SEQ ID NO: 18510 - protein, 189 aa, Unknown
  Obtained from environmental sample
  misc_feature (1)..(189): Xaa is any amino acid
MTYRHEACGILRGIMKLFRNSGIITRQYQNNYLLARISGYAFDLMIITGICTINFEKLAGLWLPFALMCILGAIGTFFYLKWICKKIYPDYYYEGFLSMFGMMTGVISSGVLLLREIDPNFETPAAGNLVLGSSFGIGFGIPMLLLIGMAPKSDLMVVITLGCCAAYFFVLLGYIFLVKPKEKKTIQAQ

SEQ ID NO: 18511 - DNA, 792 bp, Unknown
  Obtained from environmental sample
  misc_feature (1)..(792): n is a, c, g, or t
ttggacgaacattcatacatagccggggcaggaagcgaaaccagccgttcggtggttattgtagatgacatggaaacaggcaacaaactaagcgttaacgccgactgttgccggcctgtttttgcgataatgaacccggtactgacctattcggtttcagcttatcaaacaggagtgggagcggcggatactatagcccacaccctggggcgctattttacaagagatttgccagtaagcagcctgggcgacgaattcgccgaagggcttatgaggacagtcgtaaagtacagccacatcgccattgccgccgctgatgattacgaggccagggcggaactaatgatggcggcatcttttagccataatgatctcaccaatataggccgcggcggcaaacgaggtggagagcatccattggaacaccagttatccggccactacaacaccgcccacggcgcaggccttgcggttatcatgcccgcatggcttcaatacatagtggataacggcacagaagcggaagttgagcgtatagcccaattaggcgttaaagtttttgctgttaaagcaaacgcagccaaagccacagcaaacgccgggctcgacgctttccgcgcctggctgcgctcaattggaatgcctttgacctttgccgaactgggcatcccaaacacggattttgacgccgttgtaaaacgcacagtcaacgcanacagcggaatgatcagcggctttatagacctggacgaaaaagcgattaaggctatttatactatcgcaaaagcttaa

SEQ ID NO: 18512 - protein, 263 aa, Unknown
  Obtained from environmental sample
  misc_feature (1)..(263): Xaa is any amino acid
MDEHSYIAGAGSETSRSVVIVDDMETGNKLSVNADCCRPVFAIMNPVLTYSVSAYQTGVGAADTIAHTLGRYFTRDLPVSSLGDEFAEGLMRTVVKYSHIAIAAADDYEARAELMMAASFSHNDLTNIGRGGKRGGEHPLEHQLSGHYNTAHGAGLAVIMPAWLQYIVDNGTEAEVERIAQLGVKVFAVKANAAKATANAGLDAFRAWLRSIGMPLTFAELGIPNTDFDAVVKRTVNAXSGMISGFIDLDEKAIKAIYTIAKA

SEQ ID NO: 18513 - DNA, 852 bp, Unknown
  Obtained from environmental sample
  misc_feature (1)..(852): n is a, c, g, or t
atgcctttgtgggcgggtcaccacggccagcatggacgtactgccctacatgaagaccgtaggcacgcgggaggccaagagctatggggtcaacgtcataggccttcggcgccgaggcttttcggaagagaccatcgaagccctacatcgcgcacacaggattctcttcggcatgggcctgctccgcgaggaggcaatggaaaaagcgtcagcggagctgggcagcatcccagaagtggcctacctgctggaattcatccgcagcagcaagcgcggcgtcatccggggctgatggtggcccaaaagtttgcatctgttgcgatagtcggcctccccaatgtgggcaagtcaaccctgctgaacgccctggtgggcgaaaagctggccgcggtcagccagacgccgcagaccacacgcacgaggatattgggcgttgccaaccgcggcgaagcgcagttcgcgtttttggacacgccgggcttccacagagagggtcacaagcttaacgcccgcatgatggagcgccttgggtctgcaatccaggacgcggatttgatcctgtggatgattgatgccgacggccaccacggtcccaaagagcgcgaactggcggcccgcctgcgacaaacagaaaagccgctgtatctgctgatcaacaaggttgacctcgtgtcaaaggccaggctgctcgaaaaggtagtctcctacaaagacacggcgccattcagggagatagtgcccatcggcgcgaagctgaagcagaacctagagccgctctgggagatactggtgcgcgacgcgctggagggcgagtggcgttacgatgaggacgagttcnctcggccgatctga

SEQ ID NO: 18514 - protein, 283 aa, Unknown
  Obtained from environmental sample
  DOMAIN (104)...(222): Miro-like protein
  misc_feature (1)..(283): Xaa is any amino acid
MPLWAGHHGQHGRTALHEDRRHAGGQELWGQRHRPSAPRLFGRDHRSPTSRTQDSLRHGPAPRGGNGKSVSGAGQHPRSGLPAGIHPQQQARRHPGLMVAQKFASVAIVGLPNVGKSTLLNALVGEKLAAVSQTPQTTRTRILGVANRGEAQFAFLDTPGFHREGHKLNARMMERLGSAIQDADLILWMIDADGHHGPKERELAARLRQTEKPLYLLINKVDLVSKARLLEKVVSYKDTAPFREIVPIGAKLKQNLEPLWEILVRDALEGEWRYDEDEFXRPI

SEQ ID NO: 18515 - DNA, 381 bp, Unknown
  Obtained from environmental sample
  misc_feature (1)..(381): n is a, c, g, or t
atgttccattatacggacgaatggagcgacgcggctgtccgccgttttatcgcccgtgtcggcgtggaaaacctcacgaatgtttaccgtctccgcagggccgacgcctacgccacggccgccattgaacccggttccggcttccttttgcctctcgctgacagggtagaaaaaatccttaatgagaaacaggcgttttcgcttaaagacctcgcggtaaacggcagggacctcattgaaatcggaagccggcccggaaaaaccatagggatcattcttggcgaattattggaaatagtgcttaacgatcccgcccaaaacacccgcgagaccctgcttgcgattgcggaaagaataaataacgccaggagcggggaataa

SEQ ID NO: 18516 - protein, 126 aa, Unknown
  Obtained from environmental sample
  misc_feature (1)..(126): Xaa is any amino acid
MFHYTDEWSDAAVRRFIARVGVENLTNVYRLRRADAYATAAIEPGSGFLLPLADRVEKILNEKQAFSLKDLAVNGRDLIEIGSRPGKTIGIILGELLEIVLNDPAQNTRETLLAIAERINNARSGE

SEQ ID NO: 18517 - DNA, 411 bp, Unknown
  Obtained from environmental sample
  misc_feature (1)..(411): n is a, c, g, or t
atgaagaacataatgaaagtttttaaatttatcgctattacgataattattgtcctggtaatggcggttcttgggtgtgataacggctcaacaaatgaaaacgataatggtaaaaacataactctggtttgtttaggggacagtcttacagccggctatggcgctgctaagccttctgtagaagataaatcaaaatcctatcccgtttatttacaaaaaaaaaccggtattaataccgttattaacgccggggtaagcggagatacgaccgcgcaggctttagcccgtttagattctgacgttctttcccataagcctgatatagtaattatattattgggagctaatgattttttacattttatttctgtttcgacaacacaaagtaatcttcaaactattattggataa

SEQ ID NO: 18518 - protein, 136 aa, Unknown
  Obtained from environmental sample
  SIGNAL (1)...(25)
  misc_feature (1)..(136): Xaa is any amino acid
MKNIMKVFKFIAITIIIVLVMAVLGCDNGSTNENDNGKNITLVCLGDSLTAGYGAAKPSVEDKSKSYPVYLQKKTGINTVINAGVSGDTTAQALARLDSDVLSHKPDIVIILLGANDFLHFISVSTTQSNLQTIIG

SEQ ID NO: 18519 - DNA, 477 bp, Unknown
  Obtained from environmental sample
  misc_feature (1)..(477): n is a, c, g, or t
ttgccgataatgaaagcgcggcngtttttcctgaaccttgcggcgcgaagcgttaccattgtaaagccgtctcccgcaagttctgtttttcctcttacaaaagaaaatgcggggcgtattcttttggcgggcaagtacggcgattttatttccttcggcagagccgcttttcctgacgccgtcctttacaggtactcaggctcaggagacgccgatacgttttcagcgcttgcgcgtaacgcggacacggtaattttctgcctttccgacacaacggatctgcgtttgcttcgctctatcgaaaaatcgggtaaaaaagtgatagtgttttcgatattaaacccggtgtatatagaaagcgtcccctgggtaagcggagccgtcgcggtttacagttacgcccgcgaatcttttgcggcgggcttttccgccataaccggcagaatacccgcgcatggaatacttccctatgagtga

SEQ ID NO: 18520 - protein, 158 aa, Unknown
  Obtained from environmental sample
  misc_feature (1)..(158): Xaa is any amino acid
MPIMKARXFFLNLAARSVTIVKPSPASSVFPLTKENAGRILLAGKYGDFISFGRAAFPDAVLYRYSGSGDADTFSALARNADTVIFCLSDTTDLRLLRSIEKSGKKVIVFSILNPVYIESVPWVSGAVAVYSYARESFAAGFSAITGRIPAHGILPYE

SEQ ID NO: 18521 - DNA, 435 bp, Unknown
  Obtained from environmental sample
  misc_feature (1)..(435): n is a, c, g, or t
atgacagatcggccganttttgccgccgaccggaacgagcatgtttttggcagcgggggcatagaagaacgctgtaaacggggagaattggtggtttgtgacagatatctgctttcttctttagtttatcaaggcataacttgcggggaagagctgcccgtccgcctgaacgagagttttccggcgccggaattgcttgtctttcttgatatagaaccggaaaccgcccttgaccgcatagcgtccagggcgcaaaaggaaatctatgaaaaccttgctttccagaaaaaagcgggagcgcgctataaaaccctgcttcccgaattcgcctccaggggcgtcagggtggaaacaattgacgcttctttgccccccgatgaagtcgcccggcaggtatggggcgcgattgaaaaaatgccgatattcaaaaggtga

SEQ ID NO: 18522 - protein, 144 aa, Unknown
  Obtained from environmental sample
  DOMAIN (3)...(132): Thymidylate kinase
  misc_feature (1)..(144): Xaa is any amino acid
MTDRPXFAADRNEHVFGSGGIEERCKRGELVVCDRYLLSSLVYQGITCGEELPVRLNESFPAPELLVFLDIEPETALDRIASRAQKEIYENLAFQKKAGARYKTLLPEFASRGVRVETIDASLPPDEVARQVWGAIEKMPIFKR

SEQ ID NO: 18523 - DNA, 609 bp, Unknown
  Obtained from environmental sample
  misc_feature (1)..(609): n is a, c, g, or t
atgacgctgagcacgctcatcgccttcgccatctccatcggcctgttcatgtacgcgccgatgtggacggccgcgcacgtgcccgccatcaaagagtcgccgatgctcttcaacctctgcgccggagctatacgcatcaccctgttcctaatctacatatcccttataagcctgtggagcgatatgcggcgggtattcgagtatcacggggcggagcataaaaccatcttcgcctacgaggacgacaaggcgctgaccgttgaaaacgtggaaccctacgccaccgtccacccgcgctgcggcacgagcttcctaatactcgtcgcgatatgcagcatcctcctattctccgtcatagacaccctatacatacagtacgtctacgatttcagcaataacctgctctaccggttcgccgtacacctggcgcttataccgcttgtggccggcgtctcctacgagtttctcaaactctcggcccggttccaacacctgcctatagtcggcctgctaataaagccgggcctgtggctgcagcgcataaccacgcgcaagcccgacggctcgcagatagaggtcgccgtgaaggctttggaggcggcgctgtga

SEQ ID NO: 18524 - protein, 202 aa, Unknown
  Obtained from environmental sample
  SIGNAL (1)...(27)
  DOMAIN (1)...(202): Protein of unknown function (DUF1385)
  misc_feature (1)..(202): Xaa is any amino acid
MTLSTLIAFAISIGLFMYAPMWTAAHVPAIKESPMLFNLCAGAIRITLFLIYISLISLWSDMRRVFEYHGAEHKTIFAYEDDKALTVENVEPYATVHPRCGTSFLILVAICSILLFSVIDTLYIQYVYDFSNNLLYRFAVHLALIPLVAGVSYEFLKLSARFQHLPIVGLLIKPGLWLQRITTRKPDGSQIEVAVKALEAAL

SEQ ID NO: 18525 - DNA, 708 bp, Unknown
  Obtained from environmental sample
  misc_feature (1)..(708): n is a, c, g, or t
ttgcagtatatcttcggcaaggcctatttttacgaccgggaatttatcgtcaacagcaatgtgctgataccacggcccgacacggagacgttagtcgataccgttatcaattcagagaaaaagcgaccggcggcattcattgacatagggacaggcagcggaatcttagccgcggtattaacggcgcaccgccccgactggacggctgtggcgattgacatatcgttcaaagcgctgcaaacggcttcgctaaatctttggaaaaatgtgaaaaaacactctgtcaatcaacccattaacaaatccgtcaataacaatatttatttgatctgcggcgacatgctcaacgccatcaagcctgaaaaacgctttgacttcatagtcggcaatcccccatacatatcatcaccccaaatgaaaactctagacaaaagcgtcgccgactacgaaccggccctcgccctccacggcggcgaggacggactcgattattataggacgatttcaaacagcgccggaatgtatcttaaagataccgggcgaatctacctagagatcgggttcgaccaaggcgaaagcgttccgaacatcctatataatgacgggtggaaagatgtcgcggtaataaaggatctggcgggacgcgacagggtcgcggtcgccgaatggtcgatttttgaccgacaaacaagattttctaccctttga

SEQ ID NO: 18526 - protein, 235 aa, Unknown
  Obtained from environmental sample
  DOMAIN (12)...(199): Methyltransferase small domain
  misc_feature (1)..(235): Xaa is any amino acid
MQYIFGKAYFYDREFIVNSNVLIPRPDTETLVDTVINSEKKRPAAFIDIGTGSGILAAVLTAHRPDWTAVAIDISFKALQTASLNLWKNVKKHSVNQPINKSVNNNIYLICGDMLNAIKPEKRFDFIVGNPPYISSPQMKTLDKSVADYEPALALHGGEDGLDYYRTISNSAGMYLKDTGRIYLEIGFDQGESVPNILYNDGWKDVAVIKDLAGRDRVAVAEWSIFDRQTRFSTL

SEQ ID NO: 18527 - DNA, 852 bp, Unknown
  Obtained from environmental sample
  misc_feature (1)..(852): n is a, c, g, or t
atgaaagaaatccggtcagcgttgaaggatgttgatccggatgtgcgcgtcgcggcaatcaaatcccttttggactttggcgaaataaaattgcttaatcaggaaacatcgatgttacacgatccagtggagagagtgcgtcttgccaccgcggaagttatcgcaaggcacggcaacgatgcggcgattgaaatcttgaaaaacattacggttgatccaaacgagaccgaagttgtaaaaataggcgtaatcgccggattgggacaggcggcaaacgcggagggcattccgatacttgtctctgttcttgattcgcaggaagaattccgggaacacgcggaaaaagcgctggcaaacagaacaacaaaacgcgacattacccgtctgatagaaatctttaaagacgcggaaccccagctaagagaaaaacttattccggtattcaagagacagggtaaaaaagcggagccgtctattttggaaatactgaaagatgaagtcgcctctttcaagccgtatctggtaaaaattcttgaggagacaggatatgttgacgaggcaaagaggcggttatccaacagagacatagaagtcaggcgggaagccgccgctcttctttcgctcatggatactcttcccgccttccgcggtcttgtcatggcggcaaaagaccccgatcaggaagtgcgagtgtgcgtagtgaaagcgttggaaaaattaaaagctcgcaaagctacgacttccttgaaaaacttaaagaagaccccgacagccgagtgcggaaatacacccactgggcgctggagagacttgattcgctggcgatggagtgagagaaatacgctttactaa

SEQ ID NO: 18528 - protein, 283 aa, Unknown
  Obtained from environmental sample
  misc_feature (1)..(283): Xaa is any amino acid
MKEIRSALKDVDPDVRVAAIKSLLDFGEIKLLNQETSMLHDPVERVRLATAEVIARHGNDAAIEILKNITVDPNETEVVKIGVIAGLGQAANAEGIPILVSVLDSQEEFREHAEKALANRTTKRDITRLIEIFKDAEPQLREKLIPVFKRQGKKAEPSILEILKDEVASFKPYLVKILEETGYVDEAKRRLSNRDIEVRREAAALLSLMDTLPAFRGLVMAAKDPDQEVRVCVVKALEKLKARKATTSLKNLKKTPTAECGNTPTGRWRDLIRWRWSERNTLY

SEQ ID NO: 18529 - DNA, 309 bp, Unknown
  Obtained from environmental sample
  misc_feature (1)..(309): n is a, c, g, or t
ttgatgttttgcttgcgggacctcacggcggaagaattaagccgaggactggttaaccttatccccaaaaacacaagaatactttccgcgacagtgcgagggaatacagcttacatcagctttagcgaagattttttatttaacactttcggcgtggaaggttacgtcgcccagcttaggcaaattgtctggacggtgaccgagtttcaaaatgtaaaagacgtgcaaatattagttgaaggcagaagaatggattatctcggcgaagggatatggattggaagcccaatcagccgtcaatctttttaa

SEQ ID NO: 18530 - protein, 102 aa, Unknown
  Obtained from environmental sample
  misc_feature (1)..(102): Xaa is any amino acid
MMFCLRDLTAEELSRGLVNLIPKNTRILSATVRGNTAYISFSEDFLFNTFGVEGYVAQLRQIVWTVTEFQNVKDVQILVEGRRMDYLGEGIWIGSPISRQSF

SEQ ID NO: 18531 - DNA, 423 bp, Unknown
  Obtained from environmental sample
  misc_feature (1)..(423): n is a, c, g, or t
ttgatgaacgctattgattgccctntccgatgttntgatgatcttgtaaaaactcataacggggcggctgatactccgcctgtcattcttgtagatttccatgccgaatccagcaaagaaaaagaatctcttgcctactacgccgacggacgcgcggcagtaatagcgggaactcatacgcacattcaaaccgccgatgaacgtatactgccaaagggcagcgcttacattaccgatcttggaatgacgggcaacactgacagcgtaatcggcatggacccgaagatttgtcttgatcgagtccgcaagcaaattctgtatcacatggaaacggcggagtctgataaaccgggaaaaattcagggtattatcgctgagattgacgcggacacgggaaaagcaatttcgattaaaagaatttaa

SEQ ID NO: 18532 - protein, 140 aa, Unknown
  Obtained from environmental sample
  misc_feature (1)..(140): Xaa is any amino acid
MMNAIDCPXRCXDDLVKTHNGAADTPPVILVDFHAESSKEKESLAYYADGRAAVIAGTHTHIQTADERILPKGSAYITDLGMTGNTDSVIGMDPKICLDRVRKQILYHMETAESDKPGKIQGIIAEIDADTGKAISIKRI

SEQ ID NO: 18533 - DNA, 870 bp, Unknown
  Obtained from environmental sample
  misc_feature (1)..(870): n is a, c, g, or t
atgacggcgggcggcattcctgtagacgggatactttcagtgaaagttccaggttccttttcgggttggatgacgcttatgaaagactacggaaccatgcccctttcgcaggttctcgccccggccattcatcttgcaaataacggctggcagatcaggtccggccatgccagaagcattgcctcaaatttgaccaagtttaatcaggaagcgcttaatgtttacgcccccaacggggtagcgcttaaggaaggtgagattgcatataacaaaaacctggcgaaccttctaacaacgcttagtaaaatgaattaccaggacgctgaagattatgtttatcgcggcccggtggcaaaagcgctggtcgatctttcagattctcttggcggtctcattaaattgagtgatatgaatgaattcagggcggcgagggcaactcctctctccacaaattataaaggagttgacgtttatgtatgcccgcccaactcacaaggtatggtcttattggaagctctgaatatacttgaaacttacgatgtaaaatcgttcggacacaatacggccgagtacattgaccttcttacccagatactcaatctgtgtattgaagatcgcaacgcctggatgggcgatccgcgctttgtgccggttccttacggaatgatcaccaaggaatatgccagggttcgcaagaatgatataaagctcaggcaggcgatgcccgataccattaaggttggcaatccgactcaatatgagaaatacttcactggcgaaaggggcggagacacgacgtttatggtggtagcggacgcgatgggtaatatcgtggcctgtacaaccagtaatgccagggtctcgccataa

SEQ ID NO: 18534 - protein, 289 aa, Unknown
  Obtained from environmental sample
  DOMAIN (2)...(289): Gamma-glutamyltranspeptidase
  misc_feature (1)..(289): Xaa is any amino acid
MTAGGIPVDGILSVKVPGSFSGWMTLMKDYGTMPLSQVLAPAIHLANNGWQIRSGHARSIASNLTKFNQEALNVYAPNGVALKEGEIAYNKNLANLLTTLSKMNYQDAEDYVYRGPVAKALVDLSDSLGGLIKLSDMNEFRAARATPLSTNYKGVDVYVCPPNSQGMVLLEALNILETYDVKSFGHNTAEYIDLLTQILNLCIEDRNAWMGDPRFVPVPYGMITKEYARVRKNDIKLRQAMPDTIKVGNPTQYEKYFTGERGGDTTFMVVADAMGNIVACTTSNARVSP

SEQ ID NO: 18535 - DNA, 831 bp, Unknown
  Obtained from environmental sample
  misc_feature (1)..(831): n is a, c, g, or t
atgttgaaaccaaaccaggacagttttgtgcttgacacatcttgcggttcgggtgggtttttgctgtacgcaatggattttatacgaaagatcgccgaagaatattacgatgtggacagtacggattattacaaatattggcatgactttgcttccaaacggctgttcggtatagaaataaacgatgaaatagcgcgtgtagcgaaaatgaatatgattgtgcacgacgacggtcatactaatgtcattaactttgatgctcttgacagcatagacgctatgcacgcgcataatgacggatttgttgcagggaagtttgattttatcctcaccaatcccccattcggctcgaagattaacgcgtcggagcgtccgtatttgggtggttatacgctcggtaatacttacgacaaaaataataaggcaaaagcacgaaatgcgcaaagctccgaagtgctttttatcgagcgaatacacgagtttttgaaacctaaaactggcaaggcatctattgttctgcctgatggtattttaacaaacagcagtatgcagtatgtccgtgactttattcttgataaatttcaacttctctcggttgtgagcttgccgcaagctgcatttgcgcattttggcgctggcgttaaggcaagcgtgatattcgttcgcaaacgcggtgaaaacgatatgcctgacgacgatgaagccatatttatggcggctcctaacgaaattggatacgacgcaactggacgcaagacaaacaaccaattacccgaagtcgtcaagcaatacgagacgttcctcgaaaatccagaaagttttttcgtataa

SEQ ID NO: 18536 - protein, 276 aa, Unknown
  Obtained from environmental sample
  DOMAIN (1)...(273): N-6 DNA Methylase
  misc_feature (1)..(276): Xaa is any amino acid
MLKPNQDSFVLDTSCGSGGFLLYAMDFIRKIAEEYYDVDSTDYYKYWHDFASKRLFGIEINDEIARVAKMNMIVHDDGHTNVINFDALDSIDAMHAHNDGFVAGKFDFILTNPPFGSKINASERPYLGGYTLGNTYDKNNKAKARNAQSSEVLFIERIHEFLKPKTGKASIVLPDGILTNSSMQYVRDFILDKFQLLSVVSLPQAAFAHFGAGVKASVIFVRKRGENDMPDDDEAIFMAAPNEIGYDATGRKTNNQLPEVVKQYETFLENPESFFV

SEQ ID NO: 18537 - DNA, 801 bp, Unknown
  Obtained from environmental sample
  misc_feature (1)..(801): n is a, c, g, or t
ttggnnnncccgatgacagatcggcagagagattgcgccttctgctcgcagtctacgcacaataaggctggtgttgcggtacacggactctcggcatcggaagagatcatcctacggtgccgagaggcatggtctaatgggttgccgttttgcgcggtgtcaagcggtcggcgtcttaaaactacggagtttcaaacattgtgcaggacgctttcggagtgcggagatgatggggagaaacacgcttcgcttggtatcctaagcgacaatgattttgaggcgctgcgtgacgcgggagtcgagtgctacaaccacaatttggagacgagccgcggttacttcggcaagatcgtgaccacgcacggatacgacgacagggtggccaccgtccgcagggcgaaggcggccgggctgcgggtgtgctgcgggggcattttcggcgttggggaaagttgggaggacagaatcgcgctgtgtttggagttgcgggggctgggtgtagacaccgtgcctataaactttctgaacgctatcgaggggacgcgggtggaagcgcctaaggagacgccgctcgagtttttgaagatcgtttcgctgttcaggctggcaatgcctaaggcggcaatcaaagtgtgcggggggcgggagaagaacttgggggcgttgcagccgctgatttttctagccggggctaacgggtatatcacgggcggctatctgactaccggcggggctgggttggaggcggacgacgggatgataggggcgttggggctgtcgaggaaaaatcaaaatctttaa

SEQ ID NO: 18538 - protein, 266 aa, Unknown
  Obtained from environmental sample
  DOMAIN (2)...(162): Radical SAM superfamily
  misc_feature (1)..(266): Xaa is any amino acid
MXXPMTDRQRDCAFCSQSTHNKAGVAVHGLSASEEIILRCREAWSNGLPFCAVSSGRRLKTTEFQTLCRTLSECGDDGEKHASLGILSDNDFEALRDAGVECYNHNLETSRGYFGKIVTTHGYDDRVATVRRAKAAGLRVCCGGIFGVGESWEDRIALCLELRGLGVDTVPINFLNAIEGTRVEAPKETPLEFLKIVSLFRLAMPKAAIKVCGGREKNLGALQPLIFLAGANGYITGGYLTTGGAGLEADDGMIGALGLSRKNQNL

SEQ ID NO: 18539 - DNA, 588 bp, Unknown
  Obtained from environmental sample
  misc_feature (1)..(588): n is a, c, g, or t
gtgcgtcatagtcagggatttttctcggttgccacaacctgccacaactgcggcggcgaaggctacataatcgacaaaccctgtaatgattgcggcggagcgggaactcaaaagaagcggcaaaaaattatggttactattcccgccggcgtagaaaacggcaagcgtgtggtaattcccaaacagggcgacgcaggtcccaacggcggaccgccgggagacttatacgtttttatcagagtaaaaccgcacgaatattttgaacgtcaagccgctgatctttactgcgccgttcctatttcgataactcaagccgctcttggcgcggacattcacgttacgacgcttgataacaaaacaataaaagtaaaagtaccggcgggtattcaaaacggaaaaatgctccgtatccacaacgagggcgtgccgatgggtaatcaaagaggcaatctctacatcaaactttttgtgcaaatccccgaaagactttcccgcaaaggcaaagaactccttgaagaacttgccaaaatcgagggacaggacgacagcccaaaacctattccgctttcgcagcttggggatgtgtag

SEQ ID NO: 18540 - protein, 195 aa, Unknown
  Obtained from environmental sample
  DOMAIN (1)...(42): DnaJ central domain (4 repeats)
  misc_feature (1)..(195): Xaa is any amino acid
MRHSQGFFSVATTCHNCGGEGYIIDKPCNDCGGAGTQKKRQKIMVTIPAGVENGKRVVIPKQGDAGPNGGPPGDLYVFIRVKPHEYFERQAADLYCAVPISITQAALGADIHVTTLDNKTIKVKVPAGIQNGKMLRIHNEGVPMGNQRGNLYIKLFVQIPERLSRKGKELLEELAKIEGQDDSPKPIPLSQLGDV

SEQ ID NO: 18541 - DNA, 330 bp, Unknown
  Obtained from environmental sample
  misc_feature (1)..(330): n is a, c, g, or t
ttgcaaatgcttcggtccgctctggtcggcggtgataaacggcagattgacttcggtggtctgcatcgaggacaattcgatctttgctttttcagccgcttcacggagacgctggagagccatgcggtctttgccgagatcgatgcctgtgtcatttttgaattctgcgataagccattccatgacacgatgatcaaaatcgtcgccgcccaagtgagtatcgccgtttgtcgattttacttcgaaaacgccgtcgcccagttccagaatggaaatatcgaaagtaccgccgccaagatcgtatacggcgattactttgtctttttttga

SEQ ID NO: 18542 - protein, 109 aa, Unknown
  Obtained from environmental sample
  misc_feature (1)..(109): Xaa is any amino acid
MQMLRSALVGGDKRQIDFGGLHRGQFDLCFFSRFTETLESHAVFAEIDACVIFEFCDKPFHDTMIKIVAAQVSIAVCRFYFENAVAQFQNGNIESTAAKIVYGDYFVFF

SEQ ID NO: 18543 - DNA, 765 bp, Unknown
  Obtained from environmental sample
  misc_feature (1)..(765): n is a, c, g, or t
atgacatcctgccggaggcgcttcatgaagaagaatgaaatgcgtttctaccggctgctccgtgactttctggccgattatcttgtcacaaaaagaaatttcagcggaaagacggctaaggcttaccggcagacgatgagccttcttagaaactatttccgcggggaaaaaagcgtcaattttgaccaaatgaatttttcccgtttttcaaggggtaacatctatgactttcttgtatggctcagggatacccgcaataattccgtacagacccttaatgtaaggctggccgccataaaatcttttttgaaatactgcagcgaggaagatattgaactgacggcggtatatcttgaggctgccgggatacacgcgttcaaaggaaccaaaaaaccgtatgcggaatatcttaatcctgaacaattgaaactggttttctcatcggcggatattacgacaaaacacggcaggcgcgacagatttttcatgatcttcgcctatgaaacaggggcgagaatacaggaactgctggacttgcaattaagcggtattattcgtaatgagtcaggtatacgaataagaattcatggaaaaggaaataaaatacggtacgttcccctgcttggaacaacggtaaaacatttggaggcatacctttccgaatttcataataaagacacgccagatgcctgtctgttttttacaattcataattccgggaaaacacagatgaaaccggcgccgttgatattacaactgcgataa

SEQ ID NO: 18544 - protein, 254 aa, Unknown
  Obtained from environmental sample
  DOMAIN (20)...(110): Phage integrase, N-terminal SAM-like domain
  misc_feature (1)..(254): Xaa is any amino acid
MTSCRRRFMKKNEMRFYRLLRDFLADYLVTKRNFSGKTAKAYRQTMSLLRNYFRGEKSVNFDQMNFSRFSRGNIYDFLVWLRDTRNNSVQTLNVRLAAIKSFLKYCSEEDIELTAVYLEAAGIHAFKGTKKPYAEYLNPEQLKLVFSSADITTKHGRRDRFFMIFAYETGARIQELLDLQLSGIIRNESGIRIRIHGKGNKIRYVPLLGTTVKHLEAYLSEFHNKDTPDACLFFTIHNSGKTQMKPAPLILQLR

SEQ ID NO: 18545 - DNA, 438 bp, Unknown
  Obtained from environmental sample
  misc_feature (1)..(438): n is a, c, g, or t
ttgccgcttctaggagaaatgttagaaatcttggtttttagttctaattatttcgaagtttgtgtttttctccgtcgggtattgctgtttgttagtattttcattatatttaaagtaatcatgcctacttacgaatacgaatgtaaaagctgttctcacacttttgaggtttttcagtctatgagcgatcagccgctgaaagaatgtccgaaatgcggcaatgaagtccgccgtcttattttcggcggagccggcgtaattttcaaaggttcggggttttatgttaccgacaagggtaaaaatacaaccgccgccgcttcaaaaccttctgccgataaaaaaactcaaaaaagcgaaagttcccagtcaacacctgcggcatcttccccatgcagtgaatgccccaaaaaaggcgcttcagcgtcatgtccggcgtaa

SEQ ID NO: 18546 - protein, 145 aa, Unknown
  Obtained from environmental sample
  misc_feature (1)..(145): Xaa is any amino acid
MPLLGEMLEILVFSSNYFEVCVFLRRVLLFVSIFIIFKVIMPTYEYECKSCSHTFEVFQSMSDQPLKECPKCGNEVRRLIFGGAGVIFKGSGFYVTDKGKNTTAAASKPSADKKTQKSESSQSTPAASSPCSECPKKGASASCPA

SEQ ID NO: 18547 - DNA, 405 bp, Unknown
  Obtained from environmental sample
  misc_feature (1)..(405): n is a, c, g, or t
atggccggntggtacggagtggtttctgatcgatgccgaaggaaaattttgggcagggttgcggcaaaggcagcttccattcttcggggaaaagaaaaggcggtttttgcgccccaccaggaattgggagactatgtagttataattaacgcaggtaaaatagcgatttccggcaataaggcgcagcaaaaactgtaccaccatcacacagggtatccgggcggtctaaaaacggtaaatttccgggcgatgatcgcaaagcacccgtcaactccgctggaattggcgattaaaggaatgcttccaaagggcccattggggaggaagctgctaaaaaatgccaagctgtatccaggagccgagcatccccatgcggctcagaatctacagaagattgaattgtaa

SEQ ID NO: 18548 - protein, 134 aa, Unknown
  Obtained from environmental sample
  DOMAIN (6)...(134): Ribosomal protein L13
  misc_feature (1)..(134): Xaa is any amino acid
MAGWYGVVSDRCRRKILGRVAAKAASILRGKEKAVFAPHQELGDYVVIINAGKIAISGNKAQQKLYHHHTGYPGGLKTVNFRAMIAKHPSTPLELAIKGMLPKGPLGRKLLKNAKLYPGAEHPHAAQNLQKIEL

SEQ ID NO: 18549 - DNA, 393 bp, Unknown
  Obtained from environmental sample
  misc_feature (1)..(393): n is a, c, g, or t
atgataaagaatcttggtatcgggacaggccgcagaaagacttcagtggccagggtttatgtaagggacggaaacggaaaaatatcgataaacggcaaagagctaaatcaatattttccacaagggcagcatattttaatggttcgccaacccctcatggttacatcctcagagaacaattttgacatatttatcaacgtttacggcggcggcgtacacggccaggccgaagcctgccgccatggccttgcgagggcgctttgtcaggtagatcagggcaactacaccagcttaagaagcaatggataccttacccgcgatcccaggatggtggaacgcanaaagtacggtatggcaggtgcccgcaggcgcttccagttctccaagcgctga

SEQ ID NO: 18550 - protein, 130 aa, Unknown
  Obtained from environmental sample
  DOMAIN (10)...(130): Ribosomal protein S9/S16
  misc_feature (1)..(130): Xaa is any amino acid
MIKNLGIGTGRRKTSVARVYVRDGNGKISINGKELNQYFPQGQHILMVRQPLMVTSSENNFDIFINVYGGGVHGQAEACRHGLARALCQVDQGNYTSLRSNGYLTRDPRMVERXKYGMAGARRRFQFSKR

SEQ ID NO: 18551 - DNA, 537 bp, Unknown
  Obtained from environmental sample
  misc_feature (1)..(537): n is a, c, g, or t
gtggggacaaatgataccggggaactgataaccaaacatatcctcgattccctggctcctctgggaattatttaccgtttgctggtacaggctagtaacggaaccgcaatgcgtatcgccgatgttggttcgggcgcgggcttgcccggtatcccccttgccatttgtctgccacagtgttctgttacccttattgagcgcatgggcaagagggcgggttttttatggaacgcaaaggcccgcctgggcctttccaacatttccgtagaagaaggcgagctggaaagaaccgcgtccggtaatttccggcttgttgtatttcgcgcttttaagccactggaaccgaaattacttgcaagcctttttcgcgcctgcgccgggggaggggtccttgccgcctacaagggccgacgcgagaaagtcgcgcaagagatggccccgctggaaaaactgtgcggcagttgggaggcaatcccctgtgcagtgccctttctggatgaggaacggaatcttttagttatcaggcccataccgtaa

SEQ ID NO: 18552 - protein, 178 aa, Unknown
  Obtained from environmental sample
  DOMAIN (2)...(172): Glucose inhibited division protein
  misc_feature (1)..(178): Xaa is any amino acid
MGTNDTGELITKHILDSLAPLGIIYRLLVQASNGTAMRIADVGSGAGLPGIPLAICLPQCSVTLIERMGKRAGFLWNAKARLGLSNISVEEGELERTASGNFRLVVFRAFKPLEPKLLASLFRACAGGGVLAAYKGRREKVAQEMAPLEKLCGSWEAIPCAVPFLDEERNLLVIRPIP

SEQ ID NO: 18553 - DNA, 330 bp, Unknown
  Obtained from environmental sample
  misc_feature (1)..(330): n is a, c, g, or t
ttgatgcggtttccgaacccgcaccgaggtgtcctgagatttgaaatcgggggccgggcggtgaatgggataaaatttgctggcgttcaccggccccttgccgtccacggggtggccgaccacattcagcacccggcccaggacctccttgcccaccggcatggagatgggagcgccggtgtcttttacgggcatgccgcgcaccaagccgtcggagatgtccatggcgatggcccggaccacgttgtcgcccaaatgctgggccacttccagaataaggttgtcgggctggtcgtttatggccgggttggtgaccagaagggcgtttaa

SEQ ID NO: 18554 - protein, 109 aa, Unknown
  Obtained from environmental sample
  misc_feature (1)..(109): Xaa is any amino acid
MMRFPNPHRGVLRFEIGGRAVNGIKFAGVHRPLAVHGVADHIQHPAQDLLAHRHGDGSAGVFYGHAAHQAVGDVHGDGPDHVVAQMLGHFQNKVVGLVVYGRVGDQKGV

SEQ ID NO: 18555 - DNA, 483 bp, Unknown
  Obtained from environmental sample
  misc_feature (1)..(483): n is a, c, g, or t
gtgcggagttgggagttggatatagttgatataggggcgccgtttacggttgtggtggattacgcgcatactcctgatgctttggtaaatgtcttaaagacgtgcgaggagttgacaagcgggaaagtgatatgcgttttcggttgcggcggagacagggataagacgaagcgcccgttaatggccaaagctgtggcggagaattgcgatagggcggtggtgacgtcggacaatccgcgcagcgaggagccggaggcgataattgacgatatattaaaaggtatgccgtctgattttccttataaggttatggcggatagaagagaagcgataaagatagcgttgagcgaggcgcaggcgggggattgcgtagtgatagcgggtaaggggcatgaggcgtatcaagaggtcaaaggaaaacggagtggttttgacgacagggcggaggcaatgaaatgcgcaacaacaacaagacgccgttaa

SEQ ID NO: 18556 - protein, 160 aa, Unknown
  Obtained from environmental sample
  DOMAIN (4)...(88): Mur ligase family, glutamate ligase domain
  misc_feature (1)..(160): Xaa is any amino acid
MRSWELDIVDIGAPFTVVVDYAHTPDALVNVLKTCEELTSGKVICVFGCGGDRDKTKRPLMAKAVAENCDRAVVTSDNPRSEEPEAIIDDILKGMPSDFPYKVMADRREAIKIALSEAQAGDCVVIAGKGHEAYQEVKGKRSGFDDRAEAMKCATTTRRR

SEQ ID NO: 18557 - DNA, 435 bp, Unknown
  Obtained from environmental sample
  misc_feature (1)..(435): n is a, c, g, or t
atgcgcaacaacaacaagacgccgttaacggtaggcgacctgatcgattggtcgtcaggaaagtccgagctttccgagtcggcccgtaagcgtaaggtggccacggtgtggaacgattcgcgaaaagtcacgcctgaaagcggcggcgacgtctttatcgctttgcgcagcgataccgacgacggccatcgttatgtggagtcggcgttcaaaagcggcgctattgcggccgttgttgacaaaaaaggagttaatgccgtccccgaaaaatatcgcanaaaatgtatagttgtcgccgatacgctgaaatccatacaaaaggcggcggcgcgttaccgtaaggagatggggttattggtcgttggcatcaccggttcgaacggcaagactaccacgcgtagttttatctccgcggttctcaagagcgcgggttaa

SEQ ID NO: 18558 - protein, 144 aa, Unknown
  Obtained from environmental sample
  DOMAIN (32)...(113): Mur ligase family, catalytic domain
  misc_feature (1)..(144): Xaa is any amino acid
MRNNNKTPLTVGDLIDWSSGKSELSESARKRKVATVWNDSRKVTPESGGDVFIALRSDTDDGHRYVESAFKSGAIAAVVDKKGVNAVPEKYRXKCIVVADTLKSIQKAAARYRKEMGLLVVGITGSNGKTTTRSFISAVLKSAG

SEQ ID NO: 18559 - DNA, 642 bp, Unknown
  Obtained from environmental sample
  misc_feature (1)..(642): n is a, c, g, or t
ttgtatgacagcgggcgaccgcaggtcgccccctacaggccgtattgtatagatattaatgttgtaggggcgaactgtgttcgcccgcgtatgtatcaacgaaaggtgataacgcctgtgttcgacgacatcgtaaaaaacgctccgaaaagcgtggccgtaataggcgcagccaagagcggcatcgccgcggccaagtattttctctctcgcgaaagccgcgtcttcataagcgatgtttgcgacagggggcggcttgactcaattttaagcgaaaatcaattggacgggagcggattggtcgagagcgaggcgggcgggcatagcgataaggtattggagtgcgaactaataatcctctcgccgggagttcgcggcgatttggatattctcaaatcggcggcggcgaaaggtattccggtgtggtcggaaatggagcttgggtatagggtttccaaagcgccgttcttagcagttaccggatcgtcggggaagagcaccaccgtgtcgctcttggcctccgcgatgagatccgccggatttgagacggcgctcgcgggaaatatcggcacgccggttatagaagtgacgccgcaattatctaaagacgcggtggtcgtcgccgagggtccatttcagtga

SEQ ID NO: 18560 - protein, 213 aa, Unknown
  Obtained from environmental sample
  misc_feature (1)..(213): Xaa is any amino acid
MYDSGRPQVAPYRPYCIDINVVGANCVRPRMYQRKVITPVFDDIVKNAPKSVAVIGAAKSGIAAAKYFLSRESRVFISDVCDRGRLDSILSENQLDGSGLVESEAGGHSDKVLECELIILSPGVRGDLDILKSAAAKGIPVWSEMELGYRVSKAPFLAVTGSSGKSTTVSLLASAMRSAGFETALAGNIGTPVIEVTPQLSKDAVVVAEGPFQ

SEQ ID NO: 18561 - DNA, 750 bp, Unknown
  Obtained from environmental sample
  misc_feature (1)..(750): n is a, c, g, or t
atgaccgcaggtattatctgcggaattaccagcggagtgctgataaagaaagtaccggagccgcccggcgtgggaaaagccgaaaaaatcaaccttatcggcattttccgcgacgccctttcgcagccgccgattaaactttttttgataattctgatgattgtcgcgctggtatctggagtgtcgcggacatttttggtagtgtatgcccgcgaagcgttttttcaggaagacggcatgatcctgctctactcggttttcggcggactgggaaatttgctggcggggatgctgattaaattctttgttgataaacttggcgcaaaacctattttcattatttgtaccataatcagtctggtgaccatgatccccattgtgttcttttcatcttcggctgccggttatttgaccacggggattctcttcctttctttcctgtttttcatgctgaactttggctttttgggttccgagggaatcgcgcagacatattttatgggattggttccgcccgaaaaaacactcgacatgggtatattgtatttttttgtttttggcatcgccggcgcgggcggctcttttcttgccggagtttttctggatatattaaaattcttcgggtgttcacactttgtctcattcaaaatactctatgccattattatagtgttaactgcaatagcaatttatttgcagcgaanacttactccgttgggggcgctttctctgggaggagcggtaagataa

SEQ ID NO: 18562 - protein, 249 aa, Unknown
  Obtained from environmental sample
  misc_feature (1)..(249): Xaa is any amino acid
MTAGIICGITSGVLIKKVPEPPGVGKAEKINLIGIFRDALSQPPIKLFLIILMIVALVSGVSRTFLVVYAREAFFQEDGMILLYSVFGGLGNLLAGMLIKFFVDKLGAKPIFIICTIISLVTMIPIVFFSSSAAGYLTTGILFLSFLFFMLNFGFLGSEGIAQTYFMGLVPPEKTLDMGILYFFVFGIAGAGGSFLAGVFLDILKFFGCSHFVSFKILYAIIIVLTAIAIYLQRXLTPLGALSLGGAVR

SEQ ID NO: 18563 - DNA, 606 bp, Unknown
  Obtained from environmental sample
  misc_feature (1)..(606): n is a, c, g, or t
ttgnnncccatgcagatcggccgagtgcactgttatgtgctgggatcggaagatcgttctgccgccataattgttgatccgggcagcatggatgaacagcttcttgagtatcttgaaaaagatgatttgaatccgagggctgtactgattacccacgatcacactggtcatatacgcgggctgcggactttaatgcgcatataccatgtggaaatttttgcgataaaccgctatatccttgacaacaggacaacgccggtaaaggacggagacagattaaatattggtcctttttccgttgaagtaatttcaattcccggtcattcggccgattctgttgtttaccggattgaaagcctgctttttaccggtgatgtgctgacaacgggcatggtaggtacaacggccagttcctacagcgcggcaacacaaattaacaaactgcgaagccgcatcctgtcgctgcccggcgattataccgtgcttcccggccacggtcctccttcaactttagaggcagaacggcgctataatgtgagtattaccaattacaatgaaatacgaacccgcaaaccttctttcaggctcaacattttgaaagattaa

SEQ ID NO: 18564 - protein, 201 aa, Unknown
  Obtained from environmental sample
  DOMAIN (8)...(165): Metallo-beta-lactamase superfamily
  misc_feature (1)..(201): Xaa is any amino acid
MXPMQIGRVHCYVLGSEDRSAAIIVDPGSMDEQLLEYLEKDDLNPRAVLITHDHTGHIRGLRTLMRIYHVEIFAINRYILDNRTTPVKDGDRLNIGPFSVEVISIPGHSADSVVYRIESLLFTGDVLTTGMVGTTASSYSAATQINKLRSRILSLPGDYTVLPGHGPPSTLEAERRYNVSITNYNEIRTRKPSFRLNILKD

SEQ ID NO: 18565 - DNA, 831 bp, Unknown
  Obtained from environmental sample
  misc_feature (1)..(831): n is a, c, g, or t
ttgtttgacgaagagcgaaagaaacccctaccccgctttccggcggttgtgggcgtagtaagttccccgacgggagcggcggtacgcgacattcttaacatactcgcgaggcgggcgggcggcattaaagtgataatccttcccgctcccgtgcagggagacgaagccgccgcccttatcgcggcaagaataaggcaggctaaccaatggaaaatagcggacgtgcttattgtgggcaggggcggcggctcacttgaagacctattgcccttctccgacgaggaagtagtgcgcgcggttgcgacttctgaaatacccgttgtaagcgcggtggggcatgaaattgactgggctttaagcgattatgccgcggacaagcgcgcgccgacgccttccgccgcggcggaacttgtaagcgagagccgcgccgcgattacggatacaattcatacaatgattgaaagctttaagagcgttatacgcgcgcgcatggaaaaagcgcggctattgcttaaaccgtttgatttacgggatttggaataccgtttccgcgccattttacagcctcgcctgatccgccttgacgacgcgaaagacgcgcttataaacgcgatttccgacaggaaagagagtttgcgcacaaggatagctcttacctccgctgtaattgaggccgcaaatcctcttgcgtcaatggagcgcggtttttcggttgtgacagactcagacggcaaattagtgcgcgattcaaaaaaagtaaaaaaaggggagcggctttttatccggccgcttaagggaaaaataaacgcaatagtggaaagttgcgaataa

SEQ ID NO: 18566 - protein, 276 aa, Unknown
  Obtained from environmental sample
  DOMAIN (73)...(231): Exonuclease VII, large subunit
  misc_feature (1)..(276): Xaa is any amino acid
MFDEERKKPLPRFPAVVGVVSSPTGAAVRDILNILARRAGGIKVIILPAPVQGDEAAALIAARIRQANQWKIADVLIVGRGGGSLEDLLPFSDEEVVRAVATSEIPVVSAVGHEIDWALSDYAADKRAPTPSAAAELVSESRAAITDTIHTMIESFKSVIRARMEKARLLLKPFDLRDLEYRFRAILQPRLIRLDDAKDALINAISDRKESLRTRIALTSAVIEAANPLASMERGFSVVTDSDGKLVRDSKKVKKGERLFIRPLKGKINAIVESCE

SEQ ID NO: 18567 - DNA, 411 bp, Unknown
  Obtained from environmental sample
  misc_feature (1)..(411): n is a, c, g, or t
ttgacaagccgtatcaaatttgatacatttataatatgtccaatgcacatatgcaaaagaccattattgtttattttttcaaaaacttcttctggaaaagaaccggttcgagattggttaaaacttcggacacaggaggaaaagaaagaaataggcgaagatatcaaagcggttgaatttttatggccgattggttatccccgtgtcaggaagttggataaggatttatgggaaattcgtactgatttacgaaatggaatttgcagagttttctttactgtttggaagaaatatatggttttgttacatagtattattaagaaaagtcagaaaacgactcaacaggatttggatcttgcaaagacgcggcgtgacttggtattagcagaaggaataacaaatgaaaaataa

SEQ ID NO: 18568 - protein, 136 aa, Unknown
  Obtained from environmental sample
  DOMAIN (73)...(127): Phage derived protein Gp49-like (DUF891)
  misc_feature (1)..(136): Xaa is any amino acid
MTSRIKFDTFIICPMHICKRPLLFIFSKTSSGKEPVRDWLKLRTQEEKKEIGEDIKAVEFLWPIGYPRVRKLDKDLWEIRTDLRNGICRVFFTVWKKYMVLLHSIIKKSQKTTQQDLDLAKTRRDLVLAEGITNEK

SEQ ID NO: 18569 - DNA, 591 bp, Unknown
  Obtained from environmental sample
  misc_feature (1)..(591): n is a, c, g, or t
gtgttgatcaacaggggttccgcttcggcttcggagattgttgccggggcgctcaaggaccggggacgggcctaccttgtcggcgagaaatcctttggcaagggatcggtgcagcaggtgtatcccctggataccgtaggtttggataccgtaggtttcaaacttaccacagccctttactacacgcccagcgacgtgaacatcgacaagatcggcatcccgcctgaccgcgaggtgaaattccccgaatatacggcggcggacgcggaaaaactgaacgagctgatcaaggcaaacaagattcccgaatttgttacgcaaaacccgaaagccggcgcggcccaggttgaagcctttgctcaaagcctggagcgggaatacaggcttaatctttccctgctcaaacggttgattcggaacgaacaaaaccggaccatcattgccccggtgtacgatctggaatacgatgttcaactgcaggaagcggttaatattttaagaagcggcgcttatcccggcctgatgcagaccaccaagaccctcaaagccctacaggaagaagcattgaccgatctgccgctggcctcttga

SEQ ID NO: 18570 - protein, 196 aa, Unknown
  Obtained from environmental sample
  DOMAIN (1)...(79): Peptidase family S41
  misc_feature (1)..(196): Xaa is any amino acid
MLINRGSASASEIVAGALKDRGRAYLVGEKSFGKGSVQQVYPLDTVGLDTVGFKLTTALYYTPSDVNIDKIGIPPDREVKFPEYTAADAEKLNELIKANKIPEFVTQNPKAGAAQVEAFAQSLEREYRLNLSLLKRLIRNEQNRTIIAPVYDLEYDVQLQEAVNILRSGAYPGLMQTTKTLKALQEEALTDLPLAS

SEQ ID NO: 18571 - DNA, 393 bp, Unknown
  Obtained from environmental sample
  misc_feature (1)..(393): n is a, c, g, or t
atgacagatcggccgagggccttgtctatggggactcccgaatacaatcaaaaactggtgctacggtccgagacccgaacaagggttatgaaaatgatggccgatctaaaactggacgcgatagtctacccccaccagcagcaactggtgtgcaaggtgggcggctcgcagcaacagcgtaacggagtgctatgctcggtaacaggctttccttccatcgccgtacccgcgggattctccgcgcctacgccggaagcgcccctgggcgtacccgtgggcatggagatcatcggcaggccctggtctgaaccgctgctcattgaactggcctacggttttgaacaggcttcgcggttcaggaaagttcccctgagtgttcctgaattacaataa

SEQ ID NO: 18572 - protein, 130 aa, Unknown
  Obtained from environmental sample
  misc_feature (1)..(130): Xaa is any amino acid
MTDRPRALSMGTPEYNQKLVLRSETRTRVMKMMADLKLDAIVYPHQQQLVCKVGGSQQQRNGVLCSVTGFPSIAVPAGFSAPTPEAPLGVPVGMEIIGRPWSEPLLIELAYGFEQASRFRKVPLSVPELQ

SEQ ID NO: 18573 - DNA, 462 bp, Unknown
  Obtained from environmental sample
  misc_feature (1)..(462): n is a, c, g, or t
ttggagaagcgcgaattctcaagctaccttttgggtggcaaaaagcaaattctcatgaggaccgaaaaaaacatccgcgagaccttccccaaactgcgcattgtaggccgcttcgccggttacttcaggcatcaggaagaaactaccatcatcgaagccatccgcaaggcttcgccctctctgcttttggtcggcaccggtgtccgcggggaagagcgctggatcgccaggcacaacgcgtcccttggcaatggcctgcggatgtggtgtagcgatctcttcgatgtttttgccgagcgaaaaaaacacccgtccaaagctgtattcaattacggccttgaatggataggctactgcttccagcagcctttgaaattgttcaggatatttccctttttgtattacaagctgctgcttttgatttacaagttgtttgttaagagaggctccccgcaaaactga

SEQ ID NO: 18574 - protein, 153 aa, Unknown
  Obtained from environmental sample
  DOMAIN (1)...(129): Glycosyl transferase WecB/TagA/CpsF family
  misc_feature (1)..(153): Xaa is any amino acid
MEKREFSSYLLGGKKQILMRTEKNIRETFPKLRIVGRFAGYFRHQEETTIIEAIRKASPSLLLVGTGVRGEERWIARHNASLGNGLRMWCSDLFDVFAERKKHPSKAVFNYGLEWIGYCFQQPLKLFRIFPFLYYKLLLLIYKLFVKRGSPQN

SEQ ID NO: 18575 - DNA, 804 bp, Unknown
  Obtained from environmental sample
  misc_feature (1)..(804): n is a, c, g, or t
atgctcagattcggccgagaatttagaaggtccttcaaagaaaatgagccgggcttaaagggaaaatttgaagcggattttgctggtgccagtggctacaacaatttcagcggcggtgctggcagcggcactagcaacagcactagcactagcgaaaccaagagcagttttcaatacaatgaagatgacccttcgtcatcaatagttattgattctactaaaaccaccaccaccaccactactactgtttcttctggtttccgtgttcgccagtcttggggttcggtaaacttcaaagatataggcttaacgcttttgttcggtcaaacagatgatgtggtgaatccgattgacccgccttccataaatcctagcagcctcaacggtgttggaaacatcggtagccgccgtccgcaaattcgcgcaaccgaagccgttggtccggttgaactagctgttgcaataactcacgaccgtttaagagccgatgacaatgtagcttcttctaccccagctttccaaggtcgcttagggctaaaggtaccggcatcttgggctgatgagaaagcaaatttgactgttggcgtttcgggtctttttgccaaagacgaagctgcaaatgcagatgataaagatcgtaaaagaaggggaccaaccaccaatttaataggcttagacttgtctgctcctctgttgaatatcctaactttaaccggagaattttttatgggcaagaatctctctcgctatggcgatggaagtttgggcttaatcatacaagttcaagcaatcctactaaagtga

SEQ ID NO: 18576 - protein, 267 aa, Unknown
  Obtained from environmental sample
  misc_feature (1)..(267): Xaa is any amino acid
MLRFGREFRRSFKENEPGLKGKFEADFAGASGYNNFSGGAGSGTSNSTSTSETKSSFQYNEDDPSSSIVIDSTKTTTTTTTTVSSGFRVRQSWGSVNFKDIGLTLLFGQTDDVVNPIDPPSINPSSLNGVGNIGSRRPQIRATEAVGPVELAVAITHDRLRADDNVASSTPAFQGRLGLKVPASWADEKANLTVGVSGLFAKDEAANADDKDRKRRGPTTNLIGLDLSAPLLNILTLTGEFFMGKNLSRYGDGSLGLIIQVQAILLK

SEQ ID NO: 18577 - DNA, 834 bp, Unknown
  Obtained from environmental sample
  misc_feature (1)..(834): n is a, c, g, or t
ttgtctgtggaagcatcggtgaaatttttcaatgaacttaaattgagtgaaaaagaaaagagaattggagcggaaatattcagggagattaaagggaggcttggatttttgcaggctgttgggcttggatatttaacgctgaacagaggttcagcaacactgagcggaggcgaagcccagagaattcgccttgctgggcacgtgggtgctggcttgcaaggcgttctctatgttttagatgaaccgagcattgggcttcacgcacgcgacaatgagagacttttggctcttttggaaaaacttaggagtcaagggaatagccttattgtggttgagcacgatgaagaaaccataaaacgtgcggactgcatcgcagacataggtcccggcgcagggagcgaaggcggctcgcttgtggcactcgggagcattaaagatttgcaaaaaaatcccgcatcattaacgggtgcatatttaagcggaaaaaagaaaattgaaatgccaaaaaaacggcgagaagtgaataaagaaacaccgagaattaaaatacttggggcacgtgcaaataatttgaaaaacatagatgttgaaattcctctttctgttctcaccgttgtaaccggagttagcggctctggcaaaagcactttgataaaccatattctaaaaaaagcactcgcaaaaaaattccacggagcttacgaagaaccaggtgtgcacaaaagcattgaagggctggaacacatagacaaggttatagaaatagaccaaagccccataggaagaacgccccgttctaatcccgccacatacacaaaagttttgaagagataa

SEQ ID NO: 18578 - protein, 277 aa, Unknown
  Obtained from environmental sample
  DOMAIN (15)...(130): ABC transporter
  misc_feature (1)..(277): Xaa is any amino acid
MSVEASVKFFNELKLSEKEKRIGAEIFREIKGRLGFLQAVGLGYLTLNRGSATLSGGEAQRIRLAGHVGAGLQGVLYVLDEPSIGLHARDNERLLALLEKLRSQGNSLIVVEHDEETIKRADCIADIGPGAGSEGGSLVALGSIKDLQKNPASLTGAYLSGKKKIEMPKKRREVNKETPRIKILGARANNLKNIDVEIPLSVLTVVTGVSGSGKSTLINHILKKALAKKFHGAYEEPGVHKSIEGLEHIDKVIEIDQSPIGRTPRSNPATYTKVLKR

SEQ ID NO: 18579 - DNA, 573 bp, Unknown
  Obtained from environmental sample
  misc_feature (1)..(573): n is a, c, g, or t
gtgttttcgacaggtggatggcaggggagggagccgttttcccgccgccttatgcttgatgtatctgtagaaagggacggccgcaaaatctttcgggaatgcggtcttaatgatgttattgtttcatcttccggcgttgcaaagataataaatttgcgccttttttatgatgaagaaaaaatgaagacagaaataaagctgggttcgtaccgttcggatggccttattatcgccaccccgaccggttcaaccgcttattcagcggctgttggaggccccgttgttgatcctgaacttgaagcgtttatattaagccccatttgcccttttatacttacaaaccgccctttggtattgccggcaacaggaacggtaattgtggaggtggcgaatgaacagcaaagcggaatattattgacattggacggtcaggttaaggagaaaataaaaaaaggggacaggatttttattgaaaaggcgccttattactgctcactaattgcttcctgccgcagcggtttttattcggcgctcaggaaaaaactctcatgggcgggagaaggagaagtctag

SEQ ID NO: 18580 - protein, 190 aa, Unknown
  Obtained from environmental sample
  DOMAIN (2)...(169): ATP-NAD kinase
  misc_feature (1)..(190): Xaa is any amino acid
MFSTGGWQGREPFSRRLMLDVSVERDGRKIFRECGLNDVIVSSSGVAKIINLRLFYDEEKMKTEIKLGSYRSDGLIIATPTGSTAYSAAVGGPVVDPELEAFILSPICPFILTNRPLVLPATGTVIVEVANEQQSGILLTLDGQVKEKIKKGDRIFIEKAPYYCSLIASCRSGFYSALRKKLSWAGEGEV

SEQ ID NO: 18581 - DNA, 303 bp, Unknown
  Obtained from environmental sample
  misc_feature (1)..(303): n is a, c, g, or t
ttgaagtacggattacctgaacggacacttaatactcttaattctatttttcgaaagtatcccgggataaaagaagttattctttatggcagcagggcaaaaggaaattaccgcaccggttctgatattgatattaccttaaaaaccacatctagtttttgttggaatgatctgctgcgtatttcaagtgattttgatgactcggatatgccttattttgttgatgtgtcaatttatgatatgttaaaaaatactgatttgacggatcatattgatagggttgggaaggttttgtatccgtga

SEQ ID NO: 18582 - protein, 100 aa, Unknown
  Obtained from environmental sample
  DOMAIN (6)...(99): Nucleotidyltransferase domain
  misc_feature (1)..(100): Xaa is any amino acid
MKYGLPERTLNTLNSIFRKYPGIKEVILYGSRAKGNYRTGSDIDITLKTTSSFCWNDLLRISSDFDDSDMPYFVDVSIYDMLKNTDLTDHIDRVGKVLYP

SEQ ID NO: 18583 - DNA, 312 bp, Unknown
  Obtained from environmental sample
  misc_feature (1)..(312): n is a, c, g, or t
ttgaccgatcttgaaaaacaaggttttatacagggatttgaatttacttttgaattggcatggaatgtaatgaaagattatcttgaagaacaggggatatttgatattgtcggcagtaaagccgccgttaaaaacgcttttcagaacggtttaattgatgacgggcaaatttggatggatatgatagaaagccgtaatatttcttcacattcgtatgacgaagaaaccgcaaataaaataattgaacagataaaaaatatttattttttacactttcagaaatacttaaataaaatggaaggtattaattga

SEQ ID NO: 18584 - protein, 103 aa, Unknown
  Obtained from environmental sample
  misc_feature (1)..(103): Xaa is any amino acid
MTDLEKQGFIQGFEFTFELAWNVMKDYLEEQGIFDIVGSKAAVKNAFQNGLIDDGQIWMDMIESRNISSHSYDEETANKIIEQIKNIYFLHFQKYLNKMEGIN

SEQ ID NO: 18585 - DNA, 486 bp, Unknown
  Obtained from environmental sample
  misc_feature (1)..(486): n is a, c, g, or t
ttggttctggagggaaatgaagccgaaagctttagcctgtcctgggttggcgttatccaatggatatgtcagagcgcataccgtccacatcacaaaagaaaaaactggtttgttagtgtaaagccttattgcgtaccggagcaagatgagcttcccgtttcagacatacgctttgaaactgcaaggtccggaggacccggaggccagcacgtcaataaaactgaaaccgctgtccgggcagtccatgtcccaacaggtaagtgcgccgttgcacggggagagcgatcccagcttatgaacaagaaattggcgctggcccggcttatggcccttttcgcggatgaaaaagccgcgaaagagaaacaaaaccgttctgagttacgccacacgcattgggagcttgaacggggcaaccccgtccgtgtatacgacggcgagactttgaaacttattaaaaggaagaataatgacagaaacaacagttaa

SEQ ID NO: 18586 - protein, 161 aa, Unknown
  Obtained from environmental sample
  DOMAIN (46)...(155): Peptidyl-tRNA hydrolase domain
  misc_feature (1)..(161): Xaa is any amino acid
MVLEGNEAESFSLSWVGVIQWICQSAYRPHHKRKNWFVSVKPYCVPEQDELPVSDIRFETARSGGPGGQHVNKTETAVRAVHVPTGKCAVARGERSQLMNKKLALARLMALFADEKAAKEKQNRSELRHTHWELERGNPVRVYDGETLKLIKRKNNDRNNS

SEQ ID NO: 18587 - DNA, 618 bp, Unknown
  Obtained from environmental sample
  misc_feature (1)..(618): n is a, c, g, or t
ttgtatctgcaaattttggaagattacggcaaaaattccgcgattttatataacatcgcaaattgcgcatacagaaaaggcgacataggaacggcgattttatatcttgaaagagccaaattactatcccccgacgataaagacatttcatcaaacttagattatttgcgaacacagactattgataaatatgaaaaaccggaattatcctttttcagacaaaattttgagaaatttcaaaatcttatttcattgcaaacacaaattattataattatagttttgtcttttttgattacgatttttacggctttaacgcttttttcgcaaaaacgcagaacggcgaaaatttacgtcataatgattttatttctattcatgcttacgctgggagtttcggcaggaattaaatataccacgcaaaagaatacgattagatgcgtgattttaagcaaaacggtcgatgcgttaaacgaaccgcgcggaaacaaaacaatattttccgctcacgaaggaacggtcttaaatattataaaaatcgtagataattggtatttcgtttcgcttaacaacggagcgagcggctggattcaaaaacaatcggttcaaataatttaa

SEQ ID NO: 18588 - protein, 205 aa, Unknown
  Obtained from environmental sample
  DOMAIN (13)...(46): Tetratricopeptide repeat
  misc_feature (1)..(205): Xaa is any amino acid
MYLQILEDYGKNSAILYNIANCAYRKGDIGTAILYLERAKLLSPDDKDISSNLDYLRTQTIDKYEKPELSFFRQNFEKFQNLISLQTQIIIIIVLSFLITIFTALTLFSQKRRTAKIYVIMILFLFMLTLGVSAGIKYTTQKNTIRCVILSKTVDALNEPRGNKTIFSAHEGTVLNIIKIVDNWYFVSLNNGASGWIQKQSVQII

SEQ ID NO: 18589 - DNA, 333 bp, Unknown
  Obtained from environmental sample
  misc_feature (1)..(333): n is a, c, g, or t
ttggaagcccaccttgcggcggaagccaaagctatgtccggaaacctgcttgaagatgttgacatagccgcccgccaggttatcgcaaagcacggctacggggaatactttacacaccgcaccgggcatggccttggcatcgacgttcatgagggcgactccgccaataccggggtcaaggttcccataaaacccggcatagtgttttccatcgaaccgggcatttatcttcccggccgcttcggcgtacggatcgaaaaccttgtagcaatcggtgagaacggaagcgaagtcctacacagctatccccgcgagctaaaaattattgattaa

SEQ ID NO: 18590 - protein, 110 aa, Unknown
  Obtained from environmental sample
  DOMAIN (2)...(101): metallopeptidase family M24
  misc_feature (1)..(110): Xaa is any amino acid
MEAHLAAEAKAMSGNLLEDVDIAARQVIAKHGYGEYFTHRTGHGLGIDVHEGDSANTGVKVPIKPGIVFSIEPGIYLPGRFGVRIENLVAIGENGSEVLHSYPRELKIID

SEQ ID NO: 18591 - DNA, 633 bp, Unknown
  Obtained from environmental sample
  misc_feature (1)..(633): n is a, c, g, or t
ttgttatcgcagattccatcttatgagtgctcggcgtccgaaccggtttcattgggcgagattcgggaggaaattgcccactcggagacttccggaatgtccaagcaggaatacatggatttccgtttcgatgatgccctcacggaaaaagaaaattatgatttgctggtcatgggaagaacccagggcgtgggctgttactgttttgtcaatgacgtgctgaaggagcaaatccgcaagtactataaaaattaccgttacctgatcgtagacaacgaggcggggcttgaacatgtcagccgcgggattttaccgcctgtggaattgatattgctggtaagcgactgttcgcggcggggcatacaggccgccggaagaatcgccgccatgattattgaactggacattaaagcgcaaaaagtggggcttatcgtaaaccgcgccccggacgggcagctcgccgaaggcataaaggaagaaatcgcgctgcagaaactcaacctgattggcgtgcttcccaatgatcctctggtttttgaatatgacaccgagggaaccccgcttgttaatctgccgttggaatctccggtgcgtcaggcgctggaaaaaataattcaatcattggaattatag

SEQ ID NO: 18592 - protein, 210 aa, Unknown
  Obtained from environmental sample
  DOMAIN (55)...(180): CobQ/CobB/MinD/ParA nucleotide binding domain
  misc_feature (1)..(210): Xaa is any amino acid
MLSQIPSYECSASEPVSLGEIREEIAHSETSGMSKQEYMDFRFDDALTEKENYDLLVMGRTQGVGCYCFVNDVLKEQIRKYYKNYRYLIVDNEAGLEHVSRGILPPVELILLVSDCSRRGIQAAGRIAAMIIELDIKAQKVGLIVNRAPDGQLAEGIKEEIALQKLNLIGVLPNDPLVFEYDTEGTPLVNLPLESPVRQALEKIIQSLEL

SEQ ID NO: 18593 - DNA, 738 bp, Unknown
  Obtained from environmental sample
  misc_feature (1)..(738): n is a, c, g, or t
ttgccggataaggtggagaacattgcatattgtgaactgaccgatgaacagcgcgatttctatatgacggttcttgacagcacgaaagaagagttatttaagagtattgagcaaaacggcttggaaaaatcgcggatgtcgattttctccgcgttattaagactgcgccaaatctgctgccacccgcggctttatgataaagagaacgttaaaaatatcgtgtcttcgggcaaatttgaaaaactgaaatcaatgctggaagagataatttccgaagggcaccgcgttctgttgttctcgcaatttgttgatatgcttgatattgtgaaggcttggctggagcgcgaaggcattccgtttgaatatttaaccggcaaaaccaaagacagacagggtgcggttgaaagatttaattcatctaaatctattccgattttcctgatcagtttaaaagccggcggaacgggcttgaacctgacaggagccgactatgtaatccattacgacccatggtggaaccctgccgttgaagaccaggcaaccgaccgcgcataccgtataggtcaaaccaaaaaagtttttgtgtacagacttatcaccaaaaacaccgttgaagaaaaaattcaaaaactcaaatcgcgcaaacgcaaccttgttgacagcgtaatttccgttgacagaaacatcaccaaatctctaaccatggatgatatcaaagagattttctctgttgattaa

SEQ ID NO: 18594 - protein, 245 aa, Unknown
  Obtained from environmental sample
  DOMAIN (112)...(188): Helicase conserved C-terminal domain
  misc_feature (1)..(245): Xaa is any amino acid
MPDKVENIAYCELTDEQRDFYMTVLDSTKEELFKSIEQNGLEKSRMSIFSALLRLRQICCHPRLYDKENVKNIVSSGKFEKLKSMLEEIISEGHRVLLFSQFVDMLDIVKAWLEREGIPFEYLTGKTKDRQGAVERFNSSKSIPIFLISLKAGGTGLNLTGADYVIHYDPWWNPAVEDQATDRAYRIGQTKKVFVYRLITKNTVEEKIQKLKSRKRNLVDSVISVDRNITKSLTMDDIKEIFSVD

SEQ ID NO: 18595 - DNA, 627 bp, Unknown
  Obtained from environmental sample
  misc_feature (1)..(627): n is a, c, g, or t
gtgaaaattgaacatgaacaccagataaaaaacactaaagaaaaagggataccgcttctatcggtttattttatcggagggttcgctattatttttctgtgccgttttgccatgtcatcggtttacacattttttcctttgtacctgacagagacattgaactggaacgcggtcgggcttatgttcgctttgtcttctgcgtcggaagttccgtttatgtttttatccatgatcctgctccgccgttttggcgcgcttccgcttctcgctctttccgccggaggaatcgccctgcggcttttgctgtgggcgtttttcccttacaaggctgttattatatcaggacagcttctccattccctgtgctatggaatctatcatccggccgcggtgcggtttatttcatctgtcttccccgccgaaaaacgcggcataggaatgccagtgtaccttgctcttggatcgggtctccccgcgcttttcggcaacatggtgggaggcgtaattgtggagtcagtcggataccgttcgctatttgcaatttacgccggtgccgcggtgctgggtgtgttgattttcggcattatgaggaagggaaaaggggctttcgtttcttattccaaataa

SEQ ID NO: 18596 - protein, 208 aa, Unknown
  Obtained from environmental sample
  misc_feature (1)..(208): Xaa is any amino acid
MKIEHEHQIKNTKEKGIPLLSVYFIGGFAIIFLCRFAMSSVYTFFPLYLTETLNWNAVGLMFALSSASEVPFMFLSMILLRRFGALPLLALSAGGIALRLLLWAFFPYKAVIISGQLLHSLCYGIYHPAAVRFISSVFPAEKRGIGMPVYLALGSGLPALFGNMVGGVIVESVGYRSLFAIYAGAAVLGVLIFGIMRKGKGAFVSYSK

SEQ ID NO: 18597 - DNA, 846 bp, Unknown
  Obtained from environmental sample
  misc_feature (1)..(846): n is a, c, g, or t
ttgccgantcgggccggcggacaagacgaagttgcaagcgataaagtttcagctatcaaggagacgtaccaaaaactggagcttgactgtattgttttgctcggtggaaacgggacaaacaccacaggttttaaacttgcccgtgaaggattgaatgttatcgggctgcctaaaacaattgataacgatattgtaggaacggacatgacattcggttttgattcggctctttctatcgggacggaagcaatagacaggcttcattctacggcgcagagtcacagcagagttattgttattgaactaatgggacacaaagcaggctggctttcactttacgccggagttgctggaggcggagacgtaattctcattcctgagattccgtataagatagatgagattgcaagccatcttgaaaaacgcgcaagatcggggaagacattttcaattgtggttgccgccgaaggcgcgctttccgttaaagaagcgcagatggataaaaaagaacgtaaaaaataccgtctggaaaacgggccttccgccgcctaccgtattgcgcgcgaaatagcggaagcgactgaaatggaaacaagagcgacagttctgggttatgtgcaacgcggaggagtcccaagcgcgtcagatcgtgttcttgctaccagtctcggaattgccgcggcggaacttcttgcanagggaaaatacggccgcatggttacgcttaacggcaatgaaatagcatctgccgatttaagcgttcccgaaggcaaggttaaaaatgttcctgaggatcattatatgcttgataccgcaagagctgtcggcacttgtttaggcgcataa

SEQ ID NO: 18598 - protein, 281 aa, Unknown
  Obtained from environmental sample
  DOMAIN (5)...(233): Phosphofructokinase
  misc_feature (1)..(281): Xaa is any amino acid
MPXRAGGQDEVASDKVSAIKETYQKLELDCIVLLGGNGTNTTGFKLAREGLNVIGLPKTIDNDIVGTDMTFGFDSALSIGTEAIDRLHSTAQSHSRVIVIELMGHKAGWLSLYAGVAGGGDVILIPEIPYKIDEIASHLEKRARSGKTFSIVVAAEGALSVKEAQMDKKERKKYRLENGPSAAYRIAREIAEATEMETRATVLGYVQRGGVPSASDRVLATSLGIAAAELLAXGKYGRMVTLNGNEIASADLSVPEGKVKNVPEDHYMLDTARAVGTCLGA

SEQ ID NO: 18599 - DNA, 759 bp, Unknown
  Obtained from environmental sample
  misc_feature (1)..(759): n is a, c, g, or t
ttggctgttttggcgggtcggaatgagcggcgaaatcggccaggtgccgctctggagggatgggggcgacctagtgggagccctggaggccctgttctccgcgtcgggcgaggtgctgacgatgacccgtctgcgcgaactgacgggcctgggcgagggggcaattctccaaggcatagaagtcctcatggacaggtgtcgccccccaagaggggtgtgcctgctggaagtcggcggcggatggcgcctcgcagtggcaccggagtacgcgggtctggtggccaacatggcaaaagccccaagagtcccgcgcctcacacaggcccaggtggagacgctggcgataatagcctacaggcagccaatcaccatgcccgaaatatgcgagatcaggggcgtgacatccgtctcaaaccaagtcaagtgcctgctagagcgcgagctgattgcccccgtcgggcgcaagcaggtggtgggcagaccgatgatgtacgccacctcggacggcttcttgctgcacttcggtctgaggggcatccaagacctgccccgtctctccgacttcggcgaggcggacctagaggcggccgcggaagctgtgccactggtgtgaacatggtcgcgccatggattggcgcggcctttggctgggtctatgtccactggcgactgtccgttgttgtacaaagacagtgttctgattcggggggaagccatgggtcagccagacacggccactgtagcatcaacacgccctaa

SEQ ID NO: 18600 - protein, 252 aa, Unknown
  Obtained from environmental sample
  misc_feature (1)..(252): Xaa is any amino acid
MAVLAGRNERRNRPGAALEGWGRPSGSPGGPVLRVGRGADDDPSARTDGPGRGGNSPRHRSPHGQVSPPKRGVPAGSRRRMAPRSGTGVRGSGGQHGKSPKSPAPHTGPGGDAGDNSLQAANHHARNMRDQGRDIRLKPSQVPARARADCPRRAQAGGGQTDDVRHLGRLLAALRSEGHPRPAPSLRLRRGGPRGGRGSCATGVNMVAPWIGAAFGWVYVHWRLSVVVQRQCSDSGGSHGSARHGHCSINTP

SEQ ID NO: 18601 - DNA, 591 bp, Unknown
  Obtained from environmental sample
  misc_feature (1)..(591): n is a, c, g, or t
atgagcggcgaaatcggccaggtgccgctctggagggatgggggcgacctagtgggagccctggaggccctgttctccgcgtcgggcgaggtgctgacgatgacccgtctgcgcgaactgacgggcctgggcgagggggcaattctccaaggcatagaagtcctcatggacaggtgtcgccccccaagaggggtgtgcctgctggaagtcggcggcggatggcgcctcgcagtggcaccggagtacgcgggtctggtggccaacatggcaaaagccccaagagtcccgcgcctcacacaggcccaggtggagacgctggcgataatagcctacaggcagccaatcaccatgcccgaaatatgcgagatcaggggcgtgacatccgtctcaaaccaagtcaagtgcctgctagagcgcgagctgattgcccccgtcgggcgcaagcaggtggtgggcagaccgatgatgtacgccacctcggacggcttcttgctgcacttcggtctgaggggcatccaagacctgccccgtctctccgacttcggcgaggcggacctagaggcggccgcggaagctgtgccactggtgtga

SEQ ID NO: 18602 - protein, 196 aa, Unknown
  Obtained from environmental sample
  DOMAIN (19)...(178): Putative transcriptional regulators (Ypuh-like)
  misc_feature (1)..(196): Xaa is any amino acid
MSGEIGQVPLWRDGGDLVGALEALFSASGEVLTMTRLRELTGLGEGAILQGIEVLMDRCRPPRGVCLLEVGGGWRLAVAPEYAGLVANMAKAPRVPRLTQAQVETLAIIAYRQPITMPEICEIRGVTSVSNQVKCLLERELIAPVGRKQVVGRPMMYATSDGFLLHFGLRGIQDLPRLSDFGEADLEAAAEAVPLV

SEQ ID NO: 18603 - DNA, 831 bp, Unknown
  Obtained from environmental sample
  misc_feature (1)..(831): n is a, c, g, or t
atgtgcgaaaaggcagttcagaaatacggcgatttcctaagacacgttcccgcagaataccgctcagaaaaaattatcgcctcgacaatagaaaagaacgggcttatgctgcatgttattgacgaaaaacaaaaaacagaacagctttgccttgcggcggtaaaaaagcacggaggcgcgcttcagtatgtcccttatcaattacgcacggaggaaatttgccttgcggcggtaaagcattacggcaatgctcttgagcatgtgcctgaagcatttaaaacaaaagagctttgccttgcggcgcttaaaaaggatttttcacaatggacaatgagttatgtgccggaacatatcagaacagcggatttttacgatgaatgtcttacgggccataaacactccatatcatttcctcatacggatattcctgaatcattgacagaggatatttggcgcaaggcagtcagaaataacgccaacgcgcttgccgccgttccggaagagcagagaacctttgagttatgcgttgaagccctgctaagtgaatatagcttttcagcgcttgaatatgttcctgataaattcaaaactcatgaattttggctaaactgtatacgcattaatggcagttcacttaaaggctttcctgaagctctcaagacctacgagttgtgccttgaagcggtcagggattacgcttccgcgcttaaatatgtgcctccccatcttttaaccagggaaattgtctttgccgctgtcagcaaggacggcgacgctcttgaatatgactccgcggcgttcaggacagaagaactatatatgaagccataa

SEQ ID NO: 18604 - protein, 276 aa, Unknown
  Obtained from environmental sample
  misc_feature (1)..(276): Xaa is any amino acid
MCEKAVQKYGDFLRHVPAEYRSEKIIASTIEKNGLMLHVIDEKQKTEQLCLAAVKKHGGALQYVPYQLRTEEICLAAVKHYGNALEHVPEAFKTKELCLAALKKDFSQWTMSYVPEHIRTADFYDECLTGHKHSISFPHTDIPESLTEDIWRKAVRNNANALAAVPEEQRTFELCVEALLSEYSFSALEYVPDKFKTHEFWLNCIRINGSSLKGFPEALKTYELCLEAVRDYASALKYVPPHLLTREIVFAAVSKDGDALEYDSAAFRTEELYMKP

SEQ ID NO: 18605 - DNA, 690 bp, Unknown
  Obtained from environmental sample
  misc_feature (1)..(690): n is a, c, g, or t
ttgaacgatacgtcggtaatttcagttgtccatagggaatgggaaccaacatggaaaaacgagcctttaaccctgcttggtccctggcttcgttatgaggggccggtttccctgccgcgcatagcggaggttttcggcgttgacgttagtattgccgatgatgcggtaaacgccttggttgaagttgaggaaacagtcggcgatgtgacggtaacggatgtccccgctcccatctcccgctccctgctcatttgtgaccgtgaaaatcttgaaatgctgcttcgtctttcccgcaaaaaggcccggcctgaaataaaggaacggcccgccgctctgctggttccctttcttgcactgcgtcaggggcttatagagggaacagccaacgccgatgccgcttttttgaaaaaacttgccgcatggcgcgccccggttaaactgtgggaaaccgaattctgcccggcccgctgcggcgattatcaccctgaaataattgaccgcgaaattcaggaaggccgcctggtctggtacggcggcggtaaggaacggatcagtctgtgccggcctgatgatctggatttggtatataccaatgaagaatatttgaatacgcggttgtcgtccgcttatacggaacttttttcgcaggcaatgaactcaggtttttttgaccggccccgcagtttttga

SEQ ID NO: 18606 - protein, 229 aa, Unknown
  Obtained from environmental sample
  misc_feature (1)..(229): Xaa is any amino acid
MNDTSVISVVHREWEPTWKNEPLTLLGPWLRYEGPVSLPRIAEVFGVDVSIADDAVNALVEVEETVGDVTVTDVPAPISRSLLICDRENLEMLLRLSRKKARPEIKERPAALLVPFLALRQGLIEGTANADAAFLKKLAAWRAPVKLWETEFCPARCGDYHPEIIDREIQEGRLVWYGGGKERISLCRPDDLDLVYTNEEYLNTRLSSAYTELFSQAMNSGFFDRPRSF

SEQ ID NO: 18607 - DNA, 840 bp, Unknown
  Obtained from environmental sample
  misc_feature (1)..(840): n is a, c, g, or t
atggcccaatccatgcagcagctcaaaaggacagccgccgcaggcgagcgtgtctttgagtttttcgatgaggaagagctgaccgatgaaagccaaaagcgcgataagctggagcgcatcaaaggcaatgtcgaatttaagaatgtccgcttcggctatgaaaaggacaaaatcatcatccacgatttctccgcaacggttaatgccggacaaaagatagcaatcgtcgggccaaccggtgccggtaagacaacaatggtaaacctattgatgcgcttctatgaattggacggcggcgagatttgcatagacggtgtgccgacaagtcaaattacgcgggaaaacgtgcacgaccaattctgtatggtgttgcaggacacatggctctttgaggggactatcaaagaaaacattatttattcaaaacagggcgtcgccgatgaagaagtggaagccgcctgcaaggcagtcagcatccatcacttcatacaaacgttaccgcaggggtatgacactgtgttgaacgacaaagcgaacctgtcggcgggtcaaaaacagcttgtcaccattgcgcgggcaatgatccaaaactcgccgttgcttattttggatgaagcgacaagctctgtagatacgcgcactgaaaggcttgtccaggaggctatggacaagctgacccatggccggacatcttttgtcatcgcgcacaggctttctaccattaagaacgccgacaagatccttgttatgagagacggcgatattgtcgaaagcggaagccataaagaattgctggaaaaagngcgggttctacgccgagctgtactacagccagtttga

SEQ ID NO: 18608 - protein, 279 aa, Unknown
  Obtained from environmental sample
  DOMAIN (70)...(253): ABC transporter
  misc_feature (1)..(279): Xaa is any amino acid
MAQSMQQLKRTAAAGERVFEFFDEEELTDESQKRDKLERIKGNVEFKNVRFGYEKDKIIIHDFSATVNAGQKIAIVGPTGAGKTTMVNLLMRFYELDGGEICIDGVPTSQITRENVHDQFCMVLQDTWLFEGTIKENIIYSKQGVADEEVEAACKAVSIHHFIQTLPQGYDTVLNDKANLSAGQKQLVTIARAMIQNSPLLILDEATSSVDTRTERLVQEAMDKLTHGRTSFVIAHRLSTIKNADKILVMRDGDIVESGSHKELLEKXRVLRRAVLQPV

SEQ ID NO: 18609 - DNA, 771 bp, Unknown
  Obtained from environmental sample
  misc_feature (1)..(771): n is a, c, g, or t
atggctgaaaaaaaagaaaaccggctgtcgcttatccttgaaatttttacaaactccaacggccttgtatcgctggttgtcgtgcttctgggttttcttgtgggaaccctgatcattgtcgcggtaggaagaaatccctcaggaatgtattccgccatcttccagaatatttcaggtttctctgtgaacacaagaacaggcagctgggtttggaaccctcggtatataggcgaatggcttgtgtcatcaatgccgcttactctatgcggcctttcaatggcttttgccgccagaaccgggctttttaacatcggcgcggaaggccagtacatcgcaggcctgaccgcagcgcagtttgtcgcgttttattttccgcaaatacctgtcgtacattccattgttgctgtaattgcggcaattgctgcgggcgcattttgcggcggcgtggtaggctacctcaaagccaggtttcaggtttccgaggtggtttccacaataatgatgaactacatcgccctttacctttcaaggtacttcacgatgcagattccgggaaccaatacctacaaaactctggattttcccaaaaccgttatgcttacaaacagccttatggaaaccctttccaacaactccaggctgaacaacgggctttttctgaccatagccgcgttgttctttttctggattatcatggaaaaaacccgactgnggctattcgctagagccaccggcttaacccgtgccgatctgtcatgccnnnnnccataa

SEQ ID NO: 18610 - protein, 256 aa, Unknown
  Obtained from environmental sample
  misc_feature (1)..(256): Xaa is any amino acid
MAEKKENRLSLILEIFTNSNGLVSLVVVLLGFLVGTLIIVAVGRNPSGMYSAIFQNISGFSVNTRTGSWVWNPRYIGEWLVSSMPLTLCGLSMAFAARTGLFNIGAEGQYIAGLTAAQFVAFYFPQIPVVHSIVAVIAAIAAGAFCGGVVGYLKARFQVSEVVSTIMMNYIALYLSRYFTMQIPGTNTYKTLDFPKTVMLTNSLMETLSNNSRLNNGLFLTIAALFFFWIIMEKTRLXLFARATGLTRADLSCXXP

SEQ ID NO: 18611 - DNA, 609 bp, Unknown
  Obtained from environmental sample
  misc_feature (1)..(609): n is a, c, g, or t
ttgatggcgagacagagcttaggagaaggcgaagaagatggggaaagaggggaacgcaaatttatagtgagcggcaaaacaacgagcggtaaggatgtaatgcccgaagagaagacattaggaaccattaacgtattgtctggaaagctgcaaatatccctggcttgggataattcagacgatgtggatttatatgtttggacccctaatggagatagaatatattactcaaatcctaaggttaggaatggcaaagactctttggatattgactccaatgctggttgcaatgggcgcggagataacgctgaaaatgtagccataggcgtagatgggggtgatattccaaccgggcaatacaaagttgcggttcacttattcgcaaaatgctccgatactcctagaagtggagcctctttcagagtgactgccgcttatgatggcagctttatcagggaattcggaggaaaaggcgggaaattcgcagacacagaaggaggtagccgtgtgagcggaatgccagatacttatccggcaagcgataattccactgttaaaagaatgggtatcataaacataaaagaaaatggaagttacgaagttttatag

SEQ ID NO: 18612 - protein, 202 aa, Unknown
  Obtained from environmental sample
  misc_feature (1)..(202): Xaa is any amino acid
MMARQSLGEGEEDGERGERKFIVSGKTTSGKDVMPEEKTLGTINVLSGKLQISLAWDNSDDVDLYVWTPNGDRIYYSNPKVRNGKDSLDIDSNAGCNGRGDNAENVAIGVDGGDIPTGQYKVAVHLFAKCSDTPRSGASFRVTAAYDGSFIREFGGKGGKFADTEGGSRVSGMPDTYPASDNSTVKRMGIINIKENGSYEVL

SEQ ID NO: 18613 - DNA, 546 bp, Unknown
  Obtained from environmental sample
  misc_feature (1)..(546): n is a, c, g, or t
atgattccatctttaagcaggaatgacgtaatcgccagttttgccgggattcgtccctgtctggaagaagatttctatattgacgtttcaaaaaaagcgcccgcctttgtacaggtcgcgggcattcagtcccccgggctcaccgcttcgccggcaatcggggagtacgtaaagaacctccttaaagaggcgggccttgaactggcggagaagcccggctgggatccctttgtcgaggatcggccccgttccagggagctttcgccttacaggctggacgagcttattgcaaaggatccagcctggggaaacctggtctgccgctgcgaaaacgtaagcgaggcggaaatagtccaggcggtaaggctgggccaccacaccctggacggggttaagtatttcaccagggcccaaatgggtcgctgccagggcggtttttgtacctacaagatcgtcaagatcatcatgagggaaacgggcctttcgtggaacgagattaccaaacacggcggcgcaagtcggcttcttgaatcggagttgcaataa

SEQ ID NO: 18614 - protein, 181 aa, Unknown
  Obtained from environmental sample
  DOMAIN (104)...(159): BFD-like [2Fe-2S] binding domain
  misc_feature (1)..(181): Xaa is any amino acid
MIPSLSRNDVIASFAGIRPCLEEDFYIDVSKKAPAFVQVAGIQSPGLTASPAIGEYVKNLLKEAGLELAEKPGWDPFVEDRPRSRELSPYRLDELIAKDPAWGNLVCRCENVSEAEIVQAVRLGHHTLDGVKYFTRAQMGRCQGGFCTYKIVKIIMRETGLSWNEITKHGGASRLLESELQ

SEQ ID NO: 18615 - DNA, 708 bp, Unknown
  Obtained from environmental sample
  misc_feature (1)..(708): n is a, c, g, or t
gtggatcgggtagacctggccgcagcaaaggcaaagaacgtcgttgtctgcaatacgccgcgcgcgaatacccaggcggtcgccgacctcaccattggcctgcttatttgtctggcccgcaagataccagtactcgaccggaaaacaaaagaaggccagtggccgcgttccaccggcattgaattatacggcaaaaccatcggcatcctgggcctgggcgcggtaggcaaggcggttgcgaagcgggcctctgggttttccatgagggtcctcgcccgcgatccagtcatcgacagggagtatgtcgaatcgaacgggatcgttccggtcgatttcaatacgcttattcgggaggcggattttctctgccttcacctacccctaacaaacgagaccagaaacatcatttcggcggatgcgctaaagtccatgaaaaagggcgcaatccttgtgaacacggcgcgcggcggccttgttgacgaagccgcaacttacgaactccttgtttcagggcatctgggcggaatgggactggacgtttatgaaaccgaacctcccaaaaaatcgcctttatttgaattggaaaacgtagtgctaacgcctcacaccgcggcccacaccgccgaagccaccgaggctatggccgaaatgtcggtgcaaaacctaattgatgtactttccggcagggcgtgcccgaatgtcgtgtga

SEQ ID NO: 18616 - protein, 235 aa, Unknown
  Obtained from environmental sample
  DOMAIN (32)...(204): D-isomer specific 2-hydroxyacid dehydrogenase, NAD binding domain
  misc_feature (1)..(235): Xaa is any amino acid
MDRVDLAAAKAKNVVVCNTPRANTQAVADLTIGLLICLARKIPVLDRKTKEGQWPRSTGIELYGKTIGILGLGAVGKAVAKRASGFSMRVLARDPVIDREYVESNGIVPVDFNTLIREADFLCLHLPLTNETRNIISADALKSMKKGAILVNTARGGLVDEAATYELLVSGHLGGMGLDVYETEPPKKSPLFELENVVLTPHTAAHTAEATEAMAEMSVQNLIDVLSGRACPNVV

SEQ ID NO: 18617 - DNA, 801 bp, Unknown
  Obtained from environmental sample
  misc_feature (1)..(801): n is a, c, g, or t
ttgcccctcgattcgccaaagcgcaattataaagattcaaaccataagccggaaatcctggccgcccttagcccgtttacaggcttatgcggcttccgcgaagttgatgagatccgtgatttgcttgccgcttttcttgatcctgcggcgcctgttctgcgcgaaggctttgctcccttgacggcggcgctttcaaaccgcgatcccgccacaggcgggactgttgccgctttacgtgattttttggccggacttttcggcctttcacaggaaatgagggaagcgcttactgaatatatactttcgttgaaggagcctggctgtgaattaaaactaatgcaggatctggcgcacttatatcccggcgatccggcggtgattgctcctctttaccttaatgttttccgtctggagccgggcgaagctattttcctggaatccggaatactgcatgcctacattcatggctttggcgtggagcttatggccgactccgacaacgtgctgcgcggcggtctgacccctaagcatattgatgtgccggaactgatgaagatactggtttttaagccctttaaaccccggataattacacctaactcaactttgttcaggtaccctgcgccttgcgaggaattttcgcttaccagaatctgcggtcctgcggatatatgtctgtggtcccccggctggccttcgatttgcattgtcaccgaaggagaagttgttatcgactctngggacaaggacagggaaacagttgttaagcaaggggaatcgctgtttatccctcccgattga

SEQ ID NO: 18618 - protein, 266 aa, Unknown
  Obtained from environmental sample
  DOMAIN (1)...(249): Phosphomannose isomerase type I
  misc_feature (1)..(266): Xaa is any amino acid
MPLDSPKRNYKDSNHKPEILAALSPFTGLCGFREVDEIRDLLAAFLDPAAPVLREGFAPLTAALSNRDPATGGTVAALRDFLAGLFGLSQEMREALTEYILSLKEPGCELKLMQDLAHLYPGDPAVIAPLYLNVFRLEPGEAIFLESGILHAYIHGFGVELMADSDNVLRGGLTPKHIDVPELMKILVFKPFKPRIITPNSTLFRYPAPCEEFSLTRICGPADICLWSPGWPSICIVTEGEVVIDSXDKDRETVVKQGESLFIPPD

SEQ ID NO: 18619 - DNA, 315 bp, Unknown
  Obtained from environmental sample
  misc_feature (1)..(315): n is a, c, g, or t
atgcaggatcttgagcggcttataaacgaaggacagcaggtttataacgaggaaattcccaaagcaagaggcgaagccgagaagacaatccaggtcgcccagggttacgcgacagagcgcgtaaacagggcaaacggcgatgttgcccgttttaattccgtttacgaagaataccgccgcgctcccgaagtaacaagacagcggctttactatgaaatgatcgaagaggtatttaaaaacgaaaaagatatgacgattatcgaccgtaatttaaaaaatttcctgcctcttatgaacatgggaggaaacagataa

SEQ ID NO: 18620 - protein, 104 aa, Unknown
  Obtained from environmental sample
  misc_feature (1)..(104): Xaa is any amino acid
MQDLERLINEGQQVYNEEIPKARGEAEKTIQVAQGYATERVNRANGDVARFNSVYEEYRRAPEVTRQRLYYEMIEEVFKNEKDMTIIDRNLKNFLPLMNMGGNR

SEQ ID NO: 18621 - DNA, 489 bp, Unknown
  Obtained from environmental sample
  misc_feature (1)..(489): n is a, c, g, or t
atgaaaaaaataattactactataattgttattcttgtaatcattattggcattgcggtggcaggccccctttatgttattaacgagggagaacaggcggtaattgttcagtttggaagaataacagacgttatttcacaagccggcctgaaagtaaaagttccttttatagacgaagttgtccgttatccgaaaaaaattatggcatgggacggcgaggcaagaattgtgccgacggcggaaagacaatttatttttgtcgatgtcgtagcgcgctggcgcatttcagacccaaagaaattttatgaatcaataaatacggtagatgccgcgtattcaaaactctctgaaattattgattcggaagtgcgtaccgtcgtagccgaaaatccgttgcgggaatccgtcagaaactcccatattattatgggacgttctacgcgcagtgaagcggctggaatcggggaagccttgaagtggatattttaa

SEQ ID NO: 18622 - protein, 162 aa, Unknown
  Obtained from environmental sample
  SIGNAL (1)...(21)
  DOMAIN (23)...(159): SPFH domain / Band 7 family
  misc_feature (1)..(162): Xaa is any amino acid
MKKIITTIIVILVIIIGIAVAGPLYVINEGEQAVIVQFGRITDVISQAGLKVKVPFIDEVVRYPKKIMAWDGEARIVPTAERQFIFVDVVARWRISDPKKFYESINTVDAAYSKLSEIIDSEVRTVVAENPLRESVRNSHIIMGRSTRSEAAGIGEALKWIF

SEQ ID NO: 18623 - DNA, 303 bp, Unknown
  Obtained from environmental sample
  misc_feature (1)..(303): n is a, c, g, or t
ttggccgagatatttcggttttacgaagcgggagaaacgcttgaagaaaccgtagtcagggaaatatgcgaagaagtaagtatcaaagtaaaagacattgtctatataaaatcccagccgtggccgttccccagctctctgatgctgggttttaaagcgcgttattcatcaggaacaattaaacccgacggagaagaaatagaagacgcaaaatggttcaccaaagacaacctgcccaacttacccgccgaaggttctttatcgcgctatctcattaataattggattaatcagactatttaa

SEQ ID NO: 18624 - protein, 100 aa, Unknown
  Obtained from environmental sample
  misc_feature (1)..(100): Xaa is any amino acid
MAEIFRFYEAGETLEETVVREICEEVSIKVKDIVYIKSQPWPFPSSLMLGFKARYSSGTIKPDGEEIEDAKWFTKDNLPNLPAEGSLSRYLINNWINQTI

SEQ ID NO: 18625 - DNA, 660 bp, Unknown
  Obtained from environmental sample
  misc_feature (1)..(660): n is a, c, g, or t
ttgaaaaagcttcagctgttgggatttttgcttttgctttcgcttccggtgttctccttttcttttgatgattccggcgatataaacgagcttgcgttgcgcctaacaaacgaaatgagcgacgaacaggctctggctcaaacctttatgctgggttgggtcggggccgagccttctccccttattctggactggatacggaaccgcaatataggcggcgtgaaaatttttggctggaacaccgaagacaccagaaaattggcggaaacagtgggcaacctacagaagaacgccctggcttccggattaggcattcccctttttgtggcaacggatcaggagggagggcttgtacgccatgtaaagggggcgaccagcgaaactccggggaacatggccatcggcgcgtcaggaaggccgatggacgcttacttgtcgggttactacatagggcgggaactggcccttttgggcatcaacatgaattttgcccccagcgtggatctttatacaaaccgcgattcaacattgatcggcccgaggtctttcggatccgatcccgtgcaagcgggtattcttggggcggccttcgcgaaaggccataaggaaatggggagtaattgccacgggcaaacactaccccgggtccggagacactga

SEQ ID NO: 18626 - protein, 219 aa, Unknown
  Obtained from environmental sample
  SIGNAL (1)...(19)
  DOMAIN (97)...(219): Glycosyl hydrolase family 3 N terminal domain
  misc_feature (1)..(219): Xaa is any amino acid
MKKLQLLGFLLLLSLPVFSFSFDDSGDINELALRLTNEMSDEQALAQTFMLGWVGAEPSPLILDWIRNRNIGGVKIFGWNTEDTRKLAETVGNLQKNALASGLGIPLFVATDQEGGLVRHVKGATSETPGNMAIGASGRPMDAYLSGYYIGRELALLGINMNFAPSVDLYTNRDSTLIGPRSFGSDPVQAGILGAAFAKGHKEMGSNCHGQTLPRVRRH

SEQ ID NO: 18627 - DNA, 669 bp, Unknown
  Obtained from environmental sample
  misc_feature (1)..(669): n is a, c, g, or t
atgaaaaataaattatttttagccggaataattatcatattgattttcggaattatggtaacaggctgtgacggcggcggcgtcagtatcggaggcggaggcagcggaggcggcagtatcggcggcggcagcggaggcggaggcggcggcagcggaggcggaggcggcggcagcggaggcggaggcggaggcgattacggcggcagcggcggcggcagtatcggcggcggaagcggaagcggcgactacagcgatgattactacgacggcagcggaagcggcacccgtgatcctgattactacgacggcagcggcggaattattatcattggcggcggcagcggcagcagaagaagttattatactgtaaaatttacggtaacttctttcgacatgtcagattcccctgttaatattacgtattcatatccaagaaatgaaggttataactggtctgccggcgcttccgatatgtacaccagaactgaatcagttaacaactttccctgggaatataccgtttctatttcaagtaaagtaattagcagcggtgtttctctttccgtttccggcgccccttctcaaacattaaccgcaaaaatatttgttgatggcaaacaaaaaagatcaagctccggacaggggactgtatatatagattggagataa

SEQ ID NO: 18628 - protein, 222 aa, Unknown
  Obtained from environmental sample
  SIGNAL (1)...(22)
  misc_feature (1)..(222): Xaa is any amino acid
MKNKLFLAGIIIILIFGIMVTGCDGGGVSIGGGGSGGGSIGGGSGGGGGGSGGGGGGSGGGGGGDYGGSGGGSIGGGSGSGDYSDDYYDGSGSGTRDPDYYDGSGGIIIIGGGSGSRRSYYTVKFTVTSFDMSDSPVNITYSYPRNEGYNWSAGASDMYTRTESVNNFPWEYTVSISSKVISSGVSLSVSGAPSQTLTAKIFVDGKQKRSSSGQGTVYIDWR

SEQ ID NO: 18629 - DNA, 303 bp, Unknown
  Obtained from environmental sample
  misc_feature (1)..(303): n is a, c, g, or t
gtgacggcggcggcgtcagtatcggaggcggaggcagcggaggcggcagtatcggcggcggcagcggaggcggaggcggcggcagcggaggcggaggcggcggcagcggaggcggaggcggaggcgattacggcggcagcggcggcggcagtatcggcggcggaagcggaagcggcgactacagcgatgattactacgacggcagcggaagcggcacccgtgatcctgattactacgacggcagcggcggaattattatcattggcggcggcagcggcagcagaagaagttattatactgtaa

SEQ ID NO: 18630 - protein, 100 aa, Unknown
  Obtained from environmental sample
  misc_feature (1)..(100): Xaa is any amino acid
MTAAASVSEAEAAEAAVSAAAAEAEAAAAEAEAAAAEAEAEAITAAAAAAVSAAEAEAATTAMITTTAAEAAPVILITTTAAAELLSLAAAAAAEEVIIL

SEQ ID NO: 18631 - DNA, 747 bp, Unknown
  Obtained from environmental sample
  misc_feature (1)..(747): n is a, c, g, or t
atgggcgaacttcagatcaacatcattctggaaagaatcaaggcaaaccagaagatcgaggtagaaacacgcgttccgaaagtcgcctaccgcgaaacaatcaccaaaaaagcgggcgccgagtacacgcacaaaaagcagagcggcggccacggccagtacggcaaagtggtactcgaaatcgcgcctcttccgcgcggcgaaaagtatcagtttgttaacgccattttcggcggcgctatccccaagaactacatccccggcgtagaaaagggcgtagttgagggaatggcgcacggcactatggcgagttatcccgtcgtagacgtggaagtaaaagtcgttgacggcaaataccaccctgtagattcaaacgagttatctttcaaacttgccgcgcgcaacgcattccgcgaggccatgaaacaggcaaatcccaccctgctcgaaccgattatgaatttaacggtctttgtcgaagaaaaatacctcggcgacgtaatgagcgatctttccggcaagcgcggcaaaatcctcggtcaggattccgcgggcggcatcgcggaaatacgcgccgaagtgcctcaggtggaacttttgcgttactctatagatttacgatcaattacatcaggaacaggctctttcagcgtggcgtttagtcattacgcgcctatatcgggtaggatagcggatgaagtaatcaaggcgcgcgaatcgttcaaagtgcaggaagcggacgaatag

SEQ ID NO: 18632 - protein, 248 aa, Unknown
  Obtained from environmental sample
  DOMAIN (147)...(234): Elongation factor G C-terminus
  misc_feature (1)..(248): Xaa is any amino acid
MGELQINIILERIKANQKIEVETRVPKVAYRETITKKAGAEYTHKKQSGGHGQYGKVVLEIAPLPRGEKYQFVNAIFGGAIPKNYIPGVEKGVVEGMAHGTMASYPVVDVEVKVVDGKYHPVDSNELSFKLAARNAFREAMKQANPTLLEPIMNLTVFVEEKYLGDVMSDLSGKRGKILGQDSAGGIAEIRAEVPQVELLRYSIDLRSITSGTGSFSVAFSHYAPISGRIADEVIKARESFKVQEADE

SEQ ID NO: 18633 - DNA, 462 bp, Unknown
  Obtained from environmental sample
  misc_feature (1)..(462): n is a, c, g, or t
ttggaggcaccatggttttttgaatcccttgcttttgccatcggcgctccccagggcggcgccggcggtccggccgagatgttcgcgaacgtcattcccctgatcctgatgatcgccgtcttctggttcttgctgatccggccgcagaagaaacgccagcaggaacacaagaacatgctggacaatctgcgtcgcggcgatacggttgtgaccacgggcggctttatcggtcggatcgtggagattgacggcgaggtgttgaccctggacctgggggaaaccaaggcgcgcctggggcgcggcttcgtcagcggcctgtttgacgcgaaagccttgcagacgtcgaaggaaaaggacaggaagggcaaagccgaacccagggaagacaaggcgcagaaaaacgcggacagggcggaagccggcagcgaagcgcccgaggcacgtaaagaggaaaaagagtga

SEQ ID NO: 18634 - protein, 153 aa, Unknown
  Obtained from environmental sample
  DOMAIN (26)...(107): Preprotein translocase subunit
  misc_feature (1)..(153): Xaa is any amino acid
MEAPWFFESLAFAIGAPQGGAGGPAEMFANVIPLILMIAVFWFLLIRPQKKRQQEHKNMLDNLRRGDTVVTTGGFIGRIVEIDGEVLTLDLGETKARLGRGFVSGLFDAKALQTSKEKDRKGKAEPREDKAQKNADRAEAGSEAPEARKEEKE

SEQ ID NO: 18635 - DNA, 303 bp, Unknown
  Obtained from environmental sample
  misc_feature (1)..(303): n is a, c, g, or t
atggcaatcctctacattgttggcacgccgatagggaatttgggcgatatcagctttcgggcggcggaaactttcaaaaaggtcgagcttgtggcgtgtgaagatacacgccgcaccctaaaactgctctctcacctcggaattcgggtaaaaatgctctcttgtcggtcgcaaaatgaggaatttgcggcggaaaaagtgatttccgccttaaatcaggggcaaaatgtggcttacgccagcgatgcgggcactcccgcccttagcgatccgggcgcagtgctggcaaaacgcggcttttga

SEQ ID NO: 18636 - protein, 100 aa, Unknown
  Obtained from environmental sample
  misc_feature (1)..(100): Xaa is any amino acid
MAILYIVGTPIGNLGDISFRAAETFKKVELVACEDTRRTLKLLSHLGIRVKMLSCRSQNEEFAAEKVISALNQGQNVAYASDAGTPALSDPGAVLAKRGF

SEQ ID NO: 18637 - DNA, 834 bp, Unknown
  Obtained from environmental sample
  misc_feature (1)..(834): n is a, c, g, or t
ttggggggnnnccacgcatcagatcggccgagatttcgatccgcttttccaaatgaatgcgctgatcgtccgccgtcaattgaaagcgaaaccattgtccgcaatatggaaaaatgcgtcaaatgcggacgctgtgttgaagcgtgtcaggaagtgcagactatccgagccattaacacttcgcaccgaagcaaggagtacgaaatttccactccttacggacaagctcttaaagagtcttcctgcgttttctgcggacagtgcgcttcggtctgtcccgtaggagcgatttacgagcatgaccaatgcgcggaagtacgagccgctcttaacgacagcggacgcaaaacaatagcgcaagttcccccctctttcgcatccgctcttgaggacgttctttctcttgccgcaggaacaattactacaggaaaaataaactctgcggtaaaacttttaggcttcgacaaagtttacgacatgaaaactgcggcaacctccgcaagcgccgaaataaatagcgaagttacggcaaggcgaaaagccgccggaaaactgcctgtagtcacagggtgcgccgagggagtcggcaattttgtaaaaaacttttatcccgatttggcggctcacttgattaccgaaaaaacggcgcggcgcacatttgcgtcagtaattaaaaacggatacgctaaagaagcgggaatagagtcatcggctgttacatcggtttcccttgtaccctgccttgcgcaaaaatacgcagcggaaaaaaataaaaccgactacgctcttaccgccgcagaatttgcgagaatgatcaatcttgccggaatataa

SEQ ID NO: 18638 - protein, 277 aa, Unknown
  Obtained from environmental sample
  DOMAIN (103)...(277): Iron only hydrogenase large subunit, C-terminal domain
  misc_feature (1)..(277): Xaa is any amino acid
MGGXHASDRPRFRSAFPNECADRPPSIESETIVRNMEKCVKCGRCVEACQEVQTIRAINTSHRSKEYEISTPYGQALKESSCVFCGQCASVCPVGAIYEHDQCAEVRAALNDSGRKTIAQVPPSFASALEDVLSLAAGTITTGKINSAVKLLGFDKVYDMKTAATSASAEINSEVTARRKAAGKLPVVTGCAEGVGNFVKNFYPDLAAHLITEKTARRTFASVIKNGYAKEAGIESSAVTSVSLVPCLAQKYAAEKNKTDYALTAAEFARMINLAGI

SEQ ID NO: 18639 - DNA, 672 bp, Unknown
  Obtained from environmental sample
  misc_feature (1)..(672): n is a, c, g, or t
gtgtttgcgcttcccataccgttcagatcgggattggtgccgtcattcaaactgcttccaattctctccatggcgataatggttgtggtgtcgggaattgagacaatggggcacgtaaacggcatgacaatggcggtttgggacaggcaggcggccaacagcgaaacgcaaggcgcgctgcttgccgacggttttggaaatatattctcggcgatcttcggcgtcctgcccaatacttcgttcggacagaacataggcattgtctgcataacaaaagttgtcaacagattttgtatttttataacggcgattgtgcttatcctcgccgggttttcccccaaggtcggagcggttttatcggttatgcccaacagcgtattgggcggcgctgtaattaccgtattcgccatgatcatgctgaacggtataaaaatgatcgccaaagcgggattttccgaaagaaacgtattcattctcgccctgacattcggcgtcggctatgccattggaaataacgcccgattggtggaaaaactgcctttcgttttaaattttattttcaaaaaccctactgtcgcggtgtgcgtcatttccatgacgcttaaccttgtcttcccgctttccgcggaagacaaagccagggcggcggaagccgctaaaggcggcgattaa

SEQ ID NO: 18640 - protein, 223 aa, Unknown
  Obtained from environmental sample
  misc_feature (1)..(223): Xaa is any amino acid
MFALPIPFRSGLVPSFKLLPILSMAIMVVVSGIETMGHVNGMTMAVWDRQAANSETQGALLADGFGNIFSAIFGVLPNTSFGQNIGIVCITKVVNRFCIFITAIVLILAGFSPKVGAVLSVMPNSVLGGAVITVFAMIMLNGIKMIAKAGFSERNVFILALTFGVGYAIGNNARLVEKLPFVLNFIFKNPTVAVCVISMTLNLVFPLSAEDKARAAEAAKGGD

SEQ ID NO: 18641 - DNA, 360 bp, Unknown
  Obtained from environmental sample
  misc_feature (1)..(360): n is a, c, g, or t
gtgcgctacattggaaaggtatcaaatgaagaagttatcggccttttttccagggcaaaagccctgctcttccccggaatcgaggattttggtattattccggtagaagctaacgcggcaggctgccctgtaatcgcttaccgcgacggcggcgctttggaaacggtaaaagaaaacgtaacaggggtgtttttcaacgagcagacgccggaatcgttaatcggcgcaatctataattttgaaaaaattgaggtaacatttaataaccgtgaagtgtttaataatcatgtacagcagttttccaagaaaacatttacagaaaccctgtataaacttcttgaagaaaaaaaacggagataa

SEQ ID NO: 18642 - protein, 119 aa, Unknown
  Obtained from environmental sample
  misc_feature (1)..(119): Xaa is any amino acid
MRYIGKVSNEEVIGLFSRAKALLFPGIEDFGIIPVEANAAGCPVIAYRDGGALETVKENVTGVFFNEQTPESLIGAIYNFEKIEVTFNNREVFNNHVQQFSKKTFTETLYKLLEEKKRR

SEQ ID NO: 18643 - DNA, 360 bp, Unknown
  Obtained from environmental sample
  misc_feature (1)..(360): n is a, c, g, or t
ttgccgtatgcagcagaaacaataatagggctttatcacgaccatggaaccagcgagcaataccatagcgagttgaagcatgatatggatattgaacggctgccatccggaaaattcaacgtaaacgaactgtacctgatgatagggatgaacgcatataatgtattacggtttatagggcagagcgccaaagcgatgaaaacggtattgcccataaagagccgcagcttgcgaatgcggcttggcaaagtcattcaaaacattattggcattgcggtaaaatatattagccatgccggaaagaaaataatcaaactctgggagggcaatccttggagccttttatttttcaaaccgtga

SEQ ID NO: 18644 - protein, 119 aa, Unknown
  Obtained from environmental sample
  misc_feature (1)..(119): Xaa is any amino acid
MPYAAETIIGLYHDHGTSEQYHSELKHDMDIERLPSGKFNVNELYLMIGMNAYNVLRFIGQSAKAMKTVLPIKSRSLRMRLGKVIQNIIGIAVKYISHAGKKIIKLWEGNPWSLLFFKP

SEQ ID NO: 18645 - DNA, 741 bp, Unknown
  Obtained from environmental sample
  misc_feature (1)..(741): n is a, c, g, or t
gtggcgccgctattcgggcttgttgacaaatacatgacgtcgcatatatcatctgtctcaggcgccgcgccggctacggcggtcgagacgttctgctccgacggcgatccggtggagctcggcaaggcggtctgccgcgtaaaaggctccgttcggtcgatccttgccggcgagcgcaccatcctcaaccttattcagcgcctctccggcatcgcgacgctcacggcggcgatggttcgggagctctcgaacagcggcgccaaaacgcggctgcttgacacacgcaagaccacgccgggaatgcgagcccttgaaaaagcggcggtgcggcacggcggcggggtcaaccaccgagccgggctctacgacatgatactgatcaaggacacgcacgtaaggcgcgccggcggcgtgacggcggcgctcgcaaaagcgctcgcgtggcgcggcgacagcgccgtccctaaaatagaggtcgaggtgcagtctatagaagagtttgtacaagccctgcggttaaaacccgacagaataatgcttgacaacatgagcccgaaggagatagatatctgcgtggacgagcgcgacgcctcaggcctcaaaatcgagcttgaagccagcggaaacattacgctcggcatcctctcggcaatcgccgcgacaaacgtggactacatatcctgcggggcgatcacccacagcgcgcccgcgctggactttcacttggcgatgctttcatga

SEQ ID NO: 18646 - protein, 246 aa, Unknown
  Obtained from environmental sample
  DOMAIN (4)...(69): Quinolinate phosphoribosyl transferase, N-terminal domain
  misc_feature (1)..(246): Xaa is any amino acid
MAPLFGLVDKYMTSHISSVSGAAPATAVETFCSDGDPVELGKAVCRVKGSVRSILAGERTILNLIQRLSGIATLTAAMVRELSNSGAKTRLLDTRKTTPGMRALEKAAVRHGGGVNHRAGLYDMILIKDTHVRRAGGVTAALAKALAWRGDSAVPKIEVEVQSIEEFVQALRLKPDRIMLDNMSPKEIDICVDERDASGLKIELEASGNITLGILSAIAATNVDYISCGAITHSAPALDFHLAMLS

SEQ ID NO: 18647 - DNA, 669 bp, Unknown
  Obtained from environmental sample
  misc_feature (1)..(669): n is a, c, g, or t
ttgcgcattaccgtagacgaagggagttttaacgagttcgattcgggcatggagtcgggaaaccccatttccttccccggatacgaagataaagtccgcgaggcgcaggaaagctgcggtacgcgggaggcggtggtaacaggccgctgtaccattcagggctatccggctgtggtatgcgtcatggacagccgctttatgatggccagtatgggcagcgttgtcggagaaaagatcacccgcgccgtagaatacgccacggcgaaccgcatgcccgtgataattttttccgcctcgggcggggcccgtatgcaggaggggattttctccctcatgcagatggcaaagacatcgggagcgattgcgcgtcacggaaaacagggacagctttatatctccgtagtatgcgaccccacgacgggcggcgttaccgcctcgtttgccatgttaggcgatattatcatcgccgagccgggagttacaatcggcttcgccggcaaaagggttatccaggacaccatcggcgccacactgccggaaaaattccagacagccgaatttatttttgaacacggttttaccgacttgatagtctcgcggcaggaaatgcccgcgacgcttgcccggcttatccggatgcacggttacaaaaaagaagggggtaaataa

SEQ ID NO: 18648 - protein, 222 aa, Unknown
  Obtained from environmental sample
  misc_feature (1)..(222): Xaa is any amino acid
MRITVDEGSFNEFDSGMESGNPISFPGYEDKVREAQESCGTREAVVTGRCTIQGYPAVVCVMDSRFMMASMGSVVGEKITRAVEYATANRMPVIIFSASGGARMQEGIFSLMQMAKTSGAIARHGKQGQLYISVVCDPTTGGVTASFAMLGDIIIAEPGVTIGFAGKRVIQDTIGATLPEKFQTAEFIFEHGFTDLIVSRQEMPATLARLIRMHGYKKEGGK

SEQ ID NO: 18649 - DNA, 750 bp, Unknown
  Obtained from environmental sample
  misc_feature (1)..(750): n is a, c, g, or t
ttggattacaaaaccatgcttgattttctttcctggcttgaaacagaacgatgttgcggcgtttcaaccagaaaccagaggctgtccgcgttatcatcattcgcacagtatgctcaaaacagaagttttgatgcggcaacaatattccggcgtgatacaaaaaagctgccagccaaaaaacgaccgaacagagcgcgtgcaatctttacgctggaggagacggcgttttttctgaaccttcctaaaggtgacagcgcgacaggatttagaaataaaacccttttaagcgtcatgtatgccagcggggcacgggcgcaggaaatgtgcgatcttacactttgcgatttccggtccaataacgataccgcgtctctgacattaaccggtaagggcggcaagatacgaagagtcggaataccaaaagcatgcgccgcattgcttacacaatacatcgacaaactcaacctcgcggggaaaaacgaacgccatttattctccagccaaactcatgagcatatgaccgtttcctgtgttgaggaaatatttaaaaagtatgtaagcctggctaaaaaagagtatccagcgcttttccgtgagaaatgctatactccccattccatgagacattcaaccgcgactcatatgctcgaggccggcgttccaattgttgttataaagaattttcttggacacgtctcccttncatccacccaaatttatgcggaagtaactcaaagtactcttggatag

SEQ ID NO: 18650 - protein, 249 aa, Unknown
  Obtained from environmental sample
  DOMAIN (77)...(249): Phage integrase family
  misc_feature (1)..(249): Xaa is any amino acid
MDYKTMLDFLSWLETERCCGVSTRNQRLSALSSFAQYAQNRSFDAATIFRRDTKKLPAKKRPNRARAIFTLEETAFFLNLPKGDSATGFRNKTLLSVMYASGARAQEMCDLTLCDFRSNNDTASLTLTGKGGKIRRVGIPKACAALLTQYIDKLNLAGKNERHLFSSQTHEHMTVSCVEEIFKKYVSLAKKEYPALFREKCYTPHSMRHSTATHMLEAGVPIVVIKNFLGHVSLXSTQIYAEVTQSTLG

SEQ ID NO: 18651 - DNA, 768 bp, Unknown
  Obtained from environmental sample
  misc_feature (1)..(768): n is a, c, g, or t
atggaatattggttaaatttttttactaccagcattgccgccaatatcgtctatttggcgattccgttaattcttttatctgtagtggtatccgcggttcatctggataaaaaaagcattcccgttattctagtggctttgttcgctggaattatttttggcaaagacgggcttaagttttggcaattcaacaatatgattttggcaaaccaagtagcaaatttggctttggtttttgttctgtttcatggtggattttgcacggaaaaaaataatttaaaactggtcgcattgcctgcggtgggtttggcttcttggggagttatcttaacagcggtatttacatttgtgtgtttatattttattttgggctgggataaaaatctagctctcttgctggctgtgataatatcttctaccgatgcagcagctatattttcaattttaagaaaacaacctctagggcaaaagctcagttcaacaatagaaatagaaagtgcagccaatgaccctatggctattttactcacaatagtgacagtacaaaccttgacttctagcgagaatttgagttttaatgtttttgttgggcaatttttatggaagttcgtcgccggacccattttcggctatgtaatagcgaagatgacggtgcggctcataataggcttactcccgcaggaaacggatattnatatatnatactgctatgcacagcattgttcacttatggctttaccgaaacgcttaatggcagcggaatggtag

SEQ ID NO: 18652 - protein, 255 aa, Unknown
  Obtained from environmental sample
  misc_feature (1)..(255): Xaa is any amino acid
MEYWLNFFTTSIAANIVYLAIPLILLSVVVSAVHLDKKSIPVILVALFAGIIFGKDGLKFWQFNNMILANQVANLALVFVLFHGGFCTEKNNLKLVALPAVGLASWGVILTAVFTFVCLYFILGWDKNLALLLAVIISSTDAAAIFSILRKQPLGQKLSSTIEIESAANDPMAILLTIVTVQTLTSSENLSFNVFVGQFLWKFVAGPIFGYVIAKMTVRLIIGLLPQETDIXIXYCYAQHCSLMALPKRLMAAEW

SEQ ID NO: 18653 - DNA, 720 bp, Unknown
  Obtained from environmental sample
  misc_feature (1)..(720): n is a, c, g, or t
atgttccgcgccgcacgcaaagatgaaaacacgttttgccccaagcccaacaggatatttgcacaaagggcatatttgagcgcgctctgcgttgccgctgtgcaaaaatcaaaaaacgcctctattcatctgaggattgaagaccacgataaattgcgttgtccaaagcatttttctgatattataaaaaaggatttggagtggcttggttttgagtggcaaagcgagagcactcaaagcgagcgatatgaaatttatgaaaaatattttgaaactttgcataaaaaaaatntgctatatgaattctacaaaaccgataaaccaaaaattatgctgaaaaatccagaaggcgaagattttgccattaaggatgctcttgggcaatggacataccagtttgccgttgttattgacgattttgaagagggcatagatttgattgtgcgtggcgaagatttgaaagattccgttgataagcaaataactcttgcaaaaatcataggcagaacagatatgccgctattcattcaccactcccttatttacgattcaaacggaaaaaaactgagcaagagagacggctcagacggaatttgcaaggagagagaaaacggtgtttctccaaaaagggttttgagcgaaatttgcaggcttatgttgccggataaggatattccagaggagattggatgggaagaggctatcctcattcagttataa

SEQ ID NO: 18654 - protein, 239 aa, Unknown
  Obtained from environmental sample
  DOMAIN (35)...(238): tRNA synthetases class I (E and Q), catalytic domain
  misc_feature (1)..(239): Xaa is any amino acid
MFRAARKDENTFCPKPNRIFAQRAYLSALCVAAVQKSKNASIHLRIEDHDKLRCPKHFSDIIKKDLEWLGFEWQSESTQSERYEIYEKYFETLHKKNXLYEFYKTDKPKIMLKNPEGEDFAIKDALGQWTYQFAVVIDDFEEGIDLIVRGEDLKDSVDKQITLAKIIGRTDMPLFIHHSLIYDSNGKKLSKRDGSDGICKERENGVSPKRVLSEICRLMLPDKDIPEEIGWEEAILIQL

SEQ ID NO: 18655 - DNA, 585 bp, Unknown
  Obtained from environmental sample
  misc_feature (1)..(585): n is a, c, g, or t
atgttatgttcaaattgcaaaggaaaacttgaagactatatgaatttttgtccatattgcggaacaaaagtttctagtcatattgatgtttttattgaccctagggatgacaatttgtataaaaccgtaaaaataggcaggcaaatttggatggcgagaaatctagtttatgctgccgaaggcagtaaatgctatgagagaaaatacggaaggctttacgactgggtaacggcaaaaaaggcctgtcctgctggttggcatttgccaaccaatgatgaatggttagctcttgtgagttttgcaggcggcactgtaacttctggaaagaatctcaaagcgaaaagcggctgggatgattttggtaacggcatcgacgtttttggcttttcggctctgccaagcggatattgcgattccgaaggctatttcaatgatgcaggttgtttcactcgctggtggagtgcatcggaaagcggcgttcattacgcttatagttggggaatgggttgcgattttgatggtacttactggaataaagacactaaatcccacttatttagtattcgttgcctgcgagatttatga

SEQ ID NO: 18656 - protein, 194 aa, Unknown
  Obtained from environmental sample
  misc_feature (1)..(194): Xaa is any amino acid
MLCSNCKGKLEDYMNFCPYCGTKVSSHIDVFIDPRDDNLYKTVKIGRQIWMARNLVYAAEGSKCYERKYGRLYDWVTAKKACPAGWHLPTNDEWLALVSFAGGTVTSGKNLKAKSGWDDFGNGIDVFGFSALPSGYCDSEGYFNDAGCFTRWWSASESGVHYAYSWGMGCDFDGTYWNKDTKSHLFSIRCLRDL

SEQ ID NO: 18657 - DNA, 651 bp, Unknown
  Obtained from environmental sample
  misc_feature (1)..(651): n is a, c, g, or t
atgaaaatatactctcttccggctgaaaagacaaatccggctgtattttttgatatggattgcactctttatacccacgatgaatacgcgcaaagccagattgatttacctgttatgcgtcttgcgcaaatgcgtggaaagtcatttgagcagatgaaaagcgaagttgccgaatacagaaaaacttgggcggatacccataacggagaatccgtcagtcttgggaatatttttttatcgtttgggatttccataaaagatatggtacatatgagggaagaattataccgtcccgaagattatcttacagaagacaagcatcttcgttttacgcttacgcggcttgcgtccagttacaagcttgccgtagttaccaataatcctgtttctgtagcggtccgtacccttacgattctcggtgttaatgacattattggaaaaattgtcggacttgatacttgttatttgtcaaaacccgataaggaaatttatttaaaagcagcgcagttatgcgatgtttcgccgcagcagtgtatttctgtgggtgatcgttacgatattgatttagccgttccccttgagcttggtatgggtggaattcttgtcgatggagttaaagatgtttattctctttctgatattttactgtaa

SEQ ID NO: 18658 - protein, 216 aa, Unknown
  Obtained from environmental sample
  DOMAIN (12)...(205): haloacid dehalogenase-like hydrolase
  misc_feature (1)..(216): Xaa is any amino acid
MKIYSLPAEKTNPAVFFDMDCTLYTHDEYAQSQIDLPVMRLAQMRGKSFEQMKSEVAEYRKTWADTHNGESVSLGNIFLSFGISIKDMVHMREELYRPEDYLTEDKHLRFTLTRLASSYKLAVVTNNPVSVAVRTLTILGVNDIIGKIVGLDTCYLSKPDKEIYLKAAQLCDVSPQQCISVGDRYDIDLAVPLELGMGGILVDGVKDVYSLSDILL

SEQ ID NO: 18659 - DNA, 690 bp, Unknown
  Obtained from environmental sample
  misc_feature (1)..(690): n is a, c, g, or t
gtgggaatggcgcttgatgatccagaagcccagctttntacgtcatcggtacgcaatgaagtagcttttggccctgagaatcttcttttctctgtaaaagaaattgaagaaagagtaaaatacgctcttcacgcagtcggtcttgaaggttttgaagacagacagcctatgacgttgtcgggcggcgagaaacagcgccttgtcatagccgcagcgcttgcaatgaacgccaaaattcttgttttggacgagcctctttgccgccttgacccggatggaacggcacaggtaatgtcagttcttggcgaattaagagataaacaaaaaataacagttataatgacagctcacgacagtaaaaaaatgcttgagtatgcggaaaagatctgtattttaaaagaaggacatattgcctgttgcggcgaagctaaaagtattttatctaaccgtacattacttgaggaaaacggtatacagccgcctgatgaagcggatatttactctgtttttactgaaaggactgacgattataataaaactgaaacaaatatacctgcgatagaaataaagaattcctcatttttttacacaccggaaaaccctgttgcggaaaagatgaatttagctatcgcagataatgattttattgccttgattgggcataacggctgcggcaaaactacgctttaa

SEQ ID NO: 18660 - protein, 229 aa, Unknown
  Obtained from environmental sample
  DOMAIN (1)...(135): ABC transporter
  misc_feature (1)..(229): Xaa is any amino acid
MGMALDDPEAQLXTSSVRNEVAFGPENLLFSVKEIEERVKYALHAVGLEGFEDRQPMTLSGGEKQRLVIAAALAMNAKILVLDEPLCRLDPDGTAQVMSVLGELRDKQKITVIMTAHDSKKMLEYAEKICILKEGHIACCGEAKSILSNRTLLEENGIQPPDEADIYSVFTERTDDYNKTETNIPAIEIKNSSFFYTPENPVAEKMNLAIADNDFIALIGHNGCGKTTL

SEQ ID NO: 18661 - DNA, 882 bp, Unknown
  Obtained from environmental sample
  misc_feature (1)..(882): n is a, c, g, or t
gtggcaaatatttacacgcgcttgatgaacccaacctcggatgtatttgagcagcgcatagcggctcttgaaggtggtgtaggtgctttagcaacctcttcgggagcggcggcggtgacttatgctatacaaaatatcgcaacagcggggcacaatatagtatccgataaacgcatctatggcggaacctataaccttttcgcccacaccttgcccgacttaggtataaccacaacattcgtggacggtagcgaccctaagaattttgaaaaggcgattaacgaaaaaactagggcattatttgtggaatcacttggaaatccacattccaccatagttgatttagatgcgcttgcggcgattgcacacaagaatggcattccgctaattgttgataataccttttcgccaccaaacttgttccgccccattgagcacggcgcagatgtggttgtgcattccgccaccaaattcataggcggtcacggaacggttataggcggtgtgatagtggattctggaaagttcaactgggcggcaaatgataaattcccgggtttgtctaaaccgaacccaagctatcacggcgtagtcctcaccgaggcggtgggaaatctcgcatatataataaagattcgggttaccttgatgagagacacaggtgcgaccataagccctttccactcatttcttttccttcaaggcttggaaactttgtctctgcgtgtggaacgtcacgtggagaatgcgctcaaagtggtggaatatctgcgcaagcatccgcaggtggaatcccttaaccatccctctttgccagaacacccagataatgccttgtataaaaagtatttcccaaagggtgcaggttcaatttcactttga

SEQ ID NO: 18662 - protein, 293 aa, Unknown
  Obtained from environmental sample
  DOMAIN (2)...(291): Aminotransferase class I and II
  misc_feature (1)..(293): Xaa is any amino acid
MANIYTRLMNPTSDVFEQRIAALEGGVGALATSSGAAAVTYAIQNIATAGHNIVSDKRIYGGTYNLFAHTLPDLGITTTFVDGSDPKNFEKAINEKTRALFVESLGNPHSTIVDLDALAAIAHKNGIPLIVDNTFSPPNLFRPIEHGADVVVHSATKFIGGHGTVIGGVIVDSGKFNWAANDKFPGLSKPNPSYHGVVLTEAVGNLAYIIKIRVTLMRDTGATISPFHSFLFLQGLETLSLRVERHVENALKVVEYLRKHPQVESLNHPSLPEHPDNALYKKYFPKGAGSISL

SEQ ID NO: 18663 - DNA, 858 bp, Unknown
  Obtained from environmental sample
  misc_feature (1)..(858): n is a, c, g, or t
atgaaagtngccggcgagaaaaaaacaatcaacatacgcgaaatacacatggaagaagacgcgggaaagctaatacacgacgcaaagggcgcgggtacatttatggacttcaaccgctgcggagtaccgcttttggaaattgtctcacagcctgacttccgcagcgccgccgaggtgatcgcctatcttgagaaactgcgcgaaacgcttctataccttgacgtatgcgactgtaaaatgcaggaaggttccatccgcgccgacatcaatctgtccgtgcgccgcgaaggcgatgaattgggaatacgtaccgagacaaaaaacatgaactcgtttaaggcgattgcgcgcgccattgaatatgaaagggagcgtcaaatcgaaatactggaagacggcggacagattgttcaggaaacgcgccgctgggacgacgaaaagcttgagtcttacggaatgcgttcaaaggaaaacgcgcaggattaccgttacttcccggagcctgatcttctgccaatggaaattgatgacgcatggcttgcaagcgtcagaaaaaacctgccggaactggcgcatcaaaaacgtgaacggtactgccgcgactttaagatacccgaatccgaggcccttattctgactgttcacaaaaatatctgcgatctgttcgagactattgcgcggaaaagcgaacagcctgttgaagcggcgcaccttttaaccggtgaaattatgcggctgatgaacaatgccaatattttgccggaagacctgtctcttaatgctgataaattttcggcgctcattaacctggtgacgggcggaaaaatcaatcgtaatgcctataaagaaaccngttga

SEQ ID NO: 18664 - protein, 285 aa, Unknown
  Obtained from environmental sample
  DOMAIN (1)...(133): PET112 family, N terminal region
  misc_feature (1)..(285): Xaa is any amino acid
MKVAGEKKTINIREIHMEEDAGKLIHDAKGAGTFMDFNRCGVPLLEIVSQPDFRSAAEVIAYLEKLRETLLYLDVCDCKMQEGSIRADINLSVRREGDELGIRTETKNMNSFKAIARAIEYERERQIEILEDGGQIVQETRRWDDEKLESYGMRSKENAQDYRYFPEPDLLPMEIDDAWLASVRKNLPELAHQKRERYCRDFKIPESEALILTVHKNICDLFETIARKSEQPVEAAHLLTGEIMRLMNNANILPEDLSLNADKFSALINLVTGGKINRNAYKETX

SEQ ID NO: 18665 - DNA, 453 bp, Unknown
  Obtained from environmental sample
  misc_feature (1)..(453): n is a, c, g, or t
atgctccggactgtagaactgttttgcgatggggctgccctgggaaccccaggcccagggggatgggcgtacttgctcagggcgagggcaagcagcggggtacaggaaaaagagggcagcggcgcagaggcttccacgacgaacaacaggatggagctgcaggcggccatagaagggctccgtgcgcttacgcgcccntgcgccgcaagactgttctgcgatagccgatacgtggtgcagggtataaacgaatggctggaggaatggaaaagcagggggtggcgcaaggctgacaagaagcccgtcctcaacgcagagctatggcaggaactcgatgggttgttgaatgttcaccaagtggaagccgtttgggtcaagggacacgctggccaccctgaaaatgagcgggtggacaagctggctagggagcaggcggagagcgtggccagataa

SEQ ID NO: 18666 - protein, 150 aa, Unknown
  Obtained from environmental sample
  DOMAIN (2)...(146): RNase H
  misc_feature (1)..(150): Xaa is any amino acid
MLRTVELFCDGAALGTPGPGGWAYLLRARASSGVQEKEGSGAEASTTNNRMELQAAIEGLRALTRPCAARLFCDSRYVVQGINEWLEEWKSRGWRKADKKPVLNAELWQELDGLLNVHQVEAVWVKGHAGHPENERVDKLAREQAESVAR

SEQ ID NO: 18667 - DNA, 486 bp, Unknown
  Obtained from environmental sample
  misc_feature (1)..(486): n is a, c, g, or t
atgaaatacacaccaagggacatacagcgccgcgaattcgactcctcctttagggggctgaacgccgaccaagtgtacgaatacctccgcgagattgccgcagacatagaggaaatgctgcaagagaaccaacagctaaacaatgagctggcagaacacagaaaccgcatcctccagtaccacgaacaagaccgcattttcaaagagaccctgatgcaggcccagagaactagggaagagtggatggagatagccgagagggaggccgacctaatgaagaaagaggcgcgcttccagtccgatgagctgatcaagaccgcccaagaagaagtagcgaggatggaagtccaactgcgcggcatgaagctggaaagggtgcgcttcctgcaggacatggacgctctggctgcccgcaccaagcgctttctcagccaagaggccccagagatgttcccacctgcggatgtcactagaaaattggagtga

SEQ ID NO: 18668 - protein, 161 aa, Unknown
  Obtained from environmental sample
  DOMAIN (1)...(161): DivIVA protein
  misc_feature (1)..(161): Xaa is any amino acid
MKYTPRDIQRREFDSSFRGLNADQVYEYLREIAADIEEMLQENQQLNNELAEHRNRILQYHEQDRIFKETLMQAQRTREEWMEIAEREADLMKKEARFQSDELIKTAQEEVARMEVQLRGMKLERVRFLQDMDALAARTKRFLSQEAPEMFPPADVTRKLE

SEQ ID NO: 18669 - DNA, 891 bp, Unknown
  Obtained from environmental sample
  misc_feature (1)..(891): n is a, c, g, or t
atgcaaatattaataaattgcgcccaattaaaactgataacgggagaaatgttcgcgatagacggatgcaaactgccgtcgaacgcgtcaaaagaatggtctggaacgatagaggaactgagaaaaaaacgcgacaaaatgaaagggcatatagaaaaattaataaaacagcaccgtgaaatggacaaagacgagaaagtaaaaaagatacagaagccgtacgcgaagacaatgggtaaagacagggagaggagggaaaaggccataaaaaggctggaaaaaaattgggagaagctgaacaaattcctgaaagaagcggaaccggggaagggggtatccgtggaagaagtgcagtcgaacataacggacaatgaaagcgcgctgataaaagggccgcacgggtatatacagggatataacggcataacgatagcggattccggcagccagatcatcgtttcagcggaagtaataggttccggccctgagagcggaagttttccgaagatgctggaaatctttgaagaaaacattaaaacgttaacaaggaaaaaagaaccgctaaagaaagcgttattggttggcgacaccggatatttctctgaagcaaatttgcaggaagcggcggaaagggggatagaagtgttgataccggatccgcagttcaggcagagggatccgtattacgcggagaagaaggaaaaganagttngaaagaagaaaagatttacggcggaggactttaaatacaatgaaaggagcgacagttttacatgcccgtgcggaaaaacattggaatacaaaggagacgtggcgctgaggaacacagcggaaggaatacatggcnaaaggacagattgcgcggactgcccattattagataatgtatag

SEQ ID NO: 18670 - protein, 296 aa, Unknown
  Obtained from environmental sample
  misc_feature (1)..(296): Xaa is any amino acid
MQILINCAQLKLITGEMFAIDGCKLPSNASKEWSGTIEELRKKRDKMKGHIEKLIKQHREMDKDEKVKKIQKPYAKTMGKDRERREKAIKRLEKNWEKLNKFLKEAEPGKGVSVEEVQSNITDNESALIKGPHGYIQGYNGITIADSGSQIIVSAEVIGSGPESGSFPKMLEIFEENIKTLTRKKEPLKKALLVGDTGYFSEANLQEAAERGIEVLIPDPQFRQRDPYYAEKKEKXVXKKKRFTAEDFKYNERSDSFTCPCGKTLEYKGDVALRNTAEGIHGXRTDCADCPLLDNV

SEQ ID NO: 18671 - DNA, 861 bp, Unknown
  Obtained from environmental sample
  misc_feature (1)..(861): n is a, c, g, or t
ttgcccggtgaatttacctttcgcgcctttatgaacggcaagattgaccttactcgcgccgaatcggtaatggaactggtctccgccaaaacggacaggggccgcaataacgcggttaaccggctttccggcgtgctggaaaaagaaataagcgcaataaagaaaacgctggtggaagtcctgtccggcgcggaaatttttcttgattattccgaggatgaaataagcgcggatgccgaggagatcgcaggccggcttccgggcgaaacgcttgcgcgtgaaacgcttgcccgcctgcaaaaactcgcgaaatcctggcagcttgaacgtatctgtcaggaagggattaccgcggtaatcgcgggtcgtcccaactcgggtaagtccagcttgttcaatctgttgctgaaagaagaacgctcaattgtcacggagatccccggcacaacccgcgactggattgaggcctgggtttccattgaaggcataccaatacgccttgtcgacacggccggtctcagggattcatccgatcaggttgaaaaaataggcgtggaacgcagccgtgatttactggaaaccgccgatcttgttttatacctcattgacggcgaagcgggccttacggacgaggatgccgcgttaatcgacactttggcaatgccccatcttgttatctggaacaaggccgacatcgcccccgcgcaagaaaaacttcctgccgtaagcgcgaaaacgggtgaaggcatcgttgaactgacaacggcaatagctgccgcaataaaaatacgattgcagctaacgctgaaatctccggcgcgtccgtgtcgctgggcactgtccggcagaaaaacctggtag

SEQ ID NO: 18672 - protein, 286 aa, Unknown
  Obtained from environmental sample
  DOMAIN (116)...(231): GTPase of unknown function
  misc_feature (1)..(286): Xaa is any amino acid
MPGEFTFRAFMNGKIDLTRAESVMELVSAKTDRGRNNAVNRLSGVLEKEISAIKKTLVEVLSGAEIFLDYSEDEISADAEEIAGRLPGETLARETLARLQKLAKSWQLERICQEGITAVIAGRPNSGKSSLFNLLLKEERSIVTEIPGTTRDWIEAWVSIEGIPIRLVDTAGLRDSSDQVEKIGVERSRDLLETADLVLYLIDGEAGLTDEDAALIDTLAMPHLVIWNKADIAPAQEKLPAVSAKTGEGIVELTTAIAAAIKIRLQLTLKSPARPCRWALSGRKTW

SEQ ID NO: 18673 - DNA, 525 bp, Unknown
  Obtained from environmental sample
  misc_feature (1)..(525): n is a, c, g, or t
gtgtgcgacggcttcgccctgaatctggggtactattccatacaccccaacatcggcggtactttcaattcggcaaaggaaacctacgattcggagaaaaatccggtcagtttcaggttccatacaaggcacccgctgcgcgatctaatcaaacacattgtcgttgacatcactggtacagcggacagtaacgcgtttattgacgagtttattgaccgtgacgaagattcggtaaacggaacttttataccaggcaacatgttttgcattaacggcaataaaatcaagctggccggcgatgatccttcttgcggcgtattttttgtaccggtagacgacccgtcgaaagcggtcaaggtgacacgcatcggcgaaaacagttcgtcaacgataaccggcatcgctccgggtacgggctgcctgcacaacaggatagaaatacgcacccagtacactggctcgacagttacttttttgaagactccccgaacgatagtaagcgattttgttattgaagaaacataa

SEQ ID NO: 18674 - protein, 174 aa, Unknown
  Obtained from environmental sample
  misc_feature (1)..(174): Xaa is any amino acid
MCDGFALNLGYYSIHPNIGGTFNSAKETYDSEKNPVSFRFHTRHPLRDLIKHIVVDITGTADSNAFIDEFIDRDEDSVNGTFIPGNMFCINGNKIKLAGDDPSCGVFFVPVDDPSKAVKVTRIGENSSSTITGIAPGTGCLHNRIEIRTQYTGSTVTFLKTPRTIVSDFVIEET

SEQ ID NO: 18675 - DNA, 840 bp, Unknown
  Obtained from environmental sample
  misc_feature (1)..(840): n is a, c, g, or t
gtgcgctttttggggcggcccatgcaggttccgttttccgaaaatttattgggcagggtttttacaggttccggatcgcctcgcgacaaaggcccggccctgcatgaaaactacatccccataggcggtccctcagtcaacccctccgagcgcattatcccccgaaacatgatccgcaccggcatccccatgatcgacctgttcaacaccctggtcgtctcgcagaaactgccgatcttctcggtatcgggcgagccctacaacgagcttcttgcccgtatagcaatgcaggccgaagttgacgtaatcgtgcttggaggcatgggccttaaatacgacgactacctcacattcaaggacacccttgaaaacgccggcgccctcgctagaaccgtaatgttcatgcacacagccagcgaccccacggtagaatgtttgatgatccccgacatgtccctcgccgtcgccgaacagttcgctttgcagggcaaagacgtgctggttcttcttaccgacatgaccaacttcgcagacgcgatgaaggaaatatccattatccaggaacaggttccgtccaaccgcggttaccctggcgacctttacagccagcttgccagccgctatgaaaaagccgttgacttcgatagcgcgggttcaattacagtcctgggcgtaacgaccatgcccggcgacgacgtaacccacccggttcctgacaatacgggttatataaccgagggccagtactacctcaagcacggccgcatagagcctttcggttcgttaagccgcctaaacaacaggttaacggtaaaacccgcgcggaccaccgcgccctga

SEQ ID NO: 18676 - protein, 279 aa, Unknown
  Obtained from environmental sample
  DOMAIN (60)...(263): ATP synthase alpha/beta family, nucleotide-binding domain
  misc_feature (1)..(279): Xaa is any amino acid
MRFLGRPMQVPFSENLLGRVFTGSGSPRDKGPALHENYIPIGGPSVNPSERIIPRNMIRTGIPMIDLFNTLVVSQKLPIFSVSGEPYNELLARIAMQAEVDVIVLGGMGLKYDDYLTFKDTLENAGALARTVMFMHTASDPTVECLMIPDMSLAVAEQFALQGKDVLVLLTDMTNFADAMKEISIIQEQVPSNRGYPGDLYSQLASRYEKAVDFDSAGSITVLGVTTMPGDDVTHPVPDNTGYITEGQYYLKHGRIEPFGSLSRLNNRLTVKPARTTAP

SEQ ID NO: 18677 - DNA, 519 bp, Unknown
  Obtained from environmental sample
  misc_feature (1)..(519): n is a, c, g, or t
gtgatcaccaccngcttcatacaggggtatctgtatgacgacgcggactgcttcaccatcagttctacgcttcgcttcacgcacgacaacgcgcttgtctgccggaacgtgatcggcagcgaggcgcttgcctacatccagcttgcgattgacgcgttccgatccagccgcggcgctaaaaatctccgcctttcgctgatgcctgtcattgataacctgcttgcgttctggggcagcatagacgacaaactggcggacggcgaagcgcgcacgattgtcaagtgcggcaagcttgtagagaggctcgacctgtatttcagattttggtatgactataaactcatcaacagcgagtacgaaaagctgtgcaatgtgcttgtgcgagtaaggaaaggattttgtaacgctcagtatcttgcggtgctggttgaagtcctcgccacaggggaaagctacaaggagcgtctggaagaagtacttgaaagcctgaaccgtctgtttgaggagcaggctgcttga

SEQ ID NO: 18678 - protein, 172 aa, Unknown
  Obtained from environmental sample
  misc_feature (1)..(172): Xaa is any amino acid
MITTXFIQGYLYDDADCFTISSTLRFTHDNALVCRNVIGSEALAYIQLAIDAFRSSRGAKNLRLSLMPVIDNLLAFWGSIDDKLADGEARTIVKCGKLVERLDLYFRFWYDYKLINSEYEKLCNVLVRVRKGFCNAQYLAVLVEVLATGESYKERLEEVLESLNRLFEEQAA

SEQ ID NO: 18679 - DNA, 363 bp, Unknown
  Obtained from environmental sample
  misc_feature (1)..(363): n is a, c, g, or t
ttgaatacagtccgttttcagtatcaaacggaactggttttttcctcgcctgcatccgaacaccggtttctgctgaggatactaccacagagcgatgacagacagcagataaaaagcctgtcatggaatatcgacccgtcgcccgccgatacgctctggcagaccgttgacagtttcggcaacaacgcgctggcgggacacatcagcgcgccgcacggtcatttccgtttcgggatagaggggatcgcggaagtatcgaacgaaccgtacacagcgtccggcgagccaccgcgctttttgctctacccgacggagttgacacgcgcgcatcgcgggcctgtttatttttacaatgacatttaa

SEQ ID NO: 18680 - protein, 120 aa, Unknown
  Obtained from environmental sample
  DOMAIN (3)...(85): Bacterial transglutaminase-like N-terminal region
  misc_feature (1)..(120): Xaa is any amino acid
MNTVRFQYQTELVFSSPASEHRFLLRILPQSDDRQQIKSLSWNIDPSPADTLWQTVDSFGNNALAGHISAPHGHFRFGIEGIAEVSNEPYTASGEPPRFLLYPTELTRAHRGPVYFYNDI

SEQ ID NO: 18681 - DNA, 822 bp, Unknown
  Obtained from environmental sample
  misc_feature (1)..(822): n is a, c, g, or t
ttggaaggtggaaatatgtacaagtggtatgcgtttaagcgtattcttcgcggagtggtcatgtacgcccttctgatcctccttttttccgtgttgtttaattcagtcaatgaagctacccagagatcgcagataaacgaacaggttaaaatggaatccatgggtttaaggaacgtgcggcctgaacaattattagcgtggagagccgagagagaggcacagttaatacgcctgtacagactcgacaggccgttcggtgaacgcattattttccgtacggtaaatgtgctgactttcaattttggaaaatccacgcacattaaatcggcaaaaggcgaacaggatgttttgaccatcattctggaagctttgcccaaaacgatgctgctatttactacctctactataattgagcttgccatagggataacactgggcctgttaaaagccagaaaaccaggcggcaagctggacaagtcaaccagctttgtaaccatgattgtatacggaatgccggcctggtggctgggcatgatgctcatacttttatttgtatatatttttaaaatattcccttcgggcggcgtcgtatcaacccctacgcctacaggctttgccgggtttcttgacaggatttggcatatgattctgcctgtaacaacgcttgtcattatctccttctggagcctctcgttcgttatacgcaatattgtgcttggggtcttgcaggaggattacatcatgagcgcgagggcgcgcggcataggggaaagatcgattctgttcggccatacgcttcgcacatcggcccccccaatgtaa

SEQ ID NO: 18682 - protein, 273 aa, Unknown
  Obtained from environmental sample
  misc_feature (1)..(273): Xaa is any amino acid
MEGGNMYKWYAFKRILRGVVMYALLILLFSVLFNSVNEATQRSQINEQVKMESMGLRNVRPEQLLAWRAEREAQLIRLYRLDRPFGERIIFRTVNVLTFNFGKSTHIKSAKGEQDVLTIILEALPKTMLLFTTSTIIELAIGITLGLLKARKPGGKLDKSTSFVTMIVYGMPAWWLGMMLILLFVYIFKIFPSGGVVSTPTPTGFAGFLDRIWHMILPVTTLVIISFWSLSFVIRNIVLGVLQEDYIMSARARGIGERSILFGHTLRTSAPPM

SEQ ID NO: 18683 - DNA, 909 bp, Unknown
  Obtained from environmental sample
  misc_feature (1)..(909): n is a, c, g, or t
atggccgagcggantttgcacctctgcgagtcagttgaccatatcgatccaacaaaggtaataccggggcaggagttggatcttctgtgggcgtctcctgcgtgtactcatcacagcgtcgctagaggcggacggccgcgatgtgaacagcaacgcgcgccggcatggataattccattctggctggaaaacctaaaagtaaaacggttaattgttgaaaatgttccggagttccagaattggggaccgcttgatgacgacggccgcccggtaaaagaatcaaagggagaaactttcaaagcctttatcgcggcgatacggagcctcggctataccgttgattggcgggtgcttaacgcggctaactacggcgatccgaccatccggcgccgactctttattcaagcgataaaaggaaccggccggaaaatacaatggccgaacataacccatgcggaacagcagtttaatataagcggactaccaaagtggataccggcgcgaaatattattgatcccgatttacacggcgaatccattttcaagagaaagcggccgctggcccctgcgacgctgcggcgcatagagcatggtataaaaaaattctggcagccttacgcagagccgtttttggttgtcttgagaggaactggaaagtcacggtcccttgataaacccttaccaactgaaacgacatcaggtacgcattttgcgttaatagaaccatttattattggtcatcaatcaggtcaaggagcgcgatccgttgatcagcctgttcatacgatattggcacaagggagagttattttagtagagccgtttctaactcgtttccatggaggagatgattctgcgaaaagaaaccactctatnaacgaaccgcttnccgacaatagatacatctaa

SEQ ID NO: 18684 - protein, 302 aa, Unknown
  Obtained from environmental sample
  misc_feature (1)..(302): Xaa is any amino acid
MAERXLHLCESVDHIDPTKVIPGQELDLLWASPACTHHSVARGGRPRCEQQRAPAWIIPFWLENLKVKRLIVENVPEFQNWGPLDDDGRPVKESKGETFKAFIAAIRSLGYTVDWRVLNAANYGDPTIRRRLFIQAIKGTGRKIQWPNITHAEQQFNISGLPKWIPARNIIDPDLHGESIFKRKRPLAPATLRRIEHGIKKFWQPYAEPFLVVLRGTGKSRSLDKPLPTETTSGTHFALIEPFIIGHQSGQGARSVDQPVHTILAQGRVILVEPFLTRFHGGDDSAKRNHSXNEPLXDNRYI

SEQ ID NO: 18685 - DNA, 861 bp, Unknown
  Obtained from environmental sample
  misc_feature (1)..(861): n is a, c, g, or t
atgatggagagcggcacgaggaccgtatcagttatagtaaacaccgttctattcgcgctgaaattctgggcaggcatggtaaccggctcaatcgcgttgatcgcggacgcctggcacactctttctgattcattatcctcggtgtttataattttcgcggtaaagctatcttcaaaaaaagcggatagagaacacccatttggccacgggcgctgggaacatatttcctccatttttgtcgcagtcttattgggtatcattggctttgattttcttgaaaagtccgtaatcagattcaaaaacaaggaaacggtcgtttacggaacacttgctattgttgtgacaatagtttcaataatcgttaaggaattactcgcgcaattcgccttttattacggacggaaaacggacaacgcggttgtcagagcggacggctggcaccacagatccgacgctttgtcgtcggtgattgtattggctggtattatatccagcctggtatttggggaaaaattctggtggattgacagcgtcctgggaatactggtcgctttggcaatcttctatgcgacttttacaattcttaaggaagcaataacaaagctattaggcgaggagccggacaatgaattggtcagtgatataactgagcgggtaaaggccgattaccatgacgatttacagctccaccactttcatattcacaattatgttctgcacaaggaactaaccctgcacataaagctcgataaaaacatgacaatagaaaaaagccacgcgatagcaaccgagatcgaaaaaatgatagaaaccgactttggaataatcgcgactatccatacggagccttcagagacttaa

SEQ ID NO: 18686 - protein, 286 aa, Unknown
  Obtained from environmental sample
  DOMAIN (7)...(286): Cation efflux family
  misc_feature (1)..(286): Xaa is any amino acid
MMESGTRTVSVIVNTVLFALKFWAGMVTGSIALIADAWHTLSDSLSSVFIIFAVKLSSKKADREHPFGHGRWEHISSIFVAVLLGIIGFDFLEKSVIRFKNKETVVYGTLAIVVTIVSIIVKELLAQFAFYYGRKTDNAVVRADGWHHRSDALSSVIVLAGIISSLVFGEKFWWIDSVLGILVALAIFYATFTILKEAITKLLGEEPDNELVSDITERVKADYHDDLQLHHFHIHNYVLHKELTLHIKLDKNMTIEKSHAIATEIEKMIETDFGIIATIHTEPSET

SEQ ID NO: 18687 - DNA, 894 bp, Unknown
  Obtained from environmental sample
  misc_feature (1)..(894): n is a, c, g, or t
ttgtggaatacatcccgcaaacgcttagancctacggcgtttacagtttttgatttccccgtgcggtggtacgggttgatgtatttgatagctttcttttttggctatcatctgatttggcatttcacaaccaaatataaaattcaacccatgaaaaaagaacagttggaaagcgtgatgacatggcttatagctggcattttgttcggggcacggtttggatatgtgtttttttacaattttggctattatataaataacctttcggaaattatcatgccgttttcattcgagggtgggtttcatttcacgggtatttctgggatgagctaccacggcgggcttataggtgcttttttggcagcctcttacgcgataaaaaaacagaaactcgattattggaaaagcgtaaataccatttttctcgtcgtgcctttggtctatacctttggcaggcttgggaactttataaacggcgagctttacggaagagttacggagtcggctattggaatgctgtttgggcgccaaactgttttaagacatcccagccagctctatgagatgtgctttgaaggctttatcctgtttggaattctctatgccctatggcggttgttcccaaaactaaaagaccatgttatggctctttatcttattggctacggaacggcgagattttttatagaatttttcaggcagccggatgctcacctatgccagccgcatatggagttatgcgtaaatgccttgggtatgagccgcgggcaaatgctgtgcctagcaatgattttgagcggaggagcgttgtgggcggtaagggctcacaccttgtctaaggcatcgtctggcccaaataaaaacaagatgtcgccttcgcaaaattcgtattga

SEQ ID NO: 18688 - protein, 297 aa, Unknown
  Obtained from environmental sample
  DOMAIN (9)...(277): Prolipoprotein diacylglyceryl transferase
  misc_feature (1)..(297): Xaa is any amino acid
MWNTSRKRLXPTAFTVFDFPVRWYGLMYLIAFFFGYHLIWHFTTKYKIQPMKKEQLESVMTWLIAGILFGARFGYVFFYNFGYYINNLSEIIMPFSFEGGFHFTGISGMSYHGGLIGAFLAASYAIKKQKLDYWKSVNTIFLVVPLVYTFGRLGNFINGELYGRVTESAIGMLFGRQTVLRHPSQLYEMCFEGFILFGILYALWRLFPKLKDHVMALYLIGYGTARFFIEFFRQPDAHLCQPHMELCVNALGMSRGQMLCLAMILSGGALWAVRAHTLSKASSGPNKNKMSPSQNSY

SEQ ID NO: 18689 - DNA, 549 bp, Unknown
  Obtained from environmental sample
  misc_feature (1)..(549): n is a, c, g, or t
atggaaaacgctttaatgccctataaccgtaacggcgcgctcttcccgcgcaaaatcgggaaaaattacgccatgtacagccgcccgagcgattcggggcatacgccgtttggcgacattttctattcggaaagccccgaccttatatactggggaaagcaccgccatgtcatggcgcctaacggaggctggcagagcaccaaagtcggggccggcccctgccctatagaaacaagcgagggctggctcctgttctaccacggagttttaacaagctgcaacggttttgtttactccttcagcgcggcgctgctggatctggacaagccctggaaagtaatcgcccgcccaaaaccatatattatcaacccgcgtgaaatttacgaattggcgggggatgttccaaacgtaacattccctgtcgccgcgcttgttgacaaggacacaaacagagtagcgatttactacggctgcgccgacaccgtaacaggtttagttttcggaaatattgatgaaatcgttaattgggtgaagaaaaataataaataa

SEQ ID NO: 18690 - protein, 182 aa, Unknown
  Obtained from environmental sample
  DOMAIN (1)...(179): Domain of unknown function (DUF377)
  misc_feature (1)..(182): Xaa is any amino acid
MENALMPYNRNGALFPRKIGKNYAMYSRPSDSGHTPFGDIFYSESPDLIYWGKHRHVMAPNGGWQSTKVGAGPCPIETSEGWLLFYHGVLTSCNGFVYSFSAALLDLDKPWKVIARPKPYIINPREIYELAGDVPNVTFPVAALVDKDTNRVAIYYGCADTVTGLVFGNIDEIVNWVKKNNK

SEQ ID NO: 18691 - DNA, 639 bp, Unknown
  Obtained from environmental sample
  misc_feature (1)..(639): n is a, c, g, or t
atgagcgagctggtattagtacttgatttcggtggacagtataaggagcttatcgctagctcagtcaggagcttgtctgtatactcggaaattatactgggcagtacatcggctaccgagatcaagcgactaaacccgattggcattatcctgacaggcggaccgaaaagcgtctacgccagcgattcgcccaagtgcgatccaaaaatcttctcgttaggtatccctgtcctcggtatctgctacggtttgcatctgatttgccagacactcggcggcaaggttgcgccaggcgacacaggcgaatacgggcgtgtaaccgtaacgcctgccgggagcgcgtcaaaattattcggcaaggaaccttttaccgcccttatgagccacagggacactgcggcgcaattgcctgaaggtttccgcgctacggcaaaaaccgcagcctgcatagcagcctttgaaaacagcgcgaaaaaaatctacgctgtgcagttccaccccgagaccaagcacaccgagggcgggcgcgaaattcttcacaagtttttatacgatatctgccacgccgcaggcgattataaacttgacgattacattgaaacgcaaatagcccttatgcgaaaaaaggttgngcgataa

SEQ ID NO: 18692 - protein, 212 aa, Unknown
  Obtained from environmental sample
  DOMAIN (4)...(168): Peptidase C26
  misc_feature (1)..(212): Xaa is any amino acid
MSELVLVLDFGGQYKELIASSVRSLSVYSEIILGSTSATEIKRLNPIGIILTGGPKSVYASDSPKCDPKIFSLGIPVLGICYGLHLICQTLGGKVAPGDTGEYGRVTVTPAGSASKLFGKEPFTALMSHRDTAAQLPEGFRATAKTAACIAAFENSAKKIYAVQFHPETKHTEGGREILHKFLYDICHAAGDYKLDDYIETQIALMRKKVXR

SEQ ID NO: 18693 - DNA, 618 bp, Unknown
  Obtained from environmental sample
  misc_feature (1)..(618): n is a, c, g, or t
atggcacgagggccgcccggngaacccaccgtacagtctgtcgtcgcggagggggctgatctggtgagtttctccggcgacaaggcgctcggcggcccccaggcgggcatcattgtaggtaggcgcgtctatattgatcaactgcgcgccaaccccctgtgccgtgccctgcgtagcgacaagctgaccctggctgcgctggaggccaccctgcgcctgtatctcgacccgcaggcggctttggcgcaaattcccactgccgccatgctctcttgtcccccggaaaagattgcccgccgcgcccgcgggctggcagcgcgtctgcgccgcgcgcttggccggacggcacaggtttccatcgtcaaagacatctcccgtgccggcggcggcgctttccccgaacgcgatctgcccaccagcctggtctgtctgcgaccggccgcctgttcggcgggagatctgaaacaccgtctcctccgcgctgtcccgccgctcatgggccgcctgaaggacggcgctttctgtctggatccgcgcactttggacgacagggaacagccccttgactggggcgcgattcaatttgaattgtgccccttaaacgaaaagttaatataa

SEQ ID NO: 18694 - protein, 205 aa, Unknown
  Obtained from environmental sample
  DOMAIN (1)...(182): L-seryl-tRNA selenium transferase
  misc_feature (1)..(205): Xaa is any amino acid
MARGPPGEPTVQSVVAEGADLVSFSGDKALGGPQAGIIVGRRVYIDQLRANPLCRALRSDKLTLAALEATLRLYLDPQAALAQIPTAAMLSCPPEKIARRARGLAARLRRALGRTAQVSIVKDISRAGGGAFPERDLPTSLVCLRPAACSAGDLKHRLLRAVPPLMGRLKDGAFCLDPRTLDDREQPLDWGAIQFELCPLNEKLI

SEQ ID NO: 18695 - DNA, 912 bp, Unknown
  Obtained from environmental sample
  misc_feature (1)..(912): n is a, c, g, or t
atggccgagagttttacgggtataggcaattttattgtcagatttattcctgaatctaatagattttataggaaaatgtttttatttggcctaaaactaaccgaaaaaaaacgtttgacaaagcggaaacggttgcgttttagccttataattacagatcattgtaatttaaattgcaaatattgtggggctttttcacctattgctgaagaaaagtttttggatatacaggcaatatcttcggatttgtatagcttatcagaaatgactaatggggaagtagatgatattatctttacagggggtgagccattgttgcatccgcaaatggttgagatcatggttactgtgagaaaatgtttcccacaaggagaaataatacttgttacaaatggtattcttttgaataaacagtctgctgaattttggaatgcttgcagaaataataaaatcaatataagaataacgcgttatcctattaaacttgattttgaatcattaaagaataaagcggaagatgcaacggtgtcattgggatactggggggcgggtagggaaaacgagccgataaggaatatgtggaagtttccgtatgatttaaatggcacgcaagatttggaacatagttggaaatactgtcatgaggtcaataactgcaattgcgtggtaaatgggaaaatgtacccgtgcaatacaatctatgcggtgagacactttaacaaatacttcaacactaatatgatgatttctcaagatgatgtattggaattggatagggttcgtactttagatgaaattttaacttttttatccacgccaaagccgttttgcagatattgtaaaaagaaagacgtaatgttcgggttgaagtgggaaatatctaagaaagagatttcagagtgggtggaatag

SEQ ID NO: 18696 - protein, 303 aa, Unknown
  Obtained from environmental sample
  DOMAIN (49)...(266): Radical SAM superfamily
  misc_feature (1)..(303): Xaa is any amino acid
MAESFTGIGNFIVRFIPESNRFYRKMFLFGLKLTEKKRLTKRKRLRFSLIITDHCNLNCKYCGAFSPIAEEKFLDIQAISSDLYSLSEMTNGEVDDIIFTGGEPLLHPQMVEIMVTVRKCFPQGEIILVTNGILLNKQSAEFWNACRNNKINIRITRYPIKLDFESLKNKAEDATVSLGYWGAGRENEPIRNMWKFPYDLNGTQDLEHSWKYCHEVNNCNCVVNGKMYPCNTIYAVRHFNKYFNTNMMISQDDVLELDRVRTLDEILTFLSTPKPFCRYCKKKDVMFGLKWEISKKEISEWVE

SEQ ID NO: 18697 - DNA, 879 bp, Unknown
  Obtained from environmental sample
  misc_feature (1)..(879): n is a, c, g, or t
atggggaaacctgtcttaaaaaggataatcggaacggttgaatacaggcttggaatgttcccggtaggcggctactgcaagatgaaaggagaaggcgattatatagaagcgtgggaaaacagagaaaaaggtataatgccggaaaaaggctcttatcttgcggcaaaccccgcgtcaaggatccttgtgtgcttcgccggtccttttttcaatttattattggccgtccttttgctttcatctctttggggcgtcgggttccagatacagacgcttggaaataaaatcattcttgcctcggaattaacgccgggtgaggtttttccggccgataccgccggttttaagacaggcgacagaattctggaaatcgaagggaataaaatttcctacttccatgaaatacaggaaaatatcgccgcaaatcctaacaagcctcttcccataacggtggaaagggacggaaaaataattcagcttcaggttactccgtctcttgaaaaatcaagcggcgcgggtaaaatcggagtcgcgttctgggccgaccctgtaattgaaagcgtaaaggaaggaagcccggccgaaaaagccggccttaagccgggtgacattattacatccgcaaacgggcagccgcttcgcaacagttttgacttaaaaaaagtaattgatcagcagcccggcgatcttgtccttgaatatcagcgtaacggcgccgtgngacaggccgtttttaacactaaagacattgaggaagaaatcggtttttcatgggcgttaatcaattatcatactcctaaattgtctttccccgctgctngtataaaaggcgtaaaagaaagttttaaaacccttgcccttttcgataaaaaagcctaa

SEQ ID NO: 18698 - protein, 292 aa, Unknown
  Obtained from environmental sample
  DOMAIN (163)...(235): PDZ domain (Also known as DHR or GLGF)
  misc_feature (1)..(292): Xaa is any amino acid
MGKPVLKRIIGTVEYRLGMFPVGGYCKMKGEGDYIEAWENREKGIMPEKGSYLAANPASRILVCFAGPFFNLLLAVLLLSSLWGVGFQIQTLGNKIILASELTPGEVFPADTAGFKTGDRILEIEGNKISYFHEIQENIAANPNKPLPITVERDGKIIQLQVTPSLEKSSGAGKIGVAFWADPVIESVKEGSPAEKAGLKPGDIITSANGQPLRNSFDLKKVIDQQPGDLVLEYQRNGAVXQAVFNTKDIEEEIGFSWALINYHTPKLSFPAAXIKGVKESFKTLALFDKKA

SEQ ID NO: 18699 - DNA, 513 bp, Unknown
  Obtained from environmental sample
  misc_feature (1)..(513): n is a, c, g, or t
atgataatcgacgcaatggatctcctctacacggaaaagctggacggtttctgtattgtttcaagcgattctgactttacgcgtcttgcggcgcggttgcgggaaagcggccgcattgtctacggttttggcgaaaagaaaacaccgagggcttttgtttctgtttgtgataaatttatttacacggagatcctcaaagaaaaccaggaagaatccgaagatgaggacagcaaacatgtggcaaaaccaaagaaagattttaaggttgaccaaaagctgcttaaactgctgagggaaacagtggatgaccttgccgaagaatccggctgggcgtaccttggcggtgtcggcaacaagatcaacaaccgcatggctgattttgacccccgcaactacggttttaagaaacttggcgatattttccgcgcgattccccagtttgaaaccgaggaacggccccaggccaacggcatgggcagacaggtgtacatcaggtggaagcggaaaaggtga

SEQ ID NO: 18700 - protein, 170 aa, Unknown
  Obtained from environmental sample
  misc_feature (1)..(170): Xaa is any amino acid
MIIDAMDLLYTEKLDGFCIVSSDSDFTRLAARLRESGRIVYGFGEKKTPRAFVSVCDKFIYTEILKENQEESEDEDSKHVAKPKKDFKVDQKLLKLLRETVDDLAEESGWAYLGGVGNKINNRMADFDPRNYGFKKLGDIFRAIPQFETEERPQANGMGRQVYIRWKRKR

SEQ ID NO: 18701 - DNA, 315 bp, Unknown
  Obtained from environmental sample
  misc_feature (1)..(315): n is a, c, g, or t
ttggcgcgcgcaggagcatttccccgtgatacgacggatgcccgtattgtgcaggaggtacagacaggtaccgcatccggctccggaacatttgggaacggaaagggaattattgacagtcccgatgcggtgggcggttatccgacatacaacagcctccccgctcctgtcgatacagacggtgacggtatccccgacgaatgggaaacagccaacggattggatccggaaaatcacttagacggagcgttgaaaaatctttcgagggcttataccaatttggaagtgtatctctacgatttgaccgggaagtaa

SEQ ID NO: 18702 - protein, 104 aa, Unknown
  Obtained from environmental sample
  misc_feature (1)..(104): Xaa is any amino acid
MARAGAFPRDTTDARIVQEVQTGTASGSGTFGNGKGIIDSPDAVGGYPTYNSLPAPVDTDGDGIPDEWETANGLDPENHLDGALKNLSRAYTNLEVYLYDLTGK

SEQ ID NO: 18703 - DNA, 306 bp, Unknown
  Obtained from environmental sample
  misc_feature (1)..(306): n is a, c, g, or t
atgaagtttgcatggctaccggaaaaagaacaggataatattgccaagcataaaatcagcttttctgatgccgtacaagtttttacagaccctcgccgaattgaacggcatgatgatgacagcagtattggagaagaacgctggcaaacaatgggactggccggcaaggttctttttgtagtctatactgaacgtgaagaatacacatgggtaatttcggcaagatttgcagagccttttgaacggaggatttattatgaagatagtaacatataccctagaggatggcaaagagctgagccctga

SEQ ID NO: 18704 - protein, 101 aa, Unknown
  Obtained from environmental sample
  DOMAIN (1)...(89): Protein of unknown function (DUF497)
  misc_feature (1)..(101): Xaa is any amino acid
MKFAWLPEKEQDNIAKHKISFSDAVQVFTDPRRIERHDDDSSIGEERWQTMGLAGKVLFVVYTEREEYTWVISARFAEPFERRIYYEDSNIYPRGWQRAEP

SEQ ID NO: 18705 - DNA, 909 bp, Unknown
  Obtained from environmental sample
  misc_feature (1)..(909): n is a, c, g, or t
atgatggccgagaatattaagcgtgaactgatttatttttggtactatttttcgatacaatttgaacaaatcttcaagtattggatactgggaatggctgccggatcccttgtttccgttttcgcgaaagaaaaaatccaccgtgtctttgccgcgttacgcgaaaagaaactcggaattgccggcatagttcccgcctcgctgttggggattgcctcgcccctgtgtatgtacggaaccatacccattgccgcatcttttgccgagaaaggcatggaggaagactggatcgccgcttttatgatgagctctattctgcttaatccccaactgttgttttacagtgccgccctcggctggccggctttggtaatccgttttgtcagttgttttgtatgcgggatagccgcgggaattggtataagatttttttacaaaaagaaaacctttttcacgttcaccgtttttgccgcctcggcaaaccgcgataccgacccgaatatcgcgctacggctgctcaaaaatttcggcaggaatataaaggcgacaggattgtattttcttgtgggcattgtactgtcggcgctctttcagcaatatgtgccggcggaggcgtttgcgcggttattcggcagcaacagaggagttggtcttttgatggcggcgacggtcggggtccctttgtatgtatgcggcggcggcactattccgctgattcaggcgtggatgcagaaaggcatgagcatgggaaccgccgcctcatttatgatcgccggcccggcgatgaaaatcaccaatctgggagcgctgaaaattgtggtgggtattaaacattttttggtctatgtgcttttttcaataacgtttgccctgatcagcgggcttcttattgatcttttttatatctaa

SEQ ID NO: 18706 - protein, 302 aa, Unknown
  Obtained from environmental sample
  DOMAIN (8)...(295): Predicted permease
  misc_feature (1)..(302): Xaa is any amino acid
MMAENIKRELIYFWYYFSIQFEQIFKYWILGMAAGSLVSVFAKEKIHRVFAALREKKLGIAGIVPASLLGIASPLCMYGTIPIAASFAEKGMEEDWIAAFMMSSILLNPQLLFYSAALGWPALVIRFVSCFVCGIAAGIGIRFFYKKKTFFTFTVFAASANRDTDPNIALRLLKNFGRNIKATGLYFLVGIVLSALFQQYVPAEAFARLFGSNRGVGLLMAATVGVPLYVCGGGTIPLIQAWMQKGMSMGTAASFMIAGPAMKITNLGALKIVVGIKHFLVYVLFSITFALISGLLIDLFYI

SEQ ID NO: 18707 - DNA, 456 bp, Unknown
  Obtained from environmental sample
  misc_feature (1)..(456): n is a, c, g, or t
atggatattggcggcacacaggttttttttcttaataatcttaacaatattgccaatgacgggatggttgaccgcgcgaaaaatcaggctaacgatgtttccaaattcgaggaaatactcagaagaacagcgtcccaagcgaatcaagataaagctggagttgtagcagaccccgattcccactccccatcctatgccaaaattgacaagaccgacaaactctacgaacaatgcgtagagcttgaaatttttcttgttaaaacccttatcagcagcatgaggaacaccgtgcaaaaatcaaagcttatcgatgaaggttatgccggtaaaatgtacgaggatatgttatacgacgaatacgccaaaaacttcgccaaaaacgccaatttcggcctggctgaaatggcctacctggaattaacaggacagcgcggcaaaataataaataacaaataa

SEQ ID NO: 18708 - protein, 151 aa, Unknown
  Obtained from environmental sample
  misc_feature (1)..(151): Xaa is any amino acid
MDIGGTQVFFLNNLNNIANDGMVDRAKNQANDVSKFEEILRRTASQANQDKAGVVADPDSHSPSYAKIDKTDKLYEQCVELEIFLVKTLISSMRNTVQKSKLIDEGYAGKMYEDMLYDEYAKNFAKNANFGLAEMAYLELTGQRGKIINNK

SEQ ID NO: 18709 - DNA, 723 bp, Unknown
  Obtained from environmental sample
  misc_feature (1)..(723): n is a, c, g, or t
atgtcaattgcgtctattgacacccttcatattcagggatcattgcagactaccggagtacagacagaccttgctattgtaggacagggtttctttgtgttagacgacatgggcaaacagctctttacaagagccggtgctttctctgttgattccgaaggcgtacttgttaatccggcaaacggcatgaaagtgcagggctggatggcgagagaagttgaaggatacacaataattgacgtttccgctcctgtagatcagcttgttattccggtcggaggcaaagaccccgcaaaagctacgacaatggttcaatttgcctgtaaccttgacaagcgaataccggaactgccggaaaatcccacaggagatcaggtaataagatcaacatggtcaacgacaatagatatttatgatacattcggcgacaagcatgttttgcaggtttcatttacaagagttccgggaaccgccaacagctggaacgcaacggtaaatgtcgatcctcaaaacgaagctccgacaaacgcgacaatcggtttcggcgaagaacctccggcagtcggaggcccgcaggtgtttgttgtaaacttttcaaataacggcactctgctttcggcggaagacggagcgggaaacgtttccggcgcttcaggacaggtgcagatgaatgtcgcatacgatgtgcagaacgctacccccaatgaagacgggactctgtaa

SEQ ID NO: 18710 - protein, 240 aa, Unknown
  Obtained from environmental sample
  DOMAIN (123)...(239): Flagellar basal body protein FlaE
  misc_feature (1)..(240): Xaa is any amino acid
MSIASIDTLHIQGSLQTTGVQTDLAIVGQGFFVLDDMGKQLFTRAGAFSVDSEGVLVNPANGMKVQGWMAREVEGYTIIDVSAPVDQLVIPVGGKDPAKATTMVQFACNLDKRIPELPENPTGDQVIRSTWSTTIDIYDTFGDKHVLQVSFTRVPGTANSWNATVNVDPQNEAPTNATIGFGEEPPAVGGPQVFVVNFSNNGTLLSAEDGAGNVSGASGQVQMNVAYDVQNATPNEDGTL

SEQ ID NO: 18711 - DNA, 723 bp, Unknown
  Obtained from environmental sample
  misc_feature (1)..(723): n is a, c, g, or t
atgaaccgcagattttatttggtattatcaatagccatattaatcggaattcagccggtctttgcccagcaggatgagttcgcggaggaagacactgttcttacggaaaaaactatagacatggaactggcttctgacagtgagtttaatgaagccctgcaaacatcttcggatatcgaactgattaataaaaatgatatacaagtatccgaagaaaagcccgccctcactgagaaaagcgctgccgaagaagaagaaccggcccttgcagagggggttgctacagatacagaaccggccattgcggagaaaactactgaggatacagaacaggaagtacccggcggcatccgcgacaacgagtatctcagggaaagtcttcggcttaccaagcttgccgaagatgcctataactacggcgattatgacgcctccgctggttttgccgaggcagcgatccgttccgccgagctttcagatgaatatgtcgcccagcaaatgggaaccgacacaaaggatgggacttcccccttgccggccagctacaccatcagaacctggagcgtttcctatgattgtttctggaatattgccggacgcccctgggtttacggaaatcctcacttatggcgcgtactatataatgccaacaaagaaaaactgcccgatcccaataatccccatttgattgagccgggtatagttttggacattccagcctga

SEQ ID NO: 18712 - protein, 240 aa, Unknown
  Obtained from environmental sample
  SIGNAL (1)...(22)
  misc_feature (1)..(240): Xaa is any amino acid
MNRRFYLVLSIAILIGIQPVFAQQDEFAEEDTVLTEKTIDMELASDSEFNEALQTSSDIELINKNDIQVSEEKPALTEKSAAEEEEPALAEGVATDTEPAIAEKTTEDTEQEVPGGIRDNEYLRESLRLTKLAEDAYNYGDYDASAGFAEAAIRSAELSDEYVAQQMGTDTKDGTSPLPASYTIRTWSVSYDCFWNIAGRPWVYGNPHLWRVLYNANKEKLPDPNNPHLIEPGIVLDIPA

SEQ ID NO: 18713 - DNA, 627 bp, Unknown
  Obtained from environmental sample
  misc_feature (1)..(627): n is a, c, g, or t
ttgctattagcgattgataaatgccttgccgctcccgaagactggaagcttcttgaacgggtgcaggcgcagatcgagcagattgtatgcatagattggcaggctccggggctttcttcggtatcaattgaccgtcaggccgccgcagtccaggtaacgaattatctttttgaacagggctacaaggatatagtttatataggccagtccgatcagcggatttccggctttaagcaggcctttgtcgaaaggggccttgatatatccggcctttacactgcctatgcttatgacatggaaaccggatataacgtggttcagtctctgcataaagaccggaagaccctgccaaaggccatctttgccggttcagacgaggttgctttgggaattctcctttacctgcatgaacaaggcatcgccgtacccggcaatacggcggttatcagcatggacaacatcgaaattgccgcctatacaaacccgcaacttaccactatgaatgtccaaaaacacgccatgggttaccgcgcagtggaaatgatcgtgaatcacaccgcaaggcagggagaaaacgccttgactttgctgttgcctacgaaccttgttatacgcaaatcgacgtaa

SEQ ID NO: 18714 - protein, 208 aa, Unknown
  Obtained from environmental sample
  misc_feature (1)..(208): Xaa is any amino acid
MLLAIDKCLAAPEDWKLLERVQAQIEQIVCIDWQAPGLSSVSIDRQAAAVQVTNYLFEQGYKDIVYIGQSDQRISGFKQAFVERGLDISGLYTAYAYDMETGYNVVQSLHKDRKTLPKAIFAGSDEVALGILLYLHEQGIAVPGNTAVISMDNIEIAAYTNPQLTTMNVQKHAMGYRAVEMIVNHTARQGENALTLLLPTNLVIRKST

SEQ ID NO: 18715 - DNA, 804 bp, Unknown
  Obtained from environmental sample
  misc_feature (1)..(804): n is a, c, g, or t
atgattcaggagctccagtcggaaaacccgataggcccggtggtatacacaaacctcgcggatagggtcccgtccctggccgaaaggtacaaggacatgttcatgattggctcaaccaactttgtcaacgctccttactatataaagcacgtgaataccaccacccacggcaacgagctaaagcccggttccattcatcccaggggcccaagttttctggttgatcccggtactccttacggaaaccgatttgccgcccaaaggcctgacgcgcagaggtccgaatgggaatttacagtcgcggacaaccaatttggcgacgcgaggaaccataactttaacttgcatggccatacccttgcctggttcagccagtccgcccaatggatggtgaatatggtacccacgggcataaccagcggggaatttaaccctcaggggaactatatttcgcggggaaccagtcccggcccatccggcgatgcctacggaacggttcaggtagacaaggaaactgcgcgaagggcttactacgatcacatcgtttacgccatgcgccattattcctcggacgatccgcgctatgccggttcacgtctgaataatcccaacactgcggggattttccccctggcttcctgggacgttataaacgaagagctaaatgaaacgcggcattcctcggttattcccgcacagccggacgagtggaaaaccacgctacggaacacttcctggctccgcgccatgacaggngacgcctgggacgatctcagccaacactacgtgtaccttcttttttag

SEQ ID NO: 18716 - protein, 267 aa, Unknown
  Obtained from environmental sample
  misc_feature (1)..(267): Xaa is any amino acid
MIQELQSENPIGPVVYTNLADRVPSLAERYKDMFMIGSTNFVNAPYYIKHVNTTTHGNELKPGSIHPRGPSFLVDPGTPYGNRFAAQRPDAQRSEWEFTVADNQFGDARNHNFNLHGHTLAWFSQSAQWMVNMVPTGITSGEFNPQGNYISRGTSPGPSGDAYGTVQVDKETARRAYYDHIVYAMRHYSSDDPRYAGSRLNNPNTAGIFPLASWDVINEELNETRHSSVIPAQPDEWKTTLRNTSWLRAMTGDAWDDLSQHYVYLLF

SEQ ID NO: 18717 - DNA, 630 bp, Unknown
  Obtained from environmental sample
  misc_feature (1)..(630): n is a, c, g, or t
atgaggacaatgtacaatggtgaagacaaacacgcggggcttatcggtgatttcggcgttttttcatttttcccgacgaaaactctcggcgggtacggcgacggcggaatgattgttaccaataatgaagagttatataagaaagcaaaaagctacaggacgcatggctcttcaaaaaaataccatcatgattatattggttacaattcgcggcttgataccttgcaagcggcaattttgaatgtaaaattgtcccacattgacaacgcgattcaaaaacgagcgaatcacgccgcaaattaccgtgaaatgctgaaaggcgttgccggaattaagctgccctttgttaaagacggaaataaagaagtaaactatgtgttttgtatacaagccgaaaaacgcgacgctcttgaaaaacatctgcaatcgaaagaaataggaacgtcaatttattatcctgttccgcttcatttacaaaaatgttttgagtatttaggttataaaaaaggcgactttcccgtggctgaaaaattatgcgagaccgtgcttgctctccctatgtttcctgagttgacagaagacgaagttaattttgtgtgcgagagcataaaagagttttataaaaaatga

SEQ ID NO: 18718 - protein, 209 aa, Unknown
  Obtained from environmental sample
  DOMAIN (1)...(204): DegT/DnrJ/EryC1/StrS aminotransferase family
  misc_feature (1)..(209): Xaa is any amino acid
MRTMYNGEDKHAGLIGDFGVFSFFPTKTLGGYGDGGMIVTNNEELYKKAKSYRTHGSSKKYHHDYIGYNSRLDTLQAAILNVKLSHIDNAIQKRANHAANYREMLKGVAGIKLPFVKDGNKEVNYVFCIQAEKRDALEKHLQSKEIGTSIYYPVPLHLQKCFEYLGYKKGDFPVAEKLCETVLALPMFPELTEDEVNFVCESIKEFYKK

SEQ ID NO: 18719 - DNA, 690 bp, Unknown
  Obtained from environmental sample
  misc_feature (1)..(690): n is a, c, g, or t
ttgtggaacgacctccgcattatgcgcggaggagcggaacgaatcgcggaacggttcatggattcctacaaggatgcttcccgggatccttccaaagaacagaggcatacacggctttgcacagttccggtgattcaggacggcaggtttcggactatacccaccctcatcgcccctatggtgatcaaaggcagggtaaaaaccatccccctgatgccggaccgggaaggacaagcctctttgtacccttttgacgggatcggtatatacgatcgggaacgtttcgagcgcctgggggggtttgataagagtcttttaagtttttactggcagctcatggactttgggtttcgttcccatctatggggagaggagatcgtcgtaaacaccgccataaagttctcttacgaaggggccgttaccccggaggatgagactacggaagacagcttcaggcgtttttaccttaaaaacctggcgccggtttttcggggggatcacgcggatctgccccttcggcgttttccgggttttctgctgcgcctccgtatggatcttttgagcgcctgggaggaattttttcaggcccgggcctgggtgagaacaaaccgttaccgttttcactgcgacgcccggactgtcgcggaactctggggagaagcccatggagaggaggctaaggtttcatga

SEQ ID NO: 18720 - protein, 229 aa, Unknown
  Obtained from environmental sample
  misc_feature (1)..(229): Xaa is any amino acid
MWNDLRIMRGGAERIAERFMDSYKDASRDPSKEQRHTRLCTVPVIQDGRFRTIPTLIAPMVIKGRVKTIPLMPDREGQASLYPFDGIGIYDRERFERLGGFDKSLLSFYWQLMDFGFRSHLWGEEIVVNTAIKFSYEGAVTPEDETTEDSFRRFYLKNLAPVFRGDHADLPLRRFPGFLLRLRMDLLSAWEEFFQARAWVRTNRYRFHCDARTVAELWGEAHGEEAKVS

SEQ ID NO: 18721 - DNA, 450 bp, Unknown
  Obtained from environmental sample
  misc_feature (1)..(450): n is a, c, g, or t
gtgcgggcgcactatgagaccacaggcgtggaactctacagccaatgcaagccgacccacttcgtggccggaacaggcacgtcgggaacgttcatgggcacttccaaaagactcaaagagtacgatccgtccatacacatcaccctgatgcagcccgactccccgttccacgggctggaggggatgaagcacatgggcgcgaccataaagcccaagatattcgacgagagcgtcgccgacggccgtatagaggtcaagaccgaagacgcctacaaaacggcgcgtaggctcgccgccgaggagggtatattcgtgggcgtaagctccggtgcgaacgtcttcgccgcgctgaaattggccgaaacgctgccgaaaggctcgcgcgtagccaccatactgtgcgacaacggctatagatacatgaccgaacctttgtggaaggacttataa

SEQ ID NO: 18722 - protein, 149 aa, Unknown
  Obtained from environmental sample
  misc_feature (1)..(149): Xaa is any amino acid
MRAHYETTGVELYSQCKPTHFVAGTGTSGTFMGTSKRLKEYDPSIHITLMQPDSPFHGLEGMKHMGATIKPKIFDESVADGRIEVKTEDAYKTARRLAAEEGIFVGVSSGANVFAALKLAETLPKGSRVATILCDNGYRYMTEPLWKDL

SEQ ID NO: 18723 - DNA, 486 bp, Unknown
  Obtained from environmental sample
  misc_feature (1)..(486): n is a, c, g, or t
gtggaaggacttataatgcttattcttgccgcagaccacgaaaaaacaatccgcgccgaaggtgaaaaagcctaccccaacgagtgctgcggttttcttatcggcgaggttgacaaagagggagtcaaaacggtcaagagcgcccaagccatcgacaacgcgagggaagacggcgaacagtaccaccgcttcctcatcaagccggaggatatgctgagcgccgagaaaaccgccagatcgatgaagctcgacgtcatcggtttctaccactcgcaccccgaccatcccgccgccccctccgattacgacaaagaccacgcgctgccgttctactcctacgtgatagtgtcggtgaaacaaggcaaatcccgagaccttacaagctgggaacttacgttcgacaggaagaaatcatgcctgaagagtcaaggggtgaaagaaaacgcttgccgcgcggccgacgcggcgtttttttactttttttga

SEQ ID NO: 18724 - protein, 161 aa, Unknown
  Obtained from environmental sample
  misc_feature (1)..(161): Xaa is any amino acid
MEGLIMLILAADHEKTIRAEGEKAYPNECCGFLIGEVDKEGVKTVKSAQAIDNAREDGEQYHRFLIKPEDMLSAEKTARSMKLDVIGFYHSHPDHPAAPSDYDKDHALPFYSYVIVSVKQGKSRDLTSWELTFDRKKSCLKSQGVKENACRAADAAFFYFF

SEQ ID NO: 18725 - DNA, 369 bp, Unknown
  Obtained from environmental sample
  misc_feature (1)..(369): n is a, c, g, or t
atggtaggcgacaccccttttcctcatcatcgtctgtctcctntacggttttgcnccatcacattttcccccgcgcatattgcgttttatgtcgtctgtgtaaattacgtcattgacgcgataatatccgtggccagcatggcaagcaatgtttacgtgcagaacattgcggataataaggaagaaataaccgcgactatctcaaccggcatttccgtcaaccatgtgatcagcgtgcttatagccctgctgggcggccttctctggaaactcgccggcattgaactgttgttcagcctttccgccttccttggactgctgaattccctgtacgcggcgagcattaagacagtgggcagggaaaagtga

SEQ ID NO: 18726 - protein, 122 aa, Unknown
  Obtained from environmental sample
  misc_feature (1)..(122): Xaa is any amino acid
MVGDTPFPHHRLSPXRFCXITFSPAHIAFYVVCVNYVIDAIISVASMASNVYVQNIADNKEEITATISTGISVNHVISVLIALLGGLLWKLAGIELLFSLSAFLGLLNSLYAASIKTVGREK

SEQ ID NO: 18727 - DNA, 867 bp, Unknown
  Obtained from environmental sample
  misc_feature (1)..(867): n is a, c, g, or t
gtgaagacgggtggctatgacttacctgggaatgctaatgtgtttttagcgctttacaaagctggaggcccagacgaatacggttcggttagaaacataatcattcgcagagcaaacggggattctgcaaaagtagatttgtacaattttcttttaaaagggcaaaaaattggcgaaggcattttaagagacggcgatttggtttttatacaaaaagcggaaaaattggttaaggcaaccggaacaataggaaggcctgctatttatgaattgaaaaacgacgaaacccttagcgatttgcttgcctttgccggaggcttgctcccaaacaccgaacataccgtaaacctttggcgaataaataaggagaccggagcccctgaggtttttgacccaggcacggcaaaagattttgcaaaccgtaaaaaaatattccatatgcaagatggagatagcatttttgttttcgcaagcaccaagcacaatatcaatgccattcaagttacaggctcggttttttacccaggctattatgtatgggcagagggtatgttgatcaaagatgctattgccttggcgggcgggctttcttccgaagcatttaaagatagagccatagtggagcgggtaaatgcagattccagtttttcttatttttctgacgactttgatggcagcagaaactttaagttgctccctggcgataatgtggttattttggattccagaagattgaaaaattggagaatggttagcgtcaccggttttgtaaaagacccacacgactttgaatggcaagagaatttagacgctcttgatttggtagctttgtgcggaggctttttgccaaatgctatgaagaattga

SEQ ID NO: 18728 - protein, 288 aa, Unknown
  Obtained from environmental sample
  misc_feature (1)..(288): Xaa is any amino acid
MKTGGYDLPGNANVFLALYKAGGPDEYGSVRNIIIRRANGDSAKVDLYNFLLKGQKIGEGILRDGDLVFIQKAEKLVKATGTIGRPAIYELKNDETLSDLLAFAGGLLPNTEHTVNLWRINKETGAPEVFDPGTAKDFANRKKIFHMQDGDSIFVFASTKHNINAIQVTGSVFYPGYYVWAEGMLIKDAIALAGGLSSEAFKDRAIVERVNADSSFSYFSDDFDGSRNFKLLPGDNVVILDSRRLKNWRMVSVTGFVKDPHDFEWQENLDALDLVALCGGFLPNAMKN

SEQ ID NO: 18729 - DNA, 537 bp, Unknown
  Obtained from environmental sample
  misc_feature (1)..(537): n is a, c, g, or t
gtgctgaaaatagttagtaatatcccaaacgataaaatcgtatttttgccagacaaactcatgggcgaaaatttgaaaaatgaattggaaaaaatgggaataaaaaaagaacttgtgctacataccggcacctgctatgttcacgaacaatacgacccagatttgataaaatatttcagaattcaaaacgaggggcttcgcatcgcgagccacccggaatgtagccctggcgttgcaatgctaagcgactttgttggaagcacatctcaaatgctggactacattcgcggtctcccagaaaatgcacccgttttgcttttaacggaatgtgggctaagtgcgcgcttgcaaagcgaactgccagagcgccgctttataggcagttgcaatatgtgcaaatatatgaagagcaactctctggaaaatattttgcaaacacttaaaaaaccagaaaaagcaaaagagattaaacttagcactgacgttttagctgctgcaaaacgttgcattgataatatgttcaaatacgctgagtag

SEQ ID NO: 18730 - protein, 178 aa, Unknown
  Obtained from environmental sample
  DOMAIN (2)...(176): Quinolinate synthetase A protein
  misc_feature (1)..(178): Xaa is any amino acid
MLKIVSNIPNDKIVFLPDKLMGENLKNELEKMGIKKELVLHTGTCYVHEQYDPDLIKYFRIQNEGLRIASHPECSPGVAMLSDFVGSTSQMLDYIRGLPENAPVLLLTECGLSARLQSELPERRFIGSCNMCKYMKSNSLENILQTLKKPEKAKEIKLSTDVLAAAKRCIDNMFKYAE

SEQ ID NO: 18731 - DNA, 885 bp, Unknown
  Obtained from environmental sample
  misc_feature (1)..(885): n is a, c, g, or t
atgacagattcggccgagtttcattgcctgntcagnngagttacgcgtgaaaacgccagtggtcttggaattctaaaagtagataaaagaaaccagattaccgaatttttggaaaaaccaggacctgccaaagatatttctgactttaaagctccggcggaagtgcttaccgaaaaaaatagaaatgactgttatcttgcatccatgggcatttatgtatttaactcaaaaacaatggaagattgtcttgccaacgaattaacagattttggcaaagagataattcccaacgcaatcaataaattaaaagtgaacgcatatttttttgacggctattgggaagacataggaacaatcaagaatttctatgagaccaatcttcaactgacatctttaaggcctagttttgatttttatgacgagcaaaagccaatttacacccatatgcgcaatctgccgccatctaaaatgaatttttccaatatgaatcaatctattgccgcagaaggctgtatcattacaaatgcaaatattaccaactcaatagtaggtatccgtacgcttatagaaaccggttccagtcttaacggtgttgtatgtatgggcgcagactattatgaaaccgaagctcaaaaagcgcaaaatgccgaatccagaattcccaatgtaggaataggacgcggagcaataattaaaggcgcaataattgacaagaatgtttgtgtcggcgagggctgccgcatcggcgtagatgatattaaacgcacagacggtaattacggtcattattatattgttgacggaataattgtcattccaaaaaatacgattctttatccaggaacccgtgatttaccgcctgatgtattctttcaaattacttaa

SEQ ID NO: 18732 - protein, 294 aa, Unknown
  Obtained from environmental sample
  misc_feature (1)..(294): Xaa is any amino acid
MTDSAEFHCLXXXVTRENASGLGILKVDKRNQITEFLEKPGPAKDISDFKAPAEVLTEKNRNDCYLASMGIYVFNSKTMEDCLANELTDFGKEIIPNAINKLKVNAYFFDGYWEDIGTIKNFYETNLQLTSLRPSFDFYDEQKPIYTHMRNLPPSKMNFSNMNQSIAAEGCIITNANITNSIVGIRTLIETGSSLNGVVCMGADYYETEAQKAQNAESRIPNVGIGRGAIIKGAIIDKNVCVGEGCRIGVDDIKRTDGNYGHYYIVDGIIVIPKNTILYPGTRDLPPDVFFQIT

SEQ ID NO: 18733 - DNA, 906 bp, Unknown
  Obtained from environmental sample
  misc_feature (1)..(906): n is a, c, g, or t
ttgcagcttatgggggccgtggtgccccagtnggagcagcttccaaagaaagagggcgaggctggcagcagaaagatcaaccgctggacccgctacctgaccgtctttctgtcgttcatacaaggctttggcatcgccaccttggcacagaacatacaagtgggcgtcgttgacaacccaggcctctcattcaagctgatgtgcgcctttaccttggccaccggcaccatcttcatcatgtggataggcgagcagatcaccgagcgcggcgtgggcaacggcatttccctgatgattttcgccggcatagtggccggcctgccaaggggcgtgaacaccatttccaccctgttcgttgagtcaatacaaggcacaaacccaaccccgccaggcgcctatttcttgcttttggccgtgatgatagcggtgcttttggcggtcgtgatgatggaaaattcttttaggcgcatccccatacactacgcccgccgcgtggattcttcccgcatggccagccagcgcagctcttacctgcccctcaaggtcaacacaggcggggtcatgcccgtcatttttgcaagctccgtcatttattttcccgccaccatagcccagttcgctggctgggaatggctcaacaagttagccagctacatcaactacgacgcgcacttctgggtttatacgcctgtgttcattggcgtggtcgttttctttgcattcttctacaccagcattgttttcaaccccgacgaaaccgctgaaaacatgaagcggagcggcgggtacataccaggcatcaggcccggcaaagagaccagcgtctatatggacggcatcctgtccaagctcacatttgtcggggccatataccttgccatagtttccatagtgccgctggtgtga

SEQ ID NO: 18734 - protein, 301 aa, Unknown
  Obtained from environmental sample
  DOMAIN (1)...(301): eubacterial secY protein
  misc_feature (1)..(301): Xaa is any amino acid
MQLMGAVVPQXEQLPKKEGEAGSRKINRWTRYLTVFLSFIQGFGIATLAQNIQVGVVDNPGLSFKLMCAFTLATGTIFIMWIGEQITERGVGNGISLMIFAGIVAGLPRGVNTISTLFVESIQGTNPTPPGAYFLLLAVMIAVLLAVVMMENSFRRIPIHYARRVDSSRMASQRSSYLPLKVNTGGVMPVIFASSVIYFPATIAQFAGWEWLNKLASYINYDAHFWVYTPVFIGVVVFFAFFYTSIVFNPDETAENMKRSGGYIPGIRPGKETSVYMDGILSKLTFVGAIYLAIVSIVPLV

SEQ ID NO: 18735 - DNA, 855 bp, Unknown
  Obtained from environmental sample
  misc_feature (1)..(855): n is a, c, g, or t
ttgcttggaggtttcatgtctgtgtcacttaaaggctgctccctgcttacctggcaggattattcggctgaggaaattcagtatcttttggatctttcaaaaaaagttaaagccgagagcaagagcggcgttgtatatcagcgttttgtcggtaaaaccattgccctgctttttgagaagcgttccacgcggacacgctgctcgtttgaaacggcctttggcgaggaagggggacatcctgtcttcctctccaccacggacatccaactggggagcaaagaatcccttgaggacacggcgcgggtgcttggcaggatgttcagcgcgatacagttcaggggatacaagcaggaaacggttgaaaccctggcaaaatattcaggcgtgcctgtatacaacggccttacagacaagttccatcctactcaggctttggcggatataatgactcttgaagagaactttggcccgataaagggaaaaacgctgtgttatgtgggagacgggcgcaacaatgtgtctaactccctcatggtgatttccgccaaactgggactgcattttaccattgtgacaccgcctgagcttaaccccgaccctgttctgcgggaaaaatgcgtccctctggccgccgcttccggctcgaagataaccgtcagtgacgacattaccgccgttacgggcgcggatgctatatacaccgacgtgtgggtatctatgggagaggataacaaaaaagaagaacgtgtaaagctgctgtccccctatcaggtgaaccaggcattgatggaaataaaccnggcgaaggactccatcttcctccactgtcttcccgctgtcaaaggcgagaaataa

SEQ ID NO: 18736 - protein, 284 aa, Unknown
  Obtained from environmental sample
  DOMAIN (158)...(284): Aspartate/ornithine carbamoyltransferase, Asp/Orn binding domain
  misc_feature (1)..(284): Xaa is any amino acid
MLGGFMSVSLKGCSLLTWQDYSAEEIQYLLDLSKKVKAESKSGVVYQRFVGKTIALLFEKRSTRTRCSFETAFGEEGGHPVFLSTTDIQLGSKESLEDTARVLGRMFSAIQFRGYKQETVETLAKYSGVPVYNGLTDKFHPTQALADIMTLEENFGPIKGKTLCYVGDGRNNVSNSLMVISAKLGLHFTIVTPPELNPDPVLREKCVPLAAASGSKITVSDDITAVTGADAIYTDVWVSMGEDNKKEERVKLLSPYQVNQALMEINXAKDSIFLHCLPAVKGEK

SEQ ID NO: 18737 - DNA, 585 bp, Unknown
  Obtained from environmental sample
  misc_feature (1)..(585): n is a, c, g, or t
atgcgccattggggagaaaaaggtggaaacacctgctggaaggcctcggcgtcgccgaggccgacgaggtttcctctgccttttgaacgtattttggacatcaacggtctggacgatgccttgtggacgttgcgcaccctggaggagcacaaccgcgctgcccggctgtttgcctgtaattgcgccaaacgcgcgttgcctgtttttgagcgggaataccccgaggacaagcgtccgcgtatggccgtagaaacggcggaacgcttcgcccagggcgaaacaacggcggaacacctggccgacgcggaaaaagccgccgaagcggccgtaaatgttgccgaacaatccaaggcgcgggattccgtgaagtttgcggcaaaaagcgcggcctgcgccgcgcagtgggatattgaatatgccgccgcatgggctgcggaaaatgcggcaaaggctatggacgataccgttgatgccgctgtgtggaaccgcgaacaatccgccgcatggactgaactcatcggcgaatttcgtctgctgtgccgtctgggagaaccatacagccgtatccgcggggatggcccttga

SEQ ID NO: 18738 - protein, 194 aa, Unknown
  Obtained from environmental sample
  misc_feature (1)..(194): Xaa is any amino acid
MRHWGEKGGNTCWKASASPRPTRFPLPFERILDINGLDDALWTLRTLEEHNRAARLFACNCAKRALPVFEREYPEDKRPRMAVETAERFAQGETTAEHLADAEKAAEAAVNVAEQSKARDSVKFAAKSAACAAQWDIEYAAAWAAENAAKAMDDTVDAAVWNREQSAAWTELIGEFRLLCRLGEPYSRIRGDGP

SEQ ID NO: 18739 - DNA, 909 bp, Unknown
  Obtained from environmental sample
  misc_feature (1)..(909): n is a, c, g, or t
ttgttctgggttttgcctccaattgttggcgcgattattggctatgtaacgaacgctgtggcaataaaaatgctctcccgccccttaaatgaactgcggctttttggcatacggctcccttttaccccaggcattttgcccagggaacgccataaactggcggacagcataggccggatggtggagcatgaactcattacacccggggtcttaagagaacggcttgccagagccgaggttcgcggaagtatcggaaacgcccttggcggatataccgctcaaatgcttgaccggcctctttccgcgtggcttgaagaatcaggcgattttcctttgtccgagttgttaaaagacttttttaactcgtatatttttgacttttttttggaagagttgttcaagaacctgatccttggcacagcgccaaagccagaagacaacgacagtttcagtcaaaaactaaaagcaggtttcagggattttggcgggctttttattcccgccgccagcgggcttgtaaaaaacggcctagcgaaggaaatgaaaaaccaatccaaggggaaaatttctgcgtacagaaaagcgcttgaaagcgtcattgagaggtatcccggccttagtacacgcgagttcctttccatcggcgcgggcaacaaggggaaggcggattcatttttggcccttaaagcggtggaagcgatagatgaaaatatggatagcgccctttcttcggtcaacgtaaaggtacttgtttccgacaggatcaattccctggacatgctcagggtagaaaaaatcattcttgacgttatggccggacaactgaaatggataaactttttcggggctattctgggcgctttgattggttttctggaagtgcttgtttcttactttactcgttattga

SEQ ID NO: 18740 - protein, 302 aa, Unknown
  Obtained from environmental sample
  DOMAIN (8)...(300): Protein of unknown function (DUF445)
  misc_feature (1)..(302): Xaa is any amino acid
MFWVLPPIVGAIIGYVTNAVAIKMLSRPLNELRLFGIRLPFTPGILPRERHKLADSIGRMVEHELITPGVLRERLARAEVRGSIGNALGGYTAQMLDRPLSAWLEESGDFPLSELLKDFFNSYIFDFFLEELFKNLILGTAPKPEDNDSFSQKLKAGFRDFGGLFIPAASGLVKNGLAKEMKNQSKGKISAYRKALESVIERYPGLSTREFLSIGAGNKGKADSFLALKAVEAIDENMDSALSSVNVKVLVSDRINSLDMLRVEKIILDVMAGQLKWINFFGAILGALIGFLEVLVSYFTRY

SEQ ID NO: 18741 - DNA, 804 bp, Unknown
  Obtained from environmental sample
  misc_feature (1)..(804): n is a, c, g, or t
atgaaccagtatcaaaaggcgattgaaatttgggagcagtaccttgtacatgacgataaaaatataacggtgcttacaagaatagcggacgcttacaggaaggttcgtgattttaaaaattcaaaaaataactatttaaaagttttagaaatggaaggctccaacgcttacgcgattatcgggcttggtcatctgcattacgattttaaagaatatgacgccgctctttcatactgggaaagaatgttggaagccgcgaatcatgatgttgatatccgcgttcttacgtcgattggaaactgccatagaaaattaaaaacattcaataagggcatacctttttttgaaactgtactgggaagagagccaagtaatttttacgcgcttttcgggcttgccgattgttaccgaggcatgaatcaggtaaataattccctttctttctggctgcgtattcttgaacaagacccaagaaacaaaatgattcttacccgcgccggagacgcgtaccgcaacttaaaagattttgacaacgcaaaatcattttacgaaagagcgttaaacattgaatttgacacatacgccgttatgggacttgcccttatcgccaaagaacaggataaatatgacgaggctatcatctcatttaagcggttaattcaacaggacaataaaaattaccgtctttattcggagcttgcggattgttatatcaaaacgggcgataaacgaagcgccgctgaaacgctggaatcgtttcaaaaacttgggataaaaaatcaaaaaattacggaaaatgcttga

SEQ ID NO: 18742 - protein, 267 aa, Unknown
  Obtained from environmental sample
  misc_feature (1)..(267): Xaa is any amino acid
MNQYQKAIEIWEQYLVHDDKNITVLTRIADAYRKVRDFKNSKNNYLKVLEMEGSNAYAIIGLGHLHYDFKEYDAALSYWERMLEAANHDVDIRVLTSIGNCHRKLKTFNKGIPFFETVLGREPSNFYALFGLADCYRGMNQVNNSLSFWLRILEQDPRNKMILTRAGDAYRNLKDFDNAKSFYERALNIEFDTYAVMGLALIAKEQDKYDEAIISFKRLIQQDNKNYRLYSELADCYIKTGDKRSAAETLESFQKLGIKNQKITENA

SEQ ID NO: 18743 - DNA, 420 bp, Unknown
  Obtained from environmental sample
  misc_feature (1)..(420): n is a, c, g, or t
atgaaagccgctatggatacgggcgacgaagcatatattgcccgtgaaatgaaaaagtgggatcccgttattccggtggactttgatcatgccaaagtaaacgaaaccattatggactttgcaagagtggttgataatatagaaaaccattcgtttaaagcgccgacgctggactacctgacgcggaaaatcgagggaaccagtgttatctttgccacccgtacctgccgcaactgcgacgggcgtttttcctgtcccacttaccgtgagtacgccctccagtccggggcaaaaaccagcgccgattttaagaaatattacgaagaatttcgcgacgataccgatcaggaagcgtttatcactgccaatatagacacagaaaaactgaatgatattattaaggaaaaaagtgccgggtaa

SEQ ID NO: 18744 - protein, 139 aa, Unknown
  Obtained from environmental sample
  misc_feature (1)..(139): Xaa is any amino acid
MKAAMDTGDEAYIAREMKKWDPVIPVDFDHAKVNETIMDFARVVDNIENHSFKAPTLDYLTRKIEGTSVIFATRTCRNCDGRFSCPTYREYALQSGAKTSADFKKYYEEFRDDTDQEAFITANIDTEKLNDIIKEKSAG

SEQ ID NO: 18745 - DNA, 876 bp, Unknown
  Obtained from environmental sample
  misc_feature (1)..(876): n is a, c, g, or t
atgacggcaatcccggggaggaatattattttggaatatggtgggtatggcaaaaaacgatatgtccaaaccggcaaanacaacgctttttgcgatgtttttgacattgataactttattgattattgggcggcgcaaatttatatctataatgaggattggccacacaataatttccgtttatggaggacgcgtgacaaagagacggataatccctatggcgatcaaaaatggcgttggcagatgtttgatacggaacttgcaatgggaatttataatggcggcggacttacaggccaatccggcaagaatgcctttgataaaattctgaacggaagcgaaaaggataatcaaaacaataaattattcaaatcattattggcaaatcctgatttttgcagaaaatttgtcaatacaatgctggatctttacaatgtaaactttcatccgaataattatttacccaaattgaataattatgcggctgtatacaggccgctgatggatggttatttttcaaggtggggccgtccctgggatactgtttttcaaaacaaagtagatgacgcaaaaaaatacctgaacgatatacgaaacgcgatggtaaacaattatttgccggcttattttggcgccggctcttcaggaatagccaatataggtatttccagaggcaatttgcgcgatgtttccgtctccgcgacaggcgtatccggcgtaactataanaattaattcagttcatacgtcaggaaactggacaggtaaatactactccggcaatcctattactgtaactgcaagcgttcccccaaacgggtatgaatttgactcttgggtggtacaaatggtacagccgcgactccctctgcgctga

SEQ ID NO: 18746 - protein, 291 aa, Unknown
  Obtained from environmental sample
  misc_feature (1)..(291): Xaa is any amino acid
MTAIPGRNIILEYGGYGKKRYVQTGKXNAFCDVFDIDNFIDYWAAQIYIYNEDWPHNNFRLWRTRDKETDNPYGDQKWRWQMFDTELAMGIYNGGGLTGQSGKNAFDKILNGSEKDNQNNKLFKSLLANPDFCRKFVNTMLDLYNVNFHPNNYLPKLNNYAAVYRPLMDGYFSRWGRPWDTVFQNKVDDAKKYLNDIRNAMVNNYLPAYFGAGSSGIANIGISRGNLRDVSVSATGVSGVTIXINSVHTSGNWTGKYYSGNPITVTASVPPNGYEFDSWVVQMVQPRLPLR

SEQ ID NO: 18747 - DNA, 354 bp, Unknown
  Obtained from environmental sample
  misc_feature (1)..(354): n is a, c, g, or t
atgcaggaagggattatctcccttatgcagatggcaaaaacatcaggcgctgtcgcaagacatacggaagcgggcggactttatattaccgtaattacagacccaaccacaggcggcgttacagcgtcattcgccatgttaggcgacattattctcgccgagccgggggttactcttggttttgccggaaagcgggtaatacaggataccatcggagcggttttgccggacagattccaaacttcggaatttgtttatgaacatggatttatcgacgcggttatccaccgcaaggatatgccgcaggaacttgcgcatattatcagattacacggctacaaaggaggaaagtaa

SEQ ID NO: 18748 - protein, 117 aa, Unknown
  Obtained from environmental sample
  misc_feature (1)..(117): Xaa is any amino acid
MQEGIISLMQMAKTSGAVARHTEAGGLYITVITDPTTGGVTASFAMLGDIILAEPGVTLGFAGKRVIQDTIGAVLPDRFQTSEFVYEHGFIDAVIHRKDMPQELAHIIRLHGYKGGK

SEQ ID NO: 18749 - DNA, 393 bp, Unknown
  Obtained from environmental sample
  misc_feature (1)..(393): n is a, c, g, or t
atgattctccataaaacccaggaaacttttggctatatatcaagagcctcggcggagcagatttcccggcttacggggatccgtctggcccggatctacggggttatcactttttaccattttttcaagacaacaaaaccgggcaaacataaagtttccgtgtgcctgggaacagcctgttacctgaagggcgggcaggatctgatcgacgaggtcaggaacctgttgggcatcgcgcccgatgccgttacagccgacggccttttttccgtggacccggtccgttgcgtgggttgctgcggccttgcgccggtattaacggttggcaacgatacctttggcaagctgacaaaggacatgctccccggaattatcgaaaagtatcgtaagtaa

SEQ ID NO: 18750 - protein, 130 aa, Unknown
  Obtained from environmental sample
  DOMAIN (2)...(129): Respiratory-chain NADH dehydrogenase 24 Kd subunit
  misc_feature (1)..(130): Xaa is any amino acid
MILHKTQETFGYISRASAEQISRLTGIRLARIYGVITFYHFFKTTKPGKHKVSVCLGTACYLKGGQDLIDEVRNLLGIAPDAVTADGLFSVDPVRCVGCCGLAPVLTVGNDTFGKLTKDMLPGIIEKYRK

SEQ ID NO: 18751 - DNA, 405 bp, Unknown
  Obtained from environmental sample
  misc_feature (1)..(405): n is a, c, g, or t
ttggaaaaaatcgctaacggcaacggcgaggacgaggatctcgccaagcttgaagagatcggcgtggccatgaccaaggcaagcctttgtatgttgggcggctcggcggcaaacccgacgctgtccacgatcaagaatttccgggacgaataccttgagcatatccatgacaagaaatgccgcgccggcaagtgcaaaaaacttctgcgcttcatgattagcacggacaagtgtattggctgcgggatgtgcgcgaagaaatgtcccgcaaactgcattacggcgctggatccggcgaaatatccgggcaagaaaaagcctccttacgccatcgatcagaacgcctgcgttaaatgcggcgaatgtctgaagaattgtaagtttaacgcggtttcgcggggctaa

SEQ ID NO: 18752 - protein, 134 aa, Unknown
  Obtained from environmental sample
  DOMAIN (109)...(132): 4Fe-4S binding domain
  misc_feature (1)..(134): Xaa is any amino acid
MEKIANGNGEDEDLAKLEEIGVAMTKASLCMLGGSAANPTLSTIKNFRDEYLEHIHDKKCRAGKCKKLLRFMISTDKCIGCGMCAKKCPANCITALDPAKYPGKKKPPYAIDQNACVKCGECLKNCKFNAVSRG

SEQ ID NO: 18753 - DNA, 873 bp, Unknown
  Obtained from environmental sample
  misc_feature (1)..(873): n is a, c, g, or t
ttgggaatgggccggtatatattacggagagaagatttgaaaaaagaaaaaagagaaaagggaaaaaggaaaagaaaattagcgcaatggctttgtgttgtattgtttgcgggcgcggcagccggactgtgggcgcaaaacggcggaaataccgtaccgccgccggtgtcgcataaccgcccgctgcgtactgtccgccttgatccccagccgccggccgccgcttcccactcaccggcccccgatcccctctcccctcttttgactcccgaagctcttaatcagccgcttacggcgtattatattgaaaaatattcaagcgccggcggcattgcgtggatcaactcaattatcaaaaacggaagcatatatcttccctatgtaagagacgaaattgttcagcgcggcctgccgccggaattggcgtatttaccgtttattgaatcaggatatttgggtacggcgcgcagcaaatccggcgcaacgggcctgtggcagtttatgatgaatagtatcgcgcccttcagtatcaaggtaaatgatctgattgacgagcgccgtgatttccgaaaatcaaccgttgccgccctgaaaaaactcacggaaaattaccgtaccctgggggattggcatctggcactggcggcctataatgccggactgggcgcggtaagccggacggtaaaaaaaacaaacaccagcgattattggcttctctgccataaaaaagaatttaaacaggaaacgattcattatgtgcctaaatttctggcggtgtcgtatattctttcccacccccgccgcttcggcgtggatattggcctgaaacaattcaatggacaaccattaagcgggggaagcagtatcgcttga

SEQ ID NO: 18754 - protein, 290 aa, Unknown
  Obtained from environmental sample
  DOMAIN (126)...(240): Transglycosylase SLT domain
  misc_feature (1)..(290): Xaa is any amino acid
MGMGRYILRREDLKKEKREKGKRKRKLAQWLCVVLFAGAAAGLWAQNGGNTVPPPVSHNRPLRTVRLDPQPPAAASHSPAPDPLSPLLTPEALNQPLTAYYIEKYSSAGGIAWINSIIKNGSIYLPYVRDEIVQRGLPPELAYLPFIESGYLGTARSKSGATGLWQFMMNSIAPFSIKVNDLIDERRDFRKSTVAALKKLTENYRTLGDWHLALAAYNAGLGAVSRTVKKTNTSDYWLLCHKKEFKQETIHYVPKFLAVSYILSHPRRFGVDIGLKQFNGQPLSGGSSIA

SEQ ID NO: 18755 - DNA, 501 bp, Unknown
  Obtained from environmental sample
  misc_feature (1)..(501): n is a, c, g, or t
atgttaagtgtaaaattgaaagttacacccgaagacgccggaggctattatggcgtagatgattactatctcgaatcaaaagggtattggcacggaaacgccgaaatgatgaacttgttaagattgcccgtcgatttaaaccctgatgatttcctaaaactattgtggggctaccatcccaaaagcggcgaaccgcccgttccactggtcaaaaacgccggttatgacaaccggcgaggagggtcggatttcaccttttctgcccccaaaatattatccatcctctcgtttaaagatgaaagaatcctcgatgcgtttaatacggcgatacgccagacgttggacttcgccgaaagttttatccaagtcaggaacaaacacaaaggcgtcgtctccatcgaaaaaacgggcaaagcattatttgcggttttcaaccaccgcaccacacgccccatcgaagaagatgaattacccgatccgcaatacacgcgcattgcgtaa

SEQ ID NO: 18756 - protein, 166 aa, Unknown
  Obtained from environmental sample
  misc_feature (1)..(166): Xaa is any amino acid
MLSVKLKVTPEDAGGYYGVDDYYLESKGYWHGNAEMMNLLRLPVDLNPDDFLKLLWGYHPKSGEPPVPLVKNAGYDNRRGGSDFTFSAPKILSILSFKDERILDAFNTAIRQTLDFAESFIQVRNKHKGVVSIEKTGKALFAVFNHRTTRPIEEDELPDPQYTRIA

SEQ ID NO: 18757 - DNA, 360 bp, Unknown
  Obtained from environmental sample
  misc_feature (1)..(360): n is a, c, g, or t
atggacaatatcgctctggaaaaaagccgcaaatttgctataagggtatacaacttatacaaatatctttgtgatgaaaaacacgaatttactcttgcaaaacaattactgcgatcaggcacatctattggcgcaaacttgagcgaagcccaatattccgttagccgtaaagaatttcttgttaaagccacaatatccttaaaagaatgtgctgaaacagaatattggcttgatctgcttaaagagacaaaccttctatccacaaccgaatacgacagtataataaaagactgtaaagaacttctacgccttctcatttccatcacaaaaactataaaattaaataacaaacaacaataa

SEQ ID NO: 18758 - protein, 119 aa, Unknown
  Obtained from environmental sample
  misc_feature (1)..(119): Xaa is any amino acid
MDNIALEKSRKFAIRVYNLYKYLCDEKHEFTLAKQLLRSGTSIGANLSEAQYSVSRKEFLVKATISLKECAETEYWLDLLKETNLLSTTEYDSIIKDCKELLRLLISITKTIKLNNKQQ

SEQ ID NO: 18759 - DNA, 771 bp, Unknown
  Obtained from environmental sample
  misc_feature (1)..(771): n is a, c, g, or t
ttgcaaagttttccggagttttccagatataggtcaaatgaaagggaaatgatctatattgatacttatccatccaaactccaagaatcctatgaagttcttgcccatgaaatgcagcatcttatgaattttgtgtcaaccagagtatttagaaatgaaaaagggacattatatccaatggatacatgggtagacgaagggctttcagccgccgcacaatgggtatattcaggacagatatctaatgaacgcgtaatttggtataattataatggagataaaaatggtaccgtaaaaggattgatagataaaggcaacaatttctatatctggggtaatcacaaagaaaacaatgttgcgattcttgacgattatgcgacggttaatctttttttccaatatttaagactgcaatccgctaaccccggagatatttattatgatattatttcatccaagtatcctgattatgattatcgggcggtaacaaacgcaaaaaatataaacagcgctcataaaaataattggccgttactgcttagagactggcatgcggcaaattacataaacagcgcaaacggcttatatggttacatgaatgatcctgtgttgaaaggaataaaggctcctatgtttaatgacgccgccaccaccatagatctatttcccggggaaggcgtttacagcataacaaacgccgcagggactttgccgacgacttccggtaatatcaagtacgcaggttttaggaaaaaattcaaatccaagtga

SEQ ID NO: 18760 - protein, 256 aa, Unknown
  Obtained from environmental sample
  misc_feature (1)..(256): Xaa is any amino acid
MQSFPEFSRYRSNEREMIYIDTYPSKLQESYEVLAHEMQHLMNFVSTRVFRNEKGTLYPMDTWVDEGLSAAAQWVYSGQISNERVIWYNYNGDKNGTVKGLIDKGNNFYIWGNHKENNVAILDDYATVNLFFQYLRLQSANPGDIYYDIISSKYPDYDYRAVTNAKNINSAHKNNWPLLLRDWHAANYINSANGLYGYMNDPVLKGIKAPMFNDAATTIDLFPGEGVYSITNAAGTLPTTSGNIKYAGFRKKFKSK

SEQ ID NO: 18761 - DNA, 447 bp, Unknown
  Obtained from environmental sample
  misc_feature (1)..(447): n is a, c, g, or t
atgatgaaaatggtaacgccgatttacacaatgatctttcttgttttcctgattgtagccagtttcttaatcattaatactgtggtgatgatcattcacgagcggataaaggaaataggcatgatgggctgtctcggcatgacccgcgccgaaatcgttaaagtgtttttcttcgagtctctttttcttgccatgttcggcgcgtttgccggggtgattgtcggcggcgtaattgccggaatcgggtctatgtatcctctgcgtttgggtgatatgtacggagacactttcagcgaaatgccgcttggcaacgcgatatttcttgggattagtccttttataattattcgcgcgtggcttctgggcgttgtggtagcgtcattattcacgttgataccgtctttaaaaagtgcgtttgtggaaccggtggaagcgttgaggaggtaa

SEQ ID NO: 18762 - protein, 148 aa, Unknown
  Obtained from environmental sample
  DOMAIN (1)...(142): Predicted permease
  misc_feature (1)..(148): Xaa is any amino acid
MMKMVTPIYTMIFLVFLIVASFLIINTVVMIIHERIKEIGMMGCLGMTRAEIVKVFFFESLFLAMFGAFAGVIVGGVIAGIGSMYPLRLGDMYGDTFSEMPLGNAIFLGISPFIIIRAWLLGVVVASLFTLIPSLKSAFVEPVEALRR

SEQ ID NO: 18763 - DNA, 828 bp, Unknown
  Obtained from environmental sample
  misc_feature (1)..(828): n is a, c, g, or t
ttggcgcacggccggtgcatgaccggggcncttttgcaaatgctttcctcttacggcgtaacagtgctgcctgaaatcgtaatggacaggacggccctgacaatgcaataccaaactgtcgctccgtcaggcgcgcgccagataaggataacccgctatccgcagtggatccgggtgttaggcgaaaacggcaaccccatgcatccggtaagcgccaaattcaacggccttgatatgtattgggcaagcccccttgaattgagtgaagtaaaaggcgttgaggccttaccgttgtttaccaccacatctgaggcatggtcaatgagggagccgttttatacaagccctgaacaacccatgatgttaggcagggatgccaactctaccacaggcgcaaagatactcggggcaagcctgacggggatttttccctcatggttcgccgacagaccaaagcctgaacaggaagacggctcggagcttcccgatatacccgccgaagccaaaccctcgcggctgataattgtcggcgacacggattttgccacgtcgttcatgaatgtctcaggcgcccagggcaatatcaacttcattatccaggccgccgactggctgagcaatgatgatgacattataggaatacgttcaagagaatcgcgatccaacaggcttgacaggataattgatcctgtaaagaggtccgccgcaatgcgcattgccgagattgtaaatgtttttcttattcccctgctggttattattaccggcttactgctcgcctggaggcggcgtaccaaggcgccaaaagagcccgcaaatgacgtataa

SEQ ID NO: 18764 - protein, 275 aa, Unknown
  Obtained from environmental sample
  misc_feature (1)..(275): Xaa is any amino acid
MAHGRCMTGALLQMLSSYGVTVLPEIVMDRTALTMQYQTVAPSGARQIRITRYPQWIRVLGENGNPMHPVSAKFNGLDMYWASPLELSEVKGVEALPLFTTTSEAWSMREPFYTSPEQPMMLGRDANSTTGAKILGASLTGIFPSWFADRPKPEQEDGSELPDIPAEAKPSRLIIVGDTDFATSFMNVSGAQGNINFIIQAADWLSNDDDIIGIRSRESRSNRLDRIIDPVKRSAAMRIAEIVNVFLIPLLVIITGLLLAWRRRTKAPKEPANDV

SEQ ID NO: 18765 - DNA, 546 bp, Unknown
  Obtained from environmental sample
  misc_feature (1)..(546): n is a, c, g, or t
atgccttctggaaaaataaaatgggaagcgatctttgccgcgcttgaaaaatggcgcgaggacattgatgatccgtctgtaaataccgtagcggaatattataaccgctcaccatgggcggtgcttgtctctacaattatcagcctgcggacaaaggacgacgtgacccttactgcttccgaaaagcttcttgaaaaagcggcaacgcctgcggaacttgtttcgctaagacaggataaaattgaaagattgatctatcccgccggtttttacaggaacaaagccgcgtccttaaaaaaaatagccgccatactgcttgaacaatacggcggcaaagtcccctcctcaatggaagtcctgctctcccttcccggagtcggcagaaaaacggcgaacctcgtccttaacgaagcgtttgatcttgacgccatctgcgtagacatacacgttcaccgtatttcaaaccnggtgcggctggcttacaagcaaaacgtccgaagaaaccgaaatgatctcgtgcgatnctgtccatggnnnnnaaaatga

SEQ ID NO: 18766 - protein, 181 aa, Unknown
  Obtained from environmental sample
  DOMAIN (108)...(137): Helix-hairpin-helix motif
  misc_feature (1)..(181): Xaa is any amino acid
MPSGKIKWEAIFAALEKWREDIDDPSVNTVAEYYNRSPWAVLVSTIISLRTKDDVTLTASEKLLEKAATPAELVSLRQDKIERLIYPAGFYRNKAASLKKIAAILLEQYGGKVPSSMEVLLSLPGVGRKTANLVLNEAFDLDAICVDIHVHRISNXVRLAYKQNVRRNRNDLVRXCPWXXK

SEQ ID NO: 18767 - DNA, 330 bp, Unknown
  Obtained from environmental sample
  misc_feature (1)..(330): n is a, c, g, or t
ttgctgggagcggcggctcttggcgacataggcgaattgtccccgccctccgatccaatgtataagaacgccgattcaatggaacttntgcgttacgcctttgagaaggtaaagaacgcgggctggcatcttacaaatcttgactgcgtaattatctgtgaagagcctaagattcttccctttagaagcgttatccgcaaatcacttgccgccgcccttgaagtttccgatgactgtatttttctgaaaggcaaaaccgcggaaaagttgggacaggtaggcaagggaaaagcggtagaggtttacgctgtatgccttctggaaaaataa

SEQ ID NO: 18768 - protein, 109 aa, Unknown
  Obtained from environmental sample
  DOMAIN (1)...(109): YgbB family
  misc_feature (1)..(109): Xaa is any amino acid
MLGAAALGDIGELSPPSDPMYKNADSMELXRYAFEKVKNAGWHLTNLDCVIICEEPKILPFRSVIRKSLAAALEVSDDCIFLKGKTAEKLGQVGKGKAVEVYAVCLLEK

SEQ ID NO: 18769 - DNA, 522 bp, Unknown
  Obtained from environmental sample
  misc_feature (1)..(522): n is a, c, g, or t
atgaatacccgcgcgaagattctgctgtccgctgcggttgtggcgatagtcgccgttctgaccgtttgggcgatttccgtattcggcactcgatccatattaaccatcgccgcggtcatatcggcgctttgcgcggcggctatgcttatcggtctgtacaatcaagccaatttattggccgccgagatgtacacggtcgtaagcgagggcgacgccgcgattaggagcatggcggaggcgatcaaccagataaaagccgcgtccgacaacaacacgaaaatcatagagactatcgacgacatagccatccggaccaaccgtttagccctgaacgcggcgatggaagcggtggacgcgggcgaggcgggcaagggattcgccgaggtggccgaagaggcgcgcgccctcgcaatgcgctgcgccgaggcggcaaagaacgccgaaagcaccgcgttcgtgatcaggatgccgatgatggccggaaatatgacctctctcgaagagtgcgagctttggcggtag

SEQ ID NO: 18770 - protein, 173 aa, Unknown
  Obtained from environmental sample
  SIGNAL (1)...(24)
  DOMAIN (21)...(172): Methyl-accepting chemotaxis protein (MCP) signaling domain
  misc_feature (1)..(173): Xaa is any amino acid
MNTRAKILLSAAVVAIVAVLTVWAISVFGTRSILTIAAVISALCAAAMLIGLYNQANLLAAEMYTVVSEGDAAIRSMAEAINQIKAASDNNTKIIETIDDIAIRTNRLALNAAMEAVDAGEAGKGFAEVAEEARALAMRCAEAAKNAESTAFVIRMPMMAGNMTSLEECELWR

SEQ ID NO: 18771 - DNA, 783 bp, Unknown
  Obtained from environmental sample
  misc_feature (1)..(783): n is a, c, g, or t
ttgacgcgtaccctccggcacaatagactcgtagacgcccgcttgagtgaagatgaaatggtgcgccaagcggtcgccatgggacgcgccctccgcagccgctttaccataaaaacgcgccagccgctgagcgagttcacagtcgtcctctccgaccgcaagaagattgaccttatcagagacatggaggaacttgtcaaagaggaattaaacgtaaaaaaggtgacattcgacagcgacgaggagcgcgtggtgagcatatcggccaagccgaacttcaagaaactcggcaaggtctttgggcaaaagatgaaagacgccggcgcgttgatcgaacaatttagcgccgcggatataaagagactcgagagcggggacaaaattgacgtgctgggaacggcgctggcctacgacgacatagaggtccgccgcaccaaacgcgagggattggaggtggagacggagggcgaactcaccgtggcgcttgaggtcacgatcacgccggaattgaaacgtgagtgcgtggcccgcgagtttgtcaaccgcgtacagaacaggcgcaaagagataggcctaaacgtcgccgaccgcatcgtcatacgctactcgtcccccaaagagatcgagaacgcgcttgccgatttccgcgattacgtgtgcgccgaaacgctggccgtaaatatagaaagcgcccccgccgcggcaatcaacaacgccgagaacgttgacattgaggggtcggcggtaataatcggcgtcgaaaaaacggacattggaggttga

SEQ ID NO: 18772 - protein, 260 aa, Unknown
  Obtained from environmental sample
  misc_feature (1)..(260): Xaa is any amino acid
MTRTLRHNRLVDARLSEDEMVRQAVAMGRALRSRFTIKTRQPLSEFTVVLSDRKKIDLIRDMEELVKEELNVKKVTFDSDEERVVSISAKPNFKKLGKVFGQKMKDAGALIEQFSAADIKRLESGDKIDVLGTALAYDDIEVRRTKREGLEVETEGELTVALEVTITPELKRECVAREFVNRVQNRRKEIGLNVADRIVIRYSSPKEIENALADFRDYVCAETLAVNIESAPAAAINNAENVDIEGSAVIIGVEKTDIGG

SEQ ID NO: 18773 - DNA, 861 bp, Unknown
  Obtained from environmental sample
  misc_feature (1)..(861): n is a, c, g, or t
ttgataaaaacagaatggaatcaattcgacccatacaatatattgcttcccgtatgcaaggcagttgtcggcgaatgcgagaaggtaggtgaactcccgtatactctttgttgggtaaccgcaacagcgcaaataatgaagtatcacaaacatccaaagatgcgcgtaagacatccaaacgaggcttatgattatgataatatgctcgatgtatataagaatgtcaaagccaccgaacaacaacgaaatgccgtagccacgctgatatacgacatcaagatcggttggaacaaggacactacgacaaatacatataagtgggtcgctttcgggtatgacaaaagcattcaaacgctctatcgcacttactacgacgatacccaatggacggaaataataaaaaaacaattagattccggtttgccgatattgtatggtgggaaaaataaaatgagaagcgatggtcatatgtttataatagacggatacgataataagggcaaatttcattgtaattggggctggagcggtaatcaggatggatattattctcttaacgctcttaatccgggaacaagtgattggaattacggtaattatattggcataaacattaaacccgataaaggtggcgcaccgagttactctatggcgttggattcgttttccgtcgcanaaaccgccgtcgctcanaacgaaccgtttgttgttaatatcggaataaataagcaaagtaatttaccattcgacggtcaaacgggagcggcgttagtggatagcaaaggcaatatcgcggcggtttatcgattcgttaaggtgcaatcaaagaattcatatactgcgatgtaccggataacgtaa

SEQ ID NO: 18774 - protein, 286 aa, Unknown
  Obtained from environmental sample
  DOMAIN (1)...(207): Peptidase C10 family
  misc_feature (1)..(286): Xaa is any amino acid
MIKTEWNQFDPYNILLPVCKAVVGECEKVGELPYTLCWVTATAQIMKYHKHPKMRVRHPNEAYDYDNMLDVYKNVKATEQQRNAVATLIYDIKIGWNKDTTTNTYKWVAFGYDKSIQTLYRTYYDDTQWTEIIKKQLDSGLPILYGGKNKMRSDGHMFIIDGYDNKGKFHCNWGWSGNQDGYYSLNALNPGTSDWNYGNYIGINIKPDKGGAPSYSMALDSFSVAXTAVAXNEPFVVNIGINKQSNLPFDGQTGAALVDSKGNIAAVYRFVKVQSKNSYTAMYRIT

SEQ ID NO: 18775 - DNA, 546 bp, Unknown
  Obtained from environmental sample
  misc_feature (1)..(546): n is a, c, g, or t
atggctaatcacaaatcattttttccgctgtttgtggacataaacgacaaaatagcgttgatagtaggcggtggtaatgtggctgaacggcgtgtaaaagcacttgcctcattcggtgcggatgtcaccgtcatatccccaaaagtcacagaatacatcgaacacgccgcttcgtcaaacataatacatctattaaaacgcggctacgaagagggcgatattgacgtcgttaatccttttttagttatcgccgctaccgacgataggcaggtgaatcgcaacataatgacggaagcaaaaaaattgaatatccacgtatcggtagccgattgcggcgaagagtgtacattctgttttccggcgattgctgaaaacgaggattatatcgccggactcgtatcgaaaggcggcgaccacgccggcgttaaactgttggncggagaaaataagggaggtttctcatcccatgaaaagaacaataggataggaagccgcgggcggcgcgttgcccatcgcgcaggcgcggttcgttatagatgccgttag

SEQ ID NO: 18776 - protein, 181 aa, Unknown
  Obtained from environmental sample
  misc_feature (1)..(181): Xaa is any amino acid
MANHKSFFPLFVDINDKIALIVGGGNVAERRVKALASFGADVTVISPKVTEYIEHAASSNIIHLLKRGYEEGDIDVVNPFLVIAATDDRQVNRNIMTEAKKLNIHVSVADCGEECTFCFPAIAENEDYIAGLVSKGGDHAGVKLLXGENKGGFSSHEKNNRIGSRGRRVAHRAGAVRYRCR

SEQ ID NO: 18777 - DNA, 306 bp, Unknown
  Obtained from environmental sample
  misc_feature (1)..(306): n is a, c, g, or t
ttggtggagtggcttaaggaaagggggcgccccgactacaaccaggccctgataaaagccatggactcagaagacgatggagcctcagccgcaggcagcgaagctggcggtggcgatgacatctacacaatggccgtggccatcgtcatgcgggagcgcaaagcaagcaccagcctactacaaaggaagctcagcatcggctatgggcgcgccgccaagataatagacaggatggaagccgaaggccttattggcccggacaggggctctgggaagccgagagaggtgcttgctgatgccgagtga

SEQ ID NO: 18778 - protein, 101 aa, Unknown
  Obtained from environmental sample
  misc_feature (1)..(101): Xaa is any amino acid
MVEWLKERGRPDYNQALIKAMDSEDDGASAAGSEAGGGDDIYTMAVAIVMRERKASTSLLQRKLSIGYGRAAKIIDRMEAEGLIGPDRGSGKPREVLADAE

SEQ ID NO: 18779 - DNA, 426 bp, Unknown
  Obtained from environmental sample
  misc_feature (1)..(426): n is a, c, g, or t
atgaagattttgctggataccaatgttatccttgatattgttgaaaaaagagaacagtttttttctgattcttataagattttcatgaaaagcgccgcgagagaatgtgaagctattatcggagcaaattctgttactgatatttattatataacccgtaaaaattgcaaagattccaaacaagctctttcctttataattgatatgcttaaagttgttacttctgtagatacaaaagcagttgatatacaagaagccataagactgaatttttctgattttgaggatgcagttatagcggcgacagcttcaagggaaggggccagttatataattaccagaaacaccagtgattttaataaatcccctgttccggcaataaccccaacagatttcttaaaaaaatataataatggaaaccaatag

SEQ ID NO: 18780 - protein, 141 aa, Unknown
  Obtained from environmental sample
  DOMAIN (3)...(124): PIN domain
  misc_feature (1)..(141): Xaa is any amino acid
MKILLDTNVILDIVEKREQFFSDSYKIFMKSAARECEAIIGANSVTDIYYITRKNCKDSKQALSFIIDMLKVVTSVDTKAVDIQEAIRLNFSDFEDAVIAATASREGASYIITRNTSDFNKSPVPAITPTDFLKKYNNGNQ

SEQ ID NO: 18781 - DNA, 789 bp, Unknown
  Obtained from environmental sample
  misc_feature (1)..(789): n is a, c, g, or t
atgaacgggctgcctgtgatattagtcaagaaatacttctgcaatattagccaatttatagaaagtatttaccagccttgcgtcgttgtttttgatgaatttgaaaaaacctaccctgctaaaaggcaacgcgatcaagatgatcttgagagccaggaaaacttattaaacttatttgattcatcgcttgctggaaaaaagctttttctattgacctgcaatgactggtttgacctattgcaatttttattgaaccggcctggaagaatccattaccatttcaggtatcacagtcttactgctgatgaaatatcagcatactgtacggataatctcaaaaaaaaacatggtcttatcaaagaaatttgtgcatccggcgtgcgcatccctagtttttcttacgatatgctaaggtcgatagtatttgaactgaacaattatgattgcggcattgatgaattaaagaaagtattaaatataaacacacgggagcattcgctctgtgattttaaggtttaccttaaatcaggtgagatcgtacatgatgacggcgtacttgattttgagcaatcgtgtttcagtttgaggtggggtaagagcccccgcggccaaggatattttgctgttgtgaatttgaagaaagcgcagtggacgggaaatgccgatggctcgctggtattggataaagaattcatttcaaagccggaagataaagatgaggacggcggcgatattgagaagatagttttctttcctgataaaagacattttaggacctgggatcgctaa

SEQ ID NO: 18782 - protein, 262 aa, Unknown
  Obtained from environmental sample
  misc_feature (1)..(262): Xaa is any amino acid
MNGLPVILVKKYFCNISQFIESIYQPCVVVFDEFEKTYPAKRQRDQDDLESQENLLNLFDSSLAGKKLFLLTCNDWFDLLQFLLNRPGRIHYHFRYHSLTADEISAYCTDNLKKKHGLIKEICASGVRIPSFSYDMLRSIVFELNNYDCGIDELKKVLNINTREHSLCDFKVYLKSGEIVHDDGVLDFEQSCFSLRWGKSPRGQGYFAVVNLKKAQWTGNADGSLVLDKEFISKPEDKDEDGGDIEKIVFFPDKRHFRTWDR

SEQ ID NO: 18783 - DNA, 945 bp, Unknown
  Obtained from environmental sample
  misc_feature (1)..(945): n is a, c, g, or t
atgatcagatcggccgagcatgcggtgattgccaattcggggaacgccaacgcctgcacgggcgaaggcggcattgccgtagcccgcaaaatggcgagccttgcttccggcctttttgggataagcccaaaagaagtggcggttgcttccaccggggttatcggggtgcagcttccgatagaaccaattgaaagcagcatggaagccattcgcaattctttaaggggcgatgaagaaggccacttaatggcccttgaagcgatcatgaccaccgacacgcgcaaaaaaggcggggcggtggagatcgaaatcggcggcaaaagcgtaagaatcggcggcatgataaagggctcagggatgatacacccaaacatggcaaccatgctttgctttataaccaccgacgccgccatttcaaaggaagcccttgacgcaagcctccggagtgcggtgcgccgctcctttaaccgcgtttccgtagacggcgacacttcgaccaacgacatggtaatcgtcatggcaaacggcgaggcgcttaattccccgatagaagccgggacgcccggctatgaaattttctcccaggctctggaggacttttgcgtaagcctcgcccgcgagctggcaagggacggcgagggcgcgacaaaactggtgtctgttacagctcaaggggcaaaagatgaagataacgcggaaattctcgccaagtccgtggtttcttccagcctggtaaaggccgcctgttttggctcagacgccaactggggacgcatcctctgcgccatggggtactccggcgcggactttaacccggacgaggttgacgtaagctttgcaagcgaaagcgaagagatcgccgtctgccgccacggcgctccgctggacttctcagaagaagacgcccaaaggatactcaagcgcgaagagatcgaaatccgctaa

SEQ ID NO: 18784 - protein, 314 aa, Unknown
  Obtained from environmental sample
  DOMAIN (1)...(314): ArgJ family
  misc_feature (1)..(314): Xaa is any amino acid
MIRSAEHAVIANSGNANACTGEGGIAVARKMASLASGLFGISPKEVAVASTGVIGVQLPIEPIESSMEAIRNSLRGDEEGHLMALEAIMTTDTRKKGGAVEIEIGGKSVRIGGMIKGSGMIHPNMATMLCFITTDAAISKEALDASLRSAVRRSFNRVSVDGDTSTNDMVIVMANGEALNSPIEAGTPGYEIFSQALEDFCVSLARELARDGEGATKLVSVTAQGAKDEDNAEILAKSVVSSSLVKAACFGSDANWGRILCAMGYSGADFNPDEVDVSFASESEEIAVCRHGAPLDFSEEDAQRILKREEIEIR

SEQ ID NO: 18785 - DNA, 630 bp, Unknown
  Obtained from environmental sample
  misc_feature (1)..(630): n is a, c, g, or t
atgggcgtcaataacgaaaaatacgatccggccaatgaccacgttatttccaacgcaagctgcaccaccaactgcctcgcgccgctggtacacgtgattctgaaagagggcatcggcattgagacgggcctgatgaccactattcattcctacaccgcgacccaaaagaccgttgacgggccttccaaaaaagactggcggggcggcagggcagcggcaatcaacatcatcccctcaaccaccggcgcggccaaggccgtgggcgaagtgcttcccgaaaccaagggcaaactcaccggcatgagctttagggttcccacgcccaccggttccgtagtagatctggttttccggtcggtaaaggacacttccatagaggaaatcaacgccgcgttcaaaaaggcggcgggcagctacctcaacgggatactggaataccaggaggacgagattgtctccaccgacatcgtccacgacacccacacgtctatctacgacagccttgccaccctgcagaacaacctgcccggagagaagcgattcttcaaggtagtttcctggtacgacaacgagtggggctattccaacaaagtcgtcgatttgctcaagtacatcgacagcaagaaataa

SEQ ID NO: 18786 - protein, 209 aa, Unknown
  Obtained from environmental sample
  DOMAIN (26)...(188): Glyceraldehyde 3-phosphate dehydrogenase, C-terminal domain
  misc_feature (1)..(209): Xaa is any amino acid
MGVNNEKYDPANDHVISNASCTTNCLAPLVHVILKEGIGIETGLMTTIHSYTATQKTVDGPSKKDWRGGRAAAINIIPSTTGAAKAVGEVLPETKGKLTGMSFRVPTPTGSVVDLVFRSVKDTSIEEINAAFKKAAGSYLNGILEYQEDEIVSTDIVHDTHTSIYDSLATLQNNLPGEKRFFKVVSWYDNEWGYSNKVVDLLKYIDSKK

SEQ ID NO: 18787 - DNA, 387 bp, Unknown
  Obtained from environmental sample
  misc_feature (1)..(387): n is a, c, g, or t
atgaaggcaggttacgaggtgcttgttgaagcgggttatcagcctgagagcgcctattttgaagttatgcatgagatgaagcttatcatcgatcttgttaatcggggcggactttcatttatgcgttattcaatttccgacacggcggaatacggagactatgttaccgggcctaagatcattaccgaggatacaaagaacacgatgaggcaggtgttaaaaaatattcagaacggcagtttcgcgcgggaatggatacttgaaaatcaaactaaccgtcctttctttaaccgcatgagggcgattgagaaggaacacccaatcgagaagactggaaacgaacttcgcgcaatgatgtcctggttaaagaagaacgaggaaaaataa

SEQ ID NO: 18788 - protein, 128 aa, Unknown
  Obtained from environmental sample
  DOMAIN (1)...(123): Acetohydroxy acid isomeroreductase, catalytic domain
  misc_feature (1)..(128): Xaa is any amino acid
MKAGYEVLVEAGYQPESAYFEVMHEMKLIIDLVNRGGLSFMRYSISDTAEYGDYVTGPKIITEDTKNTMRQVLKNIQNGSFAREWILENQTNRPFFNRMRAIEKEHPIEKTGNELRAMMSWLKKNEEK

SEQ ID NO: 18789 - DNA, 312 bp, Unknown
  Obtained from environmental sample
  misc_feature (1)..(312): n is a, c, g, or t
atgttctatttaaccgaatacataaacataataggtgcctctgctcttgggtcaatcttctttttgggcggatttcaagctcctctcattggcattcctattgtggatgaaaaactattgctcattccagatttggtttggatgtttgcgaaaatttattttcttatatggctttatatgatgttccgctggacttggctaagacctcgcgttgaccagcttatgaattttgaatggaaatttttgctgccatcaaatttgattttgctcgggcttggagcattctttatagcaatgggttgggttttatga

SEQ ID NO: 18790 - protein, 103 aa, Unknown
  Obtained from environmental sample
  misc_feature (1)..(103): Xaa is any amino acid
MFYLTEYINIIGASALGSIFFLGGFQAPLIGIPIVDEKLLLIPDLVWMFAKIYFLIWLYMMFRWTWLRPRVDQLMNFEWKFLLPSNLILLGLGAFFIAMGWVL

SEQ ID NO: 18791 - DNA, 525 bp, Unknown
  Obtained from environmental sample
  misc_feature (1)..(525): n is a, c, g, or t
atggaaatttttgctgccatcaaatttgattttgctcgggcttggagcattctttatagcaatgggttgggttttatgactgtttccaaatattttcatgccgtgataactggtcccattagcttgctaaaagggatgtctgttactctcaaatattttataaacccaaaaagaatagtaaccgaacaatacccagaaaacaaagcaacccttaaaatgcacgagcgttttagagggagagttgaattaattcacgatgaaaacggcttgcacacttgcaccgcctgcggcatgtgtgaaaaaaactgccccaacgcctctataaatgtactctcaacaaaaaacatggcaggcaaaaaaattctcggcaaatatctttatcgtatggactcttgcactcaatgcgggctttgcatagagagctgcccctttggttgcttaagaatggcacacgattttgaaatggcttctacagatagaaaatcgttcaatatggtttttgacaaaaccgaggggcaaggataa

SEQ ID NO: 18792 - protein, 174 aa, Unknown
  Obtained from environmental sample
  DOMAIN (125)...(148): 4Fe-4S binding domain
  misc_feature (1)..(174): Xaa is any amino acid
MEIFAAIKFDFARAWSILYSNGLGFMTVSKYFHAVITGPISLLKGMSVTLKYFINPKRIVTEQYPENKATLKMHERFRGRVELIHDENGLHTCTACGMCEKNCPNASINVLSTKNMAGKKILGKYLYRMDSCTQCGLCIESCPFGCLRMAHDFEMASTDRKSFNMVFDKTEGQG

SEQ ID NO: 18793 - DNA, 537 bp, Unknown
  Obtained from environmental sample
  misc_feature (1)..(537): n is a, c, g, or t
atggccgaagaacctacatctgacgaacatgaagcctttggagacgaggctcctgcctttaatcgttttaaaatagccatttccaaagaccaaatggaagttataatgtatccgctaattgggattactgatggcgggttaactactttagaagaggttcttgatgcttgccatagagaaaacataaaagtagatataaacgaaaaattagttgaaaagcaaatactagtagccaatccggttgaaatagccataggcaaaggcataaagcccgaagacggtaaagatggttaccttgaattcaaggttgatatgagtgcaaagccgcagttcataccaaaagatgaccattcggtagattacaaaaattcaatgcaggttaccctcgtcaacataggcgatattctggcagatgtgattccaccaacagaaggcgaagatggaatggatgtcagagggtctcccataaaggcaaaagccggtgagagagcgaaatactttttaggtgaaggtctagaagaaaagatggtcatatag

SEQ ID NO: 18794 - protein, 178 aa, Unknown
  Obtained from environmental sample
  misc_feature (1)..(178): Xaa is any amino acid
MAEEPTSDEHEAFGDEAPAFNRFKIAISKDQMEVIMYPLIGITDGGLTTLEEVLDACHRENIKVDINEKLVEKQILVANPVEIAIGKGIKPEDGKDGYLEFKVDMSAKPQFIPKDDHSVDYKNSMQVTLVNIGDILADVIPPTEGEDGMDVRGSPIKAKAGERAKYFLGEGLEEKMVI

SEQ ID NO: 18795 - DNA, 459 bp, Unknown
  Obtained from environmental sample
  misc_feature (1)..(459): n is a, c, g, or t
atgtggctactcgccggcgagggagagatgatggtgggcgagccgcagagcatcgtcgtgcccgtgctctccccggggcgcgtgtccggccagggcggctccctcggggactacgagggcgccctccccggcaggacattcgacaaacagtggctgcgcagttcctttggtgtgccgcccgactcgctccgcctgctggaggttcccggcgacagcatggcgcccacagtcatgccgggcgacatggtcttcgtggacgcttcgccggaccaggaccactcgaaggagggcctgtgggtggtgcggataggggacaccctcagggtcaagcgcgtccagcacctcggcaagaacaagtccgtggccgccagcgacaatcccgcctaccagccgatcccgctggacaagacggcgaggctgatgggccgggtcgtgggcaagcccctgcgctttctctag

SEQ ID NO: 18796 - protein, 152 aa, Unknown
  Obtained from environmental sample
  DOMAIN (67)...(137): Peptidase S24-like
  misc_feature (1)..(152): Xaa is any amino acid
MWLLAGEGEMMVGEPQSIVVPVLSPGRVSGQGGSLGDYEGALPGRTFDKQWLRSSFGVPPDSLRLLEVPGDSMAPTVMPGDMVFVDASPDQDHSKEGLWVVRIGDTLRVKRVQHLGKNKSVAASDNPAYQPIPLDKTARLMGRVVGKPLRFL

SEQ ID NO: 18797 - DNA, 504 bp, Unknown
  Obtained from environmental sample
  misc_feature (1)..(504): n is a, c, g, or t
gtggctactcgccggcgagggagagatgatggtgggcgagccgcagagcatcgtcgtgcccgtgctctccccggggcgcgtgtccggccagggcggctccctcggggactacgagggcgccctccccggcaggacattcgacaaacagtggctgcgcagttcctttggtgtgccgcccgactcgctccgcctgctggaggttcccggcgacagcatggcgcccacagtcatgccgggcgacatggtcttcgtggacgcttcgccggaccaggaccactcgaaggagggcctgtgggtggtgcggataggggacaccctcagggtcaagcgcgtccagcacctcggcaagaacaagtccgtggccgccagcgacaatcccgcctaccagccgatcccgctggacaagacggcgaggctgatgggccgggtcgtgggcaagcccctgcgctttctctaggggcacggcggtctggattttgcggggcgggcggcgtcttggggtga

SEQ ID NO: 18798 - protein, 167 aa, Unknown
  Obtained from environmental sample
  misc_feature (1)..(167): Xaa is any amino acid
MATRRRGRDDGGRAAEHRRARALPGARVRPGRLPRGLRGRPPRQDIRQTVAAQFLWCAARLAPPAGGSRRQHGAHSHAGRHGLRGRFAGPGPLEGGPVGGADRGHPQGQARPAPRQEQVRGRQRQSRLPADPAGQDGEADGPGRGQAPALSLGARRSGFCGAGGVLG

SEQ ID NO: 18799 - DNA, 729 bp, Unknown
  Obtained from environmental sample
  misc_feature (1)..(729): n is a, c, g, or t
ttgcagtggtttgcggatgacgatgaagacgcgccgggtaagacggaagagcctaccgagcataaactccagcgtctgcgggaagaagggcaggttgtaaaaagtcaggagcttgtcggagcgataggtctgtttctgccggcgctgctgttgttgtttttggcgccttcaatgcttcgcacatgcgtcgagatgatccgctttttcttcctgcgcgccgtcgaattggatcccaccaaagacgcggttattctggttgttcttttacggtattttgtgaaacttgtctggccgattttgacagttgcggtactggcggctgttttttcaaatgtagcgcagattgggtttttatttacaacaaagacgattgttcccaatttttcaaaggtgcttccgaagatagggcagtatttcaggcgtattttttcggtagacggaatttacaattttattaaatcaatagccaagatggcgattatcgggtttgttgcgtttattttgatctattctgaaaaagacaaattgcttaatctgcaaaaaacggatgtctggatagggcttactacggtatcttcaatcgccattaagatgatgatcatttcggctcttttgttaattgtaatgtcgatacctgattatatgttccagcgctggcgtttcagggaacgtaaccggatgacaaggtacgaaataaaagaagaaagaaaattagaggcgctgcgataa

SEQ ID NO: 18800 - protein, 242 aa, Unknown
  Obtained from environmental sample
  DOMAIN (10)...(242): FlhB HrpN YscU SpaS Family
  misc_feature (1)..(242): Xaa is any amino acid
MQWFADDDEDAPGKTEEPTEHKLQRLREEGQVVKSQELVGAIGLFLPALLLLFLAPSMLRTCVEMIRFFFLRAVELDPTKDAVILVVLLRYFVKLVWPILTVAVLAAVFSNVAQIGFLFTTKTIVPNFSKVLPKIGQYFRRIFSVDGIYNFIKSIAKMAIIGFVAFILIYSEKDKLLNLQKTDVWIGLTTVSSIAIKMMIISALLLIVMSIPDYMFQRWRFRERNRMTRYEIKEERKLEALR

SEQ ID NO: 18801 - DNA, 414 bp, Unknown
  Obtained from environmental sample
  misc_feature (1)..(414): n is a, c, g, or t
atgggcctcaaggaacgccttgaaagcgtggaactttccattaccatgcctgccggcgccaatggaaagctgtatggttctgtcaccagccatacggtagcggatgagttggcaaagctgggcttccagatcgatcgcaagcggatcgaccttgcgagcgcgggtataaagaatgtcggaaagtacaaagccgttatcaagctatacgaaaattcccaggcggaaatccagatacacatcatcgggcaggagataaaaaccgaaacccatgaagctccgcctgcccgtccccaccgccgccgcagggatgaagttgccccaaccgcggaaaaaccggcttctgaaggcgaagcgcccgcgtcggcggaagcttccatgtccgcagaagcccccgcagtgagcagtgaagcttaa

SEQ ID NO: 18802 - protein, 137 aa, Unknown
  Obtained from environmental sample
  DOMAIN (3)...(83): Ribosomal protein L9, C-terminal domain
  misc_feature (1)..(137): Xaa is any amino acid
MGLKERLESVELSITMPAGANGKLYGSVTSHTVADELAKLGFQIDRKRIDLASAGIKNVGKYKAVIKLYENSQAEIQIHIIGQEIKTETHEAPPARPHRRRRDEVAPTAEKPASEGEAPASAEASMSAEAPAVSSEA

SEQ ID NO: 18803 - DNA, 867 bp, Unknown
  Obtained from environmental sample
  misc_feature (1)..(867): n is a, c, g, or t
atgatgaataagagaagcaaaatgcgtaaattaaatgacgtactgaaaggcgtcctggacataattgaaaataacctcaaaaacggtattaacgccgatgtcctggcggatgaattctccctctcctcagtccatttacaacggctctttaagcaaacattcaaaagatccataggtaaatatatacgttcccgtaaattatcaacaagcatcatggatttattgtacagcgatttaaatattctgagcattgcccttgaatacggctttagttacgagcaatcgtatatactcagttttagacgtgaattcggatttacaccgggcgacttacgcagaaacagacagttggtaagaaccacgccttcccttcaatcttatgtacatagttcagtatataaaaatgattttcttgtcggcaatatcattaacgaaaagtatatggacgacgcttattttgatgttataaaaaatcattttaatattatcactcccgaaaacaatctgaaaccggcttcgctgacattaaaccggggtggcgcgtacaactggtcgtatgcggatcaaatggtaaaccgggcgctggaaaacggaatacctgttcatggtcattgtatgatatggcatgattggactcccgaatggataaccagggggacaagagcggaagtagaggacaaccagaaaatttatattaccgacgtattaacgcattatcacggcaggatttattcatgggatgtggtaaatgaagtaattagggattttccttccgccgccgatgccgctggagactggaaaaaatgtctgcgtacagattcccctggtnaaagcctcggccgatctgatcatgcttnnnttttgtaa

SEQ ID NO: 18804 - protein, 288 aa, Unknown
  Obtained from environmental sample
  DOMAIN (128)...(288): Glycosyl hydrolase family 10
  misc_feature (1)..(288): Xaa is any amino acid
MMNKRSKMRKLNDVLKGVLDIIENNLKNGINADVLADEFSLSSVHLQRLFKQTFKRSIGKYIRSRKLSTSIMDLLYSDLNILSIALEYGFSYEQSYILSFRREFGFTPGDLRRNRQLVRTTPSLQSYVHSSVYKNDFLVGNIINEKYMDDAYFDVIKNHFNIITPENNLKPASLTLNRGGAYNWSYADQMVNRALENGIPVHGHCMIWHDWTPEWITRGTRAEVEDNQKIYITDVLTHYHGRIYSWDVVNEVIRDFPSAADAAGDWKKCLRTDSPGXSLGRSDHAXXL

SEQ ID NO: 18805 - DNA, 369 bp, Unknown
  Obtained from environmental sample
  misc_feature (1)..(369): n is a, c, g, or t
gtggaatttgtggaaaaaagttttgacggcgcgggcgaaaaggaaaaggcagaaatagttaaaaaatatataaacatattccgcgaacagggaatagacgccctggttctgggctgcacccactttctgtacctattggatgaattccggcgcgaggctgaaccgcaaattaaaatttttgactcccttgagggaataaccaaccgcattgaattcctgctgaatgaaaacgaaggcgcccttcgcgcgaaaaaagactgcgcgcatacccgaaaaattattcttacgggaatacagccgcctgattcttcatggataaaccgcgcgaaagcctgcgggtttgatctttgcctgataaacgaattatga

SEQ ID NO: 18806 - protein, 122 aa, Unknown
  Obtained from environmental sample
  misc_feature (1)..(122): Xaa is any amino acid
MEFVEKSFDGAGEKEKAEIVKKYINIFREQGIDALVLGCTHFLYLLDEFRREAEPQIKIFDSLEGITNRIEFLLNENEGALRAKKDCAHTRKIILTGIQPPDSSWINRAKACGFDLCLINEL

SEQ ID NO: 18807 - DNA, 744 bp, Unknown
  Obtained from environmental sample
  misc_feature (1)..(744): n is a, c, g, or t
atgggcgagccggcaaaagctctggatcagatcagcagggcgtggaaacgcagagacgaagttatccgcactgtttccgcatcgtcggaagtaaggacaaaaagagagttgcttctcgcggcgcgaatgtcattccgtcttgggcaatacagcaaagcggaagaatttattgacgcgattcttgatcaatggcccgattctcccgaaggaaaagtagcgcacactgaaaaaataaaaatattaaacgagttgaacaaatttgcggagttaaatgattttataattaataatccttttaaaatagaaaaaaatattgactactacacactgctcgcaaaatgccgttgggaacttaaaaattattccgattccgccgaagcgtgggacacggcgtttaaaatgagcgaacaaaacggcgtttacgccgttaacgcggctaacgcgtatgaaacggcgggcgatgaaaaagaagctctgtctcgatatatcgccgccggaaaaatttttcttaatcaggacaatataccggagcttgccgctcttatgcaaaaattgtccgtccttggaaaagataactgggaagcccacgcgcttgccggaaaatgggcgttcagtattgaggactacgacaagagcgcgaaagaatttgagatttcccataaaatcagatgcgcccctaagaccgcgcccgaaaccgggacccggctcttttatatttatggggggcttatttttttacattaa

SEQ ID NO: 18808 - protein, 247 aa, Unknown
  Obtained from environmental sample
  misc_feature (1)..(247): Xaa is any amino acid
MGEPAKALDQISRAWKRRDEVIRTVSASSEVRTKRELLLAARMSFRLGQYSKAEEFIDAILDQWPDSPEGKVAHTEKIKILNELNKFAELNDFIINNPFKIEKNIDYYTLLAKCRWELKNYSDSAEAWDTAFKMSEQNGVYAVNAANAYETAGDEKEALSRYIAAGKIFLNQDNIPELAALMQKLSVLGKDNWEAHALAGKWAFSIEDYDKSAKEFEISHKIRCAPKTAPETGTRLFYIYGGLIFLH

SEQ ID NO: 18809 - DNA, 354 bp, Unknown
  Obtained from environmental sample
  misc_feature (1)..(354): n is a, c, g, or t
ttgcgcgggttgcattaccaaaaaaatcctgggcaggaaaaacttgttcgctgcacgtatggcaaaatttgggatgtagcggttgatattcgcaagggcagcacgacctacggtaagtggcatgccgttgagctgagtgaagagaataaaaaaatgttttatatccccataggttttgcgcatgggttttgcgtactttccgactttgccgaggttcagtacaaatgcagctccgtttacaacggagccgaagaagcaggctacgcctgggattgccccaaaatagccataaaatggccaaccgaagagcctattttgagcaaaagggatttacagaatcctggacttgaataa

SEQ ID NO: 18810 - protein, 117 aa, Unknown
  Obtained from environmental sample
  DOMAIN (1)...(117): dTDP-4-dehydrorhamnose 3,5-epimerase
  misc_feature (1)..(117): Xaa is any amino acid
MRGLHYQKNPGQEKLVRCTYGKIWDVAVDIRKGSTTYGKWHAVELSEENKKMFYIPIGFAHGFCVLSDFAEVQYKCSSVYNGAEEAGYAWDCPKIAIKWPTEEPILSKRDLQNPGLE

SEQ ID NO: 18811 - DNA, 435 bp, Unknown
  Obtained from environmental sample
  misc_feature (1)..(435): n is a, c, g, or t
gtgagaagtatttggagtctgatttttatggatattagcgctttaggtaatcaataccttgaatatgactatgttccgttttcatccgcttccactccagaagttcaaagcgggacaacagacgcttttgaaaagctcttaagaaaggcgcaagagcaggatgcttccaatactagcttttcttctgcaaaaaaaactcctattgataaaaccgacaagctttatgaagcctgtatggagcttgaaacttttttgataaaaaaccttattaaaagtatgcgatctacaattcaaaaaaacagccttattaacacgggctttgcaggtgaagtttacgaggacatgctctacgacgagtacgccaaagcgttcacgcaaaacgcgaatttcggttttgccgagatggcgtatagagagctggcggggataaggtaa

SEQ ID NO: 18812 - protein, 144 aa, Unknown
  Obtained from environmental sample
  misc_feature (1)..(144): Xaa is any amino acid
MRSIWSLIFMDISALGNQYLEYDYVPFSSASTPEVQSGTTDAFEKLLRKAQEQDASNTSFSSAKKTPIDKTDKLYEACMELETFLIKNLIKSMRSTIQKNSLINTGFAGEVYEDMLYDEYAKAFTQNANFGFAEMAYRELAGIR

SEQ ID NO: 18813 - DNA, 843 bp, Unknown
  Obtained from environmental sample
  misc_feature (1)..(843): n is a, c, g, or t
ttgatgatgccgagctgggccgaaaaacaaaatatgttatactgtaaatgtggcaaacaggaaaacacgcagtctatctacaacgctatcgcgctctgcgccgtgggtacggagaaggctgtctcaaacgaactgaaaaaactggggctcggtcttgttgaatcggcttacggcaaggtgcgttttaaggccgatataaccggattgtaccgttccctgatggggttaagagcggcagaccgcgtgcttctggaagcgggctgtttccatgccgttgattttgacgcgctttttgaaaaaacacaggcagtaccctgggaaaaactcgtcccggcgcagtcggggctgaaaatcgtcaaggtgcgctccggcggttcacggctgaaggcggaaacgagcatacagtcaataacgcacaaggcggcggcgaaaaggctctgtacacacagcgggctttcgcgactgccggattcggagcgggcggcggaagtcagggtctatgtcgaaaaagacacggtttcacttctgctggatttaagcggagagccgctttttaagcgcgggtacaggaaggacggcggcatcgcgccgttacgggaaaccaccgcggcagctatgcttctgctttcgggctggaagcgcaaatacccgttatacgatcccttttgcggctcaggcactatcctcgccgaagcgctgatgtacgcgtgggacatggcgcccggcttatgccggggccaaggcggcggcattcgaggtttcgccctggacgggctacttatcaccgacaataaaatcaaaagaaacagtccgggccgaatttcgcgccaggacccattttga

SEQ ID NO: 18814 - protein, 280 aa, Unknown
  Obtained from environmental sample
  DOMAIN (187)...(278): Putative RNA methylase family UPF0020
  misc_feature (1)..(280): Xaa is any amino acid
MMMPSWAEKQNMLYCKCGKQENTQSIYNAIALCAVGTEKAVSNELKKLGLGLVESAYGKVRFKADITGLYRSLMGLRAADRVLLEAGCFHAVDFDALFEKTQAVPWEKLVPAQSGLKIVKVRSGGSRLKAETSIQSITHKAAAKRLCTHSGLSRLPDSERAAEVRVYVEKDTVSLLLDLSGEPLFKRGYRKDGGIAPLRETTAAAMLLLSGWKRKYPLYDPFCGSGTILAEALMYAWDMAPGLCRGQGGGIRGFALDGLLITDNKIKRNSPGRISRQDPF

SEQ ID NO: 18815 - DNA, 408 bp, Unknown
  Obtained from environmental sample
  misc_feature (1)..(408): n is a, c, g, or t
ttgataaagcgagcgaggaagacgcggggtcttcgtcgctgccgccaaggcgaatcagccgttcaaaatgggtcctggcgcgaaattcggcccggactgtttcttttgattttattgtcggtgataagtagcccgtccagggcgaaacctcgaatgccgccgccttggccccggcataagccgggcgccatgtcccacgcgtacatcagcgcttcggcgaggatagtgcctgagccgcaaaagggatcgtataacgggtatttgcgcttccagcccgaaagcagaagcatagctgccgcggtggtttcccgtaacggcgcgatgccgccgtccttcctgtacccgcgcttaaaaagcggctctccgcttaaatccagcagaagtgaaaccgtgtctttttcgacatag

SEQ ID NO: 18816 - protein, 135 aa, Unknown
  Obtained from environmental sample
  misc_feature (1)..(135): Xaa is any amino acid
MIKRARKTRGLRRCRQGESAVQNGSWREIRPGLFLLILLSVISSPSRAKPRMPPPWPRHKPGAMSHAYISASARIVPEPQKGSYNGYLRFQPESRSIAAAVVSRNGAMPPSFLYPRLKSGSPLKSSRSETVSFST

SEQ ID NO: 18817 - DNA, 336 bp, Unknown
  Obtained from environmental sample
  misc_feature (1)..(336): n is a, c, g, or t
atggaaattctaaagacgctgtttcttggcatcattcagggattgacggagttcctacccgtctcgtcctccgcccacctcattatcgccgagacgtttatgggcggnggtttcgaaagcgaggcgacgagttcggccatgcttttggaggtggttctgcacgtggcgaccggaatagcggtgctgtttgtgtttcgtaaggatattcttgatatcatacggggatgtctttcaaaggacggctttgagcgaaagggctcgcttttttactccggctgggtgatttggcgacagtaccggcggcgtttgtcgggatactttttaacgatcagataa

SEQ ID NO: 18818 - protein, 111 aa, Unknown
  Obtained from environmental sample
  DOMAIN (5)...(111): Bacitracin resistance protein BacA
  misc_feature (1)..(111): Xaa is any amino acid
MEILKTLFLGIIQGLTEFLPVSSSAHLIIAETFMGGGFESEATSSAMLLEVVLHVATGIAVLFVFRKDILDIIRGCLSKDGFERKGSLFYSGWVIWRQYRRRLSGYFLTIR

SEQ ID NO: 18819 - DNA, 717 bp, Unknown
  Obtained from environmental sample
  misc_feature (1)..(717): n is a, c, g, or t
atgtccttgagcgccaacaaggcgtggtttaccgcagcggagcagcagcttgtggccgctgctcaggcctctatggcggtattggaggggttgaacgccacgaaaaagagaagcgagtgggggctgtcggggtggccgaaaacgggcgtgtccaagacaaacccctttgtctcggattcgcggatgcagtacgacatcgcggtagttttcgagattgtaaatcaacagggcaaagtgatcggcactcagaaggtcaaactgaatcccgcctttaatatcaaacgcggagacgacggccgcttcacggttgggattgccggtgaggacatcgtcacatccgtaaacttcaatggggttaaggctgacgaaatcagcgacaacctgactgtccgcatagcctctgtaaacggggcgccgccgcagaaggcgcggttctcgatagtcgccatgccgcttgccgaaaaggctaagccgcttacggacgccagaaacggcaagaagtacaataccgttaagatcggtggtaagacgtggatggcggaaaatctgaattatcagcccaaaacgggcgagtcttggtgctacaaagacagtagttcaaattgcgataaatacggcagactctacgactggaataccgcgaggcaagtttgccccgcgggttggcgtttacccggacaatgggagtggaagaaattggttgtattggttatataa

SEQ ID NO: 18820 - protein, 238 aa, Unknown
  Obtained from environmental sample
  misc_feature (1)..(238): Xaa is any amino acid
MSLSANKAWFTAAEQQLVAAAQASMAVLEGLNATKKRSEWGLSGWPKTGVSKTNPFVSDSRMQYDIAVVFEIVNQQGKVIGTQKVKLNPAFNIKRGDDGRFTVGIAGEDIVTSVNFNGVKADEISDNLTVRIASVNGAPPQKARFSIVAMPLAEKAKPLTDARNGKKYNTVKIGGKTWMAENLNYQPKTGESWCYKDSSSNCDKYGRLYDWNTARQVCPAGWRLPGQWEWKKLVVLVI

SEQ ID NO: 18821 - DNA, 399 bp, Unknown
  Obtained from environmental sample
  misc_feature (1)..(399): n is a, c, g, or t
atgaaccgtttccccatcggctacggctttcgccctcgccttaggggccgacttaccctgggaagattgcctttacccaggaaacctcgggcttccggcggagggggatcccacccctcttttcgtctacttatacctgcattctcccttccgctccctccagcgcgccttgcaatgcgcnttcgtcggtctgcggaatgctcccctaccatcctacccttgcggatagaatccgcggcttcggttgcatgcttagccccgttacattgtctgcgcgccgtgactcgaccagtgagctgttacgcactctttcaaggaatggctgcttctaagccaacctcctggctgtcctcgccagggcacatcatttcacactcagcatgctatccgggaccttag

SEQ ID NO: 18822 - protein, 132 aa, Unknown
  Obtained from environmental sample
  misc_feature (1)..(132): Xaa is any amino acid
MNRFPIGYGFRPRLRGRLTLGRLPLPRKPRASGGGGSHPSFRLLIPAFSLPLPPARLAMRXRRSAECSPTILPLRIESAASVACLAPLHCLRAVTRPVSCYALFQGMAASKPTSWLSSPGHIISHSACYPGP

SEQ ID NO: 18823 - DNA, 633 bp, Unknown
  Obtained from environmental sample
  misc_feature (1)..(633): n is a, c, g, or t
ttgatggactgcgtggaagccgtcgaggaggagatcgtcgagggtatgcagcccgaagatgagggggataaggataaagagaaagagggtgaagaagagggccccgagtacgacgagcatgtctggacgtcgccgcgcaacgctaagttgatcgtgcggaagatttccgagacgctccgcgaggccgactccgcgaacgccgatgtatatcggaagaataccgaggcgtacctctcgcggctcgacgaattggacgtgaagttcaagggtgtggttgacagcgcagcccgcaaaacgatcgtgttcggcgaccgcttcccgttccgctacttcgccgacgcctacgggctgaagtatttcgcggcgttccccgggtgcgcgaccgagacggaggcgagcgctaagaccgtcgcgtttctgatcgacaagataaaaaaggagaagattcccgtcgtcttccacatcgagctttccaatgagaagatggcgaatgcaatcggcgaggcgaccggcgcgaaggcgtgtctgctccactcttgccacaacgtcacgaaggcggattttgagtcaggtaagacctacttggacttcatggccgtcaacgttgacgctattcgggaggcgctgaagtaa

SEQ ID NO: 18824 - protein, 210 aa, Unknown
  Obtained from environmental sample
  DOMAIN (1)...(210): Periplasmic solute binding protein family
  misc_feature (1)..(210): Xaa is any amino acid
MMDCVEAVEEEIVEGMQPEDEGDKDKEKEGEEEGPEYDEHVWTSPRNAKLIVRKISETLREADSANADVYRKNTEAYLSRLDELDVKFKGVVDSAARKTIVFGDRFPFRYFADAYGLKYFAAFPGCATETEASAKTVAFLIDKIKKEKIPVVFHIELSNEKMANAIGEATGAKACLLHSCHNVTKADFESGKTYLDFMAVNVDAIREALK

SEQ ID NO: 18825 - DNA, 678 bp, Unknown
  Obtained from environmental sample
  misc_feature (1)..(678): n is a, c, g, or t
gtgcgccacaagggcggcggacacaagcgccgctaccgcgaaattgattttaagaggaacaaaatcggcgttcccggcaaggtcgccgccattgaatacgatccgaaccgcagcgccaatatcgcccttattttttacaaagacggcgagaagcgctacatcatagcccccaagggccttcaggtaggaaacaccattgtaagcgggcctaacgcccccatagaaaccggaaacgcccttccccttgagaacatccccctgggctttaccatttgcaatatagaactgactctcggcaaaggcgcgcagatggcgcgttcagccggggccggcgcgttaatcgtagccaaggaaggcgactatgtaaccgtcaagctgccttccggagaagtccgcatggtattcaggaagtgttatgcgacaatagggtcaatcggcaacgaggatcacatgaacacatccttgggaaaagccggacggaaacgctggctgggcgtgcgccccaccgtaaggggaatggcgatgaaccccgtggatcacccccacggcggcggcgagggaaggagcaagggcatacaccccgttaccccctggggccagccgacaaagggctacaagacaaggaagaagcacaagccctcatcacggtttatagtaagccgcggtaaaaagaaatga

SEQ ID NO: 18826 - protein, 225 aa, Unknown
  Obtained from environmental sample
  DOMAIN (1)...(68): Ribosomal Proteins L2, RNA binding domain
  misc_feature (1)..(225): Xaa is any amino acid
MRHKGGGHKRRYREIDFKRNKIGVPGKVAAIEYDPNRSANIALIFYKDGEKRYIIAPKGLQVGNTIVSGPNAPIETGNALPLENIPLGFTICNIELTLGKGAQMARSAGAGALIVAKEGDYVTVKLPSGEVRMVFRKCYATIGSIGNEDHMNTSLGKAGRKRWLGVRPTVRGMAMNPVDHPHGGGEGRSKGIHPVTPWGQPTKGYKTRKKHKPSSRFIVSRGKKK

SEQ ID NO: 18827 - DNA, 909 bp, Unknown
  Obtained from environmental sample
  misc_feature (1)..(909): n is a, c, g, or t
gtgagcgttaggcgcatattctggctgctggtaacgctttgtttagtttcaattccggcgttttctcaacnttatctggaattgaacttaaaccctgtgtacagcgggaaccctttcgcaaaaccaaaacagacgcttgacgttttcagggtgatagaaagagcggcaaacgataaaagcattcatggaataattttaaacattgcgaatgttaccaaagacagatgttatctgtgggaactgcggagcgcgctggaacaatttaaggcaaacggaaaaaaaatatgcgcgtatataagcaatgccaacatggacatttattgccttgcctccgtcgcggacaaaatcgtcatggacgatcttggaaacctgaacataatgggttatgccataggcagaggatatgcgcgtcacgctctggacaaactgggaataggcgtgcgggaattgcgttattttgagtataaatccgccggcgaaacttttaccagagactccatgtcggaagcggatcgcaggcagtacaatgattatcttgacgatacgtttaaccttacccgcgacaccttaaaagaagcgcgtaactggacggacgaaaaatttaattccgtcttaaacagcggttttctttactcggcaaggagcgcgcacgaggacggccttgttgattttgtaggcggaaaagaagcggtaaatctggctgtctggcaaattgaggaaaaaatcggcgcttcttttaaattgtacggcgcatccgattcaagcataacgggcggcaaaaccgcgtatttacttccgaaagcgagaagtttcttcaggaaaagaccgccggttgtcgccgtagtttacgcaaacggggaaacgtccatgagacagggcatggaggcggtaaagcttgcgaaaatttaa

SEQ ID NO: 18828 - protein, 302 aa, Unknown
  Obtained from environmental sample
  SIGNAL (1)...(22)
  DOMAIN (87)...(245): Peptidase family S49
  misc_feature (1)..(302): Xaa is any amino acid
MSVRRIFWLLVTLCLVSIPAFSQXYLELNLNPVYSGNPFAKPKQTLDVFRVIERAANDKSIHGIILNIANVTKDRCYLWELRSALEQFKANGKKICAYISNANMDIYCLASVADKIVMDDLGNLNIMGYAIGRGYARHALDKLGIGVRELRYFEYKSAGETFTRDSMSEADRRQYNDYLDDTFNLTRDTLKEARNWTDEKFNSVLNSGFLYSARSAHEDGLVDFVGGKEAVNLAVWQIEEKIGASFKLYGASDSSITGGKTAYLLPKARSFFRKRPPVVAVVYANGETSMRQGMEAVKLAKI

SEQ ID NO: 18829 - DNA, 714 bp, Unknown
  Obtained from environmental sample
  misc_feature (1)..(714): n is a, c, g, or t
atggaagaaattgacagaaccctggttgcggtaggcagtcatgatcttatcctggacattatcgacgacatgatggcttccggtatttcctcaagctcttatctttccagttcccatgtgggaagcatggccggtctcctttcccttaaacggggggaatgtcatatagcgcccattcaccttttggacgaagataccggaacctacaatgttgtgtgggtaaaaaaaatagcgccggacagggacctgtgccttatcaagggagtgggccggattcagggtcttatcatccccaaaggtaatccgctgggtatacattccgtcaacgacttgtgccgctgccgttatgtgaaccgtcagcggggcgcggggacaaggctctttctggattaccagttaaaaaaagcggacatagatcccaacagcatcgaagggtatgacagggaagtcgccacccacatggccgtggccgcttcggtgcagagcggtaacgccgatgtcggcatgggcatagcctcagccgccaaagccctgggccttgactttattcccctgggagaagaagaatatgatttcgcgacctgtaaggaatttctggaattaaacgagatgaaaatttttcttgatattcttaaaagcccggactttcacgggaagctggaggaattgggcggctatacgtggggccgggccggggaaattgtcctgctatga

SEQ ID NO: 18830 - protein, 237 aa, Unknown
  Obtained from environmental sample
  misc_feature (1)..(237): Xaa is any amino acid
MEEIDRTLVAVGSHDLILDIIDDMMASGISSSSYLSSSHVGSMAGLLSLKRGECHIAPIHLLDEDTGTYNVVWVKKIAPDRDLCLIKGVGRIQGLIIPKGNPLGIHSVNDLCRCRYVNRQRGAGTRLFLDYQLKKADIDPNSIEGYDREVATHMAVAASVQSGNADVGMGIASAAKALGLDFIPLGEEEYDFATCKEFLELNEMKIFLDILKSPDFHGKLEELGGYTWGRAGEIVLL

SEQ ID NO: 18831 - DNA, 651 bp, Unknown
  Obtained from environmental sample
  misc_feature (1)..(651): n is a, c, g, or t
ttgactgtaacggcggcttacagcaacggcacaaaccaaaccgtaacagagtacgcattaagcggcactttgactgtcgggacaagtaccgtaaccgttacctatcagggaaaaacaaccacttttgacgtaacagttaccctcccaggtttcaccaccgcgcctgtcctttcccttgacccgggttatgaagaaatcgcttacacattgacagcctctgtccctgccgccgacagctacgatctgtactataaagagggcagcttgaacgcaagcctgcttaaaagcacaggcacaaagataactgtggtggctggcagcgataaaattaccggactgaccaacggcacggagtacagttttatcgtaacggcgaacaaggcaggctatacaagcgttgattcggtagtagaagaagcaaccccggcggatctctattatgtcattagcggaagcggttcagcgtttagcgcgaccagaaacggcgcggcactcggaacaaccggcgcgatacagaccgttattaacgcaattagaaccaacgccgccggagcgccctgtatcatacagtttggagccgagggagccacattgagcaccggctcaaccgccgtaagtttaacaacacaggcggcacatggggcacggtag

SEQ ID NO: 18832 - protein, 216 aa, Unknown
  Obtained from environmental sample
  misc_feature (1)..(216): Xaa is any amino acid
MTVTAAYSNGTNQTVTEYALSGTLTVGTSTVTVTYQGKTTTFDVTVTLPGFTTAPVLSLDPGYEEIAYTLTASVPAADSYDLYYKEGSLNASLLKSTGTKITVVAGSDKITGLTNGTEYSFIVTANKAGYTSVDSVVEEATPADLYYVISGSGSAFSATRNGAALGTTGAIQTVINAIRTNAAGAPCIIQFGAEGATLSTGSTAVSLTTQAAHGAR

SEQ ID NO: 18833 - DNA, 753 bp, Unknown
  Obtained from environmental sample
  misc_feature (1)..(753): n is a, c, g, or t
atgagccttatcatcggcatggccggcaaaggcggcaccggcaagaccaccttgtccggcttggtcacccaatacctggtccagaccggccggaccccggtcctggccgtggacgccgattccaacgccaacctggccgacgtcctgggcatgaaataccataccaccttgtccgaggcccgtgaggagatgaaatccacccccaacgacgtctccatcaccaaggaccggctgattgaattgcgcacccaggaagccattgtcgaaggcgaccacattgatctcctggtcatgggccagcccgagggttccggctgctactgcgcggccaacgctgtcctggccgcggtcctggaacgggctttgaagaactatccctaccaggtcatagacaacgaagccggcatggaacacatttcccgcctcaccgcccgctacatggacgtcttcttcgtcgtctccgacgcctcccgccggggcctgaccgcggccctgcgcatctggcggctggtggatgaactgaagataaccgtgcgccggaaacacctgattctcaaccgggtccggggcgaggtccccaaagacgtcctggacatcatcgccgccgagaagatggacctggccggggtcatccccgacgaccagcaaatctacgaggcggaccaaaacgcccggcccacctccatacttacggccgaaggcagttcggccgtggccgcggcccgggccatctttaaaaagaccctggattaa

SEQ ID NO: 18834 - protein, 250 aa, Unknown
  Obtained from environmental sample
  DOMAIN (4)...(219): CobQ/CobB/MinD/ParA nucleotide binding domain
  misc_feature (1)..(250): Xaa is any amino acid
MSLIIGMAGKGGTGKTTLSGLVTQYLVQTGRTPVLAVDADSNANLADVLGMKYHTTLSEAREEMKSTPNDVSITKDRLIELRTQEAIVEGDHIDLLVMGQPEGSGCYCAANAVLAAVLERALKNYPYQVIDNEAGMEHISRLTARYMDVFFVVSDASRRGLTAALRIWRLVDELKITVRRKHLILNRVRGEVPKDVLDIIAAEKMDLAGVIPDDQQIYEADQNARPTSILTAEGSSAVAAARAIFKKTLD

SEQ ID NO: 18835 - DNA, 534 bp, Unknown
  Obtained from environmental sample
  misc_feature (1)..(534): n is a, c, g, or t
atgcgcgacattacttataaattaatcaggaggaacattttgaaaatactggttcatgacttaaacgaacaggatttcttacaactgggaatcactaaaaatgattataaaataattaacgcaaatgccgcttccgctccctgcgtgggttgttttaattgctggtttgtgactccgggtatgtgtaaaataaatgattatatccaaaattccagcatgggaaacagtgaagaaacgattttaatcagccaaaattgttacggcggatacagtgaacaggtaaagagaatacttgaccgcagcgttcccgcaagtactccgttttttacctaccgttcatggaaaataaggcatataaagaggtatagaatgaaccggaaacaactgacggtaattttatatggtaattttcttgagacagaagcaaaagccgcggagctgatggtagagggaaaccggggcaatatgggttttaaaaaagcaaacctttacatggtaaatcatatcaatgaaataggacgggtattgaaatga

SEQ ID NO: 18836 - protein, 177 aa, Unknown
  Obtained from environmental sample
  misc_feature (1)..(177): Xaa is any amino acid
MRDITYKLIRRNILKILVHDLNEQDFLQLGITKNDYKIINANAASAPCVGCFNCWFVTPGMCKINDYIQNSSMGNSEETILISQNCYGGYSEQVKRILDRSVPASTPFFTYRSWKIRHIKRYRMNRKQLTVILYGNFLETEAKAAELMVEGNRGNMGFKKANLYMVNHINEIGRVLK

SEQ ID NO: 18837 - DNA, 300 bp, Unknown
  Obtained from environmental sample
  misc_feature (1)..(300): n is a, c, g, or t
atgcgctgccacagccaagggctcacaataaagatgacgaaagacgtgcctatagacgaggcggcagggatgatagagttcgctcacgagtgggtgaaggtcgtgcccaacgacaaggagagcacgattaaaggcctgaccccggcggcggtcagcggaacgctggacgttcctatcggcagaatacacaagatgaacatcgggccggagtacataacggcgttcaccgtaggcgatcagttgctgtggggggcggcggagccggtcaggcggatgctgaagatcgcgttggagttttaa

SEQ ID NO: 18838 - protein, 99 aa, Unknown
  Obtained from environmental sample
  misc_feature (1)..(99): Xaa is any amino acid
MRCHSQGLTIKMTKDVPIDEAAGMIEFAHEWVKVVPNDKESTIKGLTPAAVSGTLDVPIGRIHKMNIGPEYITAFTVGDQLLWGAAEPVRRMLKIALEF

SEQ ID NO: 18839 - DNA, 552 bp, Unknown
  Obtained from environmental sample
  misc_feature (1)..(552): n is a, c, g, or t
ttgttggcaggcgtcttttgtgtttcgttcgccgcggggtctttggcggattcgtatactgaggtgatggcggcggcggctgcgttgttggagtcggcgaaggctacgctcaatactgctatagccgaatttgaggctagggaggcggcggcgaaggccgcggcggaggccgaagccgctagggtcgcggcggaagccgaacgtcgcaaggcggcggctgattcattggcggcggcgaaaaggggcaagggcgttaaggcggcgaaagtcgataccgctcacgttaagagggcggttgttgataccgcggcgaatgccgccgttgcggttccggccgttgtcgacaccgccgcgaagggcgtggcttcggcgggtgatgagacggagggtgcaagcttcgctcgcgatgccccggacgttgaccccgaagcaaagaataccgacgaagttcttgacgtgaccattgaggatgccaacgacttttacgcccacatgccccaggtcgctccgcatgaagcagaccactgctttccgtgggcgcatgaaaaataa

SEQ ID NO: 18840 - protein, 183 aa, Unknown
  Obtained from environmental sample
  SIGNAL (1)...(16)
  misc_feature (1)..(183): Xaa is any amino acid
MLAGVFCVSFAAGSLADSYTEVMAAAAALLESAKATLNTAIAEFEAREAAAKAAAEAEAARVAAEAERRKAAADSLAAAKRGKGVKAAKVDTAHVKRAVVDTAANAAVAVPAVVDTAAKGVASAGDETEGASFARDAPDVDPEAKNTDEVLDVTIEDANDFYAHMPQVAPHEADHCFPWAHEK

SEQ ID NO: 18841 - DNA, 669 bp, Unknown
  Obtained from environmental sample
  misc_feature (1)..(669): n is a, c, g, or t
atgacgcgcactctcggtctggaaccatacggcatatcttttcatgtgggaagccagcagcgcgatataggccaatgggatgaagcaatcgcgaagacgaagtatcttttttcttctttggaaaaagaacaaaatatacacctgaaaatgatcaatatgggcggcggctttcccgcgtcttatattcagccttccaatgatttaaccgattattcttcagagatacacaaatacctaaccgacgattttggttcgaatattccgttaattgtacttgagccgggacgttcccttgttggcaacagcggcatattaataaccgaagttattttaatttccagaaaaacccataccgcgcttaaccgctgggtatatcttgacacaggtaaatttaacgggcttatagaaacattaaatgaatcaattaaatatcccattgttaccgccaatgaggataaagaggcggaggaggaagaagtgatcatcgccggtcctacctgcgacagtcaggatattttatacgaagaccacaagtatcagcttccggtagatttaaaaatcggcgacaaactctattttctgtccgcgggagcgtatacggcaagttacgcttctgtttgttttaacgggtttccgccgattaagacttacattatggatagtaagtag

SEQ ID NO: 18842 - protein, 222 aa, Unknown
  Obtained from environmental sample
  DOMAIN (104)...(219): Pyridoxal-dependent decarboxylase, C-terminal sheet domain
  misc_feature (1)..(222): Xaa is any amino acid
MTRTLGLEPYGISFHVGSQQRDIGQWDEAIAKTKYLFSSLEKEQNIHLKMINMGGGFPASYIQPSNDLTDYSSEIHKYLTDDFGSNIPLIVLEPGRSLVGNSGILITEVILISRKTHTALNRWVYLDTGKFNGLIETLNESIKYPIVTANEDKEAEEEEVIIAGPTCDSQDILYEDHKYQLPVDLKIGDKLYFLSAGAYTASYASVCFNGFPPIKTYIMDSK

SEQ ID NO: 18843 - DNA, 669 bp, Unknown
  Obtained from environmental sample
  misc_feature (1)..(669): n is a, c, g, or t
atggacgggatggaactgacccgcctcataaaggcggataaaagcgtgccttccgtcgtgaccatgatttcctccgcggagaggaatgttctggcaagcgcggagcaaggcgccggggtggaccatttcttgcgcaagcctattttcccttccgacatcgtggactgcatcaacgagagcctgggaatgggcacggtggcggtggaatgcgaagaaagtccggccgggcgggcgtctttcaccggccgtcgcgtccttttggttgaagatgtggagatcaaccgggaaattgccctgacgctgcttgctcccaccgggcttatcatggactgcgcggaaaatggagcggaggcggtgcgcatgttcaaagccgatccggatcgctacgatctcatccttatggatgtgcagatgccggaaatggacggctatgaggccacacgcagcatccgtgcgctggatgtcccgcaggggggacagattcccattctggccatgaccgccaatgtttttcttgaagacgtcgagaaatgtctggcggccggcatgaacgaccatgtgggcaagccgatcaatctggatgaagtgttgcaaaagctttgcagttatttgtcgaacgctccgtccatcccggtgacggaggaagtgtgcgtgaccggagtagattaa

SEQ ID NO: 18844 - protein, 222 aa, Unknown
  Obtained from environmental sample
  DOMAIN (83)...(201): Response regulator receiver domain
  misc_feature (1)..(222): Xaa is any amino acid
MDGMELTRLIKADKSVPSVVTMISSAERNVLASAEQGAGVDHFLRKPIFPSDIVDCINESLGMGTVAVECEESPAGRASFTGRRVLLVEDVEINREIALTLLAPTGLIMDCAENGAEAVRMFKADPDRYDLILMDVQMPEMDGYEATRSIRALDVPQGGQIPILAMTANVFLEDVEKCLAAGMNDHVGKPINLDEVLQKLCSYLSNAPSIPVTEEVCVTGVD

SEQ ID NO: 18845 - DNA, 678 bp, Unknown
  Obtained from environmental sample
  misc_feature (1)..(678): n is a, c, g, or t
atgattcgccgtgtactattatctttttgcctgtttttccccctatttttccctgtttacgcgcaaggaaccgaaagcggacagcataacaatgttatccgcgggcaagtatccgttgatcttgaaaacatatacgccggtcatatagacgaggagtatccgctaagcgccgccacagcgggaaaacgcgcgcttgaagaagcgtctctgtttttttccgcgatggtttacggctggtcattcagttatgaaatcggcgagagagctagaaagatagaagaaaatttagagttgaccccgctgggaagcatccaattcggagaccccgctctcgtcgttaccgaatcggaagtaaaagatatgcagttaatagtatgggcggattatcatttgagcgacgcattgcaaaaacgtatgcaaatatggcggacaggtatgctcagaaacgcgcaggcaataggctatgccccttcttcttttgaaacatatcccggctggatagcggtaaaacaactcgctcttgaagattcagccagaaccgcgttacgcgcggcattgcgagagagcgaaagaaaccgtcccaaacatgtaaacggatttataagccttgccgccttcccgcgttattttatcgcctcaggacgctgggctgccccggcgcggtttaagtgcaaataa

SEQ ID NO: 18846 - protein, 225 aa, Unknown
  Obtained from environmental sample
  SIGNAL (1)...(21)
  misc_feature (1)..(225): Xaa is any amino acid
MIRRVLLSFCLFFPLFFPVYAQGTESGQHNNVIRGQVSVDLENIYAGHIDEEYPLSAATAGKRALEEASLFFSAMVYGWSFSYEIGERARKIEENLELTPLGSIQFGDPALVVTESEVKDMQLIVWADYHLSDALQKRMQIWRTGMLRNAQAIGYAPSSFETYPGWIAVKQLALEDSARTALRAALRESERNRPKHVNGFISLAAFPRYFIASGRWAAPARFKCK

SEQ ID NO: 18847 - DNA, 447 bp, Unknown
  Obtained from environmental sample
  misc_feature (1)..(447): n is a, c, g, or t
atgtggcgaggggatcaggcactgatgaattattatggtatttacgggttcatcaacggagaattctatgacagtatggggttcagcggattaaatgattatgtccctcaaaggcgggcttggtatctaacggcaatacggagcggcaggactattgcttataccgcgccctacgaagatattcagaccggcaacattattatttccgcggtacggaacattgatatcaaaaacggtgacctagccggtatcctcagtatagacattaacatccattggctgaaggaatatgtaggctctctcagtctggcgccgggcggttatagtatgcttctcaatcggggcatgactcttatagcccatccggacagcgcagtgacgggaagctatcttcaggatttgggcaagagttatgaggaagccgcccaaactctgcgaagcgtctga

SEQ ID NO: 18848 - protein, 148 aa, Unknown
  Obtained from environmental sample
  DOMAIN (54)...(134): Cache domain
  misc_feature (1)..(148): Xaa is any amino acid
MWRGDQALMNYYGIYGFINGEFYDSMGFSGLNDYVPQRRAWYLTAIRSGRTIAYTAPYEDIQTGNIIISAVRNIDIKNGDLAGILSIDINIHWLKEYVGSLSLAPGGYSMLLNRGMTLIAHPDSAVTGSYLQDLGKSYEEAAQTLRSV

SEQ ID NO: 18849 - DNA, 732 bp, Unknown
  Obtained from environmental sample
  misc_feature (1)..(732): n is a, c, g, or t
ttgctttcacgctggcgggaataccaggcgggagaggcaaagtattccgttaagtttgcaggaacattcagcgtcaagatgcgggataatatccatcttgcggcagatgtttatctgccggacggcgcgggagaaaaactgccggcgattcttgtgcgcacctgttacaacaaaagcaagaacaaacatttatattaccgctatgtacagcgaggttacgcggttgtcattcaggatgtgcggggccgcgatgaaagcgaaggggattttattcccatgtaccatgaaacagaggacggggatgatactctgaactggattgccgcccaaaactggtccaacggaaagataggcacaatcggcgcttcttaccttggttatgtacagtgggctatggccgcaagcggaaacccccatttggcggcgatgatcagcattgttaccgccggcggcgctttcgccgatatgccgcgcagaggcgggcttttttcttccggtatgctcgcgtggacgtttatgatggcggaaagaacgagcaatccggcgctgatggagcgcanagactgggatgaactgctcaatatacggccgctgaaagatatcgccccgcgcgccctcggcaggaacatttccttttttgatcactggctttcacataccgattacgacgagttttggcaaaaaagcgaatggctcaagcgttcaagcgggcggcagaatccgcgcctataa

SEQ ID NO: 18850 - protein, 243 aa, Unknown
  Obtained from environmental sample
  DOMAIN (29)...(243): X-Pro dipeptidyl-peptidase (S15 family)
  misc_feature (1)..(243): Xaa is any amino acid
MLSRWREYQAGEAKYSVKFAGTFSVKMRDNIHLAADVYLPDGAGEKLPAILVRTCYNKSKNKHLYYRYVQRGYAVVIQDVRGRDESEGDFIPMYHETEDGDDTLNWIAAQNWSNGKIGTIGASYLGYVQWAMAASGNPHLAAMISIVTAGGAFADMPRRGGLFSSGMLAWTFMMAERTSNPALMERXDWDELLNIRPLKDIAPRALGRNISFFDHWLSHTDYDEFWQKSEWLKRSSGRQNPRL

SEQ ID NO: 18851 - DNA, 774 bp, Unknown
  Obtained from environmental sample
  misc_feature (1)..(774): n is a, c, g, or t
gtgttcgtacttggttactgcgagaacccggacgataaaaagtggacaagccccggtattatcaacaaagcgccggctaacgcgttgcttgataagtacggatcgcctgaagcggcggacagggcgcttgccgccttgaaggattactgggacgcgcttntgagtcggttcagcgtacaggctgaagacaagcgcatggcgcgtatggcgggagtgtggaaccagtaccagtgcatggttacgttcaacatgtcgcgcagcgcgtcttattttgaatccggcatagggcgcggcatgggcttccgcgattcaaatcaggaccttttgggctttgtacacctcgtgcctgaacgcgcccgcgcgcgtatactggacatcgccgcaacgcagtttcccgacggcagcgcgtaccatcaataccagccgctgaccaagcgcggcaacaacgaggtcggctccggcttcaatgacgatcccctgtggctgatctgcggcgtggcggcttatatcaaagagacaggcgacttcggtatccttgacgagaaggttcccttcgataacaaagaggagctggcagaaagtttgtttacccatttaaagcgttctttcgattacaccgttacgcacactggcccacacggtctgcccttgattggtcgcgccgactggaacgattgtttgaacctcaactgcttttccaagacgccgggcgagtccttccagaccacggccaatttgaaagcggcgtgcggaatcggtttctcggccatctga

SEQ ID NO: 18852 - protein, 257 aa, Unknown
  Obtained from environmental sample
  misc_feature (1)..(257): Xaa is any amino acid
MFVLGYCENPDDKKWTSPGIINKAPANALLDKYGSPEAADRALAALKDYWDALXSRFSVQAEDKRMARMAGVWNQYQCMVTFNMSRSASYFESGIGRGMGFRDSNQDLLGFVHLVPERARARILDIAATQFPDGSAYHQYQPLTKRGNNEVGSGFNDDPLWLICGVAAYIKETGDFGILDEKVPFDNKEELAESLFTHLKRSFDYTVTHTGPHGLPLIGRADWNDCLNLNCFSKTPGESFQTTANLKAACGIGFSAI

SEQ ID NO: 18853 - DNA, 516 bp, Unknown
  Obtained from environmental sample
  misc_feature (1)..(516): n is a, c, g, or t
atgcttattaagatgggccttttgaccgaacctctttcctttttggaaaactcggacagcgttttgagagtaaggacgacaataatcctggccaatttctggattggcgtcccgtacacaatgcttatgaccagcggtattttgcttaacatcccagcagatctttacgaggccgctaaaattgacggggcggggccattcaggtgtctggtaaaaattaccatgcctttcataatttttgttacgaccccctacctgataagttctttcatcggcaactttaacaattttaatatcatctaccttttgaccgagggcaaacccaatgccgtggggggctacaaagcgggcgctacagatcttctggtaacctggctctttaagttatctgtaaacgaaagagaatacaatttaggttcgcttataggtattttgactttcctgtgcacatcgacaataaccttgattacctaccgtcactccaaagcttacaaagaggaggacgcctttcaatga

SEQ ID NO: 18854 - protein, 171 aa, Unknown
  Obtained from environmental sample
  misc_feature (1)..(171): Xaa is any amino acid
MLIKMGLLTEPLSFLENSDSVLRVRTTIILANFWIGVPYTMLMTSGILLNIPADLYEAAKIDGAGPFRCLVKITMPFIIFVTTPYLISSFIGNFNNFNIIYLLTEGKPNAVGGYKAGATDLLVTWLFKLSVNEREYNLGSLIGILTFLCTSTITLITYRHSKAYKEEDAFQ

SEQ ID NO: 18855 - DNA, 375 bp, Unknown
  Obtained from environmental sample
  misc_feature (1)..(375): n is a, c, g, or t
ttgttaaatatcgacaatttgcgcggcaagaacggcataccgccgactatcacggaaatttacaaaactaaaaacaatataggctatatttttatgataacttcccaggggtacggcggcgatataaaactcatttgcggcatcgatccgcagggaataataattaaaactaccgcgctttcttttcagacggaaacaaaaggaattgcgactcctgtttttgaagagcagcatcagggccagtatacgggaaaggataaaaacctgaacggcgttatcgccgtctcaggcgcgactatttcgtctaccgcttatagaagaggcattcaagacgctttcaccgcgtttgatattataatgagggaaaaattatga

SEQ ID NO: 18856 - protein, 124 aa, Unknown
  Obtained from environmental sample
  DOMAIN (37)...(116): FMN-binding domain
  misc_feature (1)..(124): Xaa is any amino acid
MLNIDNLRGKNGIPPTITEIYKTKNNIGYIFMITSQGYGGDIKLICGIDPQGIIIKTTALSFQTETKGIATPVFEEQHQGQYTGKDKNLNGVIAVSGATISSTAYRRGIQDAFTAFDIIMREKL

SEQ ID NO: 18857 - DNA, 480 bp, Unknown
  Obtained from environmental sample
  misc_feature (1)..(480): n is a, c, g, or t
atgaacaaacggctctctgtcctgttaaatggaataataaaggaaaacccggttctggtgcttatactcggtatatgccccacgctcgcggtttctaccatggcggaaaacgccattggaatggggcttgccaccacttttgtacttcttggttcaaatatagccgtttccattttaagaaaagcgattcccgataaagtgcgtatcccatgttacattgtatttatcgccggatttacaactattgtaaaaatggttgtcgaagcctacgcttataacctttacgaggcattgggaatttttcttccccttattacggtaaactgcatcgtcctgggaagggcggaaatgttcgcaaataaaaacagcgtcattgaatcaactcttgacgcgataggcatgggagcgggctttaccctcgcngtatttgccatggcgtncatacgcgaaatattcgaagcggcacgtggttggaaatga

SEQ ID NO: 18858 - protein, 159 aa, Unknown
  Obtained from environmental sample
  DOMAIN (1)...(159): Rnf-Nqr subunit, membrane protein
  misc_feature (1)..(159): Xaa is any amino acid
MNKRLSVLLNGIIKENPVLVLILGICPTLAVSTMAENAIGMGLATTFVLLGSNIAVSILRKAIPDKVRIPCYIVFIAGFTTIVKMVVEAYAYNLYEALGIFLPLITVNCIVLGRAEMFANKNSVIESTLDAIGMGAGFTLAVFAMAXIREIFEAARGWK

SEQ ID NO: 18859 - DNA, 525 bp, Unknown
  Obtained from environmental sample
  misc_feature (1)..(525): n is a, c, g, or t
atgaaagtcttggacaaaaatggcgaaagccttaaccttatggctttgaactttggacctagccataatgccactcacgggtgcttgcgctaccttgctgctttggatggcgaaaccattgttgcttctgttggggaaataggttatttgcaccggggttttgaaaaaatggcagaacagggaacctggcaaatggtgctgccatatacagaccgcttgaattattgttctgcaattttaaataatgttggctatgcaaaggctgtggaaaaaatgctcggcattgaaattccagaaagagcaaaggttcttcgcgttatagtcagtgagctttccagaatttttgaccattttgtttgcgttgccgcagcctgcgtggatttgggtgctttaacgaatttttggtatttctttgactcaagagaagaaggcttggtgctttgggaaaagctaacaggcgcaaggctcacaaattcttatgcccgcataggaagcttgtacagagatacatacaacgggctttga

SEQ ID NO: 18860 - protein, 174 aa, Unknown
  Obtained from environmental sample
  misc_feature (1)..(174): Xaa is any amino acid
MKVLDKNGESLNLMALNFGPSHNATHGCLRYLAALDGETIVASVGEIGYLHRGFEKMAEQGTWQMVLPYTDRLNYCSAILNNVGYAKAVEKMLGIEIPERAKVLRVIVSELSRIFDHFVCVAAACVDLGALTNFWYFFDSREEGLVLWEKLTGARLTNSYARIGSLYRDTYNGL

SEQ ID NO: 18861 - DNA, 435 bp, Unknown
  Obtained from environmental sample
  misc_feature (1)..(435): n is a, c, g, or t
atgcttggttatctcaagggggcggctccctggctcaggttngtcggtatttgggggttnatcgtgccgggccttgtngtcctgatgggtttttcgatggtgcccattgtttcagtcgtgaatcgggcatgggccgagatgcccggctttgaatcgctgaacggtgtttttggcgttacttttagcggtttttcgatggttatgtttatcggagcgggtttattgttgttttttccttccctttatattttcaggttcggagagaaaatccgcagttacctcagtacgggcgcggacagggatctggaattggccttccaaaacaacaaatccctctggaagtttgtggggatattttgcattatccagttggcctttattccgctattgataataggcggcattatcacggcgcttgtcgcggtttttgcctga

SEQ ID NO: 18862 - protein, 144 aa, Unknown
  Obtained from environmental sample
  misc_feature (1)..(144): Xaa is any amino acid
MLGYLKGAAPWLRXVGIWGXIVPGLVVLMGFSMVPIVSVVNRAWAEMPGFESLNGVFGVTFSGFSMVMFIGAGLLLFFPSLYIFRFGEKIRSYLSTGADRDLELAFQNNKSLWKFVGIFCIIQLAFIPLLIIGGIITALVAVFA

SEQ ID NO: 18863 - DNA, 438 bp, Unknown
  Obtained from environmental sample
  misc_feature (1)..(438): n is a, c, g, or t
ttgggttccaagattatgaccgatttacagagaaaagaagttactacgattttttcaggtataaaaaattgcggcattcttgattatgtaacctgctggtataaaaaggcggcgcagtatattcaggggactgaaattgaatgtgcctttgtatcaacaaacagtatttgccagggtgaacaggttccaattctttggcctgagttgatgaataagcacaacataaaaatcaactttgcccatcagacgttcaaatggagtaacgaagcgcggggcaaggcggcggtgtattgtgtgataataggtttcgcgcttgcggacagagacacgaaaaagatttatcaatatgcgactgttacaagcgaaccggcggagacttctgcaaaacagataaattcttacctgaatccgtacagaaaattagctaattccttatag

SEQ ID NO: 18864 - protein, 145 aa, Unknown
  Obtained from environmental sample
  misc_feature (1)..(145): Xaa is any amino acid
MGSKIMTDLQRKEVTTIFSGIKNCGILDYVTCWYKKAAQYIQGTEIECAFVSTNSICQGEQVPILWPELMNKHNIKINFAHQTFKWSNEARGKAAVYCVIIGFALADRDTKKIYQYATVTSEPAETSAKQINSYLNPYRKLANSL

SEQ ID NO: 18865 - DNA, 525 bp, Unknown
  Obtained from environmental sample
  misc_feature (1)..(525): n is a, c, g, or t
atgcagtatgaaggccaggtgcggataccatccggctgcgccatatcgggtattatcgacaggtcagggcggcgcatgaacggcgaggcgattattaaatcgatcagcgtcatgcatgaccgctctaatggtctaggcggcggttttgccgcatacggaatctaccctgaatataaagactattacgccttgcacttattttatgaatccgtttccgccaaaagagagtgtgaggaatttctggaaaggcattttgacattattaacctttccaaaatcccgacaagaaaaataaaagaaattaccgatgagccgttgatttggcgttacttcgttacacccctgccgacaaaactcagcgaaagccagcttgacgagcgggagtttaccgccaaatgtgtgttccgtgtcaacacacaaattaaagacgcttatgttttctccagcgggaaaaatatgggtgtgttcaaggctgtcggctttcccgaagacgtagggcgtttttacaagcntggaagaatatag

SEQ ID NO: 18866 - protein, 174 aa, Unknown
  Obtained from environmental sample
  misc_feature (1)..(174): Xaa is any amino acid
MQYEGQVRIPSGCAISGIIDRSGRRMNGEAIIKSISVMHDRSNGLGGGFAAYGIYPEYKDYYALHLFYESVSAKRECEEFLERHFDIINLSKIPTRKIKEITDEPLIWRYFVTPLPTKLSESQLDEREFTAKCVFRVNTQIKDAYVFSSGKNMGVFKAVGFPEDVGRFYKXGRI

SEQ ID NO: 18867 - DNA, 300 bp, Unknown
  Obtained from environmental sample
  misc_feature (1)..(300): n is a, c, g, or t
atgccggaattgcaggctaccgggaacgcgtttaagattaccttgccaaacagaaacaccagtaaacgctaccactatgctaacgtcaatagcccttccttaactgagaacgaagaaaaagtaatctgcttatttgataatcaggaagaaattatcagaaaggatgtagagactgccctcgccgtctctcaggcaatggcggtaaggatcctgcgcagtttaaccgacaaacaggctgtccgggctatcggaggagggaaaaagacccggtatgtaaaagccgatacaccgaaattatga

SEQ ID NO: 18868 - protein, 99 aa, Unknown
  Obtained from environmental sample
  misc_feature (1)..(99): Xaa is any amino acid
MPELQATGNAFKITLPNRNTSKRYHYANVNSPSLTENEEKVICLFDNQEEIIRKDVETALAVSQAMAVRILRSLTDKQAVRAIGGGKKTRYVKADTPKL

SEQ ID NO: 18869 - DNA, 723 bp, Unknown
  Obtained from environmental sample
  misc_feature (1)..(723): n is a, c, g, or t
gtgggtgtcaacggctacgataacgcgggtacaaaactgcaagggcttaccagccttaactttgccgtggcggacgcgaagggcctcgtggattcccttaaagcccaggaaggtaaaaggtacgcgaaagtgaacagcatgctcatcgcagacggcgaagcggcctcccctactacggcgaatatccggcagggcctcaagtttctggaaggggctgatccacggcgcgatattgtaatcctgttcctcgcgggccacggcataagcgcgcaggagaataaatttttcttcctgcccaaagacgcggtatttaccgggaacaggattgttgacgcaaacaaagccatatccggtgacgagataatgtccgtgctggacgcgcctgggaacaggctggtgttcatagacgcctgccagtcgggcggcgtggacaacgaccgcatggtgcgctcgctcatggacaccaacgcctttgtgtttacggcaagccggggcaacgagctttcctacgagtccagggaattggggcacgggttttttacctacagcgtcatgtccgcgctcaagggagcgccggcggcattggcgcaaggcaatgtcagcgtgctgtcaatgtccggctttgtaaaagacgacgtgccaaaaaagacaggcgggcggcagaatcccagcgcctattcgcttgggttttatgactttccggtagcggttattaaacagtga

SEQ ID NO: 18870 - protein, 240 aa, Unknown
  Obtained from environmental sample
  DOMAIN (2)...(236): Caspase domain
  misc_feature (1)..(240): Xaa is any amino acid
MGVNGYDNAGTKLQGLTSLNFAVADAKGLVDSLKAQEGKRYAKVNSMLIADGEAASPTTANIRQGLKFLEGADPRRDIVILFLAGHGISAQENKFFFLPKDAVFTGNRIVDANKAISGDEIMSVLDAPGNRLVFIDACQSGGVDNDRMVRSLMDTNAFVFTASRGNELSYESRELGHGFFTYSVMSALKGAPAALAQGNVSVLSMSGFVKDDVPKKTGGRQNPSAYSLGFYDFPVAVIKQ

SEQ ID NO: 18871 - DNA, 582 bp, Unknown
  Obtained from environmental sample
  misc_feature (1)..(582): n is a, c, g, or t
atggaggcggcatttttcagagaaaagctggacagggcgttcgagggaacaagagtggttcaaatcaaaagcataatttcagatattatggtacaggttgcccattatctttccatcaaattttgtattgctgtaattaacggagtactgattggttcctgcctgaaaatcattggggtagaattcgccatgatctggggagtattccagtttaccgcgaattttatcccgaacataggcagcattgcggtgggtcttgcagccactgttttcagcgtaattcagttttggcctaatcccacgccaatggttgccgtgggtattgtcatgctggtcgttaatattatatttggttttattttggagcctaaaattatgggcgacaggcttgggctctccccgctggttgtgcttatctcccttctggtctgggggtggatttggggctttgttggccttatccttgccgtacccatgatggcaattacaaagatcatttgcaaaaacatccccgcactggaaccgatatccatacttttgggatcgcacaaggctttattggcatcaaggagcgaggattga

SEQ ID NO: 18872 - protein, 193 aa, Unknown
  Obtained from environmental sample
  misc_feature (1)..(193): Xaa is any amino acid
MEAAFFREKLDRAFEGTRVVQIKSIISDIMVQVAHYLSIKFCIAVINGVLIGSCLKIIGVEFAMIWGVFQFTANFIPNIGSIAVGLAATVFSVIQFWPNPTPMVAVGIVMLVVNIIFGFILEPKIMGDRLGLSPLVVLISLLVWGWIWGFVGLILAVPMMAITKIICKNIPALEPISILLGSHKALLASRSED

SEQ ID NO: 18873 - DNA, 504 bp, Unknown
  Obtained from environmental sample
  misc_feature (1)..(504): n is a, c, g, or t
gtgttcgtcggtgtgtatgcaccgggtctttttgatattttcccttcccccatttctccgacttatccgggtatgggggttcatattaccatgctggataatttgttgatgggcgattttataacaaaggcgcccgactgggttgcggctattattatcgcggcggctgttattctgatggtggctctggtactttactcaggccgtatcgttgccacagtcggaggccttgtactaagttttgccataattgtttttgccgggtttcttgctttttatttgggctggtgggttcccatggcggcgcccattgtcgcgacgctggtgtcttaccttacttctaccctctacagttacgcgactgaaggcaaggacaagcgtttcataaaaaacagcgttttcccgtatcctctctcccaaagttatcgatcagattatcgccgatccttcccaattgaagctgggcggggaaaaacgaaaganntgaccgcccatttttactga

SEQ ID NO: 18874 - protein, 167 aa, Unknown
  Obtained from environmental sample
  misc_feature (1)..(167): Xaa is any amino acid
MFVGVYAPGLFDIFPSPISPTYPGMGVHITMLDNLLMGDFITKAPDWVAAIIIAAAVILMVALVLYSGRIVATVGGLVLSFAIIVFAGFLAFYLGWWVPMAAPIVATLVSYLTSTLYSYATEGKDKRFIKNSVFPYPLSQSYRSDYRRSFPIEAGRGKTKXXTAHFY

SEQ ID NO: 18875 - DNA, 690 bp, Unknown
  Obtained from environmental sample
  misc_feature (1)..(690): n is a, c, g, or t
atggcaactacttctattgaatggacagaaatgacatggaatccaactactggttgtactaaaatttcatcagggtgtaaaaattgttatgcggaaataatgactcgtagattaattgctatgggacaaaaaaaatatgctgctggatttgataaagtaaggacgcatcaaaacacgttaataattccttatacatggaaatctacaaaattagtttttgtagattcaatgagtgatttgtttcacaaggatgttcccctcaaatttattaaacaagtgtttcgtgttatgaatgacaatccccatcatacatttcaagttttgacaaaaagagctgaaagactttatgagttacatgaaaaattagaatggacaaataatatatggatgggggttacgattgaaaataaagatgtaatagatagaattgggtatttaaaaaaaacaaatgccaaagtaaagtttttatcactggaaccattattaagttttttaaaagatcttagtttaagaaaaatagattgggttattgtgggtggcgaaagtggttttaatgcccgtccaatgaatcctgaatgggtaaaaaatataagagaacaatgtaaacagaacaatgttccatttttctttaaacaatggggagcatggggagaagatggtataaaaagaaacaagaaagctctgcgataa

SEQ ID NO: 18876 - protein, 229 aa, Unknown
  Obtained from environmental sample
  DOMAIN (2)...(229): Phage protein Gp37/Gp68
  misc_feature (1)..(229): Xaa is any amino acid
MATTSIEWTEMTWNPTTGCTKISSGCKNCYAEIMTRRLIAMGQKKYAAGFDKVRTHQNTLIIPYTWKSTKLVFVDSMSDLFHKDVPLKFIKQVFRVMNDNPHHTFQVLTKRAERLYELHEKLEWTNNIWMGVTIENKDVIDRIGYLKKTNAKVKFLSLEPLLSFLKDLSLRKIDWVIVGGESGFNARPMNPEWVKNIREQCKQNNVPFFFKQWGAWGEDGIKRNKKALR

SEQ ID NO: 18877 - DNA, 582 bp, Unknown
  Obtained from environmental sample
  misc_feature (1)..(582): n is a, c, g, or t
atggcgccgaggttctgcggggagttccagaaaggcgttgattattcgggcgaccttgaccaatttaacaaggaaatcaagattcattcgacgattgcccggcacttcaagtataaactaagcatacactcgggctcggacaagttcagcgtattccccgccatcgggaaagaaacccgccatatattccacgtaaaaaccgccggcaccaactggctggaggcgatgcgcgtgatcgcccaggttgatcccggcctgtacagggagatccacaagtacgccctgtccgtatttgacgaggcgcgcaaatactaccatgttacaaccgatctaagcaaaatccccggcgttgattccgtggcggacgcggacctgccgaaactttttgagaacaacgactcgcgccagctcatccatataacctacggccttatcctgaccaggaagacctcgggcgcctttacattcagggacaagctgtacggtttatggcagaagcatgaagatctgtacaaccagttcctgttcaggcacatcggcaagcatttggatttgttaggcgtcaattcaaataataaataa

SEQ ID NO: 18878 - protein, 193 aa, Unknown
  Obtained from environmental sample
  misc_feature (1)..(193): Xaa is any amino acid
MAPRFCGEFQKGVDYSGDLDQFNKEIKIHSTIARHFKYKLSIHSGSDKFSVFPAIGKETRHIFHVKTAGTNWLEAMRVIAQVDPGLYREIHKYALSVFDEARKYYHVTTDLSKIPGVDSVADADLPKLFENNDSRQLIHITYGLILTRKTSGAFTFRDKLYGLWQKHEDLYNQFLFRHIGKHLDLLGVNSNNK

SEQ ID NO: 18879 - DNA, 537 bp, Unknown
  Obtained from environmental sample
  misc_feature (1)..(537): n is a, c, g, or t
atggctttaaagggcagattttaccaaggatttttaattgcccgccctcaagcctcaatgagcgatgcagttatagacaaagctgttttttctgaatcaattgaaaaattatatacggttctgcaagataaaatagttcaaacagaagctctgcgtaagtccttagatgctcaagttgagcatttcttggcagaaaacccttttgattccgagaaaaaaaattacgacgaatatcttacaaaactcagccagatgctgcaaaatgtacggcttgtttatttatgcgacagccgcggtaaccagcttacctccaacatcgtacatccaacctatgccacaccatacaataacgagcacaaaaacaaaaattgggtttggcgcgggtatttttacgaggctttgaaatctattgctattggtgaaaaaagtcacctatcggattcctatcacgatttttcaaccaaagacaaagttcgtacttattcatactcaataagcaacgacttttttttattcatcgatatcaacactccttag

SEQ ID NO: 18880 - protein, 178 aa, Unknown
  Obtained from environmental sample
  misc_feature (1)..(178): Xaa is any amino acid
MALKGRFYQGFLIARPQASMSDAVIDKAVFSESIEKLYTVLQDKIVQTEALRKSLDAQVEHFLAENPFDSEKKNYDEYLTKLSQMLQNVRLVYLCDSRGNQLTSNIVHPTYATPYNNEHKNKNWVWRGYFYEALKSIAIGEKSHLSDSYHDFSTKDKVRTYSYSISNDFFLFIDINTP

SEQ ID NO: 18881 - DNA, 780 bp, Unknown
  Obtained from environmental sample
  misc_feature (1)..(780): n is a, c, g, or t
ttgtcaataaaaacaatacagcgtgaaaaaaggtttcatcctgataataataaaaagaaaaaagatcaccaggaaaaaatggatgaatttttgattgatcaaatcagcctgattattatggaaaataccttaataacttttcaggagatgcccggcgatgcctttagtgatataagaagaaagatcctggaaaatatcggagagattcgtaaagcaggaacagattatcttgtctatataattatcgacgccattgttgatgagtattttcttacaataaatcatctggaagaggatattgaaaacttcgaagatcgctcgacggaaacaaacgatgagacatttatagatgaaatccaggataccaaaaagtacctcttacagataaaacgggcaattttaccgttaaagaattgcttaaataaaatttcccgccaggagaattttttccggacagataagctaaagcctttccttcaagacctgactgaaaacataaaccacgcgctgataaccgttgaaagttaccgcgagtggttgtcaaacattatggaacaaaatttatctattgtgtcttatcagacgaacaaggtaatgaaggtattgactgttatttccacaatatttatccctttgacttttattgtaggcatttacggcatgaacttcgattttatgcctgagcttagataccagccggcgtacttcattgttttgggcattatgggtcttatcgcgatagtaatgctgttactttttaaaatataccactggttttaa

SEQ ID NO: 18882 - protein, 259 aa, Unknown
  Obtained from environmental sample
  DOMAIN (1)...(259): CorA-like Mg2+ transporter protein
  misc_feature (1)..(259): Xaa is any amino acid
MSIKTIQREKRFHPDNNKKKKDHQEKMDEFLIDQISLIIMENTLITFQEMPGDAFSDIRRKILENIGEIRKAGTDYLVYIIIDAIVDEYFLTINHLEEDIENFEDRSTETNDETFIDEIQDTKKYLLQIKRAILPLKNCLNKISRQENFFRTDKLKPFLQDLTENINHALITVESYREWLSNIMEQNLSIVSYQTNKVMKVLTVISTIFIPLTFIVGIYGMNFDFMPELRYQPAYFIVLGIMGLIAIVMLLLFKIYHWF

SEQ ID NO: 18883 - DNA, 528 bp, Unknown
  Obtained from environmental sample
  misc_feature (1)..(528): n is a, c, g, or t
atgtctgaaggtcaaataaaggatcaggtagtgacttggcaaaaagctgttagcgagctaaaagatgcttacaaaatctttagcgaagcaagcattgctactggcacagcggcttctgaaattctgcacgttggtcctaactactcaacaggtttgggtggagcagcctccaaccagataaaggtgaactacaccgccattgatgtcaaaggtctaggtttgcaatcccagacaatagactcacgcgaaggtgcccagagagccatagacagaatacaggacaccattaaagtagtgagcggcaaccgcgcagctataggtacctatatcaaccgtcttgattacacaatcaacaacattgcatctatggagtacaacatccaagacgcagaaagccgtatccgcgacaccgacttcgcttcggaaaccacgaacttcaccagaaatcagattatggtgcaggcttccacgagtatgttggcacaggcgaacagcttgccgcaatcggttctaggtttgataggttaa

SEQ ID NO: 18884 - protein, 175 aa, Unknown
  Obtained from environmental sample
  DOMAIN (82)...(153): Bacterial flagellin C-terminus
  misc_feature (1)..(175): Xaa is any amino acid
MSEGQIKDQVVTWQKAVSELKDAYKIFSEASIATGTAASEILHVGPNYSTGLGGAASNQIKVNYTAIDVKGLGLQSQTIDSREGAQRAIDRIQDTIKVVSGNRAAIGTYINRLDYTINNIASMEYNIQDAESRIRDTDFASETTNFTRNQIMVQASTSMLAQANSLPQSVLGLIG

SEQ ID NO: 18885 - DNA, 600 bp, Unknown
  Obtained from environmental sample
  misc_feature (1)..(600): n is a, c, g, or t
ttgaagtatcaaacaataatcttaaaataccccgctgctctgcggcggggtattttatttatcagaattggagttcccataaccagaagcaccagtgacgaagtggtcggacacctatgtgttcttgtagacatagcgcagatgcagccagcggtagaacaaaccattaaaaattacgaagaaatatcagcaatggttctttattcgggcaacggaatgataatgggacatttcgttcctgaacgggtaggaaagatgctgattgatgtggatacgatatacggcgattatatacaggaagcggataaagccgtgcgggaagggagggaatttcagtgcagcagctattcgccagttttaaaaacggatgtgaaaataaccatgattcccttccagataggcgattccggcatgtactggacagtaatgatagcgacatcagaagcttacattatgcgagaagctaactcgattaccagatataccattagcattacggtgatcgctattatagcggccgcggtaattgtgagctttatcttcgatttcacaaccaggccaatcgtcaatgtgacatttcagaaggcgaaggcgatctga

SEQ ID NO: 18886 - protein, 199 aa, Unknown
  Obtained from environmental sample
  misc_feature (1)..(199): Xaa is any amino acid
MKYQTIILKYPAALRRGILFIRIGVPITRSTSDEVVGHLCVLVDIAQMQPAVEQTIKNYEEISAMVLYSGNGMIMGHFVPERVGKMLIDVDTIYGDYIQEADKAVREGREFQCSSYSPVLKTDVKITMIPFQIGDSGMYWTVMIATSEAYIMREANSITRYTISITVIAIIAAAVIVSFIFDFTTRPIVNVTFQKAKAI

SEQ ID NO: 18887 - DNA, 732 bp, Unknown
  Obtained from environmental sample
  misc_feature (1)..(732): n is a, c, g, or t
atgatgaaaaaatcaggttatacggtgtctgaaaaagcggtgaacaaggcagttttgcagttgcctcaatttcaggacaacgggcgtttttccctcattctgtataacagaatgaccgattccgcccgtaccgccctttggaatcaaactcaggaagaaattgcgatgaatacgttttttagcgattacttcagccttttgacccccgaatccgaggcgaaatttgtcgcaagcatggcttcgcccacgaggaattttgattttgtttcttttaatgttgataattatcccgaaagcgaataccttgcgtttgcagaagaaaactccaaactttttgactcaatacaattatccagaattacaatatcaagcagtgaaagagaagcgcggaaaattctttcttccataaaagacggaaccattacttttgaagacgcggcgaaagcgcaatcaaaagacaattacgccgacagaggcggagatatgggcgttaaattttgttatgagctcgacaatgaaatttccaatcaggcggatcgtgaaaaaatttacagtcttggcaggggggagttaagcgacattatttcccataatgacagttgggtttttttcagggtggaagaagcgttgataaaagccgattttgacgattcgtcagttttggacagaatacgtgaatatgttagaaatatgaaagaaggcgcatggaggactgggctattgacaaggtaa

SEQ ID NO: 18888 - protein, 243 aa, Unknown
  Obtained from environmental sample
  DOMAIN (120)...(208): PPIC-type PPIASE domain
  misc_feature (1)..(243): Xaa is any amino acid
MMKKSGYTVSEKAVNKAVLQLPQFQDNGRFSLILYNRMTDSARTALWNQTQEEIAMNTFFSDYFSLLTPESEAKFVASMASPTRNFDFVSFNVDNYPESEYLAFAEENSKLFDSIQLSRITISSSEREARKILSSIKDGTITFEDAAKAQSKDNYADRGGDMGVKFCYELDNEISNQADREKIYSLGRGELSDIISHNDSWVFFRVEEALIKADFDDSSVLDRIREYVRNMKEGAWRTGLLTR

SEQ ID NO: 18889 - DNA, 798 bp, Unknown
  Obtained from environmental sample
  misc_feature (1)..(798): n is a, c, g, or t
ttgcgccttgtacgcgataaatggggggcaaggccgttcggcagagtgaaaatatgcgggctctcaggcggctggcagtggtttccggaatttantgatcccatttgcgattcgctcgcccgcgagatcgccgcggatgggagtaacgccctgactttagccaaaatggggcgcttatatatccgcaacgcgttacgcaatctttcgcttgtttcaaaatttccgtccgcaggaaatttgtcttttggcgaatcgcctgttcttgttcttggggcaggtccgtcccttgatgaaacccttgacgcgcttaaatccgaatatgcctgcgttcttgaccgtcctgaaaaacgtaattttaaaattatctgcgtggacacctgtcttggcgcgttaaaagaaagaaacattattcccgatcttgccgtaattttggaaagccagcactggaatattaatgattttttaacttgcagaagttggaatattgccgcggcaatagacctctcttcgcttccggcttccgtgaatattctttccggcgaaaaatttcttttttttacgccgtggacgcggttaaaaatatttgggcgaattaaagatgaaggactgcttcccgttgaaattccgccgcttggctccgtggggcttacggctgtggaattagcccgccgtcttacaacaggaaaaataatctgcgccggtcttgatttttcttttacgcaggacaagtatcatgcgcgttccacgccgggacagttttcccgtttaaatttacaaaaccgtttaaaagatatttaa

SEQ ID NO: 18890 - protein, 265 aa, Unknown
  Obtained from environmental sample
  DOMAIN (63)...(237): Protein of unknown function DUF115
  misc_feature (1)..(265): Xaa is any amino acid
MRLVRDKWGARPFGRVKICGLSGGWQWFPEFXDPICDSLAREIAADGSNALTLAKMGRLYIRNALRNLSLVSKFPSAGNLSFGESPVLVLGAGPSLDETLDALKSEYACVLDRPEKRNFKIICVDTCLGALKERNIIPDLAVILESQHWNINDFLTCRSWNIAAAIDLSSLPASVNILSGEKFLFFTPWTRLKIFGRIKDEGLLPVEIPPLGSVGLTAVELARRLTTGKIICAGLDFSFTQDKYHARSTPGQFSRLNLQNRLKDI

SEQ ID NO: 18891 - DNA, 312 bp, Unknown
  Obtained from environmental sample
  misc_feature (1)..(312): n is a, c, g, or t
atgctcagttttacctcatatacaaaggccgggcttcgtctcgccacaattttcggttttttgatgggcggtatgacttttattgtggcgttggcatattttgtttacaagctgatcttttgggacaattttcccaccgggatagcgccgttagtcatcggcgtgttctttataggctctatgcagttgttttttataggcttcatcggcgagtacgtgatggcgataaatacgaggatcaggctgatgaatcggccgcttgtgatagaggaagagcggatcaactttgaagctgcggaagataatacttaa

SEQ ID NO: 18892 - protein, 103 aa, Unknown
  Obtained from environmental sample
  misc_feature (1)..(103): Xaa is any amino acid
MLSFTSYTKAGLRLATIFGFLMGGMTFIVALAYFVYKLIFWDNFPTGIAPLVIGVFFIGSMQLFFIGFIGEYVMAINTRIRLMNRPLVIEEERINFEAAEDNT

SEQ ID NO: 18893 - DNA, 321 bp, Unknown
  Obtained from environmental sample
  misc_feature (1)..(321): n is a, c, g, or t
atggccacggagaacataatcatggaagccgtgaaacgcggcggcgacagacagctgctccacgaacacatccgcgtacactccatggaagcaggcaaaaaagtaaaggttgacggaggggaaaacgatctgctgaaacggatagccggggacgaaatcttcggaatgacggagagcgatctcgccgcgctattggatgtgaggcaattcatcggcagagcgccggagcaggtgagggagttcgtcgccgagtacgtcgatccggtcattgagacaggcaaggcctacggctctccggagcgcagggaactgtcggtgtaa

SEQ ID NO: 18894 - protein, 106 aa, Unknown
  Obtained from environmental sample
  misc_feature (1)..(106): Xaa is any amino acid
MATENIIMEAVKRGGDRQLLHEHIRVHSMEAGKKVKVDGGENDLLKRIAGDEIFGMTESDLAALLDVRQFIGRAPEQVREFVAEYVDPVIETGKAYGSPERRELSV

SEQ ID NO: 18895 - DNA, 687 bp, Unknown
  Obtained from environmental sample
  misc_feature (1)..(687): n is a, c, g, or t
atggttggcgatttaattgatgagttcggcagtaactacaaacacagcgtaaatgccgctttcaaacggctggctgaacagttaaagacaaaattcggctggaagcttacccttgagcctgacagccctgaaataaaagctcccgaattgctggaaaagcacataacggcaggccttgaacaggaattgaatgataaagaagcccttatcggcagcgcttatttaaacatgattatccgtgaaaattaccttcacgcgatagatcgtaaatggctggatcaccttgaaaatatggaagctcttcgcgaggctgtgtatctgcgtcattacgcgcaaaaaaacccgcttacagaatacaaactggaaggttatcgtatttttgaggacatgatcgaagagataaggcaggaaatcgcctcccgtatgcatcttattcgtatacaaattgcggaaggcggagaagggcgcaggcctgcaagccgctcaatgggcactatccagtctgcgagtcataacagcatggcttctttcggcggagcgtcacagtcttcaggttcttcaccgatgtcaaaggcaagccgtcccgataacgctacagtggttcgcgcacagccgaaagtcggacgtaacgacccctgcccatgcggaagcggcaaaaagtacaaattttgccacggagccaagtaa

SEQ ID NO: 18896 - protein, 228 aa, Unknown
  Obtained from environmental sample
  DOMAIN (209)...(228): SEC-C motif
  misc_feature (1)..(228): Xaa is any amino acid
MVGDLIDEFGSNYKHSVNAAFKRLAEQLKTKFGWKLTLEPDSPEIKAPELLEKHITAGLEQELNDKEALIGSAYLNMIIRENYLHAIDRKWLDHLENMEALREAVYLRHYAQKNPLTEYKLEGYRIFEDMIEEIRQEIASRMHLIRIQIAEGGEGRRPASRSMGTIQSASHNSMASFGGASQSSGSSPMSKASRPDNATVVRAQPKVGRNDPCPCGSGKKYKFCHGAK

SEQ ID NO: 18897 - DNA, 456 bp, Unknown
  Obtained from environmental sample
  misc_feature (1)..(456): n is a, c, g, or t
atgatcaccgccaaagttgacgaggcaagtattattcacggacttaatatcggcgctgatgattatgtgtgcaagcctttcagccccaggcagttaatggcgcgtgtgcaagcggctctcagacggagcggcgggggagaaaaaccgggggggggtatttcctataaagatttatctatagatactgaaaaaaggcttgttagccgggatggaaaaccgcttgccctgacccgtgatgaatacaatatcctttcgcttttaatgtcaaggcagtctaaaatttttaccagagacgaaatactggaagcggtcaagggggacgattttgacggtttagatcgcgctgttgatacccatattaaaaggcttagggctaaaattggggacgattccaaagcgccgcagtacattgttaccgtctatggtatgggttacagattaggagtaactgaatga

SEQ ID NO: 18898 - protein, 151 aa, Unknown
  Obtained from environmental sample
  DOMAIN (71)...(147): Transcriptional regulatory protein, C terminal
  misc_feature (1)..(151): Xaa is any amino acid
MITAKVDEASIIHGLNIGADDYVCKPFSPRQLMARVQAALRRSGGGEKPGGGISYKDLSIDTEKRLVSRDGKPLALTRDEYNILSLLMSRQSKIFTRDEILEAVKGDDFDGLDRAVDTHIKRLRAKIGDDSKAPQYIVTVYGMGYRLGVTE

SEQ ID NO: 18899 - DNA, 549 bp, Unknown
  Obtained from environmental sample
  misc_feature (1)..(549): n is a, c, g, or t
ttggataggcgtgagttttggcgggccgcttaccctatgatttatatgtcgcggcaggtagacgtccgctttaaggagcttttccgtaaggggctcgtcaaggggacggttatattgataagcgggcatgaggcggcttcggtggggatggctatgccgttccgtccgggtctcgactccgtctcgctattgcaccggaatctggccgcccacttgacgctggggtgcccgatacggacgtcgttgaaccaatatatggcaaacgctcacagcccgacgcacggcaaggaggggaacgtgcacttcggcgacgcggttgcgcggcgtttcccgatgatcagccatttgggcgggatgctcgccgtggccgtgggcggggcgtgggctgctcgccgggcgggggaagaggccttcgggctcgcggtgataggggacggcggcagcagcaccgggcagttccacgaggcgctcaacatggcctccgtgttcaaggcgcccgtcttgttttttgtcnaaaataacggggtacgcttttttcacgcccggtaa

SEQ ID NO: 18900 - protein, 182 aa, Unknown
  Obtained from environmental sample
  DOMAIN (11)...(182): Dehydrogenase E1 component
  misc_feature (1)..(182): Xaa is any amino acid
MDRREFWRAAYPMIYMSRQVDVRFKELFRKGLVKGTVILISGHEAASVGMAMPFRPGLDSVSLLHRNLAAHLTLGCPIRTSLNQYMANAHSPTHGKEGNVHFGDAVARRFPMISHLGGMLAVAVGGAWAARRAGEEAFGLAVIGDGGSSTGQFHEALNMASVFKAPVLFFVXNNGVRFFHAR

SEQ ID NO: 18901 - DNA, 786 bp, Unknown
  Obtained from environmental sample
  misc_feature (1)..(786): n is a, c, g, or t
ttggtagtggacgacctgccagaaaacctccttgtagcgcagggcctgcttgccccctacggcctgaaggtagacgccgccgcttccgggcgggaagccgtggaactggccaaaagccatagctacggccttatattcatggatcacatgatgcccgaaatggacggcatcgaagccgccgcggcaatccgaaaagtggaaggccatgcccatacccccatcgtcgcgctgacggcgaatgccctgcggggaatgagggaatattaccttgaacaaggctttgacgattacctttcaaagcccataagccccgaagcgttggacgcaattatcaataaatggataagggaacagggaacaacgaccccagtccccaatcccctttcattggaaatagaggcgcggcggctggataaattaaaccattaccgtgccgcctttgaaattagcaaaacttccggcgggctggaaatcgatgcggattactacgggcggtttacggccttggtcggatcttttgacgatctgcccgacggtttacaggcggacaaggcgatgctgatggaagccggacggaacggagacgcgcataggatacgcgaaacgcttcccgctttttgcgaaagcctggcggccatgcaccggagcanagcggacagcggggtggcggatggtgaaactgtgggcctgcttttccggcggcttaaaaagcaattcgggacggcgacgacgccgcttccaaaaaatagtggcggagctgggcgcgaaaaagctgagcccccgtga

SEQ ID NO: 18902 - protein, 261 aa, Unknown
  Obtained from environmental sample
  DOMAIN (1)...(112): Response regulator receiver domain
  misc_feature (1)..(261): Xaa is any amino acid
MVVDDLPENLLVAQGLLAPYGLKVDAAASGREAVELAKSHSYGLIFMDHMMPEMDGIEAAAAIRKVEGHAHTPIVALTANALRGMREYYLEQGFDDYLSKPISPEALDAIINKWIREQGTTTPVPNPLSLEIEARRLDKLNHYRAAFEISKTSGGLEIDADYYGRFTALVGSFDDLPDGLQADKAMLMEAGRNGDAHRIRETLPAFCESLAAMHRSXADSGVADGETVGLLFRRLKKQFGTATTPLPKNSGGAGREKAEPP

SEQ ID NO: 18903 - DNA, 714 bp, Unknown
  Obtained from environmental sample
  misc_feature (1)..(714): n is a, c, g, or t
gtggaaagggactcagcgaaagagcttatgaagcggcttcagcaaaccgaggaagagctggccaaaaaagcagaagaaatggctaggatagacagccagttaaagacctatgaagactctctggtagaacttgagaacatgacaggccgggtacaggagaacatgaaccgtgtccgcgaagagtccgcttttgtggactccacaggaaaacgcatcagcgaggttaaagataagcttatagactttgaaaaagcgttgtctgatgccgagaaaaagctggataagggtctgggggaagccgagaaaaaactggaaaaaagctttggggatgtcgagaagaaaattgaacaagggctgggagaggccgggaaaaaactggaaaaaagcctgggggatgccgagaaaaaaattgttcaagggttgggagatgctgaaaaacaaatagaaaaagagctgggagatatcgaaggcaagtttgaaaaagagaacagcgagtaccttgataagatcgcggatgaagtaatggcgacgataaaagcaactgtttcggatctaaaggccactgaggaaaccatcgaacgcaaggttgaggatcaccgccttgcggtagttaaaatcgaggaagctcgcgccgcgaatctggcaagggatacagagtatgtggataaattactggcgaaagcggttgatcaggcggggaaaagggcggaatag

SEQ ID NO: 18904 - protein, 237 aa, Unknown
  Obtained from environmental sample
  misc_feature (1)..(237): Xaa is any amino acid
MERDSAKELMKRLQQTEEELAKKAEEMARIDSQLKTYEDSLVELENMTGRVQENMNRVREESAFVDSTGKRISEVKDKLIDFEKALSDAEKKLDKGLGEAEKKLEKSFGDVEKKIEQGLGEAGKKLEKSLGDAEKKIVQGLGDAEKQIEKELGDIEGKFEKENSEYLDKIADEVMATIKATVSDLKATEETIERKVEDHRLAVVKIEEARAANLARDTEYVDKLLAKAVDQAGKRAE

SEQ ID NO: 18905 - DNA, 780 bp, Unknown
  Obtained from environmental sample
  misc_feature (1)..(780): n is a, c, g, or t
ttgcggaaggctgaaactgaaaattcttcctgggcggtggcgcatcttaaaggggggatggcggaactggaaaaagggcttgatgccctnagagccgcgtcccaagagaatatttccgaaaatctgagatcatttgaaaatgatttttatgccgatcttaaaaagcgggccaatgacataaatattcggattaccgaatggcagggcggtcttgaagggcggctttccgcaatcggcgaggattccgaaacagccctgcgacaattggaatacaaacatactgaagaaatgaagaaaagcctgtccgccatggacgcacggcttgcgtccgagcttgaacgtctcaattcggaagcggacgcttttgaaaagggaatactggatcggataaaaaccatcgaggaaatggagcagaaggccctggaagccagcggcgccaaactggaagagtaccgccgcgcccaggatcttgaattccaccggcttgaaaccctggtcgatgattccagaaatctggacgcggagcttcgccgctatatgcaggaattaatagggcggcttaaagatgaattctccgcttaccggggggaagcggaagagttgcggaaagccgagacagaaaatttctctctggcagcggcgcattttaagggaggcatgtcggaacttgaaaaggagcttgatgcccttagagacgcgtcccatgagaatatatcagaaaaaattaaagcatttgaaaatgaatttttcgcggatataaaaaccggaacaacgacataa

SEQ ID NO: 18906 - protein, 259 aa, Unknown
  Obtained from environmental sample
  misc_feature (1)..(259): Xaa is any amino acid
MRKAETENSSWAVAHLKGGMAELEKGLDALRAASQENISENLRSFENDFYADLKKRANDINIRITEWQGGLEGRLSAIGEDSETALRQLEYKHTEEMKKSLSAMDARLASELERLNSEADAFEKGILDRIKTIEEMEQKALEASGAKLEEYRRAQDLEFHRLETLVDDSRNLDAELRRYMQELIGRLKDEFSAYRGEAEELRKAETENFSLAAAHFKGGMSELEKELDALRDASHENISEKIKAFENEFFADIKTGTTT

SEQ ID NO: 18907 - DNA, 792 bp, Unknown
  Obtained from environmental sample
  misc_feature (1)..(792): n is a, c, g, or t
atgcttcagggtgacggtggccatccgtttgccgtgcagatagtaggctcccgccctgagccaatggcggaggccgcagtgatcgcgcaggaagcgggtgccgacataatagacataaacatgggctgccctgcttccaacgtgacgggcggtcttgcaggctcgtcgttgctcaggaacattaaagcggcggaaacgtgcgtaaaatccgttgttgcggccgtcaaagtgccagtgagtgttaaaatgcgtgtgggctgggaccagcagcaaaaagagcgcggagattatctggtatttttgaaaatgtttgaaggcaatggcgttgcggccgtgacactgcacccaaggacaaggtctcagcagtttacgggcagggcggattgggcctgcatcgccaaggcagtcgagcttggtctgggctacccgataatcggcaacggcgatgtgctggcacgcgaagacgctgaaagaatggtgctggagacgggatgcagcggtgtgatggtgggcaggggtgccctgtacaacccatttttgtttagacaaataatggagagcgacttttgcgtatcgtacgccaaacgcgttaatattgccattgactttgtgaaaatggtaatgaagtttgacgacaaaagagatgtgttgcacaaaataaaaaggttcacaggtcatttcaccaagggcgttccaggtgcatccagcttgcgtcagaagctcaatgccctgtttgaaccaacggacatcttggaagaactggaaaaattggcggaaagtgtaaatgcgtaa

SEQ ID NO: 18908 - protein, 263 aa, Unknown
  Obtained from environmental sample
  DOMAIN (1)...(262): Dihydrouridine synthase (Dus)
  misc_feature (1)..(263): Xaa is any amino acid
MLQGDGGHPFAVQIVGSRPEPMAEAAVIAQEAGADIIDINMGCPASNVTGGLAGSSLLRNIKAAETCVKSVVAAVKVPVSVKMRVGWDQQQKERGDYLVFLKMFEGNGVAAVTLHPRTRSQQFTGRADWACIAKAVELGLGYPIIGNGDVLAREDAERMVLETGCSGVMVGRGALYNPFLFRQIMESDFCVSYAKRVNIAIDFVKMVMKFDDKRDVLHKIKRFTGHFTKGVPGASSLRQKLNALFEPTDILEELEKLAESVNA

SEQ ID NO: 18909 - DNA, 516 bp, Unknown
  Obtained from environmental sample
  misc_feature (1)..(516): n is a, c, g, or t
atggaaacgctccgcagacttaccgcccgtgattaccgcagggacgccgttgccatggcgccgtggctgctaggaaaactcctttgcaggaaagccggcagaaaaatccttaagctgcggattaccgaaacggaggcttactttggcgaagcggacactgcctgccatgcccataaaggaaaaacaaaacggacggcgatcatgtatgaggatgggggttatgcgtacatctacctttgttacggaatgcattggctcttaaatgtagtcagcggcaaaaaggactttcccgaagcggtactaatccggggtgtcgaaggatttgcgggtcccggaaaacttaccaaacaattgcagatagataaaaccctgaacggtgaaaacctctctgaatcaaaacggctgtggatcgaagatgacggcagccagccttcttttactgctacaaaacgggttggcattggctatgcttcggaagaagacaaaaacaggctgtggcggtttcgggcagagtga

SEQ ID NO: 18910 - protein, 171 aa, Unknown
  Obtained from environmental sample
  DOMAIN (8)...(171): Methylpurine-DNA glycosylase (MPG)
  misc_feature (1)..(171): Xaa is any amino acid
METLRRLTARDYRRDAVAMAPWLLGKLLCRKAGRKILKLRITETEAYFGEADTACHAHKGKTKRTAIMYEDGGYAYIYLCYGMHWLLNVVSGKKDFPEAVLIRGVEGFAGPGKLTKQLQIDKTLNGENLSESKRLWIEDDGSQPSFTATKRVGIGYASEEDKNRLWRFRAE

SEQ ID NO: 18911 - DNA, 471 bp, Unknown
  Obtained from environmental sample
  misc_feature (1)..(471): n is a, c, g, or t
atggcagaaaatctgaatacaaagccaaaaccgtcggagggcaaatcaacgtgtcttgacgacagagagagcaactgcgcaaaatacggcaggctgtacgattggtacactgctgtgaaaatctgtccgtcaggttggcgtttgtcttcgtgggatgatgattggggggatcggttgagggacggaaaaaccggcaagaggctgaaagcgtcgagcggctgggcgggagaatccggctatcacggcaacggcacggaccgctacggtttctcggccctgcccggcggcggcggacccgacgggtacagcgacggcgtcttcggcgcgtggtggacgcctgatacggggtacggccatgttacgcacgtcttaatactgctccatagcgacaacatacacgggcatggcgacgacaacaaaagcagtatgtactcggtgaggtgcgtcatgaaagacaacggcggccgttga

SEQ ID NO: 18912 - protein, 156 aa, Unknown
  Obtained from environmental sample
  misc_feature (1)..(156): Xaa is any amino acid
MAENLNTKPKPSEGKSTCLDDRESNCAKYGRLYDWYTAVKICPSGWRLSSWDDDWGDRLRDGKTGKRLKASSGWAGESGYHGNGTDRYGFSALPGGGGPDGYSDGVFGAWWTPDTGYGHVTHVLILLHSDNIHGHGDDNKSSMYSVRCVMKDNGGR

SEQ ID NO: 18913 - DNA, 765 bp, Unknown
  Obtained from environmental sample
  misc_feature (1)..(765): n is a, c, g, or t
atggatgaaattcgttttgccaaagaccgactgttttctgatatttcgggacttgagaagattaatgtagatgagagcgtcaagaatgtcggtggtttgggtgggctcagaagttggcttgaggaaaagaaaaccttgctttctgccgaaaaacgtgatgaaatgaaagcgcgcggcttacaatcgcctagaggtattttacttgttggtgttcccgggtgcggaaaatcactatcggctaagtcaatagctgctaattggaagttgcctctctacagacttgattttgcgactgtgcagggtagttatgtcgggcagtcggagcaacagttaaaagatgcgcttaccacggctgaaaacgtttccccttgcgtactttggattgatgaaatagaaaaaggattatctggatacgccggtaacggggatggcggcgtatcgacgcgaatggtaggacagtttttgttttggctgcaagaatgtaagaaacaagtttttgtagtagcgacggcgaataatgtatccatgcttccaccggagttactccgccgcggtcgttttgatgaattgttctttgtcgatttgccgaccgccgaagaacggcgtgagatacttgccatgtatataaaaaagtatttgggtctgagtttcgctggtaattttgccgataaaattgttggaatcaccgaaggattcacaggagctgacttggaatctactgttagagaattggcctaccggaaggtagcaaacgatgatttttga

SEQ ID NO: 18914 - protein, 254 aa, Unknown
  Obtained from environmental sample
  DOMAIN (65)...(250): ATPase family associated with various cellular activities (AAA)
  misc_feature (1)..(254): Xaa is any amino acid
MDEIRFAKDRLFSDISGLEKINVDESVKNVGGLGGLRSWLEEKKTLLSAEKRDEMKARGLQSPRGILLVGVPGCGKSLSAKSIAANWKLPLYRLDFATVQGSYVGQSEQQLKDALTTAENVSPCVLWIDEIEKGLSGYAGNGDGGVSTRMVGQFLFWLQECKKQVFVVATANNVSMLPPELLRRGRFDELFFVDLPTAEERREILAMYIKKYLGLSFAGNFADKIVGITEGFTGADLESTVRELAYRKVANDDF

SEQ ID NO: 18915 - DNA, 384 bp, Unknown
  Obtained from environmental sample
  misc_feature (1)..(384): n is a, c, g, or t
ttgtcactttttaccagaccgtatttggagacactccgcatgagcaaagaagaaatcaacgcctttctcggggccggaacggtgtatcagggacgtctttccttccagggcgctgtgcgtattgacggttccttctccggcgaagtacattcggacggttcgctgatcgtggggaaggacgcggtcattgaagggctgctggacatcggggaactgctgctttccgggcgcttctccggggaagtgcaggccaagcggcgcgtaactatccatagaacaggcaacttgcagggcgttgtctacactcccgcgatggtgatggaggaaggcggcctgctggatggaaaaattgtcatgcagggcaatcctccggcccctgaatga

SEQ ID NO: 18916 - protein, 127 aa, Unknown
  Obtained from environmental sample
  DOMAIN (11)...(123): Protein of unknown function, DUF583
  misc_feature (1)..(127): Xaa is any amino acid
MSLFTRPYLETLRMSKEEINAFLGAGTVYQGRLSFQGAVRIDGSFSGEVHSDGSLIVGKDAVIEGLLDIGELLLSGRFSGEVQAKRRVTIHRTGNLQGVVYTPAMVMEEGGLLDGKIVMQGNPPAPE

SEQ ID NO: 18917 - DNA, 429 bp, Unknown
  Obtained from environmental sample
  misc_feature (1)..(429): n is a, c, g, or t
atgtattacaagacccgcagacacggcgtgctgttcacttatgtaacaccgtcggtggtcaacttgctggccgggatagtcaccgcgtcgctcacggggctgctgcgcgggctgctggtgtcgccgttcgccgcgcaaatccccgggtggatttatatcgctgcgccgtacctgctgcaggtgctgctgctgtttgcccagtgcaatgtcgcgctggccttgttcaatatcattcccgtattcccgctggacgggctgaagatacttcagctgttccttaaaccggatatgtccatccgcgtcagccagtacgaaaaaatcttccaggtcatactgttgattttgttgggtttaggccttatctcacgcctgtttgacccgataacgtcggcgattgtcgaagcggcgtacatagacatcaaattctga

SEQ ID NO: 18918 - protein, 142 aa, Unknown
  Obtained from environmental sample
  DOMAIN (6)...(124): Peptidase family M50
  misc_feature (1)..(142): Xaa is any amino acid
MYYKTRRHGVLFTYVTPSVVNLLAGIVTASLTGLLRGLLVSPFAAQIPGWIYIAAPYLLQVLLLFAQCNVALALFNIIPVFPLDGLKILQLFLKPDMSIRVSQYEKIFQVILLILLGLGLISRLFDPITSAIVEAAYIDIKF

SEQ ID NO: 18919 - DNA, 759 bp, Unknown
  Obtained from environmental sample
  misc_feature (1)..(759): n is a, c, g, or t
atggggcggttaataatggaagaggatgagcaacaacctgttaagcgtccgcgtcagcggaacattgtctttgccggtaaggttatttggatatccgagctggcgagtatggcgcttatcggtatatttttggtaccgctgcttaccgcgtctttagtgattttgaggaacgagtttaccatacacgcgcagaactacgacatcgccgcgatgaaagcggagcgggtaaacaccttgaacaccttggccgtcacgcgggagaaggagcggttggtgcggttgcttgacgagatcgccggacagaggataaagccggaggcgcggcaccgcctcgcggagcttatctaccaaaacagcacccagtacggctacagcccggagttgttgctggcggtgatggccgtggagagcggattcaacccgcaagccttggggcggtaccgcggcggaacgctcagcggcgccatagggatcatgcagctcaagtacgaaaccgccgcgtacatggcgaatacgctgggcatgggaaaaatagaacgggaagacctgctcgacccggagatcaacatggtgctgggaacggcgtttctcgtgacccttatcacgcagttcaagagcttcaaacacgggatactcgcgtacaacctcggtccgagcaaggtcaggactgcgttagccaacaatgagccgctgcaggcgcggtactatgagaaagttttgaagcaatattatagaatcatggaaattgagaataattga

SEQ ID NO: 18920 - protein, 252 aa, Unknown
  Obtained from environmental sample
  DOMAIN (113)...(237): Transglycosylase SLT domain
  misc_feature (1)..(252): Xaa is any amino acid
MGRLIMEEDEQQPVKRPRQRNIVFAGKVIWISELASMALIGIFLVPLLTASLVILRNEFTIHAQNYDIAAMKAERVNTLNTLAVTREKERLVRLLDEIAGQRIKPEARHRLAELIYQNSTQYGYSPELLLAVMAVESGFNPQALGRYRGGTLSGAIGIMQLKYETAAYMANTLGMGKIEREDLLDPEINMVLGTAFLVTLITQFKSFKHGILAYNLGPSKVRTALANNEPLQARYYEKVLKQYYRIMEIENN

SEQ ID NO: 18921 - DNA, 546 bp, Unknown
  Obtained from environmental sample
  misc_feature (1)..(546): n is a, c, g, or t
ttggcagagctggacgccatcgcgaattttctattttcttttaggtacgatagcagcctcaacttttacggaggctttatggctattccagcatatatgaaaatagacggcattccaggttctgtgaatgtttctggcagagagggctttgttgaagtccttgagtttaaccacagggtttatgttccaacagacagggacgatggctcgcttacaggcactcgcaagcacgattccctcgtgtttcacaaggcttttgacaaagcgtcttctctcctctaccaaaaggtttgcaccggacaaactgtgaataacattttaatccggtggtataagatcacggatagaggagaagaggttgcctactttgagcataaacttgagaaatgcaaaattgcaagcgtgcgttcttatatgcacaatgtaaaggactcaaccaaagagcagtttgtgcatcaggaggaagttaccattcgctacgaaaaggtgacttggaatttcttggacggaaatttgcagcacaccgaccagtggaatcagaggtag

SEQ ID NO: 18922 - protein, 181 aa, Unknown
  Obtained from environmental sample
  DOMAIN (30)...(168): Protein of unknown function (DUF796)
  misc_feature (1)..(181): Xaa is any amino acid
MAELDAIANFLFSFRYDSSLNFYGGFMAIPAYMKIDGIPGSVNVSGREGFVEVLEFNHRVYVPTDRDDGSLTGTRKHDSLVFHKAFDKASSLLYQKVCTGQTVNNILIRWYKITDRGEEVAYFEHKLEKCKIASVRSYMHNVKDSTKEQFVHQEEVTIRYEKVTWNFLDGNLQHTDQWNQR

SEQ ID NO: 18923 - DNA, 723 bp, Unknown
  Obtained from environmental sample
  misc_feature (1)..(723): n is a, c, g, or t
gtgaagtctaagaaaattgactgcgtccaggtcggcgctattgaaaccaactgctggctttacgccccggaagaagaaagcgataccatgttttgctttgtaattgatcccggcgacgaggccgctctgatcatttcaagactcaaggagttaaactgggttccacgttacatcctgcttacgcacggccacttcgatcatctaatggccctccccggccttatcgaagcttttgaaaaaggcgtcttcggctcaagggaagtgccaaaagtgggcgttcaccgaatggatgcccactatttgggaaaagacgccctcacagttcacagagacagtttcgccgccgcttccggtggaaacccgtcctatatagattccatctggaaacccattaaagaggcggacaccctttttgaagaaggagacgtgcttcccccgtttaaagtgcttcacgtccccggccacacccctgggagcgccgccttttacgacgaagactcagacgtccttttttcaggggacacgcttttccagggcagctggggccgcacggatctccccggcgggaacgaaaagcttattcaccanagcctgaagcgcctgcgctcaatgaaagaagaaatagttgtctgccctggtcatgggccgggttacacaattgggggaagaagcgggattaaaggtcgatgggcgaataatggcaaagatcctgatatgcgatga

SEQ ID NO: 18924 - protein, 240 aa, Unknown
  Obtained from environmental sample
  DOMAIN (15)...(214): Metallo-beta-lactamase superfamily
  misc_feature (1)..(240): Xaa is any amino acid
MKSKKIDCVQVGAIETNCWLYAPEEESDTMFCFVIDPGDEAALIISRLKELNWVPRYILLTHGHFDHLMALPGLIEAFEKGVFGSREVPKVGVHRMDAHYLGKDALTVHRDSFAAASGGNPSYIDSIWKPIKEADTLFEEGDVLPPFKVLHVPGHTPGSAAFYDEDSDVLFSGDTLFQGSWGRTDLPGGNEKLIHXSLKRLRSMKEEIVVCPGHGPGYTIGGRSGIKGRWANNGKDPDMR

SEQ ID NO: 18925 - DNA, 870 bp, Unknown
  Obtained from environmental sample
  misc_feature (1)..(870): n is a, c, g, or t
ttggnnnnacgacgacagattggcacgagcgtatccactcgcattcttaccatgggcggggtgaacgcgataatggcaatgtcggtgaacatgattgtcggcattaccgggcagctttctcttggtcaggcgggtttccttgcaatcggcgcctattcctgcattttcttcaatcttgatatggggctgcccattccgcttgcggtaatttgcgccgtcattgttaccaccattgccggttttcttatcggctttccggtgctgaagcttaccggagattacctggcgattgttactcttggttttggcgagattatccgcgtggtgtttatcaaccttaaagccctgacaggcggccccaatggaaggtcgtttacaacaaacatggtgctgaacggcgaattggcctttgtgttcacaacggcaacgctggttgttattctcgctctgctgcagaattttctccgttccacctatggccgcgcgatcaaggcgtgcagggaagatgaaatagcggctaacgcgaacgggattgatattttccgttacaaaatgatcggttttgtcatcgccgcttttatcgccggcataggtggctgtgtctacgctctggtggtcggctttgtcaaaccggatatggcccaattcctcagatccatcgacttccttatttatgtcgtgcttggcggcatgggttccatgaccggctctattcttgcggcctatgtccttacctatttgcaggaatttttgcgtttcctgcaagactaccgcctcctgatatacccggtaatactgatccttgtcatgctgttccgccccaagggccttttgggaatgaaagaattttccattgtggggcctggttga

SEQ ID NO: 18926 - protein, 289 aa, Unknown
  Obtained from environmental sample
  DOMAIN (11)...(270): Branched-chain amino acid transport system / permease component
  misc_feature (1)..(289): Xaa is any amino acid
MXXRRQIGTSVSTRILTMGGVNAIMAMSVNMIVGITGQLSLGQAGFLAIGAYSCIFFNLDMGLPIPLAVICAVIVTTIAGFLIGFPVLKLTGDYLAIVTLGFGEIIRVVFINLKALTGGPNGRSFTTNMVLNGELAFVFTTATLVVILALLQNFLRSTYGRAIKACREDEIAANANGIDIFRYKMIGFVIAAFIAGIGGCVYALVVGFVKPDMAQFLRSIDFLIYVVLGGMGSMTGSILAAYVLTYLQEFLRFLQDYRLLIYPVILILVMLFRPKGLLGMKEFSIVGPG

SEQ ID NO: 18927 - DNA, 792 bp, Unknown
  Obtained from environmental sample
  misc_feature (1)..(792): n is a, c, g, or t
atggaaacttattccacaaagccgcagagagagcgaatggatttatttatcccaaccgagtacagcaacgcctgtctggacgacgagggatttatatatgtaacaaattcaaccgggcagacagaccctgtgcgcaggttaaacgccatggggcaggatattttgatccgcaacggctatgagaagcctgtcggcgacatatcccctggcgacgccggaggaataaacgggcgttcaaaatttattgatgtcgccgctttcccgaatgattcatacgcctgttttgacagaacgcgcgggcgtatttttatgtacgactttcagggaaatctgttatacgctttcggcggcattggaaaccgcgagggcagttttatcctgccggttgcgcttgccaatatgggttattctctttacgcgctggattccggaaccgccgctcttacccgctttgatttgacaggttatgggcaattaattaacaacgcgctggaagaatacagggcaggccgttatgaatcttccgcgcaattgtgggaagaggttcttaaaatgaacggcaattacgatcttgcctatatcggtataggaagagcggctctccggcagggtgaatatcagaagtcgatgaggtactataaactaaaacactaccgcgaaggttacggaaaggcttatcaattgtaccgcaaacaatggatggaagaaaacctctggaaaatacttttaattttggcaataatattaattataccgcctgctgtcaggtttaccgttaactgtcagagataa

SEQ ID NO: 18928 - protein, 263 aa, Unknown
  Obtained from environmental sample
  misc_feature (1)..(263): Xaa is any amino acid
METYSTKPQRERMDLFIPTEYSNACLDDEGFIYVTNSTGQTDPVRRLNAMGQDILIRNGYEKPVGDISPGDAGGINGRSKFIDVAAFPNDSYACFDRTRGRIFMYDFQGNLLYAFGGIGNREGSFILPVALANMGYSLYALDSGTAALTRFDLTGYGQLINNALEEYRAGRYESSAQLWEEVLKMNGNYDLAYIGIGRAALRQGEYQKSMRYYKLKHYREGYGKAYQLYRKQWMEENLWKILLILAIILIIPPAVRFTVNCQR

SEQ ID NO: 18929 - DNA, 816 bp, Unknown
  Obtained from environmental sample
  misc_feature (1)..(816): n is a, c, g, or t
atgtaccattataagatatcaagttccgaaaaaatgtatatctggnacgtgaaaagcgataatgcgcattacaatagagtagagtcgcattgcacaaaggaaattgagattctctacatgattaacgggggccttgatatttatcttaaaggccacatgtatcacgtaatttctgacagcctgctactgatgccgtccaattttttacatgagaggatatatcctttagggaaaaatagccacaggataagcatacattttttacctgaaatgttgagcaagaccgagcggaatttctttcagaatttatttacggaaccgcttcattttctggacgtatcgcggtacgatctgaatttttatattcgggccgttaccgagtgtgaattgatggaaaagcccttacagaaaatcgcggtaaaaaacagattaaatgcattaatcacgcaaatacattatttgagttccacaaaagccgcaaagccggttgttctggatgaaagaataacaaaagtattaacatatctcgaagaaaattataataaagatatttccctggacgatttagcagatagattttttattaccaaaaaccaccttaatttcattttcactaaaatggtaggtatgcccattaagaaatacatcactgcgaaacgtcttggatttgcgcggcatgaaattctggctggaaagaacccaacacaagttgcgtataacgctggtttccatggttatgctccattctaccgtgcgtataaattattctacggcctttcaccatcagaacagttaacggacggcgttaataactaa

SEQ ID NO: 18930 - protein, 271 aa, Unknown
  Obtained from environmental sample
  DOMAIN (171)...(217): Bacterial regulatory helix-turn-helix proteins, AraC family
  misc_feature (1)..(271): Xaa is any amino acid
MYHYKISSSEKMYIWXVKSDNAHYNRVESHCTKEIEILYMINGGLDIYLKGHMYHVISDSLLLMPSNFLHERIYPLGKNSHRISIHFLPEMLSKTERNFFQNLFTEPLHFLDVSRYDLNFYIRAVTECELMEKPLQKIAVKNRLNALITQIHYLSSTKAAKPVVLDERITKVLTYLEENYNKDISLDDLADRFFITKNHLNFIFTKMVGMPIKKYITAKRLGFARHEILAGKNPTQVAYNAGFHGYAPFYRAYKLFYGLSPSEQLTDGVNN

SEQ ID NO: 18931 - DNA, 588 bp, Unknown
  Obtained from environmental sample
  misc_feature (1)..(588): n is a, c, g, or t
gtgtactacaacacgggaaactgctactaccggctgatgaagccgggtatggcgcgcctgtactacgagaaggcggccgcgctgtcgccgaacgatcccgacatagaggcgaacatcaacttcattaaatcaataatagtcgataggcaaaccggcggcgacacgcaggaatcggacttcctgacgtcggtgctgtacggcatacacacactattgccgctgaacgttcaactcatagcggtgtgcgcgctgttgttcatactgtcgattatcgcctccgctatgctctttaagcgcggtctggcgcggttgtggcttgcctacggcgcggcgctgtgcgttctgctgataataacggtaggaacgtcggtcggttacaagatttacgctttggagagcaaacagtacgcgataatattgtcggcgtctatagacgctaagaaccagccgtccggcgaccgaacgctgttcaccgcgcacgaggggacgaaactgcagatcagaaagaccgcgggcgagtggagtctcgttagtctgccgaacggcgtcagcggctgggtgacgacgggagcgctgggtaagatatga

SEQ ID NO: 18932 - protein, 195 aa, Unknown
  Obtained from environmental sample
  misc_feature (1)..(195): Xaa is any amino acid
MYYNTGNCYYRLMKPGMARLYYEKAAALSPNDPDIEANINFIKSIIVDRQTGGDTQESDFLTSVLYGIHTLLPLNVQLIAVCALLFILSIIASAMLFKRGLARLWLAYGAALCVLLIITVGTSVGYKIYALESKQYAIILSASIDAKNQPSGDRTLFTAHEGTKLQIRKTAGEWSLVSLPNGVSGWVTTGALGKI

SEQ ID NO: 18933 - DNA, 714 bp, Unknown
  Obtained from environmental sample
  misc_feature (1)..(714): n is a, c, g, or t
gtggttctttgtcacccaactcaattcggccccgcggaggatttcgcgaagtacccgcgtgatttggccaaggattgcgcccttgccgagtcagcgggttgcggatgcgtcttcgccccgtccgtcgccgagatgtaccccgacggttacggtacctacgtagacgtcggccccataggagacactctttgcggcgcttcccgccccgggcacttcaggggcgtggcgacggtcgtcctgaagctgttcaacatagtctctcccgatgccgcggtcttcggcgcgaaagacgcgcagcaggcggtggtaataaagcgcgtcgccgccgacctgaacctccccgtccgcataataaccgccccaatagtccgcgaggacgacggcttggccatgagttcgcgcaacgcctatctgataccgagcgagaggaagcaagcggtaagcatcagtaaagccttattcgacgcgaaattgttgtttgacggcggggagcggttatccgaacggataaaagggcgtatcttatcggtaataaacggcagcggcgggttgataaaaatagaatatgcggagatagtggaccctatatcgttacatccgcttgtcaatatagagaacgccgcgttgatagctgtggcttgccggacgacggagagtaagacgaggttgattgacaatgttgtcgtgggggacattaaagattgtctgaattag

SEQ ID NO: 18934 - protein, 237 aa, Unknown
  Obtained from environmental sample
  DOMAIN (1)...(229): Pantoate-beta-alanine ligase
  misc_feature (1)..(237): Xaa is any amino acid
MVLCHPTQFGPAEDFAKYPRDLAKDCALAESAGCGCVFAPSVAEMYPDGYGTYVDVGPIGDTLCGASRPGHFRGVATVVLKLFNIVSPDAAVFGAKDAQQAVVIKRVAADLNLPVRIITAPIVREDDGLAMSSRNAYLIPSERKQAVSISKALFDAKLLFDGGERLSERIKGRILSVINGSGGLIKIEYAEIVDPISLHPLVNIENAALIAVACRTTESKTRLIDNVVVGDIKDCLN

SEQ ID NO: 18935 - DNA, 345 bp, Unknown
  Obtained from environmental sample
  misc_feature (1)..(345): n is a, c, g, or t
ttgcttcctctcgctcggtatcagataggcgttgcgcgaactcatggccaagccgtcgtcctcgcggactattggggcggttattatgcggacggggaggttcaggtcggcggcgacgcgctttattaccaccgcctgctgcgcgtctttcgcgccgaagaccgcggcatcgggagagactatgttgaacagcttcaggacgaccgtcgccacgcccctgaagtgcccggggcgggaagcgccgcaaagagtgtctcctatggggccgacgtctacgtaggtaccgtaaccgtcggggtacatctcggcgacggacggggcgaagacgcatccgcaacccgctga

SEQ ID NO: 18936 - protein, 114 aa, Unknown
  Obtained from environmental sample
  misc_feature (1)..(114): Xaa is any amino acid
MLPLARYQIGVARTHGQAVVLADYWGGYYADGEVQVGGDALYYHRLLRVFRAEDRGIGRDYVEQLQDDRRHAPEVPGAGSAAKSVSYGADVYVGTVTVGVHLGDGRGEDASATR

SEQ ID NO: 18937 - DNA, 756 bp, Unknown
  Obtained from environmental sample
  misc_feature (1)..(756): n is a, c, g, or t
atgacagattcggcacgagcggacaggtaccccgacgccatagaaatgctggcggaataccatacccgagagcgcatgggcgagtttagcctctctggcccccggcccgaaataaccaggccacgcgaatggcaagaggacgacggcagaacgatagtttcgggagaaaagaaaaaacccctcgccgcaggatatgggtcggaacgacaggactcattccggcgggccgaggaagaggccaggcgcagggcggaggaaaaggccagatgggaggccgaggaagaggccaggcgcagggaagaggaaaaggccagatgggaggccgaggaagagtccaggcgcagggaagaggaaaaggccagatgggaggccgaggaagaggccaggcgtagggaagaggaagaagccaggcggcgggaagagtccaggcgcagggcggaggaaaaggccagatgggaggccgaggaagaggccaggcgcagggaagaggaaaaggccagatgggaggccgaggaagaggctaggcgtagggaagaggaagaagccaggcggcgggaagagtccaggcgcagggaagaggaaaaggccagatgggaggccgaggaagaggccaggcgcagggaagaggaagaagccaggcggcgggaagagtccaggcgcagggaagaggaaaaggccagatgggaggccgaggaagaggccaggcgtagggaagaggaagaagccaggcggcgggtagagtccaggcgcaggtaa

SEQ ID NO: 18938 - protein, 251 aa, Unknown
  Obtained from environmental sample
  misc_feature (1)..(251): Xaa is any amino acid
MTDSARADRYPDAIEMLAEYHTRERMGEFSLSGPRPEITRPREWQEDDGRTIVSGEKKKPLAAGYGSERQDSFRRAEEEARRRAEEKARWEAEEEARRREEEKARWEAEEESRRREEEKARWEAEEEARRREEEEARRREESRRRAEEKARWEAEEEARRREEEKARWEAEEEARRREEEEARRREESRRREEEKARWEAEEEARRREEEEARRREESRRREEEKARWEAEEEARRREEEEARRRVESRRR

SEQ ID NO: 18939 - DNA, 546 bp, Unknown
  Obtained from environmental sample
  misc_feature (1)..(546): n is a, c, g, or t
atgggtcggaacgacaggactcattccggcgggccgaggaagaggccaggcgcagggcggaggaaaaggccagatgggaggccgaggaagaggccaggcgcagggaagaggaaaaggccagatgggaggccgaggaagagtccaggcgcagggaagaggaaaaggccagatgggaggccgaggaagaggccaggcgtagggaagaggaagaagccaggcggcgggaagagtccaggcgcagggcggaggaaaaggccagatgggaggccgaggaagaggccaggcgcagggaagaggaaaaggccagatgggaggccgaggaagaggctaggcgtagggaagaggaagaagccaggcggcgggaagagtccaggcgcagggaagaggaaaaggccagatgggaggccgaggaagaggccaggcgcagggaagaggaagaagccaggcggcgggaagagtccaggcgcagggaagaggaaaaggccagatgggaggccgaggaagaggccaggcgtagggaagaggaagaagccaggcggcgggtag

SEQ ID NO: 18940 - protein, 181 aa, Unknown
  Obtained from environmental sample
  misc_feature (1)..(181): Xaa is any amino acid
MGRNDRTHSGGPRKRPGAGRRKRPDGRPRKRPGAGKRKRPDGRPRKSPGAGKRKRPDGRPRKRPGVGKRKKPGGGKSPGAGRRKRPDGRPRKRPGAGKRKRPDGRPRKRLGVGKRKKPGGGKSPGAGKRKRPDGRPRKRPGAGKRKKPGGGKSPGAGKRKRPDGRPRKRPGVGKRKKPGGG

SEQ ID NO: 18941 - DNA, 618 bp, Unknown
  Obtained from environmental sample
  misc_feature (1)..(618): n is a, c, g, or t
ttgggctatcttcaacgctnccatatcggctttgcgcctggcctctacttcggcctcccatctggccttatcctcttacctgcgcctggactctacccgccgcctggcttcttcctcttccctacgcctggcctcttcctcggcctcccatctggccttttcctcttccctgcgcctggactcttcccgccgcctggcttcttcctcttccctgcgcctggcctcttcctcggcctcccatctggccttttcctcttccctgcgcctggactcttcccgccgcctggcttcttcctcttccctacgcctagcctcttcctcggcctcccatctggccttttcctcttccctgcgcctggcctcttcctcggcctcccatctggccttttcctccgccctgcgcctggactcttcccgccgcctggcttcttcctcttccctacgcctggcctcttcctcggcctcccatctggccttttcctcttccctgcgcctggactcttcctcggcctcccatctggccttttcctcttccctgcgcctggcctcttcctcggcctcccatctggccttttcctccgccctgcgcctggcctcttcctcggcccgccggaatga

SEQ ID NO: 18942 - protein, 205 aa, Unknown
  Obtained from environmental sample
  misc_feature (1)..(205): Xaa is any amino acid
MGYLQRXHIGFAPGLYFGLPSGLILLPAPGLYPPPGFFLFPTPGLFLGLPSGLFLFPAPGLFPPPGFFLFPAPGLFLGLPSGLFLFPAPGLFPPPGFFLFPTPSLFLGLPSGLFLFPAPGLFLGLPSGLFLRPAPGLFPPPGFFLFPTPGLFLGLPSGLFLFPAPGLFLGLPSGLFLFPAPGLFLGLPSGLFLRPAPGLFLGPPE

SEQ ID NO: 18943 - DNA, 393 bp, Unknown
  Obtained from environmental sample
  misc_feature (1)..(393): n is a, c, g, or t
ttgcccgccagtggccaattctggcctgttgtcataatctgggacagttgggcgtcaacgttgaaagcggagcctccatggcttgggctatcttcaacgctnccatatcggctttgcgcctggcctctacttcggcctcccatctggccttatcctcttacctgcgcctggactctacccgccgcctggcttcttcctcttccctacgcctggcctcttcctcggcctcccatctggccttttcctcttccctgcgcctggactcttcccgccgcctggcttcttcctcttccctgcgcctggcctcttcctcggcctcccatctggccttttcctcttccctgcgcctggactcttcccgccgcctggcttcttcctcttccctacgcctag

SEQ ID NO: 18944 - protein, 130 aa, Unknown
  Obtained from environmental sample
  misc_feature (1)..(130): Xaa is any amino acid
MPASGQFWPVVIIWDSWASTLKAEPPWLGLSSTLPYRLCAWPLLRPPIWPYPLTCAWTLPAAWLLPLPYAWPLPRPPIWPFPLPCAWTLPAAWLLPLPCAWPLPRPPIWPFPLPCAWTLPAAWLLPLPYA

SEQ ID NO: 18945 - DNA, 420 bp, Unknown
  Obtained from environmental sample
  misc_feature (1)..(420): n is a, c, g, or t
ttgttctcggagacgcgttaccaacgcgccgcatttttgctccgggaaatgggcgcccgcgcggtaccccgcgaggtcattgcgaataatatcccttacgccgagagctatggcttcaaacgttcagacgtcaattttgagagcgagcttaaaagggcgctggatacggaaaagcagaaacctgccgttgagctgacacagacccatcctcagcacttttcaaattacaagggcagagactacagggatgtacagatacggcgggttctggattatgtcaccacggaaaaaaacaacggcaacaacgttaacatggagcaggaaaccatggcctctctgcaaaaccagatggcatatactctgtatgccaaatctatcgaatttgaattccatcaggttaacccggtattaaggaattag

SEQ ID NO: 18946 - protein, 139 aa, Unknown
  Obtained from environmental sample
  misc_feature (1)..(139): Xaa is any amino acid
MFSETRYQRAAFLLREMGARAVPREVIANNIPYAESYGFKRSDVNFESELKRALDTEKQKPAVELTQTHPQHFSNYKGRDYRDVQIRRVLDYVTTEKNNGNNVNMEQETMASLQNQMAYTLYAKSIEFEFHQVNPVLRN

SEQ ID NO: 18947 - DNA, 468 bp, Unknown
  Obtained from environmental sample
  misc_feature (1)..(468): n is a, c, g, or t
atgggattgtttagttcgatcaatacttcggcatcgggaatgagcgccgacagggtgaggatggacgtaattgcggacaatatggcaaacgtgaacaccacgcggacaaccgagggtggcccgttccgtcgcagccgcgtgattatgcggccccgcgtggaaggcccgtactggcgatctccgtttcttccccagtctctggacaacggcatagggcgcggggtgcgagtagtcgagattcaaaaagatacctcaaaggagaatccactgcgctatgatccaacgcaccccgacgccataaaatcaggccccagggaagggtatgccgaactgtcaaacgtggatatagttaccgaaaagggtggatatgatctccgcttcgcgctcctaccaggcgaacgcggctgttattggaaggcccaaaaacgattgtcccgcccgggcgctgaacctttggcgggaagataa

SEQ ID NO: 18948 - protein, 155 aa, Unknown
  Obtained from environmental sample
  DOMAIN (7)...(37): Flagella basal body rod protein
  misc_feature (1)..(155): Xaa is any amino acid
MGLFSSINTSASGMSADRVRMDVIADNMANVNTTRTTEGGPFRRSRVIMRPRVEGPYWRSPFLPQSLDNGIGRGVRVVEIQKDTSKENPLRYDPTHPDAIKSGPREGYAELSNVDIVTEKGGYDLRFALLPGERGCYWKAQKRLSRPGAEPLAGR

SEQ ID NO: 18949 - DNA, 855 bp, Unknown
  Obtained from environmental sample
  misc_feature (1)..(855): n is a, c, g, or t
ttgtccttacgacgacaggggaaaatagtcgcttttggggggcgcgccctgcccggaacagtgcaaagcgacggaaacgagccgccaaagtacataaattcccctgaaaccgagatttacaagaaggggcagaccctttttgccatagatcacgcaaaaccgcagatgagacagaccaaaaccgtgtatcttgccgaaggctacatggacgtaatcgcccttcatcaggcggaagtcgtcaattctgtcgccccgctcgggacggcttttaccgacgaacaggcggcatggctgcggcgctgggtggataatgtagttcttatttttgacagcgacgaagcggggcaaaaagcggcttacaaggcgattatcacctgccggaagaacggaatttcctgttcccttgtcaatttacaggaggggcttgagagcgaaattgacggggaagaagccaaaaaaataaaagatcccgcggatattttgcaaaaattcggtcctcagatattgaaaaaagttgttaaatttactataaatgactttgagtatctaatttcccgcggcaggcttcaatattctgcggcagacggcgatattaaccgcgcggtcgaatttatgtttccgtttttggaatcgttagattcggaaattgaccgcgacgactgtatcacaagggttgccgatatttttaaaattgagcggagcgcggtacagaaggattattcaaaccggaaaacgacaggctacaaagatttttccgagaagcctgttacgngtaaaaccgaaactccagatacggagaaacgcgcagctgagtcttttaacaactgttgcgataaatcaggaaatgtattctga

SEQ ID NO: 18950 - protein, 284 aa, Unknown
  Obtained from environmental sample
  SIGNAL (1)...(23)
  DOMAIN (1)...(53): DNA primase catalytic core, N-terminal domain
  misc_feature (1)..(284): Xaa is any amino acid
MSLRRQGKIVAFGGRALPGTVQSDGNEPPKYINSPETEIYKKGQTLFAIDHAKPQMRQTKTVYLAEGYMDVIALHQAEVVNSVAPLGTAFTDEQAAWLRRWVDNVVLIFDSDEAGQKAAYKAIITCRKNGISCSLVNLQEGLESEIDGEEAKKIKDPADILQKFGPQILKKVVKFTINDFEYLISRGRLQYSAADGDINRAVEFMFPFLESLDSEIDRDDCITRVADIFKIERSAVQKDYSNRKTTGYKDFSEKPVTXKTETPDTEKRAAESFNNCCDKSGNVF

SEQ ID NO: 18951 - DNA, 483 bp, Unknown
  Obtained from environmental sample
  misc_feature (1)..(483): n is a, c, g, or t
ttggttttaatatctggcacggattttgctagtatattctttgaggttattatgctcacaaaactggcaatattagacaaaacgagcatccctgtggcgagcaaggggctagatgcctacacccatagaggcagagcaatagccaacaatatcgcaaatgtcagcactccggggtaccgccgtatagaggtttcctttgaagaccagctccgcagggctttggacaaggaactgaacctgccgggcaagcgcaccgacaacaaccatttctttttaggccgtaaagaagtagagcatataaaaagcgaaggatatagggtagaagaccaaacaaatccgggcgaaataaataacgtggatatagatatagagatggcaaaattggcagaaaacgagattgccttntattttgcagcagcgttcataagagaccgtagcagcacaataggcgaggctatcagaggcagcaaaggaggagaatag

SEQ ID NO: 18952 - protein, 160 aa, Unknown
  Obtained from environmental sample
  DOMAIN (30)...(60): Flagella basal body rod protein
  misc_feature (1)..(160): Xaa is any amino acid
MVLISGTDFASIFFEVIMLTKLAILDKTSIPVASKGLDAYTHRGRAIANNIANVSTPGYRRIEVSFEDQLRRALDKELNLPGKRTDNNHFFLGRKEVEHIKSEGYRVEDQTNPGEINNVDIDIEMAKLAENEIAXYFAAAFIRDRSSTIGEAIRGSKGGE

SEQ ID NO: 18953 - DNA, 765 bp, Unknown
  Obtained from environmental sample
  misc_feature (1)..(765): n is a, c, g, or t
atgtctgatcaatatatatataattacgatgatataataaaagttcttccggcttgggcggaagaacttgcgaataaataccgttccaaaaccgcaaatgtatatattttacacggaaacataagggattttcttcctcacgaaaaaaaagaaggcgagtttgcttttaaaagggtacaggattatatctctgaaattttattcggaaaccaaaaaataatagcgttctacgacagttccagagggcttacattttgcgagccgcacatggaaaaaagttacattgccgccgctccgcagtttgcagtaagctccgatattgattcaggcgattttgtttcaaatgatcctgagcggtgttttccgtacttggaaaaatattttctttcgcagatacaagaggataaaaaaaataaaggcagaaaagttttaatcgtagactttgccgagcatattgtccccgccggggatttaatccgcctgtccgacagagaccgttactgtatggttactttcaaccgctgggcgacagacccaaaatttatcagaggcgatatatcgattattctgctgactgaaaatctgtccgatatttcatctcgtcttacaagttctcccgctatagtaaaaatcggcgttccgtttccaagcgcgaaaataagggaaagttttttacgctcggaaagagaaaagggtcgtcttttgcttgaacgcgggtttaacgccccgaaaacttgcctctattacatcggggtcttaatctga

SEQ ID NO: 18954 - protein, 254 aa, Unknown
  Obtained from environmental sample
  misc_feature (1)..(254): Xaa is any amino acid
MSDQYIYNYDDIIKVLPAWAEELANKYRSKTANVYILHGNIRDFLPHEKKEGEFAFKRVQDYISEILFGNQKIIAFYDSSRGLTFCEPHMEKSYIAAAPQFAVSSDIDSGDFVSNDPERCFPYLEKYFLSQIQEDKKNKGRKVLIVDFAEHIVPAGDLIRLSDRDRYCMVTFNRWATDPKFIRGDISIILLTENLSDISSRLTSSPAIVKIGVPFPSAKIRESFLRSEREKGRLLLERGFNAPKTCLYYIGVLI

SEQ ID NO: 18955 - DNA, 720 bp, Unknown
  Obtained from environmental sample
  misc_feature (1)..(720): n is a, c, g, or t
atgacagattggccgagacngcgactcaaaaatgtaatggacgcgatacgtcaaattaaaaaagattacgacatacccgtcataggcggaaatgtcgctaccaaagagggaacaaaaaaattaatcgccgccggagcggacgcggtaaaggtcggcataggaccgggttctatctgcacaacgcgaattgtcgccggtatcggcgttccgcagtttaccgccgttttggattgcgccgaagaagcggcaaagtcaaagactccggtaatcgcggacggcggcataaagttttcaggagacatagcaaaagcgataggcgcgggagcgagcgttgtaatgataggcaacttgttcgcgggattaaaagaagcgccgggaaacgagattatttttgacggaaggatttacaaagaataccgcggaatgggcagtatgggcgcaatagcggacggcgcgggagaccgctaccagattggcaaagatgaagaacctgtaccggagggaatcgaaggacgagtccctttcaagggggagcttcgcacttacatgaaccagcttgtcgcgggattgcgaaaaggcatgggttactgcggctgcaagagcattgcggaacttaacaaatataagaagtttattaagataacggcggcaggtttaagggaaagccacccgcacgacattacaataacgcaggaagcgccaaattactcgcgatcttga

SEQ ID NO: 18956 - protein, 239 aa, Unknown
  Obtained from environmental sample
  DOMAIN (3)...(225): IMP dehydrogenase / GMP reductase domain
  misc_feature (1)..(239): Xaa is any amino acid
MTDWPRXRLKNVMDAIRQIKKDYDIPVIGGNVATKEGTKKLIAAGADAVKVGIGPGSICTTRIVAGIGVPQFTAVLDCAEEAAKSKTPVIADGGIKFSGDIAKAIGAGASVVMIGNLFAGLKEAPGNEIIFDGRIYKEYRGMGSMGAIADGAGDRYQIGKDEEPVPEGIEGRVPFKGELRTYMNQLVAGLRKGMGYCGCKSIAELNKYKKFIKITAAGLRESHPHDITITQEAPNYSRS

SEQ ID NO: 18957 - DNA, 444 bp, Unknown
  Obtained from environmental sample
  misc_feature (1)..(444): n is a, c, g, or t
atggcanagacatctgtattccgtagtatagaatacagggatatgataaataaacatataaaactcgatcatgttgggaaaattctctttgaggaatttatggaaccgcacaaattgtctcggaatgctcttgcgaaagctataggtgtggctcccagccgtattacagacatagtaaatgggcgtagagggtttacggttgatactgacttgcaactaacccgtctttttggtctttcggaaggatattttttacgtttacaggaacatattgatgcgtataaagcaatggctgccgatactgagcgcgagagggaggccgaagaatggtgtaacgcctcttttgaacaatccattgaagatgatgcggaaaagtttgtaccgctttccgatgcggaaaaaaccgagatagaaaacattattaatgcggtaaataaattctaa

SEQ ID NO: 18958 - protein, 147 aa, Unknown
  Obtained from environmental sample
  DOMAIN (30)...(84): Helix-turn-helix
  misc_feature (1)..(147): Xaa is any amino acid
MAXTSVFRSIEYRDMINKHIKLDHVGKILFEEFMEPHKLSRNALAKAIGVAPSRITDIVNGRRGFTVDTDLQLTRLFGLSEGYFLRLQEHIDAYKAMAADTEREREAEEWCNASFEQSIEDDAEKFVPLSDAEKTEIENIINAVNKF

SEQ ID NO: 18959 - DNA, 858 bp, Unknown
  Obtained from environmental sample
  misc_feature (1)..(858): n is a, c, g, or t
atggatcagatcggccgaggacatttattttttagcctagctttgcgagagctgggcgtgggcaagggagttggggttgggataattgcggcaagttcgccacagtgggttatgtttgaccttgcaacgcagatttgcggcggttataccgttcccatattttcaaatatatcttccgagcattttgaatttcagataaaagaagctaaggtaaaagtcttggctatagactcttgggaaaatctctccgagcaaaatcaaccgcttgtaaaacttatagattttttaattcatttttctctgctgccagacggggcaaaacacaagaatatgctttcttggaatgactgcatacaaaaaggagaaaacctggattctgaacttgaacgcgaaaactttgagaaacgtataaaaagcatagatggcgaagagatattttcaataatttacaccagtggctcaaccggaacacccaaaggggttcccttaacgcagaacaacatggtttcccatctaaaagctatatcggattttttccctgttaaacccagcgatttgtgtatgagcattttgcccatagcgcacgtatttgagaggatggttatctattacttttcctcttttggcctgtccgtttattttgtggacacccccaacaatgttgggaaatatctgccggaagttcgtccatccattttaaccgttgtaccgcgggttttggaaaaactctaccaaaagctgatagatgcctcaaatcaaaagcgaggccctgttagatggcttatgaaatacgccataaccaaagccaaaaccacagacccccacaaagtgagtttaaaaggaaccatctgggattaa

SEQ ID NO: 18960 - protein, 285 aa, Unknown
  Obtained from environmental sample
  misc_feature (1)..(285): Xaa is any amino acid
MDQIGRGHLFFSLALRELGVGKGVGVGIIAASSPQWVMFDLATQICGGYTVPIFSNISSEHFEFQIKEAKVKVLAIDSWENLSEQNQPLVKLIDFLIHFSLLPDGAKHKNMLSWNDCIQKGENLDSELERENFEKRIKSIDGEEIFSIIYTSGSTGTPKGVPLTQNNMVSHLKAISDFFPVKPSDLCMSILPIAHVFERMVIYYFSSFGLSVYFVDTPNNVGKYLPEVRPSILTVVPRVLEKLYQKLIDASNQKRGPVRWLMKYAITKAKTTDPHKVSLKGTIWD

SEQ ID NO: 18961 - DNA, 855 bp, Unknown
  Obtained from environmental sample
  misc_feature (1)..(855): n is a, c, g, or t
ttgttaccaatgttacggaaaattatgaccgctcaggcgacggagttttcgattcaagttatgtatacngtattancgggcagaatacccttgagcctaacgcacagccccggttttgagggaacaataactctctcaggagccgacagacaggtggaagtgccgtattatacaactgacacagttaacgacattattacccgcattaacaattcaggcgcggaagttgtagcccgtcttaacagagaaggtaaaatttcgttaaaaggcacaactgcggaattaatcaacggacagagagttaaccctgattttgttatacgtcatgttgaagattccggtctcttccttgccgggtacgccggtttacttaatcaatcgggagcggaaggcgcttatgactggggacgcgccgacgcggtaacaagtcttaggggcgatacaaccgattacgcgcttgccccaatcgcgcacccgtccggctggatagaagttaacccaacattgctcagagacccgacaaatgtcgccgcaggtttcggcgaaaacggaagagtcgcgaatcccggaaacggagaagcggcggcggctatagcctcaatacggaataatccggtaatggtgggacgttttgcgacatttgacgattacttcgcgaactcggtgggaaaaatcgcgttaatgggcgaggaatcggaaagagcgctggctacggaaaatcagataatgaaatatttacgcgattggagacagtcaatttccggcgtaaatatggatgaagaacttgccaatatgcttaggtttcagcactggttacaacgccgcggcaaggtatatcacacagtctcgccataa

SEQ ID NO: 18962 - protein, 284 aa, Unknown
  Obtained from environmental sample
  DOMAIN (42)...(92): Flagellin hook IN motif
  misc_feature (1)..(284): Xaa is any amino acid
MLPMLRKIMTAQATEFSIQVMYTVLXGRIPLSLTHSPGFEGTITLSGADRQVEVPYYTTDTVNDIITRINNSGAEVVARLNREGKISLKGTTAELINGQRVNPDFVIRHVEDSGLFLAGYAGLLNQSGAEGAYDWGRADAVTSLRGDTTDYALAPIAHPSGWIEVNPTLLRDPTNVAAGFGENGRVANPGNGEAAAAIASIRNNPVMVGRFATFDDYFANSVGKIALMGEESERALATENQIMKYLRDWRQSISGVNMDEELANMLRFQHWLQRRGKVYHTVSP

SEQ ID NO: 18963 - DNA, 630 bp, Unknown
  Obtained from environmental sample
  misc_feature (1)..(630): n is a, c, g, or t
atggacagattggcacgagtatttttacccgacggcgttacggaagccgtaaactcaggcaaggaattattcggcgaagacagattaaaagacgcgcttaataaataccgttcttcttttcccaatgatttaatatataatattaaaaacgaagtaaaaaatttcgcaggcggaatggaacaggctgatgacatcgcgatgcttgccctgcgcataaacgagtataatcaaacggaaaggcaaatatcagttaacgccgaaataaaatgtttaaacagagtgctcaactttattacagccgaaataaagaaaaccggttatgagcatgagattcaaaataaaattgaaatggcgtctgaagaaatatttaccaatatcgcgaattatgcgtacgccgatgaaggcggaaaagtaaaaatcgccgtttccattatagacgggattaaaataacatttgaagataacggcagacctttcaatcctacagagtaccccgctcccgatttggaaaaacccctaaaagaccgcgagatcggcggactgggcttattcctagtcaagcaagtcatggataaagtagagtacacccgagaaaacgacaaaaatatactgataatcagcaaaaaatag

SEQ ID NO: 18964 - protein, 209 aa, Unknown
  Obtained from environmental sample
  misc_feature (1)..(209): Xaa is any amino acid
MDRLARVFLPDGVTEAVNSGKELFGEDRLKDALNKYRSSFPNDLIYNIKNEVKNFAGGMEQADDIAMLALRINEYNQTERQISVNAEIKCLNRVLNFITAEIKKTGYEHEIQNKIEMASEEIFTNIANYAYADEGGKVKIAVSIIDGIKITFEDNGRPFNPTEYPAPDLEKPLKDREIGGLGLFLVKQVMDKVEYTRENDKNILIISKK

SEQ ID NO: 18965 - DNA, 369 bp, Unknown
  Obtained from environmental sample
  misc_feature (1)..(369): n is a, c, g, or t
gtggggacaggcacttataagcacgatgacgcgggcggccggcgcgctcggaggggtatgtttatgggcggtttgcggttcataaaggttgagggtttgggcaacgacttcgtcatgttggactgcgccgacgtcgctcagtccgacgcggtgggctctcgggcggccgcgctgtgcgacccgcggcggggggtcggggccgaacgggttatctgcgtgctgccggcggcgtccggccgcggggcggattttcgtatgcggatttttcacgccgacggcgggcaagcggaaatgtgcggcaacggggtgcggtgtttcgggggaatatttgcgcctgaacggccgtccggggggaacggtttgtcataa

SEQ ID NO: 18966 - protein, 122 aa, Unknown
  Obtained from environmental sample
  DOMAIN (27)...(122): Diaminopimelate epimerase
  misc_feature (1)..(122): Xaa is any amino acid
MGTGTYKHDDAGGRRARRGMFMGGLRFIKVEGLGNDFVMLDCADVAQSDAVGSRAAALCDPRRGVGAERVICVLPAASGRGADFRMRIFHADGGQAEMCGNGVRCFGGIFAPERPSGGNGLS

SEQ ID NO: 18967 - DNA, 684 bp, Unknown
  Obtained from environmental sample
  misc_feature (1)..(684): n is a, c, g, or t
ttggaaacccttgcgaggaatttggggtacgctgatgtgcttcgctttaactggaagatggaaatggaaaaacttgacgcgattcaggattatttcaggccgcgcgctgtcaacgacatgaaggttcaccttgagatgggagattccggattggctgagcttatcttggataaatccgggaagcggttaaaatctgttccggcggcaatcaagaaagacgagtacgttaaggaaatcaacgaagtcaaggcatcgctgaaagcgcagttctcccgcgcccgcataagccttgaaaaagcgatggagaagcaggacacgttcagtttcgaggaagtcacggaactgtttcgccatcctgtaatcagcccaatcataaaaaagcttgtgttccgaagcgattgcgagttggggtttttgagggcgggtggattgacccgcgcggacggctcggaagtcgcgctcagaaagaacgctgtattgacgatcgcccactgtcatgacttgttcacactcggcaaatggttggattatcagcgttacgcgttcgataacgggctgattcagccgtttaagcaaattttcagggaattatacgccgtgaacgaggacgagaaatccgaaagaaccgtctcccgccgttacgcggggcatcagatccagccgaagaaaacagttgcgttgtaa

SEQ ID NO: 18968 - protein, 227 aa, Unknown
  Obtained from environmental sample
  misc_feature (1)..(227): Xaa is any amino acid
METLARNLGYADVLRFNWKMEMEKLDAIQDYFRPRAVNDMKVHLEMGDSGLAELILDKSGKRLKSVPAAIKKDEYVKEINEVKASLKAQFSRARISLEKAMEKQDTFSFEEVTELFRHPVISPIIKKLVFRSDCELGFLRAGGLTRADGSEVALRKNAVLTIAHCHDLFTLGKWLDYQRYAFDNGLIQPFKQIFRELYAVNEDEKSERTVSRRYAGHQIQPKKTVAL

SEQ ID NO: 18969 - DNA, 762 bp, Unknown
  Obtained from environmental sample
  misc_feature (1)..(762): n is a, c, g, or t
atgatcgcgagtactttcaaagtgggcgcggacgatacccgaaaaactcttaccgagcttgcgggtgaaaagaacgcggagaaaattcttgagtttatcggagcgaagggcggctttacggagacgcttgatcgcataacggaactgtccggcggcggctgtcctgaatcagagcggttggcatccctgcaccggtacatgatagaagccgccggctttaatgatgccgcgggggaaaacaaaaacgccgagccctttgtccttgacccttcgatcacgcgcggacttgattactacaccggcgtagtgtttgaaacgtttttaaacgagcttcccgatatcggctccatttgctcagggggacgctatgacaatctcgccggattgtactccaaggacaaggattcaataagcggggtgggttcttctatcgggcttgaccgtcttcttgccgcccttgaaagccttgataagctttccacagaaaataattgccgcgtcgccgtagcctgcgtagacgccgagaaatccgggcagtatcaggcgctggcgggaaaactgcggcaagaaggaatagcctgcgaagtttttaccgacaaaatcgatcttgttaaacaattcatactcgctgaaaaaaagggactgcgttatgtgataatacctggcgataatccgctaggcgataccattactctgcgcgaccttgccgaacggcgaaacgtagaagtgtctatcgaagaagctgtcttanaaattaaataa

SEQ ID NO: 18970 - protein, 253 aa, Unknown
  Obtained from environmental sample
  DOMAIN (166)...(253): Anticodon binding domain
  misc_feature (1)..(253): Xaa is any amino acid
MIASTFKVGADDTRKTLTELAGEKNAEKILEFIGAKGGFTETLDRITELSGGGCPESERLASLHRYMIEAAGFNDAAGENKNAEPFVLDPSITRGLDYYTGVVFETFLNELPDIGSICSGGRYDNLAGLYSKDKDSISGVGSSIGLDRLLAALESLDKLSTENNCRVAVACVDAEKSGQYQALAGKLRQEGIACEVFTDKIDLVKQFILAEKKGLRYVIIPGDNPLGDTITLRDLAERRNVEVSIEEAVLXIK

SEQ ID NO: 18971 - DNA, 453 bp, Unknown
  Obtained from environmental sample
  misc_feature (1)..(453): n is a, c, g, or t
atgatactgaaccttgaacatagaaaaactcacaaggatattgaaatatcaattatctaccctgaaaaaaataaaaccattgaaaggcttgtctcatttgtcaattcactcagtattaaaatagagggttatgcggaggaggggataaaacagataaacgtgccggatatttattatatagaaagtgaagacaagatttcggtaattttctgtgaaaaagaatattacagaacaaaataccgcttgtatcagattagtgaaaaattaaccggattgggttttgtccagatcagcaaatattgcctgataaatataaataaacttgatagaataataccactgtccaacaggcgcatggaagcgatattaaaaaacggaaaacgtgtttttattaccagaaaatatctttatgatataaaaaaaatattacaggagaatcttgatgaaaaatga

SEQ ID NO: 18972 - protein, 150 aa, Unknown
  Obtained from environmental sample
  DOMAIN (47)...(144): LytTr DNA-binding domain
  misc_feature (1)..(150): Xaa is any amino acid
MILNLEHRKTHKDIEISIIYPEKNKTIERLVSFVNSLSIKIEGYAEEGIKQINVPDIYYIESEDKISVIFCEKEYYRTKYRLYQISEKLTGLGFVQISKYCLININKLDRIIPLSNRRMEAILKNGKRVFITRKYLYDIKKILQENLDEK

SEQ ID NO: 18973 - DNA, 714 bp, Unknown
  Obtained from environmental sample
  misc_feature (1)..(714): n is a, c, g, or t
ttgcatagaagcgagttgcattactacgagggctgcggcgtatacaccagaactttccggtattttcctcaaacacggggcgagcgtttgctgctccgctttgagggagcctcttacaggacgacagtttttctgaacggaaaaataatcggaacgcatgacggcgcgtccactccgtttaacgcggacattacggacattgtcagaaaagataaccggatagttgtgtcagttgacgcaagccgcagtcccgtccgtgtccccatgcacaatacggactggtttaattatggcggcatttaccgtgacatttatcttgtccgccttcctcccatatatatcaaagactggtttgtgcggcttgcgcctgacgaaaatttttcaacggttttggctgatgtttatttggcgggcgcggacggaacgcaagaagtacgcatggaaatccccgaactgggaatatgtcaggatattcccgttgaaaacggaagaggggaagtgtcagtttctgtcaagcctgaattgtggagtcctgaaaatccaaaactgtatgatgttatttttacatataacgcgggatcgtgtattgatacgacaagggatcgtatcgggtttaggacgattagcgtaaaggggcaggaaatattccttaacggtaagaagatattcttaagctggtgtttgcgttcacgaagatcactttgcgtcaggtaa

SEQ ID NO: 18974 - protein, 237 aa, Unknown
  Obtained from environmental sample
  DOMAIN (112)...(206): Glycosyl hydrolases family 2, immunoglobulin-like beta-sandwich domain
  misc_feature (1)..(237): Xaa is any amino acid
MHRSELHYYEGCGVYTRTFRYFPQTRGERLLLRFEGASYRTTVFLNGKIIGTHDGASTPFNADITDIVRKDNRIVVSVDASRSPVRVPMHNTDWFNYGGIYRDIYLVRLPPIYIKDWFVRLAPDENFSTVLADVYLAGADGTQEVRMEIPELGICQDIPVENGRGEVSVSVKPELWSPENPKLYDVIFTYNAGSCIDTTRDRIGFRTISVKGQEIFLNGKKIFLSWCLRSRRSLCVR

SEQ ID NO: 18975 - DNA, 456 bp, Unknown
  Obtained from environmental sample
  misc_feature (1)..(456): n is a, c, g, or t
atgatactgaacaacgactacagagacatattacacgcctngtcagaaagaaaagttaagttcattctgataggcgcttatgcaatggcggcccatggatacccgcgttcaaccatggatatagatctatggatcatgcccgagaaagaaaatgccggtttggttctccgggctcttgaggatttcggggcgcctataggcgatctgtccattgatgatttacaaaaggaagatattgttttccagattggcgtcgctccacggcggattgatattcttacatctgttgacggtgtaaagtttgaggatgccttttcacattcagaaatagtcgatattgacggtatccctgttcatattatgtcgattcctgatttaataataaacaaacgttctactggaaggctcaaggatttagctgatgtggaaactctggaaagccctaatcatatatag

SEQ ID NO: 18976 - protein, 151 aa, Unknown
  Obtained from environmental sample
  misc_feature (1)..(151): Xaa is any amino acid
MILNNDYRDILHAXSERKVKFILIGAYAMAAHGYPRSTMDIDLWIMPEKENAGLVLRALEDFGAPIGDLSIDDLQKEDIVFQIGVAPRRIDILTSVDGVKFEDAFSHSEIVDIDGIPVHIMSIPDLIINKRSTGRLKDLADVETLESPNHI

SEQ ID NO: 18977 - DNA, 639 bp, Unknown
  Obtained from environmental sample
  misc_feature (1)..(639): n is a, c, g, or t
atgccaaagacacgaacacccaaccaagacctccaaggtcccgccaagggcatcggcgccgaacctagtgctaccgctgtagtgcatgacgcgcccgatgcggctacggatgccccgcagatggggctgtcgcccgatgatctcagggccgccattcaagacaacacattccacagggatcaggcgcgcccagaatggctggtgaacatgctggtcgaccatcgcctctggtgccagaccgatgggcgggatggccgtcaggccgagctaacactcatacaggaaggtcaaacctttgagggcgcagacctgtacgaagttgtcctctcacgggcatggctggagggcgcgaagatgtccagagccaatttgcatagtgcggggctttttgaagtgaacctgaaaaacgccgtcctacagagcgcanaactgtacggcgcacacatggagtgggcagagttggctggtgcggacttgagggatgcagacctgcgcaatgcagacttggacatggcaaatcttcaggggacgaaactcaaaggtgncaaccttatgaaagcgcgtctcataagggcaaactgtgcgccaagcgggttgaacccgaatgcagtagtaacagacctgtctgaagccatctga

SEQ ID NO: 18978 - protein, 212 aa, Unknown
  Obtained from environmental sample
  DOMAIN (102)...(141): Pentapeptide repeats (8 copies)
  misc_feature (1)..(212): Xaa is any amino acid
MPKTRTPNQDLQGPAKGIGAEPSATAVVHDAPDAATDAPQMGLSPDDLRAAIQDNTFHRDQARPEWLVNMLVDHRLWCQTDGRDGRQAELTLIQEGQTFEGADLYEVVLSRAWLEGAKMSRANLHSAGLFEVNLKNAVLQSAXLYGAHMEWAELAGADLRDADLRNADLDMANLQGTKLKGXNLMKARLIRANCAPSGLNPNAVVTDLSEAI

SEQ ID NO: 18979 - DNA, 567 bp, Unknown
  Obtained from environmental sample
  misc_feature (1)..(567): n is a, c, g, or t
atggaaaaatacctaattattatacaaaaatatataaagaaactggacacagaagttgaaaaattcataaggtcgggaaagtatataaagtgtttgatattgattgttgttatagggattgtaataataataatggcaattaaagatataatatccacaaaaaaatacgactctatttcgtacggcagccgaatatataaaaccgttgtcataggtacccaaacttggatggcagagaatttgaattacgaagcaagcggttcaagatgttatgataacgaattccgaaactgctacaaatacggcagattatatacttgggaaacagccaaaaaaatttgccccgaaggttggcatttgcctacaaattccgactgggataagttggtgtctagcanaccagctggcaaatatttaaaagctactagtgattgggatgaaaatggcaatggtacggataagttcggctttgcagcattgccggggcggtgttggcagcccagacggcagatttttcaatataaactggagcggttattggtggagtgncacggaatttcaatgtga

SEQ ID NO: 18980 - protein, 188 aa, Unknown
  Obtained from environmental sample
  misc_feature (1)..(188): Xaa is any amino acid
MEKYLIIIQKYIKKLDTEVEKFIRSGKYIKCLILIVVIGIVIIIMAIKDIISTKKYDSISYGSRIYKTVVIGTQTWMAENLNYEASGSRCYDNEFRNCYKYGRLYTWETAKKICPEGWHLPTNSDWDKLVSSXPAGKYLKATSDWDENGNGTDKFGFAALPGRCWQPRRQIFQYKLERLLVEXHGISM

SEQ ID NO: 18981 - DNA, 801 bp, Unknown
  Obtained from environmental sample
  misc_feature (1)..(801): n is a, c, g, or t
gtgaacgcggtgacgggcgtttctttgccctggccgagacccgcatcacccggctttgtggcccccaacggcgccggtaagaccacgaccatcaagatggccatggccctggtgcgcccgagcgccggacgcataacgctcatgggcaaggacgccaaccttcntgcgtcgcgcggcggcgtagcctacgtctccgagcagccgtacttctacaagcacctctccgtaggcgagacaattgatttctcggcgcgattggtgggcataaagcgccactccatagacgcggagcgcaagcgggtgctagacgccgtggagcttaccggtcgcgaaacttctaaggtgcgcaacctctccaaaggtctgcagcaacgcttgaacatggcctgcggcctcttgggagacccaaagctgctgatcctagacgagccgatgagcggcctggacccgccgtcgcgccgcctcttcaggaacctgttcaaagccttgggcgacgagggccgtacaatcttcttcagcacccacgtcctggaagacatagagacggtctgccgagacgtagtagtcctagagggcggaaagttacgcctaaccggcagcgtagcgtcgctgttagacaagggaacgcttggaacggagttgactgtccaatcgttaccggataatttatccaatgaattacggaatgaaggcatagaaatttcgcaattgccggacggcggcgtaacaatatttatcccggtaaaaatggacgccgaggcgtaccaacgcaaattgtatgaaaacnggcgtattctgtaa

SEQ ID NO: 18982 - protein, 266 aa, Unknown
  Obtained from environmental sample
  DOMAIN (18)...(193): ABC transporter
  misc_feature (1)..(266): Xaa is any amino acid
MNAVTGVSLPWPRPASPGFVAPNGAGKTTTIKMAMALVRPSAGRITLMGKDANLXASRGGVAYVSEQPYFYKHLSVGETIDFSARLVGIKRHSIDAERKRVLDAVELTGRETSKVRNLSKGLQQRLNMACGLLGDPKLLILDEPMSGLDPPSRRLFRNLFKALGDEGRTIFFSTHVLEDIETVCRDVVVLEGGKLRLTGSVASLLDKGTLGTELTVQSLPDNLSNELRNEGIEISQLPDGGVTIFIPVKMDAEAYQRKLYENXRIL

SEQ ID NO: 18983 - DNA, 831 bp, Unknown
  Obtained from environmental sample
  misc_feature (1)..(831): n is a, c, g, or t
atgggcggatgcgccattgacgcgaccggcgtaccgctgccgcaggaaacgatagacatatgcctgaaatccgacagtgtgctgttaggagcggtcggcgggccaaaatgggatacactgccagggaatctgcgccctgaagcgggactgctgggcattcgttccgctatgggtttatatgccaatatccgtcccgcggttcttttcaagccgcttaaaaaagcctgccccttacgcgccgatattgcggacaggggctttgacatggtgtttgtacgggagttgacgggcggcatttattttggcgagcgcggcaggcgtagcggaaaaaacggcgaggaagcctttgacaccgagtgttacagtgaaatggagatacggcgcattgccaaagtcgcttttgaaacggcaatgaccagaagaaaaaaactgatcagcatcgacaaggctaacgtgctggaaagcagccgcctatggcgcgagaccgtacacaaaatggcgggtgaatacccgcaggttgaagtcagcgatatgctggttgataacgccgccatgcagttggtaaaagacccgtcgcagtttgacgtggtggttaccagcaatatgtttggcgatattctgtccgatgaatcggcgatgataaccggctcaatcggtatgctggcatccgcttcattcggtgattccaagcgggggctgtacgaaccgatccacggcagcgcgcctgacatcgccgggcaggacaaggcaaatccggtcgcgacaatattgtccgccgcgatgatgctcaagtattcgtttggtttgcagaaagagtgtacngcgatttga

SEQ ID NO: 18984 - protein, 276 aa, Unknown
  Obtained from environmental sample
  DOMAIN (1)...(276): Isocitrate/isopropylmalate dehydrogenase
  misc_feature (1)..(276): Xaa is any amino acid
MGGCAIDATGVPLPQETIDICLKSDSVLLGAVGGPKWDTLPGNLRPEAGLLGIRSAMGLYANIRPAVLFKPLKKACPLRADIADRGFDMVFVRELTGGIYFGERGRRSGKNGEEAFDTECYSEMEIRRIAKVAFETAMTRRKKLISIDKANVLESSRLWRETVHKMAGEYPQVEVSDMLVDNAAMQLVKDPSQFDVVVTSNMFGDILSDESAMITGSIGMLASASFGDSKRGLYEPIHGSAPDIAGQDKANPVATILSAAMMLKYSFGLQKECTAI

SEQ ID NO: 18985 - DNA, 501 bp, Unknown
  Obtained from environmental sample
  misc_feature (1)..(501): n is a, c, g, or t
gtggcaaatttctgccttatcctttttgactttctgacccgggaacacggcatgaaccgccggcatcggatgatgctggaagtggcggctatgcttcacgacattggaatgtttatccggtcttcaagccaccacatacatggtcattatattgtgtccaacgcggaaatattcggcctccacaaggaggaactggatataatcgccggggtgatccgctatcaccgaagggaccttcctaaccctgccgatataagctacattgcccttcaaagggaggataggatcctgttgtcaaaaatggccgctattttacgggtagccgacgcgttggataagggacattctcagcagattaaaagcattactgcggaacggaaaagtgaaaccttgattcttcataccacgggcagccgggacctttccctggaactcatcgggcttgaagaaaaggccaacctgtttcaagatgtgtttggatataaagtagttatagattaa

SEQ ID NO: 18986 - protein, 166 aa, Unknown
  Obtained from environmental sample
  DOMAIN (13)...(114): HD domain
  misc_feature (1)..(166): Xaa is any amino acid
MANFCLILFDFLTREHGMNRRHRMMLEVAAMLHDIGMFIRSSSHHIHGHYIVSNAEIFGLHKEELDIIAGVIRYHRRDLPNPADISYIALQREDRILLSKMAAILRVADALDKGHSQQIKSITAERKSETLILHTTGSRDLSLELIGLEEKANLFQDVFGYKVVID

SEQ ID NO: 18987 - DNA, 504 bp, Unknown
  Obtained from environmental sample
  misc_feature (1)..(504): n is a, c, g, or t
ttgtcggtaaccgacgagcttacaaaaataagcaacaagcgttcgtttttggaatatatgaatttgatatgggagcattgccagggtttgcgcctgcaattaagcgccgtaatgattgacgttgacaacttcaagaaatacaacgattcccttgggcatttggaaggagacaaggcgctgctcgccatagcgcaatgcctgaaaaaccaattaaaaagggaaactgattttgtcgccagatttggcggcgaagagtttgtgtgcctgcttccgtttattgaaaagaacgaggcccttgcttttgcatcgacattggtacaaagcgttgaaaacatgaaaatccctcatcctggcaacgaacattcaaaatacctgacaatcagcgctggaatggcccatatagtcccgaatgatgacaattcttctgcccagctattggatttagcggatagggcgctgtatgcggcaaaaaaaacaggaaggaacagggtcgtagtgaattga

SEQ ID NO: 18988 - protein, 167 aa, Unknown
  Obtained from environmental sample
  DOMAIN (1)...(163): GGDEF domain
  misc_feature (1)..(167): Xaa is any amino acid
MSVTDELTKISNKRSFLEYMNLIWEHCQGLRLQLSAVMIDVDNFKKYNDSLGHLEGDKALLAIAQCLKNQLKRETDFVARFGGEEFVCLLPFIEKNEALAFASTLVQSVENMKIPHPGNEHSKYLTISAGMAHIVPNDDNSSAQLLDLADRALYAAKKTGRNRVVVN

SEQ ID NO: 18989 - DNA, 585 bp, Unknown
  Obtained from environmental sample
  misc_feature (1)..(585): n is a, c, g, or t
atggaaaacatctccagccagacgaatcttctttcaatgaacgcggctatagaggccgcccacgcgggagaagcggggaaaggttttgccgtagttgccggagagatacgcaaactggcggaaagttccacccaacagtcaaaaaccatttcagacgtattgaagagaattaaaagcgccattgacaccattaccggttcgacaaatgcggctttggaaaaatttcaggctgttgacgaacaggtacgctctgtctcggaacaggaaaccaacatccacaacgcgatggaagagcaaacccagggcagccggcaaatactcgaagcggtaagcaggcttaacgaactgactcaaatggttaaacaaggttctgaagaaatgctggaaggcagcaaagaggttattcatgaaagcagaaatcttgaaaaggcgacagtggaaatttctagcggcatgaatgaaatggcaataggcgcgggcgagataaattctgcggtcaatcaggtggaagagataagccggacaaacaaaaacagcatcgacaccctgttcaacgaagtcttaaagtttagagtaggcgaatga

SEQ ID NO: 18990 - protein, 194 aa, Unknown
  Obtained from environmental sample
  DOMAIN (1)...(149): Methyl-accepting chemotaxis protein (MCP) signaling domain
  misc_feature (1)..(194): Xaa is any amino acid
MENISSQTNLLSMNAAIEAAHAGEAGKGFAVVAGEIRKLAESSTQQSKTISDVLKRIKSAIDTITGSTNAALEKFQAVDEQVRSVSEQETNIHNAMEEQTQGSRQILEAVSRLNELTQMVKQGSEEMLEGSKEVIHESRNLEKATVEISSGMNEMAIGAGEINSAVNQVEEISRTNKNSIDTLFNEVLKFRVGE

SEQ ID NO: 18991 - DNA, 852 bp, Unknown
  Obtained from environmental sample
  misc_feature (1)..(852): n is a, c, g, or t
atgcgtagggtcctcgacccccgtattcctacaataaggcggagaattatgatcttccgtaagaaaatagacgatgcgctcaacgagttcagccagaacgtcaaaccggtttcgctctaccgcgacgcgtggaaccgcctaaaaaagaataaaatggccatgataggaatagtcgtggtctcgatatattttattatctccctgttggtgccgcttttgcctttttataattacgcgcagcaggagatgagtcatattaatatgccgccttcttttaagcctgccggtgaagtcatgattcgcacgagagaggcttatctggcaaagcttatggccaaggagaagcgcaccgagtacacagccgttgaaaaggaacaactccaaactatgcggcgcgaagccgaaaccaatccggtaaataaaaaggtttacatcttcggtactgatgttcttgggcgcgatcttttaacgcgtgtaatatacgggggccgcatatcaataggcattgggatagtcggtactcttaccgcgatgctctttgggactttttacggcgcaatagcgggctttattggcggcaaaatagacaatgtcatgatgaggatagtagacgtgatttacagcctgccttaccttatgctggtcatagtactgatggccctgtttggcggcaagagtatcttccacctgtatctcgctatcgtgatgatttcgtggctgaatcttgccagggtagtccggggccaggtaatgtcgctgaaaaattcggagtttatcgaggcggcaagatcagccggcgcnagaacgtggcgtattattggaagcacctgcttcccaacgttgtcgggataa

SEQ ID NO: 18992 - protein, 283 aa, Unknown
  Obtained from environmental sample
  misc_feature (1)..(283): Xaa is any amino acid
MRRVLDPRIPTIRRRIMIFRKKIDDALNEFSQNVKPVSLYRDAWNRLKKNKMAMIGIVVVSIYFIISLLVPLLPFYNYAQQEMSHINMPPSFKPAGEVMIRTREAYLAKLMAKEKRTEYTAVEKEQLQTMRREAETNPVNKKVYIFGTDVLGRDLLTRVIYGGRISIGIGIVGTLTAMLFGTFYGAIAGFIGGKIDNVMMRIVDVIYSLPYLMLVIVLMALFGGKSIFHLYLAIVMISWLNLARVVRGQVMSLKNSEFIEAARSAGARTWRIIGSTCFPTLSG

SEQ ID NO: 18993 - DNA, 894 bp, Unknown
  Obtained from environmental sample
  misc_feature (1)..(894): n is a, c, g, or t
ttgatcgcgagacagcttcatttcagcgtgtatggggcgacagcggctctaagccgctttgataaccaaggcaacgaaattcgtccgcgtcaggtagaattgcccggctgggaaagcgcatggttcagggatccgcttggttatataaccgagccttatgttttttattttaaaacaggtgaaaatacgatcaggtttgtcggaataaatgaaccaatggcaattcgcggtctttcgttgaaaacgcctttcgaaacgcagacttaccgtcagtttatggcaaaattggatcaaagtaagtacaaaaacactctcggtaatttccagttgaagattcagggtgaaagggctgtacgccgttcagatccctccttatatgcaatttatgatcgttcttcgggagcgacagaacctgccagcgtttctaaaatccggcttaatatgattggcggtgacagctggcgtgtggcaggacaatggattgaatgggaattcgatgtgcctgaaagcggcttgtaccgtatttcaatcaagggacggcagaattataaccgcggctttgtatcaaaccgttcaattcttattaatggtgaaataccgtgcaaagagcttgctgccgtttcgtttaaatataacaacaaatggaaactgactacgctaagcgacagtcagggagaaattttaatccctcttaacaaaggcacaaatactatccgtcttcaagcgacgcttggcgatatgggtgggatgttaaaatgtatggaagaaagcgtgtaccgtctgaatgcgatttaccggaagatacttgttcttacaggaccgggaacggatatataccgcgattaccgcgttgatgcggtttatcctgaaggtattgnaagctatgaaaactga

SEQ ID NO: 18994 - protein, 297 aa, Unknown
  Obtained from environmental sample
  misc_feature (1)..(297): Xaa is any amino acid
MIARQLHFSVYGATAALSRFDNQGNEIRPRQVELPGWESAWFRDPLGYITEPYVFYFKTGENTIRFVGINEPMAIRGLSLKTPFETQTYRQFMAKLDQSKYKNTLGNFQLKIQGERAVRRSDPSLYAIYDRSSGATEPASVSKIRLNMIGGDSWRVAGQWIEWEFDVPESGLYRISIKGRQNYNRGFVSNRSILINGEIPCKELAAVSFKYNNKWKLTTLSDSQGEILIPLNKGTNTIRLQATLGDMGGMLKCMEESVYRLNAIYRKILVLTGPGTDIYRDYRVDAVYPEGIXSYEN

SEQ ID NO: 18995 - DNA, 444 bp, Unknown
  Obtained from environmental sample
  misc_feature (1)..(444): n is a, c, g, or t
ttggcaaaagcgaatattttgtgcggattgcagaaattttcggaaaacaaattgcaggttaggcaaagctccccaagatttatggtttttgacacttccctaatgacatattcttacggcacatccaaaaaaagccttttggaaaatcaaaccgctaaagggcatttggtagaaagcgcagttggagcctatttgctcgcaaaagcaagagaagaaaattttgaggtatattggtggcgagacagagataaagaagttgattttgtgctgaaaaaaggcaaaagcataatggctttggaagtaaaaagcggaagggttaagcatataggcggttatttggatttcaagaaaaaatatccccaagctagatgtttggttataggcgattcaaattgcagtttagaggattttttgttggggaaagagcttttctatattccataa

SEQ ID NO: 18996 - protein, 147 aa, Unknown
  Obtained from environmental sample
  misc_feature (1)..(147): Xaa is any amino acid
MAKANILCGLQKFSENKLQVRQSSPRFMVFDTSLMTYSYGTSKKSLLENQTAKGHLVESAVGAYLLAKAREENFEVYWWRDRDKEVDFVLKKGKSIMALEVKSGRVKHIGGYLDFKKKYPQARCLVIGDSNCSLEDFLLGKELFYIP

SEQ ID NO: 18997 - DNA, 504 bp, Unknown
  Obtained from environmental sample
  misc_feature (1)..(504): n is a, c, g, or t
atgggtaatgcgtcgctggctttccagcatctttgcttcggattccaaatcagggtagccgatccccagggaaagaagaaagcggtccttctgcgcttcgggcagagggaaggttccctcatattcaactggattttcagttgccatcacaaagaaaggctcaggcaggggcatgcagtttccatctaccgtgatctgcccctcggccatggcttcaaggagggccgactgggtgcggggcgttgcccggttgatttcatccaccagaataaactggtttaccactggcccagggcggtacacgaaacggccttcattcgcccgccagaccgaaactcccaatatgtccgcgggcaggagatccggcgtgcattgaatccgggcgaaactcaggcccatactggcggcaaaagcacgggcaaggatggtcttgcccgtacccggcacgtcttccagaagcagatggcccctggcaaaaaagngctgccagtatcttttcgatga

SEQ ID NO: 18998 - protein, 167 aa, Unknown
  Obtained from environmental sample
  misc_feature (1)..(167): Xaa is any amino acid
MGNASLAFQHLCFGFQIRVADPQGKKKAVLLRFGQREGSLIFNWIFSCHHKERLRQGHAVSIYRDLPLGHGFKEGRLGAGRCPVDFIHQNKLVYHWPRAVHETAFIRPPDRNSQYVRGQEIRRALNPGETQAHTGGKSTGKDGLARTRHVFQKQMAPGKKXLPVSFR

SEQ ID NO: 18999 - DNA, 510 bp, Unknown
  Obtained from environmental sample
  misc_feature (1)..(510): n is a, c, g, or t
ttgcaggaaatgcggggaggcgctgtaatggctgctagtaagggcgaagctaaaagcgttttaaaagattatgaaccccggctgaaaaaaatctaccgggaacaaattgcccctgagctgataaaggaattcggctacaagacgcccatgcagactccaaaacttgaaaaaataatagtgagcatgggcgtaggcgaggcgcttcagaataaaaaactgctggatgcggccattgatgaccttacgctgataacagggcagaaagcggtaaaaacgaaagcgcgcaagagcattgcgaatttcaaaatcagggccggccaggaaatcggcgcgaaagttaccctccggggcgccatgatgtacgagttttttgacaggcttgtgaatgtcgcgcttccccgtgttaaggactttcgcgggatcaatcaaaacgctttcgatgggcacgggaattattcattggggcttactgaacagatcatctttccggagatcgatttgacaaaatga

SEQ ID NO: 19000 - protein, 169 aa, Unknown
  Obtained from environmental sample
  DOMAIN (108)...(169): ribosomal L5P family C-terminus
  misc_feature (1)..(169): Xaa is any amino acid
MQEMRGGAVMAASKGEAKSVLKDYEPRLKKIYREQIAPELIKEFGYKTPMQTPKLEKIIVSMGVGEALQNKKLLDAAIDDLTLITGQKAVKTKARKSIANFKIRAGQEIGAKVTLRGAMMYEFFDRLVNVALPRVKDFRGINQNAFDGHGNYSLGLTEQIIFPEIDLTK

SEQ ID NO: 19001 - DNA, 339 bp, Unknown
  Obtained from environmental sample
  misc_feature (1)..(339): n is a, c, g, or t
atggttgaagcagtccataaattcaaactgaaaaaggatgactctgtccagattatcgccggcaaggataagggtaagcggggacgcattttaaagattttccatgacacagaccgcgtggtagtagaaggcgcaaatatcgtaaaaaaggcgaagaagcgccggaaccagcaggacaggggcggaatcattgaagttgaggcggctgttcattcgtctaatgtggccatagtttgtaaaaaatgcggaccgacccggattggatacaaaattgagggagccgaaggttccagaaaaaataaaacaagaatttgcaggaaatgcggggaggcgctgtaa

SEQ ID NO: 19002 - protein, 112 aa, Unknown
  Obtained from environmental sample
  DOMAIN (10)...(43): KOW motif
  misc_feature (1)..(112): Xaa is any amino acid
MVEAVHKFKLKKDDSVQIIAGKDKGKRGRILKIFHDTDRVVVEGANIVKKAKKRRNQQDRGGIIEVEAAVHSSNVAIVCKKCGPTRIGYKIEGAEGSRKNKTRICRKCGEAL

SEQ ID NO: 19003 - DNA, 372 bp, Unknown
  Obtained from environmental sample
  misc_feature (1)..(372): n is a, c, g, or t
ttggcgcgctcaagtttcaggcgggctatgaagcaggctattaccaacgcaataaaaaaaggcaatgcccagggagtaaagattcgcctttccggtcggctgggcggcgccgaaatgtcacgcacggaagaagccaaagaggggcgcataccgctgcataccctccgcgcagatatagattttggttttgccgaagcccacaccacctttggttccatcggtgtaaaggtctgggtatacaacggcatgaagtacgggaaagaacaaaaggaagacgctggagcattgctccgcaaaaggcgggaacggcctccttcccatggaaatgagaaccgaagaagcgaaggttctagaaccgagggccggttttag

SEQ ID NO: 19004 - protein, 123 aa, Unknown
  Obtained from environmental sample
  DOMAIN (2)...(79): Ribosomal protein S3, C-terminal domain
  misc_feature (1)..(123): Xaa is any amino acid
MARSSFRRAMKQAITNAIKKGNAQGVKIRLSGRLGGAEMSRTEEAKEGRIPLHTLRADIDFGFAEAHTTFGSIGVKVWVYNGMKYGKEQKEDAGALLRKRRERPPSHGNENRRSEGSRTEGRF

SEQ ID NO: 19005 - DNA, 573 bp, Unknown
  Obtained from environmental sample
  misc_feature (1)..(573): n is a, c, g, or t
gtggcgggcgcttcgggcttttcccaaatagccaacatgggcgaagaagacagaagagattttatctcggagcttgattcgttatcaaacgcggacataatcatcattgacacaagcgcgggcgtttccagtaatgttttagattttatcgccgccgcggatgacgccgttattatcactaccccggaaccgaccgcgattaccgacgcttacggtataattaaaattatcgccaccgagtatgactcggttaatatgggtttgaaacttgtggtaaaccgcgcgaaaggcgcggctcaggcgaaaagcgtcgccgacaggatgattaatatcgcgggccagtttttaaacttaaaacttgattatctgggattcatttatgacgacgtgtcagtctcccatgccgtacttaggcaaaaaccttttatggtggtggatccaaagtgcaaggcgagtatctgcgttcaacatatcgtggaacgcatggacaggaataaaccgggagaaaccggaggttttggagcaatgtttaaaagactttttaagtcttcgcagaatgaaactgtagtataa

SEQ ID NO: 19006 - protein, 190 aa, Unknown
  Obtained from environmental sample
  DOMAIN (4)...(134): CobQ/CobB/MinD/ParA nucleotide binding domain
  misc_feature (1)..(190): Xaa is any amino acid
MAGASGFSQIANMGEEDRRDFISELDSLSNADIIIIDTSAGVSSNVLDFIAAADDAVIITTPEPTAITDAYGIIKIIATEYDSVNMGLKLVVNRAKGAAQAKSVADRMINIAGQFLNLKLDYLGFIYDDVSVSHAVLRQKPFMVVDPKCKASICVQHIVERMDRNKPGETGGFGAMFKRLFKSSQNETVV

SEQ ID NO: 19007 - DNA, 813 bp, Unknown
  Obtained from environmental sample
  misc_feature (1)..(813): n is a, c, g, or t
atgggtagatcatactacatagcgggaaactggaagatgcacaaaacccgcgccgaggccgctgagcttgccaaggcgctggtcgcacagttaaaagacgggaagcacaaataccttgtagcgccgtcttttaccagccttgaaactgtgggcgccattgtcaaaggcaccaatataaggcttggggcgcaggactgcgcgtttgaagagcagggcgcacataccggcgaggtttctgtcctgcagttaaaagaccttggcgtgcagaccataatcctgggccacagcgaaaggcgccatgtctataaggaagacgacgcgcttatcaataaaaaagtgaagctggccctgaaacatggctttgaagtaattctctgcattggggaactgctggaagaacgcgaagccggcaaggttgaaactgtctgcgaatcccagaccgtgaaaggccttgagggcgtcagcgcggctgatttggcgaatgtcgtcattgcctacgagccggtctgggccattggcaccggaaagaccgcaacgccggatgacgcggaagcggttcatgcctttgtccgcaaggtgattgcgaagctctacggacagcctgccgcggataaaatcatcatacagtacggcggttcggttaaaccggacaacgccgcccagttgatgggcaaagagaacatcgaccgcgcccttgtcggcngcgcggctcttaagccgatacattcgttcctatcgctaagtttatttaggacgaagggaccaaattacaaatatccgggtaacaaattacaaggaagaaggagaaaatag

SEQ ID NO: 19008 - protein, 270 aa, Unknown
  Obtained from environmental sample
  DOMAIN (5)...(248): Triosephosphate isomerase
  misc_feature (1)..(270): Xaa is any amino acid
MGRSYYIAGNWKMHKTRAEAAELAKALVAQLKDGKHKYLVAPSFTSLETVGAIVKGTNIRLGAQDCAFEEQGAHTGEVSVLQLKDLGVQTIILGHSERRHVYKEDDALINKKVKLALKHGFEVILCIGELLEEREAGKVETVCESQTVKGLEGVSAADLANVVIAYEPVWAIGTGKTATPDDAEAVHAFVRKVIAKLYGQPAADKIIIQYGGSVKPDNAAQLMGKENIDRALVGXAALKPIHSFLSLSLFRTKGPNYKYPGNKLQGRRRK

SEQ ID NO: 19009 - DNA, 375 bp, Unknown
  Obtained from environmental sample
  misc_feature (1)..(375): n is a, c, g, or t
ttgcttgcgatgggaaacagcgacgtacccgtcgggcagtatacgcaaaggattttaaagttcttcaatcttgatgaaaaggcgctggcaaacagcggaaagatcacctacggcacgaatgtaaaggaagttaccacgcagattgcggcatccagcgtaagctgcggagtcgtgtactgcactgacgctttcagtgccgggctggaaatcgtggattacgccactgttgagatgtgcggacaggttatttaccccgcatctgttatgaaatcaggcaaaaacccggacgcggctgctgcttttctggaataccttacaacagacgaggcgttagctgtttttgaaaaagtcggtttcactgcggcctggaggtga

SEQ ID NO: 19010 - protein, 124 aa, Unknown
  Obtained from environmental sample
  misc_feature (1)..(124): Xaa is any amino acid
MLAMGNSDVPVGQYTQRILKFFNLDEKALANSGKITYGTNVKEVTTQIAASSVSCGVVYCTDAFSAGLEIVDYATVEMCGQVIYPASVMKSGKNPDAAAAFLEYLTTDEALAVFEKVGFTAAWR

SEQ ID NO: 19011 - DNA, 525 bp, Unknown
  Obtained from environmental sample
  misc_feature (1)..(525): n is a, c, g, or t
ttgtcccagaaagatattaataaagcaatagttgatatttccaaaaaaaccgatattccccttgtagcgacaaatgacgttcattatttggacaaggacgattatatttcgcatgacattcttctttgtatcggaaccggaaaggtacgcactgaggaaagacgaaaaaaatattacggggatcagttttattttaagacaggcgacgaaatggcggaaattttcgccgagtatccgcaggcgattgaaaatactgtaaaaatcgcgcggcgctgtaacacggacgttccaaaaatagagaccaaagaattgccgcagtatcttcctgaatttgaaattcctgaaggctttaaggaagcgggtgagtatttaaggcatctaacagccgaaggacttgtcaagcgttacgcgaaaataaaagaaagcgacctaaacaaatgggaagaaataaagaaaagggcggattatgaactggatacgataatcgacatgggtataccggatatttttgatgtatgggattaa

SEQ ID NO: 19012 - protein, 174 aa, Unknown
  Obtained from environmental sample
  misc_feature (1)..(174): Xaa is any amino acid
MSQKDINKAIVDISKKTDIPLVATNDVHYLDKDDYISHDILLCIGTGKVRTEERRKKYYGDQFYFKTGDEMAEIFAEYPQAIENTVKIARRCNTDVPKIETKELPQYLPEFEIPEGFKEAGEYLRHLTAEGLVKRYAKIKESDLNKWEEIKKRADYELDTIIDMGIPDIFDVWD

SEQ ID NO: 19013 - DNA, 378 bp, Unknown
  Obtained from environmental sample
  misc_feature (1)..(378): n is a, c, g, or t
atgaccggccacctgggcccatcgggtggttcgagggaagggatccctcccgccccggtaaagaaaacattcggaccgggccttgatatactcttccatgccaaactctccgccgaaacagaaaacattttccacccagccgtcttcaattgccggaatcagggtggggtggggattcaggataaagtgcgaggcaaccttgcccttcagccccaactctttgccgtatgtcggcagcagcaattcaatcgcggcggtatcaaagccgataccgtgattaagccgcctgactccgtactcggcgtaaatccccttgatggcgatcattgcccgcagtatgtgcgcgttggttatcagggcgggatccctggtgaatag

SEQ ID NO: 19014 - protein, 125 aa, Unknown
  Obtained from environmental sample
  misc_feature (1)..(125): Xaa is any amino acid
MTGHLGPSGGSREGIPPAPVKKTFGPGLDILFHAKLSAETENIFHPAVFNCRNQGGVGIQDKVRGNLALQPQLFAVCRQQQFNRGGIKADTVIKPPDSVLGVNPLDGDHCPQYVRVGYQGGIPGE

SEQ ID NO: 19015 - DNA, 717 bp, Unknown
  Obtained from environmental sample
  misc_feature (1)..(717): n is a, c, g, or t
atgatggccgagggagttggggtattgctcgccatcgccggagctacgattgctggccttttggtggaccttattgcctaccgcccgcttcgtagcgcaccacgcatctcagcgttgatcagcgccataggagtttcgtttttcctccaaaacctgtctgtcgtcctgttcaccggaatgccccgttctgtgctccagccacgcttgctcatgagacccatcctcgtgggaggggtgcgcctcatccccctggggctcatggtcccaatcatctcgtttgctcttgtggcagggcttttgtgggttgtgtataaaaccaaacctgggctcgcgatgcgctccatttcttatgacatcgagaccactcggctgatgggcgtgtcagtgaacaggatcattgccttcacctttgcgctgggatctgctctggccgctctagccggcatcatgtgggcgctgcgttatccgcgcgtggaacccttcatgggggtattccctggtttcaaggccttcatcgcagcggtttttggcgggattggctccattccaggggcgatgataggagggctgacgctaggattcatcgagatcatgtccgtcgcttttttccccaggctctcaggttatagagacgcattcgcttttgttctcctcattgtcatcttgctcgtcaaacctacaggactgatgggtgagagagtggaggacaagatatga

SEQ ID NO: 19016 - protein, 238 aa, Unknown
  Obtained from environmental sample
  DOMAIN (1)...(222): Branched-chain amino acid transport system / permease component
  misc_feature (1)..(238): Xaa is any amino acid
MMAEGVGVLLAIAGATIAGLLVDLIAYRPLRSAPRISALISAIGVSFFLQNLSVVLFTGMPRSVLQPRLLMRPILVGGVRLIPLGLMVPIISFALVAGLLWVVYKTKPGLAMRSISYDIETTRLMGVSVNRIIAFTFALGSALAALAGIMWALRYPRVEPFMGVFPGFKAFIAAVFGGIGSIPGAMIGGLTLGFIEIMSVAFFPRLSGYRDAFAFVLLIVILLVKPTGLMGERVEDKI

SEQ ID NO: 19017 - DNA, 690 bp, Unknown
  Obtained from environmental sample
  misc_feature (1)..(690): n is a, c, g, or t
ttgcgctcctctgcggtagccgctcttggtccgttttcaggttcaaatgtggagaacgctatattcgatgctttcagagactcatattaccgcacaagaatcgccgcggcgcaggcaagccgtgaccgtaaacttgccgccgctgttccgtttttaaaattccgtgcagaacgcgatgatgttccaaccgtgaaagacgaggcaatacgcgccctcggcgcaatcgctgacgatgaagctattgcggtacttgaaggtttgtttacggaacgaaaaaacacagaccgtgtccgtactcttgccgccgatatgctttgcaaaaattcaggcggaaaatatttcagtaaaattgttgttgaacttgacgaagcaaaaaaaagaaaccaaacaggcctttacaacggattattaaaaattgtaggcgaaacagtagctgaaaacgataaatcggaaatagaaaccgttacgcgccgttttttaagcacaggcggcattatggaaaaattatacggtcttgatatggcgaataacaataaacttacaggattaaaagaagaaataattgcgcttacgaaagacaaaaacgaaagtctttcaaggaaagcaaaaagaacggcggaaaatcttggcatagaaattcccgagactgaaactccggcggctaaaacaccaagagcaaaaacaccttaa

SEQ ID NO: 19018 - protein, 229 aa, Unknown
  Obtained from environmental sample
  SIGNAL (1)...(19)
  misc_feature (1)..(229): Xaa is any amino acid
MRSSAVAALGPFSGSNVENAIFDAFRDSYYRTRIAAAQASRDRKLAAAVPFLKFRAERDDVPTVKDEAIRALGAIADDEAIAVLEGLFTERKNTDRVRTLAADMLCKNSGGKYFSKIVVELDEAKKRNQTGLYNGLLKIVGETVAENDKSEIETVTRRFLSTGGIMEKLYGLDMANNNKLTGLKEEIIALTKDKNESLSRKAKRTAENLGIEIPETETPAAKTPRAKTP

SEQ ID NO: 19019 - DNA, 903 bp, Unknown
  Obtained from environmental sample
  misc_feature (1)..(903): n is a, c, g, or t
gtggctggcggaaattgcggggacgcgagcctttctacgattggccgtgatatttcctttatgaaaaacgttttgaacgccccgattaaatacgacgtgcataatcggggcttttattactcaaagcccaagtaccgcgtcccacttggcttttatggcggcgacgagcttctggctttgggtatggtaaaggcccttcttgtcatgtataaagacactcccatttatgacacggcgtacaatcagcttaaaaacattaccacgcccgtggactcgaaaggcaattccgactggtacgaaaaccgtatcgtagtcccggctcctccctcagcccctgtagatcctgaagcgtgggaggcaatcataacggccttgcgtgaaaaccgtattttatcttttgattctaatgacaatggagacagaacttacataaattaccgcttttgttcataccagttattgtttgataacggcctttggtatctatacgggcaggaacaggataagaacaacacgcggattttctgtttaagcaggatgaaaaacgttatggttgccaaaggcactttccgtctgccgaataaatttgactaccgctctatttttggcggcggccatttcggcgtgtctgtaggggtctctaccgctgagaaccttaaaaagcagcggtataaaattgcctttaaaggcaatgccgtcgattgggtaaatgagcgcaaatgggcggatgatcaggaaatcaccgaaactgaagacgaagttattatcacttttaccagcagccaccttgacaaaattttagagtggatgctttcaaggngtttcaacgcgcgtcccttagagccttatactctggtaaagatatggcgtatgacattnaagacgatggggacgccgaaatag

SEQ ID NO: 19020 - protein, 300 aa, Unknown
  Obtained from environmental sample
  misc_feature (1)..(300): Xaa is any amino acid
MAGGNCGDASLSTIGRDISFMKNVLNAPIKYDVHNRGFYYSKPKYRVPLGFYGGDELLALGMVKALLVMYKDTPIYDTAYNQLKNITTPVDSKGNSDWYENRIVVPAPPSAPVDPEAWEAIITALRENRILSFDSNDNGDRTYINYRFCSYQLLFDNGLWYLYGQEQDKNNTRIFCLSRMKNVMVAKGTFRLPNKFDYRSIFGGGHFGVSVGVSTAENLKKQRYKIAFKGNAVDWVNERKWADDQEITETEDEVIITFTSSHLDKILEWMLSRXFNARPLEPYTLVKIWRMTXKTMGTPK

SEQ ID NO: 19021 - DNA, 624 bp, Unknown
  Obtained from environmental sample
  misc_feature (1)..(624): n is a, c, g, or t
atggactatttggggtttaatgcctatgaaaaatctatacacaaggaaggcccttctacggtttttatgatccgggataaagacgaagatgcccttgttattcaggggtacaatcccggctttgagggaacggcaatccgggggggcatggtaaaagcgcctctcaaccataaaaacgcggaagttttgcgaaaactttttccctttaccgcgccaagccgggtcctgaccaaagaacgcagttttggggttggggatcgcctgggaattgcctcgatcgggcatatcagggtttttgaaaaatacgatgcctaccccgtcctggcccagcagtccatccgggaacttaaccttacgaaccggacttacgaagatgtccttgacgcggcgagtttcgcggtcttccgagagggcttcaaaaaaggctggggcgccgacggggaccaccttaagacgcccgaagacatacagtacgccctttccctgggtttcaccatgatcaccctggattgttccgagcatattaagaacggtgttaccgaagaaaacgccccggacgtaactccgggattggcggaaaagtacctcaacaagaccttcgatattggcgaaaatgtaagttaa

SEQ ID NO: 19022 - protein, 207 aa, Unknown
  Obtained from environmental sample
  misc_feature (1)..(207): Xaa is any amino acid
MDYLGFNAYEKSIHKEGPSTVFMIRDKDEDALVIQGYNPGFEGTAIRGGMVKAPLNHKNAEVLRKLFPFTAPSRVLTKERSFGVGDRLGIASIGHIRVFEKYDAYPVLAQQSIRELNLTNRTYEDVLDAASFAVFREGFKKGWGADGDHLKTPEDIQYALSLGFTMITLDCSEHIKNGVTEENAPDVTPGLAEKYLNKTFDIGENVS

SEQ ID NO: 19023 - DNA, 315 bp, Unknown
  Obtained from environmental sample
  misc_feature (1)..(315): n is a, c, g, or t
gtggacttggttatcttgtcgatggaacctttaatctttttcaggacattgccgatagtttttgactgctcgctggcactttccgccagcttgcgtatttcaccggcaactacggcaaagcccttgcccgcctcgcctgcgtgggccgcctcaatcgcggcgttcattgaaagcagattggtttggctggcaacattttccattaccgagttaatctccaggaggccctcggactcgcgggctatttcctgtatgtctgatgacacttcctgcaatccgcttcgtcctacttcggaggcctcttttaaggtttga

SEQ ID NO: 19024 - protein, 104 aa, Unknown
  Obtained from environmental sample
  misc_feature (1)..(104): Xaa is any amino acid
MDLVILSMEPLIFFRTLPIVFDCSLALSASLRISPATTAKPLPASPAWAASIAAFIESRLVWLATFSITELISRRPSDSRAISCMSDDTSCNPLRPTSEASFKV

SEQ ID NO: 19025 - DNA, 654 bp, Unknown
  Obtained from environmental sample
  misc_feature (1)..(654): n is a, c, g, or t
ttgcaggaagtgtcatcagacatacaggaaatagcccgcgagtccgagggcctcctggagattaactcggtaatggaaaatgttgccagccaaaccaatctgctttcaatgaacgccgcgattgaggcggcccacgcaggcgaggcgggcaagggctttgccgtagttgccggtgaaatacgcaagctggcggaaagtgccagcgagcagtcaaaaactatcggcaatgtcctgaaaaagattaaaggttccatcgacaagataaccaagtccactgaaaacgtacttaacaggtttggagcgattgactcgggcgttaatacggtggctgaacaggaagagaatatccgtcaggcgatggaggagcagggcgaggggagcaagcagctcctgcaaggtactggtaacttgaatgaaattacccaactggtacgaagcggttccgaagaaatgcttgagggcagcaaggaagtaatccgtgaaagccagaacctcgaaaaggcaacccaggaaatcgccaacggcatgaacgagatggctactggggcggatgagataaacgcggcggtacaccatgtcaatgaaataagcggcaagaaccgtcaagggattgaaaccttgatacaggaggtttcgcggttcaaggttgagtga

SEQ ID NO: 19026 - protein, 217 aa, Unknown
  Obtained from environmental sample
  DOMAIN (2)...(175): Methyl-accepting chemotaxis protein (MCP) signaling domain
  misc_feature (1)..(217): Xaa is any amino acid
MQEVSSDIQEIARESEGLLEINSVMENVASQTNLLSMNAAIEAAHAGEAGKGFAVVAGEIRKLAESASEQSKTIGNVLKKIKGSIDKITKSTENVLNRFGAIDSGVNTVAEQEENIRQAMEEQGEGSKQLLQGTGNLNEITQLVRSGSEEMLEGSKEVIRESQNLEKATQEIANGMNEMATGADEINAAVHHVNEISGKNRQGIETLIQEVSRFKVE

SEQ ID NO: 19027 - DNA, 381 bp, Unknown
  Obtained from environmental sample
  misc_feature (1)..(381): n is a, c, g, or t
ttgagcgcgtgccttaaaatgttcgccggaatgatgaaaaccgcccaatttaacgttaagcgcatgaaggcgggtgtttccggcggttttcttgaagcgaccgacacggcggagtaccttgtccgcaaggggcttcccttccgcgccgcgcatgaaactgcggctcttattgtccgcgactgtattgaggcgggacagaaacatatcacggacagaactctcggcgaattgaaaaaacgttcaaaactttttaacgaagatatttacaaggttctaacccccgcggcctgtgtaagggcgcgcgatcttccaggcggaccggctccaaaagaagtgcgcaggcagataaaactcctacggaaaaaatttcaaacatggtaa

SEQ ID NO: 19028 - protein, 126 aa, Unknown
  Obtained from environmental sample
  misc_feature (1)..(126): Xaa is any amino acid
MSACLKMFAGMMKTAQFNVKRMKAGVSGGFLEATDTAEYLVRKGLPFRAAHETAALIVRDCIEAGQKHITDRTLGELKKRSKLFNEDIYKVLTPAACVRARDLPGGPAPKEVRRQIKLLRKKFQTW

SEQ ID NO: 19029 - DNA, 339 bp, Unknown
  Obtained from environmental sample
  misc_feature (1)..(339): n is a, c, g, or t
ttgaaaacatcngttgacaccaacaacgacatggtctttattaaagatcaatacctctacggcatccgctaccggggcagcttcggctatggattctggcagcaagccgtcgcctcaaaagaggagctgaccccggaaaactacgaggccgcccggcttgccatgaggcagttcaagcgcgacggcggcgacccgctggggcttgtcccgacccaccttgtagtaagcgccgacaacgaatcggcggcacggaaaatcattgaggcccagctaatcgacggcggggattcaaacatcaactaccacacggcagcgcttatagtttcgccgtggctatag

SEQ ID NO: 19030 - protein, 112 aa, Unknown
  Obtained from environmental sample
  misc_feature (1)..(112): Xaa is any amino acid
MKTSVDTNNDMVFIKDQYLYGIRYRGSFGYGFWQQAVASKEELTPENYEAARLAMRQFKRDGGDPLGLVPTHLVVSADNESAARKIIEAQLIDGGDSNINYHTAALIVSPWL

SEQ ID NO: 19031 - DNA, 495 bp, Unknown
  Obtained from environmental sample
  misc_feature (1)..(495): n is a, c, g, or t
atggacgaattaaatggcggctacagcgtcagggatatgagttacagcaacgacttcgtgaacgatggtaacgtctacggtggcttcggtatttcggtgcgttgcgttcatgacgggtctgggacaagttcttttggtgcatcaggtcagacaaaaacggacgatatacttaagctgtttaggctagctgaaatggataagctgatacgtgtaatgattgcgcaaagaaagaaaaccatgagtattgtgcctagctcgatttgggatagaatagaaaaaatacttacaagtgaatatctaaatgcgtgtattcctgtgtatgataagtattatactcacgatgaaataaaacagctgatattgtttcatgaatcacctatcgggaagaaaagcattgaacttgtgcctattatttatgaagaaacatcggctataggtataaaattggctaacaaattaattgaagaattagaaaaagagggctattttagatag

SEQ ID NO: 19032 - protein, 164 aa, Unknown
  Obtained from environmental sample
  misc_feature (1)..(164): Xaa is any amino acid
MDELNGGYSVRDMSYSNDFVNDGNVYGGFGISVRCVHDGSGTSSFGASGQTKTDDILKLFRLAEMDKLIRVMIAQRKKTMSIVPSSIWDRIEKILTSEYLNACIPVYDKYYTHDEIKQLILFHESPIGKKSIELVPIIYEETSAIGIKLANKLIEELEKEGYFR

SEQ ID NO: 19033 - DNA, 753 bp, Unknown
  Obtained from environmental sample
  misc_feature (1)..(753): n is a, c, g, or t
atgggttataccggatattttttgattgtttgggattttataaaatacgcaaaggagaacaatattcccgtaggaccggggcgcggttccggagcgggttctattgtcgcttactctctgcgtattaccgatattgatcccttaaagtatggccttatatttgaacgcttcttaaacccagatcgcatttccatgcccgattttgacattgactttgccaatgagggacgcgaagaagttataaactatgttacgcgcacctatggcaaggaaagagttgcgcagataatcacatttggaacattgggagcgaaagcggttatcaaggatgtggcaagagtattgggaatatcaattccggaatcggaaatgataacgaaacttatttcgtttgatcctgaaatgactttggataaagcaaaggaagaggagccccgccttcgtgaactggaaagcgatccccgctttacggaattattcgccatcgcgcataaactggaggggcttaaccgtcattcaagcatacacgccgcgggtatcgtaatcgggaaaaaacctctgattgaactggtgcctctcttccaggaaagagaagaaaagggcggcaatattgccacacagtacagcatgaacttccttgaagaatgcggtcttgttaaaatggattttctcggccttaaaaaccttgatatcattaaacattcgcaggaattaatccagcggcgcggaggcaagtattcaattttactatag

SEQ ID NO: 19034 - protein, 250 aa, Unknown
  Obtained from environmental sample
  DOMAIN (1)...(245): Bacterial DNA polymerase III alpha subunit
  misc_feature (1)..(250): Xaa is any amino acid
MGYTGYFLIVWDFIKYAKENNIPVGPGRGSGAGSIVAYSLRITDIDPLKYGLIFERFLNPDRISMPDFDIDFANEGREEVINYVTRTYGKERVAQIITFGTLGAKAVIKDVARVLGISIPESEMITKLISFDPEMTLDKAKEEEPRLRELESDPRFTELFAIAHKLEGLNRHSSIHAAGIVIGKKPLIELVPLFQEREEKGGNIATQYSMNFLEECGLVKMDFLGLKNLDIIKHSQELIQRRGGKYSILL

SEQ ID NO: 19035 - DNA, 687 bp, Unknown
  Obtained from environmental sample
  misc_feature (1)..(687): n is a, c, g, or t
ttgggcgtgaaganatatctgcccgagaaactgcccgacgccgacgaggtaggagttgtgaacgggcttgcgtggacgtcggtgggcggtgtgcttatgccgcttgaagcgtcggttatggacggcacgggcaagatcgagattacggggtcgctcggcgacgttatgaccgagtcgagcaagcttgcggtcagtttggcgcggacgttgtcggccaaatacggcattgatcccgaattttacaaaaacaaggacattcacattcacgcgccggagggggccgtgccgaagaacgggccgtcggcgggcgtggcgatgacgaccgcgctgatctccgcgctttcggggatcgccgtccgccgcgacgttgcgatgaccggcgagatcacgcttcacggcaaggttttggcgatcggcgggcttaaagaaaagtcgatggcggcgtacaaagccggcgtcaagaccgtgattattccgaaagagaaccaacccgacgtttccgagcttgacgaaaccgtccgcgcgggcattaactttgtcgcggccgagaaaatcgagactgttctcgagactgctctcgtaaagtgcgaacctgttcgcaggggcaggaagaagggcgccgacgcggatattgacgtgttgcccgaggcggtggttatgcgggacttggtgggcgcgggggtgtga

SEQ ID NO: 19036 - protein, 228 aa, Unknown
  Obtained from environmental sample
  DOMAIN (1)...(195): Lon protease (S16) C-terminal proteolytic domain
  misc_feature (1)..(228): Xaa is any amino acid
MGVKXYLPEKLPDADEVGVVNGLAWTSVGGVLMPLEASVMDGTGKIEITGSLGDVMTESSKLAVSLARTLSAKYGIDPEFYKNKDIHIHAPEGAVPKNGPSAGVAMTTALISALSGIAVRRDVAMTGEITLHGKVLAIGGLKEKSMAAYKAGVKTVIIPKENQPDVSELDETVRAGINFVAAEKIETVLETALVKCEPVRRGRKKGADADIDVLPEAVVMRDLVGAGV

SEQ ID NO: 19037 - DNA, 708 bp, Unknown
  Obtained from environmental sample
  misc_feature (1)..(708): n is a, c, g, or t
gtgacggccttaaaagatttctacaaggacaagaagcttcttcccaatagtttcaaagatgaaaaccgcatcaacagcatacagggtgtttatcttccattctggctttttgatgccaatgccaatgggcatgtttgttataagggcgtaaaagtaaaaatatggagcgacgccagctacgattatacaaagactgattattattccattgtgcgcgatggcagtttgcagtttaaaaaaattcctgtggacggttctgaaaaaatggacgatgactacatggacgctatagagccttttgattatacccagattacaggttttgagaccgcatatctgtccggctatctgacggagaaatatgatgtggacgcggagaaaagcaaggaaagggcggtcaagagaatcaagaactctgtggaagcggagtttgccagatccgttatagggtattcgtcggtcactactcaaagttccacaatcagcgtagaagacggtaaggtgagttacagtctgttcccggtgtgggtacttaataccaagtataataaggaaaattatctgtttctaatgaacggacagtcgggacgtcttatcgggaggctgccggtggatcccggcaagttctggaaatacctggttttatatgccggtattattggcgctgtttctacgtttttaattcaagctttgcggatattactgtag

SEQ ID NO: 19038 - protein, 235 aa, Unknown
  Obtained from environmental sample
  misc_feature (1)..(235): Xaa is any amino acid
MTALKDFYKDKKLLPNSFKDENRINSIQGVYLPFWLFDANANGHVCYKGVKVKIWSDASYDYTKTDYYSIVRDGSLQFKKIPVDGSEKMDDDYMDAIEPFDYTQITGFETAYLSGYLTEKYDVDAEKSKERAVKRIKNSVEAEFARSVIGYSSVTTQSSTISVEDGKVSYSLFPVWVLNTKYNKENYLFLMNGQSGRLIGRLPVDPGKFWKYLVLYAGIIGAVSTFLIQALRILL

SEQ ID NO: 19039 - DNA, 744 bp, Unknown
  Obtained from environmental sample
  misc_feature (1)..(744): n is a, c, g, or t
gtgccgaaacactttatacgccggcagggcataaccggcggcgaaagatattcgacggaaaggcttgccgaactggaatcggaaattaacggcgcgtcggacaaggttgtggaacttgaaaaaaaacttttcctggaaatccgggaacaggtaaaaaaacatcttgccttgttgtccgccgccgcccgaaggcttgccgaacttgacgcggcccagtctcttgcaaaagccgccggcgtaaggggatggacgcgccccgaattgaacgagacgggcaatcttgaaattattgaaggccgccatccggttgtggaagcccatctcggccgcggcgaatacatccccaacgacataatcctgaacacgggcgaaggcggcatttcattcgccatgataacgggccccaacatggccggaaaatccacctacctgcgttccgcagctcttattacaattatggcccaagcaggcagttttgttccggcaagggaagcgcgcataggcatttgcgaccgtatttattgcagggtaggggcttccgacaacctcgccaggggggagtcaaccttccttgtggaaatgaacgaaacggcctttatactgaacaccgcgacggaaaagagccttgtcatcatggacgaggttggcagggggacaggcacgaacgacggcctttcgatagcgtgggcggtaagcgaagaactgctaaccgaatcggctgcaggacgctttgctcggccataa

SEQ ID NO: 19040 - protein, 247 aa, Unknown
  Obtained from environmental sample
  DOMAIN (83)...(247): MutS domain V
  misc_feature (1)..(247): Xaa is any amino acid
MPKHFIRRQGITGGERYSTERLAELESEINGASDKVVELEKKLFLEIREQVKKHLALLSAAARRLAELDAAQSLAKAAGVRGWTRPELNETGNLEIIEGRHPVVEAHLGRGEYIPNDIILNTGEGGISFAMITGPNMAGKSTYLRSAALITIMAQAGSFVPAREARIGICDRIYCRVGASDNLARGESTFLVEMNETAFILNTATEKSLVIMDEVGRGTGTNDGLSIAWAVSEELLTESAAGRFARP

SEQ ID NO: 19041 - DNA, 435 bp, Unknown
  Obtained from environmental sample
  misc_feature (1)..(435): n is a, c, g, or t
gtggatatgccgaaagtatatacggcgtacttcaaggactcgcgggcggtaaggcagtttgaggaaaaaagcgctaaaatacagagcgatatagacaaaatgacaaaagagatacaggacttaaaatcgcgccaggcggacgctttattacgggacgatcaaagcgaggttttaaggcttgataatttaatttacagaaggactgattatttaagggaatttcaccagataaagacggctgaactggagagcgagaaaagaaagttaatgcagtccggctcatttttagatcaagtatatgatgagatccgttatatcgccgaaagcgaaggttacagcatggttattgaaaaaaacaataacatcctttggttcagcagtacgattgatattacagacaagttaattacaaacctgcaaaaaaaacaaagataa

SEQ ID NO: 19042 - protein, 144 aa, Unknown
  Obtained from environmental sample
  DOMAIN (1)...(140): Outer membrane protein (OmpH-like)
  misc_feature (1)..(144): Xaa is any amino acid
MDMPKVYTAYFKDSRAVRQFEEKSAKIQSDIDKMTKEIQDLKSRQADALLRDDQSEVLRLDNLIYRRTDYLREFHQIKTAELESEKRKLMQSGSFLDQVYDEIRYIAESEGYSMVIEKNNNILWFSSTIDITDKLITNLQKKQR

SEQ ID NO: 19043 - DNA, 459 bp, Unknown
  Obtained from environmental sample
  misc_feature (1)..(459): n is a, c, g, or t
gtggacttgctgcttcgatccagccagctacatgatgtagggaaaatatccatcaatgataacatcctcaggaagaccgaaaagctcaacgatgaggaatttgaagacatgaagagacacacagttatcggagagcagataattgacaaaattaggtcgctggcaaaagaaagcgattttctcaaatacgcgaagattttcgcctccagtcatcacgaaaaatgggatggcacgggttaccatcggggtctaaaagaagacgaaatacctcttttgggacgtataatggcgatagccgatgtgtacgatgcccttgtttcggacaggtcgtataaaaaagcgtttagccacgaggacgcggttaaaatgattttggaagaaaggggcaaatattttgatcccgctctggttgacttatttcttgaagtttccgatgacttcaaaaatcagggcccctga

SEQ ID NO: 19044 - protein, 152 aa, Unknown
  Obtained from environmental sample
  DOMAIN (1)...(105): HD domain
  misc_feature (1)..(152): Xaa is any amino acid
MDLLLRSSQLHDVGKISINDNILRKTEKLNDEEFEDMKRHTVIGEQIIDKIRSLAKESDFLKYAKIFASSHHEKWDGTGYHRGLKEDEIPLLGRIMAIADVYDALVSDRSYKKAFSHEDAVKMILEERGKYFDPALVDLFLEVSDDFKNQGP

SEQ ID NO: 19045 - DNA, 654 bp, Unknown
  Obtained from environmental sample
  misc_feature (1)..(654): n is a, c, g, or t
ttgacgaaggtaaagcaaataacgatgttgacgcctcggcatggtagggaagggaggcacggcctcgctttgttgggaagcctgtgttttttcctttcggctattgaatatctgattccaaaaccactgccctttatgcgtatcgggctggcgaatatgcccctcctccttgcgctggatatttttagtccgggtgattttttcctcttggctctgttaaaaatccttggacaggggatcattggcggcatgattttttcccatatttttttgttttccatagcgggaactctttcttcggttctggtaatgttttgcttgcgccgcttgctggggaaaaaactcataggttttgccgggcttggctgtgccggggcgatggtttcaaactgcgctcagttgcttttggcgcgttatttgatttttggtcccgcgctcacgtttctggccgccccgtttctcgcctccggccttattacgggcatcggcctgggccttatctgcgagtacttttgccgtcattccctctggtacgcacaattaagggagcagggagcagggaacagagaacagggaagagggaacagagaagaaagaaggagtgggtgtataccagataatcgtaatacttccgtgaggtctttttttgaataa

SEQ ID NO: 19046 - protein, 217 aa, Unknown
  Obtained from environmental sample
  DOMAIN (25)...(171): Heptaprenyl diphosphate synthase component I
  misc_feature (1)..(217): Xaa is any amino acid
MTKVKQITMLTPRHGREGRHGLALLGSLCFFLSAIEYLIPKPLPFMRIGLANMPLLLALDIFSPGDFFLLALLKILGQGIIGGMIFSHIFLFSIAGTLSSVLVMFCLRRLLGKKLIGFAGLGCAGAMVSNCAQLLLARYLIFGPALTFLAAPFLASGLITGIGLGLICEYFCRHSLWYAQLREQGAGNREQGRGNREERRSGCIPDNRNTSVRSFFE

SEQ ID NO: 19047 - DNA, 384 bp, Unknown
  Obtained from environmental sample
  misc_feature (1)..(384): n is a, c, g, or t
atggcggaaggatttttcaaatcacccctgggccgcaaggccctttcagcgaatttccgcaagaccgagtatcccgtattaacggtgatagagggaacacaaaacaaaatcatcgtttccggcaaaatcgaccttctctttgaggcaggcaatgttttctatgtggttgacttcaagactgacagggatgaggatatcgtccgccatacgggacaactggccatttacaaacgggccgtggaagatatttttggcaaaccagtagagtgccgactcttttatttgcggaacggccacgaagcggacctgaccggagaagccgacaaagccagccccgaagaactcattgccgcctgggaagaacggcttaagcagttgaattaa

SEQ ID NO: 19048 - protein, 127 aa, Unknown
  Obtained from environmental sample
  misc_feature (1)..(127): Xaa is any amino acid
MAEGFFKSPLGRKALSANFRKTEYPVLTVIEGTQNKIIVSGKIDLLFEAGNVFYVVDFKTDRDEDIVRHTGQLAIYKRAVEDIFGKPVECRLFYLRNGHEADLTGEADKASPEELIAAWEERLKQLN

SEQ ID NO: 19049 - DNA, 516 bp, Unknown
  Obtained from environmental sample
  misc_feature (1)..(516): n is a, c, g, or t
ttgaaatggcacnaggacattgcccaggcttttaacgccaactacggtcaggttctcaaagtgccgcaggcggcgatacaggacgaagttgcggtattaccgggccttgatggccggaagatgagcaagagctacggcaacacgattccgctttttgcgcccgaaaaggaactgcataaaaccattatgcgcatcgttacaaattcgcagggtgtggaagaaaagaaagaccccgacgcttctcagatatacgcctattacaagctctttgccgcccctgacgagcaggctgcgctggcctcacgcctgcgcgccggcggtatgggttggggtgacgcgaaggaagagcttttcagggtggcgaaccgcgaacttgccccaaagaggcagaagtatgaggagctcatggcgaaccccaagttgcttgatgaaatccttgcgaagggagccgagcgggcccggcccattgccgccgccacggttaaacgcgcaagaaaagccgcaggaattgactag

SEQ ID NO: 19050 - protein, 171 aa, Unknown
  Obtained from environmental sample
  misc_feature (1)..(171): Xaa is any amino acid
MKWHXDIAQAFNANYGQVLKVPQAAIQDEVAVLPGLDGRKMSKSYGNTIPLFAPEKELHKTIMRIVTNSQGVEEKKDPDASQIYAYYKLFAAPDEQAALASRLRAGGMGWGDAKEELFRVANRELAPKRQKYEELMANPKLLDEILAKGAERARPIAAATVKRARKAAGID

SEQ ID NO: 19051 - DNA, 678 bp, Unknown
  Obtained from environmental sample
  misc_feature (1)..(678): n is a, c, g, or t
atgaaaaaaacatactatacctttagctccttgtatgacgttgttgcccgccttcgcgccccgaacggctgtccctgggatcgcgaacagagccctgccacccttcgcgagtgtttaatagaagaaacttatgaatgcattgaagccatagacgaagagaacccgtcccatataaaggaagagctcggcgacctttttttgctgaccaccatgctcgcctatatgcacgaagaggaaggcgttttttcagtggcggatgtttttcagacgatttgtgaaaaactaatccggcggcatcctcatgtattcggcgagatacaggtaaaggacagtaatgaggttcttgataactgggcaaagataaaggtaacacaagagggccgcaagccgaaagactctatccttgatgaagtaagcgcgggcctccctccgctggatcgggcatggaagctgcaaaagaaagcggctaaagctggttttgactggccaaccctggaaggtgttgttggaaaaatcaacgaggaactgggagaagttatggaagctgtcggcaatacggcaaaaagtaataatgttgaagaagagctgggtgatcttctcttttctgttgtgaacctctgccgctacctgaaagtcgagccgtctgtagccctgcgccgtaccaacagcaagttttag

SEQ ID NO: 19052 - protein, 225 aa, Unknown
  Obtained from environmental sample
  DOMAIN (163)...(225): MazG nucleotide pyrophosphohydrolase domain
  misc_feature (1)..(225): Xaa is any amino acid
MKKTYYTFSSLYDVVARLRAPNGCPWDREQSPATLRECLIEETYECIEAIDEENPSHIKEELGDLFLLTTMLAYMHEEEGVFSVADVFQTICEKLIRRHPHVFGEIQVKDSNEVLDNWAKIKVTQEGRKPKDSILDEVSAGLPPLDRAWKLQKKAAKAGFDWPTLEGVVGKINEELGEVMEAVGNTAKSNNVEEELGDLLFSVVNLCRYLKVEPSVALRRTNSKF

SEQ ID NO: 19053 - DNA, 768 bp, Unknown
  Obtained from environmental sample
  misc_feature (1)..(768): n is a, c, g, or t
atggtccagggcgcgtacgggatactgatcagcactgacggggttattttagcccacccaaacgaggcgtttgtcggcgagaacgcgcataatccgaaaattcctttttcaatttttatgaatgaattaaacaacggaattgaaataaaggagaggccgcttaaaacatataaaagcgaacgcgctcttgcgtctttcaagttcctgcccaacggctggattattggaatagtaacgcctaaagggccttactataaaagcatatttactatggctttattcctgattctccttggcaccgcgctcgcgtctgttcttgttttagtattaatccgcgttgacgctgcaagaaccaaatcggacatggagaacaggcaaaaatccacattccttgcgaacatgagccatgaaatacggacgcccatgaacgctattataggcatgacggacctgttgaattacgagccgcttaacaagaggcaaatgggtttcatcaacgatataaaagtgtccgcaaggtccctgctttccattatcaacgacatactggacatgtcaaaaatcgaggcgggtaaatttgagctaaaccagattaactacgattttcacatgctcctggacaatattttttccatgttcagctttgtatcgcagaagaaagggcttgaattcaaatatgaaaccgaaggaaatataccccgctatcttttcggcgacgatataaggctaaaacaggtattaactaatatttgctcaaacgcnggttaa

SEQ ID NO: 19054 - protein, 255 aa, Unknown
  Obtained from environmental sample
  DOMAIN (126)...(191): His Kinase A (phosphoacceptor) domain
  misc_feature (1)..(255): Xaa is any amino acid
MVQGAYGILISTDGVILAHPNEAFVGENAHNPKIPFSIFMNELNNGIEIKERPLKTYKSERALASFKFLPNGWIIGIVTPKGPYYKSIFTMALFLILLGTALASVLVLVLIRVDAARTKSDMENRQKSTFLANMSHEIRTPMNAIIGMTDLLNYEPLNKRQMGFINDIKVSARSLLSIINDILDMSKIEAGKFELNQINYDFHMLLDNIFSMFSFVSQKKGLEFKYETEGNIPRYLFGDDIRLKQVLTNICSNAG

SEQ ID NO: 19055 - DNA, 711 bp, Unknown
  Obtained from environmental sample
  misc_feature (1)..(711): n is a, c, g, or t
ttggatgaagacgaattcttaaattacttgcaggtattaaacgagtttacggaaaattatcccggtcaggaagaaaaaataaaagattcgcttaaattaaaggataacgagtctttgaaaaaacaccttgccggcattatggaaatactggaaaaaatttacgcggacgagatggcgaaggactgctccaagcagattggctctataggcacggcttcggttgaaaaaatagaagcctatatgagctacttcttatccagcttgtccatgctgtcaatcgacattcaaatggctcagcagaaaatagacatgcagccttctttgcctgaggaagttcagcccggaccgcccaaagcaaacaagatactggcggttgacgatacggcatttttccttaccatactaaaaaaaatcctgcaggactcaagatacaatttaacctgcgtatcatcaggaagggacgcgcttaaataccttgaaaagcacactccggatatgtttcttctggacatagaaatgcccggaatggacggttacgaacttgccacaaaaataaaggaaggcgggtataaagcgccgattattttccttacgggcaacgccaaaaaagaatacctggcaaaagctgttaaatcaggagcggcggattttattatcaagcccatcaacaaggacgtccttcttgataaaatacgaaaatatttaagatag

SEQ ID NO: 19056 - protein, 236 aa, Unknown
  Obtained from environmental sample
  DOMAIN (120)...(232): Response regulator receiver domain
  misc_feature (1)..(236): Xaa is any amino acid
MDEDEFLNYLQVLNEFTENYPGQEEKIKDSLKLKDNESLKKHLAGIMEILEKIYADEMAKDCSKQIGSIGTASVEKIEAYMSYFLSSLSMLSIDIQMAQQKIDMQPSLPEEVQPGPPKANKILAVDDTAFFLTILKKILQDSRYNLTCVSSGRDALKYLEKHTPDMFLLDIEMPGMDGYELATKIKEGGYKAPIIFLTGNAKKEYLAKAVKSGAADFIIKPINKDVLLDKIRKYLR

SEQ ID NO: 19057 - DNA, 369 bp, Unknown
  Obtained from environmental sample
  misc_feature (1)..(369): n is a, c, g, or t
atggttctggaaaccttcggccccgatgaatatataattaccgagggaaaacccaatgataagatatatttccttattgagggaaccgtagccgttaccaaaaacgacatccccctttcccgcttcggagaaggggaagaattcggcgaaatagaagtgcttgatgtcatggcgtccgccgcctctatcagatcaacaacaaatgtaaaagttatgtccatttccaacaaagcccttcgtgatatttataagatcgatataaaaatcttttctcttataataatgaaccttgcgcgggacttatcccgccggctcaggaagatggatgaaaaacttgcggcagtcgcgaaagaaccagtttatatataa

SEQ ID NO: 19058 - protein, 122 aa, Unknown
  Obtained from environmental sample
  DOMAIN (3)...(88): Cyclic nucleotide-binding domain
  misc_feature (1)..(122): Xaa is any amino acid
MVLETFGPDEYIITEGKPNDKIYFLIEGTVAVTKNDIPLSRFGEGEEFGEIEVLDVMASAASIRSTTNVKVMSISNKALRDIYKIDIKIFSLIIMNLARDLSRRLRKMDEKLAAVAKEPVYI

SEQ ID NO: 19059 - DNA, 453 bp, Unknown
  Obtained from environmental sample
  misc_feature (1)..(453): n is a, c, g, or t
atgatattcaaccctgaatacgaatgtatggatgcgcaagcgcgaaaaaaacttcaacttgccgctctgaaaaatcttgtggaaactttgtattcccgcgtcccgttttaccgcaataaaatgcaggatatgaaggtaacgccgaaggacattcacagtttaaccgacattgaaaaattgccctttaccacaaaggacgatttacgggaaaattatccatttggattacgcgcaagcgctcatgaaaggattgtcgaagtacacatgagttccggcactacaggcaagcctgtcgtgaatgaatacactttaaaagacgtagacatatggcggcaggcgatggcaagaaccatggcggcggccggttgtaccagcaatgacattgtccagaactgttacggttacgggcttttcccggcggcgcgggagcgcattacggcgctcttacaatag

SEQ ID NO: 19060 - protein, 150 aa, Unknown
  Obtained from environmental sample
  misc_feature (1)..(150): Xaa is any amino acid
MIFNPEYECMDAQARKKLQLAALKNLVETLYSRVPFYRNKMQDMKVTPKDIHSLTDIEKLPFTTKDDLRENYPFGLRASAHERIVEVHMSSGTTGKPVVNEYTLKDVDIWRQAMARTMAAAGCTSNDIVQNCYGYGLFPAARERITALLQ

SEQ ID NO: 19061 - DNA, 819 bp, Unknown
  Obtained from environmental sample
  misc_feature (1)..(819): n is a, c, g, or t
atgaaaatattgatggtttccagcgaagcggttccctgggcaaaaacaggcggacttgccgatatggtttccgccctttcaattaacctcgcaaaactcggccatgatgtaaggattgtaatcccccgttactactctatcgaccgcggcgccttaaaacagcttccgggagctatgggaacgcccatgggcggcattgaggaatggagcgccgtctactataccgatatgccgggaacgacaaaagccaatccggtaaaggtttattttatcgatcatgaaatatacttcggcagggacggcatttacggaagctctacagattccgatttttccgacaacccaaggcgttttatgtttttttgccgcgccgtattccagctttgccgtaagataaaatggtttccggacgttcttcacgcccatgactggcccgcggcggtcgcgcccgtatacttgaaattcgcagaaagggtaaaaggaagcgcgggcggttttgaaaaaactatttcaattcttacgattcacaatctgggatatcagggaatttacagcaaagacaattttaattattcggggcttggatgggacgttttttacaacggcggttttgaggactggaatatgcttaatatgctgaaagccggcctttacagcgcggaaaaactcaacactgtttcacctaattatgccgaggaaacaaaaacgcaggaaaacggtttcaggctggacggcgtactccgttacagaaacgccgattactgcggcatccttaacgggatagacaccaatgtctggaatcccgcgaaagacaagtaa

SEQ ID NO: 19062 - protein, 272 aa, Unknown
  Obtained from environmental sample
  DOMAIN (2)...(249): Starch synthase catalytic domain
  misc_feature (1)..(272): Xaa is any amino acid
MKILMVSSEAVPWAKTGGLADMVSALSINLAKLGHDVRIVIPRYYSIDRGALKQLPGAMGTPMGGIEEWSAVYYTDMPGTTKANPVKVYFIDHEIYFGRDGIYGSSTDSDFSDNPRRFMFFCRAVFQLCRKIKWFPDVLHAHDWPAAVAPVYLKFAERVKGSAGGFEKTISILTIHNLGYQGIYSKDNFNYSGLGWDVFYNGGFEDWNMLNMLKAGLYSAEKLNTVSPNYAEETKTQENGFRLDGVLRYRNADYCGILNGIDTNVWNPAKDK

SEQ ID NO: 19063 - DNA, 447 bp, Unknown
  Obtained from environmental sample
  misc_feature (1)..(447): n is a, c, g, or t
ttgatggccgaggnagcggttgggataatacacacaacagnttcaagtacatggactattaacccctgccccacagggtggcggttgcccacgaaagatgagtttgttgcgttggacaatgcaagtggtgcaacaaatacagttcacggtggcacatgggctgcagccaacgcaaggggcaacgccgttgcagggcgtttttacggagctaaccacgccacctgctcgctgccgagcaacatggcgaactgtgtcttcttgcctgcttcgggcagccgcatctacagcggtggtgcgctcagcggccagggcagcaacggcctctattggagcagtacgcagaacaacagctccaacggctacaacttgtacttcaacagcagcaacagcaaccctgccgacggcagcgataaggcgtacgggatgagtatccgctgcgtgcaataa

SEQ ID NO: 19064 - protein, 148 aa, Unknown
  Obtained from environmental sample
  misc_feature (1)..(148): Xaa is any amino acid
MMAEXAVGIIHTTXSSTWTINPCPTGWRLPTKDEFVALDNASGATNTVHGGTWAAANARGNAVAGRFYGANHATCSLPSNMANCVFLPASGSRIYSGGALSGQGSNGLYWSSTQNNSSNGYNLYFNSSNSNPADGSDKAYGMSIRCVQ

SEQ ID NO: 19065 - DNA, 504 bp, Unknown
  Obtained from environmental sample
  misc_feature (1)..(504): n is a, c, g, or t
gtgcacgttagcgcaaaagacaaagaaacaggaaaggaacagagcattaaaattcagagttcttcgggacttagcgaagatgagataaacaaaatggttaaagatgcagaggccaatgcggagaaagacagaaaatcccgcgaattggtggatgcaaaaaatcaggcagagcaagttgtttatcaagttgaaaaaactctgaaagaaaacgatggcaaattgccagcagatgcagtttctcaagcaaatgcagccgttgcagatttaaaagctgttgctgaaaaagccacaagcaaagaggaaattcaaagcgcaatggataaagctcagggcgttttgggtcaaattttgcaagccgctcaaatgggtggtgcccctggtggtcagcatcagcacggagagaactgcgaaggttcttgcggagacgactgcaaaaacaaaagcgaaaaaggcaaagaaggcccggtagatgcagattttgaggttgttaacgaaaagaaataa

SEQ ID NO: 19066 - protein, 167 aa, Unknown
  Obtained from environmental sample
  misc_feature (1)..(167): Xaa is any amino acid
MHVSAKDKETGKEQSIKIQSSSGLSEDEINKMVKDAEANAEKDRKSRELVDAKNQAEQVVYQVEKTLKENDGKLPADAVSQANAAVADLKAVAEKATSKEEIQSAMDKAQGVLGQILQAAQMGGAPGGQHQHGENCEGSCGDDCKNKSEKGKEGPVDADFEVVNEKK

SEQ ID NO: 19067 - DNA, 465 bp, Unknown
  Obtained from environmental sample
  misc_feature (1)..(465): n is a, c, g, or t
ttgatgagaaccgctaaaacctccaaaccctccaatgtctgcaaaaatatcgccaaagtgcgagaatatgtcttcaaacgaaaaaccacccgaactaaaaccgccgccgaatccaccgctgttaagcccttcgtgaccaaaacggtcgtactgcgctttcttctgcgaatcagaaagcacatcgtaggcttctgcagcttccttgaacttggcttccgcttctttatcaccaggatttttgtccggatgatattttatagcgagctttttatacgcccgcttaatatcgtctgcggaagcgtctttgggaacgcccagaacttcgtagtaatctcgctttgccatatattttatttcttttcgttaacaacctcaaaatctgcatctaccgggccttctttgcctttttcgcttttgtttttgcagtcgtctccgcaagaaccttcgcagttctctccgtgctga

SEQ ID NO: 19068 - protein, 154 aa, Unknown
  Obtained from environmental sample
  misc_feature (1)..(154): Xaa is any amino acid
MMRTAKTSKPSNVCKNIAKVREYVFKRKTTRTKTAAESTAVKPFVTKTVVLRFLLRIRKHIVGFCSFLELGFRFFITRIFVRMIFYSELFIRPLNIVCGSVFGNAQNFVVISLCHIFYFFSLTTSKSASTGPSLPFSLLFLQSSPQEPSQFSPC

SEQ ID NO: 19069 - DNA, 687 bp, Unknown
  Obtained from environmental sample
  misc_feature (1)..(687): n is a, c, g, or t
gtgatgaacggaaaaataacggcggcccctccaacggcagccgacattgaggaagcgaaggcgtactctatccagaacgcggtcgccgccgtatcgtctcgttctgttacaaaaactttacctgacaattcgcaggcgataaaacgcgtggcgttgatggacttcggcgcaaagcgcggaatagcggcagcgttggttgcgcgggggtgcgaagtatggtcgttcccccatgacacaagcgcgcaagagatactgaaaatgaagcccgatgggatcatgctaagtaatggtcctggagatccggctgaaagcgccaacaacggaatcattgaagcgctccgtattttgcagcgaagcaacgtaccgattttcggtatatgtctgggacatcaacttctcgcgctggcaaacggttattcaacgaaaaagctcaaatttggccaccggggagccaatcaaccggtaaaagaattatcaaccggacgcgtgtacatcacgagtcaaaatcacggatacgcggttgtagcggataacggctcatttgtgaacgtaaacgatggaacctgcgagggtctggattacgggaattcattctccgtgcaatttcaccccgaagcgcgcggtgggccgcttgatacggcctttttgtttgaccgctttatggaaaggatgaatgcccgtgtataa

SEQ ID NO: 19070 - protein, 228 aa, Unknown
  Obtained from environmental sample
  DOMAIN (52)...(205): Peptidase C26
  misc_feature (1)..(228): Xaa is any amino acid
MMNGKITAAPPTAADIEEAKAYSIQNAVAAVSSRSVTKTLPDNSQAIKRVALMDFGAKRGIAAALVARGCEVWSFPHDTSAQEILKMKPDGIMLSNGPGDPAESANNGIIEALRILQRSNVPIFGICLGHQLLALANGYSTKKLKFGHRGANQPVKELSTGRVYITSQNHGYAVVADNGSFVNVNDGTCEGLDYGNSFSVQFHPEARGGPLDTAFLFDRFMERMNARV

SEQ ID NO: 19071 - DNA, 915 bp, Unknown
  Obtained from environmental sample
  misc_feature (1)..(915): n is a, c, g, or t
atgatcagattggccgagggccctaagcaatcgcgagttcaaaactccgtcttcacactcctattcgacgacgatgaagcaattcgagatatcgccggatccatcggcgccatattgggtaagaagatcgattccaatacaaaaataaaaaagaccacccttcaaaacgtactattaggcggaaaacttaacgacctatcgtttatgttagacgataggcttgttgtcttggtagaacaccaatcaacgatcaatgaaaatatgccgctacgtatgctgcattatatatgtgaaacatacaatcacctatataataaaaaagatttatataggaaagataagatacttatccccaaaccgatatttattgtcttgtataacggtacggaagagatagacgattacaaagaatatttcttgtctgattcgttctttgatctcgacaaatcaaaagaatcgccacgcctagaattagtagtatatgtgcgcaatatcaataaaggccacagcgttgaatttgtggaacaaagtccgctactacgtgactatgtggcgtttgttgaagaggtgcgcgaaaataataaaaaaacagacgatggcggattggccatgatcacggctgtggaagattgtataaaaaaaggtatattaaccgattttttgaataaacataaagaggaggttgtaaaaatgcttgtagcggaatgggactacgaactggaaaaagaagtcataagagatgaaggcgttcagaaaggcctatcccaaggcctatcccaaggcctatcccaagggagatctcangaacggcgtgagaacgtcaaacatatgtaccaagaggggtacacagttgaagctatagcaaaggcgttaggcctctcgggaagagaaagtcacgatattttaggcctgtag

SEQ ID NO: 19072 - protein, 304 aa, Unknown
  Obtained from environmental sample
  misc_feature (1)..(304): Xaa is any amino acid
MIRLAEGPKQSRVQNSVFTLLFDDDEAIRDIAGSIGAILGKKIDSNTKIKKTTLQNVLLGGKLNDLSFMLDDRLVVLVEHQSTINENMPLRMLHYICETYNHLYNKKDLYRKDKILIPKPIFIVLYNGTEEIDDYKEYFLSDSFFDLDKSKESPRLELVVYVRNINKGHSVEFVEQSPLLRDYVAFVEEVRENNKKTDDGGLAMITAVEDCIKKGILTDFLNKHKEEVVKMLVAEWDYELEKEVIRDEGVQKGLSQGLSQGLSQGRSXERRENVKHMYQEGYTVEAIAKALGLSGRESHDILGL

SEQ ID NO: 19073 - DNA, 912 bp, Unknown
  Obtained from environmental sample
  misc_feature (1)..(912): n is a, c, g, or t
gtggtgtataacggaacatcaaatggctacaatgtggttgacgttcccgtgggaactggttcagaggatagcggttggacaatggaaacaggagacaaacaaattaactccttccccgtatcaggaaaaacatntaagcttctttccggtggtggagcggcggcagtcgttgaaaccactttgcttgcagattatccaaaaacggacttctacggtaataacataaccggtacagccgccgccggagcggtacagagcaacgtaagtggcagtgggatttatatagatgtttcggtgaatgacaacgaaaaaggcagcgttaccagattgcctacatctgatgatcccgatggtcttgtttcaggtccggttacgcttacggcaaatccgaagatcgggtactatttggcatactggctggtaaatgggaacaatcaagggagttcggatcaattgcaattgaacattaatgccagagtacaggcggtgtttgggagaaacttaaccgtcagtgattttatagatgtacaaggcagtaacccagcgaaaggaactttacgttatgctattaacaacgcgcagaacggggacaagatcgtcataaacttgtcaacaggacagacaaccatcgcgctgagaagcggtcttagcatagacaaggacattacaatagaagggaatggcgtaaccataacgaaggcaaactcttggacatcgaacagtgaccattttctgcgcgttcaatcttctaaggttaccatcagccgcgtctggttcaaagatggcatagtgacattagattatggagtggctgtctataataattactctggaaacaccacactggaatcctgcattttcagtgggaaccagagtaattcaggaggcgctaatacaatggcggaatcataa

SEQ ID NO: 19074 - protein, 303 aa, Unknown
  Obtained from environmental sample
  misc_feature (1)..(303): Xaa is any amino acid
MVYNGTSNGYNVVDVPVGTGSEDSGWTMETGDKQINSFPVSGKTXKLLSGGGAAAVVETTLLADYPKTDFYGNNITGTAAAGAVQSNVSGSGIYIDVSVNDNEKGSVTRLPTSDDPDGLVSGPVTLTANPKIGYYLAYWLVNGNNQGSSDQLQLNINARVQAVFGRNLTVSDFIDVQGSNPAKGTLRYAINNAQNGDKIVINLSTGQTTIALRSGLSIDKDITIEGNGVTITKANSWTSNSDHFLRVQSSKVTISRVWFKDGIVTLDYGVAVYNNYSGNTTLESCIFSGNQSNSGGANTMAES

SEQ ID NO: 19075 - DNA, 693 bp, Unknown
  Obtained from environmental sample
  misc_feature (1)..(693): n is a, c, g, or t
ttgggacaatcgccgaaagttcaagactacggcgactggcttatatttgagccgtttaacgaactgcacaacggcgactggggcagcagcataatttccagtgaacaagcaatagttaacacgttgaatcaaaaatttaccgacaagatacgcgcttccggaggcaagaacgtccagcgctttttagtagttcagcccctatgcgccaaacctaaccaggcaatggacgacggttttaaaataccgacagatacagccaaagacaaacagatcgtttccatacactactacctgccggaagcttttgcgctcaatggtaacaataacactattacctggggttcagctaatgagaaaagctctatgtccggtaatttcgagagatacgcggacaagtttaccaaaaaaggcatccccgtgattttaggcgaaagcggcgctacatatcaaaacaggaccgacgctacggctagcgccactgccgccgccgcccggattgtctacatggactatatgcacagagaggcaaagaaaaacgccattattcccatttattgggacaacggaaccattatggcaaactccgttggcgagaatttcggcctttgggatcgccggaccgaagaaggcacccttgagctgttccctgaatgtgaagctgttcttgaagcgatggtcaacgcggtacagtaa

SEQ ID NO: 19076 - protein, 230 aa, Unknown
  Obtained from environmental sample
  misc_feature (1)..(230): Xaa is any amino acid
MGQSPKVQDYGDWLIFEPFNELHNGDWGSSIISSEQAIVNTLNQKFTDKIRASGGKNVQRFLVVQPLCAKPNQAMDDGFKIPTDTAKDKQIVSIHYYLPEAFALNGNNNTITWGSANEKSSMSGNFERYADKFTKKGIPVILGESGATYQNRTDATASATAAAARIVYMDYMHREAKKNAIIPIYWDNGTIMANSVGENFGLWDRRTEEGTLELFPECEAVLEAMVNAVQ

SEQ ID NO: 19077 - DNA, 876 bp, Unknown
  Obtained from environmental sample
  misc_feature (1)..(876): n is a, c, g, or t
gtggatgggggcggtggacatccgaggtacaacgcggtaaaggtcgactgtccggcggccttgtccgacaggtataagaacgctgctaccggcggccctcccaatcccggcggcggcaaccccaccccgaccacattcacgcttacgatcaataggaaccctacggccggcgggacagccacggcgggcagccagtcgggcatcgccgccggaacgcaggtcaacataacggccgccgctgctaccggttacacgttcaacaactggacgatcacaggcagcggcacaatcgccaacgcgagcaacgcctccacgaccgtgaccgtgaacgggaatgtgaccgtaacggccaacttcacgcagaatcctaccacgtacacgctgacggtcgaaaggaatccgacggcgggcgggaccaccaatccggccagcagccaaacgaacataaacgccgggcagcaggtcaatatatcggccactccggcgagcggttatacgttcgcaaattggacgataacctccggcagcggcaatatagccaacgcgaacaacgtttccacgaccataaccgtgaacgggaacgtgacggtaagggccaatttcacgcagaaccagacccagtatacgctgaccgtaaaccgcaacccgacggctggcgggacggttaaggtgggtaacaacgactactcgtcgcctgtcacggtaaatagcgggacgtcgaccgccatatcggctgcggcggcgagcgggtacacgtttacgaattggacggtgaccagcggttcggcgcagataaataacgcgaatagcgcgagcacaacggcttcgctcagcggaaacgccactataaccgccaatttcacgcanaatccgtaa

SEQ ID NO: 19078 - protein, 291 aa, Unknown
  Obtained from environmental sample
  misc_feature (1)..(291): Xaa is any amino acid
MDGGGGHPRYNAVKVDCPAALSDRYKNAATGGPPNPGGGNPTPTTFTLTINRNPTAGGTATAGSQSGIAAGTQVNITAAAATGYTFNNWTITGSGTIANASNASTTVTVNGNVTVTANFTQNPTTYTLTVERNPTAGGTTNPASSQTNINAGQQVNISATPASGYTFANWTITSGSGNIANANNVSTTITVNGNVTVRANFTQNQTQYTLTVNRNPTAGGTVKVGNNDYSSPVTVNSGTSTAISAAAASGYTFTNWTVTSGSAQINNANSASTTASLSGNATITANFTXNP

SEQ ID NO: 19079 - DNA, 726 bp, Unknown
  Obtained from environmental sample
  misc_feature (1)..(726): n is a, c, g, or t
ttgaaccacccgaagagtaatccccgcttggaacagggcggccttcctgaagacgtgaatcccgctgtagcagccgtaatttgcgctgccggttcctccgcccgtatgcagggcgtcaaaaaagagtactgtcttttgcccggtaagaccggcagtttaaccgtgctgggcgcggcagtatcggcatttgccgccgtccctgaaattaccaccattgtcatcgccgtgcccgccgatcccataaacggagaggccgccgcccgaaaagccctgccgccggaattccttgcggaaggaaaagaacccgttattctttttgtccgcggcggcgcaacccgccgcgcttcggtttttaacgccctgtccctgcttgccgattatgcccccggctttgtgcttatccacgacggggcccgcccctgggtcagcccctcccttatacagcgtattattgccggggtaaaaaaataccgcgccgtcattcccctgctgcctttaacagagacccccaaagaaacggatacgcccctggacagcgccggtacggacgctgtttttataaaacggcatataaaacgggcttttatgggagcggcgcagacgccccagggctttgcctttcccgaaatcttgccgcccacgaacaggccgccatgcgggaagaatccctgcacactgaatttaccgacgacgcggaagtgtgggcttctttttgcggccccgtag

SEQ ID NO: 19080 - protein, 241 aa, Unknown
  Obtained from environmental sample
  DOMAIN (23)...(239): Uncharacterized protein family UPF0007
  misc_feature (1)..(241): Xaa is any amino acid
MNHPKSNPRLEQGGLPEDVNPAVAAVICAAGSSARMQGVKKEYCLLPGKTGSLTVLGAAVSAFAAVPEITTIVIAVPADPINGEAAARKALPPEFLAEGKEPVILFVRGGATRRASVFNALSLLADYAPGFVLIHDGARPWVSPSLIQRIIAGVKKYRAVIPLLPLTETPKETDTPLDSAGTDAVFIKRHIKRAFMGAAQTPQGFAFPEILPPTNRPPCGKNPCTLNLPTTRKCGLLFAAP

SEQ ID NO: 19081 - DNA, 552 bp, Unknown
  Obtained from environmental sample
  misc_feature (1)..(552): n is a, c, g, or t
gtgttaaaagaaaatggaaaaataatagcaaccgacgtacacgttttgaacgatataaacgacaattataataacgattacataaaatattccgacatattatttttaagcaatgaaagcattattggaaatgagaacgacatgataatggaattgtcccaaaaatacaaccacaaaataatagtaattacgatgggcgaaaacggcttgttaatgtatgcaaaagaaaaacatggaataaagcactttccggcaataaaaacgcgggaagtagtcaatacaataggcgctggcgatgccttgttttcatgctttatacattattactgtagtacaaaagacccttattattctatagaattagccacattatttgcgtcatacaagattggtgaaaacngggggttcaaagggctttttaacggaggaagaattaataaaactaaaaaacaaaatataagacaagggacaatgtcccataaaaggtctgtatttgcttcgccgctttcgcggcttgggctacgccgaacaaaaaagagggatctgcgataa

SEQ ID NO: 19082 - protein, 183 aa, Unknown
  Obtained from environmental sample
  misc_feature (1)..(183): Xaa is any amino acid
MLKENGKIIATDVHVLNDINDNYNNDYIKYSDILFLSNESIIGNENDMIMELSQKYNHKIIVITMGENGLLMYAKEKHGIKHFPAIKTREVVNTIGAGDALFSCFIHYYCSTKDPYYSIELATLFASYKIGENXGFKGLFNGGRINKTKKQNIRQGTMSHKRSVFASPLSRLGLRRTKKRDLR

SEQ ID NO: 19083 - DNA, 702 bp, Unknown
  Obtained from environmental sample
  misc_feature (1)..(702): n is a, c, g, or t
ttgccaagtggattgggggacccctggctactggggggttttttccattctaaaatagcagatatggggtttatcaatctggaccttgacgctatagaaggctatgttcaaaccatctgcggcttttctttcaatggccgcggggctcattgtgtggttggaatagtggctgtgtcagtcttttttatcaatgtgcgnggagccgaaaggaccatggttcccaatgtcgagggacgggatctgacagccgctcttcttgagcttcaggtgaaagagctttaccccagaattagccttcggtacagccaaagctctacggacaaggggcttattctggagcaaagcccgctgccggggactatcgttaaagcgggccggaggatacagcttgtggtaagccagggggtaatgatcaacactattgataattacattggcagaaatattgatgaagtccgtatggacatccagactcttttatcgactcagagcgcgggggggaacgtccagccaatcaccataaaagaccctttgatgtaccaatattccacggaaccggccgggacggttttacagcaaaaacctgaagcgggtacggctatttccggcccaaccgtgatggaactggttgtgagccggggcagcgaaaatgtcaggactaagctgcctaatcttattggtctgggccttatgacgcgctga

SEQ ID NO: 19084 - protein, 233 aa, Unknown
  Obtained from environmental sample
  DOMAIN (71)...(134): PASTA domain
  misc_feature (1)..(233): Xaa is any amino acid
MPSGLGDPWLLGGFFHSKIADMGFINLDLDAIEGYVQTICGFSFNGRGAHCVVGIVAVSVFFINVRGAERTMVPNVEGRDLTAALLELQVKELYPRISLRYSQSSTDKGLILEQSPLPGTIVKAGRRIQLVVSQGVMINTIDNYIGRNIDEVRMDIQTLLSTQSAGGNVQPITIKDPLMYQYSTEPAGTVLQQKPEAGTAISGPTVMELVVSRGSENVRTKLPNLIGLGLMTR

SEQ ID NO: 19085 - DNA, 318 bp, Unknown
  Obtained from environmental sample
  misc_feature (1)..(318): n is a, c, g, or t
atgaaacctgtacagcagcattttgatcttgttgataaatctatcaattctaatagtcattttaagaaaatactttctcgttctattaaagaattccctccttttttccaatcaaaaaatgttgtaatttttaatagagattgtttagaaatactatcttctattcctgaaaattcaataaatatggtttttgccgatccgccgtatatgttatcaaatggcggatttacttgccaaaatggaaaaatggctaatgtcaataaaggaaaatgggacaaaagtaatggctttgaagaagacgccagtttttcacaatga

SEQ ID NO: 19086 - protein, 105 aa, Unknown
  Obtained from environmental sample
  misc_feature (1)..(105): Xaa is any amino acid
MKPVQQHFDLVDKSINSNSHFKKILSRSIKEFPPFFQSKNVVIFNRDCLEILSSIPENSINMVFADPPYMLSNGGFTCQNGKMANVNKGKWDKSNGFEEDASFSQ

SEQ ID NO: 19087 - DNA, 318 bp, Unknown
  Obtained from environmental sample
  misc_feature (1)..(318): n is a, c, g, or t
atggacgacagaagttttatagcctcttattgccgctgggtgcttgattggcgcgggaaacaggttctttcgttaagagaaaaacaaaacaaggactgtattttttgggaatcggaatgtatgatttatgaagcgcggccgcttcaatgcgccacgttcccgttttgggaatccgtcatttcttcggagtataactgggaagcggcaagctcaggatgcccgggaattaattcggggaaactgtactcaagcgtagaaatcgggaaatatttaaagatgcgcacgacagaaccgattgtaaacaggggggaaacatga

SEQ ID NO: 19088 - protein, 105 aa, Unknown
  Obtained from environmental sample
  DOMAIN (18)...(78): Uncharacterised protein family (UPF0153)
  misc_feature (1)..(105): Xaa is any amino acid
MDDRSFIASYCRWVLDWRGKQVLSLREKQNKDCIFWESECMIYEARPLQCATFPFWESVISSEYNWEAASSGCPGINSGKLYSSVEIGKYLKMRTTEPIVNRGET

SEQ ID NO: 19089 - DNA, 615 bp, Unknown
  Obtained from environmental sample
  misc_feature (1)..(615): n is a, c, g, or t
gtgcaggaggttttggatcttggttttgacaaagtgcgtattatcgcggctgttccgcaggattatgacgatgcgaaactccgttccaaaaaacttgtagtcgccacagaatatgtaaatctggcggaagcctggcttaaatcttccggttatcaatatcagattcttcgcacatacggcgcaaccgaagttttcccgccggatgatgccgatatgattattgataacacttcttcgggacagacgctcaaagacaatgggcttaaaattatcgcgacattgcttgagtcatccacgcgttttgtagcttccaaagccgcccttgccaacgcggagaaaaagcgccgcattgaggagcttgacatgctttttcgcgccgtgcttgacgggcgtgatcgcgtaatgctggaaatgaatatcccgaaagagcagtttgagtctttatcaagccttcctgccatgcgaagtcccacggtagcgtctctttttggggaagccggttacgccgtaaaaattgccgttaaaaagcatgaagttccagatattattccaaaactaaaaaaactgggcgctcttgatattgttgaatacgatctgcgcaaagtggtgcagtag

SEQ ID NO: 19090 - protein, 204 aa, Unknown
  Obtained from environmental sample
  DOMAIN (1)...(128): ATP phosphoribosyltransferase
  misc_feature (1)..(204): Xaa is any amino acid
MQEVLDLGFDKVRIIAAVPQDYDDAKLRSKKLVVATEYVNLAEAWLKSSGYQYQILRTYGATEVFPPDDADMIIDNTSSGQTLKDNGLKIIATLLESSTRFVASKAALANAEKKRRIEELDMLFRAVLDGRDRVMLEMNIPKEQFESLSSLPAMRSPTVASLFGEAGYAVKIAVKKHEVPDIIPKLKKLGALDIVEYDLRKVVQ

SEQ ID NO: 19091 - DNA, 408 bp, Unknown
  Obtained from environmental sample
  misc_feature (1)..(408): n is a, c, g, or t
atggaaaataaagtatccaactcccaagcctggacattctttgccgacaaagatttagccctcgcagaattcatagccgagcgaccagaattcacaggagaattagcctttcattgccagcaagcagtagaaaaatacctaaaagcctaccttgtgaaatcaaaaatcccattcaaaaaaacgcacgacttagtagaattatatcacaaagtcaaagaaataaaagattttggcatagacgaaattttacttaaagaaataagagatttatacacagaagttcgctacccaagtaacatcagtctattagctgacggcacattacccacgcaagaaaaagcaaaaatctatttagattttaccaagaatgtggcaagcgttattaagaatgaaatagaaaacacataa

SEQ ID NO: 19092 - protein, 135 aa, Unknown
  Obtained from environmental sample
  DOMAIN (8)...(131): HEPN domain
  misc_feature (1)..(135): Xaa is any amino acid
MENKVSNSQAWTFFADKDLALAEFIAERPEFTGELAFHCQQAVEKYLKAYLVKSKIPFKKTHDLVELYHKVKEIKDFGIDEILLKEIRDLYTEVRYPSNISLLADGTLPTQEKAKIYLDFTKNVASVIKNEIENT

SEQ ID NO: 19093 - DNA, 834 bp, Unknown
  Obtained from environmental sample
  misc_feature (1)..(834): n is a, c, g, or t
ttgctactggatggcggaatgggtacaatggtgcagcgttttaaattaaacgacaaagatttttgggggcatggcggcaataacgatattctcgttttgagccgtcccgatgttatagagagcatccacttggaatatctcaaagttggtgcagacatcatagagagctgcaccttcaactcaaacgccgtaagccaagcggattacgggcttcaagaagaatgttacaagttgaacaaggcgggtgcggaagtggctaaaaaagccattgaaaaatatgaagctgaatttggtggtaagcattttgtagcgggttcaattggcccaacatccaaagctacaggcatggcaagcgacgtggaagacccagccgggcgagccatttcgtttaaggaactctcagaggcgtatagaacgcagataaaagggcttttggacggcggcgtggatatccttttgatagagacaatttttgacacgcttaactgcaaagccgctttatatgcggcttctaaggagcaagaagagagagggatagaagttcccgttatgctttccgcaaccataagcgatgcttctggcaggctgctcgcagggcaaacgctggaggctttttggaattcggtttgcggctacaacttattttcagtcggtttaaactgtgcccttggcgcagaggaaatgggttcgcatattgcggagatttccaggattgcaaatgtttttgtgagtgcctatccaaatgcgggcttacccaacccgctcggcggctacgacgaaacgccggaaggcatggcaggccacatagagaaattcgcgcaaaacggctggtaa

SEQ ID NO: 19094 - protein, 277 aa, Unknown
  Obtained from environmental sample
  DOMAIN (1)...(277): Homocysteine S-methyltransferase
  misc_feature (1)..(277): Xaa is any amino acid
MLLDGGMGTMVQRFKLNDKDFWGHGGNNDILVLSRPDVIESIHLEYLKVGADIIESCTFNSNAVSQADYGLQEECYKLNKAGAEVAKKAIEKYEAEFGGKHFVAGSIGPTSKATGMASDVEDPAGRAISFKELSEAYRTQIKGLLDGGVDILLIETIFDTLNCKAALYAASKEQEERGIEVPVMLSATISDASGRLLAGQTLEAFWNSVCGYNLFSVGLNCALGAEEMGSHIAEISRIANVFVSAYPNAGLPNPLGGYDETPEGMAGHIEKFAQNGW

SEQ ID NO: 19095 - DNA, 678 bp, Unknown
  Obtained from environmental sample
  misc_feature (1)..(678): n is a, c, g, or t
ttgcggatcgcggctttaaaacaaattaacggagtcctcatgaacgatacaaaaatgattatatctcttggcgggaaagaatttgttttaataggcacagcccatgtttcccgggaaagcatcgacgaagtaagcgccataatccgggaggagaagccggatctgatttgcgttgagctggatgaaggccgttacgcttcaattacacagaaggaaagctgggaaaacctgaacatgatcaaggtctttaaggaaggcaaaggctttcttcttctggccaatctggtgctttcaggttttcagcgccgcatgggtgcggagcttggtgtaaaacccggcgaagaaatgaaagcggccctggacattgcctccgaacttggcattccctatgccctttgcgaccgggaagtgcaggttaccctgcgaagggcctggacgggctgcggactctggagcaaaagcaagcttctttcggcgctcctggcaagcgcctttaccaccgaaaagctgagctcagaggaaatagaaaatctaaaaaagcgcagcgagcttgacggaatgatggaagaacttgcggactatcttcccgaagtaaaggaaacccttatcaacgagcgggatcagtaccttgccgcgaaaatctgggcaagcagcccttctgaagcaaagcgcatgtag

SEQ ID NO: 19096 - protein, 225 aa, Unknown
  Obtained from environmental sample
  DOMAIN (23)...(225): TraB family
  misc_feature (1)..(225): Xaa is any amino acid
MRIAALKQINGVLMNDTKMIISLGGKEFVLIGTAHVSRESIDEVSAIIREEKPDLICVELDEGRYASITQKESWENLNMIKVFKEGKGFLLLANLVLSGFQRRMGAELGVKPGEEMKAALDIASELGIPYALCDREVQVTLRRAWTGCGLWSKSKLLSALLASAFTTEKLSSEEIENLKKRSELDGMMEELADYLPEVKETLINERDQYLAAKIWASSPSEAKRM

SEQ ID NO: 19097 - DNA, 843 bp, Unknown
  Obtained from environmental sample
  misc_feature (1)..(843): n is a, c, g, or t
atgaccacacacatccttttcccgcaaattgaaagccaaaaacttcccgctaccatgtcgggaaaaattcttaaaggtctgcttagagagcgtctgggctttaaggggcttgtcataagcgacgcaatggagatgagggccatcaaggattactatgggataccgcaaggctgcgtttctgctctggccgcgggcgtcgacattgtttacgtctgtcacgatcctgaggatatggaagcaagcctgcgtgaaattaccttcgcctgtgaagacggccgtatcaacgaaaaagaattagacgcttcgatggagcgtgtgctccgttataaagaacgctacggggcctttgggcctaacgccgcggaagatcctatggaagagataagccgcaggaaagagcaaaacaccgccctaatgcggagcgccctggccgcccgtgaaaagggcaaagccccgccgcctttggggggggagcctttttttgttggctgccttgcctatcgggctactatagcctccacaaatccgttagcttctttgagttttgcttcgtggtttgcagaaaaactcggcggcagcttcaaggaaacggcggtgaacccggacgcggaagagatagccggtgttgtttccgctctgccggaggccagttccatcgtgctgggaacctacaacggcaacgtcaatctggggcaaatcgatcttgcccgcgccctttttgaagcggcgcaaaagagaaagattccctttatggttgtgtcgctgcggaacccctgggatctttccctgctcccgcagggtgtctacggtttagccgcctgggaatacagtctaaaagcttga

SEQ ID NO: 19098 - protein, 280 aa, Unknown
  Obtained from environmental sample
  misc_feature (1)..(280): Xaa is any amino acid
MTTHILFPQIESQKLPATMSGKILKGLLRERLGFKGLVISDAMEMRAIKDYYGIPQGCVSALAAGVDIVYVCHDPEDMEASLREITFACEDGRINEKELDASMERVLRYKERYGAFGPNAAEDPMEEISRRKEQNTALMRSALAAREKGKAPPPLGGEPFFVGCLAYRATIASTNPLASLSFASWFAEKLGGSFKETAVNPDAEEIAGVVSALPEASSIVLGTYNGNVNLGQIDLARALFEAAQKRKIPFMVVSLRNPWDLSLLPQGVYGLAAWEYSLKA

SEQ ID NO: 19099 - DNA, 744 bp, Unknown
  Obtained from environmental sample
  misc_feature (1)..(744): n is a, c, g, or t
gtggtgaacgatttccgggttagggacatggccgcaggcggacagggcgcgcctttggttccctatacggagtatctcctctaccgcgataaaaataaaactctggctctgcaaaatatcggcggcatcggcaacatcacccttctgccggcgggctgcggcgcggctgacattgccgcctttgataccgggcctggaataatggttatagacgccattgcccgctctcttcttggaacgccctgggactatgagggacgcatcgccgccgccggcaaagtaaacgcggggcttttggaatggatgctcgccaaagacaaagattaccttgaaaaacggccgcccaagagtacaggcagggagcgctacaacgacggctatgtccgcacgctgcttaaccgcgcacaggaaggcgggcttgcagcaaatgacattcttgcgaccgttacgcgctatacagccgagacaatttcgcgtggaataaaaaatttctgcgcgcctgcgccggaggaactctttgtttccgggggcgggcttcacaacaagacattgatggccgcaatccgggaactgctccccggctgcgctgttcgtagcgggaacgagcttggaatccccgccgacgccaaagaagcggttgcttttgccgtactggccaacgaaaccattttcggcctttgcaacaatgcaccggcggctacaggagcttctcaccctgttgtgatggggaaaatatctttatag

SEQ ID NO: 19100 - protein, 247 aa, Unknown
  Obtained from environmental sample
  DOMAIN (1)...(246): Uncharacterised protein family (UPF0075)
  misc_feature (1)..(247): Xaa is any amino acid
MVNDFRVRDMAAGGQGAPLVPYTEYLLYRDKNKTLALQNIGGIGNITLLPAGCGAADIAAFDTGPGIMVIDAIARSLLGTPWDYEGRIAAAGKVNAGLLEWMLAKDKDYLEKRPPKSTGRERYNDGYVRTLLNRAQEGGLAANDILATVTRYTAETISRGIKNFCAPAPEELFVSGGGLHNKTLMAAIRELLPGCAVRSGNELGIPADAKEAVAFAVLANETIFGLCNNAPAATGASHPVVMGKISL

SEQ ID NO: 19101 - DNA, 750 bp, Unknown
  Obtained from environmental sample
  misc_feature (1)..(750): n is a, c, g, or t
gtgcgtatcatcaagccgtatatcggtgggggctttggcaacaagcaggacagcctttttgaacccttgaacgcttttatgtgtaccaaagtcggcggacggctcgttaaacttgagctttcgcgggaggaagtgtttgccgccaccagggtgcggcacagtgagaaaatatacctgaaaagctgggtacgtcccaacggcaggattgtggcgcgttcctatacggctttttccaatcagggggcttacggctcccacgggcacggaatcgccgccaagggaaccaacgtattccgccagctttacaacgatgaaaaggcccgcaaggttgacatttacacggtttacacaaataccgccgcggcaggggcaatgcggggctacgggacgcctcaggcggtgttcgccatagagtcccacattgaagacattgcaaaaagccttaaacttgatccgctggaattccgtttcctcaatgtgatgcctgttggttttgttgataattttaccaaaaatgtcaaccgctttgattcattccgccagtgcgcagaggcaggcaaaaaacggatcanatgggacgagaaacgcgaacgttacgcgaaacaaagcggcccggtcaggcgcggcatcgggatgtcccttttttggtataacaccgctgtctggcccatttcgatagaaatttcatcctgcagaatggtgatgaatcangacggcagcgtacaggtacagcttggcgaaacgaaatag

SEQ ID NO: 19102 - protein, 249 aa, Unknown
  Obtained from environmental sample
  DOMAIN (1)...(249): Aldehyde oxidase and xanthine dehydrogenase, molybdopterin binding domain
  misc_feature (1)..(249): Xaa is any amino acid
MRIIKPYIGGGFGNKQDSLFEPLNAFMCTKVGGRLVKLELSREEVFAATRVRHSEKIYLKSWVRPNGRIVARSYTAFSNQGAYGSHGHGIAAKGTNVFRQLYNDEKARKVDIYTVYTNTAAAGAMRGYGTPQAVFAIESHIEDIAKSLKLDPLEFRFLNVMPVGFVDNFTKNVNRFDSFRQCAEAGKKRIXWDEKRERYAKQSGPVRRGIGMSLFWYNTAVWPISIEISSCRMVMNXDGSVQVQLGETK

SEQ ID NO: 19103 - DNA, 678 bp, Unknown
  Obtained from environmental sample
  misc_feature (1)..(678): n is a, c, g, or t
atgttccgttttcttaattactgttgcttttcatttttttttttgttatatttatgttaccgaacggtcgttaacatgacaaaaattgaaattgttaaagccgcctttaaagtgtgggggcgcgatttttacaggaaaaccagcctctcgcagcttgccaaagaattgggtgtaagcaaacccgcgctgtaccgccactttctaaataaaaaagcgctgacatccgccatgacagagtatttttgcgatgattttgccgattctgtgcgcgcggattttgaacaagccctaaaagacacggacgcggatgaggggatttttaccataatgcgcagtatatcaaactatttcgcccgaaatgcgtacgcgctgcttttctcaataattaatatttatgaccgtaatttggacggatgctcaatatcggaacggttaaaaacgcggagcgtagacataaaaacgctcagagtattaattgaaaaaaaatatgacgcgcagccgcctgcgttacagttgatctttgcaactcttattttttatatgtcgcactttcacaaaataaacggtacttttgaaaaaccgccttccgaagaactaatacagggcgttgtcgcagtaataaacgatgtaataaaaaacggactccgattcgacgtgaaagaagccnggttcgcttga

SEQ ID NO: 19104 - protein, 225 aa, Unknown
  Obtained from environmental sample
  DOMAIN (31)...(77): Bacterial regulatory proteins, tetR family
  misc_feature (1)..(225): Xaa is any amino acid
MFRFLNYCCFSFFFLLYLCYRTVVNMTKIEIVKAAFKVWGRDFYRKTSLSQLAKELGVSKPALYRHFLNKKALTSAMTEYFCDDFADSVRADFEQALKDTDADEGIFTIMRSISNYFARNAYALLFSIINIYDRNLDGCSISERLKTRSVDIKTLRVLIEKKYDAQPPALQLIFATLIFYMSHFHKINGTFEKPPSEELIQGVVAVINDVIKNGLRFDVKEAXFA

SEQ ID NO: 19105 - DNA, 327 bp, Unknown
  Obtained from environmental sample
  misc_feature (1)..(327): n is a, c, g, or t
gtgctgggcttcccgttcatattcagaggtgccttggatgtcaaggcgtccgtgataaacgaggagatgaaagtagccgccacaatggcgctggcggaattggcgcataggaacgatgtcccgaagtctgtattggacgcgtatggattgaagtcgttaaccttaggccctgaatacataatccccaagccgaatgatccgagggtgctgatagaagagagtttggcggtggctaaggcggccatagacagcggggtggcgagggataaatcggttgatcttacagagtatagacataaattggaaaagatggcggagcgtatgtga

SEQ ID NO: 19106 - protein, 108 aa, Unknown
  Obtained from environmental sample
  misc_feature (1)..(108): Xaa is any amino acid
MLGFPFIFRGALDVKASVINEEMKVAATMALAELAHRNDVPKSVLDAYGLKSLTLGPEYIIPKPNDPRVLIEESLAVAKAAIDSGVARDKSVDLTEYRHKLEKMAERM

SEQ ID NO: 19107 - DNA, 858 bp, Unknown
  Obtained from environmental sample
  misc_feature (1)..(858): n is a, c, g, or t
atgatttttgttgatgaagaaaggtatgaatattattcctcaaaggccggccttgataaagttctttccttaaaaaaaggagtaggaacgtatatttacgatctggacggaccgggggccgaaattgaacaggcggttgagaccgacacggcggcgatactttttacgtcgggaacaatgggaatccccaagggagtaatactgacgcacaggaaccttgtctcggattgttatcttgcccaaggaacgccacttatagttttacataccgacgtattttacgcgatattgccaattcatcattcatacacgatgcttgcggtattcatagaaacaatttcaactggagccgaagttgtttttggaaaacgaatggtaacaacgcaaattttaaaagaccttaaagaagcgaagatcaccatgttattaggcgtacccatgctttttaataaagttcttgccggaatcttacgcggattaaaatccaaaggaccgattgtttacggacttatatcatttttaatgggcatttccggacttataaaaaaagtttttaaagttaatcccggcaaaaaaatgtttgggttcgttctggacaaggcgagtcttacaacgatacgcatttgtatctgcggcggcggtccgctcgcgccaagcatatttagaaaatacaaccagcttggcatcgattttgttcaaggctacggtcttaccgaaacttcccccattatcgcgattaaccccattgaagcgtacaaggaaaccagcgtaggtcgcccatgccctggggtagacatgaaaatcttaaatcccgatgagcgcggagttggcgaagtaattgtaaaggtccgatggtaa

SEQ ID NO: 19108 - protein, 285 aa, Unknown
  Obtained from environmental sample
  DOMAIN (6)...(285): AMP-binding enzyme
  misc_feature (1)..(285): Xaa is any amino acid
MIFVDEERYEYYSSKAGLDKVLSLKKGVGTYIYDLDGPGAEIEQAVETDTAAILFTSGTMGIPKGVILTHRNLVSDCYLAQGTPLIVLHTDVFYAILPIHHSYTMLAVFIETISTGAEVVFGKRMVTTQILKDLKEAKITMLLGVPMLFNKVLAGILRGLKSKGPIVYGLISFLMGISGLIKKVFKVNPGKKMFGFVLDKASLTTIRICICGGGPLAPSIFRKYNQLGIDFVQGYGLTETSPIIAINPIEAYKETSVGRPCPGVDMKILNPDERGVGEVIVKVRW

SEQ ID NO: 19109 - DNA, 342 bp, Unknown
  Obtained from environmental sample
  misc_feature (1)..(342): n is a, c, g, or t
atgcacgaagcccctttcctgatacagcgggcaatggacctgggagcctccgcctatgtggcgaaatccgctaagtccgaagaatttcttgccgccattgaagcgatactcagcggcgttccctatgtatatactgaataccaaaagcagaaagaccaacagcaagacagattcagactgacaagccgtgaaattgaaattgccgcgctggtaaaacaatccctgaccgccccgcagatcgccaaacgtttaggcataagcgcgcggactgtggcaaaacaccttgaacggatttatatcaaaacagaaacatcaagctgggaagagttgcataatttgtga

SEQ ID NO: 19110 - protein, 113 aa, Unknown
  Obtained from environmental sample
  DOMAIN (60)...(104): HTH DNA binding domain
  misc_feature (1)..(113): Xaa is any amino acid
MHEAPFLIQRAMDLGASAYVAKSAKSEEFLAAIEAILSGVPYVYTEYQKQKDQQQDRFRLTSREIEIAALVKQSLTAPQIAKRLGISARTVAKHLERIYIKTETSSWEELHNL

SEQ ID NO: 19111 - DNA, 399 bp, Unknown
  Obtained from environmental sample
  misc_feature (1)..(399): n is a, c, g, or t
gtgattaaaaacagccgcatagctcaggctcttctggttaccggcgcgtcggcggttggcgcggcgacaagaatggatgttaaggaattaaccgacattatgaacgaatcggtcggggagattgtacaaacgcttattaacagcggttattcacaagcccaggaatttgaagccgataataccgcattgtctcttatggcaggcgccggatataacccgtcaggtttgatagaaatgcttaaatcattgagcagtgttcaaacagcgggcgtgggttttggcaagacgcacccaagccctgccatgcgcataaccaatgctaaaaggtcagtgaaaaaatataaagtcacggatacaggcgcgttaagaaatgcgcggtttaccgtggaatcaaaatag

SEQ ID NO: 19112 - protein, 132 aa, Unknown
  Obtained from environmental sample
  SIGNAL (1)...(21)
  misc_feature (1)..(132): Xaa is any amino acid
MIKNSRIAQALLVTGASAVGAATRMDVKELTDIMNESVGEIVQTLINSGYSQAQEFEADNTALSLMAGAGYNPSGLIEMLKSLSSVQTAGVGFGKTHPSPAMRITNAKRSVKKYKVTDTGALRNARFTVESK

SEQ ID NO: 19113 - DNA, 567 bp, Unknown
  Obtained from environmental sample
  misc_feature (1)..(567): n is a, c, g, or t
atgaatgattttatcgccatagattttgaaaccgctacggggaaacctgaaagcgctatntccgtcggctttgtaaagtaccgcaattacaagcctgtaagctcttattattcgttaatccgtccgccgaatctgtacatacgcccggattttacggagattcacggccttacggttgacgatgtaagggacgcgccagatttcggttatctatggaaaaaggaaataaggggatttataggaaaaaccatgcttgcggcgcacaacgcgccgtttgacatgagggttcttaacgcggttcttgaatggtacgagcttcccgttccgaaactgccttatttttgcacgcttaatttggcgcgttatgcttggccaaaacttgaatctcacgcgcttgcgaaacttgccaggaatttcgggattgtttacaacgcgcacaacgctcttgatgacgcgcttacctgcgggaaacttgtgcagatggcggcgggggagtttgagccgggaaagggtattgaggaatttttggagtatatgggggttgaggtaaaatgtttgaggaaataa

SEQ ID NO: 19114 - protein, 188 aa, Unknown
  Obtained from environmental sample
  DOMAIN (4)...(159): Exonuclease
  misc_feature (1)..(188): Xaa is any amino acid
MNDFIAIDFETATGKPESAXSVGFVKYRNYKPVSSYYSLIRPPNLYIRPDFTEIHGLTVDDVRDAPDFGYLWKKEIRGFIGKTMLAAHNAPFDMRVLNAVLEWYELPVPKLPYFCTLNLARYAWPKLESHALAKLARNFGIVYNAHNALDDALTCGKLVQMAAGEFEPGKGIEEFLEYMGVEVKCLRK

SEQ ID NO: 19115 - DNA, 813 bp, Unknown
  Obtained from environmental sample
  misc_feature (1)..(813): n is a, c, g, or t
atgagtgatatgcaaaaaaacacttacgaaagcccgttgctttccagatattcatcagatgaaatgctgcatttatttagcccgcagttcaagcatcaaacttggcgtaggctttggatttggcttgccgaaggcgagcgagaacttgggcttccaataacagaagaacaaatatcagaactaaaaatttacgaaagcaatataaactgggaagaagccgcccaagaggaaaaacgccggcgccacgatgttatggctcacatacacgcatttggtttgcaggcaccaaaggcaaaagggataatacacctaggtgcgacaagcgcttatgttggtgataacacagatttaattcaaatgcagcagggcttaattctcattcgccgccgtttgtgcagggtaatagacaatctctcgcattttgctttggaatataaagatatgcccattttgggacgcacgcattttcaagcggcgcagctcacaaccgttggaaaaagagccacgctttggattcaagatttgctaattgacttagaagaaataaatcatttaatagaaattttgccattcaggggcgttaaagggacaaccggaacccaagccagctttatggaattgtttggtggcgaccacgaaaagattaaaaaattagatgcttatgttagcaaaaaagctggctttaaaaaagttctttcgataacagggcaaacatatacccgcaaatgggattacattgtgaaacacgccctagcctctctttcaacagcctcagcaattcgcaacagatttgcgcataatgcaggggcttaa

SEQ ID NO: 19116 - protein, 270 aa, Unknown
  Obtained from environmental sample
  DOMAIN (15)...(270): Lyase
  misc_feature (1)..(270): Xaa is any amino acid
MSDMQKNTYESPLLSRYSSDEMLHLFSPQFKHQTWRRLWIWLAEGERELGLPITEEQISELKIYESNINWEEAAQEEKRRRHDVMAHIHAFGLQAPKAKGIIHLGATSAYVGDNTDLIQMQQGLILIRRRLCRVIDNLSHFALEYKDMPILGRTHFQAAQLTTVGKRATLWIQDLLIDLEEINHLIEILPFRGVKGTTGTQASFMELFGGDHEKIKKLDAYVSKKAGFKKVLSITGQTYTRKWDYIVKHALASLSTASAIRNRFAHNAGA

SEQ ID NO: 19117 - DNA, 480 bp, Unknown
  Obtained from environmental sample
  misc_feature (1)..(480): n is a, c, g, or t
atggcgggcgcgccgcttgaatcccatgaatacacagcggttgacggcggccttcttgtccaaagcacagacaggaagcttttggaaaaatgggaagtcgttacgcgaataaaacccgagggccgcgacatcgcggacatgatctttggaatgagggcggtaacttttgtaaaatccaacggaatcatgctcgttaaagatcagggggcgacaggcataggcggcggacaggtcaaccgcatctggcccgcaacgcaggcgctggaacgcagtgcggcggtaacaggggctgataccgcccgtgttctggcatcggacgcctttttcccgtttaccgacatagttgaagtcgcggcggcggctggcgttaaggcaatcattcagcccggcggctcaatcaacgacaagctctcaatcgaagcctgcgacagtcacggcatctcgatggtgtttacaggaacaaggcatttcaaacattag

SEQ ID NO: 19118 - protein, 159 aa, Unknown
  Obtained from environmental sample
  misc_feature (1)..(159): Xaa is any amino acid
MAGAPLESHEYTAVDGGLLVQSTDRKLLEKWEVVTRIKPEGRDIADMIFGMRAVTFVKSNGIMLVKDQGATGIGGGQVNRIWPATQALERSAAVTGADTARVLASDAFFPFTDIVEVAAAAGVKAIIQPGGSINDKLSIEACDSHGISMVFTGTRHFKH

SEQ ID NO: 19119 - DNA, 477 bp, Unknown
  Obtained from environmental sample
  misc_feature (1)..(477): n is a, c, g, or t
gtgctggtgcgggtgcacagcgaatgcctgaccggcgacgcgcttggatcattgcgctgcgactgcggcgagcagctgggcgcggctctgacccagatcgaacgcgaaggccggggagtgctcgtctacatgcgccaggaggggcgcggcattggccttggcaacaagatcaaggcctacgccctgcaggacaagggactggacacggtagaagccaacgaagagctgggttttcgccccgatctgcgcgattacggcgttggcgcccagatactcgttgatctcggggtgcggcgcatgcgcatcatgaccaacaatccgcgcaagatcatcgggctggaaggctacggcatcgaaatcaccgagcgcgtacccattgaaatgcccccgcgcccggacaatatagactatctggccgccaagcaggaaaaaatggggcatctgtatccgcatccgctcagcaactgcaaaatttga

SEQ ID NO: 19120 - protein, 158 aa, Unknown
  Obtained from environmental sample
  DOMAIN (1)...(126): GTP cyclohydrolase II
  misc_feature (1)..(158): Xaa is any amino acid
MLVRVHSECLTGDALGSLRCDCGEQLGAALTQIEREGRGVLVYMRQEGRGIGLGNKIKAYALQDKGLDTVEANEELGFRPDLRDYGVGAQILVDLGVRRMRIMTNNPRKIIGLEGYGIEITERVPIEMPPRPDNIDYLAAKQEKMGHLYPHPLSNCKI

SEQ ID NO: 19121 - DNA, 588 bp, Unknown
  Obtained from environmental sample
  misc_feature (1)..(588): n is a, c, g, or t
atgccgatcacgcgcacaccccgtttccgcaggccggcggctgccggggatgcggccgccgccgccgaggagaagaagatggtctcctccgggcgctcctgcacaactttcagcccatcggccatggtcagccgggaaatgacggatgcggccaggggctggcgcgtgaccggcctgtcttccaggcgggcggtcagcaggggattgtcggccaaaagggtgttggcgcctaccagcaccgcgccgccgcgcagtccgacagccgcgcgcagttcatgcgcccgcgcccgcgaagcctcgccgctgatccagcgggaatgcccgtgccgggtggcgatgcgcccgtccagcgtgccggccagcttgagcacgacaaaggggcgcctgaacttttgccagacgagaaaatccgccgccaaatcccggcaggcgtcttcgcatacgcccgtatccacctgcacgcccgccgcgcgcagccgggcgatgccgcctgcggccacgggattgggatcaggcaggcccaccgccacgcggcggatgccggcggccaagacggcttccgtgcaggggggcatattgccctggtga

SEQ ID NO: 19122 - protein, 195 aa, Unknown
  Obtained from environmental sample
  misc_feature (1)..(195): Xaa is any amino acid
MPITRTPRFRRPAAAGDAAAAAEEKKMVSSGRSCTTFSPSAMVSREMTDAARGWRVTGLSSRRAVSRGLSAKRVLAPTSTAPPRSPTAARSSCARAREASPLIQRECPCRVAMRPSSVPASLSTTKGRLNFCQTRKSAAKSRQASSHTPVSTCTPAARSRAMPPAATGLGSGRPTATRRMPAAKTASVQGGILPW

SEQ ID NO: 19123 - DNA, 732 bp, Unknown
  Obtained from environmental sample
  misc_feature (1)..(732): n is a, c, g, or t
gtgcagtattgttttgccaatgaggacggaacaagccgaacttgttgcagaaaatgcattgcatgttntgcggatttaccacaatggaaactgtctcttggctttggaggaattatgagctttcaacccacccctgcaggcgaacagctgttgaccattgccgaaatagcccggcatttctccctgcccgagtccacgacccgttattattgcaagcgttttgcgtcctacatgccggtatgcggtgaaggccggcgcaagcgctaccgcaaggcggcgctggatgtcatcagcgctgtgcttgaggccatgcgcgatgcgcgcaccgccgttggcgttgaagcgatgcttgcggaaaattttccttgcaacgcgttgtccttgatgaatcccgcagcgaaatccgtcccgcccgaaggaagcttgcccgtctctactcagggagtgccgcttcagcttatcgaacagcaaggcagggcgctggaaggcatagcttccgcgctggctctgcttgtgcgcaggcaggaggatctggaggagttggcgcaacaggcccgtatcgcgcaagaggaaagtagaatcctgcgcgacgaggtcgcccgcctgcgcgtggtgatggatagcgccgagaagctgcatcagcaggatctggatcaactccgcaactggcttggccgtttgatacgcatccagtccaacgcagccgcgtccgcagccgcatccgccgcctga

SEQ ID NO: 19124 - protein, 243 aa, Unknown
  Obtained from environmental sample
  misc_feature (1)..(243): Xaa is any amino acid
MQYCFANEDGTSRTCCRKCIACXADLPQWKLSLGFGGIMSFQPTPAGEQLLTIAEIARHFSLPESTTRYYCKRFASYMPVCGEGRRKRYRKAALDVISAVLEAMRDARTAVGVEAMLAENFPCNALSLMNPAAKSVPPEGSLPVSTQGVPLQLIEQQGRALEGIASALALLVRRQEDLEELAQQARIAQEESRILRDEVARLRVVMDSAEKLHQQDLDQLRNWLGRLIRIQSNAAASAAASAA

SEQ ID NO: 19125 - DNA, 324 bp, Unknown
  Obtained from environmental sample
  misc_feature (1)..(324): n is a, c, g, or t
gtgcttcactgttattccgaagacgccgcttatgccgagaaagctcttgagcttaatctgtatttttcttttgcgggaaatcttacctacaagaacgcgaaaaatttacacgagactctttctgttcttcccgtagaccgcatattgattgaatcggaaagtccgttcatggttccggctgattatcgcggcaaaagaaatatgcccaagtatctgccgcttaccgcccgtttcatggcgaacatgcttgatatggacgaagaggctcttgccgctcaactctgggaaaactcgaataaatttttcggcttgccgagcgaatag

SEQ ID NO: 19126 - protein, 107 aa, Unknown
  Obtained from environmental sample
  DOMAIN (1)...(103): TatD related DNase
  misc_feature (1)..(107): Xaa is any amino acid
MLHCYSEDAAYAEKALELNLYFSFAGNLTYKNAKNLHETLSVLPVDRILIESESPFMVPADYRGKRNMPKYLPLTARFMANMLDMDEEALAAQLWENSNKFFGLPSE

SEQ ID NO: 19127 - DNA, 825 bp, Unknown
  Obtained from environmental sample
  misc_feature (1)..(825): n is a, c, g, or t
gtgctggacaatactggcataaaaatagaaaccgatttggctgaactaaaaaattttatgggcataatttcagaaacaactcgcaatatgattgttaaaggcgaaaattatgagaaagtgtcttggtatttgaaaaatgtaactgaatatatatccaattatgaaaataaattatcgcaagttaccgatatttatggtatttttgatgtatttgatggaaaatttcattccgatgttgatagggttcccccagaaaattattcgcctcaaaaacgcccttggtataaagcagccgttgaagccaatgggagcattgctgttacggaaccatatacggatgttgttttggatgttcccattatcactttttcgcgcagaattatggacgataacggcaaacctcttggcatagtttgcatggacttaaggctagacaaaattaaggaatatgctgcaaaggtgaatttaactgaaggcacctatagcatattattcaataaacaatttgaaatcatcgctcatccaagtcaatcgtatttaggtaaatccctgcgccaattaaatgatggtctctccattgaaagcgatttaaggcaaggcataaatgtttctgagcgcaaagtgatggattataggggcaatcaatccattgcttttatgcggcaactagataatggctggagccttgcaattttaataccttctaaagagtattataggagcttaaatggcatggcagaatttctctctgcactcggctttacaatggctgttattttaagccctgctcctatcgcgnncataacagcaacaaccaacaactaa

SEQ ID NO: 19128 - protein, 274 aa, Unknown
  Obtained from environmental sample
  DOMAIN (107)...(187): Cache domain
  misc_feature (1)..(274): Xaa is any amino acid
MLDNTGIKIETDLAELKNFMGIISETTRNMIVKGENYEKVSWYLKNVTEYISNYENKLSQVTDIYGIFDVFDGKFHSDVDRVPPENYSPQKRPWYKAAVEANGSIAVTEPYTDVVLDVPIITFSRRIMDDNGKPLGIVCMDLRLDKIKEYAAKVNLTEGTYSILFNKQFEIIAHPSQSYLGKSLRQLNDGLSIESDLRQGINVSERKVMDYRGNQSIAFMRQLDNGWSLAILIPSKEYYRSLNGMAEFLSALGFTMAVILSPAPIAXITATTNN

SEQ ID NO: 19129 - DNA, 831 bp, Unknown
  Obtained from environmental sample
  misc_feature (1)..(831): n is a, c, g, or t
gtgtcaacgccatgcttgagagggccagcgcgaggcaaggataatttaccaatgagcactatcgctctaataacggatttcggcaatgaggattggttcgccggggagttgaagggggccatcctctcgataaatccgctcgccgtacccatagaccttacgcactccattcagcgcggctacatacgggaggccgcgtttattctcttggcctcctaccgcagcttcccggagaacacggttttcatgtcggcggtggactacggcagcacgcgcacgcgggtaatctgcgcgcgcaccgcgtcgcatatattcttagcccctgacaacggtctgttgtcgtgggttctgcgccgcgagacggcggcggacgttcgggaggtgaacatcgacgagtatctgctgccgtcgggttgttcgaccttccccgcccgcgatctcttggcgccgcttgccgccggactctccgattggctggagttcgagaactgcggcgaggagacgaaagagtacgtaacgctccactggccggagccgaatctcggcaagggcacagcggaggctgcggtgatatacatagaccgcttcggcaacgcgataacatccataagcccgcgcgaggtggtcttctcctgcggcgacgctccgaattgcatattggagaacgacaggcgagtaccgctcggcaaccactacagcgacgtcccattgtggaacgcggtggcctacccggggtcggcgggattgatggaaataggggtcaacggcggcaacgcggcggaaatcctggaattggaaatcgggagcaacgtttgctttacgtcgctttga

SEQ ID NO: 19130 - protein, 276 aa, Unknown
  Obtained from environmental sample
  DOMAIN (20)...(275): Protein of unknown function DUF62
  misc_feature (1)..(276): Xaa is any amino acid
MSTPCLRGPARGKDNLPMSTIALITDFGNEDWFAGELKGAILSINPLAVPIDLTHSIQRGYIREAAFILLASYRSFPENTVFMSAVDYGSTRTRVICARTASHIFLAPDNGLLSWVLRRETAADVREVNIDEYLLPSGCSTFPARDLLAPLAAGLSDWLEFENCGEETKEYVTLHWPEPNLGKGTAEAAVIYIDRFGNAITSISPREVVFSCGDAPNCILENDRRVPLGNHYSDVPLWNAVAYPGSAGLMEIGVNGGNAAEILELEIGSNVCFTSL

SEQ ID NO: 19131 - DNA, 456 bp, Unknown
  Obtained from environmental sample
  misc_feature (1)..(456): n is a, c, g, or t
atgttagatgaagatgagactgtaattgtgcctggcgtagggggaagatcccccataactattccgcggtcacagatactcgcgattataaaacccagaatggaggaaatatttaaactgattaaacaacatcttgactcgctaaatcttccgcgtccgcttggaggaggcgttgtattaacaggcggcggagcgcagttgtcaggtgttgttgatcttgcgaacagtatattaaaactgccctcgcgtcttggaagccctataccatcgccggatttggaaggattggcagaggaataccggacgccctcttatgcgacagtcataggacttgcgcttgagggaaaccgcagggtgggaattgattcaggtgaaaggggtgaaaaacacggggagaaaaaaaacgaagctcttattggcaagttaatatcatggctaaaagaggaattcgcataa

SEQ ID NO: 19132 - protein, 151 aa, Unknown
  Obtained from environmental sample
  DOMAIN (1)...(111): Cell division protein FtsA
  misc_feature (1)..(151): Xaa is any amino acid
MLDEDETVIVPGVGGRSPITIPRSQILAIIKPRMEEIFKLIKQHLDSLNLPRPLGGGVVLTGGGAQLSGVVDLANSILKLPSRLGSPIPSPDLEGLAEEYRTPSYATVIGLALEGNRRVGIDSGERGEKHGEKKNEALIGKLISWLKEEFA

SEQ ID NO: 19133 - DNA, 552 bp, Unknown
  Obtained from environmental sample
  misc_feature (1)..(552): n is a, c, g, or t
atgagccttaaaataaaattaacaattattatcctggttatgatccttgtatccgtcgcggtcttatccgtgttcactcttacccggtctgcatctttgcagtctgacacaacccaacagtacgccggagcgttagcaaaactcaactcaaaggaaattcagcggcaaatggaagttttcacggattacggaagcgtacttgtccagatatttgacggctatgaaggtacggaaatgagcggacggcgtgctatgtatgatgatgttatgcacagccttatcgcaacagtcgattctattaccggtatctggacagcgtggcttcccggaaccatagacaattatgactccagactggggcagtataatactttcttccataggagaaacggtcctgtggttaaagaacccgccggctacgatggctggcaggaccatctggcgagaataactccaaaaggacttgtttctacaacaggggcagaaccggcttttaaggaacttgcagaccctgtgtgngaggaatatagtcggcaggctcggccgatctga

SEQ ID NO: 19134 - protein, 183 aa, Unknown
  Obtained from environmental sample
  SIGNAL (1)...(26)
  misc_feature (1)..(183): Xaa is any amino acid
MSLKIKLTIIILVMILVSVAVLSVFTLTRSASLQSDTTQQYAGALAKLNSKEIQRQMEVFTDYGSVLVQIFDGYEGTEMSGRRAMYDDVMHSLIATVDSITGIWTAWLPGTIDNYDSRLGQYNTFFHRRNGPVVKEPAGYDGWQDHLARITPKGLVSTTGAEPAFKELADPVXEEYSRQARPI

SEQ ID NO: 19135 - DNA, 453 bp, Unknown
  Obtained from environmental sample
  misc_feature (1)..(453): n is a, c, g, or t
atgagtgcggcggcggttgcaaaagaagattccgctttgaataggtttggcaaagaattggtatcccttgccgcagagggaaagctagaccccgttatagggcgtgaagaggaaatccgcagagtgattcgcattttggcacgcaaaacaaaaaataatcctgtgctcgtgggggagccgggcacaggaaaaaccgccattgtagagggcctcgcgcaccgcattcacagaaacgatgtgccagatgccttaaaaggcaaaaaaatattttcacttgatttatccgcttntatagcaggtgcaaaatatcaaggcgaatttgaagaacgcttaanagcccgtttagacgaattggaacaggagcaagatacgcttttgtttcatagacgaaattcacaacataataggggcaggaaaaaacgcagggcagtatggatttgggcaaaatgctaa

SEQ ID NO: 19136 - protein, 150 aa, Unknown
  Obtained from environmental sample
  misc_feature (1)..(150): Xaa is any amino acid
MSAAAVAKEDSALNRFGKELVSLAAEGKLDPVIGREEEIRRVIRILARKTKNNPVLVGEPGTGKTAIVEGLAHRIHRNDVPDALKGKKIFSLDLSAXIAGAKYQGEFEERLXARLDELEQEQDTLLFHRRNSQHNRGRKKRRAVWIWAKC

SEQ ID NO: 19137 - DNA, 540 bp, Unknown
  Obtained from environmental sample
  misc_feature (1)..(540): n is a, c, g, or t
ttgtgccgggacctgtgctgccgcttcaggcaggaccacccttctcttgacccagaactgggttatttggcggggattgcccacgatctgtgcaagctgtttagcgacaaggaccagttcaggctggcaaaggaatacggcggagaaataacgcgcctggaaaaagaaaagccgtcgctgcttcatggcaaggcctgcgcggccctgctgaaggagcgttttaaaatacagaataaagtgctgctggaagcgatagcccggcatacagaaggccacaaggacatgggccctctggcaaaaattctgtatattgcggacaaaatggaagtgtcgcgggtaaaagtcgatcctgccgccaggaaccggatattgtcaggcgatacccttgaccagatttttttgtcggtattggaacggactatctcttcgctgcgtaccagaaagctggaagtgtcaaaagaaaccctgggcctccttgagaaaatgggcgcgctggatttattgaaggaagacggaggcggccgcaatgcggacaaataa

SEQ ID NO: 19138 - protein, 179 aa, Unknown
  Obtained from environmental sample
  DOMAIN (8)...(111): HD domain
  misc_feature (1)..(179): Xaa is any amino acid
MCRDLCCRFRQDHPSLDPELGYLAGIAHDLCKLFSDKDQFRLAKEYGGEITRLEKEKPSLLHGKACAALLKERFKIQNKVLLEAIARHTEGHKDMGPLAKILYIADKMEVSRVKVDPAARNRILSGDTLDQIFLSVLERTISSLRTRKLEVSKETLGLLEKMGALDLLKEDGGGRNADK

SEQ ID NO: 19139 - DNA, 603 bp, Unknown
  Obtained from environmental sample
  misc_feature (1)..(603): n is a, c, g, or t
atgacagatcggccgagtgaatacgatgttgtccttgcaggagtcgggggtcagggagtgctttctgtcgcctcaataatcgcccagtccgcgcttagcgaagggcttgaagtgcgtcagagcgaagtacacggaatggcccaaaggggcggcgctgtactgtcccatctgcgcatttcagacggaaatatcgcaggagaccttgttccgaaaggcggcgcagaccttgtcatttcaatggaacctcttgaaagccttcgttatgtgtcattcctgaaaacaggcggcgttcttgtaacgaataccggacagtttaacaatattccgaactatcccgataccgaaaaagttatttcggcgataaaaagccttccgaaccgcaggcttgttgaagcggattctcttgcaaaagaagcggggcttgccaggacggtaaacacggttatggtaggagcggcttcctgtttcctgcctgttaaagctcaaagccttgaaaaaaccattacggcggtattttcaaataaaggcggtaatgtaattgaggctaatgtaaaagcttttaaactcgggcaggcggcggcaaaagacgcaggtaaaaaatga

SEQ ID NO: 19140 - protein, 200 aa, Unknown
  Obtained from environmental sample
  DOMAIN (16)...(192): Pyruvate ferredoxin/flavodoxin oxidoreductase
  misc_feature (1)..(200): Xaa is any amino acid
MTDRPSEYDVVLAGVGGQGVLSVASIIAQSALSEGLEVRQSEVHGMAQRGGAVLSHLRISDGNIAGDLVPKGGADLVISMEPLESLRYVSFLKTGGVLVTNTGQFNNIPNYPDTEKVISAIKSLPNRRLVEADSLAKEAGLARTVNTVMVGAASCFLPVKAQSLEKTITAVFSNKGGNVIEANVKAFKLGQAAAKDAGKK

SEQ ID NO: 19141 - DNA, 405 bp, Unknown
  Obtained from environmental sample
  misc_feature (1)..(405): n is a, c, g, or t
ttgaaatacgcggcagccgaaaccgttaacgccgaatacgcccttgcgcgggaacgctggaaaaaacttataacttccctttctgcgtttgaacgctgtacgcttattccgcgccggcgcgccgcgcctgatgctcaggacgggttttctccgtatattttacaggcggcttttaagaacatacccggagaagttatggcgcgcgccctcgacgaccttggctttgcggtttctacaggctccgcctgttcttcatcgtcgccagagcggcctgttcttcttgcaatgggcgttgatgaaaaattaagaatagaaggaatccgcatctcacagggatattcaactacagacgaagaaatcgatctgcttgtcgaggcaatagcggaggttttaaaatttctgtaa

SEQ ID NO: 19142 - protein, 134 aa, Unknown
  Obtained from environmental sample
  misc_feature (1)..(134): Xaa is any amino acid
MKYAAAETVNAEYALARERWKKLITSLSAFERCTLIPRRRAAPDAQDGFSPYILQAAFKNIPGEVMARALDDLGFAVSTGSACSSSSPERPVLLAMGVDEKLRIEGIRISQGYSTTDEEIDLLVEAIAEVLKFL

SEQ ID NO: 19143 - DNA, 348 bp, Unknown
  Obtained from environmental sample
  misc_feature (1)..(348): n is a, c, g, or t
atgctgggcgaagttaaagtaaaaataaaaacgacaaacggacgcttctttcttgaatgtaacgaagaaaattcaggcgtcatcgaggactgcctttcccgtcttattggaatttccggctgggcaaaaaccgttatctgtcaaaaatctgttgaagccgtaactgcggcttgtattgaagaagcgaaaatatttgcgcataacggcattaaaacttttaagataaccgcgcggagaaccgacaaaggtttcccgctgagttcttacgaattatgctgccgcgcgggagaagcggtattaaattcggaaagcggtctaaaagtgacattcatgatccgcaaggagtaa

SEQ ID NO: 19144 - protein, 115 aa, Unknown
  Obtained from environmental sample
  misc_feature (1)..(115): Xaa is any amino acid
MLGEVKVKIKTTNGRFFLECNEENSGVIEDCLSRLIGISGWAKTVICQKSVEAVTAACIEEAKIFAHNGIKTFKITARRTDKGFPLSSYELCCRAGEAVLNSESGLKVTFMIRKE

SEQ ID NO: 19145 - DNA, 540 bp, Unknown
  Obtained from environmental sample
  misc_feature (1)..(540): n is a, c, g, or t
gtgggcgaatttgacaaagttattgccaaggaagttgttaagcgcgatgttgagttgagatacgacagtaaaacaggctaccttggaacaaatgtatcgggagcgaagattgcggaagtgtcgccgtatgaccgtattctcgcaatccgcaaaaacggaatgtatacagttatggatttaagcgaaaaggcgtttatcggcgcggaagcgtggtttataggagcggcggacaaggatattctttccaaaacaatttttacaataatttacaaggaaaaagacacgggctatccttgcattaaacgctgtgtaattgaaggatggataatgaacaaggattattttcttgtaccggacggcgctgaagttatgcacatagacattaagccgaaatttacatttactgttaaatacaaacccaaaccgcggcttaaagttctttcggaagattttaaggcgcaggactacaatgtacgcggattaaaagccggaggaatcaggctgtccgcgaaagaagccgagaaagtaaccggcgtatag

SEQ ID NO: 19146 - protein, 179 aa, Unknown
  Obtained from environmental sample
  misc_feature (1)..(179): Xaa is any amino acid
MGEFDKVIAKEVVKRDVELRYDSKTGYLGTNVSGAKIAEVSPYDRILAIRKNGMYTVMDLSEKAFIGAEAWFIGAADKDILSKTIFTIIYKEKDTGYPCIKRCVIEGWIMNKDYFLVPDGAEVMHIDIKPKFTFTVKYKPKPRLKVLSEDFKAQDYNVRGLKAGGIRLSAKEAEKVTGV

SEQ ID NO: 19147 - DNA, 684 bp, Unknown
  Obtained from environmental sample
  misc_feature (1)..(684): n is a, c, g, or t
ttggcgtggaaaatagcgaaagacagcaccttaaccgccaaaagtgaactagatagcgccgttttgggtgtcggcaccgtgatatccgacaaaaacaccatcgtcgccggcagtataactatgaagtacgattctggcgccggcaatcagtcgtacgtacaattcggagccaaccacggtagcggagcagacggcgccgccaagctggaagccagactccacgacgccgccgtaggcgacagcattactttcatcttctccgagtaccaagccgcctcctccaagttgaacgactccgtaatggcccaaataggcgccaacagcggtcagacggctttcgtctccatgggcgacatgagggccaaggcgctcggcatatccgacataagcgtcagcaccaagtggggcgcggcgacggccattgagacggtgaacaacgcgttgcagaaggtttcgcatcagcgcagctctttgggcgcgattcagaaccgtctggagcacacgatcaagaacctcgacacagccgcggagaatttgcaggctgccgagagtcgtattcgcgacgtggacatggcgaaggagatcatggagttcacaaagaacaacattctccagcaagcgtctcaggcgatgctggcccaggcgaattcgcagccgcagagcgtgttggcgcttcttaggtag

SEQ ID NO: 19148 - protein, 227 aa, Unknown
  Obtained from environmental sample
  DOMAIN (134)...(205): Bacterial flagellin C-terminus
  misc_feature (1)..(227): Xaa is any amino acid
MAWKIAKDSTLTAKSELDSAVLGVGTVISDKNTIVAGSITMKYDSGAGNQSYVQFGANHGSGADGAAKLEARLHDAAVGDSITFIFSEYQAASSKLNDSVMAQIGANSGQTAFVSMGDMRAKALGISDISVSTKWGAATAIETVNNALQKVSHQRSSLGAIQNRLEHTIKNLDTAAENLQAAESRIRDVDMAKEIMEFTKNNILQQASQAMLAQANSQPQSVLALLR

SEQ ID NO: 19149 - DNA, 636 bp, Unknown
  Obtained from environmental sample
  misc_feature (1)..(636): n is a, c, g, or t
atgagcagccggactacaaaagcggatatttatccggtgttgaaaaaatcgcctattttctcgaatctgagcaagctagagcttgacgcggttctttcttttcttgagccccgaagcatgaaaaaaggggaagtcgtcttcaacgaaggcgcaagaggggaagaaatgttcgttattgtttccggcaagatcggagcctgggtagcccaggttgatggaacacagcgatggagttttgagctgaaaacaggggatttttttggggagatgtcaataatcgcgaatgaaaccagatcggcaaccatagtcgcccaggaagacctaaagcttctaaccctgaacggagttgatttttaccgcattgtttttgagtatccaaagattggaacaaaaatgcttaactctatccgaaaggtgcaaaacatgtggtttgaacaaatctcaaaacacctgggcgatataatgcgctggggagaggctgcccgccgccgcgctgtcactgatgagcttacgggcctatacaaccgccgctttcttgaagaatccgctggcgaacgcttttcgcgggggactcttggtctccgcagcgtttccctgatgatgatggatctggatnaaatacacgagatcaaatga

SEQ ID NO: 19150 - protein, 211 aa, Unknown
  Obtained from environmental sample
  DOMAIN (37)...(127): Cyclic nucleotide-binding domain
  misc_feature (1)..(211): Xaa is any amino acid
MSSRTTKADIYPVLKKSPIFSNLSKLELDAVLSFLEPRSMKKGEVVFNEGARGEEMFVIVSGKIGAWVAQVDGTQRWSFELKTGDFFGEMSIIANETRSATIVAQEDLKLLTLNGVDFYRIVFEYPKIGTKMLNSIRKVQNMWFEQISKHLGDIMRWGEAARRRAVTDELTGLYNRRFLEESAGERFSRGTLGLRSVSLMMMDLDXIHEIK

SEQ ID NO: 19151 - DNA, 651 bp, Unknown
  Obtained from environmental sample
  misc_feature (1)..(651): n is a, c, g, or t
ttgcgccacgttttttcgcgcaaagtttcaggggtgggggagatgtgcctctacctcggttttaccaacggcgagaaaggcttttcccgcaactgcgcgaagaacgcgcacagggtggcgcggcgtttcggcgggatttggctttccggcatggtcacccggagctgggaaaagggccgctttaacgacccgtacctccgcgacacgttgcaggatttcggcgttgtaatggacaccatggagtgcagcgtcaactggagcaacatgggcaaagtccaccgcgaagtgcgggcgtttgtcaaaagccgccccaagaccgtctgcatgacccacatgagccacgtctatccccagggggcgaacctctactggatattcatcacccacattcacgacccggaggagttccgccttttccatgcggggattctcgatgccatacaaaagtccggcgcatcaatgagccaccaccacggcatcggcaaaatgttcgccccctggcttgaaggcagcgtcgggcgcaacgagtacgccgttttccgcgccctgaaaaaacatttcgatcccgacaacatcatgaaccccggcggaaccctcggtttcgaccttgacgagaaggagaagaagtttttgctaagcgggaatgggtag

SEQ ID NO: 19152 - protein, 216 aa, Unknown
  Obtained from environmental sample
  DOMAIN (1)...(198): FAD linked oxidases, C-terminal domain
  misc_feature (1)..(216): Xaa is any amino acid
MRHVFSRKVSGVGEMCLYLGFTNGEKGFSRNCAKNAHRVARRFGGIWLSGMVTRSWEKGRFNDPYLRDTLQDFGVVMDTMECSVNWSNMGKVHREVRAFVKSRPKTVCMTHMSHVYPQGANLYWIFITHIHDPEEFRLFHAGILDAIQKSGASMSHHHGIGKMFAPWLEGSVGRNEYAVFRALKKHFDPDNIMNPGGTLGFDLDEKEKKFLLSGNG

SEQ ID NO: 19153 - DNA, 609 bp, Unknown
  Obtained from environmental sample
  misc_feature (1)..(609): n is a, c, g, or t
atgacatctaacagcggctatgcgcttttaaaacaaatgcccgcaatcctccgcgcaagggcttaccgcctctacaccaaagaaggacggcggttaatcgatctctggctaaccggcggcgcggctatcctgggccatactccatcgaacattcttcgcgaaataaaaaataccgcaagccgcggcctgtactcccctttcccccactttacggaaagccgttacataaaagcgctctcaaaactttttcccggacgcgctttccgtctctacgccgcgccgccgcctgaactgtccgttcttttcaactccggcgaggcaaaactttggcgaccatttattaaaccggcagacccgttcgcagtaacggaaaacgcgccggtacttattccggtattaccgggcattcaaatctggcgaggcgggctgcctttcggactttgtgtagttgccgcgaaagacgcgaattattttaacggcgaaaaacaatttcccgaaagcgataatcttccgccggtactgcttgccgccgcaacaaggggaatatatgacttgttagccgcgccggaaagagcgaaacttaattttcctcgtatgaaaaagcgttga

SEQ ID NO: 19154 - protein, 202 aa, Unknown
  Obtained from environmental sample
  misc_feature (1)..(202): Xaa is any amino acid
MTSNSGYALLKQMPAILRARAYRLYTKEGRRLIDLWLTGGAAILGHTPSNILREIKNTASRGLYSPFPHFTESRYIKALSKLFPGRAFRLYAAPPPELSVLFNSGEAKLWRPFIKPADPFAVTENAPVLIPVLPGIQIWRGGLPFGLCVVAAKDANYFNGEKQFPESDNLPPVLLAAATRGIYDLLAAPERAKLNFPRMKKR

SEQ ID NO: 19155 - DNA, 867 bp, Unknown
  Obtained from environmental sample
  misc_feature (1)..(867): n is a, c, g, or t
ttgcgccgccgcaaagccggcttccgcgaatccgagagcgaccgccccgtcaataacaactacatacgcgaggtagaacgccgcggcgccgccctccgcacggtcttttcttggggaaacgcggccagtttttccgtcaacccctcccgcatatccgagatatccgccctcctgttcgtaaagaatgtctcgcccgttggtgtctatatcaacaataaaatcgacgccacgcccccaaccggcggactgcccaaatccaaagccgcggcggctaaatccgcaatcgcggcgtccgccggcggctacgactggcacaccgaagcggtcggcgtctcgctcgcgcacgactatatcaggtacaaggggctgggcatcccaggccgcggcgtgataatggcctttttagacggcgggttccgactagaccacgcggcctacaagcgcctgcgggacagctcgcaggtgcgagccgcgtacgactttgtggacagagacacgcttgtagccgacccggattcggtgttgaacaacccgcgcagcatctactatcagaacgataaacacggttcgcagaccctctcgctagccgccgcctacgtgcccggcgtctacgtggggacggcgtttggagcatccttcttgcttgcccgcacggaggacaacggcattgagtcgcgtacggaggaggatctctgggctgaggcggtggagtgggcggaaaaaagaggggctgccataatctcaagttcgctaggctataggggcgaccacacggattctacggaaaattacatgttcccagatatggatggggcgaccacggctatctcgatagcggccgccgaggcggtcaagcgcgggggatag

SEQ ID NO: 19156 - protein, 288 aa, Unknown
  Obtained from environmental sample
  misc_feature (1)..(288): Xaa is any amino acid
MRRRKAGFRESESDRPVNNNYIREVERRGAALRTVFSWGNAASFSVNPSRISEISALLFVKNVSPVGVYINNKIDATPPTGGLPKSKAAAAKSAIAASAGGYDWHTEAVGVSLAHDYIRYKGLGIPGRGVIMAFLDGGFRLDHAAYKRLRDSSQVRAAYDFVDRDTLVADPDSVLNNPRSIYYQNDKHGSQTLSLAAAYVPGVYVGTAFGASFLLARTEDNGIESRTEEDLWAEAVEWAEKRGAAIISSSLGYRGDHTDSTENYMFPDMDGATTAISIAAAEAVKRGG

SEQ ID NO: 19157 - DNA, 897 bp, Unknown
  Obtained from environmental sample
  misc_feature (1)..(897): n is a, c, g, or t
gtggaaaatagaacacnttatggcattttacttaatgatataattatagaaaacaacaaattaggcgaaatgtctaaacgcattatcatggcggtcatcattgccgcaataattataagtttttttctatccttaattattacttcaaatattaccaaaccaattctcaaagtggcaggcgctctcgaaattgtagccgaaggcgatatgacgcatagcgttgatgtcgatacaaaagacgaaataggcgaccttgcgcgggactttaacaatacgatgaaaaaaatcaggaaccttgtcaaaaatgttaaaagagaagccgacgtactgtccgaaatcggcaatgatcttgcgagtaacatgaaccaaacggcggcggcggtcaacgaaattaccgccaacatacaaagtatagaggacagagttatcaatcagagcgcgagcgtaagtgaaacccacgcgactatggaacaggtcgtggtgaacatcaacaaactcaacagccatgtcgagaaccagagccgcaatgtttctcaagcctcatcggcaattgaagaaatggtagccaacataaattctgttaccgatacgctggttaaaaattcaagcaatgtaaaaatattgacggaagcctccgaagtgggcaaaacgggactacaggaagttgtaacggatattcaggaaatcgcccgagagtctgaaggtttgctgcaaattaacgcggtaatggaaaacatcgcaagccaaacaaacttgctttcgatgaacgccgcgattgaagccgcgcacgccggagaagccggcaaaggtttcgccgtagtcgccaatgaaatacgaaaattggctgaaagttccggcgaacagtcaaaaactatcggcaatgttttgaaaaaataa

SEQ ID NO: 19158 - protein, 298 aa, Unknown
  Obtained from environmental sample
  DOMAIN (178)...(298): Methyl-accepting chemotaxis protein (MCP) signaling domain
  misc_feature (1)..(298): Xaa is any amino acid
MENRTXYGILLNDIIIENNKLGEMSKRIIMAVIIAAIIISFFLSLIITSNITKPILKVAGALEIVAEGDMTHSVDVDTKDEIGDLARDFNNTMKKIRNLVKNVKREADVLSEIGNDLASNMNQTAAAVNEITANIQSIEDRVINQSASVSETHATMEQVVVNINKLNSHVENQSRNVSQASSAIEEMVANINSVTDTLVKNSSNVKILTEASEVGKTGLQEVVTDIQEIARESEGLLQINAVMENIASQTNLLSMNAAIEAAHAGEAGKGFAVVANEIRKLAESSGEQSKTIGNVLKK

SEQ ID NO: 19159 - DNA, 591 bp, Unknown
  Obtained from environmental sample
  misc_feature (1)..(591): n is a, c, g, or t
atgacagatcggccgaggactttcattgtggcagccaatgaaaataaagttaaaattgacgccacgtacagtgacgacgcgtttcacgctgatgttattgttaaagacggcgatactatgttgcttggtgggttatcggttaaaactctggaaacgcccggacacaccagggactcgctcagttttttcattcctgagcttgaactgctggtagtaagtgaaacagccggatttatgatgcctgacggcgccgtgtatcccacttaccttacaagttttattgacacggtcaagtctatcgaaaaactcaaaaagattccttataagtatttatcttttccgcattatggaattgtcgctgaaaaatatgcaaacgatttttttgacaaatccctgaaagccgtcaccggctgccgcgattttattttagacatgaatgataaaaaacttgataaggaagcgatgtttgaaaaatatgttcaaaaatacggaagcgaagagctttacggttaccagccctgggatgcctttgccgtaaacgcccgcgccacaatcgcctgcaccctgcgggaatttgcgcctaatgaataa

SEQ ID NO: 19160 - protein, 196 aa, Unknown
  Obtained from environmental sample
  misc_feature (1)..(196): Xaa is any amino acid
MTDRPRTFIVAANENKVKIDATYSDDAFHADVIVKDGDTMLLGGLSVKTLETPGHTRDSLSFFIPELELLVVSETAGFMMPDGAVYPTYLTSFIDTVKSIEKLKKIPYKYLSFPHYGIVAEKYANDFFDKSLKAVTGCRDFILDMNDKKLDKEAMFEKYVQKYGSEELYGYQPWDAFAVNARATIACTLREFAPNE

SEQ ID NO: 19161 - DNA, 831 bp, Unknown
  Obtained from environmental sample
  misc_feature (1)..(831): n is a, c, g, or t
gtgctgcaccttttcgcaatcgcgcgtgaacgcggcttcacgcttaacctgaacatggtgaacgagatcagcggaagaacgccgaacctctgccggcttgccccggcgggtaaacaccacattcaggatttgcatttcgccggtggagtggccgccgtcatgcgggaacttggagagttgttaaacagggacgagctcaccgtaaccggtaagacggcgggcgagaatgtacagaatgtgcttgtcaaaaacaacgaggtaattcagcgctacgctccaacaggcggccttgcggccctgttcggcagtcttgcgcctgacggcgcggttgttaagcgcagcgccgtaaaaaaagagatgcttgattttaccggaagggcgagggtgtttgacggcgaggaagccgccgtaaccgcgatatacaacgggaaaatagaaaagggcgatgtggttgttatacgctacgaagggccttcaggcgggccgggtatgcgcgagatgctccaggcgacctcggcaatcgccggcatgggccttgacgcggatgtggcgctgatcaccgacgggcgcttttcaggcgcgacgcgcggcgcggccatcgggcacatttcacccgaagctgccgctggcggcccgatagcctatgtgagcgaaggcgacaaaattcatattgatattgagcgcaaagacatttcgctgctggtatccactgaagaaatacaaaaacgcagggataccatgcgcttaagggagcctgtggctttaagcgggtacctgaagcgatacgcgaaagcggtctcatcggctgataaaggcgcagtgttgaattga

SEQ ID NO: 19162 - protein, 276 aa, Unknown
  Obtained from environmental sample
  DOMAIN (1)...(276): Dehydratase family
  misc_feature (1)..(276): Xaa is any amino acid
MLHLFAIARERGFTLNLNMVNEISGRTPNLCRLAPAGKHHIQDLHFAGGVAAVMRELGELLNRDELTVTGKTAGENVQNVLVKNNEVIQRYAPTGGLAALFGSLAPDGAVVKRSAVKKEMLDFTGRARVFDGEEAAVTAIYNGKIEKGDVVVIRYEGPSGGPGMREMLQATSAIAGMGLDADVALITDGRFSGATRGAAIGHISPEAAAGGPIAYVSEGDKIHIDIERKDISLLVSTEEIQKRRDTMRLREPVALSGYLKRYAKAVSSADKGAVLN

SEQ ID NO: 19163 - DNA, 699 bp, Unknown
  Obtained from environmental sample
  misc_feature (1)..(699): n is a, c, g, or t
atgactgaaggggagcgaataaaagccgctattcgaggttttgaagacgagtatttactgcttgaatttgaaaacgctgtaaatgacgcatggttagaaaagaacggtcatgttccgttaccgccgtatatcaaaagaaaagacgctccggcggactcggagcgttatcagactatttacgctaaccaaaccggttctacggcggctccgacggcggggcttcattttacaaaagagatattagacgattttgccgcctgcggaatagagagcgtatttgtaacattgcatgtggggttgggaacgtttcttcctgtccgcagtgaaaatatagaagatcataaaatgcacagcgaagttttcaacattgatgaaaaaaccgctgaaaaaatagaatctgcgaaaaaagcggggcggaaaattatcgccgtgggaacaacaagcgtaagaactctggaaagcgcgtggattgacgggaaacttaaacgggggggagacagcacttccatctttatttacccgggatataaattcaaagcggcggacgctctttttaccaattttcatacccccgaatcaactttattgatgttagtgtcagcgtttgcgggcagggagttgattcttgaaagttatgccgaggcaataaaagaaggataccgttttttcagttacggcgatgcgatgttgatttattaa

SEQ ID NO: 19164 - protein, 232 aa, Unknown
  Obtained from environmental sample
  DOMAIN (1)...(108): Queuosine biosynthesis protein
  misc_feature (1)..(232): Xaa is any amino acid
MTEGERIKAAIRGFEDEYLLLEFENAVNDAWLEKNGHVPLPPYIKRKDAPADSERYQTIYANQTGSTAAPTAGLHFTKEILDDFAACGIESVFVTLHVGLGTFLPVRSENIEDHKMHSEVFNIDEKTAEKIESAKKAGRKIIAVGTTSVRTLESAWIDGKLKRGGDSTSIFIYPGYKFKAADALFTNFHTPESTLLMLVSAFAGRELILESYAEAIKEGYRFFSYGDAMLIY

SEQ ID NO: 19165 - DNA, 399 bp, Unknown
  Obtained from environmental sample
  misc_feature (1)..(399): n is a, c, g, or t
atggtgggcctgaccgtgaaatcagtgcgtaaactcatcaccggccaggtttcggcccggaccctgggcggccccattctcatagccgaagtcaccggcgaccgggccaaggccggctgggaatccctgttgaatctggccgccttcatcagcgtcaacctgggggttttaaacctcctgcccatacctgtcctggacggcggccagattttattttttctcattgaggctctgcgccgccggcgcttgagccataggttccgcgaggccgcccagtgggtgggcgtggtctgtctgggtctgttgatgctcctggtcttttacaacgatatcgaccgcctcgtcacccggttttacgcttcggcggaaagcgcggcccggccggcggaagagccgtga

SEQ ID NO: 19166 - protein, 132 aa, Unknown
  Obtained from environmental sample
  DOMAIN (1)...(110): Peptidase family M50
  misc_feature (1)..(132): Xaa is any amino acid
MVGLTVKSVRKLITGQVSARTLGGPILIAEVTGDRAKAGWESLLNLAAFISVNLGVLNLLPIPVLDGGQILFFLIEALRRRRLSHRFREAAQWVGVVCLGLLMLLVFYNDIDRLVTRFYASAESAARPAEEP

SEQ ID NO: 19167 - DNA, 486 bp, Unknown
  Obtained from environmental sample
  misc_feature (1)..(486): n is a, c, g, or t
ttggctgaacccgagcccgatctccccgtggttatcatgggcgacctgaatgaaaaccacgatgatttttaccgccgcggcggaaaagtaatcagcgccctcatgcccgatgatccccgcgcggcggagattgcggaaaagcaaaaggactttctcatccttgtcaaaaacaaaccgcccgcgccgcgatacttccccgccggggctataaccctgtactcaccgtggtttacggaactgcgaaacggaaatgaggattcttccggttcctattactacaaaaacaactgggagaccatcgaccattttctgttatcaccccggtttttcgatggaaccggatgggaatttgaaagcgcgcgtatactaaacttcccgccatttaccggcgcaaagggatcgccggccgcgtataacccgagaaccggttccggcctgagcgatcatctgccattgctattactaataaagaagattagggagtag

SEQ ID NO: 19168 - protein, 161 aa, Unknown
  Obtained from environmental sample
  misc_feature (1)..(161): Xaa is any amino acid
MAEPEPDLPVVIMGDLNENHDDFYRRGGKVISALMPDDPRAAEIAEKQKDFLILVKNKPPAPRYFPAGAITLYSPWFTELRNGNEDSSGSYYYKNNWETIDHFLLSPRFFDGTGWEFESARILNFPPFTGAKGSPAAYNPRTGSGLSDHLPLLLLIKKIRE

SEQ ID NO: 19169 - DNA, 591 bp, Unknown
  Obtained from environmental sample
  misc_feature (1)..(591): n is a, c, g, or t
gtgttacgcgcaatcatgcccagcagcgtagattttcccacgcccgaaccggcgaatattccgatccgctggcccttgcctacggccagaagcccgtcaatggcccgcacgcccgttgtaatacgttctgtaatacgtctgcgtttaagagggtcgggagggcttgccagcgcggggtacattacaggggaatcaatatcgcctttgtcatcaatgggttttcccatggcgttcagcacgcggccaaggagcttcgttgacacggggacttcaagtcggctgccctgggcgattacgaggctgcccacttccagcccgtcggtctcctcgaaaaccatcaattgtacgatttcgtttcttagcccgacaacctcggcgaaaaccgttcctttgcctttgggtacctggattttgcatatttcgccgataatagcctgcgggcctttgctttccacaaggaggccctggactttacagatcctgcctgtgcattttatcgtgtcgacgcgttcggttgtttcaaagtatttctcgaagatcgaagtctcggtttccataaactgtacgtttccccctccctggtcacgataa

SEQ ID NO: 19170 - protein, 196 aa, Unknown
  Obtained from environmental sample
  misc_feature (1)..(196): Xaa is any amino acid
MLRAIMPSSVDFPTPEPANIPIRWPLPTARSPSMARTPVVIRSVIRLRLRGSGGLASAGYITGESISPLSSMGFPMAFSTRPRSFVDTGTSSRLPWAITRLPTSSPSVSSKTINCTISFLSPTTSAKTVPLPLGTWILHISPIIACGPLLSTRRPWTLQILPVHFIVSTRSVVSKYFSKIEVSVSINCTFPPPWSR

SEQ ID NO: 19171 - DNA, 867 bp, Unknown
  Obtained from environmental sample
  misc_feature (1)..(867): n is a, c, g, or t
ttgggcggggacgacagtttcgagagccacatagccgacacgctcacggcgggggcggggctctgcgacgagggggcggtgcggatactcgtcgaagaggggcccgcgcggatacgggagctgctcgattacggggcgcggttttccacggacagcgccgccgccggcaatccgtacgggctgcatctcgggcgcgagggggggcacagcgtcaataggatagtccacgccaaggacttcaccgggcgtgaattggaggcgacgctgctcaaaaaactgcgcgggctgagcaatgtcgccatccttgaaaatcactgcgcgatcgaactcatcaccggccatcatataaagagcgtgccgaaccaatacgagtgcttcggggcgtacgcgctcgactccgtccgcaagaagatctttccggtgggcgcgaaggtgacctgcctcgcgagcggcggggcggggcgcgtctacctgcactccaccaatccggcgatagccaccggcgacggcgtggcgatggcctaccgcgcgggagcgagcaccgccaatatggaattcatacagttccatcccaccaccctgtttcacgagaagggcgattcgtttttaatatccgaggcgctgcgcggccacggcgcggtgctgcgcaacgcggtcggtgaagacttcatgccgagataccatccccaagggtcgctcgcccctcgcgacatcgtggcgagggcgatagacaacgagatgaaagtctccggtctgccgtgcgtttatctcgacatcaggcacaaagacgcgcggacgaccatcgaaaattttccgcagatatacaataagtgcctgagtttcgggatagacatcacgaaagattga

SEQ ID NO: 19172 - protein, 288 aa, Unknown
  Obtained from environmental sample
  DOMAIN (2)...(288): FAD binding domain
  misc_feature (1)..(288): Xaa is any amino acid
MGGDDSFESHIADTLTAGAGLCDEGAVRILVEEGPARIRELLDYGARFSTDSAAAGNPYGLHLGREGGHSVNRIVHAKDFTGRELEATLLKKLRGLSNVAILENHCAIELITGHHIKSVPNQYECFGAYALDSVRKKIFPVGAKVTCLASGGAGRVYLHSTNPAIATGDGVAMAYRAGASTANMEFIQFHPTTLFHEKGDSFLISEALRGHGAVLRNAVGEDFMPRYHPQGSLAPRDIVARAIDNEMKVSGLPCVYLDIRHKDARTTIENFPQIYNKCLSFGIDITKD

SEQ ID NO: 19173 - DNA, 498 bp, Unknown
  Obtained from environmental sample
  misc_feature (1)..(498): n is a, c, g, or t
ttgttatatgcgacgggcgcccgggttagtgaagtgacatcactcgacgtttcggtattccaacaagactatgataaagatgatttagtacttatttctgtcatcgggaaaggaaacaaagaacggttggtgccagtcgggtcttatgcttatcaggcggtaatggattaccttgttcgtgccaggccagcattgttggcgcacgctaagagtaatacgcatgcgttattcttgaataccttgggtcgtcggttgtctaggcagtcggtttgggaaattatccaagccgctgccgctcgcgctgaattggctgaacatgttagcccgcacactttgcgacattcgtttgccactcatctcttgagcggtggtgccgatgtgcgtaccgtccaagaactactcggccacgcctctgtcaccaccacgcaaatctacacaatggtaacccaagacacgctccgagaagtgtacgccatgtcccatccacgggcgttgtga

SEQ ID NO: 19174 - protein, 165 aa, Unknown
  Obtained from environmental sample
  DOMAIN (1)...(155): Phage integrase family
  misc_feature (1)..(165): Xaa is any amino acid
MLYATGARVSEVTSLDVSVFQQDYDKDDLVLISVIGKGNKERLVPVGSYAYQAVMDYLVRARPALLAHAKSNTHALFLNTLGRRLSRQSVWEIIQAAAARAELAEHVSPHTLRHSFATHLLSGGADVRTVQELLGHASVTTTQIYTMVTQDTLREVYAMSHPRAL

SEQ ID NO: 19175 - DNA, 366 bp, Unknown
  Obtained from environmental sample
  misc_feature (1)..(366): n is a, c, g, or t
ttgcggcgcggcatcctgtgttacgaatcacagcgttgtatttttgcactcgtgagcgaagcagcccttgacttcctatatgaaccggatccgcgccctgagttggtggccgtagaaactggctatttacaagccgttccggaggcagcgcccggtcgcagcttggatgtggtggggcgtccagttccagttttcaaaaagcctcctcgcctcgattcacacggtccggctcgcgtcatcgcggtctgcaatcagaaaggtggcgtcggaaaaacgaccacgaccatcaacttangcgccgcactggccgaatatgggcgccgtgtgctgctcgtggattcgacccgcaaggtggtgcctcggtag

SEQ ID NO: 19176 - protein, 121 aa, Unknown
  Obtained from environmental sample
  misc_feature (1)..(121): Xaa is any amino acid
MRRGILCYESQRCIFALVSEAALDFLYEPDPRPELVAVETGYLQAVPEAAPGRSLDVVGRPVPVFKKPPRLDSHGPARVIAVCNQKGGVGKTTTTINLXAALAEYGRRVLLVDSTRKVVPR

SEQ ID NO: 19177 - DNA, 594 bp, Unknown
  Obtained from environmental sample
  misc_feature (1)..(594): n is a, c, g, or t
gtgcagggttccgccgaagccctgcgttcaagtttagagaagctctcaacgaaagaaataaggcttcatgtcattcaggccctgccaggcgccataaacgaaggggacgtggatctttccattgcgtctaacgccatcataatcggctttaacgtgcggcctgtccccaaagccaaaacccttgcggagcaggaaaaggttgaaatacgccgctacaatgtaatttacaaggcggtagaagaaatcaagcaggctatggaggggatgctcaagcccgagaccaaagaagaaataatcgccaccgtggaagtcagggatacgtttaaaacgccgaaattcggcgttgtggccggttgctatgtgctgaccggaaccgtcaaacgaagcgccggcattcatatcatccgcgataacattgaaatttatacaggcaaaatagggtcgctcaggcgctttaaggacgatgtcaaggaagtagccgccggttttgagtgcggtattggccttgagggctatgacgatgtcaaggtcggggatcagtttgaggtctttgagatggttgaaatagccagaaaactgagcgcttcgagttag

SEQ ID NO: 19178 - protein, 197 aa, Unknown
  Obtained from environmental sample
  DOMAIN (114)...(182): Elongation factor Tu domain 2
  misc_feature (1)..(197): Xaa is any amino acid
MQGSAEALRSSLEKLSTKEIRLHVIQALPGAINEGDVDLSIASNAIIIGFNVRPVPKAKTLAEQEKVEIRRYNVIYKAVEEIKQAMEGMLKPETKEEIIATVEVRDTFKTPKFGVVAGCYVLTGTVKRSAGIHIIRDNIEIYTGKIGSLRRFKDDVKEVAAGFECGIGLEGYDDVKVGDQFEVFEMVEIARKLSASS

SEQ ID NO: 19179 - DNA, 492 bp, Unknown
  Obtained from environmental sample
  misc_feature (1)..(492): n is a, c, g, or t
gtgccggaaatgaaaaaacagccggttaccgtccacgagcttagccttctttcctggacgcctcctgaagcgtgctttcgtttccgtgtttcctccgggacttatatacgctcacttgcgcgggacatagccctggcagcgggaaccagggcgcgtctttcccacctgcggcgcgacatggttgggcctttcctgctggaagacgctgtggacaaggatagccttgatgctaacgatgccttgcgtccaatagacgtctccctttttaaaaagattcagctaccttgttttattctcgatcgcaaagcggaagaggggtttatacacggaaggagccttgacggtattttaacggcggaaaacctttcggcatgggcggaagcgtcagctgaagctgttggggttttttcccgggatcgcctggaatttttaggctttttggaacgcaaaaacggcaaatggagctacggccatgtctttgcaggtgattga

SEQ ID NO: 19180 - protein, 163 aa, Unknown
  Obtained from environmental sample
  misc_feature (1)..(163): Xaa is any amino acid
MPEMKKQPVTVHELSLLSWTPPEACFRFRVSSGTYIRSLARDIALAAGTRARLSHLRRDMVGPFLLEDAVDKDSLDANDALRPIDVSLFKKIQLPCFILDRKAEEGFIHGRSLDGILTAENLSAWAEASAEAVGVFSRDRLEFLGFLERKNGKWSYGHVFAGD

SEQ ID NO: 19181 - DNA, 399 bp, Unknown
  Obtained from environmental sample
  misc_feature (1)..(399): n is a, c, g, or t
gtgatgagggatatcccgattatcaatgagaacgacacggtttcggtagaggaaatcaagatcggggacaatgacaccctggcggcgcagtcggcgattctctggagcgccgaccttttggtgttgttcagcgatattgacgggctgtacgacaaaaaccccaaagaattccccgacgcgcaactgatggaactggtgcaggacattgctactgctcgtagaaatgtcaccatcggatctgtcagcaattttggaaccggcgggatttccacaaagctggacgcggcgcaaagggcgtgttcctacggcatagctacgataattgccaacggcggcaggccccgctgccttgaagcccttgccgacggcagccagaagggaaccctgttcctcgcctga

SEQ ID NO: 19182 - protein, 132 aa, Unknown
  Obtained from environmental sample
  misc_feature (1)..(132): Xaa is any amino acid
MMRDIPIINENDTVSVEEIKIGDNDTLAAQSAILWSADLLVLFSDIDGLYDKNPKEFPDAQLMELVQDIATARRNVTIGSVSNFGTGGISTKLDAAQRACSYGIATIIANGGRPRCLEALADGSQKGTLFLA

SEQ ID NO: 19183 - DNA, 816 bp, Unknown
  Obtained from environmental sample
  misc_feature (1)..(816): n is a, c, g, or t
atgggacagcttgcaggcgttgaggccatgcagcttgccgtaaaaaaagcacgtaacaacggctgtggaatggtcacggtccgtaattccaatcacttcggcattgccggcttctatactgaaatggcggcggctgaagatttgctcggtatttgcatgacaaataccgaagctatctgcgtacctacattcggctcacaagcaatgacgggaaccaatgcgttagctctcgccatgcccgcagaccctgttacattttcttatgatgcggcgacaaccgttgtacctcgcggtaaacttgaagtttacagaaaaacgggacagccgcttcctgatttatgggcgctggataatgacggcaacccgtgtacagacgccgccgctgtaattgaaaatataattaacaaatcaggcggcggcatcgccccgcttggaggggccggtgttcttcacggcgggcataagggatacggactaagcgtgattgttgatcttttttctgcggtaatttccggcggacttacgtcaaattacgtaaacagaaaaccggaccacaccggtatatgtcattattttatggcaattgattacggaatattcggcgataaaaccgcaatacgcgcaagtatgtcaaaatttttacaggaattaagagacagcaaaaaagcaatgggacatgaccgtatttacacacacggagaaatggaaacggaacttatggcgcagagaataaacggacaaattcccgtaaatataaaaacacttgaagaaatgcggaaaatcgcccttgaattaaaagttgattttccgttctaa

SEQ ID NO: 19184 - protein, 271 aa, Unknown
  Obtained from environmental sample
  DOMAIN (1)...(261): Malate/L-lactate dehydrogenase
  misc_feature (1)..(271): Xaa is any amino acid
MGQLAGVEAMQLAVKKARNNGCGMVTVRNSNHFGIAGFYTEMAAAEDLLGICMTNTEAICVPTFGSQAMTGTNALALAMPADPVTFSYDAATTVVPRGKLEVYRKTGQPLPDLWALDNDGNPCTDAAAVIENIINKSGGGIAPLGGAGVLHGGHKGYGLSVIVDLFSAVISGGLTSNYVNRKPDHTGICHYFMAIDYGIFGDKTAIRASMSKFLQELRDSKKAMGHDRIYTHGEMETELMAQRINGQIPVNIKTLEEMRKIALELKVDFPF

SEQ ID NO: 19185 - DNA, 528 bp, Unknown
  Obtained from environmental sample
  misc_feature (1)..(528): n is a, c, g, or t
atgggaaagactctttatcataaaatttttgaaaaacatacggtttgcaagctgcaatccggtcaatatcagctatttataggcctgcacctgcttcacgaggtgacaagcccgcaggctttttctatgattagggaagataaactgcccgttctttacccaaatcgctcttttgcaacggtggatcacataatacctaccaccgcaaatgagcgttcaaggccgttgaaagaccctgtggcagaggaaatgttcgcccgtttggagcagaattgcaaggattatggcatccgtttttttggaccagaagccgaggaacaaggagttattcacatcgtggggccagaagagggagttacccagcccggaatgaccatagcctgcggtgatagccacacggcaacccacggcgcattcggttccatagcctttggtgtaggctcttcgcaagtagcggacgtacttgcaacacaaaccttagcgataagccccttaaaggttcgcagaataaaattcaccggaagttaa

SEQ ID NO: 19186 - protein, 175 aa, Unknown
  Obtained from environmental sample
  DOMAIN (4)...(174): Aconitase family (aconitate hydratase)
  misc_feature (1)..(175): Xaa is any amino acid
MGKTLYHKIFEKHTVCKLQSGQYQLFIGLHLLHEVTSPQAFSMIREDKLPVLYPNRSFATVDHIIPTTANERSRPLKDPVAEEMFARLEQNCKDYGIRFFGPEAEEQGVIHIVGPEEGVTQPGMTIACGDSHTATHGAFGSIAFGVGSSQVADVLATQTLAISPLKVRRIKFTGS

SEQ ID NO: 19187 - DNA, 387 bp, Unknown
  Obtained from environmental sample
  misc_feature (1)..(387): n is a, c, g, or t
atgaatggatttgttttgtccctgcttatggcagccccgcagggtgctgaaggcgctcagggcagccccgccaacagtttgatgacttttctcccgtttatcgcgattattgcgattttttactttttgataatccggccccagaacaaaaaacagaaggaaacccagaaaatgctctccgccctgaaaaaaggcgaccgggttgtcaccattgggggtatacatggaacaattcagaacgtgaaagaacaatctgtcattgtcaaagttgacgaaaacaccaaaattgaattcagccgcagcgctatttccagcattgaagctgccgccaaagaagacaagagcgaaaacaatacggaaactgagacttccggagagaaagcatga

SEQ ID NO: 19188 - protein, 128 aa, Unknown
  Obtained from environmental sample
  SIGNAL (1)...(18)
  DOMAIN (25)...(107): Preprotein translocase subunit
  misc_feature (1)..(128): Xaa is any amino acid
MNGFVLSLLMAAPQGAEGAQGSPANSLMTFLPFIAIIAIFYFLIIRPQNKKQKETQKMLSALKKGDRVVTIGGIHGTIQNVKEQSVIVKVDENTKIEFSRSAISSIEAAAKEDKSENNTETETSGEKA

SEQ ID NO: 19189 - DNA, 360 bp, Unknown
  Obtained from environmental sample
  misc_feature (1)..(360): n is a, c, g, or t
gtgataggcaaacaacgccccctccgtatgtacagcggcgttgtatacatttatagtctaaatatggagctgaataccataatccagggcgattgcatcgaagaattaacgaaattccccgataaatccatagatttaatatttgccgaccccccctataatatgcagctaaaaaatgaactttaccggccaaataataccaaagttgacggcgtagacgatgaatgggacaaattcgcttcttttgcggactatgacgctttttgcacggcatggctcaccgaatgtaagcggatattaaaaaataccggtactatatgggtaaattggcagttatcacaatatttttcggtgtggtaa

SEQ ID NO: 19190 - protein, 119 aa, Unknown
  Obtained from environmental sample
  misc_feature (1)..(119): Xaa is any amino acid
MIGKQRPLRMYSGVVYIYSLNMELNTIIQGDCIEELTKFPDKSIDLIFADPPYNMQLKNELYRPNNTKVDGVDDEWDKFASFADYDAFCTAWLTECKRILKNTGTIWVNWQLSQYFSVW

SEQ ID NO: 19191 - DNA, 561 bp, Unknown
  Obtained from environmental sample
  misc_feature (1)..(561): n is a, c, g, or t
atgagattcaccgttcccggcctttcaaagatcccactgctcggcaatttttttaagaacatgtatccttttgaaattgtcatactcgcgctggcggcgttcgcgtggtatattttttataaaacacgtttcggcctccgcctgcgcgcctgcggcgacaaccctcacagccttgacgcggccggcggcgacgtgggcatgacgcgcgtcaaggccattatgtttaccggcgctttttcaggcctcggggggatgtgtttcgcctattcgataatggcccagttttctcccagcatatacatgggctacggctatcttgccattgccgcgatgatcttcggcaactgggacatactgaccaccttcgcggcctgcctctttttcggcttggcgcgttcgggcggttatcagttgtgccttaccctgggcatgtccagtaatttttccgacctgttccttgtgcttccctacgtgctgacattgctgtcccttgtgttcttctcccggcataaccatcccccgcgcgccattggggagatattcgataagagcaagagatga

SEQ ID NO: 19192 - protein, 186 aa, Unknown
  Obtained from environmental sample
  misc_feature (1)..(186): Xaa is any amino acid
MRFTVPGLSKIPLLGNFFKNMYPFEIVILALAAFAWYIFYKTRFGLRLRACGDNPHSLDAAGGDVGMTRVKAIMFTGAFSGLGGMCFAYSIMAQFSPSIYMGYGYLAIAAMIFGNWDILTTFAACLFFGLARSGGYQLCLTLGMSSNFSDLFLVLPYVLTLLSLVFFSRHNHPPRAIGEIFDKSKR

SEQ ID NO: 19193 - DNA, 504 bp, Unknown
  Obtained from environmental sample
  misc_feature (1)..(504): n is a, c, g, or t
atgaaaggcttccgtgttatgcccatgatggaagccgccaaattaggcgacatttttgtcaccgccacaagctgcaacaaggttatcacaacggaacattttaacgtgatgaagaacaacgtgctgctcgccaactccggccacttcgacgtggaagtggacaaggccgcgctggaaaaactgtgcgtgaaaaaggaaaggcgcaagccgtttatcgacggctaccggctgcccaacggcaaagtgctgaatttattggccgagggccgtctggtcaacatcgtggcggggaacggtcatcccgcggacattatggacttaagtttcggcatccagcttctcggcgttctgcacgtggctaaaaacgccaaacagcttaaacccatgctatataacattccgcaggaaattgacgatgaaatatgccgcatcaagctggaagcgctggggatcaatattgacgcccatacggcggagcagctggcgtacttgaaacacatgtaa

SEQ ID NO: 19194 - protein, 167 aa, Unknown
  Obtained from environmental sample
  DOMAIN (1)...(99): S-adenosyl-L-homocysteine hydrolase, NAD binding domain
  misc_feature (1)..(167): Xaa is any amino acid
MKGFRVMPMMEAAKLGDIFVTATSCNKVITTEHFNVMKNNVLLANSGHFDVEVDKAALEKLCVKKERRKPFIDGYRLPNGKVLNLLAEGRLVNIVAGNGHPADIMDLSFGIQLLGVLHVAKNAKQLKPMLYNIPQEIDDEICRIKLEALGINIDAHTAEQLAYLKHM

SEQ ID NO: 19195 - DNA, 906 bp, Unknown
  Obtained from environmental sample
  misc_feature (1)..(906): n is a, c, g, or t
atggccgagaaatcttatggcgaaagaagggcgcacagcttactggcattcaatacgaaccngctttttccgtactttaaagacgcgcccgcttctttccgtactttccttggtgattttgttactacagaagatggtacgggcattgtgcataccgctcccggtttcggtgaggatgacgctcgcgtactcaagggaactggtataccggttatctgtcctgtagacgctgaatgcagatttacagaagaggtaagcgattttaaaggattatttgtaaaagacgctgacaaggcaatcatggaaaagcttaaagccgaaggaaaacttgtaaagcgcgagcagatacttcactcctatccccactgctggagatgcggacatccgctcatttaccgcgccgtcggttcctggtttgttagtgtggaaaaaataaagcaggatatgatagacgccaacagtaaaatctactgggttcccgaacacatcaaggaaggcagattcggcaaatggctggaaggcgcacgcgactgggcaatcagccgtaaccgctattggggcaacccccttcccatctggcgctgccccgactgcgaaaaaataatctgtatcgggagccgcgccgagttaaaagaactttcaggcgtataccccgatgaccttcataaacattttgtcgatgacattgcaattccctgttcatgcggcgcaaaaatgacgcgcattcccgaagttcttgactgctggtttgaatcgggagcgatgacctatgcgcagaatcattaccccttcgagaacaaagaattttttgaaagccactttcccgcggactttatcagcgaaagccttgatcaaacaagaggctggttttataccctcacagttcttgctgcggccctgttttaa

SEQ ID NO: 19196 - protein, 301 aa, Unknown
  Obtained from environmental sample
  DOMAIN (1)...(301): tRNA synthetases class I (I, L, M and V)
  misc_feature (1)..(301): Xaa is any amino acid
MAEKSYGERRAHSLLAFNTNXLFPYFKDAPASFRTFLGDFVTTEDGTGIVHTAPGFGEDDARVLKGTGIPVICPVDAECRFTEEVSDFKGLFVKDADKAIMEKLKAEGKLVKREQILHSYPHCWRCGHPLIYRAVGSWFVSVEKIKQDMIDANSKIYWVPEHIKEGRFGKWLEGARDWAISRNRYWGNPLPIWRCPDCEKIICIGSRAELKELSGVYPDDLHKHFVDDIAIPCSCGAKMTRIPEVLDCWFESGAMTYAQNHYPFENKEFFESHFPADFISESLDQTRGWFYTLTVLAAALF

SEQ ID NO: 19197 - DNA, 762 bp, Unknown
  Obtained from environmental sample
  misc_feature (1)..(762): n is a, c, g, or t
atgagtaataacaaggaattcaaagaaaggcgcgacagcttaacggtacgtttttccattggggcaaaactaataaccattatctcgataatcgtattgatttctctcggttcaataacggcgctggtgtcatggctggttcgggaagaccttaaaatatccgccgaagaaaataacttcgaggtgaaccgccgcgccgccgctgaaactgaacagaccctcgaaaaaatgcgcctgctctccattacattctcccgcacgactgctctcgcgaaacgcggtggcttaatacgggaagaagcagattatttctttaatcataatccgcagattgcggctcttttctatacgacagtctcatctaccgcgtggacggatacggtatttgtaaacgagcgattttttctttcaagcggaattgatacaaagcttgtggatgcttttctaggcaacagcaaaaaaatactagataacgcggtaatggggcaaacggtactcatcaacgcctcgcccatgtttaataaaacgcaaggttcaacgtatcttgcggcaatgttcttcccgatacaggatggagggggatgcgtcctgttctcgagcgaaaacttgaacgaaagttttggcatgggcgtaaacgcgacatacctcttaaacgccgacggcgatattatcgcggacgcggatccggaaagggtaaaaactcaggttaatctgtcgaatcaggacattatccgccagatttttacaagccncggatcgtaa

SEQ ID NO: 19198 - protein, 253 aa, Unknown
  Obtained from environmental sample
  misc_feature (1)..(253): Xaa is any amino acid
MSNNKEFKERRDSLTVRFSIGAKLITIISIIVLISLGSITALVSWLVREDLKISAEENNFEVNRRAAAETEQTLEKMRLLSITFSRTTALAKRGGLIREEADYFFNHNPQIAALFYTTVSSTAWTDTVFVNERFFLSSGIDTKLVDAFLGNSKKILDNAVMGQTVLINASPMFNKTQGSTYLAAMFFPIQDGGGCVLFSSENLNESFGMGVNATYLLNADGDIIADADPERVKTQVNLSNQDIIRQIFTSXGS

SEQ ID NO: 19199 - DNA, 432 bp, Unknown
  Obtained from environmental sample
  misc_feature (1)..(432): n is a, c, g, or t
atgacccttttccaactcatacaaacctgttttcattccatagctcgtaaccgaatgcggagccttctcacatcattgggcgtaataataggtgtcggctcggtaatcatcatggttgctcttggcgaaggctcacaacgggcaatcgaggcgagaataactgcaatgggaactaatttactgcagattaaccaccgtccgccgccgccccacttgcggacgcaaagcacaagaatatcggctttcaccaaagatgatcttgaaaaacttaaaactgaatcgagttttgctgtagcgatttctgggattgtccagatcaacaatgccaacgtgattggtggagagggaagcgtacaggtgaggctccagggggtagagcccggcttccaggcggcccgaaactggaatctaaacgcnggggtatttttttga

SEQ ID NO: 19200 - protein, 143 aa, Unknown
  Obtained from environmental sample
  misc_feature (1)..(143): Xaa is any amino acid
MTLFQLIQTCFHSIARNRMRSLLTSLGVIIGVGSVIIMVALGEGSQRAIEARITAMGTNLLQINHRPPPPHLRTQSTRISAFTKDDLEKLKTESSFAVAISGIVQINNANVIGGEGSVQVRLQGVEPGFQAARNWNLNAGVFF

SEQ ID NO: 19201 - DNA, 501 bp, Unknown
  Obtained from environmental sample
  misc_feature (1)..(501): n is a, c, g, or t
ttggcaaaagaccttgccgcttcgggccatgaaaacgcttctatgttctacgctccccttgatctttcaggttcccagtaccggattgataaaagttttgtagccagaggcctggcccggaatgaagatgaatttttcaagaccacggggaaagagctttccctgatctggcaccccccgttttatgccctgtcccgggaaattgccgaagcggcagccgcctcgggataccgtactacgggccgggacgtggacagccgggattggatacaggccggcgacgccaaaaggctgggtattgatcaactttccgcggcggatatgatcgatcgcatcatggatatcaaggaaggtggatcgatcatccctgtacggctgggactcctggacggaggcaggccggattatctttttaacaacctggaagtactgctggacgctcttttgcgggaaggttatgagatagtgcctgtttcaacgctgattaataaaatccgttaa

SEQ ID NO: 19202 - protein, 166 aa, Unknown
  Obtained from environmental sample
  misc_feature (1)..(166): Xaa is any amino acid
MAKDLAASGHENASMFYAPLDLSGSQYRIDKSFVARGLARNEDEFFKTTGKELSLIWHPPFYALSREIAEAAAASGYRTTGRDVDSRDWIQAGDAKRLGIDQLSAADMIDRIMDIKEGGSIIPVRLGLLDGGRPDYLFNNLEVLLDALLREGYEIVPVSTLINKIR

SEQ ID NO: 19203 - DNA, 717 bp, Unknown
  Obtained from environmental sample
  misc_feature (1)..(717): n is a, c, g, or t
atggagcctgcagccgaaatccgggcaataaaaagtttcgttttaagatcaggccggatgagccccgcccaaaagcgttcctatgaaactcttttttccctttacgctgtaaagggagacaggatggggagcatggattgtttttctctttttggaaataatggccccctgcatattgaaataggcttcggaatgggaagggccacagccggcattgccataaaaaaccccggaattaattacctcggaattgaggtacacaaaccgggtataggccggctcctttgggaaattgagaaaatgtctataaagaatatccgtataatcgaaggagacgcaactgaaattataacatataaaattccggataattcagtttcggcttttcatattttttttcccgatccctggcctaaaaagaggcatcataaaaggaggttggtaaagcgcccgtttacggatctgcttgccacaaaactcctttccggcggttacatttatatggtaagcgactgggccgactacgcggattgggccttaagggagttaagcgcaacgccgtctttggaaaacaaatacccagatttttccgagtcacaaaagtggaggccgganaccgaatttgaaaaaaaagccaggcttaaaaaccacgagataagagagcttttctttctaaaaaatagtcattacggagcgttaggtgaaaaacaacagtga

SEQ ID NO: 19204 - protein, 238 aa, Unknown
  Obtained from environmental sample
  DOMAIN (42)...(227): Putative methyltransferase
  misc_feature (1)..(238): Xaa is any amino acid
MEPAAEIRAIKSFVLRSGRMSPAQKRSYETLFSLYAVKGDRMGSMDCFSLFGNNGPLHIEIGFGMGRATAGIAIKNPGINYLGIEVHKPGIGRLLWEIEKMSIKNIRIIEGDATEIITYKIPDNSVSAFHIFFPDPWPKKRHHKRRLVKRPFTDLLATKLLSGGYIYMVSDWADYADWALRELSATPSLENKYPDFSESQKWRPXTEFEKKARLKNHEIRELFFLKNSHYGALGEKQQ

SEQ ID NO: 19205 - DNA, 588 bp, Unknown
  Obtained from environmental sample
  misc_feature (1)..(588): n is a, c, g, or t
ttgaaaaggatgggtgaattatcagccgccaaggttatacgcaatatcaggactaaacgcgaaatttcccttgaagcgtttattgccggttttgattttgaaggggtaggggaactcattatggaaagggtagtctattccggtttcgatactcttgagaaattacgctcggcgaatctggaggatctctcaggagtttatggtttaggtgaaattaccgcaagaacaatattgaatggactagcagagtgtaaagatgaaatagacaaagtactttccgcagggatcatttcaatagcgcttccgccaaaggaaaaagacgttcccttaaaggggctttccttttgttttacaggcgaattaaaaagcatgaagcgaagccaggccgaggaaaaagtaaaaacgcttggcgcctcagtaaaatcctccgttgtaaaggacctttcatacctggtcacaaacgatcccgaatcaggttccgcaaagaataaaaaggcgcttgaactgggggtaaagataataaacgaagaaagctttatgaggttaataacagacaggcaagagccggcgcaaaaagaacttttctaa

SEQ ID NO: 19206 - protein, 195 aa, Unknown
  Obtained from environmental sample
  DOMAIN (105)...(183): BRCA1 C Terminus (BRCT) domain
  misc_feature (1)..(195): Xaa is any amino acid
MKRMGELSAAKVIRNIRTKREISLEAFIAGFDFEGVGELIMERVVYSGFDTLEKLRSANLEDLSGVYGLGEITARTILNGLAECKDEIDKVLSAGIISIALPPKEKDVPLKGLSFCFTGELKSMKRSQAEEKVKTLGASVKSSVVKDLSYLVTNDPESGSAKNKKALELGVKIINEESFMRLITDRQEPAQKELF

SEQ ID NO: 19207 - DNA, 594 bp, Unknown
  Obtained from environmental sample
  misc_feature (1)..(594): n is a, c, g, or t
atggccaatgacggcctcaaggcccagggcttgggcggcgcggaggccagggacaagcccctgatcctggtggtggatgacgatccggtcatctgttgcgttctggccggcgccttgaaccgggccggctttgacgcggagatattccaggacgccgccctggccctggagtctctgaacgagttggaaccggatgtggccgtggtggactgggtcatgccggattttgacggcttgaacctggtcgatatcctgaaggccagggtccggaatcttatgaccatcttgatcaccagccatgtcgcccacgaagcggtggaagaggcccggcggagcggacgggtggacgcggtgctgcccaagccgttcaacctggccgatttcctgaacatggtctcctcctgcgtcaacagccggcactgggcctcggcgccgccggccgccccggaaagcgtcgggggcggcgtcctgaccggctggctggccttggacgggcgggaggcttatttcgaacatgtcttggacagcctgattgacgcggtgatgatggtcgaccgcgtgggccngcataatctatacaacacccggccataa

SEQ ID NO: 19208 - protein, 197 aa, Unknown
  Obtained from environmental sample
  DOMAIN (20)...(133): Response regulator receiver domain
  misc_feature (1)..(197): Xaa is any amino acid
MANDGLKAQGLGGAEARDKPLILVVDDDPVICCVLAGALNRAGFDAEIFQDAALALESLNELEPDVAVVDWVMPDFDGLNLVDILKARVRNLMTILITSHVAHEAVEEARRSGRVDAVLPKPFNLADFLNMVSSCVNSRHWASAPPAAPESVGGGVLTGWLALDGREAYFEHVLDSLIDAVMMVDRVGXHNLYNTRP

SEQ ID NO: 19209 - DNA, 372 bp, Unknown
  Obtained from environmental sample
  misc_feature (1)..(372): n is a, c, g, or t
ttgaaaaacaaagcccgcctgttaatctcatacatggaagttcccggctttgacaattttaaaaaggccgacaatccgtctttttcggacgtaaaaaatgagcctgttatttacagggacgtttatgtaatctggaaaggtatggcgactaaccttgaagttaccgacgaagccgtccgctttgattttcttgtaggctacgatacgcgcaaaacgcttgaaggcatagtaccggttgtgtttaaaactcccgtaacagtaaacaccgaacgcccgcttgaagtgcttggaaaaattagactgtatggcgaaaaaatggacatagcgcttgaaggagcctcgatacatcagtccggtaaacttgaaaattag

SEQ ID NO: 19210 - protein, 123 aa, Unknown
  Obtained from environmental sample
  misc_feature (1)..(123): Xaa is any amino acid
MKNKARLLISYMEVPGFDNFKKADNPSFSDVKNEPVIYRDVYVIWKGMATNLEVTDEAVRFDFLVGYDTRKTLEGIVPVVFKTPVTVNTERPLEVLGKIRLYGEKMDIALEGASIHQSGKLEN

SEQ ID NO: 19211 - DNA, 393 bp, Unknown
  Obtained from environmental sample
  misc_feature (1)..(393): n is a, c, g, or t
ttgttatcagggcaagttttccgtttccatgcnggagactcaaggatttatctgctgcgtgacggcgggctgcgcgttcttaccatagaccactcgcttaaggagtcgggcggaaaccctgacgccccttccaatataattaccaacgctttaggcggcggggacagcgcgttcgtcgaatttgaggaagtcgaacggccttttttgaataacgacatatatcttctgtcttccgacggcttgcacgatcttgtaacccccgatgtaatttcagatacgcttatcctgccgagaaccgaaggggccgataaactgttggcgctcgcgaaagagaacggcggaaaagataatatttcaatcatcaccataaaaatagaggagaaagaagaatga

SEQ ID NO: 19212 - protein, 130 aa, Unknown
  Obtained from environmental sample
  misc_feature (1)..(130): Xaa is any amino acid
MLSGQVFRFHAGDSRIYLLRDGGLRVLTIDHSLKESGGNPDAPSNIITNALGGGDSAFVEFEEVERPFLNNDIYLLSSDGLHDLVTPDVISDTLILPRTEGADKLLALAKENGGKDNISIITIKIEEKEE

SEQ ID NO: 19213 - DNA, 687 bp, Unknown
  Obtained from environmental sample
  misc_feature (1)..(687): n is a, c, g, or t
atgcgaaacggcattgaaggcatagcgtttgatcttgacggaactttataccccaattaccgcctgcgtttaaggatccttcccgcgattttaaaagaactgcgtttagtagcggctttcggcatggcaagaagcgctataagaaaagaacaggaaaatttaaacatagtacacagcgatttttatcattatcaggcggaccttaccgcaaagattctttccgttccgcaaggcacgcttaaagaagaaatagaccgcattatctacaaaacatgggaggatccttttaaagatattaaactcttcaaaggggtaaaagaaaccctcggcgctcttaaaaaagccggttataaattgggacttttgtcggactttccgccggataaaaaactggattatctgggattaggcggcctttgggacgcggttctttgctcggaatcctccggcactataaaaccgcaccccttgtcatttaatgagcttgccgccgccatgtccctgccgccggataagatcctgtacgtggggaacagccgcgcttatgacgtagcgggagcgaaccgggcgggaatgaaaaccgcgtggataaaaagcccgctttttccgggaagcggccttaaaaaaccaaaacctgatttttcctttaataactatcgcccattgtacgattttatgataaattaa

SEQ ID NO: 19214 - protein, 228 aa, Unknown
  Obtained from environmental sample
  DOMAIN (5)...(200): haloacid dehalogenase-like hydrolase
  misc_feature (1)..(228): Xaa is any amino acid
MRNGIEGIAFDLDGTLYPNYRLRLRILPAILKELRLVAAFGMARSAIRKEQENLNIVHSDFYHYQADLTAKILSVPQGTLKEEIDRIIYKTWEDPFKDIKLFKGVKETLGALKKAGYKLGLLSDFPPDKKLDYLGLGGLWDAVLCSESSGTIKPHPLSFNELAAAMSLPPDKILYVGNSRAYDVAGANRAGMKTAWIKSPLFPGSGLKKPKPDFSFNNYRPLYDFMIN

SEQ ID NO: 19215 - DNA, 414 bp, Unknown
  Obtained from environmental sample
  misc_feature (1)..(414): n is a, c, g, or t
atgatatgcgaatgttccctgcaagtccgcacctatgaatgtgacagttacggtcatgtcaacaacgcaaattatctcaattatcttgagtatgcccgttacgagttattgaaggctgtgggttttgattattcaaaagcgatcagcgccggttacggggtgtttatttcccgcgttgaaattgattacaaaaaaccggcgttaaccgatgacattctcattataaaaacctggcccaccaagaaaggcgcggtcagcggaacccttgcccaggagattcgccggggtgatgacattgtggcggaggcaaaagttacttgggcttttgtcgatttcagaacagggatgccggtgagaatacccaaagaatgggatatgcccggactcagtccgcagtctgattctacaaactga

SEQ ID NO: 19216 - protein, 137 aa, Unknown
  Obtained from environmental sample
  DOMAIN (17)...(102): Thioesterase superfamily
  misc_feature (1)..(137): Xaa is any amino acid
MICECSLQVRTYECDSYGHVNNANYLNYLEYARYELLKAVGFDYSKAISAGYGVFISRVEIDYKKPALTDDILIIKTWPTKKGAVSGTLAQEIRRGDDIVAEAKVTWAFVDFRTGMPVRIPKEWDMPGLSPQSDSTN

SEQ ID NO: 19217 - DNA, 573 bp, Unknown
  Obtained from environmental sample
  misc_feature (1)..(573): n is a, c, g, or t
atgtcgatgctgaactatcaggaaagcttgaaacaagggaagcagggaaagaacgcggaaaacatccttggggtgccggcaataccgtgcgggaaccagataacgcggctgatagacgggatagcgccggaagtatntgcgccgtcattcagcaaccggctagcaacggccggagagaagaaagttttggatgactatcgggtgttggacggcggcgtattaatcgtattggacgggacatggtatttctcatcagggaagatacactgcgggcattgtttgcatataacggaaaaagagaaaacgacctattaccacagcatggtagcggcggcggtggtgaaacccggggggaaagtggttttacccctgatgcctgagatgatacggaacgaggacgggaaggataagcaggattgcgagcgtaacggcgtgaaacggatgctcaaagcgcagggggagacattccgggaactgaaggcaacggtgctaggggacgatttatattcggattattacacgtgcaaggcggtgcttgagcaggggctgacagggctatcatttaacgcataa

SEQ ID NO: 19218 - protein, 190 aa, Unknown
  Obtained from environmental sample
  misc_feature (1)..(190): Xaa is any amino acid
MSMLNYQESLKQGKQGKNAENILGVPAIPCGNQITRLIDGIAPEVXAPSFSNRLATAGEKKVLDDYRVLDGGVLIVLDGTWYFSSGKIHCGHCLHITEKEKTTYYHSMVAAAVVKPGGKVVLPLMPEMIRNEDGKDKQDCERNGVKRMLKAQGETFRELKATVLGDDLYSDYYTCKAVLEQGLTGLSFNA

SEQ ID NO: 19219 - DNA, 597 bp, Unknown
  Obtained from environmental sample
  misc_feature (1)..(597): n is a, c, g, or t
ttgaccgatattgagcagtctgtcatggaaggcattatcgtccgcatattggcgaatatgcgcgaagcctggacgacggtaatagacctgcgcccgcgcctggggcagattgataccaacccgcagtttgcacagatcgtcccccccactgaaatggttatccttgtaacgctggaaaccaaggtaggcgatgtggaagggatgatgaatttctgtatcccctatatcaccattgagccgatagtcggcaagctttccgcccagttctggtattcgtcggtgcggcgtaacgccacttccgaaaatctcaatgtattaaaggaaaagctggctactgtcgatgttaatgtagtggctgaaatcggaaagatcgatatttccataagggacgttctttccctgcaaggaggggatgtgatccgcctgtacaatacccgtgtggacgaaccgtatttcctgaatataggcaacaagccgaagttccagtgccgcccgggtttgatagggagaaagctggcggtgcagataacaaaaaagattgccgagcttgacgaagacgaatttgaagagctggcaagcgacggggaggttttgtaa

SEQ ID NO: 19220 - protein, 198 aa, Unknown
  Obtained from environmental sample
  DOMAIN (1)...(85): Flagellar motor switch protein FliM
  misc_feature (1)..(198): Xaa is any amino acid
MTDIEQSVMEGIIVRILANMREAWTTVIDLRPRLGQIDTNPQFAQIVPPTEMVILVTLETKVGDVEGMMNFCIPYITIEPIVGKLSAQFWYSSVRRNATSENLNVLKEKLATVDVNVVAEIGKIDISIRDVLSLQGGDVIRLYNTRVDEPYFLNIGNKPKFQCRPGLIGRKLAVQITKKIAELDEDEFEELASDGEVL

SEQ ID NO: 19221 - DNA, 828 bp, Unknown
  Obtained from environmental sample
  misc_feature (1)..(828): n is a, c, g, or t
atgtgtactttaggcgtggacccccgcatcaggactggatgcaagctggccatcatcaaccgcctagggcagtttatggaaaccgccactgtgtacccgctagagccaaagagggatttggaaggcactgcggcagtcttggaacagctgatgcaaaaatacccgattgaaaccatagcgataggaaatggcaccggggggcgggaaaccgaagccgttttcaggcagtggttagaggatacaggcaggggcgacatcccatgcgtcagcgtcagcgagtctggagcgtcggtttattctgcgtccgaggtggccagggaagaatttcccgaccttgacgtcaccgtgcggggggccatcagcattgcccgccgttttcaggacccattggcggaactggtaaaaattgagccaaagagcataggcgtgggccagtaccagcatgacgtaaacccggcacttctcaaaaagggcctagacgaatctgtggaatcttgcgtcaacagagttggggttgacctaaatagcgcatcgtataagctgctgtcgtacgtggccggcattggggaaaccctgtccaaaaacattgtccagtggaggtacgagaaaggcgcattccaaaagcgggaacaactatttgaagtgccgcgctttggcgaaaaagccttccagcaggccgctgggttcctgcgcgtcagaggcggcgaaaacccgctggacgcgagcgcggtacaccctgaatcataccctgtggtgcagcgcatctgccaattagcgggcaagtccactcttgaactcatcggcaacgaggcaatatggactcactga

SEQ ID NO: 19222 - protein, 275 aa, Unknown
  Obtained from environmental sample
  misc_feature (1)..(275): Xaa is any amino acid
MCTLGVDPRIRTGCKLAIINRLGQFMETATVYPLEPKRDLEGTAAVLEQLMQKYPIETIAIGNGTGGRETEAVFRQWLEDTGRGDIPCVSVSESGASVYSASEVAREEFPDLDVTVRGAISIARRFQDPLAELVKIEPKSIGVGQYQHDVNPALLKKGLDESVESCVNRVGVDLNSASYKLLSYVAGIGETLSKNIVQWRYEKGAFQKREQLFEVPRFGEKAFQQAAGFLRVRGGENPLDASAVHPESYPVVQRICQLAGKSTLELIGNEAIWTH

SEQ ID NO: 19223 - DNA, 324 bp, Unknown
  Obtained from environmental sample
  misc_feature (1)..(324): n is a, c, g, or t
ttggtggttgacttccagtccttccctcacctacgcaggactggctgccccgtaatattcgatgccacgcatagcgtacagaagcctggctcactgggcgacgccacagggggggcacgcgaaatgatccccacgctggccagggctgccgcgacttgcacggatgggtacttttttgaagtccacgaagagccagagagggccctcagcgacggcccaaatgtgttcagactgtctgaatttgggcaattgctagatgagctgctcttgatttggaggatagcccggcctgcaacactgcgggaagcaacaggcaagggttga

SEQ ID NO: 19224 - protein, 107 aa, Unknown
  Obtained from environmental sample
  misc_feature (1)..(107): Xaa is any amino acid
MVVDFQSFPHLRRTGCPVIFDATHSVQKPGSLGDATGGAREMIPTLARAAATCTDGYFFEVHEEPERALSDGPNVFRLSEFGQLLDELLLIWRIARPATLREATGKG

SEQ ID NO: 19225 - DNA, 792 bp, Unknown
  Obtained from environmental sample
  misc_feature (1)..(792): n is a, c, g, or t
gtgcgcccgaaaacgacgcgcactttcctttttatcatattaaaaacaaggaggtttgttaccatgagcgcaattcactcgacaggaaagatgaaggctgcggctttgggtatcaccataatggcattgtgcttcgcttggggggcgtgggcgcaggatccggctgatccggcggatgcggatgatccggtagacttggaggatccggcggtagtggacgcggacgatccggcagacgttgacgacccggctgacttggtcgacacggacgacccggcggacgtggacgtggacggcccgacggatttggtggacgtggacgatccggcggacgttgacgacccgacggacttggtcgacacggacgatccggcggacattgacgacccgacggatttggtcgacacggacgacccggcggactcgacggatttggcggattcgggagactctgaagatccggacggcccgccggtcgccgccgtaccggtcatcaccataaccaagcaacccgcagcggctattaccttaattaagggtcaaagcgacaccctgacggttgaggcaagcgtaacattgggcgcgacactaagttatcagtggcactacgccaacgccgtcagcagctgcgcggacgagggtgactgcgatggggccataacggagctttacggcgcggcaggcccgtctatcgtattctccgccgacgattttgatgtgggaacgcatgtgttctattgcgtggtaagcgcgacgaacggcgcggtctccgaaagtccaacgacgccgtag

SEQ ID NO: 19226 - protein, 263 aa, Unknown
  Obtained from environmental sample
  misc_feature (1)..(263): Xaa is any amino acid
MRPKTTRTFLFIILKTRRFVTMSAIHSTGKMKAAALGITIMALCFAWGAWAQDPADPADADDPVDLEDPAVVDADDPADVDDPADLVDTDDPADVDVDGPTDLVDVDDPADVDDPTDLVDTDDPADIDDPTDLVDTDDPADSTDLADSGDSEDPDGPPVAAVPVITITKQPAAAITLIKGQSDTLTVEASVTLGATLSYQWHYANAVSSCADEGDCDGAITELYGAAGPSIVFSADDFDVGTHVFYCVVSATNGAVSESPTTP

SEQ ID NO: 19227 - DNA, 432 bp, Unknown
  Obtained from environmental sample
  misc_feature (1)..(432): n is a, c, g, or t
ttggttatggtgatgaccggtacggcggcgaccggcgggccgtccggatcttcagagtctcccgaatccgccaaatccgtcgagtccgccgggtcgtccgtgtcgaccaaatccgtcgggtcgtcaatgtccgccggatcgtccgtgtcgaccaagtccgtcgggtcgtcaacgtccgccggatcgtccacgtccaccaaatccgtcgggccgtccacgtccacgtccgccgggtcgtccgtgtcgaccaagtcagccgggtcgtcaacgtctgccggatcgtccgcgtccactaccgccggatcctccaagtctaccggatcatccgcatccgccggatcagccggatcctgcgcccacgccccccaagcgaagcacaatgccattatggtgatacccaaagccgcagccttcatctttcctgtcgagtga

SEQ ID NO: 19228 - protein, 143 aa, Unknown
  Obtained from environmental sample
  misc_feature (1)..(143): Xaa is any amino acid
MVMVMTGTAATGGPSGSSESPESAKSVESAGSSVSTKSVGSSMSAGSSVSTKSVGSSTSAGSSTSTKSVGPSTSTSAGSSVSTKSAGSSTSAGSSASTTAGSSKSTGSSASAGSAGSCAHAPQAKHNAIMVIPKAAAFIFPVE

SEQ ID NO: 19229 - DNA, 438 bp, Unknown
  Obtained from environmental sample
  misc_feature (1)..(438): n is a, c, g, or t
atggtaacggttatttctttaggcggctccatagtcgcgcctgacaaggttgatgttcaattcttgaaagattttaccgcgcttatccgctcttttttggaagcggattccgacaggcgctttatctttgttgttggcggcggcggtccggcgcggcattggataaacgcctaccgggaaataaacgcgcaaagcaaagacgaggaagccgactggattggaataatggcgacgcggcttaacgcgcagttggtaaaggcggcgatgggggaattatgcgttcaggatgttgttacaaaccccggccatgttgatcctttaacgggccgcgtgcttgtcgccgccggctggaagcccggtttttcaacagactacgacgctgttctgctcgctgagcgtttcaaagncggagcgctgtcattaacctttccaacatga

SEQ ID NO: 19230 - protein, 145 aa, Unknown
  Obtained from environmental sample
  misc_feature (1)..(145): Xaa is any amino acid
MVTVISLGGSIVAPDKVDVQFLKDFTALIRSFLEADSDRRFIFVVGGGGPARHWINAYREINAQSKDEEADWIGIMATRLNAQLVKAAMGELCVQDVVTNPGHVDPLTGRVLVAAGWKPGFSTDYDAVLLAERFKXGALSLTFPT

SEQ ID NO: 19231 - DNA, 777 bp, Unknown
  Obtained from environmental sample
  misc_feature (1)..(777): n is a, c, g, or t
atggctacttgccaaggcgaggaagatttttaccgccgcctccagcagctgatggtactggctaaggacagcctcagaatcaaacgcaagattgtcagccgccttcttgagggcgggcttttcccgtataccaggcgctaccttaaaaacctggataaccactttagcactatagggctggtgggcatgaacgaatgtttgttgaatttcctgggcagggaattcaccatagcaaccgacaggggccgctcctttgcccttgaggtcctgggctttatgcggaataagcttgcggactttcaggaagaaacaggggaactttttaacctggaggctacccccgcagaatctacctcatacaggctagccaagcacgacaggaaaaaatacccgcgaattatcagcgcgggaaaggatgagccttactacacaaactcaacccagcttccggtaatggaaaccgacgacattttcgaagccctggatctgcaggaaaatctgcaaattgcctatacaggcggcacggttttccattgcttccttggcgaagctattgaagactggcgggtttgcagggatctggtaaaaacaatatccggcaagtaccgaatcccttattttacggtatcgcctaccttctcggtgtgcccggtacacgggtacctgaagggcgagcattttttctgcccaaaatgcagggaagaaaaagaaaacgagcttcgcgaaaaaatcgtgttattggaagaagagcggaaagctgttttggcgctgctttag

SEQ ID NO: 19232 - protein, 258 aa, Unknown
  Obtained from environmental sample
  misc_feature (1)..(258): Xaa is any amino acid
MATCQGEEDFYRRLQQLMVLAKDSLRIKRKIVSRLLEGGLFPYTRRYLKNLDNHFSTIGLVGMNECLLNFLGREFTIATDRGRSFALEVLGFMRNKLADFQEETGELFNLEATPAESTSYRLAKHDRKKYPRIISAGKDEPYYTNSTQLPVMETDDIFEALDLQENLQIAYTGGTVFHCFLGEAIEDWRVCRDLVKTISGKYRIPYFTVSPTFSVCPVHGYLKGEHFFCPKCREEKENELREKIVLLEEERKAVLALL

SEQ ID NO: 19233 - DNA, 444 bp, Unknown
  Obtained from environmental sample
  misc_feature (1)..(444): n is a, c, g, or t
atgaaattcgccaaatacctcttttcgctctgggcaggggttttgatatatgcctctctgttcctgataaccggtgctaaagggttttcaacccataggcagcttgagaatgaacaaaaaaaacaggaagcaaatattgaatccctgaaattaattaatcaggaactggaagatacaaagaattcgctcctttacgatgaggatacgctggctgtttacgcccgtgagcagggttatgcttcttcccgtgaaagattcatacgcatagtcggccttggggtaaatcaaggaaacaaaatctttcccggtaaagcaatatccgcggctgaaccacaatacaccccggaaaatactataatgatgattgccttttgcgccggcgcgagtgtttttttatgtatagctgtttttgatatcctaaaactctttagagatccaacgtaa

SEQ ID NO: 19234 - protein, 147 aa, Unknown
  Obtained from environmental sample
  SIGNAL (1)...(26)
  DOMAIN (14)...(92): Septum formation initiator
  misc_feature (1)..(147): Xaa is any amino acid
MKFAKYLFSLWAGVLIYASLFLITGAKGFSTHRQLENEQKKQEANIESLKLINQELEDTKNSLLYDEDTLAVYAREQGYASSRERFIRIVGLGVNQGNKIFPGKAISAAEPQYTPENTIMMIAFCAGASVFLCIAVFDILKLFRDPT

SEQ ID NO: 19235 - DNA, 462 bp, Unknown
  Obtained from environmental sample
  misc_feature (1)..(462): n is a, c, g, or t
ttgcctgtaaaactggacaccaacggaatgtttcccgcacttctggaaaaacttctctcgcgggaagaaagccggcctgattatattgcccttgatctgaaaatgcgcnntgagcgatacaagaacctgtcagcaggcgaagaaacgcctaccgccgacctttggtcggacggttatttggacctggcttccctgctccgccaaagcgccaagttaatccgcgagtccggtataagtcacgaataccggactttggcgctgccagaaggtttcacgagcgaaaaagacatcgaagcgcttgtccccctggcggataactccccctggtatttcaggccctttgcaggcggaaactgcctggatcctgcctgggatgcctttgaaagtcccgccactccggaagtagaagctttagcaaagaaagcgagggagctgggcaaaacgggtattgcaataaactga

SEQ ID NO: 19236 - protein, 153 aa, Unknown
  Obtained from environmental sample
  misc_feature (1)..(153): Xaa is any amino acid
MPVKLDTNGMFPALLEKLLSREESRPDYIALDLKMRXERYKNLSAGEETPTADLWSDGYLDLASLLRQSAKLIRESGISHEYRTLALPEGFTSEKDIEALVPLADNSPWYFRPFAGGNCLDPAWDAFESPATPEVEALAKKARELGKTGIAIN

SEQ ID NO: 19237 - DNA, 678 bp, Unknown
  Obtained from environmental sample
  misc_feature (1)..(678): n is a, c, g, or t
atgagcatatccgagcatgagggcgattcaaaagaaatcgcaagacggatagaagaatgtcggcttgcgggcggggaggttcttgacctttcttttcttaatatgacagagcttcccgctgaaattcaggacctaaaaaaccttgccactcttgatttgagctacacccatctgcaaaagctgccggattggattggaaatttaaccacattagaagagcttgacctcaccgatacgcgaattgaaacgttcccagaatctttcggcaacctaaagtcgttacgggtgctctttttagagaaaaaatacgaagaaacactgacagaagagcctaaaatgcccctttatgatataaaagacgtacaaattgatgtacctgttcattttcctgactctttcggcaatctaacatcgcttgagaaattgtacataagatgcaatatcgccgtatttcctgaatcgtttggaaatctccggtctttaaaaacgctatacctaaatttttgggtctcaaagatgtattataaccagcttggatcaggatatggtaatgatattcttgccatcaataatttttcctccctgcctgaatctttcggggatcttgaatctcttgaagatttttccattgacggcggtaatataagaacgcttccggccagtttgaactcgccataa

SEQ ID NO: 19238 - protein, 225 aa, Unknown
  Obtained from environmental sample
  misc_feature (1)..(225): Xaa is any amino acid
MSISEHEGDSKEIARRIEECRLAGGEVLDLSFLNMTELPAEIQDLKNLATLDLSYTHLQKLPDWIGNLTTLEELDLTDTRIETFPESFGNLKSLRVLFLEKKYEETLTEEPKMPLYDIKDVQIDVPVHFPDSFGNLTSLEKLYIRCNIAVFPESFGNLRSLKTLYLNFWVSKMYYNQLGSGYGNDILAINNFSSLPESFGDLESLEDFSIDGGNIRTLPASLNSP

SEQ ID NO: 19239 - DNA, 846 bp, Unknown
  Obtained from environmental sample
  misc_feature (1)..(846): n is a, c, g, or t
atgtttgccctgaaaaaatactttgaggataataaaataaaccttctttcctatagaactgagggatataccggcctgcttgccgaacgggcggtcaacttttccagccccggcggcctgcttgacactgccgagcgctttgtgccgggcgtacggcggaatacccgcaagatcgaagggatacccaatatttacccctaccttacggaaattgcccaattgttgaacgataaggaagtggaattccccctgctgatagactgtttgaactgcgaaaaaggatgcaacggaggctccggaaccggcaaccattccctgcctttggacaagctggaaacgcctatccgcaaacgcagcgcggaacatgagaaacaaattgcccgcaataaacataaaaacgattttgaaaaataccacaaacagttgaaccagttctggaagcgcggcctgtatgaccgcagttaccgcgacatttccggaaaccttgtattaggcaagccgagcgatcttgaattaaatgaaatttaccttaaaatgaaaaagttgggaaaatcggatttgtacgattgcggagcctgcggttacggaagctgtaagggaatggccacggctattttcaacggcattaacaaaccggaaaattgcgcccactataccctcgccgtactcaaggaaaaaaaggatacggaggaattaaaccggatgcttcatgagcacatcggctacgcgtccgacattcttgaaggaataaacaacctggtaagcgaactgcataccgttattgagctgcaggcggaatcggtcgacaggtcttcggcgataaccgaagaaatgatcgtactataa

SEQ ID NO: 19240 - protein, 281 aa, Unknown
  Obtained from environmental sample
  DOMAIN (188)...(218): Putative Fe-S cluster
  misc_feature (1)..(281): Xaa is any amino acid
MFALKKYFEDNKINLLSYRTEGYTGLLAERAVNFSSPGGLLDTAERFVPGVRRNTRKIEGIPNIYPYLTEIAQLLNDKEVEFPLLIDCLNCEKGCNGGSGTGNHSLPLDKLETPIRKRSAEHEKQIARNKHKNDFEKYHKQLNQFWKRGLYDRSYRDISGNLVLGKPSDLELNEIYLKMKKLGKSDLYDCGACGYGSCKGMATAIFNGINKPENCAHYTLAVLKEKKDTEELNRMLHEHIGYASDILEGINNLVSELHTVIELQAESVDRSSAITEEMIVL

SEQ ID NO: 19241 - DNA, 771 bp, Unknown
  Obtained from environmental sample
  misc_feature (1)..(771): n is a, c, g, or t
ttgaaaaagctcaacctgcgcggaaacaggctcggctctatgccggattccgtcggcgatcttaaagacattacttccattgatatcggcttaaacattttctgggaaataccggcctgcctcaaacggcttacatctcttgaacatcttgatcttgaatcgctttgcctgcgatacgacgatagaaccttgccggattggattggggattttactgctctgaaatatctcaatttacgccactccggccttacatctctgcctgaatcaatgaagaagcttataaacttgcggactttttatcttggcgcgaattgtttgcccgcgttgcccgaatggttgggcggttttaccttgctggaagagctggacattagtgccaatgagctttacgccataccggagtttgtcgggaatttcaaaaacctccgcgcccttgatttgggccattcaggtaaatgggaaactgtaatccgtagtagtagcgtatgttatctggatgaacagataaatgagcttgattgcctgcccgcttttttaaccgggcttccacgccttgtccgccttgatctgggcaatacaaaacttaaatcgctccctgattttttaaacgcattgcgaattgaaagcctaaagctgggcaacaatgagctagcaaagattccggagtggcttggctcaatgacaagcctaagggagcttgatctttcggaaaatatgaatcttaaatcgctcccccgcagtctgaaccgacttgctcggccgatctga

SEQ ID NO: 19242 - protein, 256 aa, Unknown
  Obtained from environmental sample
  misc_feature (1)..(256): Xaa is any amino acid
MKKLNLRGNRLGSMPDSVGDLKDITSIDIGLNIFWEIPACLKRLTSLEHLDLESLCLRYDDRTLPDWIGDFTALKYLNLRHSGLTSLPESMKKLINLRTFYLGANCLPALPEWLGGFTLLEELDISANELYAIPEFVGNFKNLRALDLGHSGKWETVIRSSSVCYLDEQINELDCLPAFLTGLPRLVRLDLGNTKLKSLPDFLNALRIESLKLGNNELAKIPEWLGSMTSLRELDLSENMNLKSLPRSLNRLARPI

SEQ ID NO: 19243 - DNA, 774 bp, Unknown
  Obtained from environmental sample
  misc_feature (1)..(774): n is a, c, g, or t
atgctggaactggaaaatctgtggagagagtttaaggaggccggatcccaagccgctaaggataagctgcttgtggagtattcccacttggttaaatacaccgcgcagcggcttgccataaacttgccgccgtccgtggatcgcgacgacttgtacagcgccgggattctggggcttataaaggcggtggacacctttgagccggagcgcggtttcaagtttgagacctacgccggccacaagatacgcggggcgatcttagacgaactgcgcgccttagactgggtgccgcgctccgtcaggcagaaggcccgcgatctgcaaagaacgttcacaaggatggagaacgctctcggccgcgccccctacgacgacgaggtctgcgacgaactcggcgtaacaatggaggagtacgagcagatattggccgaggtcacacccgccaccatcgtctccttggacgagacgatgaacgactccttctccgacgccaaagacatgaagatgatcgaccaagtggaggatccggacagcctgaatccactaaaagagatgggaaccgacgaggtcaagggcatactgaaagacgcgatcgtagggcttcctgaaagcgaaagggtggtagtggcgctgtatcactatgaagagttaacgctgaaagagataggggtggtgctgaatcttacggaaagccgtgtcagccagatacattccaaggcaatgatgaaacttcgcgccagactcctacagaagtttatggaagatgacgtttga

SEQ ID NO: 19244 - protein, 257 aa, Unknown
  Obtained from environmental sample
  DOMAIN (97)...(176): Sigma-70 region 3
  misc_feature (1)..(257): Xaa is any amino acid
MLELENLWREFKEAGSQAAKDKLLVEYSHLVKYTAQRLAINLPPSVDRDDLYSAGILGLIKAVDTFEPERGFKFETYAGHKIRGAILDELRALDWVPRSVRQKARDLQRTFTRMENALGRAPYDDEVCDELGVTMEEYEQILAEVTPATIVSLDETMNDSFSDAKDMKMIDQVEDPDSLNPLKEMGTDEVKGILKDAIVGLPESERVVVALYHYEELTLKEIGVVLNLTESRVSQIHSKAMMKLRARLLQKFMEDDV

SEQ ID NO: 19245 - DNA, 843 bp, Unknown
  Obtained from environmental sample
  misc_feature (1)..(843): n is a, c, g, or t
gtgcgccgcgaaggcgatgaattgggagtgcgtaccgagacaaagaacatgaattcgtttaaggcgattgcgcgagccattgaatacgaaagctcccgccagatcgaaatactggaagatggcgggcaggtcgttcaggaaacacgccgctgggacgacgagaaacttgagtcctatggtatgcgctcaaaggaaaacgcgcaggactaccgctactttccggaacctgacctcctgccgattgacattgatgaggcgtggcttgcgagcgtcaaaaaaaacctgccggaactggcgcatcaaaaacgtgaacgctattgccatgatttcaggattagcgaatccgaagcggcggttctgaccgtccataaaaaaaccagcgatctgttcgaggccattgcgaaaaaaagcgggcagcctgtcgaagcggcgcacctaataaccggagagatcatgcggttgatgaacaacgccaatattctgccggaagatttatctattgacgtcggtaaactttcagcgcttattacacttgttaccagcggaaaaatcaaccgaaacgcttataaagaaaccgttgaggcggtattcacccgcaatgttgatcctgaaagctacatcgccgaaaaaggtttgatgatgatcaacgacgacngcgcggtcatcgaagcggcgaaagctgttatcgctgaaaaccaggattcggtcgcggattaccgcgcaggcaaggaaaaaatattcgcctttttaatggggcaggttatgaaaaaactgggcgggaaaggaaatccggaaatggtgaagaagacattaacaaatctgcttaaagaggttagcgcatga

SEQ ID NO: 19246 - protein, 280 aa, Unknown
  Obtained from environmental sample
  DOMAIN (58)...(126): PET112 family, C terminal region
  misc_feature (1)..(280): Xaa is any amino acid
MRREGDELGVRTETKNMNSFKAIARAIEYESSRQIEILEDGGQVVQETRRWDDEKLESYGMRSKENAQDYRYFPEPDLLPIDIDEAWLASVKKNLPELAHQKRERYCHDFRISESEAAVLTVHKKTSDLFEAIAKKSGQPVEAAHLITGEIMRLMNNANILPEDLSIDVGKLSALITLVTSGKINRNAYKETVEAVFTRNVDPESYIAEKGLMMINDDXAVIEAAKAVIAENQDSVADYRAGKEKIFAFLMGQVMKKLGGKGNPEMVKKTLTNLLKEVSA

SEQ ID NO: 19247 - DNA, 900 bp, Unknown
  Obtained from environmental sample
  misc_feature (1)..(900): n is a, c, g, or t
ttgatcagatcggccgagttaatccgaaaacgcgctattcaagcccgtaacgcgcaaattaagtcgctaatcatgaaagaatcaaatatccccccctttttcgccgtggatcacgagggcggaactgttaaccgcttcaggcgcggcgcagcggatttgcctgcggcggcttcttattgggaaatcgcccaaggacagggaatacagactgcgctcgcgaaaatagaagctgacagtttcaaagcgggcagagagataaatactttaggtcttaacatgaatttcgcccctgtggcggaatacttattcgacggcaaccgcgattttttggcaagccgctcttacggacccgacccgctctttgccgcgcaagccgcatccgcttttacccacggcatggaacaggcgggagttttatgcgttgtaaagcattttcccgcaagcgcgggacccgatccgcaccgttctccgtccgtgcttaacattgacaaagccgctttggacaatcttgtctcgccttttgtcgccgccataaaaaacggagcaagatcgataatggcggctcacacccgcgcgtccgcggttgacgataaaatagcgagtctttcgcccgttgttatgggaaaatggctaagaggcgatttgggttttgacggaataattataagcgacgattttacaatggctgcagcgggcaatatcagtcccgaagaagcggcggtgctttcagtcgccgcgggatcggatatgattcttgtctggcctgcccatttaccgaanacctaccaggcgtttattgacgcgcttgaagacggacggctttcccgcgaaagactgcangacgcggcgcanaggataatttatgaaaaattaaaaatgggattgatagatggagaataa

SEQ ID NO: 19248 - protein, 299 aa, Unknown
  Obtained from environmental sample
  DOMAIN (23)...(253): Glycosyl hydrolase family 3 N terminal domain
  misc_feature (1)..(299): Xaa is any amino acid
MIRSAELIRKRAIQARNAQIKSLIMKESNIPPFFAVDHEGGTVNRFRRGAADLPAAASYWEIAQGQGIQTALAKIEADSFKAGREINTLGLNMNFAPVAEYLFDGNRDFLASRSYGPDPLFAAQAASAFTHGMEQAGVLCVVKHFPASAGPDPHRSPSVLNIDKAALDNLVSPFVAAIKNGARSIMAAHTRASAVDDKIASLSPVVMGKWLRGDLGFDGIIISDDFTMAAAGNISPEEAAVLSVAAGSDMILVWPAHLPXTYQAFIDALEDGRLSRERLXDAAXRIIYEKLKMGLIDGE

SEQ ID NO: 19249 - DNA, 717 bp, Unknown
  Obtained from environmental sample
  misc_feature (1)..(717): n is a, c, g, or t
atggcaaaaagcctggtaaacagcgcaattttatcggctctcatcgcgctggaaatgaagataccgaaccacaaggttttacagatagtaaccggcgcgctgctccacgatgtaggcatgcttagaatgccaaaggaaattgttgaaaaaaaaggcggcctttcggaatcggaacttcagcgtatccaggcccataccttatacacctacaaaattgtaaacaaggaactcctgtatccggaagaagtggggcttatcgtccttcagcaccacgagcgatgggacggcgaaggctatcccagacgtctttccggaacagccattgacatcggcgcacggattgtctctgtcgctgacgctttcgaggccatggtgagcaagaagccctaccggaattccatgatgggctaccaggccatgaaaaaccttctttccgataacctaaggcgctttgacccggatgtgatcaaggcctttattcagactatggggatttacccgataggctcaatcatcctgcttaataacggcgctcttggaagagtcgtagacgttcaggcaagcgccccgctcaggccaacagtcaggatacttgccgatgaattcggccattttttcaaaaatgactcaggagatctgctggatcttctgattgaaaagagcctcttcattgccagggctgtggatccaaaagaagttgccgataaagacttctag

SEQ ID NO: 19250 - protein, 238 aa, Unknown
  Obtained from environmental sample
  DOMAIN (1)...(124): HD domain
  misc_feature (1)..(238): Xaa is any amino acid
MAKSLVNSAILSALIALEMKIPNHKVLQIVTGALLHDVGMLRMPKEIVEKKGGLSESELQRIQAHTLYTYKIVNKELLYPEEVGLIVLQHHERWDGEGYPRRLSGTAIDIGARIVSVADAFEAMVSKKPYRNSMMGYQAMKNLLSDNLRRFDPDVIKAFIQTMGIYPIGSIILLNNGALGRVVDVQASAPLRPTVRILADEFGHFFKNDSGDLLDLLIEKSLFIARAVDPKEVADKDF

SEQ ID NO: 19251 - DNA, 882 bp, Unknown
  Obtained from environmental sample
  misc_feature (1)..(882): n is a, c, g, or t
ttgagaaatttaccgattttctttacaatactagaaatgaaaatccgattaaaaatgttccttgtaattctgcctttaatcattgtaccgcttgttcttgcggaaactgcgtcctattttcaagctgtaaacggaataacccgccttgccagagaacttttagggtttaaactgagcgaactggaaaaatacgccaataatcaatggtcgcttttggttgataacaactacgccggaaaacccgagatggtggaagcggcggaaaaagccgtggaacagtacggacgcagtattcttttaagcgatacggaaatagtttttgcggtagataaaaccggtaagacggcgatgtctacttccgagattaaattatcgcctccggaatcaaaggcgctgttacagcttcttgagcatgaaaatcagggattgcaaactgccgtcatcggcggcgaaaagcgtatttttcaggctttttattttaccccctttaactggtatattttaatcagcgaaaaagagcaggtgttttttgaagacgcaaaaatgattgcgttccaaactatcatttctctaggagcctctgtcttaatcgccgtgtttatgcttattatcgttacccgccgtctgacaaatcccctgggaaagattgttacaactatggaatcgataattgagacggcggatctttcatctaaagttgaagttgagtataacgatgaaaccggcattcttgcgcagacgttcaataatatgacggaagaattgaacagggcgtactcgcagataaagcgttacgcgttcgacgccgttcttgcgggcaaaaaagaagagcgtatccgccagatttccaaaagtatgtgccgaatactcgtgccgatctga

SEQ ID NO: 19252 - protein, 293 aa, Unknown
  Obtained from environmental sample
  DOMAIN (187)...(257): HAMP domain
  misc_feature (1)..(293): Xaa is any amino acid
MRNLPIFFTILEMKIRLKMFLVILPLIIVPLVLAETASYFQAVNGITRLARELLGFKLSELEKYANNQWSLLVDNNYAGKPEMVEAAEKAVEQYGRSILLSDTEIVFAVDKTGKTAMSTSEIKLSPPESKALLQLLEHENQGLQTAVIGGEKRIFQAFYFTPFNWYILISEKEQVFFEDAKMIAFQTIISLGASVLIAVFMLIIVTRRLTNPLGKIVTTMESIIETADLSSKVEVEYNDETGILAQTFNNMTEELNRAYSQIKRYAFDAVLAGKKEERIRQISKSMCRILVPI

SEQ ID NO: 19253 - DNA, 816 bp, Unknown
  Obtained from environmental sample
  misc_feature (1)..(816): n is a, c, g, or t
ttgttacgcgacatacgttctgaactggctgaccttgagcggggtatactccgttaccccgacgctccgcgcgaactgcacgccgctctcgaaaaagtcggcatcgaggctttctttctggcggaagccgcggaaattaccgcgcccgactgggttgacgccgttgaaggctggctcaacacgcggcgcttcgccattctggttgaccccgtccattttcaaaaagccatcgaagtatacaaccgcctcccccgttccgtggccggagcttttatccccaatatcgaaaagatgcgggatgctgtggtaagacagggttccctcgccgagatcgttaaagccgaaggttatgcccgcatttacattgattacacattgggaaaagttatgcgttctgaccttgcaaatctaaaaacgtatgattcctcggttaccaaagagtgtatgacctatatgaaccacaccgcttcacggatcaaggaggaggtttaccgccgtcattatctgggaagggcagctctggaggagcgccggaaattccttgctgccgaagcggagcgtgtcgaagcggaattaataagcagcgaaagagaggagaaggaagcgcgggtccgcgaagattgctgtaaccgcgttatacgttttctgcctcaattaatgctcctttacccttctatcgcgggcgctgaacttcttgccggtcagctcgctgcctctgagaaagaaactgccgcgatagatacccaatctttcaaagaactggaaaacaaacgcggtggaattagagaaataccttggactattaaaagaagataa

SEQ ID NO: 19254 - protein, 271 aa, Unknown
  Obtained from environmental sample
  misc_feature (1)..(271): Xaa is any amino acid
MLRDIRSELADLERGILRYPDAPRELHAALEKVGIEAFFLAEAAEITAPDWVDAVEGWLNTRRFAILVDPVHFQKAIEVYNRLPRSVAGAFIPNIEKMRDAVVRQGSLAEIVKAEGYARIYIDYTLGKVMRSDLANLKTYDSSVTKECMTYMNHTASRIKEEVYRRHYLGRAALEERRKFLAAEAERVEAELISSEREEKEARVREDCCNRVIRFLPQLMLLYPSIAGAELLAGQLAASEKETAAIDTQSFKELENKRGGIREIPWTIKRR

SEQ ID NO: 19255 - DNA, 327 bp, Unknown
  Obtained from environmental sample
  misc_feature (1)..(327): n is a, c, g, or t
gtggttgttgacactgaaaccgtaatgcaactctcgaaacgctacgccgacgatgtgcgacgcgtgatgccggtcgataaggctgtactgttcggctcntacgccaagggcaccgcagacgcactcagcgacattgatatctgcttcttcctagacaactacggcggcaaacgacgggcagatattattggggaaatgctacgcctctcaaacgtccccgattacaaaaatgccttttttgaacccattgcgtttccaacatcggaaatatataacgataaccccttcgtaaaagaaattttgcgaactggaaaagaaatatcgtag

SEQ ID NO: 19256 - protein, 108 aa, Unknown
  Obtained from environmental sample
  DOMAIN (8)...(97): Nucleotidyltransferase domain
  misc_feature (1)..(108): Xaa is any amino acid
MVVDTETVMQLSKRYADDVRRVMPVDKAVLFGSYAKGTADALSDIDICFFLDNYGGKRRADIIGEMLRLSNVPDYKNAFFEPIAFPTSEIYNDNPFVKEILRTGKEIS

SEQ ID NO: 19257 - DNA, 729 bp, Unknown
  Obtained from environmental sample
  misc_feature (1)..(729): n is a, c, g, or t
gtgaacggcgttatcgttacngcgcagggaagcagggtttttccgggcgatacggtgctgctggacggaaaacnggttcggacggaaagcaggcttgtctacctcgccctgaacaaaccgcccggctatatttgcagttcctccgatccgcaggggcgcccccttgccattgatcttctgccgggtgaaatcagggagaggctgtataatgtcggcaggctggatttcatgtcctgcggccttatcttttttaccaatgacggcgaattcgccgcccggcttggccatcctcgatccggcctcgagaaggaatacatggttgaagcgaccggccatatccccgacgctctcatcgatgcttttgaaaaagggataagcatagaagacgtgtattataaggcgcaattgattgaaaggcttggttccagactaataagggtagtgctgatagagggcaagaacagggaaatccgccgtgtgttttcccattttcatctgcaccccttccgtctgcgccgcgtacgcataggcccggtaaagctggaagaactggaagaaggagaatcgcgcccgttaaggaagtttgaactggaagccctaaaaattaggaatgaggaattaggaattaggaataaagagagacaagaaaacggaaggaatagcagaaagcctattcctcattcctcactcctaattcctaattccccgaaggggagcatgacatggtaa

SEQ ID NO: 19258 - protein, 242 aa, Unknown
  Obtained from environmental sample
  DOMAIN (33)...(163): RNA pseudouridylate synthase
  misc_feature (1)..(242): Xaa is any amino acid
MNGVIVTAQGSRVFPGDTVLLDGKXVRTESRLVYLALNKPPGYICSSSDPQGRPLAIDLLPGEIRERLYNVGRLDFMSCGLIFFTNDGEFAARLGHPRSGLEKEYMVEATGHIPDALIDAFEKGISIEDVYYKAQLIERLGSRLIRVVLIEGKNREIRRVFSHFHLHPFRLRRVRIGPVKLEELEEGESRPLRKFELEALKIRNEELGIRNKERQENGRNSRKPIPHSSLLIPNSPKGSMTW

SEQ ID NO: 19259 - DNA, 771 bp, Unknown
  Obtained from environmental sample
  misc_feature (1)..(771): n is a, c, g, or t
gtgatagaacttcaggatgtgggggttaggtattatacctttctttccacattgcggaacttgttcaatacccttaagaaagaaaatatcccccttccggtgtgggttgttgaccgggaaaaccccgcgggctcctgggtagagggttctccgttaaagccgggctacgggtcttttatcggtatcgaggggctccctcaccgttacggccttaccattggggagatggcctattattttcacgctgaaatcgaggcggatttcccccttcacatagtgtcctggcaggcggaggtttgcggctttccctggacaatacctccctcgccgaacatccccggtttttttaccccgggcttttattcaggccagtgcctctgggaagggaccaatgtgagcgaaggccgggggaccacaaggccctttgaagtattcggcgcgccctggatggaggaaagcctcgtgacttacaaccgaaaacatggttatgaaaactggaatgatcctaaacatccgctttttgatcccaacgcctctctgcgctggcaccgcttcatccccacttttcataagtacaaggacgagtgctgtttcggctttcaactcatactccgggatcccaaggcaagttaccacgcccttttccatgccctgcgtataatccgatttatccggacccactgccccggatttctctttcaggccccggaaaatacgagaccggggaacgataaaacagccataggaacttttggcggggggattccctga

SEQ ID NO: 19260 - protein, 256 aa, Unknown
  Obtained from environmental sample
  DOMAIN (1)...(256): Protein of unknown function (DUF1343)
  misc_feature (1)..(256): Xaa is any amino acid
MIELQDVGVRYYTFLSTLRNLFNTLKKENIPLPVWVVDRENPAGSWVEGSPLKPGYGSFIGIEGLPHRYGLTIGEMAYYFHAEIEADFPLHIVSWQAEVCGFPWTIPPSPNIPGFFTPGFYSGQCLWEGTNVSEGRGTTRPFEVFGAPWMEESLVTYNRKHGYENWNDPKHPLFDPNASLRWHRFIPTFHKYKDECCFGFQLILRDPKASYHALFHALRIIRFIRTHCPGFLFQAPENTRPGNDKTAIGTFGGGIP

SEQ ID NO: 19261 - DNA, 639 bp, Unknown
  Obtained from environmental sample
  misc_feature (1)..(639): n is a, c, g, or t
gtgctttacacctgcgaagcgtttatcctcctcggagaaattgtttctgccattgacgcacgcagcctggatgaggtgatccgtgcccgggtactggagcccctgagaatgaaagatacctgttataatccggccgcgtccctcatggaacgcattgcccccaccgaagacgatcccttgcggggcaggcttatccgtggagaggtacatgacgaaaacgccggcgtcatgggtggggtgagcgggaacgcagggcttttttcaagcgcccttgatatgagccgctttggcgctgccatgctcgcctctttggaaaatggcgcttttcttcataaggcaagcgccgagttaatgacccgcaaccatacgccgggcatgggggaaaaccggggcttaggctggatgattgcggggccaggttcttccgcgggggacgtcctttcccctggcagcttcggccatacgggctttacaggaaccagcctctggatagatcccaaaaggaaattgtacgccctgcttctttccaaccgcattcatcccaggagggacaacacgggtatattcagaacccggcacattttccataacctcgcggttctggaatacgagaatccaggaacgaagaatgacaaatga

SEQ ID NO: 19262 - protein, 212 aa, Unknown
  Obtained from environmental sample
  DOMAIN (1)...(196): Beta-lactamase
  misc_feature (1)..(212): Xaa is any amino acid
MLYTCEAFILLGEIVSAIDARSLDEVIRARVLEPLRMKDTCYNPAASLMERIAPTEDDPLRGRLIRGEVHDENAGVMGGVSGNAGLFSSALDMSRFGAAMLASLENGAFLHKASAELMTRNHTPGMGENRGLGWMIAGPGSSAGDVLSPGSFGHTGFTGTSLWIDPKRKLYALLLSNRIHPRRDNTGIFRTRHIFHNLAVLEYENPGTKNDK

SEQ ID NO: 19263 - DNA, 885 bp, Unknown
  Obtained from environmental sample
  misc_feature (1)..(885): n is a, c, g, or t
atggaaaaatgggccgtgccttcggcgggcggggaagatatcggtattttgcccgaagacggcgcggaacatgacgcccggcaggtatttcatcggctggcctttacctggatggactggggacggcaaagcgggtacttcgacagtgaggaagacgcgcaggctttctatgatgagacctgctatatgcttgctcaccagcttgccgcgcccaacagtccccagtggttcaacaccggcctgtacgcggtatacggcatcgacggtccggcgcaggggcattactattttgaccctgaaaagaaacagttggtaaaatcggacagcgcctacaaacggccccagcctcacgcctgctttattctttctattgaagacaatctcgtaaacgagggcggtatcatggatttggtaacacgggaggcgcggctcttcaaatacggttccggcacgggttccaatttttccaatatccgcagtataaacgagccgctctccggcggcggcgtttcttccggcctgatttcatttttgaaaatcggggaccgttccgcttcggcgataaaatccggcggcactacccgccgggccgccaaaatggtcacgctggacgtggatcaccccgacgtagaaagatatatttcctggaaggccggcgaggaacataaagtcgcctctatggtaaccggttcgtcgattgtaaaaaaacaccttgagggcatcaaaaaggcgctggccggtttccggggaccggaaagcgataaatttaacgttgaaaagaaccatgagcttgccgcggttctccgcgccgcgttaggcgataaatccccgcgtcttacctgtaccagcatctcaggcggaatgagcagggggatgatgatataa

SEQ ID NO: 19264 - protein, 294 aa, Unknown
  Obtained from environmental sample
  DOMAIN (2)...(67): Class II vitamin B12-dependent ribonucleotide reductase
  misc_feature (1)..(294): Xaa is any amino acid
MEKWAVPSAGGEDIGILPEDGAEHDARQVFHRLAFTWMDWGRQSGYFDSEEDAQAFYDETCYMLAHQLAAPNSPQWFNTGLYAVYGIDGPAQGHYYFDPEKKQLVKSDSAYKRPQPHACFILSIEDNLVNEGGIMDLVTREARLFKYGSGTGSNFSNIRSINEPLSGGGVSSGLISFLKIGDRSASAIKSGGTTRRAAKMVTLDVDHPDVERYISWKAGEEHKVASMVTGSSIVKKHLEGIKKALAGFRGPESDKFNVEKNHELAAVLRAALGDKSPRLTCTSISGGMSRGMMI

SEQ ID NO: 19265 - DNA, 519 bp, Unknown
  Obtained from environmental sample
  misc_feature (1)..(519): n is a, c, g, or t
atgctcaaaaccaggaccatcctgctttcgggagaaattcgcaaagggcttgcggaaaagactatccgccagcttctattaatggaagctaccggaaatgagcccgtgcgtatctttattgattcgcccggcggggatgccgatgcgggttatgccatttttgacatgatccgatttataacccccccggtgtggaccatcggcatggggcttgtcgcaagcgccgcggctattatccagcttgccgcgccgaaagaacggaggatggggctgcctaacagccattatcttatacaccagcccctttccggcatacggggcgttgccaccgacattgaaatccacgccagagaactggaaaagctgcgggcgaagataaaccgcctcatagcggaagaaaccggcaaccctgcagaacaggttgaaaaagataccgatcgcgactactggatgaacgcccaggaagcggtcaagtacggcctgatcaacaaagtgataaccaaccgggacgaaatgtaa

SEQ ID NO: 19266 - protein, 172 aa, Unknown
  Obtained from environmental sample
  DOMAIN (1)...(169): Clp protease
  misc_feature (1)..(172): Xaa is any amino acid
MLKTRTILLSGEIRKGLAEKTIRQLLLMEATGNEPVRIFIDSPGGDADAGYAIFDMIRFITPPVWTIGMGLVASAAAIIQLAAPKERRMGLPNSHYLIHQPLSGIRGVATDIEIHARELEKLRAKINRLIAEETGNPAEQVEKDTDRDYWMNAQEAVKYGLINKVITNRDEM

SEQ ID NO: 19267 - DNA, 366 bp, Unknown
  Obtained from environmental sample
  misc_feature (1)..(366): n is a, c, g, or t
gtgtccactccgaatgccgcgcccaaagcgtacctgaccgcgcccctgttccattgggaggtgttctatgttgatgatataaaccaagttatcaacgggacctggaaatcacgcgcctattgggaaggattcagcaacgggacggttacactggacaagcttaccgacaataacgatccccgcgcggccgggactattgagacggccaggaatgccataaaagagggaacattagagctttttaccggccccttaagcgatcagagtggcgaggtaagagttcctgccggcactaaaatgaccgatgatgaaatttggaacatgggctggtttgtaaaaggcgttattggcatcattcccggctga

SEQ ID NO: 19268 - protein, 121 aa, Unknown
  Obtained from environmental sample
  misc_feature (1)..(121): Xaa is any amino acid
MSTPNAAPKAYLTAPLFHWEVFYVDDINQVINGTWKSRAYWEGFSNGTVTLDKLTDNNDPRAAGTIETARNAIKEGTLELFTGPLSDQSGEVRVPAGTKMTDDEIWNMGWFVKGVIGIIPG

SEQ ID NO: 19269 - DNA, 774 bp, Unknown
  Obtained from environmental sample
  misc_feature (1)..(774): n is a, c, g, or t
atgaggcctttatccgatataaccccttcccaggccgtcggtatccgttatgtgctaatggatattgacgatacgcttacacataacgggaaactgcttgcctcatcgtataacgcgttatggaaacttcgagccgccggcctcaaggccgtgccggtgacgggccggcccgcgggctggtgcgactgcattgcccgccaatggcccgtggacggcgttgtcggggaaaacggtgcttttgtcttttgggaagagccgcatgcccatgcgcagcttaatcatcagatcctgaaagcggcgtaccatccaaatgctattaaaaacgatcatccggttctcaagagggtgcgtgaacgcgcccttgccgaagtccccggcttgcgcgacgccaaggatcagtttgcccggttgttcgacatcgccctggattttgccgaggaagagcctgtgcttccgttcagcgcggcggaaaaggtgaaggatatagcccttgcgcagggggcaagggcaaaaatctcgtcaatacacgtcaatgtctggatgggcgattacgacaagctctccatggcagagcgttttctaagggaccgcttcggctggcagggcggtttggaagaagttgtcttcgtaggcgactctcccaatgacgagcccatgttcgcccgtttccccctttcatgcgccgtcgacaatatccgcaattttctgcatctcataaaagacagcccgcgttcgtggccgcaaaagaagggcgcgagggtttcgcggaaatag

SEQ ID NO: 19270 - protein, 257 aa, Unknown
  Obtained from environmental sample
  DOMAIN (18)...(245): haloacid dehalogenase-like hydrolase
  misc_feature (1)..(257): Xaa is any amino acid
MRPLSDITPSQAVGIRYVLMDIDDTLTHNGKLLASSYNALWKLRAAGLKAVPVTGRPAGWCDCIARQWPVDGVVGENGAFVFWEEPHAHAQLNHQILKAAYHPNAIKNDHPVLKRVRERALAEVPGLRDAKDQFARLFDIALDFAEEEPVLPFSAAEKVKDIALAQGARAKISSIHVNVWMGDYDKLSMAERFLRDRFGWQGGLEEVVFVGDSPNDEPMFARFPLSCAVDNIRNFLHLIKDSPRSWPQKKGARVSRK

SEQ ID NO: 19271 - DNA, 852 bp, Unknown
  Obtained from environmental sample
  misc_feature (1)..(852): n is a, c, g, or t
ttgccgcacaactgtaaacttaataatataacaaactatatggaaacatttttgcaatggtgggcgggaattagctatttgttgtccaagatattcattgtccgctcggagtttctggaaaatggcagaaacagccgccttattggctggtttgcgtatttggtgggaatgccggcatggatcgttttattgttaagcaggcaaaattggattgcctcggcagttgaaatagccgggattccatcggtaattctgggaatagttttaacctggaaacaaaacaacaatctcaataaatatatcgaccggtcaatcagggtctttatcgctctggtgattttattgggagtagtgtcaagtatttatacttttggcgggataaaaaccttttcgcaagttttggaaatattaatcatatttggcattcttttaagcaattatttactggcaagaaagaatccgtttggatggcttacgtttacgctggggctaacaagtacgagtattttaatgtatattcagaataagatggtattatgtattcagcagttagtttctttaatacctgtaataattggatttgtagtgtgtatgaagaaagcaaaaaggaatgtcaatgtatgtctcattgctttattagcggcattaactttctcgaattgcgccacaatacgccaaaaggatttttcccaatataattttacattgaataatacgttatcaatattcctgatagacaatgaaaaaaccccttatttttgtatacctgttcaatatatgggtgattatcaaatttccaggttcgagttcgacaatggcaatatactaattggcgattacgatattttgtga

SEQ ID NO: 19272 - protein, 283 aa, Unknown
  Obtained from environmental sample
  misc_feature (1)..(283): Xaa is any amino acid
MPHNCKLNNITNYMETFLQWWAGISYLLSKIFIVRSEFLENGRNSRLIGWFAYLVGMPAWIVLLLSRQNWIASAVEIAGIPSVILGIVLTWKQNNNLNKYIDRSIRVFIALVILLGVVSSIYTFGGIKTFSQVLEILIIFGILLSNYLLARKNPFGWLTFTLGLTSTSILMYIQNKMVLCIQQLVSLIPVIIGFVVCMKKAKRNVNVCLIALLAALTFSNCATIRQKDFSQYNFTLNNTLSIFLIDNEKTPYFCIPVQYMGDYQISRFEFDNGNILIGDYDIL

SEQ ID NO: 19273 - DNA, 588 bp, Unknown
  Obtained from environmental sample
  misc_feature (1)..(588): n is a, c, g, or t
atgatgtctgggcacagtaagtgggctaccataaagcatgcaaagggcgccgctgacgcaaaacgcggccaaatgtttacaaaactgattaaagaaatatcgattgccgcgcgtatgggcgggggaagcgtcgagggaaatccgcgcctaaggactgccgtgctaaaagccagggcggccaatatgcccaaagacaatattgatcgggctataaaaaagggaaccggagagctggaaggcgttacttacgaagagcttgcgtacgaggcgtttgcgcccggaggcgtagccctgcttatagaagtattgacggacaacaaaaaccgggctgccgcggatgtgcgtaatatccttacccgcgcggggggccagcttgctacagccggatctgtgtcgcggcttttcaaacgccaggggattatcagcctggatggggaaaagtacaccgaagaccangtgatggaagcggctattgaaggcggggccgaagatgtatccctttcaggcggcgttatttcggtaactaccgcgcctgangattttgaaaccgtcgtanacgccataaccgagaaaaaatttgaactataa

SEQ ID NO: 19274 - protein, 195 aa, Unknown
  Obtained from environmental sample
  DOMAIN (6)...(195): Domain of unknown function DUF28
  misc_feature (1)..(195): Xaa is any amino acid
MMSGHSKWATIKHAKGAADAKRGQMFTKLIKEISIAARMGGGSVEGNPRLRTAVLKARAANMPKDNIDRAIKKGTGELEGVTYEELAYEAFAPGGVALLIEVLTDNKNRAAADVRNILTRAGGQLATAGSVSRLFKRQGIISLDGEKYTEDXVMEAAIEGGAEDVSLSGGVISVTTAPXDFETVVXAITEKKFEL

SEQ ID NO: 19275 - DNA, 774 bp, Unknown
  Obtained from environmental sample
  misc_feature (1)..(774): n is a, c, g, or t
ttgagttcgaggagcctttgggatttggggataaacaacatagtagccaaagcgctgaccggggatatggagccgcactggacgacgatagccgattttatttccagcaacggcgaaaggttcaaggaaacgtttgcaaaagcattggcatattgcgccgggctgggtttggtaggcggacaaacctttgcgatagacggattgaggctgccgtcaaatgcgtcgctggacctaaccgggacggccgaagatttggagagacggctcaaaatatacaggcggatggcggagaaacacatagagaagcacaggcggaaagacgccgcaggagaggccgacgaagaaacgaaacggcattatcaggagcagcaaaaaaggctggacagaaagataaaaaacatcagcgattttcttgaggccatggaaaagaaggagggcaagcgcggcaaagagataaagtccaacgtaaccgacaacgagagcgcgttgatacactcgccgtcgggctatatccagggatatataggactggcggtctccgaccagaaaggacagataattgtgagcgcggaggcggttgggagcgcgaacgaatgcgaacattttcctcggatgcttgataagacattggacaatatgaaagaggctgccgttcaaccgcctgaaggggcgaaacggacgatgcttgccgacnacaactatttcagcgaagaanacctganagcctgccttgagcatgagatagaagcaatagtgccggacgaccattantag

SEQ ID NO: 19276 - protein, 257 aa, Unknown
  Obtained from environmental sample
  misc_feature (1)..(257): Xaa is any amino acid
MSSRSLWDLGINNIVAKALTGDMEPHWTTIADFISSNGERFKETFAKALAYCAGLGLVGGQTFAIDGLRLPSNASLDLTGTAEDLERRLKIYRRMAEKHIEKHRRKDAAGEADEETKRHYQEQQKRLDRKIKNISDFLEAMEKKEGKRGKEIKSNVTDNESALIHSPSGYIQGYIGLAVSDQKGQIIVSAEAVGSANECEHFPRMLDKTLDNMKEAAVQPPEGAKRTMLADXNYFSEEXLXACLEHEIEAIVPDDHX

SEQ ID NO: 19277 - DNA, 726 bp, Unknown
  Obtained from environmental sample
  misc_feature (1)..(726): n is a, c, g, or t
atggacatagcagccgttatatgcgccgcaggctcctccgcccgcatggggggcgtaaaaaaggaatacctgtgcctgcccggcgcccctgacgggccccgtaccgtgctgggcgcggccgtttccgctttcgccgccgttcccgaaatcaatacgatcctcatcgtcgtgccggaagagcccgaaaccggggaaaccgcggcgcggaacgccctgccccctgaaatccttgacggaaccagtgcgacggtgcgtttcgtcaccggcggcaacacccgccgcgcctcggtttttaacgcccttcgcgcgcttgccgccggcgcgccaaattacgtgcttatccatgacggcgcccgcccccgggtcagccccgatctgattaggcgcgtgattaggggcgtcaaacaataccgcgccgtcatccccctgctccccctgacagagacccccaaggaaacgaccttgccgcttgacaggcctttcggcagcggacccgtctttatcaaacaacagttgaagagggccttcatcggaaccgcccagacgccccaggccttcgccttccctgaaattctcgccgcccatgaaaaggccgccgcacagggtggcggcagggagttcaccgatgacgccgaagtctgggcggagttttgcggccccgtcgcggtcatccccggcgaggctaaaaacaaaaaaataactttcaaggaagatttatcatgctga

SEQ ID NO: 19278 - protein, 241 aa, Unknown
  Obtained from environmental sample
  DOMAIN (3)...(240): Uncharacterized protein family UPF0007
  misc_feature (1)..(241): Xaa is any amino acid
MDIAAVICAAGSSARMGGVKKEYLCLPGAPDGPRTVLGAAVSAFAAVPEINTILIVVPEEPETGETAARNALPPEILDGTSATVRFVTGGNTRRASVFNALRALAAGAPNYVLIHDGARPRVSPDLIRRVIRGVKQYRAVIPLLPLTETPKETTLPLDRPFGSGPVFIKQQLKRAFIGTAQTPQAFAFPEILAAHEKAAAQGGGREFTDDAEVWAEFCGPVAVIPGEAKNKKITFKEDLSC

SEQ ID NO: 19279 - DNA, 522 bp, Unknown
  Obtained from environmental sample
  misc_feature (1)..(522): n is a, c, g, or t
ttgatggccgaggcgcttctggaaaggccgagtcaaaaaatctaccgcgacgttttcgcggacgccccggaacttacggcgcttaccgaaaccatccggaaaaaatacctgcaggaaaacggcagcctggtcaaggaaatgggcaaacatctgttgaaagcgcacgagctctgcgccgcgataggggtgcgttttgaggattatgttgaccgcgtgcttcgaataccccgcgccgcggcgaacatggctattaaaatgttcgattacgatcttaatccgcagacaggcgccgacaacatgcgtttcctcgccggcatccgcgaccccgatgagcggaaagccgctgaaaccgccctgctcaaaaataaaagccccgattcggttaaagcggcgattcgccaaaaaaccaaagatgaagaccccgtgctaatgcttgaacgggaaaagatccgccttgaacgcaccatacagacgctctctaaacggcttgaagaagtgaaaaaggagcttgagcaaaaataa

SEQ ID NO: 19280 - protein, 173 aa, Unknown
  Obtained from environmental sample
  misc_feature (1)..(173): Xaa is any amino acid
MMAEALLERPSQKIYRDVFADAPELTALTETIRKKYLQENGSLVKEMGKHLLKAHELCAAIGVRFEDYVDRVLRIPRAAANMAIKMFDYDLNPQTGADNMRFLAGIRDPDERKAAETALLKNKSPDSVKAAIRQKTKDEDPVLMLEREKIRLERTIQTLSKRLEEVKKELEQK

SEQ ID NO: 19281 - DNA, 588 bp, Unknown
  Obtained from environmental sample
  misc_feature (1)..(588): n is a, c, g, or t
ttgttaagtatttacttttcggcgatgaccgcttatggcttacatgtttatcggtttaaggggaggttggtgctgtggactgttatcctaatcgtaattatgctgccaagctcactttccattatcggtttttatcagttcatgtccacgatgaagctccgtgacagttatattccgcttattattccgggtatagccgcggcgggaacggttttgttccttaggcagtacatgatgtctgttttgagtaccgatcttattgacgcggcgcggattgacggcgcacatgagtataagatattcaatatcattattcttccgattatgattcccgctcttgccgctcagtcgatttttacctttgtaggttcatggaataactttattacgccgtttatattgatttccaacgaaaagaaatttactttgccaatgcttgttcaaagtttgcgtggtaatatttaccgcgcggagtacggcgcgatttatctgggaatagccgtttcacttatacccgatattctcttttattcattcatgtcacggtttatcatttccggtcttactatgggcggactaaaggaatag

SEQ ID NO: 19282 - protein, 195 aa, Unknown
  Obtained from environmental sample
  DOMAIN (1)...(190): Binding-protein-dependent transport system inner membrane component
  misc_feature (1)..(195): Xaa is any amino acid
MLSIYFSAMTAYGLHVYRFKGRLVLWTVILIVIMLPSSLSIIGFYQFMSTMKLRDSYIPLIIPGIAAAGTVLFLRQYMMSVLSTDLIDAARIDGAHEYKIFNIIILPIMIPALAAQSIFTFVGSWNNFITPFILISNEKKFTLPMLVQSLRGNIYRAEYGAIYLGIAVSLIPDILFYSFMSRFIISGLTMGGLKE

SEQ ID NO: 19283 - DNA, 753 bp, Unknown
  Obtained from environmental sample
  misc_feature (1)..(753): n is a, c, g, or t
atgccgtcgtttatcgtaaccctttcgggaatgatgctttttcggggacttacttatattattacaaaagttaaccccgtcagcctcaaagataccggttattcccatctttccaccggaacattggacgaagtgctgaaaacaaatcaaatagggccttattatccaacggctctggttctggctgtgctggtacttttagtttattatatagctgaaattcttgggcgcaggaaaaaagtggccaatggttttgaagtaagcccctttccgttgtttataacccaactggtattagtcagccttttgacgcttggacttgccgatcgttttgcccggtatcgggggcttccaatcgtagtattggtattgggtataacagtttttgtctttcactttcttttgaataataccgtgcttggccgctttatctacgcggtcggcggtaacccgcgttccgcaaaactttccggtatcaattcggagatggtaacatttatcgtcttctgttttatgggcggattaacagggcttgccgccgtggtgagtaccggttacatgaacagcgctcttccccaggcgggcaacctttttgaattggacgccattgccgcgtgttacataggcggcgtatccgccggcggcggtattggttctgtaatcggggttgtcgtaggcggtcttgtaatgagcgcgattaacaacggaatgatcctgatgaatctcggcacacactatcagtatgttgtttaa

SEQ ID NO: 19284 - protein, 250 aa, Unknown
  Obtained from environmental sample
  DOMAIN (3)...(250): Branched-chain amino acid transport system / permease component
  misc_feature (1)..(250): Xaa is any amino acid
MPSFIVTLSGMMLFRGLTYIITKVNPVSLKDTGYSHLSTGTLDEVLKTNQIGPYYPTALVLAVLVLLVYYIAEILGRRKKVANGFEVSPFPLFITQLVLVSLLTLGLADRFARYRGLPIVVLVLGITVFVFHFLLNNTVLGRFIYAVGGNPRSAKLSGINSEMVTFIVFCFMGGLTGLAAVVSTGYMNSALPQAGNLFELDAIAACYIGGVSAGGGIGSVIGVVVGGLVMSAINNGMILMNLGTHYQYVV

SEQ ID NO: 19285 - DNA, 726 bp, Unknown
  Obtained from environmental sample
  misc_feature (1)..(726): n is a, c, g, or t
gtgatagaaaccgagatcaaccagtacgcttatattacctcccccattgacggcattgtgcttgacaggaggatcaatatcggcgacacagtcgttgacagctcaagcaacaattcatccgccatttttacccttgccgaaaacctaagggagatgcagatagaagcggccgtgggcgaacttgacgtcgcctccattcaaaaggggcagcgggcgcgttttaccctggagagcatgccggggcggagttttcagggcgaggtggaaaccctccgcatggttcccatagtgtcaaataatgtcgtttcctataccgttattgtcaaagtagagaatctcgacggctcgctgcttccaggaatgacctgcgccgtggactttattgtggagcgcggcgaaaatgtccttatggttgccaatgcggccttgcgctaccagcccacaagcctcagcgatgaaaaaatcgccgatatggtttttaacgcgggactggcaaacctggacgacgaacagcgtcaggcggcgatcgaggcgagggctcaggcgaaggcgcagcaggctcatggccagaaccccaacaacggctttcaaaacctgatgatgggagggcagggcctccgaatgcccgggggcagaggcggaagagggcaggggccgcagggagaacaacagggaggcggacgcgaacaggttattatacgtaaccttttggtatttgggcgatga

SEQ ID NO: 19286 - protein, 241 aa, Unknown
  Obtained from environmental sample
  misc_feature (1)..(241): Xaa is any amino acid
MIETEINQYAYITSPIDGIVLDRRINIGDTVVDSSSNNSSAIFTLAENLREMQIEAAVGELDVASIQKGQRARFTLESMPGRSFQGEVETLRMVPIVSNNVVSYTVIVKVENLDGSLLPGMTCAVDFIVERGENVLMVANAALRYQPTSLSDEKIADMVFNAGLANLDDEQRQAAIEARAQAKAQQAHGQNPNNGFQNLMMGGQGLRMPGGRGGRGQGPQGEQQGGGREQVIIRNLLVFGR

SEQ ID NO: 19287 - DNA, 792 bp, Unknown
  Obtained from environmental sample
  misc_feature (1)..(792): n is a, c, g, or t
gtgggggtcgagccggattatagtaaagcccggaactggaaagtcagcgccggcgtctttattgacgaagatgatttgctgcaaagaagcagggtagcggttctgggaagcgatacggctaaaaatttgttcaaagaaccggaaaacgccctgtccggacagatacgcctggcaaacatatattttaccgttatcggtattttggaaagcaagggcggcgacagtgacgacggtatcatggttccgatggatacggcgatgacgcggctgctcaattctcgtaatatagatacgatttacatgagcgtagtcagtaaggagtacatggaagcggcgcagaaagaggcggaattgatcctgcgcgaatcccgcaatatccgcgaaggctctgacgatgatttcaccgttatgaaccagaaggacatgatcgaaatggcctcggcgacgtcaaaaacattaacgacattgttggcttcaatcgcaggagtgtcgcttttggtcggcggtatcggcataatgaacatcatgcttgtttctgtcacagagcgcacccgcgagataggcatcaggatggctgtcggcggacgcaagcgggacattctctttcaatttctcgccgaatcggtgatactaagccttatgggcggcatactggggatagggacggcttttcttgcctgccgcgtactgcaggccgccgggattccgacggcgataaacccattgattgtagccggttcggcgttgttcgccgcgatggtcggcgtaatttttggctactatccggcgtaa

SEQ ID NO: 19288 - protein, 263 aa, Unknown
  Obtained from environmental sample
  DOMAIN (96)...(263): Predicted permease
  misc_feature (1)..(263): Xaa is any amino acid
MGVEPDYSKARNWKVSAGVFIDEDDLLQRSRVAVLGSDTAKNLFKEPENALSGQIRLANIYFTVIGILESKGGDSDDGIMVPMDTAMTRLLNSRNIDTIYMSVVSKEYMEAAQKEAELILRESRNIREGSDDDFTVMNQKDMIEMASATSKTLTTLLASIAGVSLLVGGIGIMNIMLVSVTERTREIGIRMAVGGRKRDILFQFLAESVILSLMGGILGIGTAFLACRVLQAAGIPTAINPLIVAGSALFAAMVGVIFGYYPA

SEQ ID NO: 19289 - DNA, 558 bp, Unknown
  Obtained from environmental sample
  misc_feature (1)..(558): n is a, c, g, or t
atgagcgacacggcgcaaaatcgttacatgaacgggaacgcgccctcgtggtgccccggatgcagctacttcaccgtgctctccgccctcacggagtgcttcgacgagcgcggtatcgcgccggacgagatatgcgtgatctccggaataggctgctcgtcgcggctgcccctatttctgaacacgcacggcatgcacaccctgcacggcagaccgcttccggtcgccataggttcaaggctggcgcgccccgacatccctgtggtagtggcgactggcgacggcgacctgctctccataggcgcggcgcacttcgtccacgccgcgagaaagaatttcgacataacggtaatatgcctggacaaccgcttgtacgccatgaccaaaaatcaaacatcccccacctcgtcgctgggatacaaggggtcgcttaccccctacggcaagctcagcgcgccactcaacaccaccgaactcgccatcagcagcggagcctccatggtctgccgaagctgcgcctacgacaaagcccactcgtgccgaatctgtacgtggtga

SEQ ID NO: 19290 - protein, 185 aa, Unknown
  Obtained from environmental sample
  DOMAIN (49)...(179): Thiamine pyrophosphate enzyme, C-terminal TPP binding domain
  misc_feature (1)..(185): Xaa is any amino acid
MSDTAQNRYMNGNAPSWCPGCSYFTVLSALTECFDERGIAPDEICVISGIGCSSRLPLFLNTHGMHTLHGRPLPVAIGSRLARPDIPVVVATGDGDLLSIGAAHFVHAARKNFDITVICLDNRLYAMTKNQTSPTSSLGYKGSLTPYGKLSAPLNTTELAISSGASMVCRSCAYDKAHSCRICTW

SEQ ID NO: 19291 - DNA, 321 bp, Unknown
  Obtained from environmental sample
  misc_feature (1)..(321): n is a, c, g, or t
ttggtcatggcgtacaagcggttgtccaggcatattaccgttatgtcgaaattctttctcgcggcgtggacgaagtgcgccgcgcctatggagagcaggtcgccgtcgccagtcgccactaccacagggatgtcggggcgcgccagccttgaacctatggcgaccggaagcggtctgccgtgcagggtgtgcatgccgtgcgtgttcagaaataggggcagccgcgacgagcagcctattccggagatcacgcatatctcgtccggcgcgataccgcgctcgtcgaagcactccgtgagggcggagagcacggtgaagtag

SEQ ID NO: 19292 - protein, 106 aa, Unknown
  Obtained from environmental sample
  misc_feature (1)..(106): Xaa is any amino acid
MVMAYKRLSRHITVMSKFFLAAWTKCAAPMESRSPSPVATTTGMSGRASLEPMATGSGLPCRVCMPCVFRNRGSRDEQPIPEITHISSGAIPRSSKHSVRAESTVK

SEQ ID NO: 19293 - DNA, 360 bp, Unknown
  Obtained from environmental sample
  misc_feature (1)..(360): n is a, c, g, or t
atgcgtcgtctctggggcttcgacgcggcaatgacgcgcatagcggtgtcagcaatgcgcaaccgcggctttaaaatcgcctgcctctacccgcgcctcctcttcccgtttgtcaacgggcattatatggagctgctgaacttttgcccgcgcatagccgtggtggagtcaaactacacaggccaattagcctctctgatacgtatgaataccgagatcaacccgatctccgtgaaaaaatacaacggcgagccattcgccccggaagagatcgaggcggagctatgcggcatcattaatatggaaaaatttatatccgacatgagcaacacaaacatcgacggagcggcgaaaacatga

SEQ ID NO: 19294 - protein, 119 aa, Unknown
  Obtained from environmental sample
  misc_feature (1)..(119): Xaa is any amino acid
MRRLWGFDAAMTRIAVSAMRNRGFKIACLYPRLLFPFVNGHYMELLNFCPRIAVVESNYTGQLASLIRMNTEINPISVKKYNGEPFAPEEIEAELCGIINMEKFISDMSNTNIDGAAKT

SEQ ID NO: 19295 - DNA, 732 bp, Unknown
  Obtained from environmental sample
  misc_feature (1)..(732): n is a, c, g, or t
atgatggatgaacttggcaggctcaaagacgcggcaaaaccggacgagcttctcctcgtggcggatgccatgaccggccagtccgccgtggatatcgccaaagcctttgatgaaaaaatcggccttaccggagttgtgctgaccaagttcgacagcgacactaggggcggcgcggccctctcgctaaaaaccattaccggcaagccccttaagtttgtaggaacaggcgagaagcccgaagattttgaacccttccatcccgagagggccgcagggcgaatcctgggcatgggcgacgttgtttcgctcgtggaaaaagcccaggaagtaattgacgaaaaagaagctcttgccctccagaaaaaaatggaaaaggaaaccctcacgctggaggactggcttcagcagatccgctcggtgaaaaagatgggttccctaaaatccatgctgaacatgatccccggcatggcaggtcagataagcgaagaagacatcgacaaagcggaacttaaaagccaggaggccatcctttcgtccatgacccgcaaggagcgtacaaaccaccttatcatcgggccttcgcgtcgcgcccgtatcgcccgaggctccgggacttccgtagcggaagtagcccgcctcctgaaaaaattcgagaagatgagaggcatgatgaaaaagatgaccaagatgggcaaagaccccaactttatgcagggcggttttccgcgctga

SEQ ID NO: 19296 - protein, 243 aa, Unknown
  Obtained from environmental sample
  DOMAIN (1)...(96): SRP54-type protein, GTPase domain
  misc_feature (1)..(243): Xaa is any amino acid
MMDELGRLKDAAKPDELLLVADAMTGQSAVDIAKAFDEKIGLTGVVLTKFDSDTRGGAALSLKTITGKPLKFVGTGEKPEDFEPFHPERAAGRILGMGDVVSLVEKAQEVIDEKEALALQKKMEKETLTLEDWLQQIRSVKKMGSLKSMLNMIPGMAGQISEEDIDKAELKSQEAILSSMTRKERTNHLIIGPSRRARIARGSGTSVAEVARLLKKFEKMRGMMKKMTKMGKDPNFMQGGFPR

SEQ ID NO: 19297 - DNA, 750 bp, Unknown
  Obtained from environmental sample
  misc_feature (1)..(750): n is a, c, g, or t
ttgatatcacttctgtctgaagaaaactaccgcgaaattcaaaaaaggcttgatgaaagaaaaatgaggaatggctttacctgcctgttcattggcgggcctggaaccggaaaaaccgagaccgcctaccaaattgcccgccagaccgggcgtaacataatggcggtgaatatagctgaaacaaaaagtatgtggtttggcgagagtgaaaggaaaattaaggaaatattcgacacttatcgggaagctgtgaataattccaatgttaccccgattttattgtttaacgaagcagacggagtaatcagcaagcggttggaactaaattcatcaagccgtgcaatcgatcgggctgaaaatggcattcaaaatattattttacaggaagttgaaaacctttcggggattttgatcgccacaaccaatttagcgcagaacattgacaaggcctttgagcgccgttttctgtacagaatcaattttgacaggccctgcgaacagggacgtaaaaacatctggaacaccctgctgccggaattgcctgtggaattagtcacggatctgtccggtaaatttgatctttcaggcggacagattgaaaacattgcccgcaagatcaacattgacgcgatattaaccgggtgtattacaaaggatactatgatgcagtattgcaaggatgaaatccagagcagctttactgtcccaaaaagaatagggtttgaagcagaagcatatctgggttcctaa

SEQ ID NO: 19298 - protein, 249 aa, Unknown
  Obtained from environmental sample
  DOMAIN (27)...(212): ATPase family associated with various cellular activities (AAA)
  misc_feature (1)..(249): Xaa is any amino acid
MISLLSEENYREIQKRLDERKMRNGFTCLFIGGPGTGKTETAYQIARQTGRNIMAVNIAETKSMWFGESERKIKEIFDTYREAVNNSNVTPILLFNEADGVISKRLELNSSSRAIDRAENGIQNIILQEVENLSGILIATTNLAQNIDKAFERRFLYRINFDRPCEQGRKNIWNTLLPELPVELVTDLSGKFDLSGGQIENIARKINIDAILTGCITKDTMMQYCKDEIQSSFTVPKRIGFEAEAYLGS

SEQ ID NO: 19299 - DNA, 453 bp, Unknown
  Obtained from environmental sample
  misc_feature (1)..(453): n is a, c, g, or t
atgtttgacgggccgctgcacgacggcgcaatggttatacagggcgggaaaatagccgctgcgggatgtttcctgccgctgtcggaaaggcaggatatacgcaaaaacttcggcacgcgccacagggcaagtcttggaatggcggaacagtcggacgctgtagtgcttgtggtttccgaagaaacaggagctatttcactttcttatgatgcaaaactttactatgatttatctcctgcggaaataacgcgtaaattactggacttgcttgataaaggaagcagaaaagaatcgacttctccgatacaggagcaatcatcgactcaaacatcttcgcagcaaacatcattacagacctcatctcaatacacaatgcaaacatcgtctatgcaggctgcggagcaaaaagaaagagcttccgtaggagaaaacagcgaggttctttttgagtaa

SEQ ID NO: 19300 - protein, 150 aa, Unknown
  Obtained from environmental sample
  DOMAIN (1)...(74): Domain of unknown function DUF147
  misc_feature (1)..(150): Xaa is any amino acid
MFDGPLHDGAMVIQGGKIAAAGCFLPLSERQDIRKNFGTRHRASLGMAEQSDAVVLVVSEETGAISLSYDAKLYYDLSPAEITRKLLDLLDKGSRKESTSPIQEQSSTQTSSQQTSLQTSSQYTMQTSSMQAAEQKERASVGENSEVLFE

SEQ ID NO: 19301 - DNA, 333 bp, Unknown
  Obtained from environmental sample
  misc_feature (1)..(333): n is a, c, g, or t
atgagtacaattcgaaacagtaaaaccaaaacattcggcatattgacatcaggcggggattgtcccggactgaatgccgcgatacggggcgtttgccgggcggcgcatgaccgttacggcatgaaaattatcggcatagccaacggtttccggggccttatcaacggaaatgtcaacccgcttaatccaagtgatttttcgggaatattgacaaggggcgggactatcctcgggtcaagcagggaaaagccgttcaaacacactaaggatgatgaagagattgccggcgacaaggtggcggccattaaagaaacgtaccgcaagcagaactga

SEQ ID NO: 19302 - protein, 110 aa, Unknown
  Obtained from environmental sample
  SIGNAL (1)...(26)
  misc_feature (1)..(110): Xaa is any amino acid
MSTIRNSKTKTFGILTSGGDCPGLNAAIRGVCRAAHDRYGMKIIGIANGFRGLINGNVNPLNPSDFSGILTRGGTILGSSREKPFKHTKDDEEIAGDKVAAIKETYRKQN

SEQ ID NO: 19303 - DNA, 396 bp, Unknown
  Obtained from environmental sample
  misc_feature (1)..(396): n is a, c, g, or t
ttgccgccctttatcgtaaaacggcagccgtttccggggccggggcttgcaatccgcgtcatgggcgaagttacggaggagaagctggaaattgtgcgccgaaccgacgccatcctccgcgaagaactggataaaacaaagcgcaggccggatcaatactttaccgttttgacaagcacccgctctgtgggcgttaaaggtgatggcagaacgtatgattttgtaatcgcagtccgggctgtaaagacggacgattttatgacatgcgaatacgctcctctgtcgcataaggcgcttagcagaatatcgtcgcggatcacaagcgagctgccgtcagtcagccgtgtcgtctacgacatcacgtcaaagcccccggctacggtggaatgggagtga

SEQ ID NO: 19304 - protein, 131 aa, Unknown
  Obtained from environmental sample
  DOMAIN (40)...(130): GMP synthase C terminal domain
  misc_feature (1)..(131): Xaa is any amino acid
MPPFIVKRQPFPGPGLAIRVMGEVTEEKLEIVRRTDAILREELDKTKRRPDQYFTVLTSTRSVGVKGDGRTYDFVIAVRAVKTDDFMTCEYAPLSHKALSRISSRITSELPSVSRVVYDITSKPPATVEWE

SEQ ID NO: 19305 - DNA, 534 bp, Unknown
  Obtained from environmental sample
  misc_feature (1)..(534): n is a, c, g, or t
atgccggcccatatttccctgtttttggccgctccgcttgaaatccgcatagagcgcgtaaaaaattatttccattgcgatgaacatcgggcgcgtcaaataattgaacgcagcgaccaggatcgcattgggtttcatcgttacttttttgacgttgagtggaggaatccggaaaattaccacatttccctgaacacgggaatttcttcccccgctgtctgcgccgaaattgtcatgacgttaaaaagcaggatttttactcctgacgcggaggaacaaaacaaaatccgcctgagggagttaattcttgaacagaggataaagcataatattgtatacgagcaggggatacccgttcatttccttgaagtgtccgcaaacgacagcgcggttactctatacggtgtggtaaattctcagggcttgtctgacgctgccatgaaggcggcccaggaaacagccggcgcgattgaaagctccctaaccatacgcaatgaaattcagattgtacatgaatacacagttatgccttaa

SEQ ID NO: 19306 - protein, 177 aa, Unknown
  Obtained from environmental sample
  DOMAIN (104)...(165): Putative phospholipid-binding domain
  misc_feature (1)..(177): Xaa is any amino acid
MPAHISLFLAAPLEIRIERVKNYFHCDEHRARQIIERSDQDRIGFHRYFFDVEWRNPENYHISLNTGISSPAVCAEIVMTLKSRIFTPDAEEQNKIRLRELILEQRIKHNIVYEQGIPVHFLEVSANDSAVTLYGVVNSQGLSDAAMKAAQETAGAIESSLTIRNEIQIVHEYTVMP

SEQ ID NO: 19307 - DNA, 474 bp, Unknown
  Obtained from environmental sample
  misc_feature (1)..(474): n is a, c, g, or t
atgagcattaccgaggagcggaagcttaaatacgacttttcagcgccctattacgattcaggcgttgtaatggcagtccgcgccgcggataataccattaacggttacgccgatctcagaggcaagcgcgtcgcggtaaaaaccggaacagaaggcgcgacctttgccgagagcatcaaggacacatacggatttaaccttgtctattttgatgaatcgcccttcatgtacgaggaggtaaaatccggcaactctgtagcctgtttcgaggactacccggtaatgggctacggtatttcccagggcaacggccttaaaatggtaggaggtatggaaaaaggctcgtcttacggattcgccgttttaaagggaaaaaaccaggaactgctgaaaaaatttgacaccggccttgccaacataaaagccaacggaacctatcaggccattatcgacaaatacatcaaaaccaactaa

SEQ ID NO: 19308 - protein, 157 aa, Unknown
  Obtained from environmental sample
  DOMAIN (1)...(156): Bacterial extracellular solute-binding proteins, family 3
  misc_feature (1)..(157): Xaa is any amino acid
MSITEERKLKYDFSAPYYDSGVVMAVRAADNTINGYADLRGKRVAVKTGTEGATFAESIKDTYGFNLVYFDESPFMYEEVKSGNSVACFEDYPVMGYGISQGNGLKMVGGMEKGSSYGFAVLKGKNQELLKKFDTGLANIKANGTYQAIIDKYIKTN

SEQ ID NO: 19309 - DNA, 477 bp, Unknown
  Obtained from environmental sample
  misc_feature (1)..(477): n is a, c, g, or t
gtgcccgtcgttatcgttagcggggaggaggacgccaagaaacaagtggcctccgtagatttccaaaagctgaaatcgcggcgcgcctcggtcgtcgcccagcacaacgagaggcagagcgagttcgagagtatagtgatgggctggaagtcggcttgggaggcgagggacatagacacatattcgacattttactttacatcgggcttcatggacggttcgatgaattggcaagccttccgcgaccgtaaaaaagggctgttcgcctcgtactcggcgatatacgtggacttgaacgacatcgcgctgaccgagtacacggacaatatggcgaccgtaaagtttcatcaggtgtacaacaccaataggaataaccggatggagaacgcgaagcggttgatattcaggagagacgatcaagggcagtggaaaatatacagggaaataccattcccaaaagaggagcttctcttatga

SEQ ID NO: 19310 - protein, 158 aa, Unknown
  Obtained from environmental sample
  misc_feature (1)..(158): Xaa is any amino acid
MPVVIVSGEEDAKKQVASVDFQKLKSRRASVVAQHNERQSEFESIVMGWKSAWEARDIDTYSTFYFTSGFMDGSMNWQAFRDRKKGLFASYSAIYVDLNDIALTEYTDNMATVKFHQVYNTNRNNRMENAKRLIFRRDDQGQWKIYREIPFPKEELLL

SEQ ID NO: 19311 - DNA, 477 bp, Unknown
  Obtained from environmental sample
  misc_feature (1)..(477): n is a, c, g, or t
ttgatgagagacacgggagcgactgtcagccccttccattcattcctcttcctgcagggactggaaaccctttctttgcggacggaacgccatgtgcagaacgcgcttaaggtggtaagttatctgcaaaagcacccgcaggtggaaagcgtaaaccatccgtccctgccgaatcatccggatcacacgttgtacaataaatatttcccgaacggcgccggttctattttcacttttgaaattaaaggcggggcggagcaggcgaaaaagtttatcgacaaactggaattgcattcgcttcttgccaatgtggcggattccaaatcgcttgttatacatccggcaagcacgacgcactcgcagctttccggtgatgaacttttggatcagggaataaaacccaacaccatccgcctctccgtcggaaccgagcacatagacgacatcatcgccgatttggaacaggcgtttaaatga

SEQ ID NO: 19312 - protein, 158 aa, Unknown
  Obtained from environmental sample
  DOMAIN (1)...(158): Cys/Met metabolism PLP-dependent enzyme
  misc_feature (1)..(158): Xaa is any amino acid
MMRDTGATVSPFHSFLFLQGLETLSLRTERHVQNALKVVSYLQKHPQVESVNHPSLPNHPDHTLYNKYFPNGAGSIFTFEIKGGAEQAKKFIDKLELHSLLANVADSKSLVIHPASTTHSQLSGDELLDQGIKPNTIRLSVGTEHIDDIIADLEQAFK

SEQ ID NO: 19313 - DNA, 354 bp, Unknown
  Obtained from environmental sample
  misc_feature (1)..(354): n is a, c, g, or t
gtgaacagggcaatagaagattacaacagggctatcaatctgaaaagttcattcgcggaagtttacaattaccgaggttttttatatgcccaaaagggagaacttagaagggctgtcgaggactacacacaggcgatccgttacaagggcgattacgtcgacgcttatttcaaccgtgcccatgcttacggggaactgggtaattgggatctgtccattgccgactacactcaggtaataaagcttgaacccaagaactgggccgcctacaatcagcggggcaaagcatggtacagcaaaggagacaaaactaaggcggatgaggattacagggctgcggagcgattgaaataa

SEQ ID NO: 19314 - protein, 117 aa, Unknown
  Obtained from environmental sample
  DOMAIN (19)...(52): Tetratricopeptide repeat
  misc_feature (1)..(117): Xaa is any amino acid
MNRAIEDYNRAINLKSSFAEVYNYRGFLYAQKGELRRAVEDYTQAIRYKGDYVDAYFNRAHAYGELGNWDLSIADYTQVIKLEPKNWAAYNQRGKAWYSKGDKTKADEDYRAAERLK

SEQ ID NO: 19315 - DNA, 762 bp, Unknown
  Obtained from environmental sample
  misc_feature (1)..(762): n is a, c, g, or t
atgtcctgggtttttcatggacggttttatcagttcatcgtactgtacctcatgggccggccagctatctgggcaacacaggctgcgggaaaatgggccgccctcattcccatccattcgcccagaatcgtattaagcaggggttacggtatacgaaacaccgtcaatttggaatcggtgcgccagtccctggaccgttttattcctctgaacatcgcaggaatcaatattcccgttgccaattatctggtaataggccttttgtgcctttttatcatctggttcagaaaaaccaaattgggccaggacatgagggctgtggggcagaatcagacggtggcccacgctgcgggtattcccgtggatcgcaccagaatcctggcaatagtaatttctacggttctcgcaagcctgggacagattatatttttgcagaacatgggaaatatggcgacttataatgcccacaggcagacaggtttcttcgctgccgcggcgattttggtcggcggcgcttccatttcaaaggccagcattaccaatgtatttatcggaaccatattgctacatttaatgtacatagttgttccgcgcgccggcaccaacctcttcggttccgcccagattggcgaatatttccgggatgcctttagttacgcgattatcgcccttgccctggtgatccatgcgtggcgcaaacgcgcaaatgccgaagccgcccgcagcagccttcgcggcgaggctgtaaccaaagaggaataa

SEQ ID NO: 19316 - protein, 253 aa, Unknown
  Obtained from environmental sample
  DOMAIN (2)...(226): Branched-chain amino acid transport system / permease component
  misc_feature (1)..(253): Xaa is any amino acid
MSWVFHGRFYQFIVLYLMGRPAIWATQAAGKWAALIPIHSPRIVLSRGYGIRNTVNLESVRQSLDRFIPLNIAGINIPVANYLVIGLLCLFIIWFRKTKLGQDMRAVGQNQTVAHAAGIPVDRTRILAIVISTVLASLGQIIFLQNMGNMATYNAHRQTGFFAAAAILVGGASISKASITNVFIGTILLHLMYIVVPRAGTNLFGSAQIGEYFRDAFSYAIIALALVIHAWRKRANAEAARSSLRGEAVTKEE

SEQ ID NO: 19317 - DNA, 540 bp, Unknown
  Obtained from environmental sample
  misc_feature (1)..(540): n is a, c, g, or t
atgagtcaaaaagcctttttgtgtggatttgcggcgttttgctgcctcgccgggctattcctcctgccgccggccggcctttacgcccaggctgccttgccggacgcggacctgacagagccggcacaggaagaggggacggttttaccgaggcaattccggcagcttggtctggggatgagccttgacgacctgaaaacggccctgataaacgatgagcttttcaattttaggggggatcgggacgtctcgttcctgcccgcgcgggaacagagtcttgtggaaactacaggctcatcattcataaagcgcgctttttttcagcttagggacggaacggtgtttattatgtctttttcactgaacaccgatattatggatcattattcggtattcacccagtttgtcgaaaaatacggagagccctcctaccttgatcccaaagaggcggtatgggaaagcggggaaaccagaatagccgttgaaaggcctttaactgtaaagtacatcgacaaaactattttaacgatatgtggatga

SEQ ID NO: 19318 - protein, 179 aa, Unknown
  Obtained from environmental sample
  SIGNAL (1)...(29)
  misc_feature (1)..(179): Xaa is any amino acid
MSQKAFLCGFAAFCCLAGLFLLPPAGLYAQAALPDADLTEPAQEEGTVLPRQFRQLGLGMSLDDLKTALINDELFNFRGDRDVSFLPAREQSLVETTGSSFIKRAFFQLRDGTVFIMSFSLNTDIMDHYSVFTQFVEKYGEPSYLDPKEAVWESGETRIAVERPLTVKYIDKTILTICG

SEQ ID NO: 19319 - DNA, 501 bp, Unknown
  Obtained from environmental sample
  misc_feature (1)..(501): n is a, c, g, or t
gtgatgcggataactcccccatacaaggatttttttgcgaaagttcaaaacaagctacactatgccattcacgggcacaccgccgccgaggtaatttacgaacgcgccgattccgtcaaagaccacatgggattgacgacatgggaaaacagtcctcaaggtaaaattgttaaaacagacgtagctgtcgcgaaaaactacctgaccgaagccgaactggaatctttggggcgtattgtcaacgcgtatcttgatttggcggaggatcgggcaaaaaagcatatccccatgacaatggaagactgggccaaacgcctcgaccgctttcttgaggccgatgacaggccgattcttcaagactcaggaaagataagcgcccagcttgcaaaagaattcgccgaaagcgaattcgaaaaatatcgcattattcaagaccgcttgtttgaatctgattttgacagggaaatcaaaagtatcaaaggaaaacggccgaaggagtag

SEQ ID NO: 19320 - protein, 166 aa, Unknown
  Obtained from environmental sample
  misc_feature (1)..(166): Xaa is any amino acid
MMRITPPYKDFFAKVQNKLHYAIHGHTAAEVIYERADSVKDHMGLTTWENSPQGKIVKTDVAVAKNYLTEAELESLGRIVNAYLDLAEDRAKKHIPMTMEDWAKRLDRFLEADDRPILQDSGKISAQLAKEFAESEFEKYRIIQDRLFESDFDREIKSIKGKRPKE

SEQ ID NO: 19321 - DNA, 891 bp, Unknown
  Obtained from environmental sample
  misc_feature (1)..(891): n is a, c, g, or t
gtgctttccgcgccggatctcattgtatttcttctctatataggttatctcaccgctcccctcaccagaatcgcccagtgggttggccaataccaggatgctgttgccggtttcacccgttttatggagatgacggatatggaaacggaacacattccgcttagaatcgaggcaaaaaaacaggagtacccaagggccaaaggccatctggaatttgtcaacgtgagtttccggtatggtgaggaattggacgatgtgctggataatgtgtgcctggacattcagccgggaaatttcattgcctttatcggttcttcaggggcagggaagacgacactttgctcccttatccccaggttctatgagccgagggccgggaaaatcctcctggacggcaaagacatccgtgaaatggaccttggtactttacggcgaaacataggcgtggttgcccaggacgtgtacctttttaacgggacagtcatggaaaacatcgcctacggaaaaccgggcgctacaggggatgaagtacttcaggccgccaaaatggcaaaggcccacgacttcatcatggaactgcccaagggctatgagacggaaatcggccagcggggcatccgcctttccgggggccaacgccagcgcctttcaattgcccgggctttcctgaaagacccgccggtgcttatccttgacgaggcaaccagcgcactcgactatgaaaacgaaagggccatccacgagagccttgacggctttatgaagaacagaactgtcctgataatcgcgcaccggctctctacggtgaagaaagccgggaaggtcttttctgtttcagggcgcagtattgaagaaacgactataatccctgacgaagtgccctcattttaa

SEQ ID NO: 19322 - protein, 296 aa, Unknown
  Obtained from environmental sample
  DOMAIN (97)...(281): ABC transporter
  misc_feature (1)..(296): Xaa is any amino acid
MLSAPDLIVFLLYIGYLTAPLTRIAQWVGQYQDAVAGFTRFMEMTDMETEHIPLRIEAKKQEYPRAKGHLEFVNVSFRYGEELDDVLDNVCLDIQPGNFIAFIGSSGAGKTTLCSLIPRFYEPRAGKILLDGKDIREMDLGTLRRNIGVVAQDVYLFNGTVMENIAYGKPGATGDEVLQAAKMAKAHDFIMELPKGYETEIGQRGIRLSGGQRQRLSIARAFLKDPPVLILDEATSALDYENERAIHESLDGFMKNRTVLIIAHRLSTVKKAGKVFSVSGRSIEETTIIPDEVPSF

SEQ ID NO: 19323 - DNA, 885 bp, Unknown
  Obtained from environmental sample
  misc_feature (1)..(885): n is a, c, g, or t
gtgagggcggcggagttcgccccggtggacggcttcgccagggagcacatgtgggtcggcaacggccggaagccgcacctccggaagcccctcgcgctggcgtttttggccaaggcagtctggaacctgccgaccacgaggacgctgatcgacttcctcaaggcgaacgggaccgtgcgggcgctgtgcggctgggagcgtgcgtccgacctcccgagcgagtccaccttctcccgcgccttcgaccagttcgccgtgggcaggctgcctgagcggctgcacggggcgatggtcggggccgcgatggaggggaggctggtgggccatgccagcatggactccacggaggtggaggccagggagagggcggcggcgaagccgaagaaagaaaagaagccaaagccaatggagaggcggaaacccggccccaagaaaggccacaagcgcggcaagaggcagcccaagcggctggagctgcaggccggcaggacgctggaggagaacctcgccgacctcccgcgccagtgcgactacggcttcaagcgcaacggcaaggggttccaccacatgtggaagggctacaagctgcacatagccgtggcggactgcggggcgcccatctgcgccgccctcacgagcgcgtccacgcatgactcacaagcggccataccgctcatgcagatgggatcggggagggcggccgtcctctacgacctcgcggactcggcctacgacgctgcttccataagggggtacagccgctcccttggccatgttcccataatagagccgagcggccggcgcaggggcgcgccccggctgccccccgtcgagaaggcccgccacaggnagcgcggcgcggtggaaagggctttctccacctga

SEQ ID NO: 19324 - protein, 294 aa, Unknown
  Obtained from environmental sample
  misc_feature (1)..(294): Xaa is any amino acid
MRAAEFAPVDGFAREHMWVGNGRKPHLRKPLALAFLAKAVWNLPTTRTLIDFLKANGTVRALCGWERASDLPSESTFSRAFDQFAVGRLPERLHGAMVGAAMEGRLVGHASMDSTEVEARERAAAKPKKEKKPKPMERRKPGPKKGHKRGKRQPKRLELQAGRTLEENLADLPRQCDYGFKRNGKGFHHMWKGYKLHIAVADCGAPICAALTSASTHDSQAAIPLMQMGSGRAAVLYDLADSAYDAASIRGYSRSLGHVPIIEPSGRRRGAPRLPPVEKARHRXRGAVERAFST

SEQ ID NO: 19325 - DNA, 660 bp, Unknown
  Obtained from environmental sample
  misc_feature (1)..(660): n is a, c, g, or t
atgaaagcgaaacaggaaaagaacttaaaggcagaaagggcagttacagacaaaggcagaacctgcaagaagaccgatgaaaacgtactggccatttatttgaaggaaatcaaccgcatccctctcttaacaagggatgaggaagacagtatcgcgcgcgccgccgcgaggggcagtattacggcccgtaataaattaatcgacagcaacctccgctttgtcgtcaatgtggcaaagaggtaccaggggcacgggatgcctctgtcagatttaatcagcgaaggcaatatcgggttgataaaagcggtagagaaatacgatgctgacaggggtttccattttatttcttatgcggtgtggtggatacgtcaaaccatactcaaggcgcttgccgatcaatccaggcttatccgcctgcctgtcagccggacaaatgacattatccagattgaaaaagcgaagaaactgcttgccggcagctctaacagcgaaactgatgtaagtgaactggcccagttgctcagtatggacgaaagtcatattgaagatatgctgaccgtctccagagagactctctcgctggaaaaatcagttgatgccagcaggaacactacaccgctgggaaactttattgtggacaacncgctacgatgcgcctga

SEQ ID NO: 19326 - protein, 219 aa, Unknown
  Obtained from environmental sample
  DOMAIN (27)...(63): Sigma-70 factor, region 1.2
  misc_feature (1)..(219): Xaa is any amino acid
MKAKQEKNLKAERAVTDKGRTCKKTDENVLAIYLKEINRIPLLTRDEEDSIARAAARGSITARNKLIDSNLRFVVNVAKRYQGHGMPLSDLISEGNIGLIKAVEKYDADRGFHFISYAVWWIRQTILKALADQSRLIRLPVSRTNDIIQIEKAKKLLAGSSNSETDVSELAQLLSMDESHIEDMLTVSRETLSLEKSVDASRNTTPLGNFIVDNXLRCA

SEQ ID NO: 19327 - DNA, 546 bp, Unknown
  Obtained from environmental sample
  misc_feature (1)..(546): n is a, c, g, or t
atggcctcaggcgataataaatcatccaaaaaatcgtcttctaaaaaatcacccatagaagaattccgctcactgttcccgtattttcgtaaatactctcttagttactctctgggccttttttttcttattgtagttgacgccgccctggttgtaactccacaattcatccgccaggcggttgacatcgtttcgtccggcgttttcgagttaaagaaggtgataatcccctgcgctattatggtcggccttacggggattgtttcccttgggcgttttttttggcgctactttattcacggttcttcccgtcgtatagaaacagaactgcgtgaaaagctttttgaacatcttctttcgctttcatacggatattatcaaaagaacaagattggcgacctgatggccagggcgacaaacgacctgaacgccgtaagggaatccattggcatggggttgggtgccatgntggaccgtacggtgatggccgcgccgaatttggttatcaattcgttcaggaaacccctaccgccgcttttgccgtaa

SEQ ID NO: 19328 - protein, 181 aa, Unknown
  Obtained from environmental sample
  misc_feature (1)..(181): Xaa is any amino acid
MASGDNKSSKKSSSKKSPIEEFRSLFPYFRKYSLSYSLGLFFLIVVDAALVVTPQFIRQAVDIVSSGVFELKKVIIPCAIMVGLTGIVSLGRFFWRYFIHGSSRRIETELREKLFEHLLSLSYGYYQKNKIGDLMARATNDLNAVRESIGMGLGAMXDRTVMAAPNLVINSFRKPLPPLLP

SEQ ID NO: 19329 - DNA, 468 bp, Unknown
  Obtained from environmental sample
  misc_feature (1)..(468): n is a, c, g, or t
ttgccggtgcttgagcgcgaaatgataaagaaacgcggctggcttacaatggacgaagtgcttgatttttacaccatcgcccagataacgcccggcatcatcctggttaacatagcaaccttttccggctataagcgaaaaggcatacccggcggcattatcgccaccatcggactggcgctgccgggcttttgccttatgctgttaatatcgttattcattaaacgtttcgccgaataccccatagtacagcgcgccttcagcggcatacgccttgccgtctgcgccctcatcctggacacggcgattaaattgttcaaaggattctggaaagattataaggcgctgattatcagcatcgcggcttttgttctttcggcaattttcagcgtgtcgcccgtgtatatcatccctgtcggcggccttgcgggctttctgcttttttcaccaaaggggaaaaacgggtga

SEQ ID NO: 19330 - protein, 155 aa, Unknown
  Obtained from environmental sample
  DOMAIN (1)...(153): Chromate transporter
  misc_feature (1)..(155): Xaa is any amino acid
MPVLEREMIKKRGWLTMDEVLDFYTIAQITPGIILVNIATFSGYKRKGIPGGIIATIGLALPGFCLMLLISLFIKRFAEYPIVQRAFSGIRLAVCALILDTAIKLFKGFWKDYKALIISIAAFVLSAIFSVSPVYIIPVGGLAGFLLFSPKGKNG

SEQ ID NO: 19331 - DNA, 663 bp, Unknown
  Obtained from environmental sample
  misc_feature (1)..(663): n is a, c, g, or t
atgatggccgagccccggggnttgagctatctagcgagattcagggggattgatatccatattttggggtactatgtggacttcaacaacggcgcttttgttgccaaacttcaggagatgaaggaggcgcgttatatgcgcgctcaaaaaatggtctcgaacctgaataaacaaggcatcgacctgcgcttcgacaccgtcctgagcatcgccggggagggttctatcggacgtccgcacatcgccaccgccatgctcaaggaggagttcgtgttctccttccgcgaggctttcgacaaattcatcgggtacgactccccagcctacgtcgagaagctccagatgtcgccgaaagaggttttcgacctcataaagagcgccggcggcgtgcctgtgttggcgcatcctggggtaacgaaggtggacgagcgcatacaagagttcatccgcgacggtttgcagggcattgaggtcagccacgccgaacaccctgacgcagccgttaggcactacctcaaaatatgtaaaaaaaacagcctcgctttcaccggaggctccgatttccatagcagcggcaggagtaaattcgaactgggtttcccgccggtttcatacgccgccgtcgaaagtctaaaggaaaagttatgcaaacggtcccggtaa

SEQ ID NO: 19332 - protein, 220 aa, Unknown
  Obtained from environmental sample
  misc_feature (1)..(220): Xaa is any amino acid
MMAEPRGLSYLARFRGIDIHILGYYVDFNNGAFVAKLQEMKEARYMRAQKMVSNLNKQGIDLRFDTVLSIAGEGSIGRPHIATAMLKEEFVFSFREAFDKFIGYDSPAYVEKLQMSPKEVFDLIKSAGGVPVLAHPGVTKVDERIQEFIRDGLQGIEVSHAEHPDAAVRHYLKICKKNSLAFTGGSDFHSSGRSKFELGFPPVSYAAVESLKEKLCKRSR

SEQ ID NO: 19333 - DNA, 408 bp, Unknown
  Obtained from environmental sample
  misc_feature (1)..(408): n is a, c, g, or t
ttgaaaaaagtttatttggaaacctccgggggcattaaagaagcgtttatttctcattccgaggcttatggctttgtatggaaattccgttttgagggctataactcgccagaagcggttcagccatttgtgaacgcttatgttctaataccagaaactgaaaggttgcctctgccagaaggtgaattttatttcagcgattttgaaaattttgaagcagtggataaagatgggaacttggtgggcaaggttttaagcgcagaggagatgccctcggtgaatgtttttaatttgcttgtgggtgaaaaggaaattgtagtgccttggattgatgattgtattttgaaggttgatatggaagggaaaaagattgttgtggatgtggggtatattaaatggttgatttaa

SEQ ID NO: 19334 - protein, 135 aa, Unknown
  Obtained from environmental sample
  DOMAIN (60)...(131): PRC-barrel domain
  misc_feature (1)..(135): Xaa is any amino acid
MKKVYLETSGGIKEAFISHSEAYGFVWKFRFEGYNSPEAVQPFVNAYVLIPETERLPLPEGEFYFSDFENFEAVDKDGNLVGKVLSAEEMPSVNVFNLLVGEKEIVVPWIDDCILKVDMEGKKIVVDVGYIKWLI

SEQ ID NO: 19335 - DNA, 474 bp, Unknown
  Obtained from environmental sample
  misc_feature (1)..(474): n is a, c, g, or t
atggcaaaagaaacaggtataccttttgaaacttacagtaaatatgaaagcggcgagtcggatataccgatcagcgttttgtatacgatagccggccgtcttggaaccgatattacagtccttcttacgggagaagaggcgagaatggacagcgcggcggtttgcagaaaaggaaaaggagtggagattgaacgctatccgggatatgagttctcaagtcttgcgtataattttaaacacagaacaatggagcctttgctcgtaacgcttgattcgtcaaagcctcccgttgatcaagtgtctcatacgggacaggaatttaattttgtagttgaagggcaggtaaaagtaacggttgtaaaaaccgaacatattttgaaccccggcgattctatttattttgacgcgcgtcttccgcacgctcaaagctccgtaaacggaacagcgcaatttttaacgataattcaggaataa

SEQ ID NO: 19336 - protein, 157 aa, Unknown
  Obtained from environmental sample
  DOMAIN (86)...(155): Cupin domain
  misc_feature (1)..(157): Xaa is any amino acid
MAKETGIPFETYSKYESGESDIPISVLYTIAGRLGTDITVLLTGEEARMDSAAVCRKGKGVEIERYPGYEFSSLAYNFKHRTMEPLLVTLDSSKPPVDQVSHTGQEFNFVVEGQVKVTVVKTEHILNPGDSIYFDARLPHAQSSVNGTAQFLTIIQE

SEQ ID NO: 19337 - DNA, 546 bp, Unknown
  Obtained from environmental sample
  misc_feature (1)..(546): n is a, c, g, or t
atgaacaaaaatttaattcaaccgattatagttctagctcttatatgcctctttgtatcaggcgctttgtcggttgtaaacggtaagacaagtcccgttattcaaaaggccgcggaagaacgagcggcagcggcaaggaaggaagttatcccgcaggcgagcggatttgaattattaaatatcgacaatttacgcggtaaaaacggcatacctccgacaattacggaaatttataaaaccacaaacaatataggttatatttttatgataacatcccaaggatacggcggcgatataaaacttatttgcggtatcgatcctcagggattaataataaaaacttccgcgctctattttcagacggaaacaaagggaatcgctactcctgtttttgaaaatcaacatcaaaaccagtatgtcggcaaagataaaaacctgaacggcgttatcgctatctcaggcgcgactatntcgtctaccgcttataaaagaggcattcaagacgctttcaccgcatttgatatttttatgagggaaaaattatga

SEQ ID NO: 19338 - protein, 181 aa, Unknown
  Obtained from environmental sample
  SIGNAL (1)...(24)
  DOMAIN (94)...(173): FMN-binding domain
  misc_feature (1)..(181): Xaa is any amino acid
MNKNLIQPIIVLALICLFVSGALSVVNGKTSPVIQKAAEERAAAARKEVIPQASGFELLNIDNLRGKNGIPPTITEIYKTTNNIGYIFMITSQGYGGDIKLICGIDPQGLIIKTSALYFQTETKGIATPVFENQHQNQYVGKDKNLNGVIAISGATXSSTAYKRGIQDAFTAFDIFMREKL

SEQ ID NO: 19339 - DNA, 360 bp, Unknown
  Obtained from environmental sample
  misc_feature (1)..(360): n is a, c, g, or t
ttgccggaggtattaccggagatttccccgccgctcatcgtgaaggttgcttcactaccccacacaaacaccccgccaccgccgttgactgtggtattgccggagattttcccgccgttcatcgtgaaggttccactgtccacgttcaccccgccgtcgccgccatcggcggtattgccggaaatttccccgccgttcatcgtgaaggttccactgtccacatacaccccgccggtattgccggagatttttccgccgttcatcgtgaaggttccactgtccacatacaccccgccgcaggtattgtcgctaataaccgaacccatacgcatttccaacgcgccgccggagtttacatag

SEQ ID NO: 19340 - protein, 119 aa, Unknown
  Obtained from environmental sample
  misc_feature (1)..(119): Xaa is any amino acid
MPEVLPEISPPLIVKVASLPHTNTPPPPLTVVLPEIFPPFIVKVPLSTFTPPSPPSAVLPEISPPFIVKVPLSTYTPPVLPEIFPPFIVKVPLSTYTPPQVLSLITEPIRISNAPPEFT

SEQ ID NO: 19341 - DNA, 327 bp, Unknown
  Obtained from environmental sample
  misc_feature (1)..(327): n is a, c, g, or t
atggtaagccgcgaaagcaataaatgggaagagattgtacagcttgacaccttcaaactggtcgaattcgagcttgaccgctaccttgaaaaacagggctccagcctgtaccgcgaaagcgacacttccgggcccgccatggttattaaacagggcagcaggccaaaggttgtacagggctttattgaggccgcgaatgttgaccccgtggtcgagatggtgcaaatgatcgaggtgaaccgttcttacgaggcaaaccaaaaaataatccaggttgaggaggccgcccttggcaccctgatcaaccaggtaatgaaattcggctga

SEQ ID NO: 19342 - protein, 108 aa, Unknown
  Obtained from environmental sample
  DOMAIN (65)...(103): Domain of unknown function (DUF1078)
  misc_feature (1)..(108): Xaa is any amino acid
MVSRESNKWEEIVQLDTFKLVEFELDRYLEKQGSSLYRESDTSGPAMVIKQGSRPKVVQGFIEAANVDPVVEMVQMIEVNRSYEANQKIIQVEEAALGTLINQVMKFG

SEQ ID NO: 19343 - DNA, 720 bp, Unknown
  Obtained from environmental sample
  misc_feature (1)..(720): n is a, c, g, or t
atgacagttcttgacggcgacaaagcgggcgtttatgcgacatacagcgtgccctttgaagatcgcgatatggaagtgttcagaaggcagcgtttttttctcgggttcctgaaccggaatatacaaatgaacgaaagactcaaaaaccgcgaagcggctaaaatgtattattcgctttttaaaacaaatgtgaaccggcgtacactgacgcttctttttgacgagtttgtttatatagacactgatcgtacaaatgtacagactgtcggcggaaatgtacaggagatatccggtcaaacgctgattattccgcattggaacggagaccttgtaaaggaagttgtgcgtcagacactggcgtcgctgacacgcgatatagaagagcatattgcagggcagtcgcttacagttgaagtattaaacggaacggcagttaacggccttgccggaagaacggcggaaatgctgcgcagtttcggttacgacgtaatttccattcaaaatgcggataataataattatgaagctacagttatcattcaccgttccggcagcgacggcatggtaaacgaatttgccgatattatccgctgtaccaacatacgacgcgaattaattactgatgagcctgatgataatcagcttaatcctgagtataaagcggatataaccctgcttatcggaaaggactttaacggaagatatgttactgaaaactga

SEQ ID NO: 19344 - protein, 239 aa, Unknown
  Obtained from environmental sample
  misc_feature (1)..(239): Xaa is any amino acid
MTVLDGDKAGVYATYSVPFEDRDMEVFRRQRFFLGFLNRNIQMNERLKNREAAKMYYSLFKTNVNRRTLTLLFDEFVYIDTDRTNVQTVGGNVQEISGQTLIIPHWNGDLVKEVVRQTLASLTRDIEEHIAGQSLTVEVLNGTAVNGLAGRTAEMLRSFGYDVISIQNADNNNYEATVIIHRSGSDGMVNEFADIIRCTNIRRELITDEPDDNQLNPEYKADITLLIGKDFNGRYVTEN

SEQ ID NO: 19345 - DNA, 426 bp, Unknown
  Obtained from environmental sample
  misc_feature (1)..(426): n is a, c, g, or t
gtgaattttatgaacgccattgactgtccttttcattgtttcgacagtattgcaaaaacgcttacaaacacagcaatatcgcccgtaatccttgtggattttcacgcggaatcaacccgtgaaaaagaaactcttgcctattatattgacggccgcgtgtctttggttgcaggaacacatacgcacgtacagactgccgatgaacgggtattgccgaacggcagcgcatacattaccgatctcggcatgacaggattaacagacagcgtaatcggcatggatgccaaaatctgccatgaaagattttttaaacaaattcagtatcaattaaaaacagcgtcatcaaaagaaagcggtaaaatacagggtgtaattgcggagattgacgcggacaccggaaaagcaatttccgtcaaacgaatttaa

SEQ ID NO: 19346 - protein, 141 aa, Unknown
  Obtained from environmental sample
  misc_feature (1)..(141): Xaa is any amino acid
MNFMNAIDCPFHCFDSIAKTLTNTAISPVILVDFHAESTREKETLAYYIDGRVSLVAGTHTHVQTADERVLPNGSAYITDLGMTGLTDSVIGMDAKICHERFFKQIQYQLKTASSKESGKIQGVIAEIDADTGKAISVKRI

SEQ ID NO: 19347 - DNA, 612 bp, Unknown
  Obtained from environmental sample
  misc_feature (1)..(612): n is a, c, g, or t
atgtttcccatttcgctcacattatcggcggtttatgtggcagtttcttcggattcttccgtcctcaaaggagggttatttatgaataaagaatttctgcaatttgacacggtacgcgacaacgcgcttaaactcgcgcatcgcatctgcagcgacgggtttttccccgatgtgatctatgtgtcattgcgcggcggagcttatcttggcaacctgataagcgagtattataagattgtacacaaaggtgcgcatcctgtgtactacgcggctgttgtcgcgcgttcttacaccgatgtagcgaaagcggaaggcgtaaaggtggacggctggacatatgccccggaacatcttcgggtaggggacaaggtgctgctcattgacgatatttttgattcgggaagaaccattaaccatctggcgcagataattctagatatgggaattccaagaagcgatttaaaaatcgcggttcacgattataaatatttttacgataaacctgaacagtacgccattcagcccgattactggtgccgtaagcatgacgtgtcaattcatgatgacacttactggattcattanatagcccacgagctatggtcgcgataa

SEQ ID NO: 19348 - protein, 203 aa, Unknown
  Obtained from environmental sample
  SIGNAL (1)...(16)
  misc_feature (1)..(203): Xaa is any amino acid
MFPISLTLSAVYVAVSSDSSVLKGGLFMNKEFLQFDTVRDNALKLAHRICSDGFFPDVIYVSLRGGAYLGNLISEYYKIVHKGAHPVYYAAVVARSYTDVAKAEGVKVDGWTYAPEHLRVGDKVLLIDDIFDSGRTINHLAQIILDMGIPRSDLKIAVHDYKYFYDKPEQYAIQPDYWCRKHDVSIHDDTYWIHXIAHELWSR

SEQ ID NO: 19349 - DNA, 333 bp, Unknown
  Obtained from environmental sample
  misc_feature (1)..(333): n is a, c, g, or t
atgctggaagaaaattacggctcaaagccgcttcttgtgatgataattataacagcccttgtaacgggaatcttaaacgtactgttattcaacagcgcgttaatgggagcttccggcgtagtatttatgatgatacttctgtcatcttttacaaatttcagctcaggtgaaattccgcttacattcattcttgtaatgattctgtacatgggcatacagttttttaacacatccggcccggaaaatgtttcccatttcgctcacattatcggcggtttatgtggcagtttcttcggattcttccgtcctcaaaggagggttatttatgaataa

SEQ ID NO: 19350 - protein, 110 aa, Unknown
  Obtained from environmental sample
  misc_feature (1)..(110): Xaa is any amino acid
MLEENYGSKPLLVMIIITALVTGILNVLLFNSALMGASGVVFMMILLSSFTNFSSGEIPLTFILVMILYMGIQFFNTSGPENVSHFAHIIGGLCGSFFGFFRPQRRVIYE

SEQ ID NO: 19351 - DNA, 471 bp, Unknown
  Obtained from environmental sample
  misc_feature (1)..(471): n is a, c, g, or t
ttgagagggatattagcacatacgcagcgttctaaccttgtcataggcgagcaaatggcggagaagttaaaaatagaaataggaaacgcctctccggacaagactatcgaaaaattagaggtaaagggcaacgacgccattaccggtcttccgcgtcgtcttgagattgattcggtggaagtgcgtgaagcgcttaaagatcccattaccgcgataattgacgaaataaaagctgtcttcggcaagacaccgccggaacttgccgccgatatcgtggaccgcggcattgtaatgaccggcggcggctctatgttaaaaggtcttgacaagcttatcgcgaaagaaacgggggttcccgcgattatcgcggatcaacccgaactttgcgtcgctttgggagccggcaaatattttgattacatgaaaggctctgaccttacaaaaaatatctatgacagaataaacaattaa

SEQ ID NO: 19352 - protein, 156 aa, Unknown
  Obtained from environmental sample
  DOMAIN (1)...(146): MreB/Mbl protein
  misc_feature (1)..(156): Xaa is any amino acid
MRGILAHTQRSNLVIGEQMAEKLKIEIGNASPDKTIEKLEVKGNDAITGLPRRLEIDSVEVREALKDPITAIIDEIKAVFGKTPPELAADIVDRGIVMTGGGSMLKGLDKLIAKETGVPAIIADQPELCVALGAGKYFDYMKGSDLTKNIYDRINN

SEQ ID NO: 19353 - DNA, 498 bp, Unknown
  Obtained from environmental sample
  misc_feature (1)..(498): n is a, c, g, or t
atgattaaaaatattatttggacaataatccttgccgtagcagccggtatattacaatcaaccatactcggaaatttcgcgctnttcggcgccgttcccgatattgctctgtgtattattgtttattcagcctatgtaaacggaaccatgacaggtcagctgtcgggtttnttctccgggttactgcttgattttctttcagccgctcctttagggcttaattgccttatacgcaccgttataggggctgtaacgggtatttttaaaggagcgttttttcttgacgtgtttttcctgccgttcattctttgcgctttggcgacaatagcaaaggctttaattatgtttttactaaattttattatgggtaatgcggttcctgtttattcgctgttttctatattgttttggatagagctcgggcttaattcattatgcgcgccgattttatttttaatcttaaaacattttaggcttattacgcctaaacggagttag

SEQ ID NO: 19354 - protein, 165 aa, Unknown
  Obtained from environmental sample
  SIGNAL (1)...(20)
  DOMAIN (1)...(160): rod shape-determining protein MreD
  misc_feature (1)..(165): Xaa is any amino acid
MIKNIIWTIILAVAAGILQSTILGNFALFGAVPDIALCIIVYSAYVNGTMTGQLSGXFSGLLLDFLSAAPLGLNCLIRTVIGAVTGIFKGAFFLDVFFLPFILCALATIAKALIMFLLNFIMGNAVPVYSLFSILFWIELGLNSLCAPILFLILKHFRLITPKRS

SEQ ID NO: 19355 - DNA, 726 bp, Unknown
  Obtained from environmental sample
  misc_feature (1)..(726): n is a, c, g, or t
atgagacctttcaattcactcgtagccttgcccatttcggttttgctctttgcaaacacaatggcattggcacaagttgctcctgctagcgcagaggcggctccagaacctgctcctgttgcggagccagtagttgccccaccagcgcaagttgttgtgacagaacccgctccggttgcagccaaaccggaaccagaagcgaaaccggcagctaaagccgcacctatgaaaatttctctatatggattcttccagctcaacacaataattgaaggcggcgcaaatggcaacagagcctggtcaatttggcttcccaaaaagtctgaagatggcgaaagtcgtatagcgctcaatgcgaatcaaacgagaattggcataaatgtgtctggggaaccaaaagaaggcagcccagaagtccttggaagatttgaaattgatttttctaatgacaacaatcgcaacaacaatggagttggcagtcttcgcataaggcaggcttttggtcaggtgaaattcaacgacataggtttaagcctattgttgggacaaaccagcgatttgatcggtccgttgaccgctccctcggttaaccaaggcactttgcaaggccagggttctttaggtacgcgccgccctatgattcgcgcaacgcaagccttaggcccggttgaaatagccgctgccgtaacggataacagagatgtaagcactatacaatcaaagtaa

SEQ ID NO: 19356 - protein, 241 aa, Unknown
  Obtained from environmental sample
  SIGNAL (1)...(24)
  misc_feature (1)..(241): Xaa is any amino acid
MRPFNSLVALPISVLLFANTMALAQVAPASAEAAPEPAPVAEPVVAPPAQVVVTEPAPVAAKPEPEAKPAAKAAPMKISLYGFFQLNTIIEGGANGNRAWSIWLPKKSEDGESRIALNANQTRIGINVSGEPKEGSPEVLGRFEIDFSNDNNRNNNGVGSLRIRQAFGQVKFNDIGLSLLLGQTSDLIGPLTAPSVNQGTLQGQGSLGTRRPMIRATQALGPVEIAAAVTDNRDVSTIQSK

SEQ ID NO: 19357 - DNA, 465 bp, Unknown
  Obtained from environmental sample
  misc_feature (1)..(465): n is a, c, g, or t
atggcgggaagggcagccaggcacattacttccatcaaccttgttccggcggagcttgaagccaaaattaaagaaaggtttgaaagatacgaactcattaaaaaaactgaaacccgttttgaggaagtggatacggcaaatgctgaaattattttgacagcctacggaacctgcgccagggtctgccttggcgcgaaaaagcttgcggacaaagccgggctaaaagtcggccttttccggcctataaccctctggccgttcccatacgaagccttgggcaaaataggcgaaagggggaagcccattctcactgtggagatgagcatgggccaaatggtggaagatgtgcgcctttcggttctgggcaaggccccgattcatttcctggggcacaccggaggagttattcctaccgaggaagaagtttttgaagagctaaagaaaattatagggagcgtaaaatga

SEQ ID NO: 19358 - protein, 154 aa, Unknown
  Obtained from environmental sample
  misc_feature (1)..(154): Xaa is any amino acid
MAGRAARHITSINLVPAELEAKIKERFERYELIKKTETRFEEVDTANAEIILTAYGTCARVCLGAKKLADKAGLKVGLFRPITLWPFPYEALGKIGERGKPILTVEMSMGQMVEDVRLSVLGKAPIHFLGHTGGVIPTEEEVFEELKKIIGSVK

SEQ ID NO: 19359 - DNA, 630 bp, Unknown
  Obtained from environmental sample
  misc_feature (1)..(630): n is a, c, g, or t
gtgaaatctgcaagggaaaaatccgaaaaaaacatggacatggtaagcacccaaagggagtacgaggccctgnataaggaaattaaggacgcttcggaaaaagaacaacaataccgcaaagaattacagcaaaggggaagtattctttgtgaacttgacgatcagattaagcagcagaccgcgttaattgaacagcaggaaaaagaactggaagaacgcagaaaaaaaattgaagctgaaattaatgaaaaaaagaagcaaattgaaaatctgaagaaaaaagaaagcaaacttactgaaaaccttgattccgaagtcgtgtttaaatttgaacgtattatcaaaaacaagatgggaatcggtattgtcgcgataaagggcaatgtctgtatgggctgccatatgattcttcccgttcaatttgccaatgaagtcagaataggcgaggaatatgtcttttgcccctattgttcgcgcattctttactacgaagaatcgggggagggtgaggaagagttctttaacacggaagataccggcgccctttccgaccttgacgaagtggacgaagacgaggaagaagaagacgaggaagaagaagagataattaatattgattctgaggaatga

SEQ ID NO: 19360 - protein, 209 aa, Unknown
  Obtained from environmental sample
  DOMAIN (1)...(165): Uncharacterized ACR, COG1579
  misc_feature (1)..(209): Xaa is any amino acid
MKSAREKSEKNMDMVSTQREYEALXKEIKDASEKEQQYRKELQQRGSILCELDDQIKQQTALIEQQEKELEERRKKIEAEINEKKKQIENLKKKESKLTENLDSEVVFKFERIIKNKMGIGIVAIKGNVCMGCHMILPVQFANEVRIGEEYVFCPYCSRILYYEESGEGEEEFFNTEDTGALSDLDEVDEDEEEEDEEEEEIINIDSEE

SEQ ID NO: 19361 - DNA, 846 bp, Unknown
  Obtained from environmental sample
  misc_feature (1)..(846): n is a, c, g, or t
gtgttcaccggcagtaataaaacgctttacgcgcactggtctgttcacggcgtactggttactttcaacgccaatgggggtaaagatctcagtttcaaggacaagggggtaatgcccggcaacgcctatggtacgctgccagatgttaccagaaccggatacaagttggacggctggtttacccagtatacaggcgggactaaagtaaacgaaggtactgtgttcactggcggtaaacaaacgctttacgcgcactggacaccaacaagcggcatgatggttaccttcgacgccaacggtggcgacgtgcccagcttcacgaccaaggggctatctcccggctcctccaactatggcgagcttccgactgttaccagagaaggatacaagttcgaaggctggtttactcaggctacaggcgggaataaagtaaacaaaaatgacaggttcaccggtattagcaggctttacgcgcaatggactaaagcaagcagcgtaaaggttaccttccatagaaatggtgggacttccgatccaatccaggcaataactaccgcatacaacagcaaagtaactctgcccaaggaacccacctggccgggccatgcttttgacagttggaataccaaggctgacggcagcgggacgacctttaacgagaaaacgcccgttaaagcggacatcgaagtacacgccaaatggaaggcgaatacctacaccgtaatcttccacaaaagcgacggggacaccccgaggcagaccaagactgttaagcccccggcaaccacaatcgacgctttgcccacgaaacccaccaagaaaggccacgattnctcggccatctga

SEQ ID NO: 19362 - protein, 281 aa, Unknown
  Obtained from environmental sample
  misc_feature (1)..(281): Xaa is any amino acid
MFTGSNKTLYAHWSVHGVLVTFNANGGKDLSFKDKGVMPGNAYGTLPDVTRTGYKLDGWFTQYTGGTKVNEGTVFTGGKQTLYAHWTPTSGMMVTFDANGGDVPSFTTKGLSPGSSNYGELPTVTREGYKFEGWFTQATGGNKVNKNDRFTGISRLYAQWTKASSVKVTFHRNGGTSDPIQAITTAYNSKVTLPKEPTWPGHAFDSWNTKADGSGTTFNEKTPVKADIEVHAKWKANTYTVIFHKSDGDTPRQTKTVKPPATTIDALPTKPTKKGHDXSAI

SEQ ID NO: 19363 - DNA, 912 bp, Unknown
  Obtained from environmental sample
  misc_feature (1)..(912): n is a, c, g, or t
ttgaaagggatccatggggttcgtcttatgattccaagcggaaaaagacttattttttcctcntacagtccggatattgtaaataacgataataaaagcgcggcttatcgcagttacaatgagccggacctcccatacgaattgatagcagttgaaaacggaggagtgccaaaacacacttttgacaataaatcaggaagcattcttttttccttcccgttatacgattctttcgatatttactgcggcacagctttgttctccctctccatagatgccatattggagaagcttttcaacgaagggaggatactatccagccatgaaataatcttaattcaaaaaccacctggaatggtattcggtaccatggccgccgatgagtgggtcatgccaagccaaatttcgtcagtttgggaaacaacggggataaaaaccgccagggtctcttccagtgattcaggtgtcccatatatcctgatttcaaccaaaacatcccagaatttatttatcggaagccttattaaggaagaattatacgtgttcccatggaacatgaagcttgttctcctggtttctttctttttaacggtgtaccttacggttttcctgctgtttagccttaaacaagaacctgtcacaattattcaaaaccggctgaaacgcctgcaagtatcgcttttagaacagttttacgaaacaaaggacgaggaagactggaaccgctgggtaagggaactgaagcatcgtagggaagaaataagcgccctcttgaaacagggtattcagccagtttcccgcaaccttaatgaagagattgataccctaatcaacaaatcctggggcgagtttcttactttgctgggaagcagaagggagcccggcttgacgggaaaaactagatccgcctaa

SEQ ID NO: 19364 - protein, 303 aa, Unknown
  Obtained from environmental sample
  misc_feature (1)..(303): Xaa is any amino acid
MKGIHGVRLMIPSGKRLIFSSYSPDIVNNDNKSAAYRSYNEPDLPYELIAVENGGVPKHTFDNKSGSILFSFPLYDSFDIYCGTALFSLSIDAILEKLFNEGRILSSHEIILIQKPPGMVFGTMAADEWVMPSQISSVWETTGIKTARVSSSDSGVPYILISTKTSQNLFIGSLIKEELYVFPWNMKLVLLVSFFLTVYLTVFLLFSLKQEPVTIIQNRLKRLQVSLLEQFYETKDEEDWNRWVRELKHRREEISALLKQGIQPVSRNLNEEIDTLINKSWGEFLTLLGSRREPGLTGKTRSA

SEQ ID NO: 19365 - DNA, 660 bp, Unknown
  Obtained from environmental sample
  misc_feature (1)..(660): n is a, c, g, or t
gtggcggctatggaagacgttttatcggtttacgcgcgcccgtatgacccaaaaaggcctgttatatgcatggatgagaaaccgtatcaattgctcggccttgcccgcccgtctttgcctatggaacccggctcgcctgagcgggaagattttgagtacatccggattggaacatgcagtatttttatatttgccgaaccgcttggcagctggcgctacgcggaagcattcccacagcggacgaaaaaggattgggcgcataggataaaatggctgcttgacaagcaatacggcaaagcggaaaaagttgtgcttgtgatggacaatttaaacacgcataccatttcttcgctctatgaagccttcccgcctgaggaagcatttcgtcttgcgcaacggcttgaaattcattttacgccgaagcatgggagctggcttaacatagcggaaattgagctatcttcaatggcatcacaatgcctgggcaaaaggcgcattcctggaattaattctttgaatgaggaactcgctgcctggcatactaagcgcaaccagaaccagaggggcgttgactggcattttacaaccngatggcgcgcgggtcaaactaaagaggctctatcccataattgtgtaaagtttttgatgtacatatactag

SEQ ID NO: 19366 - protein, 219 aa, Unknown
  Obtained from environmental sample
  misc_feature (1)..(219): Xaa is any amino acid
MAAMEDVLSVYARPYDPKRPVICMDEKPYQLLGLARPSLPMEPGSPEREDFEYIRIGTCSIFIFAEPLGSWRYAEAFPQRTKKDWAHRIKWLLDKQYGKAEKVVLVMDNLNTHTISSLYEAFPPEEAFRLAQRLEIHFTPKHGSWLNIAEIELSSMASQCLGKRRIPGINSLNEELAAWHTKRNQNQRGVDWHFTTXWRAGQTKEALSHNCVKFLMYIY

SEQ ID NO: 19367 - DNA, 486 bp, Unknown
  Obtained from environmental sample
  misc_feature (1)..(486): n is a, c, g, or t
atgaaagaaattttagatatcgtttatcgaaaaatagatgatatatcattaaagcttgatttgttcttaccggataataacgaaaaccctccgcttattttatggattcacggcggggcgtggatgatgggcgaccgtaaatggtgcggtatgcaaggccagcttaatcgcggatatgcagtggcaagcatagattaccggttgagtacaatagcgccgtttcctgcttgcattattgattgtaaacatgctcttgcttttttgcggaaaaatgaaaataaatatcccatagatgtgtcccggatatgtgttgccggagattcagcggggggacatcttgcgtcattgatgggcgtaaccgcaggtcattctgaatgggaaccggaaggctcggattgttctgtgcaggcggttattaatttttacggccagattacttttcaagataaaggggaaaaaaacgctggaagatgcntatgtgattaa

SEQ ID NO: 19368 - protein, 161 aa, Unknown
  Obtained from environmental sample
  DOMAIN (33)...(161): alpha/beta hydrolase fold
  misc_feature (1)..(161): Xaa is any amino acid
MKEILDIVYRKIDDISLKLDLFLPDNNENPPLILWIHGGAWMMGDRKWCGMQGQLNRGYAVASIDYRLSTIAPFPACIIDCKHALAFLRKNENKYPIDVSRICVAGDSAGGHLASLMGVTAGHSEWEPEGSDCSVQAVINFYGQITFQDKGEKNAGRCXCD

SEQ ID NO: 19369 - DNA, 795 bp, Unknown
  Obtained from environmental sample
  misc_feature (1)..(795): n is a, c, g, or t
atgcgttgctatcctgaacaagcaatgttgctcacaaataaacaggcgcggcaattcctgctgcgccgccatggcttaattggagaacgcgtcttcagtggcaaggaaggcgtaatggcgttcattaagcgcgtcgggtgcctgcagtttgaccccgtggatttatgcggcaggaacgccgacatcgccctgaattcccgtgtatatggctatacaaaagagacgcttgatgaactgctttacaaagagcgtcgccttatcgactacttcgacaaaaatttgtctattttccccattgaggattttccggtttttgtaagcgagaagccaggcggcggatacgcggaagcttacgatgcgcggggcggcgaagctgtgcagcagattaagccccacatccggcagttaatcgctgaacggggacatatcagcgcgaaggaaatcgatgttgaaaagatgatcgtctggcactggggcacgatgacatcactttcgagggccgcgcttgagtcgatgtactttcgcggagaactcgtcgtccatcacaaaacaggcacgaacaagagttacaccttcgcgaaagatcttttgccagcggacatattgaacgcgccggagcctttcagaacaggagaggagcggcaggcgtggctcgtaaaacgccgtatcggctctgtaggaatgctatggaacaggtcaagcgacgcatttttgggatcaaggctgaaaacaagccagcgaacggcggcattcaaaaactgcttgcggacggcgaaatcttcgaggttagcgtga

SEQ ID NO: 19370 - protein, 264 aa, Unknown
  Obtained from environmental sample
  DOMAIN (9)...(263): Protein of unknown function (DUF1006)
  misc_feature (1)..(264): Xaa is any amino acid
MRCYPEQAMLLTNKQARQFLLRRHGLIGERVFSGKEGVMAFIKRVGCLQFDPVDLCGRNADIALNSRVYGYTKETLDELLYKERRLIDYFDKNLSIFPIEDFPVFVSEKPGGGYAEAYDARGGEAVQQIKPHIRQLIAERGHISAKEIDVEKMIVWHWGTMTSLSRAALESMYFRGELVVHHKTGTNKSYTFAKDLLPADILNAPEPFRTGEERQAWLVKRRIGSVGMLWNRSSDAFLGSRLKTSQRTAAFKNCLRTAKSSRLA

SEQ ID NO: 19371 - DNA, 423 bp, Unknown
  Obtained from environmental sample
  misc_feature (1)..(423): n is a, c, g, or t
ttgccccttggcgcgggagttgagtcggtaaacgcaaaggccctgctgctcgccggaaccgaagccgtctcccaatatgatcgtgaacacgtctgcccctacctgtatacccaccctgaaaaatttctcctccaccgcccgcttgccccgcagcattggcaataccctgaaattcgcctaacggtagacgcccaacaggactacgaacaggcgcaggttttgtacgccgcgctggatagcatggaaaaggcaggaaagctgtcagaaggagagcgatataagggggaagtgataatcagagcttacaaggggttcagggttcagggttcagggttcggggatcaggaacaagggttcagggttcagggttcggggtttggggattgttgttcgcagtctgatcgtgttggtaatcagcaatga

SEQ ID NO: 19372 - protein, 140 aa, Unknown
  Obtained from environmental sample
  misc_feature (1)..(140): Xaa is any amino acid
MPLGAGVESVNAKALLLAGTEAVSQYDREHVCPYLYTHPEKFLLHRPLAPQHWQYPEIRLTVDAQQDYEQAQVLYAALDSMEKAGKLSEGERYKGEVIIRAYKGFRVQGSGFGDQEQGFRVQGSGFGDCCSQSDRVGNQQ

SEQ ID NO: 19373 - DNA, 453 bp, Unknown
  Obtained from environmental sample
  misc_feature (1)..(453): n is a, c, g, or t
atgttccgtcatcaaattgacactatggggattcttatcgactacggttacgttaattcgatattgcttaaagcttcgcttgtacacgatgttcttgaagatatccccgattttaatcacaatattttactttctatcgataccgaaagccacgctgtttataaccttgttcttgaagttacgcgaaggcacggcgaaacaaaaccggattttcttacgcgtatatacgaaaatgcttcttttgacgctaaaactttaaaagtcgcggatcgtatttccaacatgatttctcttggatttgtaaacaaccttgcatttgtagagcgttatataaatgaaacggaaaaatatcttcttcctcttgcctcgcaagttaacacttatatgctgacagaacttacagaccttgtaaaaacaaaacgtaaatatctggaagacctgaaacgacaatga

SEQ ID NO: 19374 - protein, 150 aa, Unknown
  Obtained from environmental sample
  DOMAIN (1)...(95): HD domain
  misc_feature (1)..(150): Xaa is any amino acid
MFRHQIDTMGILIDYGYVNSILLKASLVHDVLEDIPDFNHNILLSIDTESHAVYNLVLEVTRRHGETKPDFLTRIYENASFDAKTLKVADRISNMISLGFVNNLAFVERYINETEKYLLPLASQVNTYMLTELTDLVKTKRKYLEDLKRQ

SEQ ID NO: 19375 - DNA, 570 bp, Unknown
  Obtained from environmental sample
  misc_feature (1)..(570): n is a, c, g, or t
gtgaccaacagcgcgaatcacacgctttacgcacactggactgtcataaacgttacggttgcctttaacatcaacgggggcaaggcacccagtcccttaaacaagataatagcatttgactccacctatggctcgctgccgactgctaccagagacggatacaaattcgacggctggtataccgcggcttcaggcgggaccaaagtagaatcatcgacaaaagtgtccaacgccggtaatcacacgctttacgcgcactggactgccgcaagcggtataacggtttccttcgacgctaaaggcggcacgcccagccccgcaagcaaagcggtaacctttggttccaactattcgctgccgtctgtttccaggcccggatacaaattcgacggctggtttactgcggcttcaggcgggactaaagtggaaggagcgacaaaggtgtccaacaccgctaatcacacgctttacgcacgttggacagccaacagcataacggtagcatttaacgccaacgggggcgttgcgcccagccccgcaaacaaagcggtaacctttgactccacttag

SEQ ID NO: 19376 - protein, 189 aa, Unknown
  Obtained from environmental sample
  misc_feature (1)..(189): Xaa is any amino acid
MTNSANHTLYAHWTVINVTVAFNINGGKAPSPLNKIIAFDSTYGSLPTATRDGYKFDGWYTAASGGTKVESSTKVSNAGNHTLYAHWTAASGITVSFDAKGGTPSPASKAVTFGSNYSLPSVSRPGYKFDGWFTAASGGTKVEGATKVSNTANHTLYARWTANSITVAFNANGGVAPSPANKAVTFDST

SEQ ID NO: 19377 - DNA, 861 bp, Unknown
  Obtained from environmental sample
  misc_feature (1)..(861): n is a, c, g, or t
ttgaagctcccgtctgggcttaaacgacttccctcggaagtcgtacgactcccttcgggggccgtgctaaatttttcagggcctgccctggtgatggccgttattaactgcaacgaggattccttttacgccccttccagggcgcttggggaggaagcggttgaaaaagcgctggccgccgaagaaaatggggccgcaattgttgattttggagcggagtcctcaaggcccggcgcttcctacataagcgaagaagaagagcttaagcggcttattcctgtgataggcgctttcagaaagcgctcttctctgccggtttcggtagatacccgcaaggcggctgttgcccgcgcggccattgatgccggggcggatataatcaacgatatttccgctttaagcgacgatccaaaaatggccgcgatctgcgcggaaaaaggcgcggcggttgtgctgatgcacaaaaaaggcgtgccgcttaccatgcaggaagctccctcttattcagatgtagcggaagagataagcgctttttttaaagacaccacgaaacaggcgctggcggcaggaattcccccggaaaaaatcgtccttgaccccggcattggctttggcaaaagccttaaagacaatctccaaattatccgccttcttgcggaaatatgcgggaaggattatcctatactggttgggctttcgcggaaaagttttatcggcgaaataacaggccacgccgtgggacgccacagtgtggcgcggggaccggaagacaggctcgcgggaaccctggcggcgaatgctgcggcaattctggccggggcggatttaattcgggttcatgacgtaaaagagcagcgttga

SEQ ID NO: 19378 - protein, 286 aa, Unknown
  Obtained from environmental sample
  DOMAIN (34)...(242): Pterin binding enzyme
  misc_feature (1)..(286): Xaa is any amino acid
MKLPSGLKRLPSEVVRLPSGAVLNFSGPALVMAVINCNEDSFYAPSRALGEEAVEKALAAEENGAAIVDFGAESSRPGASYISEEEELKRLIPVIGAFRKRSSLPVSVDTRKAAVARAAIDAGADIINDISALSDDPKMAAICAEKGAAVVLMHKKGVPLTMQEAPSYSDVAEEISAFFKDTTKQALAAGIPPEKIVLDPGIGFGKSLKDNLQIIRLLAEICGKDYPILVGLSRKSFIGEITGHAVGRHSVARGPEDRLAGTLAANAAAILAGADLIRVHDVKEQR

SEQ ID NO: 19379 - DNA, 642 bp, Unknown
  Obtained from environmental sample
  misc_feature (1)..(642): n is a, c, g, or t
atgcggattatctccggacttttggaaccatcaagcggggacgtgctgttccggggacaaagcctgtacggcgggcggcgcggacagcagcgtgaaaccgagaaagcgctccgcagggaattggggctggtgtttcaggatgccgacgcgcaaatagtgggggaaaccgtcatcgaagacgccgcctttgggccggagaatatcggtctttcaagcgccgaggcggagacttgcgcggataaagccctcgccgcgatgggccttgccgaaaagcgggacaatgccccccggcggctttccggcggagaaaagcgccgccttgccgtcgccggagtgcttgccatgggctgcggcaccatcatcatggacgagccattcgccaaccttgattggccgggagtggttcaaaccctcaaacttatccgcgatttaaaaaatgacggcaaaaccctgattatccttacccatgaacttgaaaaaatcctcgccctggctgaccggctggtaatactccaccagggcgttattcgtcatgacggcaatcccgccgtggtttttaacgaacttgaccccggttggggagtgcgcgacccccgccgcaactatgccactgtagaggattgttcatggctggaaaaataa

SEQ ID NO: 19380 - protein, 213 aa, Unknown
  Obtained from environmental sample
  DOMAIN (1)...(174): ABC transporter
  misc_feature (1)..(213): Xaa is any amino acid
MRIISGLLEPSSGDVLFRGQSLYGGRRGQQRETEKALRRELGLVFQDADAQIVGETVIEDAAFGPENIGLSSAEAETCADKALAAMGLAEKRDNAPRRLSGGEKRRLAVAGVLAMGCGTIIMDEPFANLDWPGVVQTLKLIRDLKNDGKTLIILTHELEKILALADRLVILHQGVIRHDGNPAVVFNELDPGWGVRDPRRNYATVEDCSWLEK

SEQ ID NO: 19381 - DNA, 756 bp, Unknown
  Obtained from environmental sample
  misc_feature (1)..(756): n is a, c, g, or t
atgcgctacatctgggacttgtaccacgaatatttcaggggaaccagcccaccggttcgcttttttatgaagaggctcattccccgcctccgcgtctgggatattacttccgccaatctggtggatcgttttatgaccaattcccgctatacggcgaaaaggatagagcgcctttataatcgtaccgctgaagtggtctacggcccggtagccatcgaagaatacctcaaaattgaacgaaaaccagccgattattacctttttttcggtcagattaccggctacaagcgggcggatatcgctattgaagcatgtgccggatccggaaggaaacttattgtcgccggggcgggcgcaaggaaaaaagatataaaaaagtacgcaaaaaccggcctgatacgctttaccggcagggtttccgacgaggaagcggcgactctttttgccggagcccgcgccctcctctaccccggcattgaggatttgggcctgattcccgtcgaggccaatgccgcggggtgcccggttattgccttccgggaggggggcgccctggaaacggtaaaagagaatgttactggcctgttttttgacgaacaaacgccggaatcccttgcttcggccatggatttttttgagaaaaatacgaatttgttcaaagatcgcgcccaattcagcgcccatgtgcggcaattttcaaaggcggcctttatgggacgtgtaaaaaaactcattgatgaaaggaagcgaatataa

SEQ ID NO: 19382 - protein, 251 aa, Unknown
  Obtained from environmental sample
  DOMAIN (72)...(232): Glycosyl transferases group 1
  misc_feature (1)..(251): Xaa is any amino acid
MRYIWDLYHEYFRGTSPPVRFFMKRLIPRLRVWDITSANLVDRFMTNSRYTAKRIERLYNRTAEVVYGPVAIEEYLKIERKPADYYLFFGQITGYKRADIAIEACAGSGRKLIVAGAGARKKDIKKYAKTGLIRFTGRVSDEEAATLFAGARALLYPGIEDLGLIPVEANAAGCPVIAFREGGALETVKENVTGLFFDEQTPESLASAMDFFEKNTNLFKDRAQFSAHVRQFSKAAFMGRVKKLIDERKRI

SEQ ID NO: 19383 - DNA, 783 bp, Unknown
  Obtained from environmental sample
  misc_feature (1)..(783): n is a, c, g, or t
atgcccgaactggatgtccacaagctgaagcattngcaaaattcgtctgtttcggcgttccgctacaatgtgctgatacccaattttttcaccattaccaatatctggatgtctgtctgtgattttgacggcgttctgggccttgtaaccagccataaacttaaaatgttttggaatttaggaattaaacgttttatggatcttgcaattgtcattataggcggaatcattattctgccccttcttctgcttgtagcgctgttgatcaagatctcatcgcccgggccggttctgtacattcacaagcgtctcggcatgaacggtaatcactttaatgtatacaaattccgttccatggttgcggattcggaagaacggctgaaagatattctggaatcggatcctgagataaaaaatgaatgggaaaaaacgcacaagctgcacaatgatccaagagtaacctggatcggcagatttatacgccgtaccagtatagacgaatttccccaactaattaatatattaaaaggggaaatgtctctggtcggtccgcgccccattgtagacgccgaagtaaaaaaatacggcgaggattacaaccgcgttttttccataaaaccgggattgaccgggctttggcaggtatcgggaagatccgataccaattacagtgaacgggttgcttatgatacctactaccttcaaagctggtcaggctggctggatctatgggtgatattcaaaactttcggcgccgtaataaggggcaggggagcctattaa

SEQ ID NO: 19384 - protein, 260 aa, Unknown
  Obtained from environmental sample
  DOMAIN (63)...(260): Bacterial sugar transferase
  misc_feature (1)..(260): Xaa is any amino acid
MPELDVHKLKHXQNSSVSAFRYNVLIPNFFTITNIWMSVCDFDGVLGLVTSHKLKMFWNLGIKRFMDLAIVIIGGIIILPLLLLVALLIKISSPGPVLYIHKRLGMNGNHFNVYKFRSMVADSEERLKDILESDPEIKNEWEKTHKLHNDPRVTWIGRFIRRTSIDEFPQLINILKGEMSLVGPRPIVDAEVKKYGEDYNRVFSIKPGLTGLWQVSGRSDTNYSERVAYDTYYLQSWSGWLDLWVIFKTFGAVIRGRGAY

SEQ ID NO: 19385 - DNA, 330 bp, Unknown
  Obtained from environmental sample
  misc_feature (1)..(330): n is a, c, g, or t
atgaaccaaaacgtcaaaaccgaactcgacaggatcgtaagtacgctggccgaaacggggatcgtaaccaaaattatcctattcggctcttatgcgaggggcgaagaaacccccaaaagcgatatcgatttgtgcgtcctcacgccggtaacccccaaaagcaatgttgagcttatctctaacttccgaagatctgtatggggtatacgtacaatgccgttggatttgttcgcttataaccaagataatttttactttcacgccaaacgcccaacttcatttgaacacgaaatagcggaaacaggagtctcgttgtatgagcacagatag

SEQ ID NO: 19386 - protein, 109 aa, Unknown
  Obtained from environmental sample
  DOMAIN (5)...(91): Nucleotidyltransferase domain
  misc_feature (1)..(109): Xaa is any amino acid
MNQNVKTELDRIVSTLAETGIVTKIILFGSYARGEETPKSDIDLCVLTPVTPKSNVELISNFRRSVWGIRTMPLDLFAYNQDNFYFHAKRPTSFEHEIAETGVSLYEHR

SEQ ID NO: 19387 - DNA, 909 bp, Unknown
  Obtained from environmental sample
  misc_feature (1)..(909): n is a, c, g, or t
atgggatcagaattcggcacgagctcatcttccaacaaaaacagtatacgtctggtaataaacacgaacgagggttctgcgacacgttacccaaacaaagaaacatacgtatgcggcgaacaagttaccataacggctacacccaacaccggccactcgtttcatggatggtcgggcgcggcgaccggtatgacaaatccattgactattacagtggacgaaaacaaggtgctgacagccaatttcaatccgagtaagtacatgctcacaacaaacgtgtcatcatctattggcgttggcggttcaatatcgcgcaatccggataaggcatactacgattatggagacatagttaccgtaacggctacagcaacgagttgctacacgtttacggggtggttatctggttctacaagtccaagcgttacgattacgatggatgggaacaaggaattgacggccaaatttcaacaaaatacatacacgctcacaacaagcgtatcaccatcatcgagctatggatctgtgtcacgtagtccgaatcagacaagttacgcgtgcgggacaagcgttacattaacggctacacctacgaatagtaattatatgtttgatagttggacgggtgcaacgacgggtacgacaaatccattgacgattacaatgaacgacaacaaaacgctaaccgcaaaatttaaagttaaaaaaagtgaaaccaaagagtattccactgtcggtactagtagctattcatttaacaaaggttttcccgcgacagtggaggtttatgcctttggtgcgggaggaggaggcgcangcggatctagtaacaattactggggtacgtggtacatgataacgggtggtgcangtggaagtggagcancagttatggcagtattcaaatag

SEQ ID NO: 19388 - protein, 302 aa, Unknown
  Obtained from environmental sample
  misc_feature (1)..(302): Xaa is any amino acid
MGSEFGTSSSSNKNSIRLVINTNEGSATRYPNKETYVCGEQVTITATPNTGHSFHGWSGAATGMTNPLTITVDENKVLTANFNPSKYMLTTNVSSSIGVGGSISRNPDKAYYDYGDIVTVTATATSCYTFTGWLSGSTSPSVTITMDGNKELTAKFQQNTYTLTTSVSPSSSYGSVSRSPNQTSYACGTSVTLTATPTNSNYMFDSWTGATTGTTNPLTITMNDNKTLTAKFKVKKSETKEYSTVGTSSYSFNKGFPATVEVYAFGAGGGGAXGSSNNYWGTWYMITGGAXGSGAXVMAVFK

SEQ ID NO: 19389 - DNA, 411 bp, Unknown
  Obtained from environmental sample
  misc_feature (1)..(411): n is a, c, g, or t
gtggggtggggcgttgatttgcaaagcgagcacgaacgctacttagtgaaaaaacactttaaacgtcccgttatcctgacggattatccgaaagaaataaaagcgttttacatgaagctaaacgatgacggtaaaaccgtgcgagggatggatgtgttgttcccgaaaatcggcgaaatcatnggcggttcgcagcgcgaagaaaatctcgataaactgatggcacgcattcgggaaaacaacatgggaactgaaacgcttgaatggtatatcgacacgcgccgctttggcagtgcggtacacagcggtttcggattgggttttgaacgcttgctgctgttcgtaaccggcatgtccaacattcgcgatgtgattccgttcccgcgcacgccaaagaatgcagaattttaa

SEQ ID NO: 19390 - protein, 136 aa, Unknown
  Obtained from environmental sample
  DOMAIN (1)...(132): tRNA synthetases class II (D, K and N)
  misc_feature (1)..(136): Xaa is any amino acid
MGWGVDLQSEHERYLVKKHFKRPVILTDYPKEIKAFYMKLNDDGKTVRGMDVLFPKIGEIXGGSQREENLDKLMARIRENNMGTETLEWYIDTRRFGSAVHSGFGLGFERLLLFVTGMSNIRDVIPFPRTPKNAEF

SEQ ID NO: 19391 - DNA, 588 bp, Unknown
  Obtained from environmental sample
  misc_feature (1)..(588): n is a, c, g, or t
atgaaaagatttcgtaccggtgttattggtgtcggctttattggggcagtgcacatagaacagctccgccgccttagtaatgtggaagttgcggctctggtagaaataaatgatccccaggggaaggcggatagcctttcggttccaaagggctactcggattacagggaaatgatagacagggaaaaactcgactgtattcatatctgtacggcaaataatttgcactatgaaattgtcgattacgccctggacaaagggctgcatgtagtgtgcgaaaagcccctgaccctgaacgccacggaagcggagaaacttgtcaggaaagccaaagaaaagggccttataaacgcagtcaattacaattgccgctactatccgcttgtttaccagatgcgggaaatgattcgctcaggagaagttggcgacgtgtatacagtgcacggcgggtacttgcaggattggctttactttgacactgactacaactggcggcttgaacgggaatccagcggggtcagccccgcctttttccaacatcggcactcactggcttggaccttgttgaaattcataaccgggccttaa

SEQ ID NO: 19392 - protein, 195 aa, Unknown
  Obtained from environmental sample
  DOMAIN (5)...(109): Semialdehyde dehydrogenase, NAD binding domain
  misc_feature (1)..(195): Xaa is any amino acid
MKRFRTGVIGVGFIGAVHIEQLRRLSNVEVAALVEINDPQGKADSLSVPKGYSDYREMIDREKLDCIHICTANNLHYEIVDYALDKGLHVVCEKPLTLNATEAEKLVRKAKEKGLINAVNYNCRYYPLVYQMREMIRSGEVGDVYTVHGGYLQDWLYFDTDYNWRLERESSGVSPAFFQHRHSLAWTLLKFITGP

SEQ ID NO: 19393 - DNA, 759 bp, Unknown
  Obtained from environmental sample
  misc_feature (1)..(759): n is a, c, g, or t
atggggaaaaaatttgattacatttcgttagttagagagtatgctcaatacccacctgaacttgatccaccatctgtatcagatgagccaaatacgtcgtctgcaccgtctgtacagaaagcgcctactacaccagctacactgnatgcaccatctgtatcagatgaaccaaatacgtcgtctgcaccggctgtacagaaagcgcctactacaccgattgtactgacaccacatactacaccagctacacttgatgctccctctgtactgacagtacctactgctccggccgcattgacaccacctactgtatcgcctgaactggatgcacctactacatcgcctgaactcgatgtaccgtctacaccgactgtatcgactgcatcaactgcatcaactaccccgtctgcaccggctgtgtcgacaacatcaactgtaccgacggcgcattcggtacaggatgtacaaactgatttaaataatcaaaaaatacctactgaacaaaaaaaacagaaaaaacaaaagctacagactgttcaaaaagagcaaaatattcaagacgaacaaaacatacagaatatacatgatacaaaacgtttcaatttggccatatcaaaaaaacaatatcaggccctaaaaataatttgttcgctaaagcagatgagcatgaccaaattaataaacgctgccattgacgaattcgtcaacaataacagggtgataatcgagaaatacgatgaattgcgtaaatatatataa

SEQ ID NO: 19394 - protein, 252 aa, Unknown
  Obtained from environmental sample
  misc_feature (1)..(252): Xaa is any amino acid
MGKKFDYISLVREYAQYPPELDPPSVSDEPNTSSAPSVQKAPTTPATLXAPSVSDEPNTSSAPAVQKAPTTPIVLTPHTTPATLDAPSVLTVPTAPAALTPPTVSPELDAPTTSPELDVPSTPTVSTASTASTTPSAPAVSTTSTVPTAHSVQDVQTDLNNQKIPTEQKKQKKQKLQTVQKEQNIQDEQNIQNIHDTKRFNLAISKKQYQALKIICSLKQMSMTKLINAAIDEFVNNNRVIIEKYDELRKYI

SEQ ID NO: 19395 - DNA, 342 bp, Unknown
  Obtained from environmental sample
  misc_feature (1)..(342): n is a, c, g, or t
gtgcctaatcatcgggactttctgcttcgcgcgagccgagaaaaatcggtaaaacagaaacgcatggcgagcataacaacggaagcatttttaagtttcaggcagaggctgctgaatttcatacactcacgggtcagccggattgaagacgccgaggatattctgcaagatgtgttctatcaatttacccgtgtgaatgatctgatcaacccgatagaaaacatttctgcgtggctttacagcgccgctcgtaacagaattatcgaccattataaaaagaagaaggacgagccgctacccgaatcttacgatgaagacgatgacgatgctatgacgagataa

SEQ ID NO: 19396 - protein, 113 aa, Unknown
  Obtained from environmental sample
  DOMAIN (29)...(97): Sigma-70 region 2
  misc_feature (1)..(113): Xaa is any amino acid
MPNHRDFLLRASREKSVKQKRMASITTEAFLSFRQRLLNFIHSRVSRIEDAEDILQDVFYQFTRVNDLINPIENISAWLYSAARNRIIDHYKKKKDEPLPESYDEDDDDAMTR

SEQ ID NO: 19397 - DNA, 606 bp, Unknown
  Obtained from environmental sample
  misc_feature (1)..(606): n is a, c, g, or t
atgatagtggggatgatggtcaacatgctgtttatgatgaactcgatgaacatgaccagttttgttgacgatcatcaaaccgacttcatacaggaaatgcttgtttcgccggtatcgcgctattcacttgttataggcaaaattttcggctccatgttcggggcgatcttaagccttgcgggaacgcttatagttggcttgattatgagcattactctgaacgcaggccagcttcttttgatcctggcgctgtcgccgctcatgtgcctttccggcggcgctctggcgatgatactaatcggccttataagaaacaaaaccgccgcgaatatggcggtgtcgctcatcactctgccgcaaatgtttctttcaggtgcgattattccaattaacaattcatccggggcgctctttgttataagccgtatgttgccgatgacctattgccttgatctggtgcgggcggtggtttatgccggaacgctggagtataatagcgtggtgatgttcaaccctttaatcaacttcgccgttatcgccgcgttgacggtattgtgcctaatcatcgggactttctgcttcgcgcgagccgagaaaaatcggtaa

SEQ ID NO: 19398 - protein, 201 aa, Unknown
  Obtained from environmental sample
  misc_feature (1)..(201): Xaa is any amino acid
MIVGMMVNMLFMMNSMNMTSFVDDHQTDFIQEMLVSPVSRYSLVIGKIFGSMFGAILSLAGTLIVGLIMSITLNAGQLLLILALSPLMCLSGGALAMILIGLIRNKTAANMAVSLITLPQMFLSGAIIPINNSSGALFVISRMLPMTYCLDLVRAVVYAGTLEYNSVVMFNPLINFAVIAALTVLCLIIGTFCFARAEKNR

SEQ ID NO: 19399 - DNA, 729 bp, Unknown
  Obtained from environmental sample
  misc_feature (1)..(729): n is a, c, g, or t
ttgacccccatctcaatgaacgtattggggaacgtagtccttacccccgtcgcgttttttgagttgagcgccgggggaatgttgggttccggctggatcaccaacttgtttggttctgagatccacggtatcggccttaaccgtcccaatgccaatggccgtacttcagttgacggttccgcttttgacgggttttttgggggagggcatttgggcggcgcggtgcagtttgatttggcggcgcttattcccggcgaatggaatcatgtggttttccgttcgtaccacgaaatcggatacaaaatgtacagccgcgccgaaaaaggcgaaccgtggttttttgaaaatgataatggcgaaaatcaaaacggctggaactattacgccagttatcttgccggttaccgtatgccgatttttctggatactgtcgccctgctcgccgagattgaaaaatacctgtacaacacgccgggcggcgatcaatggggggattctctggggcggtggacatttggcctgctgacgaattttacaatctccaaaagattcagctgcgtgctgttcacgcagtttagaaccctgcgtaattacaccaattatgcctacggtgacaaaagcgatcttttttaccggtaccggaatttggactttggcaatccccgaaccttctcattttatcgcaccgttttggtattgaattaccgtctgggaacaaacggcggctaa

SEQ ID NO: 19400 - protein, 242 aa, Unknown
  Obtained from environmental sample
  misc_feature (1)..(242): Xaa is any amino acid
MTPISMNVLGNVVLTPVAFFELSAGGMLGSGWITNLFGSEIHGIGLNRPNANGRTSVDGSAFDGFFGGGHLGGAVQFDLAALIPGEWNHVVFRSYHEIGYKMYSRAEKGEPWFFENDNGENQNGWNYYASYLAGYRMPIFLDTVALLAEIEKYLYNTPGGDQWGDSLGRWTFGLLTNFTISKRFSCVLFTQFRTLRNYTNYAYGDKSDLFYRYRNLDFGNPRTFSFYRTVLVLNYRLGTNGG

SEQ ID NO: 19401 - DNA, 933 bp, Unknown
  Obtained from environmental sample
  misc_feature (1)..(933): n is a, c, g, or t
atgacgccatgctggacgcggaaaagcatgacggcgtttctgggagccgccctttttgatccgtatattgccaaagtacccgttatgatcgacagctcccgctggaatgtcattgaagcgggcctgaagcgcttacaggggaaggggctggtcaattcaataaacctgaaggacggcgaagcggaatttctgcgccgggcggctctggtcagacgctacggcgcggcggtggtggtgatgctcattgatgagcaggggcaggcggtcagttatgagcggaaaattgaaatagcgggacgcgcttaccgtctgctggttgaaagcggttttccgcctgaaaatatcgtgtttgatcccaacgtactcgctgtcgcaaccggaatcggcgaaagtgattcctgcgcgattgatttcatccgcgcctgcgcgtggattcgggacaactgcccccgcgttcagatttccggcggcatttcaaacctttcgtacagtttcaggggaaacaatgccgtgcgcgaagccatgcacagcgtttttcttttccatgccggagcggccggcctgactatggccattgtgaatccggcggcgctcattgcgtataacgacatcgaagaaaatttccgcaatgccattgaagatgtcattcttaaccgcagcccgggcgcggcggaccgcctcattaaccttgccgaaaaaaaaaactccctgacatcccccactccccataactctccatcagcggcaggctggcggaacgaatccgccgaatcccgcatcacttatgcgctggtaaaaggcattgacagttttattgagacggatgtactggaactcatggagaacaagggaggctcaaccggcaggacagcgcttggaaatgttgaaggctcgctgatggacggcatgaaaaaaagtgggaaatcgctttga

SEQ ID NO: 19402 - protein, 310 aa, Unknown
  Obtained from environmental sample
  DOMAIN (6)...(167): Pterin binding enzyme
  misc_feature (1)..(310): Xaa is any amino acid
MTPCWTRKSMTAFLGAALFDPYIAKVPVMIDSSRWNVIEAGLKRLQGKGLVNSINLKDGEAEFLRRAALVRRYGAAVVVMLIDEQGQAVSYERKIEIAGRAYRLLVESGFPPENIVFDPNVLAVATGIGESDSCAIDFIRACAWIRDNCPRVQISGGISNLSYSFRGNNAVREAMHSVFLFHAGAAGLTMAIVNPAALIAYNDIEENFRNAIEDVILNRSPGAADRLINLAEKKNSLTSPTPHNSPSAAGWRNESAESRITYALVKGIDSFIETDVLELMENKGGSTGRTALGNVEGSLMDGMKKSGKSL

SEQ ID NO: 19403 - DNA, 708 bp, Unknown
  Obtained from environmental sample
  misc_feature (1)..(708): n is a, c, g, or t
atgaaaaagaagattgtcttggcctattcaggcggcctggatacgacagtgattatcccctggcttaaagaaaaccatgattgtgaggttatcgcggtctgtgtcgatctgggtcaggaagctgactggaagaccatcaagaagcgggcgctggatacaggggcttcttcctgtacgatagtggacgtaaaacaggaatacgttgaaaactatgtatggccagcccttaaggcaaacgccctttacgaggataagtacctgctgggtacttctaccgcgaggccgttaatcgccaaaatattggtggaacaggccaggaaggaaaaggcccgcataatcgcccacggcgcgaccggcaagggcaacgatcaggttcgttttgaccttgggatcatggccctggggcccgagatggaaatcatcgccccctggcgcacatggaacatcaaaagcagggaagaagagatccgctatctggaagaacggaagatccccgtgccaatgaaaaagactgattcctactccagagacgacaacctctggcacatctcccatgaggggctggaacttgaagaccccgctaacgaaccggaatatgcccgcatgttgaaaattacgactccgccggaaaaagcgccggcaaagcctgagtacgtggaaattgaatttgagcagggtatccccgtttcagtgacggcaaaaaaatga

SEQ ID NO: 19404 - protein, 235 aa, Unknown
  Obtained from environmental sample
  DOMAIN (6)...(235): Arginosuccinate synthase
  misc_feature (1)..(235): Xaa is any amino acid
MKKKIVLAYSGGLDTTVIIPWLKENHDCEVIAVCVDLGQEADWKTIKKRALDTGASSCTIVDVKQEYVENYVWPALKANALYEDKYLLGTSTARPLIAKILVEQARKEKARIIAHGATGKGNDQVRFDLGIMALGPEMEIIAPWRTWNIKSREEEIRYLEERKIPVPMKKTDSYSRDDNLWHISHEGLELEDPANEPEYARMLKITTPPEKAPAKPEYVEIEFEQGIPVSVTAKK

SEQ ID NO: 19405 - DNA, 807 bp, Unknown
  Obtained from environmental sample
  misc_feature (1)..(807): n is a, c, g, or t
atggtgcgggagttcgcggaagaaagcgtgctccccgaaaacaggaattacctgtaccaccatttcagggacaactgttccacccgcatccgcgacattatcgatctggcaaccgacgggcaatttaagaagcggttgaaaaatgagccggggcggtttactttgcgccagcacgtcaggcggcatacgtggttttcgccgtttgccgactggcttctttcctttttgatgggccgcaacattgacacgcccaccaccgtctgggaagagatgtttctgccttccgaagtggcaaggcacattcaggattttcaatataccaattctgtcggcgttcagtgcccgttggtgtcaagcatggaagttatcaatacggcgcggggccggccccccgtactggacgttccccgcctgcagtggcccagggaacttgccttcagccttgttttggccgccttcttgggttttttgttttacattcagtccaaatccaccgctatggggcaggtgccgctgggaatatttcactgcctggcgggggtaattttcggcgggtcgggtttggcgttgttctttatgagcaatttcactgaacatgactatacgttccataacgcanacctgctttttggaaaccccttgctcttgctggcaatcccctgcggcatacgttacgcgtctgcaataaattacaacaggcggctaaagtcggaagttatgctcagggtgctgtggtttttgaccgccctgggggttatagcgtcgatgcttataaactttcgcctggtttccgccagcagaacttaa

SEQ ID NO: 19406 - protein, 268 aa, Unknown
  Obtained from environmental sample
  misc_feature (1)..(268): Xaa is any amino acid
MVREFAEESVLPENRNYLYHHFRDNCSTRIRDIIDLATDGQFKKRLKNEPGRFTLRQHVRRHTWFSPFADWLLSFLMGRNIDTPTTVWEEMFLPSEVARHIQDFQYTNSVGVQCPLVSSMEVINTARGRPPVLDVPRLQWPRELAFSLVLAAFLGFLFYIQSKSTAMGQVPLGIFHCLAGVIFGGSGLALFFMSNFTEHDYTFHNAXLLFGNPLLLLAIPCGIRYASAINYNRRLKSEVMLRVLWFLTALGVIASMLINFRLVSASRT

SEQ ID NO: 19407 - DNA, 645 bp, Unknown
  Obtained from environmental sample
  misc_feature (1)..(645): n is a, c, g, or t
gtgcagcaggccatgctgaaaattttggagggcaccgtggccggcgtcccccccaagggcgggcgcaagcatccggagcagagcctcatccaaataaacacgagggatatactcttcatctgcggcggcgcgtttgaggggcttgacaagataattgaggcgaggatagaccagagccgtatgggcttcaacgccgaggttaggagcaagagtcagaagaagataggcgatatactgcgcaaagtcgagccggacgatctaatttctttcggcctgataccggagatcataggccgtctgcctgtggtgatgggcctcgatcagttggacgaagattcgttgctgcgcatcctcacggagccgaagaacgcgcttgtcaagcagtaccggaagctctttgacatggagggtgtgaagctgacgttcgagaaggaggcgcttaaagagacagtggacaccgcggtgcgtaagaagaccggcgccagagggcttcgcaacgtgcttgagtcgtgcttattgccggtgatgttcgagttgccgtcgcgtgacgacgtattggaggtagtggtgactaaagaatccgttgtgaataaaacgccgccggagtatgtgcttaaggacggggaggataagaagagcgcctga

SEQ ID NO: 19408 - protein, 214 aa, Unknown
  Obtained from environmental sample
  DOMAIN (1)...(103): ATPase family associated with various cellular activities (AAA)
  misc_feature (1)..(214): Xaa is any amino acid
MQQAMLKILEGTVAGVPPKGGRKHPEQSLIQINTRDILFICGGAFEGLDKIIEARIDQSRMGFNAEVRSKSQKKIGDILRKVEPDDLISFGLIPEIIGRLPVVMGLDQLDEDSLLRILTEPKNALVKQYRKLFDMEGVKLTFEKEALKETVDTAVRKKTGARGLRNVLESCLLPVMFELPSRDDVLEVVVTKESVVNKTPPEYVLKDGEDKKSA

SEQ ID NO: 19409 - DNA, 792 bp, Unknown
  Obtained from environmental sample
  misc_feature (1)..(792): n is a, c, g, or t
atgagcgaaaacgatctcgccaaactgcaggattccagaaactgctatgccgatatgccgctcgtaaactacaccagccagtacggtcttgcctgtttgnagggactcaaagcgcttccgcaaaaagacggagggctctctctttttcgtcctgacagaaatgcggcgcgtttttaccgttctatggaggggctttgcatgccccccttcccggaaaaaatttttctggaagcgtgcatagaaaccgtaaaaagaaacgcaaaacttggtttttatcctaaatacaacaaggactgggaaaaggactcgtttatatcggcggactccgtttatgtaaggccgtttacaatggcggaaggcggcataggggtaaatctgtcctcaaaaccgtgggtgtgcgtgattaatactcctgtaagcgcgtacttttcgtcaggcaattccgacgcggttatctccgacagaatccgcgcgacgccgaacggcacaggctggataaaagcctgctccaactatgtaatttcggctctcgcaaaagccgaagcccataaagccggcttcatggaatgtgtgtttctcgacgcgactcaccgcaagtatatggaagaaggttcgtcctgtaacatctttttttacttaaagtcaggcgagcttgtaacgcccgagcttggcgacacaatcctgcccggcattacccgcgcgagcataatagagcttgcccgtgacaagggcgtaaaagtgtccgaaagacaaatctcgatagacgaggttttgccgctcggccgattctga

SEQ ID NO: 19410 - protein, 263 aa, Unknown
  Obtained from environmental sample
  DOMAIN (3)...(263): Aminotransferase class IV
  misc_feature (1)..(263): Xaa is any amino acid
MSENDLAKLQDSRNCYADMPLVNYTSQYGLACLXGLKALPQKDGGLSLFRPDRNAARFYRSMEGLCMPPFPEKIFLEACIETVKRNAKLGFYPKYNKDWEKDSFISADSVYVRPFTMAEGGIGVNLSSKPWVCVINTPVSAYFSSGNSDAVISDRIRATPNGTGWIKACSNYVISALAKAEAHKAGFMECVFLDATHRKYMEEGSSCNIFFYLKSGELVTPELGDTILPGITRASIIELARDKGVKVSERQISIDEVLPLGRF

SEQ ID NO: 19411 - DNA, 354 bp, Unknown
  Obtained from environmental sample
  misc_feature (1)..(354): n is a, c, g, or t
gtgtccataaaaatcgtgaggtttttttgctgttccaggacagagcgggccgcggacatgtacgcctgcttgtcggcctgggcgcggggcgcctgtaccgccggcccccgcgaacggttgagtactcggtattgtatcatggtcgcgtcgatgagccgggccatttcaccgcccagggcgtccacttcccggacaagattgcccttggaaagcccgcccaccgcgggattgcaggagagcgcgccgatccggtccgggttttgggtgatgaggagtgtaacaaaaccaagccggctgaccgccagagacgcctcgattcccgcgtgcccgccgcctataacaatgcaatcgtag

SEQ ID NO: 19412 - protein, 117 aa, Unknown
  Obtained from environmental sample
  misc_feature (1)..(117): Xaa is any amino acid
MSIKIVRFFCCSRTERAADMYACLSAWARGACTAGPRERLSTRYCIMVASMSRAISPPRASTSRTRLPLESPPTAGLQESAPIRSGFWVMRSVTKPSRLTARDASIPACPPPITMQS

SEQ ID NO: 19413 - DNA, 744 bp, Unknown
  Obtained from environmental sample
  misc_feature (1)..(744): n is a, c, g, or t
ttggcgttttcctctaaaggaaaaatagccgttacaaatccatacaagagcatttttttcccattgaatgtccttactttttcacggtttctttatgatgataacaacagtccgctgggcgtagtctgtcttgatttcgatttaaaaactatttccagtcttattcaaaatttagacttttctgaaaacagttacgagtttttacttgataataaactggaaataatttcccatcccttataccaggctattagcgatcaaaagaaaaatattgaaaacgggttattggagataatgccggatttggctgaaggacaaaatatcaacgcatacaaaatgaaaaattacatgaacgaagattccgttgtttttgtcagagggataagccacggatggcatttggggattgtaattcctgtaaaagaatattacgcaaatataataaagaccgcggtattccttataatagggggaattcttctggcgttattgctgtgcatcatgctttacaatatttacagcgcaaaatcggaggcggataaaaagacccggcaaaaaagcaacttccttgcgacaatgagccacgaaatccgcacaccattaaacgcgattctgggcatgaccganattcaaatgcaaagttccgcgcatccgccggcaacaagcgacgcctttataaaaattaacaattcgggcaatttgcttttaaacattatcaacgacattcttgatctttcaaaatag

SEQ ID NO: 19414 - protein, 247 aa, Unknown
  Obtained from environmental sample
  DOMAIN (185)...(246): His Kinase A (phosphoacceptor) domain
  misc_feature (1)..(247): Xaa is any amino acid
MAFSSKGKIAVTNPYKSIFFPLNVLTFSRFLYDDNNSPLGVVCLDFDLKTISSLIQNLDFSENSYEFLLDNKLEIISHPLYQAISDQKKNIENGLLEIMPDLAEGQNINAYKMKNYMNEDSVVFVRGISHGWHLGIVIPVKEYYANIIKTAVFLIIGGILLALLLCIMLYNIYSAKSEADKKTRQKSNFLATMSHEIRTPLNAILGMTXIQMQSSAHPPATSDAFIKINNSGNLLLNIINDILDLSK

SEQ ID NO: 19415 - DNA, 783 bp, Unknown
  Obtained from environmental sample
  misc_feature (1)..(783): n is a, c, g, or t
atgcagacgaatgtggtgatgctgctcgtcaatgacgaaaaaatgatagccatctatgaaggcggcgttgccgccaatctgaaagcgggcatgacactgtgctttgcccacgggttcaatatccgttacgggcaaattgttccgccaaaagatgttaatgttattatgatcgcgcccaaaggccccggtcacacggtgcgaagccaatatcaggaaaacaaaggcgttccctgcctgatcgccgtggaaaataacgcgaccggcaacgccaaagaaatcgcccttgcctacgcttcggctattggcggcggaaggggcggcattctggaaaccacgttcaccgaggaaaccgagacggacctgttcggcgaacaatgcgttttgtgcggcggcgtttcggcgctgatgaaagccggttttgaaacgctggtaaacgcgggctatcagccggaaagcgcgtattttgaatgtgtccatgaaatgaaactgattatcgacctggttatcaaaggcggactgtcctttatgcgttattcgatcagcgacaccgccgaatacggcgattattccgtgggcgaccggatcatcacgcagtccaccaaagatgaaatgaagaaggtgcttgccgaaattaaggacggttcctttgccaagcggtggctggatgaaaacgctcagggacggcctaccttcaccaaacggcgcaatgaagaaagcgaattgcttcttgagaaagtcggggccgaactgcgcaagaacatgagttgggctgaaaaaaagtaa

SEQ ID NO: 19416 - protein, 260 aa, Unknown
  Obtained from environmental sample
  DOMAIN (2)...(107): Acetohydroxy acid isomeroreductase, catalytic domain
  misc_feature (1)..(260): Xaa is any amino acid
MQTNVVMLLVNDEKMIAIYEGGVAANLKAGMTLCFAHGFNIRYGQIVPPKDVNVIMIAPKGPGHTVRSQYQENKGVPCLIAVENNATGNAKEIALAYASAIGGGRGGILETTFTEETETDLFGEQCVLCGGVSALMKAGFETLVNAGYQPESAYFECVHEMKLIIDLVIKGGLSFMRYSISDTAEYGDYSVGDRIITQSTKDEMKKVLAEIKDGSFAKRWLDENAQGRPTFTKRRNEESELLLEKVGAELRKNMSWAEKK

SEQ ID NO: 19417 - DNA, 303 bp, Unknown
  Obtained from environmental sample
  misc_feature (1)..(303): n is a, c, g, or t
atggttgagggatacntgaaaggaaggcccactctgcgcgttgtgttcgtactcatagatgcagaggtggggcccacgccattggacatccagatgatagactggctgcgggctatggaaatcccatacagggccgtggccaccaaggcggacaaggtaaagccctcaaaggcgctgttccaaagaaaggacgttgccgcaaaacttgggctgcagccgggcgacgtcgcttggctttccagcacaaagggtacgggcatagccgatttccgcagggaagttgccgatatgctgaacctgtaa

SEQ ID NO: 19418 - protein, 100 aa, Unknown
  Obtained from environmental sample
  misc_feature (1)..(100): Xaa is any amino acid
MVEGYXKGRPTLRVVFVLIDAEVGPTPLDIQMIDWLRAMEIPYRAVATKADKVKPSKALFQRKDVAAKLGLQPGDVAWLSSTKGTGIADFRREVADMLNL

SEQ ID NO: 19419 - DNA, 840 bp, Unknown
  Obtained from environmental sample
  misc_feature (1)..(840): n is a, c, g, or t
gtggtatttatcatcagtatgataatatgccgaagcgaaaaaaaagggaaaataatcaaactcgccgttatttttatagcctttatagcaatcggaatcttcggcaataaagcgatggcgaaaataaaaggcaatccccagtcaacccaaaccttgacgattacccaacatgccgatataaccagcgatgtaaatttccgcaaaggcccttctacaaacgatgcagtcatcaggcagttaatgaagggcgacagcgtaacattgacaggcgaagtttcaggtggctggacgcagataacccacaacggcgaaacagggtgggtaagttcggagtatttgaaagtatggggagggggacaagcggcggctccgcaaacgacagcgcagacacaaacacaaccgcaaaaacaaagcgcggaagcgcagcaagcagtggcgcaaactgaaaggaaagaggaagtgccgcaagcaacggcgcagcaaccagcgggtattacagaggaaattgctgattgggcaagggggaattatacggccagtattgtcgtcaatgcaaattccataacaggccgcaatatcaacataacgggagcgcggacagtcattcaaaagccgttagcgggacaccccaatttaaaatgggcttacgtttatgtcggcgataaaaaatacggcgtcgtatgggacagaacaacgtatacccgttcaatgcatgacggaattgaactcggcataagaagcgaggcgcggtcggcgttcgatttttacggcggttcagacaaagacagtatttttgcggatattgcccgtgaagcacccgcgataaaaggtgttaagtga

SEQ ID NO: 19420 - protein, 279 aa, Unknown
  Obtained from environmental sample
  DOMAIN (60)...(117): Bacterial SH3 domain
  misc_feature (1)..(279): Xaa is any amino acid
MVFIISMIICRSEKKGKIIKLAVIFIAFIAIGIFGNKAMAKIKGNPQSTQTLTITQHADITSDVNFRKGPSTNDAVIRQLMKGDSVTLTGEVSGGWTQITHNGETGWVSSEYLKVWGGGQAAAPQTTAQTQTQPQKQSAEAQQAVAQTERKEEVPQATAQQPAGITEEIADWARGNYTASIVVNANSITGRNINITGARTVIQKPLAGHPNLKWAYVYVGDKKYGVVWDRTTYTRSMHDGIELGIRSEARSAFDFYGGSDKDSIFADIAREAPAIKGVK

SEQ ID NO: 19421 - DNA, 897 bp, Unknown
  Obtained from environmental sample
  misc_feature (1)..(897): n is a, c, g, or t
atgatagattggccgagatctgatcacataaataaccttgttacattcgggaaaaacaacaattgtttttattcatggattgagaaagacggtattgaagaacactctgtaaatgtttgggaagacgcttttataaaaccgcttggcggaattgatcctgaaacaagaaaattttttgaacgaataaaacagcgtttacaagcaatgcgctatgccgcttctttttcagaacttcgcaggcagtattttatttttcgtgaacaatttatggatatggaaaattgcggcgaggaagctgatcttgtactatcccgctgtatcgcagaactgatgacgcttgtacagcttgaaaaagatttccctgatgcgcccgcaattgatcctttttctttttttaccgaacatttaagcgaaacctactaccttgcccagactaaaacaagcggagtcgcaatccttccgtacaaagcggcggcggcggctccgtttgattgtcatataatcctcggttcagatcaggaatatttatcttcggtttatactcatcttgattttctgccgaaaaagaaacgggaacagcttagcattcctgacgaggacgcatcggaggtttttatcaacttacataaatacaattctataaagaattccgccttcttttgcagtgaacagactttttcaggtttcacaataccgcattcaaaaacaggctcaccttccgagccgaaggaccgttatgcgacagatccttctttttgtgataaattttctctcgatcattacagtatagaaaactcattttgctcttcactttctgtttccggcactgagcctggtcaattgcataaaaatcagatgaactggatttacagaatggaaaaaccgcaggaaacatga

SEQ ID NO: 19422 - protein, 298 aa, Unknown
  Obtained from environmental sample
  misc_feature (1)..(298): Xaa is any amino acid
MIDWPRSDHINNLVTFGKNNNCFYSWIEKDGIEEHSVNVWEDAFIKPLGGIDPETRKFFERIKQRLQAMRYAASFSELRRQYFIFREQFMDMENCGEEADLVLSRCIAELMTLVQLEKDFPDAPAIDPFSFFTEHLSETYYLAQTKTSGVAILPYKAAAAAPFDCHIILGSDQEYLSSVYTHLDFLPKKKREQLSIPDEDASEVFINLHKYNSIKNSAFFCSEQTFSGFTIPHSKTGSPSEPKDRYATDPSFCDKFSLDHYSIENSFCSSLSVSGTEPGQLHKNQMNWIYRMEKPQET

SEQ ID NO: 19423 - DNA, 798 bp, Unknown
  Obtained from environmental sample
  misc_feature (1)..(798): n is a, c, g, or t
gtggatcaagatcggccgagagcatccgcgcggattgatgatataaagaatccttatgaaaaaggagggtttatcctttcccagcttaaacagtattacagctttctggatattgtcgccgataactatgattcgtgccagtacgcggtgcggcgttatgtgttttccagcgccctgcgttgtttccaggacctgctgggagatggagtaaaccagtacgatcccggtctgctgctgttggtagggcgctgttacaaaggcgtaggcgattacgatgaggcgctgaaataccttgagcaggcggtgcgtttcagacgagaggacggcgagacactggctgagttggcggatgtaaacgccctgctcggcgaggccagtacggcaaaggccctgttccgcgaagcgtttttcctgaaccccgaaaaaattgatctgcgggcgatggaatcggaaatgataatccggctgagggacaggctggcccaggagaaaagttaccgggaagaagaactgcgcgaatggataccggtatacggcaggctgtggggggtattttcgatcaaacgggagcttaagcccattgaattcggcaggctcaagcagtcaatctttaccctggaaacagagtgccggggcaatccgagacgaagcgccctgcttaaaccgcggctgattaaccggtacttttggctgatagattattatgaaaataaacgggaagaccccgatcttatcgaagaggtcttgctgaaaataaaagttaccgatccggagatttatgaacggtatataagatga

SEQ ID NO: 19424 - protein, 265 aa, Unknown
  Obtained from environmental sample
  DOMAIN (75)...(108): Tetratricopeptide repeat
  misc_feature (1)..(265): Xaa is any amino acid
MDQDRPRASARIDDIKNPYEKGGFILSQLKQYYSFLDIVADNYDSCQYAVRRYVFSSALRCFQDLLGDGVNQYDPGLLLLVGRCYKGVGDYDEALKYLEQAVRFRREDGETLAELADVNALLGEASTAKALFREAFFLNPEKIDLRAMESEMIIRLRDRLAQEKSYREEELREWIPVYGRLWGVFSIKRELKPIEFGRLKQSIFTLETECRGNPRRSALLKPRLINRYFWLIDYYENKREDPDLIEEVLLKIKVTDPEIYERYIR

SEQ ID NO: 19425 - DNA, 909 bp, Unknown
  Obtained from environmental sample
  misc_feature (1)..(909): n is a, c, g, or t
ttgatatgttatgattgtttggaggtttctatgtctgtgtcactaaaagggcggtctctgcttacatggctggattattcggctgaagaaattcaatatcttttggatctttcaaaaaaagttaaagccgagagcaagaacggcgttgtatcccagcgttttacaggtaaaacacttgccatgatttttgagaaacgctccacacggacgcgctgctcttttgaaacggcctttggcgaagaaggtgggcatcctgtctttctctcaaccgcggacatccaactggggggcaaagaatcccttgaggacactgcgcgggtgcttggcaggatgttcagcgcgattcagttcaggggatacaaacagaaaacggttgagacgctggccaggtattcaggcgtgcctgtgtacaacggccttacggacgatttccatcctacccaggctttggcggacataatgactcttgaggaaaactttggtccggtaaagggaaaaatcctttgttatgtaggagacggacgcaacaatgtggctaactccctcatggtgattgccgccaagttggggctgcattttaccattgtgacgccgcccgaacttaaccccgaccctgttctgcgggaaaagtgcgctcctctggcctccgcttccggctcgaagataattgtcagcaatgacgttaacgccgtttccggcgcggacgcaatatacaccgacgtgtgggtatctatgggagaggataacaaaagagaggaacgtgttaagctcctgtccccctatcaggtgaaccaggccttaatggaaataaaccatcggaaggactccgttttcctccactgtcttcccgctatcaagggcgaggaagtaacatcactcgtgccgctcgtgccgaatctgatccaatga

SEQ ID NO: 19426 - protein, 302 aa, Unknown
  Obtained from environmental sample
  DOMAIN (163)...(301): Aspartate/ornithine carbamoyltransferase, Asp/Orn binding domain
  misc_feature (1)..(302): Xaa is any amino acid
MICYDCLEVSMSVSLKGRSLLTWLDYSAEEIQYLLDLSKKVKAESKNGVVSQRFTGKTLAMIFEKRSTRTRCSFETAFGEEGGHPVFLSTADIQLGGKESLEDTARVLGRMFSAIQFRGYKQKTVETLARYSGVPVYNGLTDDFHPTQALADIMTLEENFGPVKGKILCYVGDGRNNVANSLMVIAAKLGLHFTIVTPPELNPDPVLREKCAPLASASGSKIIVSNDVNAVSGADAIYTDVWVSMGEDNKREERVKLLSPYQVNQALMEINHRKDSVFLHCLPAIKGEEVTSLVPLVPNLIQ

SEQ ID NO: 19427 - DNA, 306 bp, Unknown
  Obtained from environmental sample
  misc_feature (1)..(306): n is a, c, g, or t
atggattgggattttcccggccttgaaagcgccgttaaggttgacgggaagataaacgatccttcaacagttgataagggctggtctgtggaactggcgtttccctgggagggcttcagaacactgcagccaaacaaagcctggccgccaaaggcaggtgacagcctccgcttccaatgcttccgctttgaagctctacgctatcacggcaaaaccgtcagcgaaagcgtggggtgggcccttaacaaacacggcgcttacgactcgcatatccctgagaaatttgcgttcctaaaatttgtttag

SEQ ID NO: 19428 - protein, 101 aa, Unknown
  Obtained from environmental sample
  misc_feature (1)..(101): Xaa is any amino acid
MDWDFPGLESAVKVDGKINDPSTVDKGWSVELAFPWEGFRTLQPNKAWPPKAGDSLRFQCFRFEALRYHGKTVSESVGWALNKHGAYDSHIPEKFAFLKFV

SEQ ID NO: 19429 - DNA, 630 bp, Unknown
  Obtained from environmental sample
  misc_feature (1)..(630): n is a, c, g, or t
atgattgcgcagatcatggttaagtcgacttttgcaaagtattccaaagtgccatgttcaaagaggataaccggccaggattccgcggcgctgttattaaaggcaaacaatatccacaatgttaaaatagaagcggttggcggctctcttaccgaccactatgacccatcgtcaaaagtagtacggctctcccagccggtcttcggacaaaattccattgccgcagtaggcgttgccgcgcatgaaacagggcatgccatccagcacgcgcgcggatacgggcctttgttcctgcgtagcactcttgttccggtagcgaacatcggttcaaggatgggccccttgcttgcgatggcgggattaatcatgtccttgccaatacttctgaatatagggatcattttctttgctggggccgtgcttttttatgttatcaccctgccggttgaatttaacgcctctgcaagggctatcgccatactaaggtccaacaacgtacttacaaaggatgagctaaacagcgtaaaaaaagttctgacagcggcggccatgacttatgtagcttcggcccttactgccatgatgagccttctaaggcttatactgctgtcaaggagcaggcggcgttag

SEQ ID NO: 19430 - protein, 209 aa, Unknown
  Obtained from environmental sample
  DOMAIN (1)...(208): Putative neutral zinc metallopeptidase
  misc_feature (1)..(209): Xaa is any amino acid
MIAQIMVKSTFAKYSKVPCSKRITGQDSAALLLKANNIHNVKIEAVGGSLTDHYDPSSKVVRLSQPVFGQNSIAAVGVAAHETGHAIQHARGYGPLFLRSTLVPVANIGSRMGPLLAMAGLIMSLPILLNIGIIFFAGAVLFYVITLPVEFNASARAIAILRSNNVLTKDELNSVKKVLTAAAMTYVASALTAMMSLLRLILLSRSRRR

SEQ ID NO: 19431 - DNA, 564 bp, Unknown
  Obtained from environmental sample
  misc_feature (1)..(564): n is a, c, g, or t
atgaaaaagctaaaagaaatatttatggctattcttgttattgtcgtggtaggcatattattttattttgtatatcagaacgtaaccacaaaaacacacagggaattagcaaagcgcattgcggaattaagtcctaaaggcggccctcctgaaactattgacggtttaagaaaggcaattgcgttatacgaaaatcaaatcgaaaggaacgtaagggaaggcgctcaaaccggagtttactggaaaatactggctataaggcttgcggataaaaagatgcacaatgacgcgcttgacgcgtttgaaagggcgatttattttaataccgaagacccgaccctttactatttaaccggcgtatccgcagcgtcagccgcgaaatcgcttgtagggttttcaacgggagaacaaaaagagaaagacagattgtataaactttccgagaattcatatttacgcgcgatggaacttgacattacgtatacaaagcccagtgtacggcatagcaatactgtatattttgagctgacaggccgcaggacgctcggccgatctgatccatga

SEQ ID NO: 19432 - protein, 187 aa, Unknown
  Obtained from environmental sample
  SIGNAL (1)...(27)
  misc_feature (1)..(187): Xaa is any amino acid
MKKLKEIFMAILVIVVVGILFYFVYQNVTTKTHRELAKRIAELSPKGGPPETIDGLRKAIALYENQIERNVREGAQTGVYWKILAIRLADKKMHNDALDAFERAIYFNTEDPTLYYLTGVSAASAAKSLVGFSTGEQKEKDRLYKLSENSYLRAMELDITYTKPSVRHSNTVYFELTGRRTLGRSDP

SEQ ID NO: 19433 - DNA, 519 bp, Unknown
  Obtained from environmental sample
  misc_feature (1)..(519): n is a, c, g, or t
atgtttgaaacacttgctgaaatgtttgggtatacgtttctggtcagggcctttaccgtcggcatcctcgtctcaatttgcgccgcgctgttgggggtaagcctcgtcctaaagcgctattcaatgataggcgccggcctttccaatgtgggcttcggctctttggcaatcgcaaccgggcttggcatggccccgctggccgtctcaatccccgtggttatcgcggcggcgttcctcctgctccgcctgagcgagaacagcaagataaagggcgacgccgcggtggcccttatttccaccagttcgcttgcaattggagtcatcgtcatatcgctgaccatccgcatgaacatcgacgtatgcaattaccctgtcggaaagcatctggcgatgagcaaaaacgacgtatacctgagcataacacttttcataaccgtcngggtctttttaaactggtttacaacaaaatgntttgccatcccccttgaacgaaccgtttgcccaaccccggggggataa

SEQ ID NO: 19434 - protein, 172 aa, Unknown
  Obtained from environmental sample
  DOMAIN (10)...(172): ABC 3 transport family
  misc_feature (1)..(172): Xaa is any amino acid
MFETLAEMFGYTFLVRAFTVGILVSICAALLGVSLVLKRYSMIGAGLSNVGFGSLAIATGLGMAPLAVSIPVVIAAAFLLLRLSENSKIKGDAAVALISTSSLAIGVIVISLTIRMNIDVCNYPVGKHLAMSKNDVYLSITLFITVXVFLNWFTTKXFAIPLERTVCPTPGG

SEQ ID NO: 19435 - DNA, 510 bp, Unknown
  Obtained from environmental sample
  misc_feature (1)..(510): n is a, c, g, or t
atggtatggttttccagggccccatacagcgacgagctcagcgcggcatgccaggtgttaaacgaatatcttgaaataaaactggatgatgagatacgtgaaaaactcgggggcgtctattcgatttcctcaggcgtttccgtctcgcctgttccccagggcgagctttccatgcaggtatactttagctgcgatccaaaacgggcgcgggagctccaaacagcggttatcgcggtattgaatcaggcagcgggcagtattgaccgcgacacttttgcgaaggccgtggaagccttaaagaaagaatgggaagtctcgattcagagcaactcctacatcgcgcagagctatgcaaattcgtcagtactgcttggccttccgctgtcgcggctggacaggcggccaaaattgtttgacgcggttacccatgctgatattcagagggtatgcgggcagctattacggagcaacggcccggcgattgtggtgcttatgccggaaaaaaattag

SEQ ID NO: 19436 - protein, 169 aa, Unknown
  Obtained from environmental sample
  misc_feature (1)..(169): Xaa is any amino acid
MVWFSRAPYSDELSAACQVLNEYLEIKLDDEIREKLGGVYSISSGVSVSPVPQGELSMQVYFSCDPKRARELQTAVIAVLNQAAGSIDRDTFAKAVEALKKEWEVSIQSNSYIAQSYANSSVLLGLPLSRLDRRPKLFDAVTHADIQRVCGQLLRSNGPAIVVLMPEKN

SEQ ID NO: 19437 - DNA, 585 bp, Unknown
  Obtained from environmental sample
  misc_feature (1)..(585): n is a, c, g, or t
gtgtacgagaatcttcgttatgaatccggggttcacagggtgcagagggttcccgcgacggaagcgtcgggcaggatacacacttccgctgtaaccgtggcggtcttgccggaagccgacgagacggaaattgacataaagcaggaagaccttcgcattgacgtaatgcgcgcgggcggtcccggcgggcagtgcgttaacactacggattcagctgtgcgcataacgcacattcccacaggagttacggtacattgtcaggacgagaaaagccagataaaaaacaaagcaaaagctatgcgcatacttagggcgcgtatttacgagatggaagaagcaaaagccgccgcgcagagagccgaggcaagaaagagccaggtaggctcaggcgaccgctcccaaagaatcagaacctataattttccgcaaaatcgcctaacagatcatcgcatcaatcttacgctttataaacttgatattataatgcaaggagaaacatcggaactttttgacgcgcttaaactttccgcaaaggaagatttattgcaaagcagcgcgtcggatatgtccgcagatgaggaatag

SEQ ID NO: 19438 - protein, 194 aa, Unknown
  Obtained from environmental sample
  DOMAIN (37)...(150): Peptidyl-tRNA hydrolase domain
  misc_feature (1)..(194): Xaa is any amino acid
MYENLRYESGVHRVQRVPATEASGRIHTSAVTVAVLPEADETEIDIKQEDLRIDVMRAGGPGGQCVNTTDSAVRITHIPTGVTVHCQDEKSQIKNKAKAMRILRARIYEMEEAKAAAQRAEARKSQVGSGDRSQRIRTYNFPQNRLTDHRINLTLYKLDIIMQGETSELFDALKLSAKEDLLQSSASDMSADEE

SEQ ID NO: 19439 - DNA, 960 bp, Unknown
  Obtained from environmental sample
  misc_feature (1)..(960): n is a, c, g, or t
atggcgagaggatacatcgctttgcctgaacctgccgcgaaaagcccgccggaaagctcctgcggctttcccttgccgctttacgcccgcatcgatctttcaacaggaaaaaccgaagattttcccatatcagaagagtatttcaaaaagtttgtcggcgggaaaaccatagcggcaaagcttctgcttgatcttatgccgccgggccttgatccctttgatcccaatgcggtgatcatcatcaacaccgggccgcttaacggaaccggcgcgccgtcgtcaagccgctttaacatgacatttaaaaacgcgcttacaaacggaatcgcctcatcaaactgcggcgggaatttcggctttatgctgaaaagggccgggtacgacggccttattatttccggcaaggcttcttctccttcgcggattgaaattatcgacgggaaaatatcgatcctgtccgcagaagagctttggggcatggacaccgaaaaaacccaggaagagcttccggctcatcacggtaaactggtgataggccccgccggtgaaaacctggtacgttacgcgtcagccacatcgggcgagcgcgtggccgggcgctgcggcggcggcgcggtgtttggttcgaagaacttaaaagccctcagcgcctacggcacacgtcttccccgcctgcacaacccaaagaaattcaagcgcttcctgaaaaagtggattgcctttttacggaatcatcccatgacaggggatgctcttccccattacggctcaatggggcttatgaacaaggcgaacgcttcaaacgcgttgccgacccataatttcaaatacgggttttctgataccgccgacnaggtttcgggggaaactctggcggaaacctgtgtggtgcgcaactccggctgtgtgagctgcccgatacgctgcgagcgcagggttattaaggaaggcgtgaaataa

SEQ ID NO: 19440 - protein, 319 aa, Unknown
  Obtained from environmental sample
  DOMAIN (29)...(221): Aldehyde ferredoxin oxidoreductase, N-terminal domain
  misc_feature (1)..(319): Xaa is any amino acid
MARGYIALPEPAAKSPPESSCGFPLPLYARIDLSTGKTEDFPISEEYFKKFVGGKTIAAKLLLDLMPPGLDPFDPNAVIIINTGPLNGTGAPSSSRFNMTFKNALTNGIASSNCGGNFGFMLKRAGYDGLIISGKASSPSRIEIIDGKISILSAEELWGMDTEKTQEELPAHHGKLVIGPAGENLVRYASATSGERVAGRCGGGAVFGSKNLKALSAYGTRLPRLHNPKKFKRFLKKWIAFLRNHPMTGDALPHYGSMGLMNKANASNALPTHNFKYGFSDTADXVSGETLAETCVVRNSGCVSCPIRCERRVIKEGVK

SEQ ID NO: 19441 - DNA, 852 bp, Unknown
  Obtained from environmental sample
  misc_feature (1)..(852): n is a, c, g, or t
atgattgaatatctgatttcaaagggctgccgtattgatgaacaggataagagaggttatacgccattgtcctgggccgcatattgggttgaatacagcggatatgaggatactattattgccctgcttgataacggcgcagacccgaatattctcgacaatgacggaagaacagcgctccacacttacctcctaaaattgaagttgagtaaatatacaggaagaaaaccctggggaaatatgaagcctgaaacagttatacccgccttccttgccgcgggagcgattcccgcgctcaaagataaagaagggaattccgcccttagttttgttctttatatttcgaaagaatatcctgatatgcggatcttcagcgaccaaatgttaaaacataccgataccaacgaaataaaaacggctaaagcgaattcaaataaaaaaatcgcggaagacagaaaagatactattttatattccgattattttaaacccgctatgtggtttttgggaagcgccgtattaatcggcggcttaaacattggaatgcgcgagggagtatacaagggcagagattcagaaaactttatgggaccggtaaacagcgttatcacttttagcacgctcggtacatttttaggcggattaattgggtatagtacaggccgggacagagggttaggcgggattcttgatttattcttttggggagggcttggactaatcggcggaattgttataggcagccttcctcctgtacaggaagcttttcgggataatcccgtgttatactactcctcatcagctttactcgcccttcccggcacaatcttctttaagatctctcggcgataa

SEQ ID NO: 19442 - protein, 283 aa, Unknown
  Obtained from environmental sample
  DOMAIN (18)...(54): Ankyrin repeat
  misc_feature (1)..(283): Xaa is any amino acid
MIEYLISKGCRIDEQDKRGYTPLSWAAYWVEYSGYEDTIIALLDNGADPNILDNDGRTALHTYLLKLKLSKYTGRKPWGNMKPETVIPAFLAAGAIPALKDKEGNSALSFVLYISKEYPDMRIFSDQMLKHTDTNEIKTAKANSNKKIAEDRKDTILYSDYFKPAMWFLGSAVLIGGLNIGMREGVYKGRDSENFMGPVNSVITFSTLGTFLGGLIGYSTGRDRGLGGILDLFFWGGLGLIGGIVIGSLPPVQEAFRDNPVLYYSSSALLALPGTIFFKISRR

SEQ ID NO: 19443 - DNA, 945 bp, Unknown
  Obtained from environmental sample
  misc_feature (1)..(945): n is a, c, g, or t
ttgagaggtcaaatctgctgttcttccgtggcatttagccctgatggaaaacaggctatttccggctctggtgataacacaatcaaactatgggatgtaaataccggaacgaaaattaagacattttcaggtcatacaagttatattacttctgtagcgttcagccctaatggtaggcagattctttccggctcttatgaaggaataatcaaactttgggatataaataccggaaaagaaattaggactttttcaggacatacattaagggttaatgcattgttcagccctaatggacaacagattctttcccaatgctttgacaagataaaactttgggacgtaaacaccggtagagaaataaagtctttttctataaataatacctatattgattctgtagctttcagccctgacgggaggcaaatagttttcggagctaatagagacaatacaattaaactctgggacgtaaacaccgacagagaaataaaaacattttcaggtcatcaagttaatgttatttcaatagcgttcagccctgacggaaaacaaattctttctggggaatggttcagagcaatcaaactttgggatgtaaataccggtagggaaatcagaactttttctgatgatacaagtcaaatttcttccgtggcgttcagctttgacggtaagcaaataatttccagttcccccgatggctcaataaaactatgggacgcaaatacaggtaaagaaatcaaaacgtttttaggtcatactaattctgttaaatcaataaaatttagtcctgatggaaagcagatactttccggctctgatgacggcancatccgcctctgggacgtaaccactagcnaagaaatcgcccatttcatctccttttatgacggtgaatggataagtctcactcccgacggttactataattccttcgcctaa

SEQ ID NO: 19444 - protein, 314 aa, Unknown
  Obtained from environmental sample
  DOMAIN (119)...(157): WD domain, G-beta repeat
  misc_feature (1)..(314): Xaa is any amino acid
MRGQICCSSVAFSPDGKQAISGSGDNTIKLWDVNTGTKIKTFSGHTSYITSVAFSPNGRQILSGSYEGIIKLWDINTGKEIRTFSGHTLRVNALFSPNGQQILSQCFDKIKLWDVNTGREIKSFSINNTYIDSVAFSPDGRQIVFGANRDNTIKLWDVNTDREIKTFSGHQVNVISIAFSPDGKQILSGEWFRAIKLWDVNTGREIRTFSDDTSQISSVAFSFDGKQIISSSPDGSIKLWDANTGKEIKTFLGHTNSVKSIKFSPDGKQILSGSDDGXIRLWDVTTSXEIAHFISFYDGEWISLTPDGYYNSFA

SEQ ID NO: 19445 - DNA, 525 bp, Unknown
  Obtained from environmental sample
  misc_feature (1)..(525): n is a, c, g, or t
atgggctttcgaagattcgctgtaagttattttatgaaagggatactaagcgttatctgtaaaattgactgcaaggaatttaccgaagcattaaaaaacaacgagccaatgctggttatttttaatcatattaattttttggaagtgcctattcttgtagcgcacagttatccggtttatgtaacagggcttgttaaatcggagacatggaataacccgatattcgcgtttatttttaacacttacaaagctatcccaattgacagaagaggcgcgttcagcgagtctttcaagaaagtgctggacgcgataaaaagagggtattatatgtgcgtcgcgccagaaggcacaagaagtaaggacggcgttttaggaaaaggaaaaccaggaattattcagcttgctcttgaggcgggcgtgccgattcttcctgtcgcccatttcggcggagagaatgtttggaaaaacatccgccgtttaaaagaactccgttttgttttaaggcaggccgtcctttccgcataa

SEQ ID NO: 19446 - protein, 174 aa, Unknown
  Obtained from environmental sample
  DOMAIN (21)...(148): Acyltransferase
  misc_feature (1)..(174): Xaa is any amino acid
MGFRRFAVSYFMKGILSVICKIDCKEFTEALKNNEPMLVIFNHINFLEVPILVAHSYPVYVTGLVKSETWNNPIFAFIFNTYKAIPIDRRGAFSESFKKVLDAIKRGYYMCVAPEGTRSKDGVLGKGKPGIIQLALEAGVPILPVAHFGGENVWKNIRRLKELRFVLRQAVLSA

SEQ ID NO: 19447 - DNA, 777 bp, Unknown
  Obtained from environmental sample
  misc_feature (1)..(777): n is a, c, g, or t
ttgaaacgatccacgcgagccacgtttggcagagcttgccgttgcacgggcgtgagcgcgatgtctgcgccagcaaggccggcgccggcggttctgctgctgttgtgcgcttcggccttggccgccgatgcggccgagaccccttcccccatcgacaacttcttcctgacgccgcaaataggcactttgggcatcggcctgaacctcggttaccagttcaacgacatcttcaaggccaggatcaacggcaactatctggcgatgcgcaccaagggagagattgacgaggtgaattgcaatctggatgtcagcagttttaccctgggcgctcttgccgacgtgcatcccttcagcggcaacttccgcctgaccggcggcctgtactatgtgaacatgcaagcgaaggcgacggccgatctcaagggcgacaaagagtatgagataggcgaccacaaatatagggcttcgcaactgggaaacgcggaaggaaccgtgaaatggcagcgccttgcgccgtatgtgggtatcggcttaggccccggcgaagggcggaaggaaaattccccctgtcctccgccttccaacttcagcttcagcgcggacgtgggcgtgctgtttatcggcgatcccaatgtttcgatggagtttgcgaaccaaaaggtcaactctgccttgcgccgggacgtggacaaatacgaaagcgacgccaaaagcggcatcaagagctacctcccggtctatcctgtgctgtcgctgggggtgacttaccgtttctaa

SEQ ID NO: 19448 - protein, 258 aa, Unknown
  Obtained from environmental sample
  SIGNAL (1)...(22)
  misc_feature (1)..(258): Xaa is any amino acid
MKRSTRATFGRACRCTGVSAMSAPARPAPAVLLLLCASALAADAAETPSPIDNFFLTPQIGTLGIGLNLGYQFNDIFKARINGNYLAMRTKGEIDEVNCNLDVSSFTLGALADVHPFSGNFRLTGGLYYVNMQAKATADLKGDKEYEIGDHKYRASQLGNAEGTVKWQRLAPYVGIGLGPGEGRKENSPCPPPSNFSFSADVGVLFIGDPNVSMEFANQKVNSALRRDVDKYESDAKSGIKSYLPVYPVLSLGVTYRF

SEQ ID NO: 19449 - DNA, 552 bp, Unknown
  Obtained from environmental sample
  misc_feature (1)..(552): n is a, c, g, or t
atgaaaaaaagagtattactcattgcctttatatgcggcttaatgtttaccacttgtgatttactgaaagatgtggttaaaaaaccggaggtaacgctaaaatcggctgaattcaccgaggttgattttacgggcctcactctgctcaatacggtggaagtcaaaaataatatttcaatagatattccgctcccaaagatcgactgggagctattcgtaatagaaaatccgtttgtaaaaggaaccatagaaagtgaaggctctcttaaatccaacggaacaacagaagtagaatttccggtaagttttgagtatgttgatctgattaataccatcattaacctgactgatgaaaacgccagatataaaataaaaatgacagcgcatattccggttcccgagttgggggatttatcctggccttttgaacatgaaggaaagatactcataatgcgcgcgccggatataaccgttgcgacggctcccagcgcgtcatttacatacggtcttattcccggcgttcctacgggtggaaaaatgattttgatctga

SEQ ID NO: 19450 - protein, 183 aa, Unknown
  Obtained from environmental sample
  SIGNAL (1)...(22)
  DOMAIN (12)...(157): Late embryogenesis abundant protein
  misc_feature (1)..(183): Xaa is any amino acid
MKKRVLLIAFICGLMFTTCDLLKDVVKKPEVTLKSAEFTEVDFTGLTLLNTVEVKNNISIDIPLPKIDWELFVIENPFVKGTIESEGSLKSNGTTEVEFPVSFEYVDLINTIINLTDENARYKIKMTAHIPVPELGDLSWPFEHEGKILIMRAPDITVATAPSASFTYGLIPGVPTGGKMILI

SEQ ID NO: 19451 - DNA, 861 bp, Unknown
  Obtained from environmental sample
  misc_feature (1)..(861): n is a, c, g, or t
gtggccttagagactttgttgatgttcggctttttcctggaatggctgcgcgacagaaaaacctacaaaataaacagccagcccccaaaagtatcgctgatcgtccccatccacaacgaaggccggcgcatggaatcgttgctgaaaagcctgctggaacaggattattggcattctgaaggcggctgggctgaaataatctttattgatgaccgttcagacgacgaaagccccgccatgctggccaaattcgccgggaaagcggcggagcggggcatggaaaactgcaaaattatcactctgagggagaatccaggcccaaactataagcagtatgccctttcggtgggcatagcccaggcgcaaggggattatttcctgtttaccgacggcgactgcgaggtgccgcccggctggatccgcgccatgtcccgccgtatggcagaccctaaagccggcgcggttatagggccggtgttcaagaaaaaacagggtaggggctttttccacctgtatcaatgttatgatcacgcgctgcgctataacttccttgccggggcaatagggctgggcgcggcgggcggcggttttgggaataacctcattgtcagcagggcggcgcttgaggcctcaggcggttacggcgctgttccttcttctccaaccgaggacgcggcgttaatctcattgatacgttcccggcgcaaatacaaagtacacgccgtcgccctgccggacgctgccgtggaaaccgccgctgaaaacacctggcgcggctttatcagccagacctctcgctggaacacggcggcatcttcaccccgaaacatgacccgcttaactcatctgctatgctgctaa

SEQ ID NO: 19452 - protein, 286 aa, Unknown
  Obtained from environmental sample
  DOMAIN (32)...(212): Glycosyl transferase family 2
  misc_feature (1)..(286): Xaa is any amino acid
MALETLLMFGFFLEWLRDRKTYKINSQPPKVSLIVPIHNEGRRMESLLKSLLEQDYWHSEGGWAEIIFIDDRSDDESPAMLAKFAGKAAERGMENCKIITLRENPGPNYKQYALSVGIAQAQGDYFLFTDGDCEVPPGWIRAMSRRMADPKAGAVIGPVFKKKQGRGFFHLYQCYDHALRYNFLAGAIGLGAAGGGFGNNLIVSRAALEASGGYGAVPSSPTEDAALISLIRSRRKYKVHAVALPDAAVETAAENTWRGFISQTSRWNTAASSPRNMTRLTHLLCC

SEQ ID NO: 19453 - DNA, 654 bp, Unknown
  Obtained from environmental sample
  misc_feature (1)..(654): n is a, c, g, or t
atggtctgcgatgtatccgacaggaacgccgtttacagtcaggcgcaaaaacttactgcggatttcggtccgttagacatactcgttaataatgcgggtattgtatcaaaaaagggagagaatactgtcggccccgcattcctcggcgttcccgatgaaagcataatcaaagttataaatattaacgctctctcgcttttctggacaagcaaggcgttcctgccttccatgatcgaaaggaacagcggccacattgttaccatatcttcagccgccggaatgatcggcgtaaagggattatcggattactgcgcaggaaaattcgccgctttcggttttgacgaagctctgcgcatggaactgcggcgaatgaaaagcgcgataaaaaccacagtagtctgtccgttctttatagataccggaatgtttgaaggagtaaaaacccgcttcccgcttgttctgccgattctcaaaaaagattatgccgtaaaaaaaattgttaaagcggtgttgaaaaataaaaaacggctcatcatgccgcgttttgtgtattctgtatacttactgcggcttctgccgccggctgtaatggattggactgccaaccttttcggcatcagccacgcaatggatgatttcaggggcagagcatga

SEQ ID NO: 19454 - protein, 217 aa, Unknown
  Obtained from environmental sample
  DOMAIN (1)...(122): short chain dehydrogenase
  misc_feature (1)..(217): Xaa is any amino acid
MVCDVSDRNAVYSQAQKLTADFGPLDILVNNAGIVSKKGENTVGPAFLGVPDESIIKVININALSLFWTSKAFLPSMIERNSGHIVTISSAAGMIGVKGLSDYCAGKFAAFGFDEALRMELRRMKSAIKTTVVCPFFIDTGMFEGVKTRFPLVLPILKKDYAVKKIVKAVLKNKKRLIMPRFVYSVYLLRLLPPAVMDWTANLFGISHAMDDFRGRA

SEQ ID NO: 19455 - DNA, 558 bp, Unknown
  Obtained from environmental sample
  misc_feature (1)..(558): n is a, c, g, or t
gtgtgcgatacaggtcaaaacatctcgcctccccgatgggtgcgaaacagggtccacaggaaaaaaggcccgccgatcagggcggtgatgatgcccacgggcatttcagccggagccaggattacgcgggcgacaagatccgccagggccacgaagcagccgcccgtgacaaagactgccggcagcagccggcgatggttccagcctgtgtacatgcggcagatatgcggcagcatcatgcccacaaagccgataggcccggccagggatactattgtgcccaccatgaccgaagcgacggcgaagatcaggatcttgccgcgcgccacacgcatgccgcggctggctgccagttcttcgcccgcgcagagcaggtctgtttccggcgccagccgatgcaggatcagcgcctcggcgatgaccacaaaggccagatccgccagacggacgagttcaaggcccgcaagggaacccatcagccagtgcatgatgcgcagggaatcctgcgcgccggagagatattggatgagcgtcntcaggctggagaagaaaaactga

SEQ ID NO: 19456 - protein, 185 aa, Unknown
  Obtained from environmental sample
  misc_feature (1)..(185): Xaa is any amino acid
MCDTGQNISPPRWVRNRVHRKKGPPIRAVMMPTGISAGARITRATRSARATKQPPVTKTAGSSRRWFQPVYMRQICGSIMPTKPIGPARDTIVPTMTEATAKIRILPRATRMPRLAASSSPAQSRSVSGASRCRISASAMTTKARSARRTSSRPAREPISQCMMRRESCAPERYWMSVXRLEKKN

SEQ ID NO: 19457 - DNA, 474 bp, Unknown
  Obtained from environmental sample
  misc_feature (1)..(474): n is a, c, g, or t
atgcactggctgatgggttcccttgcgggccttgaactcgtccgtctggcggatctggcctttgtggtcatcgccgaggcgctgatcctgcatcggctggcgccggaaacagacctgctctgcgcgggcgaagaactggcagccagccgcggcatgcgtgtggcgcgcggcaagatcctgatcttcgccgtcgcttcggtcatggtgggcacaatagtatccctggccgggcctatcggctttgtgggcatgatgctgccgcatatctgccgcatgtacacaggctggaaccatcgccggctgctgccggcagtctttgtcacgggcggctgcttcgtggccctggcggatcttgtcgcccgcgtaatcctggctccggctgaaatgcccgtgggcatcatcaccgccctgatcggcgggccttttttcctgtggaccctgtttcgcacccatcggggaggcgagatgttttga

SEQ ID NO: 19458 - protein, 157 aa, Unknown
  Obtained from environmental sample
  DOMAIN (1)...(149): FecCD transport family
  misc_feature (1)..(157): Xaa is any amino acid
MHWLMGSLAGLELVRLADLAFVVIAEALILHRLAPETDLLCAGEELAASRGMRVARGKILIFAVASVMVGTIVSLAGPIGFVGMMLPHICRMYTGWNHRRLLPAVFVTGGCFVALADLVARVILAPAEMPVGIITALIGGPFFLWTLFRTHRGGEMF

SEQ ID NO: 19459 - DNA, 759 bp, Unknown
  Obtained from environmental sample
  misc_feature (1)..(759): n is a, c, g, or t
atgaatgatattcccgacaaaagtattgatttaatattatgcgatttaccctatggaataactaattgccggtgggatgttaaaattccttttgacattttatggcggcaatacaaccgcataaaaaaaataaacacccctataattttattttctaaccagccgtttaccgccgcccttataaattcaaacttgaaacaataccgctataattggtattggattaaaaataatgataccggttttgcttttgcaaacaaccagcctatgcgatgtgtagaggatatatgcgtattttatgaacgcgctccgctttataatcctataggcttatttccggcggcaataaaaaaacataggaaagcaacagcggactccgtttacaaaagcgcaacccttcaaaaaaaatatgttcaaaaactttccggctatcctaacaatattttgtattttgaaacggacgcaataggcgataaccgttaccatgaaacacaaaaaccggttaaacttttagaatatttaatccgcacttatacaaatttaaatgacatagtattagataacacaatgggaagcggttccaccggtgttgccgccatcaataccgggcggagttttatcggcattgaaaaaaaagaacatcattttttgaacgctgaaaaaagaattaaagccgccgaaaaacaagccgcgcaaaatctttttgatgttgaaaccatagaggggattatgaaagccccccccccgtcaagaggatga

SEQ ID NO: 19460 - protein, 252 aa, Unknown
  Obtained from environmental sample
  DOMAIN (9)...(221): DNA methylase
  misc_feature (1)..(252): Xaa is any amino acid
MNDIPDKSIDLILCDLPYGITNCRWDVKIPFDILWRQYNRIKKINTPIILFSNQPFTAALINSNLKQYRYNWYWIKNNDTGFAFANNQPMRCVEDICVFYERAPLYNPIGLFPAAIKKHRKATADSVYKSATLQKKYVQKLSGYPNNILYFETDAIGDNRYHETQKPVKLLEYLIRTYTNLNDIVLDNTMGSGSTGVAAINTGRSFIGIEKKEHHFLNAEKRIKAAEKQAAQNLFDVETIEGIMKAPPPSRG

SEQ ID NO: 19461 - DNA, 837 bp, Unknown
  Obtained from environmental sample
  misc_feature (1)..(837): n is a, c, g, or t
atgccgattggcgctatgggggcggttacgccgggcatcggggacgggcgggtttcggtaagctgggccagtgtcgccggggcggagctgtacgaggtgtactgcagcacagccagcagcataccggcaagcccttcgctggccgttgcaacaaatgcggcggtaatcaccggcctgtccaacgggacaacgtactatgtgtgggtaaaagccaggaacgccataggcgcaagcaatacaagcgcggttgcaagcggcaagcccatcggggctatgggaaccgtgacgctcggcgccggcgggagcggggagcttacgctcaactggcccgccgttgctggggcggatcagtacgaggcgtattgcagcgccgataactcgataccggcagtccccgcgctgaccgtttcaacaacctcggcgacgatcagcggtttaacggacggggcaatgtactatgtgtgggtgaaaccgaaaaacgccaccggcaccggcagcgcgagcgcggccgccggcggcacgccgattgggaacatgggggcggttacagtgagcgcgggcaatcagcagctttcggcaagctgggccggtgttgccggggcggagttctacgaggtgtattgcagcgccgccaacagcataccggcaagcccgtcggaaaccgttaccgcaacggcggcgataatcagcggccttgctcacgggacaacgtactatgtgtgggtaaaagcggtgaacgccatangcgcaagcaatacaagcatggcggtcagcggcaagccccgtcggcaacatgggtgccgtaacgctcaacgtcggcgggaacgggggtgctaa

SEQ ID NO: 19462 - protein, 278 aa, Unknown
  Obtained from environmental sample
  DOMAIN (88)...(168): Fibronectin type III domain
  misc_feature (1)..(278): Xaa is any amino acid
MPIGAMGAVTPGIGDGRVSVSWASVAGAELYEVYCSTASSIPASPSLAVATNAAVITGLSNGTTYYVWVKARNAIGASNTSAVASGKPIGAMGTVTLGAGGSGELTLNWPAVAGADQYEAYCSADNSIPAVPALTVSTTSATISGLTDGAMYYVWVKPKNATGTGSASAAAGGTPIGNMGAVTVSAGNQQLSASWAGVAGAEFYEVYCSAANSIPASPSETVTATAAIISGLAHGTTYYVWVKAVNAIXASNTSMAVSGKPRRQHGCRNAQRRRERGC

SEQ ID NO: 19463 - DNA, 780 bp, Unknown
  Obtained from environmental sample
  misc_feature (1)..(780): n is a, c, g, or t
ttgacgaatcttaatctcctttttattcccgctctgatcgcagcagttcttctggcagaattggcggattttcttatcggtgcgcccgcgatgctgcgcctgcgcggcgaatatcttgccatcgttaccctgagtttttcagaaataattagggtggtaataacaaattcgcagtctgttaccaacggcgttttgggccttaaagggctgcaaaattactcaacaacctgcatgatctggggcgttgcttttatctcggttgtacttatcatcgcgcttataaattcctctttcggacgttcctgcaaagctgtaagggacaatgaaattgccgcccgggcaatgggaattaacgcggtcagaataaagatcataagttttactatagccagttttatggcgggcattggaggcgcattgctggctcatatgttaagcgccattgatccgaggatgtttacctttaccattacgtataacgttttgcttatagtggttcttggaggaagcggcagtatttcagggtcgataattgccgcgattgttgtaacaatttccatggaagctttgcgttttctcgacggccctctgaatttactttttatccgtacccagggactgccgggcttgcggatggtcctgttcagttttcttctgctgttggtaattattttcaggccgcagggtctgatgggaaaccgcgaattatcatgggatatgcttgccaatttaatgaaaaaacgaaagccgcctgacacttacgacgcctcgctcaaataa

SEQ ID NO: 19464 - protein, 259 aa, Unknown
  Obtained from environmental sample
  SIGNAL (1)...(19)
  DOMAIN (3)...(223): Branched-chain amino acid transport system / permease component
  misc_feature (1)..(259): Xaa is any amino acid
MTNLNLLFIPALIAAVLLAELADFLIGAPAMLRLRGEYLAIVTLSFSEIIRVVITNSQSVTNGVLGLKGLQNYSTTCMIWGVAFISVVLIIALINSSFGRSCKAVRDNEIAARAMGINAVRIKIISFTIASFMAGIGGALLAHMLSAIDPRMFTFTITYNVLLIVVLGGSGSISGSIIAAIVVTISMEALRFLDGPLNLLFIRTQGLPGLRMVLFSFLLLLVIIFRPQGLMGNRELSWDMLANLMKKRKPPDTYDASLK

SEQ ID NO: 19465 - DNA, 612 bp, Unknown
  Obtained from environmental sample
  misc_feature (1)..(612): n is a, c, g, or t
ttggctctaaacgctaccattcaagctgctggcgcaggcgaagccggcaatggttttgccgtagtggctggtgaaatcaaagaacttgccaaccagagcgctcaaagcgcagacgatatagctaaccgaatagagggaattcaaaacgaaactagcgcggtgatagaagttatacacgaagtaagcaacattattgttaaaataaaccaaagtgttgaatcaatagcaggtcatgttgaacagcaaaccaaagcaagcaacgaaatagcaaacaatgtggcacaggcaaacatgggagcaaagcgagtggcttccgccattggcgaggtcgccaaaggtaccaacgaaattgcaagcaatgtaacgcaggcaagcgcgggagcaaagcgagtggcttctgccattaacgaagtagccaaaggtagtcgtgatattgccgcaaatgcaggcaaagcggtaaagggaaccgacaatataaaagaaaatatggctgctgcaaacaaagtagcagaagaatccaatcagggaacttcgcaggtgagtacctcagcaaacaatttggcaaaaatggcagatggtttgagaaatgctatagataaattcaaggtttaa

SEQ ID NO: 19466 - protein, 203 aa, Unknown
  Obtained from environmental sample
  DOMAIN (1)...(197): Methyl-accepting chemotaxis protein (MCP) signaling domain
  misc_feature (1)..(203): Xaa is any amino acid
MALNATIQAAGAGEAGNGFAVVAGEIKELANQSAQSADDIANRIEGIQNETSAVIEVIHEVSNIIVKINQSVESIAGHVEQQTKASNEIANNVAQANMGAKRVASAIGEVAKGTNEIASNVTQASAGAKRVASAINEVAKGSRDIAANAGKAVKGTDNIKENMAAANKVAEESNQGTSQVSTSANNLAKMADGLRNAIDKFKV

SEQ ID NO: 19467 - DNA, 408 bp, Unknown
  Obtained from environmental sample
  misc_feature (1)..(408): n is a, c, g, or t
ttggagttccagagcaggatgatggctctgacccagaaattaggcagcatcaaggcgataattcaggacggccattttgtgtccgacgaggtggttgtggacgggtacgacttctcgaacaccaacgcggaagacttcgccgcgttcaaggcgttcgccgaggatctgcaggtctcggtatggttcagcgcgtccacgcaccgcgacgacccgaggagggacgccaacggggttccggcggttctctcgccctacatggacaaaaccgcgattctgatcctgatggagcctatggtggggtacgtccaccttcacttggtaaaagtccacgaaatcttcccggccccggacagcctgcatttgaaattagacccgcaggtcatgttgatagccgaagagccgtcgtaa

SEQ ID NO: 19468 - protein, 135 aa, Unknown
  Obtained from environmental sample
  misc_feature (1)..(135): Xaa is any amino acid
MEFQSRMMALTQKLGSIKAIIQDGHFVSDEVVVDGYDFSNTNAEDFAAFKAFAEDLQVSVWFSASTHRDDPRRDANGVPAVLSPYMDKTAILILMEPMVGYVHLHLVKVHEIFPAPDSLHLKLDPQVMLIAEEPS

SEQ ID NO: 19469 - DNA, 402 bp, Unknown
  Obtained from environmental sample
  misc_feature (1)..(402): n is a, c, g, or t
ttgcaaagcatattttttttattatcggaggatagcatggaggctttgagcaaaacagaattagagcgtttcaaagagcttataacagaaaaatataatgcccttttagaagaacttcgctatcgcgaaaaatcttccattatggaaaatcaaagggaaaccggctcagaattatcttcttatgcaaaccaccccgcagaagcagcctcagattatgccaatttaaccatgaatctcaatctagcagagagagacagcaaatatctggtgcaattagaagatgccctagatcgcataaataatggaacttacggtatatgctcggtttgcaaaaaagattatacctatggttcgattggaagcggttccaaccaccacaaaatgcgtagaatgcaaaaatga

SEQ ID NO: 19470 - protein, 133 aa, Unknown
  Obtained from environmental sample
  misc_feature (1)..(133): Xaa is any amino acid
MQSIFFLLSEDSMEALSKTELERFKELITEKYNALLEELRYREKSSIMENQRETGSELSSYANHPAEAASDYANLTMNLNLAERDSKYLVQLEDALDRINNGTYGICSVCKKDYTYGSIGSGSNHHKMRRMQK

SEQ ID NO: 19471 - DNA, 399 bp, Unknown
  Obtained from environmental sample
  misc_feature (1)..(399): n is a, c, g, or t
atggaagagaaaaaatcattgccgcgagagagaatttttgccggagaattggcgaaattgagcatagaagagctactttgcgttattttgggcagaggaaccgctcaaaagagcgtttttgagctttcaagggaaatagctgggcttttggagaaaaagtccagaatgccctcaatggaagagcttttgagggttaaagggctgggtcttgcanaatctgcccaaatactggcttgtttggagctttctggccgttttatgcttggaacgcgtgatgaggctatacaaagcccagcagagcttatgcccctgctttcgtttatgaagcattcaaatcaggaaaatatggttttggttacctttgacggtgcccacnaggtgataaaaatcacagcataa

SEQ ID NO: 19472 - protein, 132 aa, Unknown
  Obtained from environmental sample
  misc_feature (1)..(132): Xaa is any amino acid
MEEKKSLPRERIFAGELAKLSIEELLCVILGRGTAQKSVFELSREIAGLLEKKSRMPSMEELLRVKGLGLAXSAQILACLELSGRFMLGTRDEAIQSPAELMPLLSFMKHSNQENMVLVTFDGAHXVIKITA

SEQ ID NO: 19473 - DNA, 945 bp, Unknown
  Obtained from environmental sample
  misc_feature (1)..(945): n is a, c, g, or t
gtggccgagactttcccatattatgaacagcttttaaggcgttaccgcgatcaaatagaccttaataactttcaaattcaaatgagcctttggtctcaggcttttgagtcggcggctgtgagcatagccgttttgcaggagatgaaaagatccaattacgaaccgccggaaaaagttgttgacagggaagtggcaaagctgccccagtttcaggacgaaaaaggaaatttttctatttacctttatcggcaaatgtccgagtccagccggctttcgctgtggcggcaggtaagggaagaacttaccgctattcaattctataacgatattttcacccttttaattccggcaggtgaaaaagaatttttctcgaaaatgggcgccgatatgagggctttcgaaatggtatatttccacgtagatgattttcccgattccgaatatttatcatgggcgcgggaaaactccgatctttttaagtccattcatctttcaaaaatcaccgttaaatccggcgagagggcggcgaaaaaaattcttgaatccattaaagacggaacgacgacatttgaagacgccgcaaggtcccagtctcaggacaattacgccgacaggggcggggatatgggcgttcaatatgtgtacgatcttgaaagagaaattaccgacgaggcagtacgcgaaaatattttcagccttggcaagggagaattaagtgctgttgtcaatcttgacgacagatgggttttcttcagaattgaagacgaattanaacaggcggattttgacgattacgcggtaatggacagagtgcgctcgtatatgaggaattatgaaagagggcgcatgggagactgggctatcgcgcgcgcggatgaatttattgccgaggccaangatgacgggtttgccaataccgcgcggcgggaaaataagaaagaataa

SEQ ID NO: 19474 - protein, 314 aa, Unknown
  Obtained from environmental sample
  DOMAIN (167)...(254): PPIC-type PPIASE domain
  misc_feature (1)..(314): Xaa is any amino acid
MAETFPYYEQLLRRYRDQIDLNNFQIQMSLWSQAFESAAVSIAVLQEMKRSNYEPPEKVVDREVAKLPQFQDEKGNFSIYLYRQMSESSRLSLWRQVREELTAIQFYNDIFTLLIPAGEKEFFSKMGADMRAFEMVYFHVDDFPDSEYLSWARENSDLFKSIHLSKITVKSGERAAKKILESIKDGTTTFEDAARSQSQDNYADRGGDMGVQYVYDLEREITDEAVRENIFSLGKGELSAVVNLDDRWVFFRIEDELXQADFDDYAVMDRVRSYMRNYERGRMGDWAIARADEFIAEAXDDGFANTARRENKKE

SEQ ID NO: 19475 - DNA, 759 bp, Unknown
  Obtained from environmental sample
  misc_feature (1)..(759): n is a, c, g, or t
atgagtgacatcagttattctgattgctctgctgaaatgcaggcacaataccggggaaaaaggcgaaaaatccgcaaaaatccccttgatctgttccccgatcagcggccccgcgagcgcctgatcagcaaagggccaacggctctttccgatgtcgagcttttggcggtgcttttgaacacgggaattaaaggaaaaaacgtgtccgagctggcggaggatctcctcggcctgcttgaccggagcagggaaattccccccatacaggaaatctcaaaactttccggcatgggcagttcaaaggcctgcgccgtggcggccatgctggaatttggcaggcggcgctggggcgcggccggttccattatcaagcgccccgaggaaattttttccctggtacggcacaatgccgaccggaaacaggagcgttttatcaccctgtccctgaacggcgcgcatgaggtcatggctgtccgggtagtgactatcggcctggtaaaccggaccattgttcacccgcgcgaagtttttgccgaccttatccaggaccgcgccgccgcttttgccgttgcgcataaccacccttcaggacggctttccccctcccccgaagacgatgaaattaccgaccgtcttctgaaagcggcggatattctgggtctacatctgcttgaccatattattttctcagaaaccgcctggtggagctaccgtaaaaacggccgcctcaagaaactagccaaaggaggcacggaatag

SEQ ID NO: 19476 - protein, 252 aa, Unknown
  Obtained from environmental sample
  DOMAIN (120)...(243): RadC, DNA repair protein
  misc_feature (1)..(252): Xaa is any amino acid
MSDISYSDCSAEMQAQYRGKRRKIRKNPLDLFPDQRPRERLISKGPTALSDVELLAVLLNTGIKGKNVSELAEDLLGLLDRSREIPPIQEISKLSGMGSSKACAVAAMLEFGRRRWGAAGSIIKRPEEIFSLVRHNADRKQERFITLSLNGAHEVMAVRVVTIGLVNRTIVHPREVFADLIQDRAAAFAVAHNHPSGRLSPSPEDDEITDRLLKAADILGLHLLDHIIFSETAWWSYRKNGRLKKLAKGGTE

SEQ ID NO: 19477 - DNA, 876 bp, Unknown
  Obtained from environmental sample
  misc_feature (1)..(876): n is a, c, g, or t
gtgaaagacgctaaggtaaaagtattggctatagactcttgggaaaatctcactccgcagaaccagccgcttgtaaaacttatagattctctgattcattttcttctgctgccaaacggggcaaaacacgagaatatgttttcttggaatgattgcataaaaaatggggaaaaactggattctgagcttgagcgcgaaaactttgcaaagcgtataaaaagcatagatggcgaagagctgttttcaataatttacaccagcggttcaacaggaacccccaaaggtgttcctctaactcagaacaacatggtatcccatctaaaagccgtatcggattttttccctgttaaaccgagcgatgtgtgcatgagtattttacccatagcgcacgtgtttgagcggatggttatttattacttctcatcttttgccctgcctatttattttgtggataacccaaacaacgtaggaaaatatctgccggaaattcgtccgtccattttaaccgttgttccgcgagttttggaaaaactataccaaaaattgatagatgcctcaaatcaaaaacgaggccctattaaatggcttatgaaatacgccataaccaaagccaaaaccgcagacccgggcaaggtgaatttgcgaggaaccatctgggataaattggtttattcaaaaatgcgtgctgcgcttggcggcaatttttatctgatagtttccggggcttctgccctgagccttccggtgaacagatttttgagaaacatagggctgccgttatacgagggctatgggcttacggaatgctcacccgttatctctgcggaatgcccaaagcatacaaaagtaggctctgttggcaaaccgattgtttaa

SEQ ID NO: 19478 - protein, 291 aa, Unknown
  Obtained from environmental sample
  misc_feature (1)..(291): Xaa is any amino acid
MKDAKVKVLAIDSWENLTPQNQPLVKLIDSLIHFLLLPNGAKHENMFSWNDCIKNGEKLDSELERENFAKRIKSIDGEELFSIIYTSGSTGTPKGVPLTQNNMVSHLKAVSDFFPVKPSDVCMSILPIAHVFERMVIYYFSSFALPIYFVDNPNNVGKYLPEIRPSILTVVPRVLEKLYQKLIDASNQKRGPIKWLMKYAITKAKTADPGKVNLRGTIWDKLVYSKMRAALGGNFYLIVSGASALSLPVNRFLRNIGLPLYEGYGLTECSPVISAECPKHTKVGSVGKPIV

SEQ ID NO: 19479 - DNA, 792 bp, Unknown
  Obtained from environmental sample
  misc_feature (1)..(792): n is a, c, g, or t
ttgntcaagataaaatgcgcggcgctccccgagaacctcattgagtcggagctgttcggccacgagaaaggggctttcaccggagcgataaaggacaagaccggtaagttcgaggcggcgaaccgcgggacgctcctcttggacgagatcagcgagatgccgatgagcgctcaggccaagctgctcagggccatacaggagaaagagatacagaaggtgggcggcgacgatccgctgaaggtagatgtcaggatattggccacgtccaaccgcgatctgctggcggagatggacaaggggaatttccgcgaagacttgtactatcgtctcaacatctttcacgtggagctgccgccgctgcgcgagaggaaagaggacatcgtcgcgcttgtcgagcactttataggcaagttcaacgatgaaaacgacttgagcgtctccggtctcgaagagggttgcaagaaactgctatgcgcgtacaactggcccggcaatattcgtgagttggaaaacaaggttgagcgagccgtggtgttgacgtgctccggtttgataaagccgaccgcgttcgatctcacaaccggcggtgcgcgcgccagatcctccggcggcgggcttgaagccggaatgaccatcgacgaggcggagaaagagctgataataaaaacgttggagcattgcaacaataaaaaaaacgatgcggcgaagatgctggggatatcggtacggacgttgaggaataaactgaacgaatacgctcttggggccggggaagatgaggatgacgattga

SEQ ID NO: 19480 - protein, 263 aa, Unknown
  Obtained from environmental sample
  DOMAIN (212)...(252): Bacterial regulatory protein, Fis family
  misc_feature (1)..(263): Xaa is any amino acid
MXKIKCAALPENLIESELFGHEKGAFTGAIKDKTGKFEAANRGTLLLDEISEMPMSAQAKLLRAIQEKEIQKVGGDDPLKVDVRILATSNRDLLAEMDKGNFREDLYYRLNIFHVELPPLRERKEDIVALVEHFIGKFNDENDLSVSGLEEGCKKLLCAYNWPGNIRELENKVERAVVLTCSGLIKPTAFDLTTGGARARSSGGGLEAGMTIDEAEKELIIKTLEHCNNKKNDAAKMLGISVRTLRNKLNEYALGAGEDEDDD

SEQ ID NO: 19481 - DNA, 300 bp, Unknown
  Obtained from environmental sample
  misc_feature (1)..(300): n is a, c, g, or t
gtgccggtacaaggcatagaaatactggaagcacacgcgatgccggatcacatacatatgtgcatatcggtaccgccgaagtacagtatagcgatgacgattgggtatctgaagggtaaaagcgcaatcaggatacacaaggaaatgtcaggacgggagccgaaaggatttacgaacaaaaacttttggacaaggggttactgtgtcagtacggtaggactagacgaaaaacaaatccgtgagtacataagcaaccaagaaaaaatggaaatgggagaacaaggttatctcaatttttag

SEQ ID NO: 19482 - protein, 99 aa, Unknown
  Obtained from environmental sample
  DOMAIN (4)...(79): Transposase IS200 like
  misc_feature (1)..(99): Xaa is any amino acid
MPVQGIEILEAHAMPDHIHMCISVPPKYSIAMTIGYLKGKSAIRIHKEMSGREPKGFTNKNFWTRGYCVSTVGLDEKQIREYISNQEKMEMGEQGYLNF

SEQ ID NO: 19483 - DNA, 699 bp, Unknown
  Obtained from environmental sample
  misc_feature (1)..(699): n is a, c, g, or t
gtgattcagcaggcactcaggaacattaaaaaaaattatggagacgaagtttgccttatcaccgatgtatgcttgtgcgaatatacaaaacacgggcattgcggggtgattaacgaaaacggaattgacaacgatgcaacgctctcgcttctttcgcaaacagctctctcccacgctcgctccggcagcgatatggttgccccctccgcgatgatggacggaacagttgccgccataagagatgctcttgacatggaaggattcaaagagactcctataatgagttacgctgctaaatacgcttctgcactttatggtcccttccgcgatgcggcaggttccacgccccagttcggagatagaaaaacttatcaaatggattatcacaacgggaaagaggctttgaagcggatagatattgatattgcggaaggagcggacatgataattgtaaaacccgctctcacaagccttgacataatttctatggcatcgcagcaaataaaattgcccatagcaggctacagcgtgagcggtgaatatgctatgattaaagcagcggctgcttctggttttattgatgaatacaaaacgatgtgcgaaagcgcagtcgccattttccgtgccggagcagatatattgattacatactttgccaaagaactatccacagcaattgaaaagagagagatagggtga

SEQ ID NO: 19484 - protein, 232 aa, Unknown
  Obtained from environmental sample
  DOMAIN (1)...(226): Delta-aminolevulinic acid dehydratase
  misc_feature (1)..(232): Xaa is any amino acid
MIQQALRNIKKNYGDEVCLITDVCLCEYTKHGHCGVINENGIDNDATLSLLSQTALSHARSGSDMVAPSAMMDGTVAAIRDALDMEGFKETPIMSYAAKYASALYGPFRDAAGSTPQFGDRKTYQMDYHNGKEALKRIDIDIAEGADMIIVKPALTSLDIISMASQQIKLPIAGYSVSGEYAMIKAAAASGFIDEYKTMCESAVAIFRAGADILITYFAKELSTAIEKREIG

SEQ ID NO: 19485 - DNA, 645 bp, Unknown
  Obtained from environmental sample
  misc_feature (1)..(645): n is a, c, g, or t
gtgggtagcaataggaagtcaacattgaaccaaaaaaaaataataggcatcacaggaaactactgtgcggggaaaaatcacgtggcatccattttggagcggcgttccattccggttcttgatgttgataagctggggcacaaggccattgagaccgaaaaagagcggcttctggaacgctttggcaacgacatcctgagtcatgacggctctttgtctattgatcgcaagcgtctggggaataaagtttttggcaggcaaaaagaactacaggccctggaggaaataatccaccctgttgtaaaccgggaaactcttgcatggatcaatacccggtcggagacagtctgtgttataaacgcggcgctgcttcaccgttcgtcggcatttgaaatactggatgcagtcatcattgtcgaagctcccttttttgtcaggctgcttagagccagaaagcgggatcacctgccgtggacagccctcttaaaacgtttcaaaagccaaaaaaaattcaaagctcaactttttaaggaaatagccgatatatacaaagtggagaactctgcttttttcagttttaacagggaatttgcgggaaaaaagctgaacaaacgtatcaatgaaattctttctattctgaagtga

SEQ ID NO: 19486 - protein, 214 aa, Unknown
  Obtained from environmental sample
  DOMAIN (13)...(192): Dephospho-CoA kinase
  misc_feature (1)..(214): Xaa is any amino acid
MGSNRKSTLNQKKIIGITGNYCAGKNHVASILERRSIPVLDVDKLGHKAIETEKERLLERFGNDILSHDGSLSIDRKRLGNKVFGRQKELQALEEIIHPVVNRETLAWINTRSETVCVINAALLHRSSAFEILDAVIIVEAPFFVRLLRARKRDHLPWTALLKRFKSQKKFKAQLFKEIADIYKVENSAFFSFNREFAGKKLNKRINEILSILK

SEQ ID NO: 19487 - DNA, 837 bp, Unknown
  Obtained from environmental sample
  misc_feature (1)..(837): n is a, c, g, or t
ttggaagctgccgatagtgccctgaacgcgaacgccgtggccggcgctcgagatatgttcctgagcgaggggctgaacgattttatctcaaaaccgattgacataccgaaactgaacgccgtcctcgacaagtggataccgcaaaatctgcgcaaatcgccaacggaggtaatcgcggcggggggtgagaacggcgacgacgacatagacttaaggaaaattaaaatcgacggcgtggacatagagaaaggcttgtcaatctcaggcggcaagggaacgcactacatccgcactatcaccatgttctatgaggacggcttcgagaagataaaagagatacgcaactgctttgaggccggcgatatgcaactctacgcgacgcacgttcacggcctcaagagcgccgccgcaagtatcggcgccgcggaggtctccgatgaggccaaggcgcttgagatggcgtgtaaagaggacaaccacgtatacataaacgaacacaactccaaatttttaatggattttgaggtgctgctgcacaatatcggcaaactcttagacgacatcgaggcaatgaaaaagaagggtggcggagggcacatcgacatggagatgctcaaagtggaactctccagattaaaaacggcgttagaaggctttgactcggagacgattgacggcgcgacaaacacgttaggtgagtacgagcaggccgaacacttcggggagcaaattaaggacatcatgcacaatgtgcttatcggcgaatacgaagacgcgcttaattctatagacaaactcttggaaaaacttggggtagagatagagttgaaggattag

SEQ ID NO: 19488 - protein, 278 aa, Unknown
  Obtained from environmental sample
  DOMAIN (97)...(194): Hpt domain
  misc_feature (1)..(278): Xaa is any amino acid
MEAADSALNANAVAGARDMFLSEGLNDFISKPIDIPKLNAVLDKWIPQNLRKSPTEVIAAGGENGDDDIDLRKIKIDGVDIEKGLSISGGKGTHYIRTITMFYEDGFEKIKEIRNCFEAGDMQLYATHVHGLKSAAASIGAAEVSDEAKALEMACKEDNHVYINEHNSKFLMDFEVLLHNIGKLLDDIEAMKKKGGGGHIDMEMLKVELSRLKTALEGFDSETIDGATNTLGEYEQAEHFGEQIKDIMHNVLIGEYEDALNSIDKLLEKLGVEIELKD

SEQ ID NO: 19489 - DNA, 768 bp, Unknown
  Obtained from environmental sample
  misc_feature (1)..(768): n is a, c, g, or t
atgctttcttctctttccagcgacgctattcaagtggctgtttttacttccgccggagtcgcggaaatttgccccgccgtaatgaatttaagcatccctttcataatcaggaatgaagaggagtttgatcttgtgcttgaaaatatgctgccggttcttaacagccgcgttaagagcgattatgtcgttatctcatggtcaaaaggcgggtgggtttatatattttcaaaagaaaaagtgttaacgccggatgatctgcgcaaacaaagacttgcgacaagtcccgatctaaaggagatgaataccgtattcagggtaatgggattccaacttgtagagaccgatatggtatctaccggaaccaaacttgcgagtaacgctattaacgccatctatattattccggcggtagtcgctcccatgcagctgcacaaaagtttaaaccacatgcttgacttgcccattgctccaatccttggcgcaattgtcatgaatcgcgtaacatggaataaattaagtcctgccagtcaacaggaaatattaaaagctacccgcaaggtagcggatgagtttgacgcttcagtagtaagaacagaagcaaatgccattaccgcaatgggcagagacgggcttagcatanacaaactaaccaaagctcagcaggatctgtggagtaatgaagtaaaaaataatttatcttcaatagttggtcctatttttgatcgcgaattatacaaccagatgaatagtatactggaaaaaggctag

SEQ ID NO: 19490 - protein, 255 aa, Unknown
  Obtained from environmental sample
  DOMAIN (2)...(239): Bacterial extracellular solute-binding protein, family 7
  misc_feature (1)..(255): Xaa is any amino acid
MLSSLSSDAIQVAVFTSAGVAEICPAVMNLSIPFIIRNEEEFDLVLENMLPVLNSRVKSDYVVISWSKGGWVYIFSKEKVLTPDDLRKQRLATSPDLKEMNTVFRVMGFQLVETDMVSTGTKLASNAINAIYIIPAVVAPMQLHKSLNHMLDLPIAPILGAIVMNRVTWNKLSPASQQEILKATRKVADEFDASVVRTEANAITAMGRDGLSIXKLTKAQQDLWSNEVKNNLSSIVGPIFDRELYNQMNSILEKG

SEQ ID NO: 19491 - DNA, 816 bp, Unknown
  Obtained from environmental sample
  misc_feature (1)..(816): n is a, c, g, or t
atgcctggcggtataattatcgccgctgtaattatctgcgcgtnttttacatcttttacaggcgcgtccggggtaactattcttgctcttggcgggatacttttaattattttaaatgaaaataattattcggaacgattttccatagggcttttaacatccgctggcggcataggattaatgttccctccaagtcttcctattatacttgtagcttcgtcaaccaatacaatcctgcattttatgaatttaccggtagagaatacgattattcattattttataggagcagtagtacccggatttattctggtgttagcgacgattattgccggatttattctttcttcaaaagtaaaatttcaaacggaaaaatttaacggcaaagacgcgcttgattcattaaaagactctctttttgaaattttactgcctataattcttgtgttaggatttttctccgggtttctttctttaatagaggtaagcgcggtatcggttatttatgtggtaattgttgaagtcttaattaaaaaagatattttattcaaggatattacaaaagttttctttaaagctgttccgataatcggcggaattctggctattctggcaatggcaaaagccctatcctacgcgtttattgattccggcgttcccgaaagtttttctttctggatgcagagcgcaataaaatcaaaatatgtttttttactgctgttgaaccttgctttgcttgtgcttggctgtatcatggatattttttccgcgatactgttttccttccgctcattgtccgctctcggccgattctga

SEQ ID NO: 19492 - protein, 271 aa, Unknown
  Obtained from environmental sample
  SIGNAL (1)...(22)
  DOMAIN (1)...(269): DctM-like transporters
  misc_feature (1)..(271): Xaa is any amino acid
MPGGIIIAAVIICAXFTSFTGASGVTILALGGILLIILNENNYSERFSIGLLTSAGGIGLMFPPSLPIILVASSTNTILHFMNLPVENTIIHYFIGAVVPGFILVLATIIAGFILSSKVKFQTEKFNGKDALDSLKDSLFEILLPIILVLGFFSGFLSLIEVSAVSVIYVVIVEVLIKKDILFKDITKVFFKAVPIIGGILAILAMAKALSYAFIDSGVPESFSFWMQSAIKSKYVFLLLLNLALLVLGCIMDIFSAILFSFRSLSALGRF

SEQ ID NO: 19493 - DNA, 612 bp, Unknown
  Obtained from environmental sample
  misc_feature (1)..(612): n is a, c, g, or t
ttgtccggagcttcgtatatgcttgggcttacggtggaacgcgcttccggcaagctgttaaacgcactggcgtcggaggtattctttgacccgctcggcatggttgatacaacatttctcattgacgacgataagcgttcccgttgcgttcctaccgaaatagacccttggcgcggccgcgccgtctgcggcgaggtgcacgacgagagcgcctacaccctgcaaaagatcatgacgcccggttccgcggggcttttctccaccgccggcgatttgttgaagtatatcaagatgttgattgacggatgggaaccgtttttctcgaaggagactgtggaatcaatgcaaactaaccaaatcccgcacatcagcggcaaatgtaccggtttggggtgggagttgaatcaggagtacatggggaaaaaacggtcgccggaaacattcggaaagacggggttcaccggatgcgccgtggtcgtcgacaggccgaggcggtcggggttcgcgttgctgtctaaccatacttggcctaagcgtaagcccgatagggatatgataaacgaggttcggagcggggtggcggatattgtgttcggcattgagggggtgtaa

SEQ ID NO: 19494 - protein, 203 aa, Unknown
  Obtained from environmental sample
  misc_feature (1)..(203): Xaa is any amino acid
MSGASYMLGLTVERASGKLLNALASEVFFDPLGMVDTTFLIDDDKRSRCVPTEIDPWRGRAVCGEVHDESAYTLQKIMTPGSAGLFSTAGDLLKYIKMLIDGWEPFFSKETVESMQTNQIPHISGKCTGLGWELNQEYMGKKRSPETFGKTGFTGCAVVVDRPRRSGFALLSNHTWPKRKPDRDMINEVRSGVADIVFGIEGV

SEQ ID NO: 19495 - DNA, 417 bp, Unknown
  Obtained from environmental sample
  misc_feature (1)..(417): n is a, c, g, or t
ttgagttacggccagaaaaaacggcttaccatcgcggcgattctggcgctgcgaccctctttcatgattcttgacgagcccactgcggggcaggattaccggcattacaccgaatttatggaattccttttgggcctcaacagcgaccttcagatctcccttcttttgattactcacgatatgcaccttatgcttgagtatacttccagggcggtagtcctctccgacggggtctgcgttgccgatcaggaaccgttcgaggtactcaccgacgatggcattatcgaaagggcaagccttaagcggacgagcctctacgatcttgcccttaaagccggtcttcccgatcccaggggctttgttggacgccttatcgcctgcgacaaaaaanacaggaggaaaaagagcggagcatga

SEQ ID NO: 19496 - protein, 138 aa, Unknown
  Obtained from environmental sample
  DOMAIN (1)...(77): ABC transporter
  misc_feature (1)..(138): Xaa is any amino acid
MSYGQKKRLTIAAILALRPSFMILDEPTAGQDYRHYTEFMEFLLGLNSDLQISLLLITHDMHLMLEYTSRAVVLSDGVCVADQEPFEVLTDDGIIERASLKRTSLYDLALKAGLPDPRGFVGRLIACDKKXRRKKSGA

SEQ ID NO: 19497 - DNA, 669 bp, Unknown
  Obtained from environmental sample
  misc_feature (1)..(669): n is a, c, g, or t
ttggtcagattcngccgagatcgcaagcaggtggagggtatcgtttacgtgggctaccattgccgggaaattacgtacctcccttcaagggtgcaggttccttttgtgtacgcttactgctaccctaaagaggaaatctacccgtcagtgatgtatgatgatgaaaaggccgcaagagacgtaaccaagctgctcattgccaaaggccatagtcgcatcggcgtcatttgcggtccagcctcgagttaccacacccaggcgaggcttaaaggtcattacgcagccctgctagaacatggcgtcgcgcccgatcaacagctcgttgtatacggtgattgggaacgaccttctggctaccatttagccgccttcctcctggatcaaaaggtctccgcgattttctctttcaacgatttaatggcttccggggtttatgaacgcgcctccgagcggaggctgcaaattgggaaagacatttcactttttggattcgacaaccgggacatcagccagggctacatcccggcgctctccaccgtggagccgccgctaaacgaaatcggccgccgttctgccgggataatatttaaccagataaaaaaccacaaaaccggtaaaaagcgggtataccttccctgtaccattctggaacggaattcagcagtatag

SEQ ID NO: 19498 - protein, 222 aa, Unknown
  Obtained from environmental sample
  DOMAIN (1)...(219): Periplasmic binding proteins and sugar binding domain of the LacI family
  misc_feature (1)..(222): Xaa is any amino acid
MVRFXRDRKQVEGIVYVGYHCREITYLPSRVQVPFVYAYCYPKEEIYPSVMYDDEKAARDVTKLLIAKGHSRIGVICGPASSYHTQARLKGHYAALLEHGVAPDQQLVVYGDWERPSGYHLAAFLLDQKVSAIFSFNDLMASGVYERASERRLQIGKDISLFGFDNRDISQGYIPALSTVEPPLNEIGRRSAGIIFNQIKNHKTGKKRVYLPCTILERNSAV

SEQ ID NO: 19499 - DNA, 927 bp, Unknown
  Obtained from environmental sample
  misc_feature (1)..(927): n is a, c, g, or t
gtgaaaaaggcgaattgggagagggacccgctaaaatccgcccgcgccgccgttatcgagcattgcggggttgacgatgaacgtctatcatccatagaaacttcgctgctggcgcagttggacgaggcgatacgcggcgaaatcgccgtcgcccgcccgtctttcggcaccgtgtcgatggacgtcttcgcgcccgtcaaataccccgccgttaaaccctacgccgccaagaacgtccgcaacacccacgccatcaacgcggcgcaggagcatatactcgcggagaacaaaaacgccttcgtctgcggccaggacgtgggcaggtacgggtcgccgttcaagacctgcaaggggcttatcgacaagttcggtgaagaacgggttatcgacgtccccatctgcgaggcggggacggtcggcttctgcttgggagcgtcgcagaccggggcgcggcccatcatggagttccagttcgccgacttctccacggaggcggtctcccagctagggttgaacgcggggacgtggtacttccggtcggacaggcccgcgccgctactcttccgcctgcccaacggggcgggggtgacgctcggggcgttccactccggcgagttcgaggggctgtggtcgcgcttcccggggcttaaattattctatccggtcaccccccaggaaacctacgaggcgctcatggttggattttatgacgataatccgtgcgtcgtctttgagcataaattactttattggggtaggcccgccgacatagagttcgacggagacctgtcaaaagtctgccgcccccgcccgtatacggaggggacggacattaccgttatcgcgacgggtgctatggttgatcaagcctccgcgcagtggaagagggcaaatattccgccgaagtgtggaatccgtttgtattga

SEQ ID NO: 19500 - protein, 308 aa, Unknown
  Obtained from environmental sample
  DOMAIN (79)...(252): Transketolase, pyridine binding domain
  misc_feature (1)..(308): Xaa is any amino acid
MKKANWERDPLKSARAAVIEHCGVDDERLSSIETSLLAQLDEAIRGEIAVARPSFGTVSMDVFAPVKYPAVKPYAAKNVRNTHAINAAQEHILAENKNAFVCGQDVGRYGSPFKTCKGLIDKFGEERVIDVPICEAGTVGFCLGASQTGARPIMEFQFADFSTEAVSQLGLNAGTWYFRSDRPAPLLFRLPNGAGVTLGAFHSGEFEGLWSRFPGLKLFYPVTPQETYEALMVGFYDDNPCVVFEHKLLYWGRPADIEFDGDLSKVCRPRPYTEGTDITVIATGAMVDQASAQWKRANIPPKCGIRLY

SEQ ID NO: 19501 - DNA, 882 bp, Unknown
  Obtained from environmental sample
  misc_feature (1)..(882): n is a, c, g, or t
atggtaaccagccaaatccttaaagaactgaaagaaggacggatcaccatgctgctgggcgtgccaatgctttttaataaagtgctgaccggtattatccgcgggcttaaagcgaaaggccccattgtttacgggctgatgttatttttaatgggcgtttcagggctgattaagaaaatatttaaggtaaaccccggcaagaaaatgttcggttttgttctggagaaggccagccttacttcgatacggatctgtatctgcggcggcggccctcttgccccaagcatattcaaaaaatacaaccagcttggcatcgactttgtgcagggttacggcctgacagaaacttcccccatcattacgattaacccccttgagcattacaaggaaaccagcgtaggccggccctgtcccggcgctgatataaaaatactggatcccgacgatcgcggcgtaggcgagataatcgtcaaaggccccatggtgatgaaaggctactataataagccggaggatacctcggaagtctttacgcccgacggctatctcaagacaggcgaccttggttacatggacggcgaaaattacctgtacctcaccggcagggcaagaaacatgatcgttaccgaaggcggcaaaaatgtttaccccgaagaaatagaaaacgagttccagctttttgatgagatcgagcagatacttgtcagaagttatacgccggacaaagaaacaaagtcggaaaacatagaagccctcgtatatcctaaccccggattcanaaatgaaaacggcgttaccccttccgctgaacagatgaaagctcgcatagacnagatcatttccatagtgaatcagcggctccctctcctacagcggaattga

SEQ ID NO: 19502 - protein, 293 aa, Unknown
  Obtained from environmental sample
  DOMAIN (1)...(235): AMP-binding enzyme
  misc_feature (1)..(293): Xaa is any amino acid
MVTSQILKELKEGRITMLLGVPMLFNKVLTGIIRGLKAKGPIVYGLMLFLMGVSGLIKKIFKVNPGKKMFGFVLEKASLTSIRICICGGGPLAPSIFKKYNQLGIDFVQGYGLTETSPIITINPLEHYKETSVGRPCPGADIKILDPDDRGVGEIIVKGPMVMKGYYNKPEDTSEVFTPDGYLKTGDLGYMDGENYLYLTGRARNMIVTEGGKNVYPEEIENEFQLFDEIEQILVRSYTPDKETKSENIEALVYPNPGFXNENGVTPSAEQMKARIDXIISIVNQRLPLLQRN

SEQ ID NO: 19503 - DNA, 465 bp, Unknown
  Obtained from environmental sample
  misc_feature (1)..(465): n is a, c, g, or t
ttgggtacgggagaaagcgccgacgcttatcacatgaccgctccgggaacggacggggccggaccggcaaaggcgatgagagccgcgcttgccgacgcggaattgaaagctgaacaaatcggctatatcaaccttcatggtacgggaactgaacttaacgacaaagccgaagggcttgcaattaagacggtatttaatgagataccgcccattagctcaaccaagcccatcacaggccatactttgggcgcggcaggggcattggaagcggcgatctgctggatggttttatctgaaaaaatggggcttcctgtccattgttgggacggcgttaaagatgatgaaatcccggtttttccttccaatgaagatggtcaaaaaaaacctgcgatatgtatgagcaatagttttgcttttggcggatgcaatgtcagtttaattttaggagtaacagataattgttaa

SEQ ID NO: 19504 - protein, 154 aa, Unknown
  Obtained from environmental sample
  DOMAIN (2)...(149): Beta-ketoacyl synthase, C-terminal domain
  misc_feature (1)..(154): Xaa is any amino acid
MGTGESADAYHMTAPGTDGAGPAKAMRAALADAELKAEQIGYINLHGTGTELNDKAEGLAIKTVFNEIPPISSTKPITGHTLGAAGALEAAICWMVLSEKMGLPVHCWDGVKDDEIPVFPSNEDGQKKPAICMSNSFAFGGCNVSLILGVTDNC

SEQ ID NO: 19505 - DNA, 411 bp, Unknown
  Obtained from environmental sample
  misc_feature (1)..(411): n is a, c, g, or t
ttgttaatagaaaaggaagaattgcaaacgttaattcctcataaagggaaaatgctgctcctaaataaaataattgattatgatattgaacatagtatcagggcgcaatatactgtcacagagagttgtattttttacgatcctgctttggacggcgtgcccgcgtgggtgggttttgaatttatggctcaggcgatttccgctcttacgggaatcaggaaacgggcaaaaggagaaaaacccaaaatcgggtttattttaagtgtcccgtccatgcggatggaaatcccgttttttaagaacggcagttcggtagaggtttgtgtaaaagaaagcgattgtacggatatgatttatacttatgaaggaggagcttttttggaaaataaaaaagtatgggaggaaaattaa

SEQ ID NO: 19506 - protein, 136 aa, Unknown
  Obtained from environmental sample
  misc_feature (1)..(136): Xaa is any amino acid
MLIEKEELQTLIPHKGKMLLLNKIIDYDIEHSIRAQYTVTESCIFYDPALDGVPAWVGFEFMAQAISALTGIRKRAKGEKPKIGFILSVPSMRMEIPFFKNGSSVEVCVKESDCTDMIYTYEGGAFLENKKVWEEN

SEQ ID NO: 19507 - DNA, 696 bp, Unknown
  Obtained from environmental sample
  misc_feature (1)..(696): n is a, c, g, or t
atgagcgacgtcattcttgcgcaaaacgggaccatcgacaaatacgaaggcgacgccatcgtcgcctttttcggcgcgcccgtagaaatgcccgatcatgccgtccgggtctgtgattccgccattaccatgaaacgcattgaagcggaactcaatgaaaaaatactggaagagaagctttctcccgctccgcttcttaccagaatcggcattaacaccggaagcatggtagccggcaatatgggcacggaaaacaagatgaactacactattatgggaaacgcagtaaacctggcttcccgccttgaaggggtaaacaaacaatacagaacatggatcctcgtttccgaagacacgctccgtgagactgacggccgttaccttacccgcaaacttgacagggtcagggtagtaggcatccaggaacctgtgcggatctacgagcttctggataccctggaaaccgcggacccgcaaaagaaaaaactggtgacaattttccaggaagctctggactgctatgaaaaatgggactggaaagccgccggccagggcttccgggaatctcttgcccttgaaacaggcggtcaaaaaggccacaacccttcggcgctgtaccttgaacgctgtatgcgtttcctgaccagacctcccagggaagactgggacggggtgaacaacctcacggaaaaatag

SEQ ID NO: 19508 - protein, 231 aa, Unknown
  Obtained from environmental sample
  DOMAIN (1)...(151): Adenylate and Guanylate cyclase catalytic domain
  misc_feature (1)..(231): Xaa is any amino acid
MSDVILAQNGTIDKYEGDAIVAFFGAPVEMPDHAVRVCDSAITMKRIEAELNEKILEEKLSPAPLLTRIGINTGSMVAGNMGTENKMNYTIMGNAVNLASRLEGVNKQYRTWILVSEDTLRETDGRYLTRKLDRVRVVGIQEPVRIYELLDTLETADPQKKKLVTIFQEALDCYEKWDWKAAGQGFRESLALETGGQKGHNPSALYLERCMRFLTRPPREDWDGVNNLTEK

SEQ ID NO: 19509 - DNA, 744 bp, Unknown
  Obtained from environmental sample
  misc_feature (1)..(744): n is a, c, g, or t
gtgataatagacgaagcgcaatatgccacggaactttttacctatataaaaatctacgcagataaaaaaaagaaagacggtctttttctgctgaccggttcgcaaaaatacagtcttatgaaaggtatacaggaaagccttgccggacgcgtggctattctcaatatgctcggtttatcttataaggaaataattaagaaaccaaaggattcaacgccatttttgccgtctcttaacctgacaaaaaaaactcagtcaggcaaatcattaacctcgccagaagtgtttaaattggtctggcagggttcgtttccccgcataatcacaaataaaaacgcttctgccgcaagaaaacttttttatgattcatatatccaaacttatattgaaagggatgtaaaggatttttacaatatcgagaatgaaataaacttctataatttccttgtagccgcggcggcaaggacaggacagcttctcaattactccgatcttgcgcgcgatgttcacatagatataagaaccgcgaaattgtggctcgaaatccttgagcgatcctgccttattcaactgctttatccttatagttcaaatacggcaaaacgtacaataaagacacccaaattgtattttctcgacaccggacttgcgtcgcatctgtgttcatgggaaaccgccgacacactcagaaacggcgcgcagagcggagccatgctcgaaatctatgtattcnctgaattttaa

SEQ ID NO: 19510 - protein, 247 aa, Unknown
  Obtained from environmental sample
  misc_feature (1)..(247): Xaa is any amino acid
MIIDEAQYATELFTYIKIYADKKKKDGLFLLTGSQKYSLMKGIQESLAGRVAILNMLGLSYKEIIKKPKDSTPFLPSLNLTKKTQSGKSLTSPEVFKLVWQGSFPRIITNKNASAARKLFYDSYIQTYIERDVKDFYNIENEINFYNFLVAAAARTGQLLNYSDLARDVHIDIRTAKLWLEILERSCLIQLLYPYSSNTAKRTIKTPKLYFLDTGLASHLCSWETADTLRNGAQSGAMLEIYVFXEF

SEQ ID NO: 19511 - DNA, 465 bp, Unknown
  Obtained from environmental sample
  misc_feature (1)..(465): n is a, c, g, or t
atgcccgatttttctcatactattgatgaacatctttcccaacctgtcagacttgatcgctatgtgtcggaaaccttacgccttctctcccgttcgcaaatcaaggcaaggtctttaaccgcaaaagtaaacggaaaggacgtaaaaaattcccgccttgtaaaaaagggagaccttcttgaattacgctggcaggattccccgcccgtgaatattatacctcaggacattccccttgaaataatttatgaagatgaaaattgtattgttgtaaacaaagcgcagggaatggtagtccacccgggagcgggaaacaggcaggacactcttgccaatgctctgtatttcaggagacttaacaggggcgggaaagtaagcaatatagaaacaaacaatgtgcgtcccggtattgttcatcgtcttgataaagacacatcgggaaataattatcgccgcttacaatga

SEQ ID NO: 19512 - protein, 154 aa, Unknown
  Obtained from environmental sample
  misc_feature (1)..(154): Xaa is any amino acid
MPDFSHTIDEHLSQPVRLDRYVSETLRLLSRSQIKARSLTAKVNGKDVKNSRLVKKGDLLELRWQDSPPVNIIPQDIPLEIIYEDENCIVVNKAQGMVVHPGAGNRQDTLANALYFRRLNRGGKVSNIETNNVRPGIVHRLDKDTSGNNYRRLQ

SEQ ID NO: 19513 - DNA, 588 bp, Unknown
  Obtained from environmental sample
  misc_feature (1)..(588): n is a, c, g, or t
atggtaatgcttgacgatgtgtgtttacatacgaataacatttgttggaaaaagacaacaaaggagtattattatattgatttaacttccgtaagtcgcgaaacgaatgaaattcgtctagagttgatgattaactcagaaaacgcaccaagtagggcacaacaaattgtaaaaactgatgatgttctcttcgcaacgactcgacctacattgaaaagatattgctatatcccgaaagaatatgatgagcaaatatgcagtacaggttattgcgtcttacgagcaaataggcaattcatactgccgaaatttcttttctattctataacaacaagcgactttaatagatatattgagaataatcaagaaggaacgagttatccatcaatatctgacagcaaagtaaagagatataaatttcggttaccgtcgcttatggaacaagagcgtattgtctcaatactcgaccgtttcaacaccctaaccacagacatcacaaccggcctccccgccgaaatatcagcgcgtcagaagcagtatgaatattacagagataaattattaacattcgacggaattaacccatga

SEQ ID NO: 19514 - protein, 195 aa, Unknown
  Obtained from environmental sample
  DOMAIN (1)...(160): Type I restriction modification DNA specificity domain
  misc_feature (1)..(195): Xaa is any amino acid
MVMLDDVCLHTNNICWKKTTKEYYYIDLTSVSRETNEIRLELMINSENAPSRAQQIVKTDDVLFATTRPTLKRYCYIPKEYDEQICSTGYCVLRANRQFILPKFLFYSITTSDFNRYIENNQEGTSYPSISDSKVKRYKFRLPSLMEQERIVSILDRFNTLTTDITTGLPAEISARQKQYEYYRDKLLTFDGINP

SEQ ID NO: 19515 - DNA, 912 bp, Unknown
  Obtained from environmental sample
  misc_feature (1)..(912): n is a, c, g, or t
atgtcagattggccgagaacgcaggacgggacagagccgacagacgaaagcgcactctacagcgacaccgacaaaccggtcatcacggcgggcaagctgacgctgaaagccatcgccgtaaaaagcggcatgaacgacagcgcggtactgacggcggtgtataccattacaacggtaacgccgcctacgataaatgacatcacggtcacaggcgcaactcctgaaggcgggaagtataagtatagcgatacaattaagctaagcggcaatcctgcggcagccggcaatacctatgcctggacttgcacgccggacactcttacttttgacaagacggcggccgaacctactgtcagcggctttgccaagggcggcagttacacctttacactcacgatcaagaaaggcgagctaacttcaaccaaaagcgtgacagtgaacatcgcagagaacaaggctccgactatcacttcgccgagcacgaatctgtccggcaacaccggagctctgacgagtacgggtctggtggtcaacctgaccggcagtgtggcggacgcggacaatgatgcattgaccagccagtgggtttgcacaaactacaatgccaatggtcatactgttactaatgcgggcagtgtagccgcagaggttagcagcagtatcggcgcggcgagcgcgacggggaataatactaccgtgaccttgaaaaaagccggcgtatacaccttcgtgctcaagacttcggacggagttgtgacggctgagtccgcgcccgtgacggtgacggtaaatccgtggaatgcgactcangatgtaactgttaattctaagacaatttacctacccaacgtagcggttgattttagccccattgattattctcctgctggcggcacatggggtggtttttga

SEQ ID NO: 19516 - protein, 303 aa, Unknown
  Obtained from environmental sample
  misc_feature (1)..(303): Xaa is any amino acid
MSDWPRTQDGTEPTDESALYSDTDKPVITAGKLTLKAIAVKSGMNDSAVLTAVYTITTVTPPTINDITVTGATPEGGKYKYSDTIKLSGNPAAAGNTYAWTCTPDTLTFDKTAAEPTVSGFAKGGSYTFTLTIKKGELTSTKSVTVNIAENKAPTITSPSTNLSGNTGALTSTGLVVNLTGSVADADNDALTSQWVCTNYNANGHTVTNAGSVAAEVSSSIGAASATGNNTTVTLKKAGVYTFVLKTSDGVVTAESAPVTVTVNPWNATXDVTVNSKTIYLPNVAVDFSPIDYSPAGGTWGGF

SEQ ID NO: 19517 - DNA, 666 bp, Unknown
  Obtained from environmental sample
  misc_feature (1)..(666): n is a, c, g, or t
gtgcggcacaccctccgaatcgcacacaagccgcagcctctcctcgatcaggccgacgggaatcagcctgaacgggtaaatctgcacccggctctntatggtgtcaggcacgtcctgcagctccgtggtggccagcacaaagacagcgtggggcggcggctcctccagtatcttcagcagtgcgtcgaaggcttggcgggagagcatgtggacttcatcgatgatatagacgcggtagcggcagaaggccggtcgcgtgtggacctgctcccgcagagccctggcgtcctcgacgctggcgcggctcgccgcgtcaatctcgacgatgtccatgttgcggtcgggctgctcggaagccaggcaggggccgcaggtcccgcagggcgtgggcgtgggcccctccgcgcagttcagcgacctggccatgacgcgcgccgtgctggtcttgcccgtgcccctcacgccggcgaacaggaatgcttgatggtggatagccccgcccaccgccttggcccttgtcagcgcattgtggagcgccttaacactcgcctcttggccgacgaggtcggagaggattcggggacggtatttcagcgcgagtgttgccatgatcctacattctctcacaggagccataggaatgggtttagtggcgtaagctgctga

SEQ ID NO: 19518 - protein, 221 aa, Unknown
  Obtained from environmental sample
  misc_feature (1)..(221): Xaa is any amino acid
MRHTLRIAHKPQPLLDQADGNQPERVNLHPALYGVRHVLQLRGGQHKDSVGRRLLQYLQQCVEGLAGEHVDFIDDIDAVAAEGRSRVDLLPQSPGVLDAGAARRVNLDDVHVAVGLLGSQAGAAGPAGRGRGPLRAVQRPGHDARRAGLARAPHAGEQECLMVDSPAHRLGPCQRIVERLNTRLLADEVGEDSGTVFQRECCHDPTFSHRSHRNGFSGVSC

SEQ ID NO: 19519 - DNA, 768 bp, Unknown
  Obtained from environmental sample
  misc_feature (1)..(768): n is a, c, g, or t
atgttcgagggggtcattgagaaacccgacgggatactgttagtcacggggccgaccggcagcggcaaaagctccaccctctacgccgccctaaagaagatcaacgacgtcgccataaacatagtcactatggaagacccggtcgagttcaacctcgacggaatcgcccaaggacagataaacccgctcgcgggtttcacctttgccgcgggtatgcgttccattctccgtcaagaccccgacgtggtgatgataggtgagatgcgcgacgccgagacctgccagatggccatacaagccgcgctcaccgggcacttggtcttctcaacgctccacacaaacgactccccaagcgcctacacgcgcctgctcgacatgggcatagagccgttcctgatcacgtcgtccgtaataggcatactggctcagcgcttggtgcggaagttgtgcaagtgcaaggagcagtacgaccccgaccccatgctgctgcagaaattgggtctgcgccccgggctgaagttctacagaagcaagggctgcaaggcgtgcaacaacaccggtttcaaggggcgtatggggctctacgagtttttggtcccggacgaggagatcaacaacatggttataaagcgcctaccgtcggaacagataaaacactacgcgctaaagaggggcaattacgactcgttgcgcagggacgggctgaagaaggtgctggacgggtcgacgacgatagagcaggttttgagctctacgcaggatgattga

SEQ ID NO: 19520 - protein, 255 aa, Unknown
  Obtained from environmental sample
  DOMAIN (1)...(149): Type II/IV secretion system protein
  misc_feature (1)..(255): Xaa is any amino acid
MFEGVIEKPDGILLVTGPTGSGKSSTLYAALKKINDVAINIVTMEDPVEFNLDGIAQGQINPLAGFTFAAGMRSILRQDPDVVMIGEMRDAETCQMAIQAALTGHLVFSTLHTNDSPSAYTRLLDMGIEPFLITSSVIGILAQRLVRKLCKCKEQYDPDPMLLQKLGLRPGLKFYRSKGCKACNNTGFKGRMGLYEFLVPDEEINNMVIKRLPSEQIKHYALKRGNYDSLRRDGLKKVLDGSTTIEQVLSSTQDD

SEQ ID NO: 19521 - DNA, 885 bp, Unknown
  Obtained from environmental sample
  misc_feature (1)..(885): n is a, c, g, or t
atggaaatagcgagcaccgatgtaatgacacgccttcgcagagatatgtaccagactgttcaatggcaggattacaaattcttaaaccgcttccctaccggcaaccttatgacccgtatgactcaggacttagaccgcctgcgccatactgtagcgtgggtttcctaccaatttataggcgctatcgccctttttgcagccacatttattttttacctgttcttaaactggagactcgcgctctgccttgtaggaattactccttttattctatatataagcagcagatttgtaaaaaaaataagacctcgtttccaattactgagggaaaaacttacagacctcggcactgccgttacggaaaacattgacggcaaccgtgtggtaaaagcgtttgcccgggaagaatacgaaaaagaaaaagtagaaaaacaaaacgccgaattccgggatataagctgtgagaacgctcttataacggcgaaataccagccgttccttgaaacagcgagccaactcctcatggtaataatggttgtagccggcggtttctttctgataaaagaatggatgactcccggcgaatacatggcgttttcctcgcttacatgggcgcttgccatgccgatgcagatgctcggccccttgcttgccgaccttgaacgctggacttccgcangacagatgatccgcgaagtggttgaagcgcccaagggaataagcgatatgtcgggggcaatgcaattaacacagcgccccaaaggaagaattgaattcagagacgtaaaactcgcccttaacggaaatactattcttgaggatattaattttacgggcggaagcgggttccactatcggcatactcggaagcacgggaacgggtaa

SEQ ID NO: 19522 - protein, 294 aa, Unknown
  Obtained from environmental sample
  DOMAIN (1)...(210): ABC transporter transmembrane region
  misc_feature (1)..(294): Xaa is any amino acid
MEIASTDVMTRLRRDMYQTVQWQDYKFLNRFPTGNLMTRMTQDLDRLRHTVAWVSYQFIGAIALFAATFIFYLFLNWRLALCLVGITPFILYISSRFVKKIRPRFQLLREKLTDLGTAVTENIDGNRVVKAFAREEYEKEKVEKQNAEFRDISCENALITAKYQPFLETASQLLMVIMVVAGGFFLIKEWMTPGEYMAFSSLTWALAMPMQMLGPLLADLERWTSAXQMIREVVEAPKGISDMSGAMQLTQRPKGRIEFRDVKLALNGNTILEDINFTGGSGFHYRHTRKHGNG

SEQ ID NO: 19523 - DNA, 795 bp, Unknown
  Obtained from environmental sample
  misc_feature (1)..(795): n is a, c, g, or t
ttgcagaataaccgcgaccaccgcaaaattatttcgatagacggcaagatcacgttcaccggcggacttaatttggcggacgagtacattaacgctgttgaacgttttggccactggaaagacgccgcgataaaaattgaaggggacggggcgtggtctctaacgttaatttttttacagatgtggaatttaggttttagggaaaaagatgattacccttcattttttccgtggaaagacaatattattgaacacactgaaaacggcgtgtccgaaggttttgaagcgtggggttatgtgcaaccgtatgccgacagccccatcgacaaagaaaacgttggggaacacgtatacattcaaataattaatcaggctaaaaagtacgtttacatcaacaccccatacctgattgtagacgacaatcttctttccgcgttaatactggcggcaaaaagcggcgttgacatacgcataatcaccccccaccgctgggacaaatggatagtagcgattacatcccgctcatattaccgaaggctcattcaggcgggagttaaagtttacgagtacacttcaggctttaaccacggaaaaacctttgtatcagacgacagaatagcgacagtaggtacgacaaaccttgatttcaggagcctataccttcactttgaatgcggcgtggtagtttacgcaagcgaaacagtagccgcagtcaaagaagattttttgcgtactctccccagttcacaggaaataaccctaaaagactgcgccgacaaaaattcaaaagcataa

SEQ ID NO: 19524 - protein, 264 aa, Unknown
  Obtained from environmental sample
  DOMAIN (2)...(29): Phospholipase D Active site motif
  misc_feature (1)..(264): Xaa is any amino acid
MQNNRDHRKIISIDGKITFTGGLNLADEYINAVERFGHWKDAAIKIEGDGAWSLTLIFLQMWNLGFREKDDYPSFFPWKDNIIEHTENGVSEGFEAWGYVQPYADSPIDKENVGEHVYIQIINQAKKYVYINTPYLIVDDNLLSALILAAKSGVDIRIITPHRWDKWIVAITSRSYYRRLIQAGVKVYEYTSGFNHGKTFVSDDRIATVGTTNLDFRSLYLHFECGVVVYASETVAAVKEDFLRTLPSSQEITLKDCADKNSKA

SEQ ID NO: 19525 - DNA, 498 bp, Unknown
  Obtained from environmental sample
  misc_feature (1)..(498): n is a, c, g, or t
atgtccctcaactggaaagaaattgacctgattcttgaggaattggacttacccggttctcagattcaaggcgcggcccagagcgcctttgacgttattggtttgcggatacacaaaaagggtgcgccatcttccgatggagcgaccaaacagttgcttatcgcgctgagccccggcgcttgccgtttccatgaaacttttcgctcctttcccaaaagcgacaaaccgctgcgttttgcccaattcctcaactcccgcgttgtcaacggctggatagaagaggcggcgcagttgggagataaccgcattatccggctgttggtaaaaaggggggagaaccgcttccgcctgtatatcaggctgtggtcaaacgccgcgaactttattgtcaccgatgaacagggtgtcgtgctggacgcgatgcgccgcctgcccaaaaaaggggaaataagcggcgggacatatgcgccggaaggggatgaaagcgcaccgccctga

SEQ ID NO: 19526 - protein, 165 aa, Unknown
  Obtained from environmental sample
  misc_feature (1)..(165): Xaa is any amino acid
MSLNWKEIDLILEELDLPGSQIQGAAQSAFDVIGLRIHKKGAPSSDGATKQLLIALSPGACRFHETFRSFPKSDKPLRFAQFLNSRVVNGWIEEAAQLGDNRIIRLLVKRGENRFRLYIRLWSNAANFIVTDEQGVVLDAMRRLPKKGEISGGTYAPEGDESAPP

SEQ ID NO: 19527 - DNA, 705 bp, Unknown
  Obtained from environmental sample
  misc_feature (1)..(705): n is a, c, g, or t
ttgcattttnttnnnggcatgatcagatcggccgagagacgtggctttgcaaatctaccggtagtctttattatagacagagcaggcttggtaggctcagatggtccaacccaccacggtgcgctggatttgtcttatttgcgcacaattcccaatatggtgattatggctccctcagatgagaacgaaatgcgcaatatgatttacacggcaacccaatataaaaacggtcccatagctcttcgctacccaagggcaattacctatacaaacgatattcgcacggaattttcggagttgcccataggcaaattccgcatcgttcgcaagggcaaaaaggttttaataataggcataggctttttgctcgcgaaatgccttgatgcagcgggtgttttggagaataagggctatgaacccacaataatagacgctcgttttgcaaagcctcttgatgttgaagcctataaggagctttttagcaagcacagcgttgttgcaacggtagaagacaattccacaacgggcggttttggttctgcaatcgcagagattttggcagagatgaaaaacccgccgcgcttgattcgagtggggctgccggattcctttgttgagcaaggggaaatagatgaattgagggaaagccttgggctttctggtcaaagcatagctgataaaatactcttaaatgccgccacctga

SEQ ID NO: 19528 - protein, 234 aa, Unknown
  Obtained from environmental sample
  DOMAIN (1)...(90): Transketolase, pyridine binding domain
  misc_feature (1)..(234): Xaa is any amino acid
MHFXXGMIRSAERRGFANLPVVFIIDRAGLVGSDGPTHHGALDLSYLRTIPNMVIMAPSDENEMRNMIYTATQYKNGPIALRYPRAITYTNDIRTEFSELPIGKFRIVRKGKKVLIIGIGFLLAKCLDAAGVLENKGYEPTIIDARFAKPLDVEAYKELFSKHSVVATVEDNSTTGGFGSAIAEILAEMKNPPRLIRVGLPDSFVEQGEIDELRESLGLSGQSIADKILLNAAT

SEQ ID NO: 19529 - DNA, 738 bp, Unknown
  Obtained from environmental sample
  misc_feature (1)..(738): n is a, c, g, or t
atgatcagatcggccgaggccgtagactttggaaatcttgtgcgtgagctcaaggaaaacgcgccttctaatgaaaacgccccctccaatgaagcgctttcccgcgagaaaaccctcaaggtaaaagaatttttgaatgatcttgcccgcaccgttgacgcagaagaagccgcgctggaagaagaagaaaaggccattgcggaaaaacgccgccgcatcagcgcggaacaaacaacgcccggcgctgcggcaacctttgcccccggcatggaagttcttgccggaacgccgcagcggcgcggcgtgctggtcaagccgggcaaaaaaagccctgcgggaaattcatggatcgtggagattggctcgctcaggatacgtttcccggaacgggatttaatacccgcctccccgcaggcaacgcagcccaaacgccatcttgccacagttgaactggcccaagcgccgcccgtcagcccggaaattaacctctgcggaatgcggctggaagaagcccttgatgccttgagccgccagatagacgcggcgcttctgcacgggctgcatgaattttccgtggtacacggtaagggggacggcattctgcaaaaaggcgtccatgaaaaactgaaaaacgagccgaccgtcgccgattattatttttcccgccccgaactcggcggcttcggcagaaccgaagtaattctgaaaagttacggcagcgcaggtttatttcattga

SEQ ID NO: 19530 - protein, 245 aa, Unknown
  Obtained from environmental sample
  DOMAIN (161)...(236): Smr domain
  misc_feature (1)..(245): Xaa is any amino acid
MIRSAEAVDFGNLVRELKENAPSNENAPSNEALSREKTLKVKEFLNDLARTVDAEEAALEEEEKAIAEKRRRISAEQTTPGAAATFAPGMEVLAGTPQRRGVLVKPGKKSPAGNSWIVEIGSLRIRFPERDLIPASPQATQPKRHLATVELAQAPPVSPEINLCGMRLEEALDALSRQIDAALLHGLHEFSVVHGKGDGILQKGVHEKLKNEPTVADYYFSRPELGGFGRTEVILKSYGSAGLFH

SEQ ID NO: 19531 - DNA, 837 bp, Unknown
  Obtained from environmental sample
  misc_feature (1)..(837): n is a, c, g, or t
ttgccgggcgaatggtacaaagtgcttaccgaggacggcagcacgggctactgtttctcataccggctcagagtatttgagtacggcagcgaagactttacctcttccgtggctgtcatcaacgaacaagccgaagatcccgagttggaaatactgttgtcaaaagaatggtcgcccgaatcgtatctcacaatgattaactcaaaaaaaatcaatcttgaagaattgtccaaacattggcgctttgatccaggacaggagatcggccgtgccagagtttttgtacctgatattgacaacacctttcagtataccagcatccgtcgtgatggtaatcgaacctggcgttttgaaggaaccaacctttcaatacaacttagaggtgaaacgatcctggccgtacaatttccggaagggagcggcagtacaaggactttactctttgtctcactgcccgtcagcgtggacgatcttatcttacaggaagccgcccgccgcgaaagcctgtacaacaggatttacagccgggggccggtttataccagcaacaactacggaaccatcacctttaagggaggcgggagattctcatggcggaatttcgatctcctggtaccccgtttcatccccgaagacatcgaaggtgacgggacagttttgttagaccttttccttgattccgcgtttgaggatcgctacgacggggcatttactctccgttttgcaaataaaagggctgcgctgtactgtatgtattcgcttgacaacgaggggttcaggatagagatagtcccggattcgagtattgaggaggtcaccataccagcctcgcgataa

SEQ ID NO: 19532 - protein, 278 aa, Unknown
  Obtained from environmental sample
  misc_feature (1)..(278): Xaa is any amino acid
MPGEWYKVLTEDGSTGYCFSYRLRVFEYGSEDFTSSVAVINEQAEDPELEILLSKEWSPESYLTMINSKKINLEELSKHWRFDPGQEIGRARVFVPDIDNTFQYTSIRRDGNRTWRFEGTNLSIQLRGETILAVQFPEGSGSTRTLLFVSLPVSVDDLILQEAARRESLYNRIYSRGPVYTSNNYGTITFKGGGRFSWRNFDLLVPRFIPEDIEGDGTVLLDLFLDSAFEDRYDGAFTLRFANKRAALYCMYSLDNEGFRIEIVPDSSIEEVTIPASR

SEQ ID NO: 19533 - DNA, 507 bp, Unknown
  Obtained from environmental sample
  misc_feature (1)..(507): n is a, c, g, or t
atgttttttacaattgcaataatatttttctatgtaatgattgccgtatcagcctatttttttctgaccgccgcgacaaacgtactggatatgagaattcgtacttcaaagccttcgataaaaaacggacctatggtctcggtgctgattcccgtccgtaacgaaaaaaaaaatatagaagggtgcctttcttcactgcaaaatcagaattacaataattatgagattcttgttattgacgataattcagccgacggcacttacgggattgtttccaaaatcgcggaaaaggatacccgggtaaaagtatttaagggcaaacccttacccgccgactggtacggcaagccgtttgccctttcccagcttgttccccataccgacggtgaaattctgctctttaccgacgccgatacaatccacagccccaccagtgtttcctgggcggtaacaacatgggagcgacccagcggatttattttcggctatgtcggccagattctctaa

SEQ ID NO: 19534 - protein, 168 aa, Unknown
  Obtained from environmental sample
  SIGNAL (1)...(24)
  misc_feature (1)..(168): Xaa is any amino acid
MFFTIAIIFFYVMIAVSAYFFLTAATNVLDMRIRTSKPSIKNGPMVSVLIPVRNEKKNIEGCLSSLQNQNYNNYEILVIDDNSADGTYGIVSKIAEKDTRVKVFKGKPLPADWYGKPFALSQLVPHTDGEILLFTDADTIHSPTSVSWAVTTWERPSGFIFGYVGQIL

SEQ ID NO: 19535 - DNA, 870 bp, Unknown
  Obtained from environmental sample
  misc_feature (1)..(870): n is a, c, g, or t
atgatgaacatcctcaacggcggtcaacacgccgacttctgcattgacatccaagagttcatggtgcttccagttggggcgccttcattcagggagtgcctcaggtggggcgctgagatataccactctctcaggtctgttctcaagtccaagaagctctccactggcgttggtgacgaaggcggcttcgcgcctaccctgcagagcaacgaagaggcactgaacctgatagccgaggccgccaagaaggccggctacgaacccggcaaggatgtattcttcggtctggactgcgcttccagcgagttctacgagaacggcaaatacaacatagacaaaggaaccaaatccggcccagaattgattgactactacgttggactgacgcagcgccacccgctcctgtcaatcgaagacgggtgcgatgagagcgactggcccaactggtctgtgctgacggagaaattgaacaagaccacgcagctggtgggggacgaccttttcgtcaccaacaccaagatactggccaagggcatttccgaaggcgtggcaaacgcaatcctcatcaagctgaaccagataggcaccgtgaccgagacctttagggccgtggacatggcgcacaaagctggttacaaggcgattatcagccaccgcagcggtgaaactgaagacacattcatcgccgacttggtcgttgccactggcgcgggccagataaaaactggcgccccatgcaggaccgaccgcgtggccaagtacaaccgattgctccaaattgaatgggagcttggcaaggccgccaaattcgcgggccgtgatgcgtttgggcggaggctgaagaacatgaacctagcttggctcccttaa

SEQ ID NO: 19536 - protein, 289 aa, Unknown
  Obtained from environmental sample
  DOMAIN (1)...(279): Enolase, C-terminal TIM barrel domain
  misc_feature (1)..(289): Xaa is any amino acid
MMNILNGGQHADFCIDIQEFMVLPVGAPSFRECLRWGAEIYHSLRSVLKSKKLSTGVGDEGGFAPTLQSNEEALNLIAEAAKKAGYEPGKDVFFGLDCASSEFYENGKYNIDKGTKSGPELIDYYVGLTQRHPLLSIEDGCDESDWPNWSVLTEKLNKTTQLVGDDLFVTNTKILAKGISEGVANAILIKLNQIGTVTETFRAVDMAHKAGYKAIISHRSGETEDTFIADLVVATGAGQIKTGAPCRTDRVAKYNRLLQIEWELGKAAKFAGRDAFGRRLKNMNLAWLP

SEQ ID NO: 19537 - DNA, 312 bp, Unknown
  Obtained from environmental sample
  misc_feature (1)..(312): n is a, c, g, or t
gtggcgctgcgtcagtccaacgtagtagtcaatcaattctgggccggatttggttcctttgtctatgttgtatttgccgttctcgtagaactcgctggaagcgcagtccagaccgaagaatacatccttgccgggttcgtagccggccttcttggcggcctcggctatcaggttcagtgcctcttcgttgctctgcagggtaggcgcgaagccgccttcgtcaccaacgccagtggagagcttcttggacttgagaacagacctgagagagtggtatatctcagcgccccacctgaggcactccctgaatga

SEQ ID NO: 19538 - protein, 103 aa, Unknown
  Obtained from environmental sample
  misc_feature (1)..(103): Xaa is any amino acid
MALRQSNVVVNQFWAGFGSFVYVVFAVLVELAGSAVQTEEYILAGFVAGLLGGLGYQVQCLFVALQGRREAAFVTNASGELLGLENRPERVVYLSAPPEALPE

SEQ ID NO: 19539 - DNA, 372 bp, Unknown
  Obtained from environmental sample
  misc_feature (1)..(372): n is a, c, g, or t
ttggagcaatcggttgtacttggccacgcggtcggtcctgcatggggcgccagtttttatctggcccgcgccagtggcaacgaccaagtcggcgatgaatgtgtcttcagtttcaccgctgcggtggctgataatcgccttgtaaccagctttgtgcgccatgtccacggccctaaaggtctcggtcacggtgcctatctggttcagcttgatgaggattgcgtttgccacgccttcggaaatgcccttggccagtatcttggtgttggtgacgaaaaggtcgtcccccaccagctgcgtggtcttgttcaatttctccgtcagcacagaccagttgggccagtcgctctcatcgcacccgtcttcgattga

SEQ ID NO: 19540 - protein, 123 aa, Unknown
  Obtained from environmental sample
  misc_feature (1)..(123): Xaa is any amino acid
MEQSVVLGHAVGPAWGASFYLARASGNDQVGDECVFSFTAAVADNRLVTSFVRHVHGPKGLGHGAYLVQLDEDCVCHAFGNALGQYLGVGDEKVVPHQLRGLVQFLRQHRPVGPVALIAPVFD

SEQ ID NO: 19541 - DNA, 888 bp, Unknown
  Obtained from environmental sample
  misc_feature (1)..(888): n is a, c, g, or t
ttgggccatcgctgcggctgtgacattttttccaaaggctcaattaaaaaaacagcacgggcggaaccagcccccaatgcttcaaacctgaagtgcggtatcattacctattacaggcgcagccacaagagaggtcaacaagtgccgcagatgcagatgctgatcgaagaagagtccttgcaggaacaacaagggggcaaaaaaattgccgatgagttcggcgatggggcggaaattgtctttttgcatggcgactccttagacagcatgaggaaatgcccgccgggttttgcaacgctgataatcacttcgccaccttacaacatcggcaaagaatatgaaacccagacgaaccttgaaaagtatctaaacaggctcgaacccatcatagagcaactgattcgcgcattggcccccaatggctcgctttgctggcaggttgggaattatgtggaaaacaaagagattttcccgctggatacatatttctacacgattttcaaaaaatgcggactcaagctgaggaaccgcatcgtgtggacattcgaccacggcctgcactgctcggcgcgtttttctggccgctacgagacgctgctttggttcacaaagggcgatgactatgttttcaacctcgaccctgtgcgggtgccctccaagtatccaggcaagacccacttcaagccaggccccaaatatgggctcccgtctggcaaccctttggggaagaacccaagcgatgtatggaacttgttggcgcaagaatgggaaacggggctatggaacatcccaaacgtcaaagccaaccatccagaaaagacgctgcacccttgccaatttcccatcgagctgggagcgctctgccatatgtcatgtnnnnnnaaatga

SEQ ID NO: 19542 - protein, 295 aa, Unknown
  Obtained from environmental sample
  DOMAIN (98)...(295): DNA methylase
  misc_feature (1)..(295): Xaa is any amino acid
MGHRCGCDIFSKGSIKKTARAEPAPNASNLKCGIITYYRRSHKRGQQVPQMQMLIEEESLQEQQGGKKIADEFGDGAEIVFLHGDSLDSMRKCPPGFATLIITSPPYNIGKEYETQTNLEKYLNRLEPIIEQLIRALAPNGSLCWQVGNYVENKEIFPLDTYFYTIFKKCGLKLRNRIVWTFDHGLHCSARFSGRYETLLWFTKGDDYVFNLDPVRVPSKYPGKTHFKPGPKYGLPSGNPLGKNPSDVWNLLAQEWETGLWNIPNVKANHPEKTLHPCQFPIELGALCHMSCXXK

SEQ ID NO: 19543 - DNA, 654 bp, Unknown
  Obtained from environmental sample
  misc_feature (1)..(654): n is a, c, g, or t
atgaaaaccaatcgttttttactcacggcagccctcgtgctcgccaccgcattaaccctttcctgctctagtggtgacgaccctgcggataaccacggcaacgagagcagttcttcccagccgcagggcaatatctcttccagcgaaatgccgtcttcgtctagtagcggcagtagcagttcttctcaaccgcagggcaacatttcttccagcgaaacgccgtcttcgtctagcagtggcaacagcagtagcgtaggaaacagcacagaggattcttccagcagcaagaatgaaattagttcctccagcagttccaatggcatgatacggaaaaccaaaatcagcggcgttttccagaaaggaccgttcatcgcaggcacaacagccacattgaacgaattggacaatgaattgaatcccacaggtcgcccataccaaacgctgattacggacgacaaagggacattcgagctgaggaacgttgaattggtttcgccttatgctcacttaattgcaagcggcttttaccgcaacgaggtgacaggcaacaaatccgccgctcccatcactttgcaggcggttgtggatttgagagacaaggacaacgtgaatgtgaatatccttacgcatcttgaatattanccgtgtgcttga

SEQ ID NO: 19544 - protein, 217 aa, Unknown
  Obtained from environmental sample
  SIGNAL (1)...(24)
  misc_feature (1)..(217): Xaa is any amino acid
MKTNRFLLTAALVLATALTLSCSSGDDPADNHGNESSSSQPQGNISSSEMPSSSSSGSSSSSQPQGNISSSETPSSSSSGNSSSVGNSTEDSSSSKNEISSSSSSNGMIRKTKISGVFQKGPFIAGTTATLNELDNELNPTGRPYQTLITDDKGTFELRNVELVSPYAHLIASGFYRNEVTGNKSAAPITLQAVVDLRDKDNVNVNILTHLEYXPCA

SEQ ID NO: 19545 - DNA, 831 bp, Unknown
  Obtained from environmental sample
  misc_feature (1)..(831): n is a, c, g, or t
ttgaacatggggggacagcaggttgaggcgaagcccgggaccgcgcttaacgcggccgcggggaatgacgggatggcgctgcaagtgagcaaaggcgcggccgcgatcatggaaaacggacagagccgtgcgctgacgacgggagcggcggtcgtgatggacaacgaaggattgattcgcactacgccctccgcgctggtcagcgcgccccgtcccaacgccctttaccgcaagaacggcgccgggccttttgccgtcgcttttgcgtggaaccggatcaacctgcagcccaatgaaacgctgcgccttgaaatagccgaagaccggaactttatccgttccgtccgcgtctttgacggcctgaacgattccgcgcgggccgagcttccggcggggctttggaactggcggctgagctacctcaactctgttcttgattcggggcggtttaccataacggaggttcccgggctggaactgctaagccccgcgaggaaccagcaatttttttatgagacagaaccgccgaaactgtattaccagtggtccggggctgaggatgttttacattacattgtggaagtggacgttacgcccgaattcaggaatcccattataaggaagcagaccgcggttacgtcttttgccgattcaagccttgagaatggcgtctggtactggcgcgtaacgcctgtttattcccaaaccacagaaggcggcgttggaggccttaattcgcgcccgtccgcttttcgcatagaaaaagcagggagccgcaaacatcgccgttattgccatggaggaggaagagccagcgctctgccgatctga

SEQ ID NO: 19546 - protein, 276 aa, Unknown
  Obtained from environmental sample
  misc_feature (1)..(276): Xaa is any amino acid
MNMGGQQVEAKPGTALNAAAGNDGMALQVSKGAAAIMENGQSRALTTGAAVVMDNEGLIRTTPSALVSAPRPNALYRKNGAGPFAVAFAWNRINLQPNETLRLEIAEDRNFIRSVRVFDGLNDSARAELPAGLWNWRLSYLNSVLDSGRFTITEVPGLELLSPARNQQFFYETEPPKLYYQWSGAEDVLHYIVEVDVTPEFRNPIIRKQTAVTSFADSSLENGVWYWRVTPVYSQTTEGGVGGLNSRPSAFRIEKAGSRKHRRYCHGGGRASALPI

SEQ ID NO: 19547 - DNA, 666 bp, Unknown
  Obtained from environmental sample
  misc_feature (1)..(666): n is a, c, g, or t
gtgaagaaactgcacgagttcacccccatgatggggcaccgcggctgccgcctcggcatcacgtatcccgaaatcatccgcatgcaaatgcgcgccatagccgaagccgccatcaatgccgagaagaagggcatcaaggccatacccgaggtcatggtgccacttataggcacagtcaaagagctttcgttcaccaaggccgaaatgctagccgaaattgccgagatcaacaaagagcaaggcaccaattttagttgccagatcggcacaatgatagagataccccgcgccgcaataaccgccgaccaagtggccctagaagccgactactttagcttcggcaccaacgacctcacccagatgggctttggcttcagccgcgacgatgcgggcacattcctgcgcgactactacgccaaaaagattttggacgacgatccattccagaccttggatcagcaaggcataggcgaattggtcaaaatggcctgcgaaaaagggcgctccgccaagccaggcttcaagctgggagtctgcggcgagcacggcggagacccgcgctcggtcaagttcttcttcaagtgcggccttaactatgtgagctgcagccccttccgcgtacccgttgccattgtggctgcggcgcaggccagcctggaggaataa

SEQ ID NO: 19548 - protein, 221 aa, Unknown
  Obtained from environmental sample
  DOMAIN (1)...(219): PEP-utilising enzyme, TIM barrel domain
  misc_feature (1)..(221): Xaa is any amino acid
MKKLHEFTPMMGHRGCRLGITYPEIIRMQMRAIAEAAINAEKKGIKAIPEVMVPLIGTVKELSFTKAEMLAEIAEINKEQGTNFSCQIGTMIEIPRAAITADQVALEADYFSFGTNDLTQMGFGFSRDDAGTFLRDYYAKKILDDDPFQTLDQQGIGELVKMACEKGRSAKPGFKLGVCGEHGGDPRSVKFFFKCGLNYVSCSPFRVPVAIVAAAQASLEE

SEQ ID NO: 19549 - DNA, 750 bp, Unknown
  Obtained from environmental sample
  misc_feature (1)..(750): n is a, c, g, or t
atgagagactggatttggagcataaaagaaaataaaaaagccatagccacgcaatcgcaagctcttgcttgcttgaaaagttttgggaaatatttggttcgcggagcagttctagggcataatccggctgctgttataaaaactccaaagaagccaaaaaggttggtttcttttttatctcaaaaagagattagcgagccttttaaaattgaggatttattcaaaacggagtttggcgaaaacgaaaataccctgcgggcaagaaccattttggaattgctttacggaacagggcttagaatttctgagtgcgcaaatttaacctgggcaaatttgaattttgcagaggaattggttagggtatggggcaaaggcagcaaagaacgtattgtgcctttaactagggattcaataaaatggctttgcaaattcagggattttcagagcaaaaatgcaattccttgttctccatctaattttgtgttctcaaaaaatggcgaaaagccttataacacccgcaaactttacagcgatattcacaatcttctccgttcaataggctgggaaggcaaggcaagcccccacgttttgcggcacacttttgcaacgcacttgctggaaaatggcgcanacatagtgactgttcaaaaacttttaggccacagcaacccaaacaccacgcaaatttacacgcacgtgagtgcagagatgctgagagatagcctanaacaagcacaccctaggggatag

SEQ ID NO: 19550 - protein, 249 aa, Unknown
  Obtained from environmental sample
  DOMAIN (73)...(240): Phage integrase family
  misc_feature (1)..(249): Xaa is any amino acid
MRDWIWSIKENKKAIATQSQALACLKSFGKYLVRGAVLGHNPAAVIKTPKKPKRLVSFLSQKEISEPFKIEDLFKTEFGENENTLRARTILELLYGTGLRISECANLTWANLNFAEELVRVWGKGSKERIVPLTRDSIKWLCKFRDFQSKNAIPCSPSNFVFSKNGEKPYNTRKLYSDIHNLLRSIGWEGKASPHVLRHTFATHLLENGAXIVTVQKLLGHSNPNTTQIYTHVSAEMLRDSLXQAHPRG

SEQ ID NO: 19551 - DNA, 753 bp, Unknown
  Obtained from environmental sample
  misc_feature (1)..(753): n is a, c, g, or t
atgtccagaaccgttgtctacaaagccctgtctctgagaaaccgccaaaattcaagtcaggaatccaacagcgaagtttacctgctaaccgccgaagaaggtatcatcagggctacggtttttggcggcgcaaagagcaaactgcgctcccatgccgcgccgtacaattcaggacaagtctggatttaccgcgatccgtcaaaagattaccgcaaactaagcgattttgacgttcattcatggcgccccggactaagggaactttacgagcggacaatggctgcaagcgggatagcggaaacgattctgtcttctcacggcggcggcagtgattggagcgaagctatgtcactcgcttcggcagcgctggatacgctggaaagcgccaacgaagaattgtgtgaacggcttttggttcactttttatggcgctgggcaggtttcctcggactgcagccgcaagtcggctgttgttcaaattgcgggaatgaagccgctgacggcccgcttatgttcaataaccgcgaaaacagtttgctttgtgaaaaatgtatcatcaatacagactctgcctcaggcttgattaaacttaactcaggcagccgccgttggcttgccttaacagggcagatcgaatcttctattttgcaccgttattcaatggacagtaaatctttccgcgaagcaaaaacgctgattgccgcagtaatgactgcggcaatcggaaaacagcttgcaagctgggaatggtaa

SEQ ID NO: 19552 - protein, 250 aa, Unknown
  Obtained from environmental sample
  DOMAIN (1)...(237): Recombination protein O
  misc_feature (1)..(250): Xaa is any amino acid
MSRTVVYKALSLRNRQNSSQESNSEVYLLTAEEGIIRATVFGGAKSKLRSHAAPYNSGQVWIYRDPSKDYRKLSDFDVHSWRPGLRELYERTMAASGIAETILSSHGGGSDWSEAMSLASAALDTLESANEELCERLLVHFLWRWAGFLGLQPQVGCCSNCGNEAADGPLMFNNRENSLLCEKCIINTDSASGLIKLNSGSRRWLALTGQIESSILHRYSMDSKSFREAKTLIAAVMTAAIGKQLASWEW

SEQ ID NO: 19553 - DNA, 741 bp, Unknown
  Obtained from environmental sample
  misc_feature (1)..(741): n is a, c, g, or t
atggcctgcggcgcgtgcgcagccgcctgcccgcatggcctgatcgcaacgaaagagcgcggcggccctgaacttgaccgcaaggcgtgcgtcgcatgcggcgcctgctgcgatgtctgcccgaccggcgccatgttccgcaagggcagggacatgactgtggacgaaattgtcgccgcggcattgcgagacagcgtcttctacgcccattcgggcggaggactcacggtttccggcggcgaacccttggcgcagcctgattttttgcttgaactgctcggcgcggccaaggatgcagcactgaacacggccatggaaacgacgcttcacgcagattgggctgtcgtcgagcgttgtctgccttttctggatcatgtgttttttgacgtaaagcatccagactccgccctccatgccgcaggcgccggcgtggggctggaaaaaattctgccgaatgccgggcgcttgtgccgggtccatccggatccgcatccgcgcatccccgtcattccaggctacaacacgagcgagaaggcaatggagggcttcgctgagctgatagcgggttttgggcgcccagttgagcttctgccctatcacgcgctcggcgaaggcaaatactcgctgctcggcaaaccttaccccggcgatgacatcccggcggacaagggcttggagtacgcgaaactttttcaaaattacctgcgcgggcgcggcatcgacgcggacattcacgcctga

SEQ ID NO: 19554 - protein, 246 aa, Unknown
  Obtained from environmental sample
  DOMAIN (27)...(184): Radical SAM superfamily
  misc_feature (1)..(246): Xaa is any amino acid
MACGACAAACPHGLIATKERGGPELDRKACVACGACCDVCPTGAMFRKGRDMTVDEIVAAALRDSVFYAHSGGGLTVSGGEPLAQPDFLLELLGAAKDAALNTAMETTLHADWAVVERCLPFLDHVFFDVKHPDSALHAAGAGVGLEKILPNAGRLCRVHPDPHPRIPVIPGYNTSEKAMEGFAELIAGFGRPVELLPYHALGEGKYSLLGKPYPGDDIPADKGLEYAKLFQNYLRGRGIDADIHA

SEQ ID NO: 19555 - DNA, 351 bp, Unknown
  Obtained from environmental sample
  misc_feature (1)..(351): n is a, c, g, or t
ttgcatgcccaaataccatttctaattagtggaggggatcattttaaaaaagctctttttcgggggaaaaatatgagcaatgttacaaaaaggagtttggtggagaaggtggcgatccgaaccggtctgactcaggtggacacgaagatcgtgttggattgctttttggaggcgttgtccgattctttggtgcagggtaacggcatagagatccgcggttttgggcgtttcaagatcagggagaagaagccgcgcaccgcccgcaatccgcggacgaatgaggttatagaggtaaaggccgggataaaaccgatattcgagcccgcgttgcagttgaagaagncgggttaa

SEQ ID NO: 19556 - protein, 116 aa, Unknown
  Obtained from environmental sample
  DOMAIN (28)...(114): Bacterial DNA-binding protein
  misc_feature (1)..(116): Xaa is any amino acid
MHAQIPFLISGGDHFKKALFRGKNMSNVTKRSLVEKVAIRTGLTQVDTKIVLDCFLEALSDSLVQGNGIEIRGFGRFKIREKKPRTARNPRTNEVIEVKAGIKPIFEPALQLKKXG

SEQ ID NO: 19557 - DNA, 342 bp, Unknown
  Obtained from environmental sample
  misc_feature (1)..(342): n is a, c, g, or t
gtgagcgtctacgagggtctgatggacgcggtgaccggtctctccggtagcgggccggctttcgcgtacagtttcatcgaggcgcttgcggagggcggggtcgggaccgggttatcctacaagatggctatggatatggcggttcagacggtggtaggcgcggcgcgtatggttcaggctaccgcggagcatccgtctgtgctgcgttcgcgggttatgtcgccgggcgggacgacggtcaaagggcttgaggcgttggagcgggccgcgttcaaaagtaccgtgatgtcggccgtcgcggaggccgcggcgcagtcggcgcgtatggctggtaaaaagtaa

SEQ ID NO: 19558 - protein, 113 aa, Unknown
  Obtained from environmental sample
  SIGNAL (1)...(22)
  misc_feature (1)..(113): Xaa is any amino acid
MSVYEGLMDAVTGLSGSGPAFAYSFIEALAEGGVGTGLSYKMAMDMAVQTVVGAARMVQATAEHPSVLRSRVMSPGGTTVKGLEALERAAFKSTVMSAVAEAAAQSARMAGKK

SEQ ID NO: 19559 - DNA, 888 bp, Unknown
  Obtained from environmental sample
  misc_feature (1)..(888): n is a, c, g, or t
gtgagaccgcctaaggattcggagcgctacttcgcgctgcttagggtcgagatgatcaactacgaagacccggaggagtgcaagcgcaagataaacttcgacgacctaaccccgctcttcccagacaaaaagtttgacctcgagtacaatcctaaggagaccgccacccgcatcatcaaccttatggcccccataggcaaggggcagcgcggcctcatagtggcgcctccccgcaccggcaagaccgttctgctcaaaaacttggcgaacgcgatcttggccaaccacaaagaggtgcatctcatagtcctgctcatagacgagcgcccggaggaggtcaccgatatgcagcgcagcgtaaacgccgagatcataagctcgaccttcgacgaaccggccgaccgccacgtggtcgtggccgagatggcgatcgaacgggccaagcgccttgtcgagcacaaccgcgacgtggtgatcctgctagacagcataacccgcttggcccgcgcccacaatacggtggcgccgcactcggggcgcgttctgtcgggcggcgtggactcgcaggcgctttacaagcccaagcgtttcttcggcgcggcccgcaatattgataacggcgggtcgctcaccatcatcgccaccgccctcatagagacaggcagtcgtatggacgaggtgatctttgaggagttcaagggcacgggtaatatggagttggtgctggacagaaagatagccgagcgccgcgtattcccggccatcgatcccttcaagagcgggacgcgcaaggaggagatgctgcttagcccaagagagctgaacaggatgtggatactccgtaaagtcatggcctcaatgtcgcctattgaggctatggagttatga

SEQ ID NO: 19560 - protein, 295 aa, Unknown
  Obtained from environmental sample
  DOMAIN (54)...(262): ATP synthase alpha/beta family, nucleotide-binding domain
  misc_feature (1)..(295): Xaa is any amino acid
MRPPKDSERYFALLRVEMINYEDPEECKRKINFDDLTPLFPDKKFDLEYNPKETATRIINLMAPIGKGQRGLIVAPPRTGKTVLLKNLANAILANHKEVHLIVLLIDERPEEVTDMQRSVNAEIISSTFDEPADRHVVVAEMAIERAKRLVEHNRDVVILLDSITRLARAHNTVAPHSGRVLSGGVDSQALYKPKRFFGAARNIDNGGSLTIIATALIETGSRMDEVIFEEFKGTGNMELVLDRKIAERRVFPAIDPFKSGTRKEEMLLSPRELNRMWILRKVMASMSPIEAMEL

SEQ ID NO: 19561 - DNA, 354 bp, Unknown
  Obtained from environmental sample
  misc_feature (1)..(354): n is a, c, g, or t
gtgctcgacaaggcgcttggcccgttcgatcgccatctcggccacgaccacgtggcggtcggccggttcgtcgaaggtcgagcttatgatctcggcgtttacgctgcgctgcatatcggtgacctcctccgggcgctcgtctatgagcaggactatgagatgcacctctttgtggttggccaagatcgcgttcgccaagtttttgagcagaacggtcttgccggtgcggggaggcgccactatgaggccgcgctgccccttgcctatgggggccataaggttgatgatgcgggtggcggtctccttaggattgtactcgaggtcaaactttttgtctgggaagagcggggttag

SEQ ID NO: 19562 - protein, 117 aa, Unknown
  Obtained from environmental sample
  misc_feature (1)..(117): Xaa is any amino acid
MLDKALGPFDRHLGHDHVAVGRFVEGRAYDLGVYAALHIGDLLRALVYEQDYEMHLFVVGQDRVRQVFEQNGLAGAGRRHYEAALPLAYGGHKVDDAGGGLLRIVLEVKLFVWEERG

SEQ ID NO: 19563 - DNA, 948 bp, Unknown
  Obtained from environmental sample
  misc_feature (1)..(948): n is a, c, g, or t
atgatcagatcggccgagacggaacaaacggcaaactgtattgtaacggtaagcacggaaaccgtagacgtaacaggcgtatcattgaacaaatctaatacaactatactcgtaggagaaacagaaacccttaccgcaacagttgcgccggataacgcaacaaacaaaaatgtaacatggtcatcaagcgatacttcaaaggcgactgttacaaatggcgaagttaccgccgttgccgcaggttctgcgacaattacggcaactacagcagacgggggaaagacggcaacttgtaatgtaacggtaagcgcaacagtgatagacgtaacaggagtatcattgaacaaatctaatacaactatactcgtaggagaaacagaaacccttaccgcaacagttgcgccgaacaacgcaacaaacaaaaatgtaacatggtcatcaagcgatacttcaaaggcgactgttacaaatggcgaagttaccgccgttgccgcaggttcggcgataattacggttactacatcagacggaggaaagacggcaacttgtaacgtaacggtaagcgcaacagcggtaggcgtaacaggcgtatcacttaacaaatcaagtacgagtataaccgtaggcggaacggaaatccttaccgcaacaatcacgccgagcggagcgactaatcaaaatgtgaactggtcttcaagcaataccgccgtagcgacagtgagcggaggaacagtaaccgctgtttcggcaggttctgcaacaattacggttactaccgtagacggaaacaggacggcgacttgctccgttactgtaacaacgccnacatacaccgttatatacaatgcaaacggcggaacaggaacaatggcaaacagtatccacacggtcggagaatctaaaaccttgtccccaatggnattacaagggaagactatctgttcatag

SEQ ID NO: 19564 - protein, 315 aa, Unknown
  Obtained from environmental sample
  DOMAIN (193)...(270): Bacterial Ig-like domain (group 2)
  misc_feature (1)..(315): Xaa is any amino acid
MIRSAETEQTANCIVTVSTETVDVTGVSLNKSNTTILVGETETLTATVAPDNATNKNVTWSSSDTSKATVTNGEVTAVAAGSATITATTADGGKTATCNVTVSATVIDVTGVSLNKSNTTILVGETETLTATVAPNNATNKNVTWSSSDTSKATVTNGEVTAVAAGSAIITVTTSDGGKTATCNVTVSATAVGVTGVSLNKSSTSITVGGTEILTATITPSGATNQNVNWSSSNTAVATVSGGTVTAVSAGSATITVTTVDGNRTATCSVTVTTPTYTVIYNANGGTGTMANSIHTVGESKTLSPMXLQGKTICS

SEQ ID NO: 19565 - DNA, 441 bp, Unknown
  Obtained from environmental sample
  misc_feature (1)..(441): n is a, c, g, or t
atgaagtcaataactttatatcatccgaacacatttcacaacgcgctgaacgattttaacaggtattttgattcgttctttgtggattcaattctgtctcctgaagaacgggttctgtactattcgccggcggtagatattcaggaaaacgaaaacagctatatcatgaagatggagcttcccggttttaacgaaaaaaatattgaggttaatgtcgacggcccttacctgagcatagtttccagacataaagaaaaaaaggagaaaaaggctgaaaaaaacggaaattctattctgcgcgaaagagggaacactaccttcaaccgttctttcctactgcccggaaacgccgacccgcttgcgataagcgcggcatttaaggacggcatcctgagtttggacataaagaaacgcgcggaaacgaagaggaagaattattga

SEQ ID NO: 19566 - protein, 146 aa, Unknown
  Obtained from environmental sample
  DOMAIN (46)...(144): Hsp20/alpha crystallin family
  misc_feature (1)..(146): Xaa is any amino acid
MKSITLYHPNTFHNALNDFNRYFDSFFVDSILSPEERVLYYSPAVDIQENENSYIMKMELPGFNEKNIEVNVDGPYLSIVSRHKEKKEKKAEKNGNSILRERGNTTFNRSFLLPGNADPLAISAAFKDGILSLDIKKRAETKRKNY

SEQ ID NO: 19567 - DNA, 495 bp, Unknown
  Obtained from environmental sample
  misc_feature (1)..(495): n is a, c, g, or t
atgggaaactctgcccctttatatttacagggcagtcggggcttatcgctacggaaacgcttgcgccgcaggttcattacttattttaagcctggcaggtgggctttttttatcagaatggggaagaaaaaaatatggctgagaaaatatatgtcaattgaagtaaaaggcataaaaaagtcttttggaatcttttctgttttattggatttatacgtcgataagggagaaacgctagcgctggttggtccttctggctcgggcaaaacaacggcccttaaccttatttcaggcatttcagctcccgaagagggaaagataatcgttgacggcgaggatatcagcgcccttccggtgtatcgaaggaatatctcggtggttttccaggatctcgctttatttccgcatctggatgtaggcggaaatattgcttacggtctttttgtacgtaaaatcccccgaaaagagcggcaaaggatagtgaagatgccctag

SEQ ID NO: 19568 - protein, 164 aa, Unknown
  Obtained from environmental sample
  DOMAIN (76)...(163): ABC transporter
  misc_feature (1)..(164): Xaa is any amino acid
MGNSAPLYLQGSRGLSLRKRLRRRFITYFKPGRWAFFIRMGKKKIWLRKYMSIEVKGIKKSFGIFSVLLDLYVDKGETLALVGPSGSGKTTALNLISGISAPEEGKIIVDGEDISALPVYRRNISVVFQDLALFPHLDVGGNIAYGLFVRKIPRKERQRIVKMP

SEQ ID NO: 19569 - DNA, 381 bp, Unknown
  Obtained from environmental sample
  misc_feature (1)..(381): n is a, c, g, or t
ttggttttccttcacgttttaattgccctccccttcgcttttaattccatcttggaaggcttccgttctttgccggaaaatatcctgaacgcggcattagtttccggggcccctcctcttcgaatgctcctgacaatagcgctgcctctttcccttccaaggatacgctcggcctggggttttgccgcagcactgagcctgggagagcttaacgcggtaatgatgcttggagttcaggaatgggaaactctgcccctttatatttacagggcagtcggggcttatcgctacggaaacgcttgcgccgcaggttcattacttattttaagcctggcaggtgggctttttttatcagaatggggaagaaaaaaatatggctga

SEQ ID NO: 19570 - protein, 126 aa, Unknown
  Obtained from environmental sample
  misc_feature (1)..(126): Xaa is any amino acid
MVFLHVLIALPFAFNSILEGFRSLPENILNAALVSGAPPLRMLLTIALPLSLPRIRSAWGFAAALSLGELNAVMMLGVQEWETLPLYIYRAVGAYRYGNACAAGSLLILSLAGGLFLSEWGRKKYG

SEQ ID NO: 19571 - DNA, 564 bp, Unknown
  Obtained from environmental sample
  misc_feature (1)..(564): n is a, c, g, or t
gtgcccaaaagcctggaggagctgacagatccaaagtatgccggaagccttatactgattgacccgcgcacttcttctcccggcctgggtttctttatctgggtaaaagaagtctatggcccagcatggcgcggttattgggaacggcttaagccttcaatactcaccattgccgaagggtggagcacagcatacgggctttttacaagcggagaagcgccaatggttctttcatacaccacaagccccggctatcacctggaatatgaaaacagcgaaaggtacaaggcagccattttccaggacgggcatatattacaaatagaagcggccgggcttttgaaaaacgcaaaaaattcatacaatgcaaagctcttccttgattttatgctggatcctgactttcaaaatattgttcctctcacaaattggatgtataccgtaacggatattcctttacctgattctttccgtgtaaacccaaaaagcgacaaacccctgaaaggcagcccggcaactgaagtggagcttaacgaatgggctacgttaatgctcaataattaa

SEQ ID NO: 19572 - protein, 187 aa, Unknown
  Obtained from environmental sample
  misc_feature (1)..(187): Xaa is any amino acid
MPKSLEELTDPKYAGSLILIDPRTSSPGLGFFIWVKEVYGPAWRGYWERLKPSILTIAEGWSTAYGLFTSGEAPMVLSYTTSPGYHLEYENSERYKAAIFQDGHILQIEAAGLLKNAKNSYNAKLFLDFMLDPDFQNIVPLTNWMYTVTDIPLPDSFRVNPKSDKPLKGSPATEVELNEWATLMLNN

SEQ ID NO: 19573 - DNA, 399 bp, Unknown
  Obtained from environmental sample
  misc_feature (1)..(399): n is a, c, g, or t
atgaagaacgggtttggctattccgcgtcgcttggcattaacattcctattatagactggggtgctgccgaagatggaattttgcaagcgcaagtcgcggaggaaagagcgcaaatctcggctctcaacacacaaaagcagcttgagaatgccattgagcagttggttttgcaagtggaaacttatcgtgttcaatgggaagtttcttctgtgcaattggatgctgggcggctttcccttgaaaaatccgttcagcaacacgagcttggaatgctggatatatcttcgctggttcagcaacaaacaattttcaacaattcgcaaataaagcacaatcaggcaaaatacagttatttgctgagtaaaacgcttttggatttgcaaaccggaaatttttaa

SEQ ID NO: 19574 - protein, 132 aa, Unknown
  Obtained from environmental sample
  misc_feature (1)..(132): Xaa is any amino acid
MKNGFGYSASLGINIPIIDWGAAEDGILQAQVAEERAQISALNTQKQLENAIEQLVLQVETYRVQWEVSSVQLDAGRLSLEKSVQQHELGMLDISSLVQQQTIFNNSQIKHNQAKYSYLLSKTLLDLQTGNF

SEQ ID NO: 19575 - DNA, 711 bp, Unknown
  Obtained from environmental sample
  misc_feature (1)..(711): n is a, c, g, or t
gtgtttttagcaccagggccttatgttgggattgactggggagagttgggggggggggccggagcccaaaaggttagttcatttttttttacccggtattgtcggtcccgggggagggatccgttttccgcttgggcgccagggcaagggggggacccgcgccttgggaaaaaaaggaattttccctgggcggacaaaggggaaggccaagacattggtttggttccgggaacagagtacgcggcctttttaagatccggaggggccgccgcaatagccgccgcaggggatatagtggatatagacggcaacgttataggaaaacacaacggcatccacaactataccgtcggccaacgcaaaggtctcggggcgttgggaaaaccgatgtacgtcaaacagatcatcctgaacgaaaacaaagtggtagccgcggaggacagccgaatagtcagcaacgaagcggtgatagaagacgccgtaatcgccaaaacgagggaggtaagcgtcggtaaccgctacgccgcccaaatacgctaccgaagcccggcggtcggggctgaagtcgttgaaatcaatagggctgacggtcaggatggattaacgataaggataaggtttgatgaccctgttcgtgcggtctcaccgggtcaggcggcggtgttatacgatggggatacggtcgtagcagggggaacgataaggctttga

SEQ ID NO: 19576 - protein, 236 aa, Unknown
  Obtained from environmental sample
  DOMAIN (1)...(234): tRNA methyl transferase
  misc_feature (1)..(236): Xaa is any amino acid
MFLAPGPYVGIDWGELGGGAGAQKVSSFFFTRYCRSRGRDPFSAWAPGQGGDPRLGKKRNFPWADKGEGQDIGLVPGTEYAAFLRSGGAAAIAAAGDIVDIDGNVIGKHNGIHNYTVGQRKGLGALGKPMYVKQIILNENKVVAAEDSRIVSNEAVIEDAVIAKTREVSVGNRYAAQIRYRSPAVGAEVVEINRADGQDGLTIRIRFDDPVRAVSPGQAAVLYDGDTVVAGGTIRL

SEQ ID NO: 19577 - DNA, 648 bp, Unknown
  Obtained from environmental sample
  misc_feature (1)..(648): n is a, c, g, or t
gtgctctccaaacacacggaaattacggaagaccttcaaaaaaatctggagctaataaccgatgacggcatgaagctttttaccgtaattaacgatattcttgatattttaaaaatagaatctggaaaaattaaattaaaccctattaaatataagttaccaaaattcatatatgatataacttcagcatacgtggtttatacggatagcaagccaattcaatacaagctggttattggagacaaattgccgttaaatcttatcggcgacgagcttcgcgtcaagcaaatttgccatcaccttttaactaacgcgtttaagtacacccatgaagggaatataacggttagcataacaaccaagctgaaaagcgaatatgtattgcttgtcataaaaatcacagacaccggaattggcatgacggaagacaaattaaacactatttttacaaattacgggcagggaagcgggggaattggggtcttcctatgcaagcaattagcggaaatgatgaaagggtcgctttccgtaaccagcgagcacggcaaaggcactgtctttacattttgtgtgccgcagaaattggtatccaacgagacaatcgggcccgatacggcaaaaaaacttgccaactttaaaatggaataa

SEQ ID NO: 19578 - protein, 215 aa, Unknown
  Obtained from environmental sample
  DOMAIN (89)...(194): Histidine kinase-, DNA gyrase B-, and HSP90-like ATPase
  misc_feature (1)..(215): Xaa is any amino acid
MLSKHTEITEDLQKNLELITDDGMKLFTVINDILDILKIESGKIKLNPIKYKLPKFIYDITSAYVVYTDSKPIQYKLVIGDKLPLNLIGDELRVKQICHHLLTNAFKYTHEGNITVSITTKLKSEYVLLVIKITDTGIGMTEDKLNTIFTNYGQGSGGIGVFLCKQLAEMMKGSLSVTSEHGKGTVFTFCVPQKLVSNETIGPDTAKKLANFKME

SEQ ID NO: 19579 - DNA, 903 bp, Unknown
  Obtained from environmental sample
  misc_feature (1)..(903): n is a, c, g, or t
atggcggtcatcggtaaaaacagaaagatgattattcatcacgggaaaacctgtattcaggggcggcaggcgctataccgtcttttggagccgacagacaaaatagctctggaagccggaaatctagcgtttattatagcgcgggagataatggaacagatcggtagtgaagtaagggtattgaactccgcgaaactgccgcttatctgggatgcgccgacaaaaactgacaaggaagacgcgatgaaattggcgcatcttattgaagacaggcgggacgaaaaactgccgatagtgccgctgcccagtgaaaaggaaatggaacggcggaaaacaatttccagttacggaagggaaatgaataaccggacaaggctgattaatacattacacgcgatatttgtacatcagggacataccactatagtgaagaaaaatcttgcgacagcggagcggagacagcaggcaattcaggtattgaccggacatgagcgagaagaggccgaatggcttttgaaatatcttgaattacacgaacagcgaatcaaggaattgagggtaaaaataaaagaagaagcgaaaaatgatgaagatatgaagcggttgcaaagcatacccggtattggacctatagtagcgtatgcctatgtagcccatgtgggagacggcagcagatttagcanaggagcgcaagtaagcaattatatcggatttgttccgagactggattattcangaactattcagcggcacgggcatataacanaacgcgggaacggttatctccgaggtctacttttgtcaagcgcttggactatgacgctctgtaaaaaaggcgagctctcagcactcgttataaatattatacgttatgccggggaagcaagtaaaagaagacaatag

SEQ ID NO: 19580 - protein, 300 aa, Unknown
  Obtained from environmental sample
  DOMAIN (174)...(285): Transposase IS116/IS110/IS902 family
  misc_feature (1)..(300): Xaa is any amino acid
MAVIGKNRKMIIHHGKTCIQGRQALYRLLEPTDKIALEAGNLAFIIAREIMEQIGSEVRVLNSAKLPLIWDAPTKTDKEDAMKLAHLIEDRRDEKLPIVPLPSEKEMERRKTISSYGREMNNRTRLINTLHAIFVHQGHTTIVKKNLATAERRQQAIQVLTGHEREEAEWLLKYLELHEQRIKELRVKIKEEAKNDEDMKRLQSIPGIGPIVAYAYVAHVGDGSRFSXGAQVSNYIGFVPRLDYSXTIQRHGHITXRGNGYLRGLLLSSAWTMTLCKKGELSALVINIIRYAGEASKRRQ

SEQ ID NO: 19581 - DNA, 606 bp, Unknown
  Obtained from environmental sample
  misc_feature (1)..(606): n is a, c, g, or t
ttgcggctgggactggagttaagcgcaagtatgctggaagatgaacgtaacaattattttgaccaaagcaccatagatgaattaacccagtgcaaaaaccgccgtgattttcagcagacattcaaaaggtatctgtccaactacagaacttcggataactggctgtgtgttgcgatccttgatattgattttttcaaattttacaacgatcattacggacaccctcagggtgacgactgtctgcgcgccgtaggcagggtattgaacagtttgcaggatatgctggacgtttatgccgccagggtcggcggcgaagaatttgccctgctgtggttcgaggctgaagtctcgcatgtggatgttgttgtttcccggttactggacttaataaaggacctcaaaattccgcacgaaaaatcaaaagtcgcgccgaatgtgtctatcagtatgggagtatttgtagaacagtgcggcgcggatactgatacgcagaccatgtatgatatggcggataaagcgctgtacaccgccaaagaaggcggacgtaattgcgcgattgtcaccggcagtacgattgaacaatacaagataacgccgactccctga

SEQ ID NO: 19582 - protein, 201 aa, Unknown
  Obtained from environmental sample
  DOMAIN (19)...(184): GGDEF domain
  misc_feature (1)..(201): Xaa is any amino acid
MRLGLELSASMLEDERNNYFDQSTIDELTQCKNRRDFQQTFKRYLSNYRTSDNWLCVAILDIDFFKFYNDHYGHPQGDDCLRAVGRVLNSLQDMLDVYAARVGGEEFALLWFEAEVSHVDVVVSRLLDLIKDLKIPHEKSKVAPNVSISMGVFVEQCGADTDTQTMYDMADKALYTAKEGGRNCAIVTGSTIEQYKITPTP

SEQ ID NO: 19583 - DNA, 618 bp, Unknown
  Obtained from environmental sample
  misc_feature (1)..(618): n is a, c, g, or t
gtgaaactggatttccactaccgctcctccggtttcagcaacacatatctcctcggcagcagcggggaagattctcccaaagaggcggttattgtagacccgagcctgatggacgcaagcctcctcaacatgattgaagaaaacaactattccttaaagggtgttcttataacccatgatcatccccaccatgttcaggggctaagggctattctgcgaatctacaacaccgaggttttcgcgataaatccggttgtcggagaataccatacaacactggtcagggacggggaaataataaacataggacaatttaaaactgaggttttttccgttcccgggcactcggccgattccgcgatattcaggatagagcgtctgctttttacaggcgacgccttaagcgcctgccgtttaggaagcaccgcaagctcatattccgcagcaacccaggcaagcgccatcataagaaagatcctttcactgccgggagattacactattcttcccggacacggccctccctcttcgcttgaagctgaacgccattttaacatagaactgaattcttatgggcatcagaagaaccgccgtcccgctttcaggtatgaggcatag

SEQ ID NO: 19584 - protein, 205 aa, Unknown
  Obtained from environmental sample
  DOMAIN (12)...(172): Metallo-beta-lactamase superfamily
  misc_feature (1)..(205): Xaa is any amino acid
MKLDFHYRSSGFSNTYLLGSSGEDSPKEAVIVDPSLMDASLLNMIEENNYSLKGVLITHDHPHHVQGLRAILRIYNTEVFAINPVVGEYHTTLVRDGEIINIGQFKTEVFSVPGHSADSAIFRIERLLFTGDALSACRLGSTASSYSAATQASAIIRKILSLPGDYTILPGHGPPSSLEAERHFNIELNSYGHQKNRRPAFRYEA

SEQ ID NO: 19585 - DNA, 552 bp, Unknown
  Obtained from environmental sample
  misc_feature (1)..(552): n is a, c, g, or t
ttgatccttcacaggaggtataaattgggaacagatatgtcgcaagcaattcgtcagttaaatcaggatcgcggtattcctgaagatctgatactgcggactattgaagatacgttaattgccgcatacaaacaccgttttggcaacgcggaaaacgcggttgttcagtttgatgaagataatcttgaagtctctattttcgcccggaaaaaaattgtggaacaggacggcgtttatgatcctgtaactgagattgatctggaagaagcaagggaattaaacccggacgccgaagttggcgatgaaatacttgtggaaatagacccgaaacaatttgaccgcatcacggttcaaagcgcgaaacaaaaagcccaccaatcaataagggatattcaaaaggacagtctttattcggagtttaaggataaagaaaaggaaataataatcggttattaccaacgggagcgcaacggcaatatctatgtggacatcggaaaaatggaaggcatccttcctaagaaattcagtcccccagggaaatataccatgtga

SEQ ID NO: 19586 - protein, 183 aa, Unknown
  Obtained from environmental sample
  DOMAIN (12)...(135): NusA N-terminal domain
  misc_feature (1)..(183): Xaa is any amino acid
MILHRRYKLGTDMSQAIRQLNQDRGIPEDLILRTIEDTLIAAYKHRFGNAENAVVQFDEDNLEVSIFARKKIVEQDGVYDPVTEIDLEEARELNPDAEVGDEILVEIDPKQFDRITVQSAKQKAHQSIRDIQKDSLYSEFKDKEKEIIIGYYQRERNGNIYVDIGKMEGILPKKFSPPGKYTM

SEQ ID NO: 19587 - DNA, 888 bp, Unknown
  Obtained from environmental sample
  misc_feature (1)..(888): n is a, c, g, or t
atgggcatagacgggcatttcatggtcgagcaggccgcccgcagctggaacggctgtttcatgaacttcaacggtacggcgggcatgttccgcatagccgctattcaaagttgcggcgtttggcagcacgataccctgacggaggacatggacctctcctaccgcatgcagttggacggatgggggacggagtacgtgcccggcctcgccgtgcccgccgaaatcccggaagatatgaacgccttcaaaaatcagcagttcaggtgggcgaagggttccatacagaccgccgcgaagatcatcccgctactcgttaaacagaagattcccccgttcaagttcatacaagccgtgctccacctgacgcactacgtggtacaccctcttatgctgatgctggccatactcaccatgccggtgctattcttcgtaaaggtaacgctcgcccccttatggatggcgatagtcatagcctgcatgatcttggcgacaagcggcccctccaccatgtacatggtctcccagcacttcttggggaagaaggtgcgcaagcaaatattccttatccccgccatgatgctgataggcaccggcttggccgtgaacaacggcaaggcggtgatagaggcgctcttgaagatagactccccattccaccgtacgcccaaaaaggggcaggcgaagatgaaagccggttacaaacctataaaagacgtcacctgcctatttgagatttttctcggcttgtactgcttcacaagccttaagatatttatgggctacacaaactttttggtctccccgttcttggcgctctacgcctcaggattcttattcgtaggcatcctatcgatagtccacttccgccgcccggaggaatcgacataa

SEQ ID NO: 19588 - protein, 295 aa, Unknown
  Obtained from environmental sample
  misc_feature (1)..(295): Xaa is any amino acid
MGIDGHFMVEQAARSWNGCFMNFNGTAGMFRIAAIQSCGVWQHDTLTEDMDLSYRMQLDGWGTEYVPGLAVPAEIPEDMNAFKNQQFRWAKGSIQTAAKIIPLLVKQKIPPFKFIQAVLHLTHYVVHPLMLMLAILTMPVLFFVKVTLAPLWMAIVIACMILATSGPSTMYMVSQHFLGKKVRKQIFLIPAMMLIGTGLAVNNGKAVIEALLKIDSPFHRTPKKGQAKMKAGYKPIKDVTCLFEIFLGLYCFTSLKIFMGYTNFLVSPFLALYASGFLFVGILSIVHFRRPEEST

SEQ ID NO: 19589 - DNA, 630 bp, Unknown
  Obtained from environmental sample
  misc_feature (1)..(630): n is a, c, g, or t
atgaagggtggaaaaccaacatcgacagcttacggcgaaagaaccgcaacgcctgtggcgaacacatcaacacagacagcgacaacaaggccgccggttacgacttacaaaatcggcgacacgggaccggcgggcggacttgttttttacgacaaaggcaacaacataggcggctggcgttacctcgaagccgccccttccgatttaggcccaaataaatttataacggaagaccccggctcgttacccaaaaacttatacgaactgtgggaaaaaaccgatggcgacaaagggcgtggaataggcaaaggcaaatacaacaccgaattcctaatggggatagcccaggcgcggggcggctttgattgggcgatacgcttatgcaacgattatgtactcaacggctttaacgactggtttatgcccagcagggacgaactcaactttatgtacggcaacctgcacatgaaaggattgggcaatttcaggcttgaaccatactggtcatcaacaggctggcaggacacatggggttcttacagcgcatggtacataaactttgaaaacggcgcggctgattacaaaggcgcaagccagccgaggcggtttagacctatcaggcagttttaa

SEQ ID NO: 19590 - protein, 209 aa, Unknown
  Obtained from environmental sample
  misc_feature (1)..(209): Xaa is any amino acid
MKGGKPTSTAYGERTATPVANTSTQTATTRPPVTTYKIGDTGPAGGLVFYDKGNNIGGWRYLEAAPSDLGPNKFITEDPGSLPKNLYELWEKTDGDKGRGIGKGKYNTEFLMGIAQARGGFDWAIRLCNDYVLNGFNDWFMPSRDELNFMYGNLHMKGLGNFRLEPYWSSTGWQDTWGSYSAWYINFENGAADYKGASQPRRFRPIRQF

SEQ ID NO: 19591 - DNA, 909 bp, Unknown
  Obtained from environmental sample
  misc_feature (1)..(909): n is a, c, g, or t
atggtgtttcagcgacatgattattaccccctgccgcggctgttctgctgcaaaacgggncggcagatgaatgaggtgggagcagggttagtgaataaaaataaattaagaatttttaataatactatatccattngagaaaagaaaatgcacagtgaaattattaaaacaataaattcaccaatctctgaatatgaagatattaacaatttaaacaacttatggagagagcctatcatcgaaattatttcggcaaaaaatgaaaaattactggaattaaaacaaattgtgtctttagaacatttattgccttgcgatatactgccggacgcaaagagcattatcagcttttttattccgtttaatgaaaacattgttaaaagcaacattaacggaacaatagcgtcaaaagaatgggcgcaagcctatattaaaacaaatgatttaataaaaaaaattaatgataagatagaagaattaatggaaaaaaacggatataaagccggtaaaatacccgcaacgcataattttaatgaaaaaacgctgataagcaattggtctcacaggcacatagcgttcatagcgggtataggtacattcggaataaataatatgcttataacaaaaagaggatgctgcggaagacttggaagcatattaattgattatgagttagaaaattataaaaatgccggcatagaaaaagaaaaatgtttacataaactaaatggtaattgcggaatatgtcaaaaaagatgcatagcaaacgcgtatgaaaataaaagcttcaataaggatatttgctataaacaatgtatggaaaacgcggcgtattataaagaaacagtatatgcggatgtctgcggaaaatgtcttgtcgggctgccttgttcaatacaagaaccataa

SEQ ID NO: 19592 - protein, 302 aa, Unknown
  Obtained from environmental sample
  misc_feature (1)..(302): Xaa is any amino acid
MVFQRHDYYPLPRLFCCKTGRQMNEVGAGLVNKNKLRIFNNTISIXEKKMHSEIIKTINSPISEYEDINNLNNLWREPIIEIISAKNEKLLELKQIVSLEHLLPCDILPDAKSIISFFIPFNENIVKSNINGTIASKEWAQAYIKTNDLIKKINDKIEELMEKNGYKAGKIPATHNFNEKTLISNWSHRHIAFIAGIGTFGINNMLITKRGCCGRLGSILIDYELENYKNAGIEKEKCLHKLNGNCGICQKRCIANAYENKSFNKDICYKQCMENAAYYKETVYADVCGKCLVGLPCSIQEP

SEQ ID NO: 19593 - DNA, 900 bp, Unknown
  Obtained from environmental sample
  misc_feature (1)..(900): n is a, c, g, or t
ttgaagagaaaagaagacgaagcggagctgcgcgctgtagttgaatatattgaaccggtgttcctcttttgcgttaaacgcctgaataaccgccaggatgcggaagatttggctagtgaaattatggttcatattttaaacggcgtcaaaaaataccatattgattctcttgaaaagtgggtatggcgtattgcccataaccgttacgcgagatttatcaatatgcgtaataagcataatgaagtacagtctgaatatgattttacaggtatcagggacgattatgattttgttgacgaaatgataatcgttgacgaataccggcaggttttcaaacagcttcatacgctatcctgtgagtaccgtaatattttggttgattactacattgaggagctgcctgtaaaacaaatcgccgaaaattactcgctgacagagacgacggcgaaatggcggcttaacatcggccgcaaaaaaattaaagcaagaataggagaaaataaaatggacaaagtatataaacctattaactggaatacagatacctgtaacggcggttttttcagctcggataaatatctgcaaagccaggttgcgcgggctatatgcgcggcggcttatgaaaaaccgctcactgtagaagaaataagcttgaaaacagggcttcccgcaatgtacattgaggacgaattgccgagactgatatacggcgaagctataanagaagacggaaataaatacgcggcaaattttatagtgcttcgcctgtgtgataaacgggcaatggaagtaaacttcgccccttttattgccggcattgccgatcattttgcagagctttttacgaacatgaagatgatatttcaaaaatggatttctacggctcaaggcttggtatga

SEQ ID NO: 19594 - protein, 299 aa, Unknown
  Obtained from environmental sample
  DOMAIN (12)...(79): Sigma-70 region 2
  misc_feature (1)..(299): Xaa is any amino acid
MKRKEDEAELRAVVEYIEPVFLFCVKRLNNRQDAEDLASEIMVHILNGVKKYHIDSLEKWVWRIAHNRYARFINMRNKHNEVQSEYDFTGIRDDYDFVDEMIIVDEYRQVFKQLHTLSCEYRNILVDYYIEELPVKQIAENYSLTETTAKWRLNIGRKKIKARIGENKMDKVYKPINWNTDTCNGGFFSSDKYLQSQVARAICAAAYEKPLTVEEISLKTGLPAMYIEDELPRLIYGEAIXEDGNKYAANFIVLRLCDKRAMEVNFAPFIAGIADHFAELFTNMKMIFQKWISTAQGLV

SEQ ID NO: 19595 - DNA, 675 bp, Unknown
  Obtained from environmental sample
  misc_feature (1)..(675): n is a, c, g, or t
ttgcggctgtccctaatctggctaatgcgtacacctaccgtggcaacgcatacagtggtaaaggtgactacgataaggccattaccgattgtaacgaagcgttatggattaacccaaactttccaaattcttaccgtactagtattctggaaaggcaaaatatttacaatggaatcaaaatgcagtatcctgaagcatgggaggagatactgcatggaaaggaaacaaattgtactgacccctgaagaacgtgcggaactgaagcggttttgcaaggcaggggtgcacagcgtcagactggtcaaccgcgcacggataatacttgcccttgacacgtcgggaaacagaaaagcagagcggcaggaagacatagcagaacatgtcggggtaagccgacaggccgtcaacggcgttaggaatgattttttggcattgcaagaggtgccgctgtttttacagcgaaagaaacgggagacgccgcctgtaccgccgaaaataactggggaattggaagcccgtatcatcgcgctggcttgcggcaaagttcccaagggttacgcccggtggacgctgcggcttttagcagaaaaatgcgtggaactacgttactgcgacaccatatcccacacgtccataggcacccttttaaaaaaacgcagcttaagcctctgctga

SEQ ID NO: 19596 - protein, 224 aa, Unknown
  Obtained from environmental sample
  misc_feature (1)..(224): Xaa is any amino acid
MRLSLIWLMRTPTVATHTVVKVTTIRPLPIVTKRYGLTQTFQILTVLVFWKGKIFTMESKCSILKHGRRYCMERKQIVLTPEERAELKRFCKAGVHSVRLVNRARIILALDTSGNRKAERQEDIAEHVGVSRQAVNGVRNDFLALQEVPLFLQRKKRETPPVPPKITGELEARIIALACGKVPKGYARWTLRLLAEKCVELRYCDTISHTSIGTLLKKRSLSLC

SEQ ID NO: 19597 - DNA, 582 bp, Unknown
  Obtained from environmental sample
  misc_feature (1)..(582): n is a, c, g, or t
ttgactacacaagaggctgccgncttttcaacttacggcacctggtggataagacaggcgattatcaaaagcatcgcggacaaggggcgcgttatacgcataccgattcacatgcttaacactattaaaaaatgctactatgtagccaaacagcttacgcaggatttggggcgcgatcccaacgaacaggaactgtcagaatacttgggcgttccggtctctaaagtaaaggaaatagtaaaactttcgcaggagacgacaagccttgacacaatcgtagacgacggaaacatgacccgccttgcggaacttataaaagacgacgtaagggccgaaccctttgaaatggttttttccatgaccttgcaggagacaatgaccgatatcctttcgcagttatctgaaagggaaatgaaaattatccagctacgctacggcttaaccggagaaaacccccttacccttgaagagacaggcaaatacctggggataacccgcgaacgcgtaaggcaaatccaggaaaaagccgtctggaaactccgcaccatgcgtgagttgaaagtcttaaaagagaacgcttga

SEQ ID NO: 19598 - protein, 193 aa, Unknown
  Obtained from environmental sample
  DOMAIN (35)...(117): Sigma-70 region 3
  misc_feature (1)..(193): Xaa is any amino acid
MTTQEAAXFSTYGTWWIRQAIIKSIADKGRVIRIPIHMLNTIKKCYYVAKQLTQDLGRDPNEQELSEYLGVPVSKVKEIVKLSQETTSLDTIVDDGNMTRLAELIKDDVRAEPFEMVFSMTLQETMTDILSQLSEREMKIIQLRYGLTGENPLTLEETGKYLGITRERVRQIQEKAVWKLRTMRELKVLKENA

SEQ ID NO: 19599 - DNA, 654 bp, Unknown
  Obtained from environmental sample
  misc_feature (1)..(654): n is a, c, g, or t
atgaagaaacaggggtttaatccttttctgccgtcatgggaatacattcccgacggcgagcctcatatatttgacggcagagtctatgtttacggttctcatgataaattcaacggttatgtttattgcatgaacgactatgtctgctggtcggcggacgaaaacaatctaaccgattggcgttacgaaggcgtaatctttaagaagaccgatgatccgtttaacgctgacggaagcatgaatctgtacgcgcctgatgttacgcgcggccctgacgggcgttactacctttattatgttttggacaaaacagacgttgtatcagttgcggtttgcggctctcccgcaggaaaatatgaattcctgggatatgtacatcaccctgacggaaccatgtacggcagaaaagaaggcgacctgccgcagtttgatccgggtgtactgacggaaggcgaaaatacctatctttatacaggtcaatgctggccgggcgataaatcaaggaaaggttctcttgttgttgttctgggcgctgatatgctgacaatttcgcaggggccgttttttattatacccggctcatgttacagcgaaagaacaggctttgaggggcatgaattctttgaagctcatcaatcaaaaacacggcgatga

SEQ ID NO: 19600 - protein, 217 aa, Unknown
  Obtained from environmental sample
  misc_feature (1)..(217): Xaa is any amino acid
MKKQGFNPFLPSWEYIPDGEPHIFDGRVYVYGSHDKFNGYVYCMNDYVCWSADENNLTDWRYEGVIFKKTDDPFNADGSMNLYAPDVTRGPDGRYYLYYVLDKTDVVSVAVCGSPAGKYEFLGYVHHPDGTMYGRKEGDLPQFDPGVLTEGENTYLYTGQCWPGDKSRKGSLVVVLGADMLTISQGPFFIIPGSCYSERTGFEGHEFFEAHQSKTRR

SEQ ID NO: 19601 - DNA, 435 bp, Unknown
  Obtained from environmental sample
  misc_feature (1)..(435): n is a, c, g, or t
gtggatatgaacggcaagagggtattgatagtcggcggcgggaatgtggctgaacggcgtataaaaacgctcgctccattcggcgcgaatatcaccgtcatatcacccaatatcacggaatacattgaacgcgcttcgtcgtcaaagttaatacatctattaagacggcgttatgaaaatatggatatatccgccataaatccgtttttggttatcgccgcgaccgacgataggcaggtgaatcacaacataacggcggaagccaaaagccaaaacattcacgtctctgtcgccgactgccgtgatgattgtacattctactttccggcgatagcggagaacgagaattatatcgccggactcgtatcaaaaaacggcgaccacgccggagtcaaagtgtccgcaagaaaaatacgggaggttctcaatccatga

SEQ ID NO: 19602 - protein, 144 aa, Unknown
  Obtained from environmental sample
  misc_feature (1)..(144): Xaa is any amino acid
MDMNGKRVLIVGGGNVAERRIKTLAPFGANITVISPNITEYIERASSSKLIHLLRRRYENMDISAINPFLVIAATDDRQVNHNITAEAKSQNIHVSVADCRDDCTFYFPAIAENENYIAGLVSKNGDHAGVKVSARKIREVLNP

SEQ ID NO: 19603 - DNA, 546 bp, Unknown
  Obtained from environmental sample
  misc_feature (1)..(546): n is a, c, g, or t
ttgtacattctactttccggcgatagcggagaacgagaattatatcgccggactcgtatcaaaaaacggcgaccacgccggagtcaaagtgtccgcaagaaaaatacgggaggttctcaatccatgaaaagaacaatacgaataggaagccgtaacggccctttagcgcttgcgcagacgcaaatcgttattgatgccgtcaaaaagactaatccgaatctcgactttgaaatcgttaccatcaagacgaccggagacaaaatattggacaagagtttagacgctctcggcggcaagggcgtctttaccaaagaacttgaacaggcgttaaccgacggcagtatcgacatagccgtccatagttacaaggatatgccgattgacgagaataacgacctgcctatcgtggcgctatccgtcagagaagcgccttttgacgttttggtattgcctaaaacatccgctgtccttgataagtcaaaaccggtcggctcctcaagccttagaaggacaatccaattctcaaaactatatgatgggagttag

SEQ ID NO: 19604 - protein, 181 aa, Unknown
  Obtained from environmental sample
  DOMAIN (45)...(181): Porphobilinogen deaminase, dipyromethane cofactor binding domain
  misc_feature (1)..(181): Xaa is any amino acid
MYILLSGDSGERELYRRTRIKKRRPRRSQSVRKKNTGGSQSMKRTIRIGSRNGPLALAQTQIVIDAVKKTNPNLDFEIVTIKTTGDKILDKSLDALGGKGVFTKELEQALTDGSIDIAVHSYKDMPIDENNDLPIVALSVREAPFDVLVLPKTSAVLDKSKPVGSSSLRRTIQFSKLYDGS

SEQ ID NO: 19605 - DNA, 588 bp, Unknown
  Obtained from environmental sample
  misc_feature (1)..(588): n is a, c, g, or t
atgtccgcagtacaggaaatctttaaatttgaacccgtaaagcccataaatggtttccctgagcttcactggactggcaaacggccctatgaagcggcccaatactatcccgcccagcttaaagaacgttacggtaaaaaacagaacggctggataaacaagctttacctgggcgataaccttcaggtgatgggccatcttattaaagaattccgcggtaaaattgacctgatttacattgacccgccttttgattcaaatgtctattattataaaaagaaaattaaactacgagggcaaaaaacggagagagattctgcatcctttaaagaaaaacaatacggcgatgtttggacagatgacggttatttgcaatttatgtatgagcggttaatcattatgcgagagctgttaagcattaacggatcaatatatgttcagatagatgaaagaagagccccgtttttacgcataattatggatgaaatttttggcattcagaattttcagcgcgaaatagtgtggagaataggctgggtatcaggttataaaacggctgcaaaaaactggataagaaccatgatctga

SEQ ID NO: 19606 - protein, 195 aa, Unknown
  Obtained from environmental sample
  misc_feature (1)..(195): Xaa is any amino acid
MSAVQEIFKFEPVKPINGFPELHWTGKRPYEAAQYYPAQLKERYGKKQNGWINKLYLGDNLQVMGHLIKEFRGKIDLIYIDPPFDSNVYYYKKKIKLRGQKTERDSASFKEKQYGDVWTDDGYLQFMYERLIIMRELLSINGSIYVQIDERRAPFLRIIMDEIFGIQNFQREIVWRIGWVSGYKTAAKNWIRTMI

SEQ ID NO: 19607 - DNA, 1002 bp, Unknown
  Obtained from environmental sample
  misc_feature (1)..(1002): n is a, c, g, or t
atgatggcagaggcgtattccatttactttttcctggctttccttgcgcttgccgcaggttccattgcgacgtttaacatctcgtggcagtcattctttccggaagtcgtagatcttcgggagcgcaactttgttttaacaaggcgttcccacatggacgtttttataagcatacctctgccgctgttggtcggtactattttactgcacgctccggcaggcaggggaaagatactcgttcatcagtttttttatttattcgccgcgctgtttctgatactggcggcgttaaattaccgccgcataaaagccgtccggaccgccgcgccaaagcgcgtttctctttttgaaataaaaaaagccgtgaaaaacctttcacataacaggcagtatttgctgttcatcgcaaccgcgctgttcttttacatgacatggcattctgactggacattgtattttatagggcaggtacaatatctggaaatgaatgagtttcagatagggcttacaacgctgggcgcgacaacggctcagtttttaacaatgcgtttttggagccgcgtaaatgaaaaacacggcgtggcgcttccggttacctttggcatcttgggattaagcctttgtccggttgtgatgatcatctcaaccagcctgcctgtttccttcggtaaatacgtttttctgcccttacacgctattgtcagcattccgctcgcgaccaccaccttgaatatgctccaatgccttctgcaggttgccgacgaagaataccgcagcttttcaatttcggtttatacctgccttgtgtgcctttcaaacgcaacaatgccggtggcgggtatcgcgctctaccgcgcgctcggcggcgacagaaacgggcttaggcttacctcgcagttcttttcatcctgcggattggcgccgccggtttatggcttttacgctgggcgcggcaaaaagtacggcggctaccaaataacaataaaaaattaccaggtataa

SEQ ID NO: 19608 - protein, 333 aa, Unknown
  Obtained from environmental sample
  SIGNAL (1)...(18)
  misc_feature (1)..(333): Xaa is any amino acid
MMAEAYSIYFFLAFLALAAGSIATFNISWQSFFPEVVDLRERNFVLTRRSHMDVFISIPLPLLVGTILLHAPAGRGKILVHQFFYLFAALFLILAALNYRRIKAVRTAAPKRVSLFEIKKAVKNLSHNRQYLLFIATALFFYMTWHSDWTLYFIGQVQYLEMNEFQIGLTTLGATTAQFLTMRFWSRVNEKHGVALPVTFGILGLSLCPVVMIISTSLPVSFGKYVFLPLHAIVSIPLATTTLNMLQCLLQVADEEYRSFSISVYTCLVCLSNATMPVAGIALYRALGGDRNGLRLTSQFFSSCGLAPPVYGFYAGRGKKYGGYQITIKNYQV

SEQ ID NO: 19609 - DNA, 915 bp, Unknown
  Obtained from environmental sample
  misc_feature (1)..(915): n is a, c, g, or t
atgatcagatcggccgagtccatgcacgtgcctgagcctgttatcacgctggcgatcaatcccaaggacaaaaaaagcgccgatcagatggcaaaggccctgaaccgctttacaaaggaagacccgaccttccagacctatgtcgatcccgaatcaaatcagacgatcatcaaaggcatgggggaactgcatctggacgtgtacatcgaaaggatgaagcgcgagtacaagtgcgaagtggaaaccggaatgccccaggtcgcctaccgcgaggcgattacccagaaagccgaattcaactacacccataagaaacagacaggcggatcgggccagtttgggcgcgtggccggttacatggagccgtatcatgaaggcgactacgagtttgtaaaccagataaagggcggctcaattcccacagaatatgtgcccagttgcgacaagggttttaaggaagcgataaaaaaaggttcgcttatcggattccccattgtcaacatacgctgccttatcaacgacggacagagccacccggtagactcatctgacatcgcgttccagcaggcggcaatcggcgcgttccgcgaagcttataacaaggccaaaccctgcatacttgaaccaataatgaaagtatcggtggaaggccccacggaattccagggtaacatcttcgggtctatcaaccagcgtcgcggcatgattttatcatccaccgaggacggggtaaattcccgcgttgacgcggaagtcccccttagcgagatgttcggctactcaacggttctccgctccctgacgcanggcaaggcggaatttacaatggaatttgagaaatacggcaaggttccccaaagcgtctcagaagctttgataaaggaatataccgccaaaaaacaggcgcagcgctaa

SEQ ID NO: 19610 - protein, 304 aa, Unknown
  Obtained from environmental sample
  DOMAIN (205)...(292): Elongation factor G C-terminus
  misc_feature (1)..(304): Xaa is any amino acid
MIRSAESMHVPEPVITLAINPKDKKSADQMAKALNRFTKEDPTFQTYVDPESNQTIIKGMGELHLDVYIERMKREYKCEVETGMPQVAYREAITQKAEFNYTHKKQTGGSGQFGRVAGYMEPYHEGDYEFVNQIKGGSIPTEYVPSCDKGFKEAIKKGSLIGFPIVNIRCLINDGQSHPVDSSDIAFQQAAIGAFREAYNKAKPCILEPIMKVSVEGPTEFQGNIFGSINQRRGMILSSTEDGVNSRVDAEVPLSEMFGYSTVLRSLTXGKAEFTMEFEKYGKVPQSVSEALIKEYTAKKQAQR

SEQ ID NO: 19611 - DNA, 744 bp, Unknown
  Obtained from environmental sample
  misc_feature (1)..(744): n is a, c, g, or t
atgcgttctcaggtttcgccggtttgggcgggttttgttttnttctttatatggttgtgtgggtacgcgacgcctctnttctccatggaaacagcgggcggtttcgcgtctatctggaaaggcaagggcgggtatttccccaggctctactttaccgaagtgattgactcagtcaggaaggccgaagacgccagtccgtactgggcgaatacgcaggccgaacaggaagccataaaccgtattgccgccgattacacttccctgattttgaataatgacattctggcgttttacggacatccccgttccacgataatgggtattcttggccgcttcccgatagaagaacttgacagaaagctcaccgttcttgctgatgaatacaaagccgcaaacggcggcagaaatgtaataaaagcgttttatatcatttttggaaccgtatggcccgaaggcgagatcggcattatcaattcggagcttctcaccagttggattgaatatgcaaggagacgggacatgcttgtttttatcgatcaccagatcggccgttacgatcctgtcgcttccctcaggcgcatgctgccctggcttagatacccaaatgtccacctggctcttgaccccgaatggcgcactaccaaaccgatgaaagaaatcggaacggtaaccgccgatgagattaaccgtgcccagcaagaaatggaagattacataatcgccaatgnctctcggccgatctga

SEQ ID NO: 19612 - protein, 247 aa, Unknown
  Obtained from environmental sample
  SIGNAL (1)...(28)
  misc_feature (1)..(247): Xaa is any amino acid
MRSQVSPVWAGFVXFFIWLCGYATPLFSMETAGGFASIWKGKGGYFPRLYFTEVIDSVRKAEDASPYWANTQAEQEAINRIAADYTSLILNNDILAFYGHPRSTIMGILGRFPIEELDRKLTVLADEYKAANGGRNVIKAFYIIFGTVWPEGEIGIINSELLTSWIEYARRRDMLVFIDHQIGRYDPVASLRRMLPWLRYPNVHLALDPEWRTTKPMKEIGTVTADEINRAQQEMEDYIIANXSRPI

SEQ ID NO: 19613 - DNA, 822 bp, Unknown
  Obtained from environmental sample
  misc_feature (1)..(822): n is a, c, g, or t
atgctccaggactatccccgcccctgttttaaggacggaaaatcgacgtttgactccctagcccccttccttatcgaccgcgaacgcgacctctccttcaattccgaaggcaggcatttcgattccagtttttacctcaccttcgtctggcggcccccttccgaaggcgctaaaaaactcgtttccatgttcattaacagcggcgtcagggacgggaacggagcgggcgtaaaacaaaacgtcgaattcttcgtcaacgaatccgattcctttgtcgggcttctgtcgaacggccttttactcgaaccccttgacaacgacgagaccgtcaaattccttcattccgccgtttctttcaagcgccatgaaatttattgtcccaatacccagatatttcttgaccgcgtccttccggacagcgaacttgaaaacaatattccgatgaaactcggcggtaattatatccccatcgtcggcgttaacgacttccccgacgaaacttatcccgccatcctcgacggccttaaccgcgccagaattgagtaccgctgggttacaaggtatatctgcctcgacaaggacgagggcgttaaagaagcaagaaaaaaagaaaaattccacaggggaagcaggaaatctttccttcaaacgctcgcggaacaaacttccggagaagccgcgaaagccgtcaaccacggcgcgggagttaaggaaaacgactccatacaggcgaatatcgatattgaaaacgacgtcgccgctctcggttacctcaccacgtgcgtcatggtttgggatccttcccccaaaaagccaaattaa

SEQ ID NO: 19614 - protein, 273 aa, Unknown
  Obtained from environmental sample
  misc_feature (1)..(273): Xaa is any amino acid
MLQDYPRPCFKDGKSTFDSLAPFLIDRERDLSFNSEGRHFDSSFYLTFVWRPPSEGAKKLVSMFINSGVRDGNGAGVKQNVEFFVNESDSFVGLLSNGLLLEPLDNDETVKFLHSAVSFKRHEIYCPNTQIFLDRVLPDSELENNIPMKLGGNYIPIVGVNDFPDETYPAILDGLNRARIEYRWVTRYICLDKDEGVKEARKKEKFHRGSRKSFLQTLAEQTSGEAAKAVNHGAGVKENDSIQANIDIENDVAALGYLTTCVMVWDPSPKKPN

SEQ ID NO: 19615 - DNA, 543 bp, Unknown
  Obtained from environmental sample
  misc_feature (1)..(543): n is a, c, g, or t
atgaggattaccggcggggagctntgcggcaggcaggtaaaagttccaaaaggggttatacgtccggcaatggacagaatgagggaatctgttttcgcatcccttggagaaatttcaggcaaatcgtttcttgacattttttccggttcaggaattatcgccctggaagcggcatcaaggggcgcctcatacattgaggctgtggaagcggatccgcttaaacgccatactcttcttgaaaacgttaaaatttcacctgtacgaattctttgccattttatgccggccgaattatatgttaagagggcaaaacggcgttttgattacattttttgcgatccgccttttccttataaatacaaatgggaactgcttgagtgcatcgcttcttcaaatcttataggcgaaggatcatgcctgctacttcacaggccgcgggaagatttccacgacgctccaattgctaatatacgtctatggaatagtaaagaattcggacgctcggtagtaaatttttatgaatttttatttcctgtaaattga

SEQ ID NO: 19616 - protein, 180 aa, Unknown
  Obtained from environmental sample
  DOMAIN (1)...(174): Conserved hypothetical protein 95
  misc_feature (1)..(180): Xaa is any amino acid
MRITGGELCGRQVKVPKGVIRPAMDRMRESVFASLGEISGKSFLDIFSGSGIIALEAASRGASYIEAVEADPLKRHTLLENVKISPVRILCHFMPAELYVKRAKRRFDYIFCDPPFPYKYKWELLECIASSNLIGEGSCLLLHRPREDFHDAPIANIRLWNSKEFGRSVVNFYEFLFPVN

SEQ ID NO: 19617 - DNA, 795 bp, Unknown
  Obtained from environmental sample
  misc_feature (1)..(795): n is a, c, g, or t
ttgtcgcatttagacaaggtaatcgacatagaccagtcccccataggccgcacgccgcgctccaacccggcgacctacacaaaagtattcgacgcgataagaaatcttttcgccatgctgcccgaaagcaaaatccgcggctacctcccggggcgcttcagtttcaacaccaaaggcgggcgctgcgaagcctgcgagggcgacggcgaacttcggatagagatgcacttcctgcccgacgtctacgtcaaatgcgaaacgtgcggcggaaaacgctacaaccgagaaacgctcgaagtgctctacaagggaaaatccatcgccgacgtattagagatgacggtggacgaagcgttaatctttttcgacaacctatcggcaatccggcaaaaactgcaagtgctgtcgcaagtgggcctaggctacatcaaactcggccaatcagccacaacgctctccggcggcgaggcgcagagaatgaaattagcctccgaactctcaaaacgcgccacgggaaaaaccctatacatcttagacgaaccgaccaccggattacacttcgaggatatcagaatgctgatgtccgtcatacaagagctggttgacaaagacaactcggttatagtcatagaacataatttagacgtgataaaatgcgccgaccacatagtagacctcggccccgacggcggcgacagaggcggcactatcgtggccgtaggaacgccggaagagatagcgaagaacccggcgtcggttacggggaagtttttgagggggtatttgaggcggtaa

SEQ ID NO: 19618 - protein, 264 aa, Unknown
  Obtained from environmental sample
  DOMAIN (69)...(230): ABC transporter
  misc_feature (1)..(264): Xaa is any amino acid
MSHLDKVIDIDQSPIGRTPRSNPATYTKVFDAIRNLFAMLPESKIRGYLPGRFSFNTKGGRCEACEGDGELRIEMHFLPDVYVKCETCGGKRYNRETLEVLYKGKSIADVLEMTVDEALIFFDNLSAIRQKLQVLSQVGLGYIKLGQSATTLSGGEAQRMKLASELSKRATGKTLYILDEPTTGLHFEDIRMLMSVIQELVDKDNSVIVIEHNLDVIKCADHIVDLGPDGGDRGGTIVAVGTPEEIAKNPASVTGKFLRGYLRR

SEQ ID NO: 19619 - DNA, 354 bp, Unknown
  Obtained from environmental sample
  misc_feature (1)..(354): n is a, c, g, or t
atgcgaaacgtgcggcggaaaacgctacaaccgagaaacgctcgaagtgctctacaagggaaaatccatcgccgacgtattagagatgacggtggacgaagcgttaatctttttcgacaacctatcggcaatccggcaaaaactgcaagtgctgtcgcaagtgggcctaggctacatcaaactcggccaatcagccacaacgctctccggcggcgaggcgcagagaatgaaattagcctccgaactctcaaaacgcgccacgggaaaaaccctatacatcttagacgaaccgaccaccggattacacttcgaggatatcagaatgctgatgtccgtcatacaagagctggttga

SEQ ID NO: 19620 - protein, 117 aa, Unknown
  Obtained from environmental sample
  misc_feature (1)..(117): Xaa is any amino acid
MRNVRRKTLQPRNARSALQGKIHRRRIRDDGGRSVNLFRQPIGNPAKTASAVASGPRLHQTRPISHNALRRRGAENEISLRTLKTRHGKNPIHLRRTDHRITLRGYQNADVRHTRAG

SEQ ID NO: 19621 - DNA, 606 bp, Unknown
  Obtained from environmental sample
  misc_feature (1)..(606): n is a, c, g, or t
ttgccctgcatggacgacgacgatttgcggcgcggacggccgtcctgccacaaaaaatttgacgaagcgacggcgcttttggcgggcgacaccttgcagtctttggcttacgaaattattgcccgcgattcggagaatgccgctgagctaattaaacaactgggacaagcttccggaatttacggcatggcgggcggacagatgcttgacctgtccggcttggtacacactttggcggaattgcaaagaatgcacgccttaaagaccggtgctttgctcaagttcgccgtgaccgcgccgttgtgttttgcacaggctgatgccgcggtaactacaggcttaaacgcttatgcgtctgctgtcggtctggcattccaaattaaagacgacattctcgatgcggagggcacggcggcgacgcttggcaaaactcccggcaaagacgccgaaaaaaacaaaagcacatatatgactttgctgggtttggccaaggccagggaattgctgaccgcggagactgacaaagctctgcatgccgcccgggtattcggcaaggaaaatcttttgttagacctggcgcggtatttactggagagggaaagttag

SEQ ID NO: 19622 - protein, 201 aa, Unknown
  Obtained from environmental sample
  DOMAIN (1)...(198): Polyprenyl synthetase
  misc_feature (1)..(201): Xaa is any amino acid
MPCMDDDDLRRGRPSCHKKFDEATALLAGDTLQSLAYEIIARDSENAAELIKQLGQASGIYGMAGGQMLDLSGLVHTLAELQRMHALKTGALLKFAVTAPLCFAQADAAVTTGLNAYASAVGLAFQIKDDILDAEGTAATLGKTPGKDAEKNKSTYMTLLGLAKARELLTAETDKALHAARVFGKENLLLDLARYLLERES

SEQ ID NO: 19623 - DNA, 750 bp, Unknown
  Obtained from environmental sample
  misc_feature (1)..(750): n is a, c, g, or t
ttgtcgccttacaccagcgaagaaattataacccgtgattttttacttaaacaaaaaccggacggtattatcaacataattgacgcgacaaatattgagcgtaacctttacctgaccacgcaattaattgaattgcaaataccaatggtgcttgccctgaatatgatggacgaagttcaggctaataacggaagtatcgacatacaacacatgagagaagttctcggtatacctgtcgttccaatatccgcggtaaaaaaacagggattgtcagagcttatggaatacgcggttgaaacagcccgcaatcaaaaaaaacctgaacgtatagatttttgttcgggcgcggtacaccgcgctattcacgcgacaatccaccttattgaagatcacgcccaaagacagaaaatccctatgcgttttgcggcgacaagacttgtcgagggcgatgagcagatgctaaatattctttctcttgataaaaacgaagcggagacgatagaacacgccgtcaaagaaatggaaacggagatggaaacagaccgtgaagcggcattagctgatatgcgttatcagtttatcgaggatgtttgtaaaaaatgcgtaataaaagcgcatgaaagccgcgaataccggcgtagcgtgagtttggactcaatattaacccacaagtttttcgcgtttccggcttttttgggaaaatgctgctggtcttcgctcttaccttcggagttatcggagacagactga

SEQ ID NO: 19624 - protein, 249 aa, Unknown
  Obtained from environmental sample
  DOMAIN (90)...(244): Ferrous iron transport protein B
  misc_feature (1)..(249): Xaa is any amino acid
MSPYTSEEIITRDFLLKQKPDGIINIIDATNIERNLYLTTQLIELQIPMVLALNMMDEVQANNGSIDIQHMREVLGIPVVPISAVKKQGLSELMEYAVETARNQKKPERIDFCSGAVHRAIHATIHLIEDHAQRQKIPMRFAATRLVEGDEQMLNILSLDKNEAETIEHAVKEMETEMETDREAALADMRYQFIEDVCKKCVIKAHESREYRRSVSLDSILTHKFFAFPAFLGKCCWSSLLPSELSETD

SEQ ID NO: 19625 - DNA, 831 bp, Unknown
  Obtained from environmental sample
  misc_feature (1)..(831): n is a, c, g, or t
atgcttgtcatttcaaaagacgaaacgacatataagaacagtatcattattaaaaagaacagtccgttaaacaccgaattcggcaatgaatatcattttgccggaaatgaaatggacgtgtttgttttgcagggggaatccaatgagcctcgcgattgtatgatcctttataagtattgcgtgtccggttttaaaaaaggcaaaaagaccgattttaccctctattttgaatataaccagaacggagttgtagatgtacgcgttgatgcgaaggatggaacggtgctaaaggtagtaaaatccgatgtcaacgaaacaatagacgaagttataaacaggctgcttcgagagagagaagaacggatgcgcaaatctcgcgcggaaattatgtttatgatagacacatccggctcaatgtccggcaaacctgtaaagttggcgcgtgaggctgtacgggattttgtaaaagaattggacttatcaaaattcagcgtttcaatagtcaattttgccgatacgggcaggtttgagtgcaagaatgaaaagaacccccgtagaatagatagtgcaataacggcggtggaagttggtacttgcggcggagccaacgatgaaacgcctcttaattcattcggaaataaattcagtgaaaaggaagttaatcatattattgtagttttaaccgatggagtatggagcgatcaagctactgaaattaaagctgccgaaagattaaagacgtccggtattacaatttacgcaataggttttggcggagctgatgaaagatttttaaacaggattgcgtcagacggatgcgggcaaaagtag

SEQ ID NO: 19626 - protein, 276 aa, Unknown
  Obtained from environmental sample
  DOMAIN (128)...(273): von Willebrand factor type A domain
  misc_feature (1)..(276): Xaa is any amino acid
MLVISKDETTYKNSIIIKKNSPLNTEFGNEYHFAGNEMDVFVLQGESNEPRDCMILYKYCVSGFKKGKKTDFTLYFEYNQNGVVDVRVDAKDGTVLKVVKSDVNETIDEVINRLLREREERMRKSRAEIMFMIDTSGSMSGKPVKLAREAVRDFVKELDLSKFSVSIVNFADTGRFECKNEKNPRRIDSAITAVEVGTCGGANDETPLNSFGNKFSEKEVNHIIVVLTDGVWSDQATEIKAAERLKTSGITIYAIGFGGADERFLNRIASDGCGQK

SEQ ID NO: 19627 - DNA, 828 bp, Unknown
  Obtained from environmental sample
  misc_feature (1)..(828): n is a, c, g, or t
atggcggctccgctttcatcgtattatatgaatccggtgaacggtaatcccggacttttaagaataatatacagcggtatcagacttgttgttttcccgccgatgattttcctttgcataggaagtatgacggacttcggaccgcttatcgcttccccaaaaagctttcttatcggtcttggagcgcagtttggaatatttgtagcgatggcagtttctttctacggcggaaactttgttctgcacttaattaatcctgattatgtccctttaactcttaaagaatgcgccgctatcggtattatcgggggcgctgacggtcctaccgccgtatatacgtcgactatgctcgctcctagattgttacccgctataagtatagctgcgttctcatacatggcgcttgttccttttatccagccgccttttatgaggcttcttacaaccaaaaaagaacgtgtaattgtaatgccggaacccaaagcggttacgcaaagtcaaaagataatgttcccgattatattggctatagtcgtattattgctgattcccgccgccggcgcgttaatagcgatgatgtgccttggaaaccttattaaggaaagcggcgctgtgcctcgtatcgccaaggcgcttgaaggagattttttaagtattgttactctttttgtagggttatcaatcggttcttcagccacagcggaaatcttccttacgccggaaacattgattattcttatctgcggcgttatagcgttcgcctttggaacagtcggcggtattatcattgccaagattcttaacgtactgacaggcggggaaaggtaa

SEQ ID NO: 19628 - protein, 275 aa, Unknown
  Obtained from environmental sample
  DOMAIN (4)...(273): Na+-transporting methylmalonyl-CoA/oxaloacetate decarboxylase, beta subunit
  misc_feature (1)..(275): Xaa is any amino acid
MAAPLSSYYMNPVNGNPGLLRIIYSGIRLVVFPPMIFLCIGSMTDFGPLIASPKSFLIGLGAQFGIFVAMAVSFYGGNFVLHLINPDYVPLTLKECAAIGIIGGADGPTAVYTSTMLAPRLLPAISIAAFSYMALVPFIQPPFMRLLTTKKERVIVMPEPKAVTQSQKIMFPIILAIVVLLLIPAAGALIAMMCLGNLIKESGAVPRIAKALEGDFLSIVTLFVGLSIGSSATAEIFLTPETLIILICGVIAFAFGTVGGIIIAKILNVLTGGER

SEQ ID NO: 19629 - DNA, 360 bp, Unknown
  Obtained from environmental sample
  misc_feature (1)..(360): n is a, c, g, or t
gtggtgcagatggatgagacggaggtacaagtaataggggaagaaaaccggagcgacattcagaaaagccgcatgtggcttgcccggggtggccctcctggcaagaaagtaatatggtatgagtaccatccgacgcgggtcgcgtataacgcgaaagcatttctggaagggtattcgggttatctgcaaacggacgggtatgacgggtatgacagcgcggtgaaagacatgcccggtattgttcacgtggggtgcatggcgcacgcgagaaggaagttttttgaggcgtccaggataaacaagaaaccgcagtccgccgagggaggggataaaacatatacgcaagctgtaccggcttga

SEQ ID NO: 19630 - protein, 119 aa, Unknown
  Obtained from environmental sample
  misc_feature (1)..(119): Xaa is any amino acid
MVQMDETEVQVIGEENRSDIQKSRMWLARGGPPGKKVIWYEYHPTRVAYNAKAFLEGYSGYLQTDGYDGYDSAVKDMPGIVHVGCMAHARRKFFEASRINKKPQSAEGGDKTYTQAVPA

SEQ ID NO: 19631 - DNA, 648 bp, Unknown
  Obtained from environmental sample
  misc_feature (1)..(648): n is a, c, g, or t
atggacgaacttatttcgcgcggagtgaaaacatttaaatttttggacaggactttcaacatcaacataaaccgcgcgcgtgaaataatggaattttttcttgaaaagatcagacaaaaaaacaagtttgtggttcatttcgaaatggttccctcgttattccctcctgcgcttcgcgaaactctttcccgttttcctcccgatactctgcgtcttgaagtcggcatccaaactcttaaccccgaagctgccgcccgtatttgccgcgcggggtatcagcaaaaagacatttccggcttgcctgaaaaagagcttgaagccgtccgcttccttcgcgaaaaaaccaacgcaatcattcacgcggatttaatcgcggggcttccgggagaagacattgaatcattcggcaaaggtttcaaccgtctgcttgcctgtcttgctttgtcaaaagagatgtcaacagagacggacaacatggaaatacaagtcggcattttaaagcttctgccgggagcgccaatttcgcacctcaacggcgctctcggaatggtttacgatcctttgccgccatacgaagtcagggagacttccgccgtaagcgccgccgatattttgcgaataaaaaattcgcccgtttttgggagataa

SEQ ID NO: 19632 - protein, 215 aa, Unknown
  Obtained from environmental sample
  misc_feature (1)..(215): Xaa is any amino acid
MDELISRGVKTFKFLDRTFNININRAREIMEFFLEKIRQKNKFVVHFEMVPSLFPPALRETLSRFPPDTLRLEVGIQTLNPEAAARICRAGYQQKDISGLPEKELEAVRFLREKTNAIIHADLIAGLPGEDIESFGKGFNRLLACLALSKEMSTETDNMEIQVGILKLLPGAPISHLNGALGMVYDPLPPYEVRETSAVSAADILRIKNSPVFGR

SEQ ID NO: 19633 - DNA, 792 bp, Unknown
  Obtained from environmental sample
  misc_feature (1)..(792): n is a, c, g, or t
atgcgcgaagacaacattgtatggatgtatattaccgtcagcgacaccggaataggcatacgcgaggacgacattaaaaagctgttccttgaatatttcatggtcaacgccaaagccaaccgttatattgagggtacgggacttggcctgcctattaccaaaaaactagtggaattgatgaacggggaaatacaggtagatagcgagtacggcaaaggcacaacattccgcctgcgccttaaacagggttttgttgaagatacatctctgggaaaagaaacagcggaaaaactgcgcagtttccgctataccgacgacaagcgtattgccgccaaaaaacttttacgcctcaatttaagctacgccaaagtgctggtggtagacgatatgcaaaccaatctggacgtagcctccggtcttttgggtaaatacaatatacatgttgactgtttaaacaacgggcatgatgctgtaaacagaatatacagcggaaatcctgtttacgacgcgatattcatggatcacatgatgcccggaatggacggcatagaaacaacagacaagattcgcgcattaggcagagaatacgcgcaaaaaatacctattatcgcacttacagccaacgcgatacacggaacggaagaaatgttttatcaacacggcttccaggcgtttatatccaaacccatcgatataatggagcttgattcgattcttaggaaatgggtacgncacgaggagaaagagaaggagcttggaaccaacgcgtttataaatcccgagactgtttga

SEQ ID NO: 19634 - protein, 263 aa, Unknown
  Obtained from environmental sample
  DOMAIN (1)...(83): Histidine kinase-, DNA gyrase B-, and HSP90-like ATPase
  misc_feature (1)..(263): Xaa is any amino acid
MREDNIVWMYITVSDTGIGIREDDIKKLFLEYFMVNAKANRYIEGTGLGLPITKKLVELMNGEIQVDSEYGKGTTFRLRLKQGFVEDTSLGKETAEKLRSFRYTDDKRIAAKKLLRLNLSYAKVLVVDDMQTNLDVASGLLGKYNIHVDCLNNGHDAVNRIYSGNPVYDAIFMDHMMPGMDGIETTDKIRALGREYAQKIPIIALTANAIHGTEEMFYQHGFQAFISKPIDIMELDSILRKWVRHEEKEKELGTNAFINPETV

SEQ ID NO: 19635 - DNA, 474 bp, Unknown
  Obtained from environmental sample
  misc_feature (1)..(474): n is a, c, g, or t
gtggagaaatacattcagtcctttataaaggtttgcgaatcagttttccgtgaatttgttcaaacagaagtcaaagccggtgagttcttctatttaacaaaggaaaaaagagatatgggttgggacatttcggggatcatcgggctttcaggccagatatcaggggctgtttctttatccatgaaggacgacgtcgcttttcaggttacaaagacactgacaggcgttgatcataatacttttgacgctgacgttattgacgcaacaggcgaaataatcaacataataaccggaaatattaaaaaagaatttgaagcgacttacaaaacggctatttccatcccttctattgtacagggtaaaggccacaaattaatatggccttccaaaaatataaaaataatttgtatcccattcatcattttctcagacaaggagatttttatttccatcgcggtagatgaggctaaatga

SEQ ID NO: 19636 - protein, 157 aa, Unknown
  Obtained from environmental sample
  misc_feature (1)..(157): Xaa is any amino acid
MEKYIQSFIKVCESVFREFVQTEVKAGEFFYLTKEKRDMGWDISGIIGLSGQISGAVSLSMKDDVAFQVTKTLTGVDHNTFDADVIDATGEIINIITGNIKKEFEATYKTAISIPSIVQGKGHKLIWPSKNIKIICIPFIIFSDKEIFISIAVDEAK

SEQ ID NO: 19637 - DNA, 546 bp, Unknown
  Obtained from environmental sample
  misc_feature (1)..(546): n is a, c, g, or t
ttggccgacaatgtgggaagtccggtttccgcaaagaaaatcgccgatactctaagttcaggcggccgccctacaggttccgccacggttgatacttatttggaagcgctttgtgacgcataccttttctataaagtaaaccggtatgacattaaagggaagatgcaccttaaatccgaaagcaaatattatatttgcgacacgggcttacgaaatatgatactgggaacaacaaataaagatatcgggcaccagatagaaaatatcgtttttttggaactattaagacgcaggttttcaattaatatcggtaaatccggacggggtacggaggttgattttgtcgctgtccgtaacaataaacccgagtattatcaggtttccgcgtcggtgttagacgaaaacacattgaaacgggaacttacgccgtttaagcaaattaatgacaactatccgaaataccttatcacaatggacgattttacaggcgataatgaaggtatacagcagatcaatttgattgactggctgtatccgccaaattaa

SEQ ID NO: 19638 - protein, 181 aa, Unknown
  Obtained from environmental sample
  misc_feature (1)..(181): Xaa is any amino acid
MADNVGSPVSAKKIADTLSSGGRPTGSATVDTYLEALCDAYLFYKVNRYDIKGKMHLKSESKYYICDTGLRNMILGTTNKDIGHQIENIVFLELLRRRFSINIGKSGRGTEVDFVAVRNNKPEYYQVSASVLDENTLKRELTPFKQINDNYPKYLITMDDFTGDNEGIQQINLIDWLYPPN

SEQ ID NO: 19639 - DNA, 603 bp, Unknown
  Obtained from environmental sample
  misc_feature (1)..(603): n is a, c, g, or t
gtgtttattgcccttggcattctggtttcaaaaacctttttactcatgggcggcatctccgtatatatcaactgggctgctggaatcatcgtcattgtcctgggccttaacgtgatcttcaactttattaagtttgtcaattatgaaaaacgcccctttttgcaaaaatggatgaagaagggcatccgtggaatgttagctgcctttctagcgggaacggctttcggcgcaggctggacgccctgtatcggccccatcctcacgagcgttcttttaatagcggctcaggacggaaaaaccgggacagcagttttttatttggcggtgtattctgcggggcttgctatgccttttcttttggcggccctgtttctggatttctttttaaagcggggccccgctctccgcaaacacctgccgcttatcaggcgcgtaagcggcatcctattaataattatcggacttatgatccttgccggaaaatactcggcgcttaacatactgnattcaagggcgactttcagttatatttattgngcggaggataaagcccttccgttcaggcttttagccaacgctttaagctgccttcaaaatttttag

SEQ ID NO: 19640 - protein, 200 aa, Unknown
  Obtained from environmental sample
  DOMAIN (1)...(159): Cytochrome C biogenesis protein transmembrane region
  misc_feature (1)..(200): Xaa is any amino acid
MFIALGILVSKTFLLMGGISVYINWAAGIIVIVLGLNVIFNFIKFVNYEKRPFLQKWMKKGIRGMLAAFLAGTAFGAGWTPCIGPILTSVLLIAAQDGKTGTAVFYLAVYSAGLAMPFLLAALFLDFFLKRGPALRKHLPLIRRVSGILLIIIGLMILAGKYSALNILXSRATFSYIYXAEDKALPFRLLANALSCLQNF

SEQ ID NO: 19641 - DNA, 321 bp, Unknown
  Obtained from environmental sample
  misc_feature (1)..(321): n is a, c, g, or t
gtgaccattggatcaaatttaaaattcaataaaattaaaaacgagtgggaaaatgtcggtaatccgattatttttaaaaatgtagttatagctgacggcgcaaaaatattcggtccaataataatcggaaaaaatactgtagcatcagctggtgcaataattacaaaagatatacccgctaacagtatagcttatggtgtcaatcaggttaggcataaagataataattatgatttattatttaatggaaatatgataaaaattgagaaaattataaaaacaaataataaattaatagaggattttaataaaatgaaataa

SEQ ID NO: 19642 - protein, 106 aa, Unknown
  Obtained from environmental sample
  misc_feature (1)..(106): Xaa is any amino acid
MTIGSNLKFNKIKNEWENVGNPIIFKNVVIADGAKIFGPIIIGKNTVASAGAIITKDIPANSIAYGVNQVRHKDNNYDLLFNGNMIKIEKIIKTNNKLIEDFNKMK

SEQ ID NO: 19643 - DNA, 627 bp, Unknown
  Obtained from environmental sample
  misc_feature (1)..(627): n is a, c, g, or t
atgaccaattatcgggagattctcagactaaatcagcttgggattcttaaacaagacattgccaaatcctgcgggtgttcaaggaataccgtggcaagcgtcattaaaaacgcgcaggaaaaaggactgggatgggaaacagccacaggtcttaacaacagcgaactggccgggcgtctgtttccgggtaaccagaaaaagccggtttataaaataccggactgggaatatatccatcgggaaatggctaaaagcggagttgcgctcagtctgttatggacggaatactgcgagcaatgccggcagaacaatgaaataccctacaagacaacccagttctaccagtattacagcgactatgttaagaaaacaaaggcaaccatgcacatcggccacaaaccgggtgaaatcatggaggttgactgggctgggaaacctgcgtttatccgtaacactgattcaggagaacctataaaggcacatatcttcgtagcggtattaccgtactccggatatacctacgttgaagcgttcctgtctcaaaacgagcaggcatggatacaagcccatgttaatgcctttgggtatttcggcggagtaacacggattctggtaccggaaatctga

SEQ ID NO: 19644 - protein, 208 aa, Unknown
  Obtained from environmental sample
  misc_feature (1)..(208): Xaa is any amino acid
MTNYREILRLNQLGILKQDIAKSCGCSRNTVASVIKNAQEKGLGWETATGLNNSELAGRLFPGNQKKPVYKIPDWEYIHREMAKSGVALSLLWTEYCEQCRQNNEIPYKTTQFYQYYSDYVKKTKATMHIGHKPGEIMEVDWAGKPAFIRNTDSGEPIKAHIFVAVLPYSGYTYVEAFLSQNEQAWIQAHVNAFGYFGGVTRILVPEI

SEQ ID NO: 19645 - DNA, 885 bp, Unknown
  Obtained from environmental sample
  misc_feature (1)..(885): n is a, c, g, or t
atgatcccggggccagcaggcatcgacgaacggctcgccctgctgtataaattcaagcgcaagtactgcgccgcgctaggcgcgcccaatgccgcgcccgatgccgcgcctgatggcggagctgtttgcgacgaggacgccatgctcgcctaccgcgccgcggcggaagccgagatagaagccctgacaaacatcgaggaaaaccgggaaaacctcaaagcgaccataggggcgctggaaaaagacatcgcttccaaagccgccgccttaaggcagaaacggacggccgccgccggagtgttgggccagcagatcacggggattctcaaacggcttggaatgcccaacgccaggttttccccctcgataaccgcgaaaacccagcaagggcaggacggccgatcaacagttgtattcggcccctggggcgccgatgaagtcgaatttcttatttccgcgaattcaggcgagccgcttaaagacctttcaaggatagcgtcgggcggggaactgtcgcgcgtcatgctggcaataaaatccgtattgtcagcgactgacaatgtagacacattgatttttgacgaaatagacgcgggcataggcggcgaggtcgcccttgccgtaggggaataccttgaaaaaatgggggagagccggcagatattctgcgttacccatctcgcgagcatagcggtgcgcgccggcaatcatttcaaggtggaaaaacggacggaagaaggccggactttcacaggggtcggtcccttgagcgcggacggcagaagaaaggaaatcgcaagaatgttgtctggggacggaggcgaggcggctcttgcgcatgccgatgatctaattgccaaatatggcagagcgggaggtgattag

SEQ ID NO: 19646 - protein, 294 aa, Unknown
  Obtained from environmental sample
  misc_feature (1)..(294): Xaa is any amino acid
MIPGPAGIDERLALLYKFKRKYCAALGAPNAAPDAAPDGGAVCDEDAMLAYRAAAEAEIEALTNIEENRENLKATIGALEKDIASKAAALRQKRTAAAGVLGQQITGILKRLGMPNARFSPSITAKTQQGQDGRSTVVFGPWGADEVEFLISANSGEPLKDLSRIASGGELSRVMLAIKSVLSATDNVDTLIFDEIDAGIGGEVALAVGEYLEKMGESRQIFCVTHLASIAVRAGNHFKVEKRTEEGRTFTGVGPLSADGRRKEIARMLSGDGGEAALAHADDLIAKYGRAGGD

SEQ ID NO: 19647 - DNA, 558 bp, Unknown
  Obtained from environmental sample
  misc_feature (1)..(558): n is a, c, g, or t
ttgccggcgcgcaccgctatgctcgcgagatgggtaacgcagaatatctgccggctctcccccattttttcaaggtattcccctacggcaagggcgacctcgccgcctatgcccgcgtctatttcgtcaaaaatcaatgtgtctacattgtcagtcgctgacaatacggattttattgccagcatgacgcgcgacagttccccgcccgacgctatccttgaaaggtctttaagcggctcgcctgaattcgcggaaataagaaattcgacttcatcggcgccccaggggccgaatacaactgttgatcggccgtcctgcccttgctgggttttcgcggttatcgagggggaaaacctggcgttgggcattccaagccgtttgagaatccccgtgatctgctggcccaacactccggcggcggccgtccgtttctgccttaaggcggcggctttggaagcgatgtctttttccagcgcccctatggtcgctttgaggttttcccggttttcctcgatgtttgtcagggcttctatctcggcttccgccgcggcgcggtag

SEQ ID NO: 19648 - protein, 185 aa, Unknown
  Obtained from environmental sample
  misc_feature (1)..(185): Xaa is any amino acid
MPARTAMLARWVTQNICRLSPIFSRYSPTARATSPPMPASISSKINVSTLSVADNTDFIASMTRDSSPPDAILERSLSGSPEFAEIRNSTSSAPQGPNTTVDRPSCPCWVFAVIEGENLALGIPSRLRIPVICWPNTPAAAVRFCLKAAALEAMSFSSAPMVALRFSRFSSMFVRASISASAAAR

SEQ ID NO: 19649 - DNA, 714 bp, Unknown
  Obtained from environmental sample
  misc_feature (1)..(714): n is a, c, g, or t
atggaggttgatgcaattgagctttcggagaaaatgcacgatttgttatcgccgctccctgaatatccagcatatattttgcgccccgaaaaaacacgcatacaaggcttgggcgatgcattatgtggcgattatttgcaaacattcaagcatttaaaaggcaattttgagttttgcccagagaaccgctttcactgcgcaaccgctttggcagcggaatgggtgataagcggcgcaggaaaaaatatagtgagttcctttagtggcataggtggctttgcagcgactgaagagctgattatgattttgaaaataaacggacttcgcaaaccgggcaaaacctaccattttctccccgaaatgacagagttgttttccaaaataataaaaaaaaagataccaaaaaacaagcccattataggcagtaaaatatttgaagtggaatcgggagttcatgttgacggaattctaaaaaatcctgcaagctatgagccgtttccgccggaaagcgtgggacagaagcggaaaattgtgctgggaaagcatagcggaactgcctcaatacgagcaaagctcgcagagttaaagataaaatgtgcggaagaagatattccgcgtattcttgaacaggtaaaaatgaaagctgtgcaaaaaaaaggcgaagtgagcaacagggaatttgcaagaactttctatattatccccgacctatga

SEQ ID NO: 19650 - protein, 237 aa, Unknown
  Obtained from environmental sample
  misc_feature (1)..(237): Xaa is any amino acid
MEVDAIELSEKMHDLLSPLPEYPAYILRPEKTRIQGLGDALCGDYLQTFKHLKGNFEFCPENRFHCATALAAEWVISGAGKNIVSSFSGIGGFAATEELIMILKINGLRKPGKTYHFLPEMTELFSKIIKKKIPKNKPIIGSKIFEVESGVHVDGILKNPASYEPFPPESVGQKRKIVLGKHSGTASIRAKLAELKIKCAEEDIPRILEQVKMKAVQKKGEVSNREFARTFYIIPDL

SEQ ID NO: 19651 - DNA, 723 bp, Unknown
  Obtained from environmental sample
  misc_feature (1)..(723): n is a, c, g, or t
ttggtctgcgcacgaaccgctcttgaatccattgccaaaattggcgattccggcggtcttgacgcggtgcttgcctgtgcttccgccagcgatcccaacatccgttcagccgctgtcaccgcattgggaccattttccggacaggcggttgatgaggcaatactcgatgcatttcgggattcctattaccgcacccgcattgcggcggcgcaggccagccgtcagcgtaaacttgccgcagccgtaccttaccttaaattccgcgccgagcgcgacgaggttcccgccgtcaaagaagatgccatccgcgcccttggcgcgatagcggacggcgagtcaattaaaatactggaagatctttttaccgaacgtaaaaacagcgaccgtgtgcggattgtcgccggtgaaatgatcatgcaaattcaaccggaaaaatttcttgaccgtcttgtcatggaactggacgaggcaaaacaaaaaaaacagactgctctgtacaacggtctgttgaagattatcggagagacaaagagcgccaacatggacgccattacccgccgcctgatgcagaacagcgggataatagaaaggtcttacgctctggatatggcggctaacaatcgcctgacgggacttgccgatgaaataagagccatgacttctgataaaaacgaaacacttgcctccaaagcccgcagaacccttgaaaaacttggtttatag

SEQ ID NO: 19652 - protein, 240 aa, Unknown
  Obtained from environmental sample
  misc_feature (1)..(240): Xaa is any amino acid
MVCARTALESIAKIGDSGGLDAVLACASASDPNIRSAAVTALGPFSGQAVDEAILDAFRDSYYRTRIAAAQASRQRKLAAAVPYLKFRAERDEVPAVKEDAIRALGAIADGESIKILEDLFTERKNSDRVRIVAGEMIMQIQPEKFLDRLVMELDEAKQKKQTALYNGLLKIIGETKSANMDAITRRLMQNSGIIERSYALDMAANNRLTGLADEIRAMTSDKNETLASKARRTLEKLGL

SEQ ID NO: 19653 - DNA, 606 bp, Unknown
  Obtained from environmental sample
  misc_feature (1)..(606): n is a, c, g, or t
atgatcagattcggagaggcttcctccaccgcgcagagccacagccgaatcatcgttattgagttaatggggcacaaagcgggctggcttgcgctttacgccggagtcgcgggcggcgccgacgttattctgcttccggaattcaactatgatatacgcgcaatttcccaacatcttgaaaaacgctcaaaacacggcagaatgttttcaatcgtggtcgccgcggaaggcgcgttgtccgtcaaagaagcggagatggataaaaaagaccggaaaaaattacgcgcggaaagcggcccgtccgtggcataccgcgtcgcacaaaaaattaatgaagagacaggcatggaaacccgcgccaccgttttaggatatgtccagcgcggaggaatcccaagcgcgtcagaccgcatcctcgccacaagcctgggaaccgccgcggcggaacttctcgcaaacggcaaatacaaccgcatgatcgccctgcagggagaccgcatcggcgatgtagacctcagcgtccccgaaggcaaagtaaaaaacgttccgacggatcattacatgatcgacaccgccaaagccgtcggcacttgcatggggttttag

SEQ ID NO: 19654 - protein, 201 aa, Unknown
  Obtained from environmental sample
  DOMAIN (3)...(153): Phosphofructokinase
  misc_feature (1)..(201): Xaa is any amino acid
MIRFGEASSTAQSHSRIIVIELMGHKAGWLALYAGVAGGADVILLPEFNYDIRAISQHLEKRSKHGRMFSIVVAAEGALSVKEAEMDKKDRKKLRAESGPSVAYRVAQKINEETGMETRATVLGYVQRGGIPSASDRILATSLGTAAAELLANGKYNRMIALQGDRIGDVDLSVPEGKVKNVPTDHYMIDTAKAVGTCMGF

SEQ ID NO: 19655 - DNA, 402 bp, Unknown
  Obtained from environmental sample
  misc_feature (1)..(402): n is a, c, g, or t
gtggcgagttccggccttacctgggataccggaactgataggcgttttaaggcaaagaaaaataaagggttacgggttttgacaaataaaccggatccagtggctcaaaaagtggcagccgggctcttcccttccggctcttttgaccgcgtgcaggggggcgtgcccggaaagccgctaaagccggatcccgccagcgtttgggaactgcttgtcgagcttagccttacccccagcgatataattttcgccggcgattcggaagtagacatcaaaaccgccgtttcttccggctgctttcctcttggcgtcgcctggggctaccgttcgcgtgaaacaataattaacgcaggcgcccggctaataattgagaaaccggaagaactgctgcaattgctataa

SEQ ID NO: 19656 - protein, 133 aa, Unknown
  Obtained from environmental sample
  misc_feature (1)..(133): Xaa is any amino acid
MASSGLTWDTGTDRRFKAKKNKGLRVLTNKPDPVAQKVAAGLFPSGSFDRVQGGVPGKPLKPDPASVWELLVELSLTPSDIIFAGDSEVDIKTAVSSGCFPLGVAWGYRSRETIINAGARLIIEKPEELLQLL

SEQ ID NO: 19657 - DNA, 912 bp, Unknown
  Obtained from environmental sample
  misc_feature (1)..(912): n is a, c, g, or t
ttgcttaaaggcaaaaaagaccgccttacagggcattttatcatgtatatccgatcgggcgatctgtatctttgcgtctgcgcgaaaggttgtgaaaaagaagttttaccgcccgtcagttatcgcatgnaaagaagtaaaaaaatcattacacctgaaatattctgtccgaataaagaatggaaaacaggcgagaaaatggcggagatagttgtctttcacgccaaaggatactttaattttaaggacacccttaaaaccatatattgccagaaagaaatttttaaaacaaacagcttccttatgaatttttcggaaaaccctttggaaaaatcaaatatggcgggaggttatgaatcctggtataaccactacacaaacattaatgaaaaaataatactcgaagatttatacgcgttgggaaaaacagaaaacttgatcaaattatggtttttggacagaaacaaaaaggccgtgtttcaaattgatgacggctgggaaaaagccgtcggcgaatgggaaattgatacttcgcgtttcccgaacgggcttaaagcaatagcggaaaaaatcgaaggcgcgggatacattcccggcatttggctcgccccgtttttagttacacgccggtccaggctcttttccgagaaaccggaatgggtactcaaagaagccaatggcggaaaattagctgcggcgggctttaatcctctctgggataaacagttttactgtttggatatttccagaagcgacgtccttgaatatatggaaaaaataatagaccgcgtgatagacgaatggggtttccgctatttgaaactggattttctttacgccggaatgttaaacggtttttttgcggaaggcggaagcccgtaccggcattacgaaaaagcctgcgcggtttaa

SEQ ID NO: 19658 - protein, 303 aa, Unknown
  Obtained from environmental sample
  misc_feature (1)..(303): Xaa is any amino acid
MLKGKKDRLTGHFIMYIRSGDLYLCVCAKGCEKEVLPPVSYRMXRSKKIITPEIFCPNKEWKTGEKMAEIVVFHAKGYFNFKDTLKTIYCQKEIFKTNSFLMNFSENPLEKSNMAGGYESWYNHYTNINEKIILEDLYALGKTENLIKLWFLDRNKKAVFQIDDGWEKAVGEWEIDTSRFPNGLKAIAEKIEGAGYIPGIWLAPFLVTRRSRLFSEKPEWVLKEANGGKLAAAGFNPLWDKQFYCLDISRSDVLEYMEKIIDRVIDEWGFRYLKLDFLYAGMLNGFFAEGGSPYRHYEKACAV

SEQ ID NO: 19659 - DNA, 714 bp, Unknown
  Obtained from environmental sample
  misc_feature (1)..(714): n is a, c, g, or t
gtggttactggagcgacatccaaacagttaagcagcgaaaagcacatgctccccatttcttacggctcaatgctggtggaaaccatggtggcgatccttgcccttattgccgttggttccatgtggaaagggaaaatgccggaaggcactcccccggttattttcgcgaccgccgtctccggttttctttccaggtttcgcctgccccatcaggcgtcttttaccatagtatcgctggcggtttcatcatttgtgtttacgacgctggataccgtcgcccggctgggtcggctttctttccaggaacttttttccgatggcgatcagaaacaaaaaaagaacccattggtattgatacttaataacagggcggttgcttcggtttttaccctggggcctgcctaccttctggcgataatgggctatcgaaatatatgggctttattcggcgccgccaaccaacttcttgccgcccttacactaattgcctgtaccttgtttttcaaaaagaccggcaagcgtatttttattattatcgttccaaccgttatcatgctggccgttacctatacttccctttgtttaagtataaaaggcaaaattacgcttttgttaaatggcacgttcaacgcggcggttgacggtattcaaatgtgcattgccatcctgcttttgatattggggattcttgtagcggcttcatgcgcccgctaa

SEQ ID NO: 19660 - protein, 237 aa, Unknown
  Obtained from environmental sample
  misc_feature (1)..(237): Xaa is any amino acid
MVTGATSKQLSSEKHMLPISYGSMLVETMVAILALIAVGSMWKGKMPEGTPPVIFATAVSGFLSRFRLPHQASFTIVSLAVSSFVFTTLDTVARLGRLSFQELFSDGDQKQKKNPLVLILNNRAVASVFTLGPAYLLAIMGYRNIWALFGAANQLLAALTLIACTLFFKKTGKRIFIIIVPTVIMLAVTYTSLCLSIKGKITLLLNGTFNAAVDGIQMCIAILLLILGILVAASCAR

SEQ ID NO: 19661 - DNA, 786 bp, Unknown
  Obtained from environmental sample
  misc_feature (1)..(786): n is a, c, g, or t
atgcccgcgtcaaagtcagccacggccaaaggcggttttattttcctcggtcctgaaataggaaagaaacaggatgagatagggcaaatcaaaaaaaagctgtcagagaacggggattatgaagaaactgttttctacgccggtgaaacgccgataacaaatattgtaaatacaatacaaaaccacagcctgtttacccaatcgcgcctgttcataatcaaaaacgcggaacagataaaaaagaaagacgagataaacgccgtcgccgactgcctgaaagatcttgaacctgatgacactctgatacttgtatccgatgaattcaagctttccgcgggactggacaacgcctgtcctaaagagaaccgcaaagttttttatgagatgtttgaaagggaaaaaagcgcgtgggtgcgttcttttttccagcgcgaaggccgcagtatcgactctgggggcgttgacgcaatcctggaacttgttgaaaacaataccgacgcgatgcagcgcgaatgttcgaggcttatgctttttctgcccaaagaccgcccggcgcgggcgcaggacatagagcaatggctttcccacagcagggaagagtcggcctttaccttattttccaggattgccgccggagacagttcanaggcgattgaatcgcttcataccctgcttgcggcaaaggaaagccccattggtattctcgccggccttgcgtggtctttcagaaaactccgcgactatctgacgctctccgaaacggcgagccggaatattttgaattaa

SEQ ID NO: 19662 - protein, 261 aa, Unknown
  Obtained from environmental sample
  misc_feature (1)..(261): Xaa is any amino acid
MPASKSATAKGGFIFLGPEIGKKQDEIGQIKKKLSENGDYEETVFYAGETPITNIVNTIQNHSLFTQSRLFIIKNAEQIKKKDEINAVADCLKDLEPDDTLILVSDEFKLSAGLDNACPKENRKVFYEMFEREKSAWVRSFFQREGRSIDSGGVDAILELVENNTDAMQRECSRLMLFLPKDRPARAQDIEQWLSHSREESAFTLFSRIAAGDSSXAIESLHTLLAAKESPIGILAGLAWSFRKLRDYLTLSETASRNILN

SEQ ID NO: 19663 - DNA, 576 bp, Unknown
  Obtained from environmental sample
  misc_feature (1)..(576): n is a, c, g, or t
ttgtcctttcttccaaaaaatttgagattacaaggaatttccaatataattataaagggagtattcatgcttattggacttacgggtaaatactgtgccgggaaaaatcatgcggcggctattctggagaaacacgggcttccggttctggatgtggacaagctgggacacgcagctcttgaaataaaaaaagacgaagttttttcccgttttggaaatgatgtaatgaatccggacggatcggttaaccggcgcttgctcaagaagaaagtttttagaaaaaaaagcgagattaccgcgctggaagctattatccatccgcaggctgaccacatggcgctggaatggattgcctcgcaaaagggcaaaccctgcgttataaacgcggcattgctccatagaatggcggtttttgggcaatttaactgcattatactggttaacgccccgttttttgtccggttgttacgggcaaagcgcagagacaggctctcctgggtttcaattttaaggataatgaagaaccagaagcgttttacccttcaatatttggccgtaaatgccgatattacatag

SEQ ID NO: 19664 - protein, 191 aa, Unknown
  Obtained from environmental sample
  DOMAIN (23)...(189): Dephospho-CoA kinase
  misc_feature (1)..(191): Xaa is any amino acid
MSFLPKNLRLQGISNIIIKGVFMLIGLTGKYCAGKNHAAAILEKHGLPVLDVDKLGHAALEIKKDEVFSRFGNDVMNPDGSVNRRLLKKKVFRKKSEITALEAIIHPQADHMALEWIASQKGKPCVINAALLHRMAVFGQFNCIILVNAPFFVRLLRAKRRDRLSWVSILRIMKNQKRFTLQYLAVNADIT

SEQ ID NO: 19665 - DNA, 699 bp, Unknown
  Obtained from environmental sample
  misc_feature (1)..(699): n is a, c, g, or t
atggggtggtcgaagataaaagcggtcataatgaaaggaaggggcaattacctgtgcctgcgccgccttgacgaagccttacgcgagccgccgatgattattgaagaagacgacagcgaatatgatgaactgaaacgcattaacgaatgggcgcaaaacacaaaaaccggagtgcgcagcgaactttcctttcaaccggcggaaaccgtgtggggatcagtttgttccgagtcggatttatgtttaagtcttcattgtccctggcgcgaaaattgttttgtttccgccatgcgcaaagaagcgagtaacgcgcacattatcgtagtaaaccatcatctgctctttgcggatttggcggcgcgttttcagggcgcgggttatgaaaacgccgtcgtcctaccgccttttaacaggcttgtaatcgacgaagcccacacgatagaaaatgccgcaacctcattcttttccgcggagttcgggcgcgcgggaattttccgccaactgggaagactctaccacaaaaagaaaaaaagcaaacgtggactgcttgtaaggctctgcgccatgctgccgcccggaagcaagcatttgaacagcatggtaaaacaggcggataaaatacgcgattgcgcgcaagctctggacttaagcgcgctggaactttgcggagaagcgggagttttaccgactgtcgcctga

SEQ ID NO: 19666 - protein, 232 aa, Unknown
  Obtained from environmental sample
  misc_feature (1)..(232): Xaa is any amino acid
MGWSKIKAVIMKGRGNYLCLRRLDEALREPPMIIEEDDSEYDELKRINEWAQNTKTGVRSELSFQPAETVWGSVCSESDLCLSLHCPWRENCFVSAMRKEASNAHIIVVNHHLLFADLAARFQGAGYENAVVLPPFNRLVIDEAHTIENAATSFFSAEFGRAGIFRQLGRLYHKKKKSKRGLLVRLCAMLPPGSKHLNSMVKQADKIRDCAQALDLSALELCGEAGVLPTVA

SEQ ID NO: 19667 - DNA, 879 bp, Unknown
  Obtained from environmental sample
  misc_feature (1)..(879): n is a, c, g, or t
atgtcagatcggccgagtcaatcctcggcaaaagggcgtcctacgcgatctcgtcaatctctcggctcaatgtccgaggaggagcgcaaaactttcggcgccgcggccaacgctctgcgccgcgaggtcgaggaacgcttcgcggaggcgccgtggcagaataaagccgaggcggctgacccagggtttgaccccaccctcccaggctacccttttcaaaccggcagcctgcacccccttgcaaagataaggggcgagatcgtagaaatactcgtaagtatgggtttttcagtagcttacgggccggatgtagaaagcgactactacaacttccaggcgctgaacatgccgccgctgcaccccgcccgcgacatgcaggacactttctatatcagcgaaaaatcggtcttgcggacgcacacgtcgcccgtgcaaatccgcgttatggagacgcaaaaaccacctgtaaggataatagccccgggccgcgtctaccgcaacgaggcgatcagcgcgcgcagctactgcatgttccaccaagtagagggactctacgtagacgaaaacgtcagcttcgccgacctcaaagggacgttgctcgccttttcgcggcgcttcttcgacaaaaacacgaagataaagatccgccccagtttcttcccattcacggaacccagcgtcgaggtagacgttgagtgcttcctatgcaagggaaaagggtgcaatatctgcaaacatagcggatggctggaaatacttggggcggggatggtccaccccaacgtattcaaggcctggcggatagatccggaacagtacacgggtttcgctttcggtatgggcatagagagaatcgctttgctcaaataccggggttga

SEQ ID NO: 19668 - protein, 292 aa, Unknown
  Obtained from environmental sample
  DOMAIN (62)...(292): tRNA synthetases class II core domain (F)
  misc_feature (1)..(292): Xaa is any amino acid
MSDRPSQSSAKGRPTRSRQSLGSMSEEERKTFGAAANALRREVEERFAEAPWQNKAEAADPGFDPTLPGYPFQTGSLHPLAKIRGEIVEILVSMGFSVAYGPDVESDYYNFQALNMPPLHPARDMQDTFYISEKSVLRTHTSPVQIRVMETQKPPVRIIAPGRVYRNEAISARSYCMFHQVEGLYVDENVSFADLKGTLLAFSRRFFDKNTKIKIRPSFFPFTEPSVEVDVECFLCKGKGCNICKHSGWLEILGAGMVHPNVFKAWRIDPEQYTGFAFGMGIERIALLKYRG

SEQ ID NO: 19669 - DNA, 834 bp, Unknown
  Obtained from environmental sample
  misc_feature (1)..(834): n is a, c, g, or t
atgggggcctactatattatttacggaattcctttctttataatcgccgcgtttgtcggcatatcatttattacattaaacgacagaatccagcaagtatatttctggaatatgataggttccggcgcaggcggcctgtttattgttctgtttatgttttttcttcctcctcagtaccttttatttccggttctcgcccttacaattattgccgctcttttcagctcatgccgcaaggacgagaaattacttttcccggttccctatgttatcggtcttgttataacaacagttgcttcggtttttcttgttttcttccggggaaacatcaggatttccgactataaagacataagctatgtacgcaaatacgcggattctgcccttgttcaccattccaacggacctgccggtgagtttcatgtctacgcgtcaaggtattttcattttgcccccggactttcagataacgctgtcctcagtatcgagaatctgcccacacagctttactggggcctgtttattgacggctcgggcccggtcgggataatgggccatcttaaggaaaatgaaaaaatttacatggattatcttccgatggcggccccctactccgtgatttcagcgcctaaagtgctgcttgtaaacttgagcggaggaataaacgcgaatgtcgctttgtacaatggggcgcgttccattgacatcacggaaccttctccggaaatgatccgtctgctgcgcaaggatccttctgtttcccgctttacgggcaatcttctggatactgaaaaaataaatgtaatcaggggagagggccggtcgcattgctaa

SEQ ID NO: 19670 - protein, 277 aa, Unknown
  Obtained from environmental sample
  misc_feature (1)..(277): Xaa is any amino acid
MGAYYIIYGIPFFIIAAFVGISFITLNDRIQQVYFWNMIGSGAGGLFIVLFMFFLPPQYLLFPVLALTIIAALFSSCRKDEKLLFPVPYVIGLVITTVASVFLVFFRGNIRISDYKDISYVRKYADSALVHHSNGPAGEFHVYASRYFHFAPGLSDNAVLSIENLPTQLYWGLFIDGSGPVGIMGHLKENEKIYMDYLPMAAPYSVISAPKVLLVNLSGGINANVALYNGARSIDITEPSPEMIRLLRKDPSVSRFTGNLLDTEKINVIRGEGRSHC

SEQ ID NO: 19671 - DNA, 453 bp, Unknown
  Obtained from environmental sample
  misc_feature (1)..(453): n is a, c, g, or t
atgcggtgtccgcactgcggcacaattgaggacaaggtagttgaatcgcgaaccctcgcaaacggggacgcgatacgccgccgcagggaatgtatcaactgcggttatcgtttcaccagttacgaaaggattgatgaaacgcagtttatggtggttaaaaaggacggaagacgcgaaccttttgaccgtgtaaaacttgagcgcggcgttgagcgggctttggaaaaaagaccgttttcgcagatgcagattgaaagctttgtaaacgagattgaagacgcgacagcgatcttaagcaagggaagccgcgagatcgcgagcacggaaatcggggatctggtgttaaagaggcttggcgagatagacaaagtcgcctacatccgctttgcttcggtgtacaaacattttgaagatttagatgaatttatcaaggagataaagacagtatcttga

SEQ ID NO: 19672 - protein, 150 aa, Unknown
  Obtained from environmental sample
  DOMAIN (49)...(141): ATP cone domain
  misc_feature (1)..(150): Xaa is any amino acid
MRCPHCGTIEDKVVESRTLANGDAIRRRRECINCGYRFTSYERIDETQFMVVKKDGRREPFDRVKLERGVERALEKRPFSQMQIESFVNEIEDATAILSKGSREIASTEIGDLVLKRLGEIDKVAYIRFASVYKHFEDLDEFIKEIKTVS

SEQ ID NO: 19673 - DNA, 747 bp, Unknown
  Obtained from environmental sample
  misc_feature (1)..(747): n is a, c, g, or t
atgggtaaaaatctgttgttccgctccggagagtctgtaaattacactctggtgtcggcgtgtatttccgcaattatggatttgggggacagttcatcttatcccgccctattttcggttctttacgccgggtatccggaagtaatcgcatctgaagcccaaggcgcgttagaagtaattcccgggaacctgtatcaattccttgtaaacgtaatatattataatccgcctgaggaaaaatttgccgcttttagaataggggcggacagtgacaagataaacgtatcccaacgcgggcagcttgcggagattgcgcttgaacaggcactaaacgcggatgaagaaaatatcgatatgaccattatgcgctattccgccgttttactgcttactcagcttaagtggacgcgcgcaaacgctcttgcaatacgccactattaccgtgtgcaggccgattatcttcataatttagccccaaaagaacgttttatagaagcgattgcctgccttggcgcggttggaaattcagacgcgacttccatacttggcttgcaacttgggcttattaatgttaaaacggaaagaacaggatcatttgacgcggatataacattggcggttgttcaggcgcttgggaatattggctctaacgccgcgtttgatcaattattatatgtagaaaatttatcgtacaccgaagatattcaagctgcggcaagggaggcggttgatcgccttaaatggtaa

SEQ ID NO: 19674 - protein, 248 aa, Unknown
  Obtained from environmental sample
  misc_feature (1)..(248): Xaa is any amino acid
MGKNLLFRSGESVNYTLVSACISAIMDLGDSSSYPALFSVLYAGYPEVIASEAQGALEVIPGNLYQFLVNVIYYNPPEEKFAAFRIGADSDKINVSQRGQLAEIALEQALNADEENIDMTIMRYSAVLLLTQLKWTRANALAIRHYYRVQADYLHNLAPKERFIEAIACLGAVGNSDATSILGLQLGLINVKTERTGSFDADITLAVVQALGNIGSNAAFDQLLYVENLSYTEDIQAAAREAVDRLKW

SEQ ID NO: 19675 - DNA, 483 bp, Unknown
  Obtained from environmental sample
  misc_feature (1)..(483): n is a, c, g, or t
ttgaaaattgttcttgagggccgcaagcctgtcgcgtatgcccttgccgcttcggaacacgggactgtacctgtggtgtttgacagccagggcgtaatttacgaagtcggcggaaaaggccttccggatttttatccggtggtttcggggcttgttattgaaaaccccgttccgggcatgaggcttccgggagtttttattcccttcctaaaagagcttgaaaaaattgaaatgtcctctccggagctgctttccgcagtgtcggaattcaagataaacagaaaactttatgacggttttgatttgttcctttatccggcccacaaaaagataaaggtcaggatgtccgaaataaacgaagatttgctgcgttacgcgcttttaatggtggatgtactgtcatccagagaaagcggaatagatacacttgattttcgctccggtatagcatcatatgtccctaaggaggcatatcctgagtaa

SEQ ID NO: 19676 - protein, 160 aa, Unknown
  Obtained from environmental sample
  misc_feature (1)..(160): Xaa is any amino acid
MKIVLEGRKPVAYALAASEHGTVPVVFDSQGVIYEVGGKGLPDFYPVVSGLVIENPVPGMRLPGVFIPFLKELEKIEMSSPELLSAVSEFKINRKLYDGFDLFLYPAHKKIKVRMSEINEDLLRYALLMVDVLSSRESGIDTLDFRSGIASYVPKEAYPE

SEQ ID NO: 19677 - DNA, 771 bp, Unknown
  Obtained from environmental sample
  misc_feature (1)..(771): n is a, c, g, or t
atgcctgaactgacgtcaaaaatcgaccttacagtacggatgtggctttaccgaagggcatacaaaaaatctctcataatatatacgttatctaatttttcaaaatccagaattgaatatcacctcgggacaaaaaagccaattatcgttacatacaacgctgtacagcctttttttctttcatacagggacaaaaacctcaacgtacaaaaaacagaaactattatatttatgggtaatatcaaaaaacacaaaggattggactgccttttgaaagcgttcatcttggcaaaaaaagaaggcctgccgcacaaattattagtaataggagctaatgataatttaagtacatccgataactcaattaggcaagagattgatacatttggcagcggcgaaattatttttaacgattttgtttccaatgaagagcttctaaaaagtctttcggaagctgcattgctggttcagccctcgctttatgaagcatttggtctcgcgccgcttgaagcgcttgttctgggtacaaaagctttagtttctgacatcccggtttttagggaaatatatgacggttttccggtagcatttttccgtgccggagactctgcggatttgaaaaacaaaatgatggaaatacttgccgcaaaaaatcaagcgtcaaaaaaaagagcttctaaaaagacagcatctaaagaacaattttttcctgttttatctgatgaattattgaataaatatacttttgaaaaaacagcccgccgtatatag

SEQ ID NO: 19678 - protein, 256 aa, Unknown
  Obtained from environmental sample
  DOMAIN (59)...(234): Glycosyl transferases group 1
  misc_feature (1)..(256): Xaa is any amino acid
MPELTSKIDLTVRMWLYRRAYKKSLIIYTLSNFSKSRIEYHLGTKKPIIVTYNAVQPFFLSYRDKNLNVQKTETIIFMGNIKKHKGLDCLLKAFILAKKEGLPHKLLVIGANDNLSTSDNSIRQEIDTFGSGEIIFNDFVSNEELLKSLSEAALLVQPSLYEAFGLAPLEALVLGTKALVSDIPVFREIYDGFPVAFFRAGDSADLKNKMMEILAAKNQASKKRASKKTASKEQFFPVLSDELLNKYTFEKTARRI

SEQ ID NO: 19679 - DNA, 600 bp, Unknown
  Obtained from environmental sample
  misc_feature (1)..(600): n is a, c, g, or t
atggcaatgatgcatcatggtacggttgaacactgggacggacagagaaaacttcacccggattatttaatacaggattttgccaactttggaaattttcttgcttcatggaacgtaaggttcatttttacaggccattatcacgcgcaggatgttacgcgcggcgactataacggaaaaacaatccatgatattgaaacaggttctcttgtaaccgccccttgtccggtgcgctatattgagataaaagacaacgtgatgaatatccgtaccgaaacaatcgtagacaaacttcatccgggaactgattttgcgcctgacgctatggcttttgtaaagaagacggttatgctggaggcggcaggcgttcttagaaaatacaaagtatccgaaaaggatattgctattattaccgacgccgtaggagacgcctttaacgctcattatagcggagatgaagatctctctttaaaaaaggcggtagacgaatccaaactcggcctttggggacgttttattcttggacaacagcaatatgtcattgacggtctttggacggatcttaaacctgtggataataacgtaaatttacagttttaa

SEQ ID NO: 19680 - protein, 199 aa, Unknown
  Obtained from environmental sample
  misc_feature (1)..(199): Xaa is any amino acid
MAMMHHGTVEHWDGQRKLHPDYLIQDFANFGNFLASWNVRFIFTGHYHAQDVTRGDYNGKTIHDIETGSLVTAPCPVRYIEIKDNVMNIRTETIVDKLHPGTDFAPDAMAFVKKTVMLEAAGVLRKYKVSEKDIAIITDAVGDAFNAHYSGDEDLSLKKAVDESKLGLWGRFILGQQQYVIDGLWTDLKPVDNNVNLQF

SEQ ID NO: 19681 - DNA, 498 bp, Unknown
  Obtained from environmental sample
  misc_feature (1)..(498): n is a, c, g, or t
gtggaaaaaattgattatgatctgatgtgcattgaccgctcgcctgaagatttttatacggcccgccttacaggcttgattatccgtaaaccgcagtcaaacgacatgaacgatcttgccgcgttacaggccgcctacgagcaggaagaagttataccctctgcggcggagtttaacgccgctgtcagccgcctgaacacggaacgcattttttcaaaagaacaaatgcttgtcgccgaactggacggtcatcttatcggaaaaattaacaccaatgccgctactttttcccgctatcaggttggcggcgtatacgttgctcccgattaccggggccggggcatagcccgcagaatggcgagcgaatttatcaccggtcttgtcgctcagggccggggcatttccctttttgtcaaaaaatcaaacccctgcgcccgccgcgtataccagcgcatcggttttgaaacactgggcgattacaggattagttattattga

SEQ ID NO: 19682 - protein, 165 aa, Unknown
  Obtained from environmental sample
  DOMAIN (77)...(162): FR47-like protein
  misc_feature (1)..(165): Xaa is any amino acid
MEKIDYDLMCIDRSPEDFYTARLTGLIIRKPQSNDMNDLAALQAAYEQEEVIPSAAEFNAAVSRLNTERIFSKEQMLVAELDGHLIGKINTNAATFSRYQVGGVYVAPDYRGRGIARRMASEFITGLVAQGRGISLFVKKSNPCARRVYQRIGFETLGDYRISYY

SEQ ID NO: 19683 - DNA, 597 bp, Unknown
  Obtained from environmental sample
  misc_feature (1)..(597): n is a, c, g, or t
atgtcaagtgaaattgacgcgaaagaaaaattcacctctattatgaaaaaatttatcgctcttgcggctgtccgtcttagcgacgatgtgatagcccgcctgcgcgaaatgcgggaacgcgaggacactcctttgcaaaaagcgatctatgacagttaccttgaaaatttgaaaatggcgctggaacttaaacgtccatgctgtcaggatacgggtcttcttcaattttacataaaggcgggaacagcttttccgcacttggacattgccgctgaagcgttagttgaagcgactcggagggctacggcaagcgttcctttaagaccgaacgcggtaaactactttgacgaaaaaaacacgggcgataacatagcggaacgatctccgtggattgattgggagattgttcccaattcgcggaatatggaaattaccctgtacttttccggcgcggggtgcagtcttcccggacaggccaaggttttcaagccttcggacgggcttgaggcggttattccctttgtttatgacgcggtctacgggccggggaataacgcctgccctcccctggctgtcggtatcggggcttgggcataa

SEQ ID NO: 19684 - protein, 198 aa, Unknown
  Obtained from environmental sample
  DOMAIN (11)...(198): Fumarate hydratase (Fumerase)
  misc_feature (1)..(198): Xaa is any amino acid
MSSEIDAKEKFTSIMKKFIALAAVRLSDDVIARLREMREREDTPLQKAIYDSYLENLKMALELKRPCCQDTGLLQFYIKAGTAFPHLDIAAEALVEATRRATASVPLRPNAVNYFDEKNTGDNIAERSPWIDWEIVPNSRNMEITLYFSGAGCSLPGQAKVFKPSDGLEAVIPFVYDAVYGPGNNACPPLAVGIGAWA

SEQ ID NO: 19685 - DNA, 750 bp, Unknown
  Obtained from environmental sample
  misc_feature (1)..(750): n is a, c, g, or t
atggaaaccaaggaggggcgcttctgccgcctctgcggcgccgaactcgaatacgaagcgtattattacagtcagataggccgctacgcctgcccaaactgcgggttcacgcgcccgctgcccgcatacgccgccgaaaacgtctcccttaccgacggcatctcctttaccgtgggcggcgcgcggctcgcggcggactatcgcgggctctacaatatttataatatgctcgccgcctacgcggtcctgcggagatacgatatacacaacgtggacatcaacaaggcctttgccggataccgcccgcagatcggcaggatggagagctttacggttggcggcaagccggtcatcctgaatctctcgaaaaatcccgctggctttaatcaggcgatcgccaccctgcataccgatacgcgcggcaaagccgtggtgatcgtcatcaatgacaacgatcaggacggacgcgatgtctcgtggctgtgggatgttgattttgagcgccttgacggtatcccaaacctcattgtcagcggcctgcgcgcgcacgatatgctggtgcgcatgaaatacgcgggttacgacatggcaagagcgcggatactcccgaaaatcaaggaagcgcttcgggccgcgcttgcctgcgactgcgaagtcgtgtacgcgcttgtaaactataccgcgctcttttatacgcacgatctgttacagaaattatcagattcagaccggcgcttgaaacgcctgtaa

SEQ ID NO: 19686 - protein, 249 aa, Unknown
  Obtained from environmental sample
  DOMAIN (121)...(229): Domain of unknown function (DUF1727)
  misc_feature (1)..(249): Xaa is any amino acid
METKEGRFCRLCGAELEYEAYYYSQIGRYACPNCGFTRPLPAYAAENVSLTDGISFTVGGARLAADYRGLYNIYNMLAAYAVLRRYDIHNVDINKAFAGYRPQIGRMESFTVGGKPVILNLSKNPAGFNQAIATLHTDTRGKAVVIVINDNDQDGRDVSWLWDVDFERLDGIPNLIVSGLRAHDMLVRMKYAGYDMARARILPKIKEALRAALACDCEVVYALVNYTALFYTHDLLQKLSDSDRRLKRL

SEQ ID NO: 19687 - DNA, 633 bp, Unknown
  Obtained from environmental sample
  misc_feature (1)..(633): n is a, c, g, or t
ttgtatgagattagccgccaatgttttccggtgtcgcccgtagtatttaatacaatgatcaagccctataaaacaaccgcctgcatagccttttggctgctgatacttgggtccggccgcgtgtcggctgacggatacgccgtcgcgccggccgagaccgatccggccatcaggagcgcgcaatacgaccactacgccgtgattaacccgtgggcggcgcggcgcggcgtccttttcctcttctttccggggacgaagtcgcgcgcaatgaattacaagatgatctgcgaaaccgccgccgaccggggattccacgccgtaagcctgcaatatgtaaacgatgtctctgtcaacattaagtgcggcaaaagccgcaatgccgagtgccatgaaaatatgcgccgcgaaatactcttcggcgcggatttctcgccccacgtgaacgtgagccgcccaaacagcgccgagaatcgcctggtcaagctactgcgctacctcgccgaccgctacccgctcgacggatgggatcagtacctgaccgccggagacgtcccgcgctggtcgagaatccttgtcgccggacactcgcaaggcggcggccacgcggccctgcgggcaactcggccaatctga

SEQ ID NO: 19688 - protein, 210 aa, Unknown
  Obtained from environmental sample
  misc_feature (1)..(210): Xaa is any amino acid
MYEISRQCFPVSPVVFNTMIKPYKTTACIAFWLLILGSGRVSADGYAVAPAETDPAIRSAQYDHYAVINPWAARRGVLFLFFPGTKSRAMNYKMICETAADRGFHAVSLQYVNDVSVNIKCGKSRNAECHENMRREILFGADFSPHVNVSRPNSAENRLVKLLRYLADRYPLDGWDQYLTAGDVPRWSRILVAGHSQGGGHAALRATRPI

SEQ ID NO: 19689 - DNA, 789 bp, Unknown
  Obtained from environmental sample
  misc_feature (1)..(789): n is a, c, g, or t
atggcggagaaggacgcggacagggcaaaaaagcttggtatccgtattgtgtcctggcgcgaaaaaaactatccgcccctgcttcgcgagatctacgatcccccggcgcttctgttttatcggggcgttcttcccgatccggttaagcctatggcggcggtggtgggaaccagaaggccgtcttcgcagggggcaaagcgggcttttgatataggtttggagcttggcaaggccggcatccccgttgtgtcggggcttgccctgggaattgactcaatggcccaccgcggaaacattgaaggcggatcgcctacggtagccgtacttggttcaagccccgacatggtttaccctgcttctaaccgctttctcgcgaagcgtattctggaaacaggcggcgttattctttcggagtacccgccgggaacgggtccccgaaaatggaattttccggagcgtaaccggattatttcggctctggcgcggggaaccattattgttgaggcccctgaaaaatccggcgcgcttattacggcaaaattcgcgctggaacaggacagggatctttgggtggacaaagccggaatttcctcaaaatggagccgcggtacggctaatcttgagaaagagggcgctttgattttttcttcagttaaagatattcttgcggaatggagccttgaaggagcttcatcagcgccggaacagagcgaaaagaaaaacagggatcgggatgaaagggccggccttgtttcgtccatggctgaatatctggacattaagttgtga

SEQ ID NO: 19690 - protein, 262 aa, Unknown
  Obtained from environmental sample
  DOMAIN (8)...(216): SMF family
  misc_feature (1)..(262): Xaa is any amino acid
MAEKDADRAKKLGIRIVSWREKNYPPLLREIYDPPALLFYRGVLPDPVKPMAAVVGTRRPSSQGAKRAFDIGLELGKAGIPVVSGLALGIDSMAHRGNIEGGSPTVAVLGSSPDMVYPASNRFLAKRILETGGVILSEYPPGTGPRKWNFPERNRIISALARGTIIVEAPEKSGALITAKFALEQDRDLWVDKAGISSKWSRGTANLEKEGALIFSSVKDILAEWSLEGASSAPEQSEKKNRDRDERAGLVSSMAEYLDIKL

SEQ ID NO: 19691 - DNA, 981 bp, Unknown
  Obtained from environmental sample
  misc_feature (1)..(981): n is a, c, g, or t
gtgcggccaagttttgttcgttcaaggaaaaggaaaggtcttttggaactggatcggggggctacagccgaaggagttgcctgggtaccaagcgttcttaacttgatgaacctggacatgctgatcatggagcgttacgaggaaaatgaagccctacccatggattacntcagtcagaaaaaaaaggaattgattgagcaggaagcggtagggcttctggagtttatggaaacccaatataacctggatgcggtttccggccacgattttgtgaaaaagcttctcagaaaccatgccaaggcaataaagcgcggccagagtgaagtggtgccgatgggttacctgatagcggggccgataggaaccggaaagagttttatggtgagcgccttcgccggtgaaatcggaatccccatggttaaattccgcaactttcgttccaaatggcagggcgagtccgaatcaaatttggagaaggttctgaatatcctgaagtcaatggctccggtggcggtaatgatcgacgaagcggacgcgtatttgggcgaccgtgatcaggaaggggattcaggtaccagtaaccgtgtgtttgcccaaatagccagtttcatgggtgacaccgcttaccggggaaagatcatgtggttccttataacctgccgccccgatcttcttcctattgacttaaaacgccagggcagggcggaagaacactttgcgctcttttacccggaaaccctgccggaaaaagtagccctttttgaaactctggtaaagaagctcaaattcggggttcacactttttcggttcccgatcttttcaagaaatacagccacgaagtttccggggccgaaatagaatccatgctcataagggcaatgcaaagagccgtaatggaaggccggacaatgatctccaaactggacatggaagaagtaatggaagattttatcctccgcagtacctcgtgccgaatctga

SEQ ID NO: 19692 - protein, 326 aa, Unknown
  Obtained from environmental sample
  DOMAIN (113)...(299): ATPase family associated with various cellular activities (AAA)
  misc_feature (1)..(326): Xaa is any amino acid
MRPSFVRSRKRKGLLELDRGATAEGVAWVPSVLNLMNLDMLIMERYEENEALPMDYXSQKKKELIEQEAVGLLEFMETQYNLDAVSGHDFVKKLLRNHAKAIKRGQSEVVPMGYLIAGPIGTGKSFMVSAFAGEIGIPMVKFRNFRSKWQGESESNLEKVLNILKSMAPVAVMIDEADAYLGDRDQEGDSGTSNRVFAQIASFMGDTAYRGKIMWFLITCRPDLLPIDLKRQGRAEEHFALFYPETLPEKVALFETLVKKLKFGVHTFSVPDLFKKYSHEVSGAEIESMLIRAMQRAVMEGRTMISKLDMEEVMEDFILRSTSCRI

SEQ ID NO: 19693 - DNA, 888 bp, Unknown
  Obtained from environmental sample
  misc_feature (1)..(888): n is a, c, g, or t
gtgttaggcgacataaaagaaaaatttaaagttcagcctgtggcggttacactgcctatgggaagcggcggcggttataagggcgttatcgacgtactgcatgaaaaagcgtatgtcatgcagggcgaggctttggaaaaagaagaagctataccgcctgagttcaaggatgccgttgcggcggcaagagaaaaattgattgaggcggcggctgaaggcgatgacggcttaatggaaaaatatatcgaaaacggctcgctctccgccgatgaaatgaagaagggtcttatagaagcgcttgcggaaaataaatatgttcccgcctttgccggcgctccgcttaaaaattccggcgtccttcctttaatcggtttctttgttgacgtgtctcctaatccgcgcacggcaaaagacgcggtaattgacgccgaaggaaatgaaacgcctgtcgctattgatcccgataaaccgatgtcggcgcttgttatacggacaaactacgatcaattttccggcaaactttcatggataaaagttatgacgggaaaacttgtgtcggataccgaagtgcataatgttaccgaaaacaaaaaagagcgtatcggaaaactgcatacatgtcagggtaaaaaacttgaagaagtaaaagagctatcggcgggcgatatcggcattattacaaaagccgcaaccttaaaaaccaacgatactttggcggcaggcgacagtaaaaactttgtccacctgcgtctgcctgaacccgttcattctgttgcggtaaacgctgtgcaaaaaaaagacgaagaacaacttggcgaattccttgtcccgtgcgcggaagagacaaaactttccgctatcactacacggcgagacaaagaatcgtaa

SEQ ID NO: 19694 - protein, 295 aa, Unknown
  Obtained from environmental sample
  DOMAIN (172)...(239): Elongation factor Tu domain 2
  misc_feature (1)..(295): Xaa is any amino acid
MLGDIKEKFKVQPVAVTLPMGSGGGYKGVIDVLHEKAYVMQGEALEKEEAIPPEFKDAVAAAREKLIEAAAEGDDGLMEKYIENGSLSADEMKKGLIEALAENKYVPAFAGAPLKNSGVLPLIGFFVDVSPNPRTAKDAVIDAEGNETPVAIDPDKPMSALVIRTNYDQFSGKLSWIKVMTGKLVSDTEVHNVTENKKERIGKLHTCQGKKLEEVKELSAGDIGIITKAATLKTNDTLAAGDSKNFVHLRLPEPVHSVAVNAVQKKDEEQLGEFLVPCAEETKLSAITTRRDKES

SEQ ID NO: 19695 - DNA, 888 bp, Unknown
  Obtained from environmental sample
  misc_feature (1)..(888): n is a, c, g, or t
atgaaattatcagaagttcaagatatcgccgaaagccaaaaatccgcgttagacaagcaggaaaaaggcctagaacgccagcttttaccagaattgccgaatataaaaagccacgctcttgtggtcagcggaatccgtcgttgtggaaaaagcacgcttcttcgtcagttcatgcataaactgcgaaagccttatttttacctgaattttgacgatatccgccttatttccttttctcattcggattttgctttattagataaggtaattgcggaatccgccgcgcgtttaattttctttgatgaaatccaatccgcgccccgttgggagctatatgtcaggcagaaacttgatgaaggtttccaactcgcgattaccggttcaaacgcttcacttcttagccgggaactgggaacccgccttacgggccggcatattacaaaagagctttttcctttctcatacaaagaattttgtattttttttagtcttaacgcatgttcagagtctttaacggactaccttgaaaaaggcggtttccccgaattcttaaaaaccggaaacactgatattcttgcacagcttcagtcggacatattataccgtgatattgccgtacgatacgggattcgtgatactgtatctttgcggcagctttttgtatatcttgtatcanatccttcccagctattttcatccggtaagttaaccggtgttgttggggtaaaatctccctacacagttctggaatatatttcttatttcgaagcagctttatctgtataccttttaccggctttttcatggtcggtaaaagcgcaaagcctttcgcccaaaaagatatacatagcccacacagggttgataaaaacggcgctgtttctttag

SEQ ID NO: 19696 - protein, 295 aa, Unknown
  Obtained from environmental sample
  misc_feature (1)..(295): Xaa is any amino acid
MKLSEVQDIAESQKSALDKQEKGLERQLLPELPNIKSHALVVSGIRRCGKSTLLRQFMHKLRKPYFYLNFDDIRLISFSHSDFALLDKVIAESAARLIFFDEIQSAPRWELYVRQKLDEGFQLAITGSNASLLSRELGTRLTGRHITKELFPFSYKEFCIFFSLNACSESLTDYLEKGGFPEFLKTGNTDILAQLQSDILYRDIAVRYGIRDTVSLRQLFVYLVSXPSQLFSSGKLTGVVGVKSPYTVLEYISYFEAALSVYLLPAFSWSVKAQSLSPKKIYIAHTGLIKTALFL

SEQ ID NO: 19697 - DNA, 693 bp, Unknown
  Obtained from environmental sample
  misc_feature (1)..(693): n is a, c, g, or t
ttgaaattggttcagggtctggtaaccgctttaagagacggaacgcatgaatatcttgtcgcgccttcttttacgttactcgaaaccgtatccggagtgatcgaaggcactaatatccgtctgggagcgcagaattgcgctagcgaagagcagggtgcgcataccggagaagtatcggtattacagcttaaagatctcggcgtacagacgataattttagggcatagcgaaagacgtcatatttacaaggaagacgacgctcttatcaacaaaaaagtaaaacttgccctgaaacacggatttgaagttattctttgtatcggtgagcttttggaagaacgcgaagccggtaaggtggaagaagtttgcgaaaggcagacggttaagggacttgaaggggtaagcgtggcggaattaggaaatgtcgtaatcgcttatgaacctgtttgggcaatcggcactggaaagacggcgacaccgcaggacgcggaagcggtacattcctttgtacgcaaggtaatcgcgcgcctgtacggacaagatgccgccgcaaagatcattattcagtacggcggttccgtaaaagcggataatgccgcgcagttaatggctatggaaaacatagacggcgctcttgtgggcggcgcgtcacttaaaacggacacatttatcccgatagcaaaattttcctga

SEQ ID NO: 19698 - protein, 230 aa, Unknown
  Obtained from environmental sample
  DOMAIN (1)...(227): Triosephosphate isomerase
  misc_feature (1)..(230): Xaa is any amino acid
MKLVQGLVTALRDGTHEYLVAPSFTLLETVSGVIEGTNIRLGAQNCASEEQGAHTGEVSVLQLKDLGVQTIILGHSERRHIYKEDDALINKKVKLALKHGFEVILCIGELLEEREAGKVEEVCERQTVKGLEGVSVAELGNVVIAYEPVWAIGTGKTATPQDAEAVHSFVRKVIARLYGQDAAAKIIIQYGGSVKADNAAQLMAMENIDGALVGGASLKTDTFIPIAKFS

SEQ ID NO: 19699 - DNA, 393 bp, Unknown
  Obtained from environmental sample
  misc_feature (1)..(393): n is a, c, g, or t
ttgaatgaacgcgataaaacagtcgctgatgtgatatgccatttgcacgagtggcatttgatgatggaaacttggtataaagttggaatgtcgggtaaaaagccggcaatacctgcggagggttatacgtttcaaactttgccgaaattgaaccataagatatgggagcaatataaagggactgaattgaaaaaagcaattgagatgttcaaaaagagccataaggctgtgatggctttgattgggaagcatacggatgatgaattatttaccaaaaagaaataccaatggacaggaacaacgtcattaggttcgtattttatttcaagtacatcaagccattatgattggggtttgaaaactgtgaagccattgaagaaaatggtgaaatga

SEQ ID NO: 19700 - protein, 130 aa, Unknown
  Obtained from environmental sample
  DOMAIN (1)...(128): Protein of unknown function (DUF1706)
  misc_feature (1)..(130): Xaa is any amino acid
MNERDKTVADVICHLHEWHLMMETWYKVGMSGKKPAIPAEGYTFQTLPKLNHKIWEQYKGTELKKAIEMFKKSHKAVMALIGKHTDDELFTKKKYQWTGTTSLGSYFISSTSSHYDWGLKTVKPLKKMVK

SEQ ID NO: 19701 - DNA, 435 bp, Unknown
  Obtained from environmental sample
  misc_feature (1)..(435): n is a, c, g, or t
ttgttggatatgtttgataaattagtgaaaataaattgcttctctaagagtaggatgttgagatatgttgccaagaatttgttggagaagttttattgttgtgagattaattgcatagagatagataaaagcgtgttgtttgctcatcacgctcgcggttgtacgattattgcttcgaaaatttgtgagaatgttgtgatattgcaaaatgtgactattggaacgaatatgagatttaataagagtagtaatgaatgggagaatgttggtaatccaattataggcaagaatgtggtgattgctgatggggcgaaaattttgggtccaattataattggcgagaattcttttgttgcggctggggcgatagttacgaaaaatatgcctgctaatagcattatatatggcgttaataaattaagcctagggatatga

SEQ ID NO: 19702 - protein, 144 aa, Unknown
  Obtained from environmental sample
  misc_feature (1)..(144): Xaa is any amino acid
MLDMFDKLVKINCFSKSRMLRYVAKNLLEKFYCCEINCIEIDKSVLFAHHARGCTIIASKICENVVILQNVTIGTNMRFNKSSNEWENVGNPIIGKNVVIADGAKILGPIIIGENSFVAAGAIVTKNMPANSIIYGVNKLSLGI

SEQ ID NO: 19703 - DNA, 879 bp, Unknown
  Obtained from environmental sample
  misc_feature (1)..(879): n is a, c, g, or t
gtgtcgttcgttatcaacaagaagactctgacgtccgcggactttacttggaacacgctgaatgtcgcctatacggccgacaccgtcagcgcgaatgtgaagagcaaagactcgaccgtcacggtcgccacgatcggcgcgatagtcgtgaagtacgccggcgctacggcgctgccggtaaacgccggtatttacgcgcttacggttgacgtcgcgggcggctcgaactacaacccggccacgggccttgttctcggcaatttcacgatcaacaaggcggttatcgatactacgtggttggcgtacacgatcccgaccggtaacacagtcggtaaacccgatccgctcggtatcggccctgtaacaatgaagaaggggacaggcgtgaagtcgatcaccgttaagtacaacggtctcaccgacttaccgaccgccgccggcaggtatatcgtgacggttgatatcctcgctgacagcaacttcttcagcgccgccaacctcgcgctcggcacctacgaagtcggcattggcgttgccgccggcaacaccacgatcccgaccgcgaagaaagacgctgttgtgaccgttgcgccgatcaaggtagcggccgccagcttcaccgccggtcccagccccgtagcgaagaacggcgtgatcaagttcttctccgcgaagcaggtgaagagcggttcgctctacatcttcgacgcgaacggtaacgcggtaacaaagctctccgccaaagcgggtagcggcgaaatcgccagctggaacctgaaggacaagaatggcgtaaccgtagccgagggcacatacgttgtgaaaggcgccctggccggcaaagatggacgcgcgagaggtatcctcgtgtcagcgtaa

SEQ ID NO: 19704 - protein, 292 aa, Unknown
  Obtained from environmental sample
  misc_feature (1)..(292): Xaa is any amino acid
MSFVINKKTLTSADFTWNTLNVAYTADTVSANVKSKDSTVTVATIGAIVVKYAGATALPVNAGIYALTVDVAGGSNYNPATGLVLGNFTINKAVIDTTWLAYTIPTGNTVGKPDPLGIGPVTMKKGTGVKSITVKYNGLTDLPTAAGRYIVTVDILADSNFFSAANLALGTYEVGIGVAAGNTTIPTAKKDAVVTVAPIKVAAASFTAGPSPVAKNGVIKFFSAKQVKSGSLYIFDANGNAVTKLSAKAGSGEIASWNLKDKNGVTVAEGTYVVKGALAGKDGRARGILVSA

SEQ ID NO: 19705 - DNA, 786 bp, Unknown
  Obtained from environmental sample
  misc_feature (1)..(786): n is a, c, g, or t
ttggaactgctgaaaccgcttatcgaaaacaaggcggatgtcgtttacggctcgcgttatttaaaaccggatacacgcagagtgctgtatttttggcatacgtggatgaacaagaccctgaccaccgtctcaaatatgttcacagacctcgatatcacggacatggaaacctgctataaggtgttcagaaaagaagtgatagcgcgaatagcgccgactttgaaagaggaacgtttcggatttgagcctgaaatcacctgcaaggtcgcgcagggcggctatcgtgtgtacgaaacggctatttcctataacccccgtagctacgaagagggtaaaaagatcggttggaaagacggcgtccgcgctctgtactgcctgctccactacggagcccacacctccccgctcccgatgcagtttatactgtacctatttataggcggcgtatcgttgctcgtgaacgtgataagtttcgggatcggaaactacgtaggtctttcgttgagtgtttcgattgtctccgcgtttatcttggcggcgactgtcaactacatactatgcatccttattttgttccaacacaattcgcgatggaataattttggggagttttcgctttatatcttgtcggtcgcggtaatgggcggactggattacgctatgacgcgtgggcttatcgcgctgtcgtgcggggcgcttgtgtccaaggttgtggccgcgcttgccggatttgcaggaaattttgttttaaggncgttgggtggttttcccggagcgtanntttaa

SEQ ID NO: 19706 - protein, 261 aa, Unknown
  Obtained from environmental sample
  misc_feature (1)..(261): Xaa is any amino acid
MELLKPLIENKADVVYGSRYLKPDTRRVLYFWHTWMNKTLTTVSNMFTDLDITDMETCYKVFRKEVIARIAPTLKEERFGFEPEITCKVAQGGYRVYETAISYNPRSYEEGKKIGWKDGVRALYCLLHYGAHTSPLPMQFILYLFIGGVSLLVNVISFGIGNYVGLSLSVSIVSAFILAATVNYILCILILFQHNSRWNNFGEFSLYILSVAVMGGLDYAMTRGLIALSCGALVSKVVAALAGFAGNFVLRXLGGFPGAXX

SEQ ID NO: 19707 - DNA, 867 bp, Unknown
  Obtained from environmental sample
  misc_feature (1)..(867): n is a, c, g, or t
atgtgcatggcctttttcggctttaccctgaacctcctgacactgaccggccttataatgggtttgggtatgaccgtggacggttccatagtaatgcttgaaaacatccatagttaccgcctgcgcggcgcaaaaccggaaattgctgcgatactcggaagcagggaaatgctcagggcaattatcgcttcagcggcaaccaccctttgcgtatttatcccccctattatttacaagaacagcctggaaatgatagggcaatttgccagtgatttgatttttacagtggttatttccctgacctgttctcttgtcgtagcggttaccctggtaccgagcctctgcggcagcatcctgaaactggacaccagaaaacaaaagcccctgaagatacccccgctcagggctatcgacaacgcatttgagggaattttcgtcgccattgaaaacggctacaaaaaggcgcttggctactgcctttcgcacaggcttttgatagtgacgcttgccgttgtgcttctgctgttttccctgctacagttcggcagcatcgggatgaatatgtttttccgaaccagaaccgatgacaacgtgaatatcaatgtctccatgccccttggcactaccatagaagaaacggaaaggattctttttgaattggaaggatttattaaggatgagattgagggatacaacagcatcattcttaccgcaaggcgaagcggaagcacccagggttccattcaaattacgctacccgagccagccaggcagatcgatactcccgattccatcatcaacaagttgactccatttaccaattctatacccggtgcaaaggtgagttttcgggcgggtcgttcgtag

SEQ ID NO: 19708 - protein, 288 aa, Unknown
  Obtained from environmental sample
  misc_feature (1)..(288): Xaa is any amino acid
MCMAFFGFTLNLLTLTGLIMGLGMTVDGSIVMLENIHSYRLRGAKPEIAAILGSREMLRAIIASAATTLCVFIPPIIYKNSLEMIGQFASDLIFTVVISLTCSLVVAVTLVPSLCGSILKLDTRKQKPLKIPPLRAIDNAFEGIFVAIENGYKKALGYCLSHRLLIVTLAVVLLLFSLLQFGSIGMNMFFRTRTDDNVNINVSMPLGTTIEETERILFELEGFIKDEIEGYNSIILTARRSGSTQGSIQITLPEPARQIDTPDSIINKLTPFTNSIPGAKVSFRAGRS

SEQ ID NO: 19709 - DNA, 678 bp, Unknown
  Obtained from environmental sample
  misc_feature (1)..(678): n is a, c, g, or t
ttgccctgcggccccttacaggcgatgcaggttttcgctctctccaccggaagccccgtaaagggcggcatttccatgttcctgttttgcgtcggaacaattccgctgatgttcgctctgggagctgtaagcgggttattaagcggcgcaaaggggcgcgtgttctcacgccgcgttatgcaaactggagctgttcttgtaaccgcgcttggacttgtaatgttctcctacggctggaatctttcgggattaaccgtttcgcctgacaagacggcttccgcaaaacccgccggcgcgcctgagaaaagcaatcaagacagacagcaaaaacagggtgttgaattaacgccaaatcccggttcgcaggacgcgggcaaatttgagcctgtaattgaaaacggcgtacagattgtaaattcaacactgcggtcaaaccgctatccggcgataacggtacaacagggcattccggtacgctggacaatcaacgctccgcccggcagtataacaggctgtaattacagcataattctttacgattacggcattcaatatgattttaagccgggtgaaaatataattgagtttactcccgaaaaaacaggcaagttcctctattcctgctggatgggcatgattagaagcgtcattaccgtagtcgcagaaaaagaaggttaa

SEQ ID NO: 19710 - protein, 225 aa, Unknown
  Obtained from environmental sample
  misc_feature (1)..(225): Xaa is any amino acid
MPCGPLQAMQVFALSTGSPVKGGISMFLFCVGTIPLMFALGAVSGLLSGAKGRVFSRRVMQTGAVLVTALGLVMFSYGWNLSGLTVSPDKTASAKPAGAPEKSNQDRQQKQGVELTPNPGSQDAGKFEPVIENGVQIVNSTLRSNRYPAITVQQGIPVRWTINAPPGSITGCNYSIILYDYGIQYDFKPGENIIEFTPEKTGKFLYSCWMGMIRSVITVVAEKEG

SEQ ID NO: 19711 - DNA, 933 bp, Unknown
  Obtained from environmental sample
  misc_feature (1)..(933): n is a, c, g, or t
ttgccgggaaacgccggagcctctggccttggctgtacttccggatggccggggattcagctcatttggagcagaaccgggcgcccggctcttttcacttcccgccctgcccgaaggctttgcttacactggcatcgctctccttgggaatatcctcgcggcctcctgggaagaacagcaggacgcgggcataggctccgcgggctttatggtgataaactactctcgatgataaatttttcagtgaacggaaagccggttcaaggtcaggccgaaaaagaacttctctgttttctgcgggatgatcttcgtttgtttgccgcgaaaaacggctgcgcttccggggcctgcggcgcgtgtacggtactggttaacggaaagcccgtccgttcctgtatcacccccctgagaaagctggagggaaaaaacgttgttacagtcgagggcctctcggaacgcgaaaaggatgtttttgtttacgcctttgccgaagccggggctgtgcagtgcggtttttgcattcccggcatgttactttcagctaaagctcttttggatattaacaacaaccctgatgagaagacgatacgccgggcgattcattccaatatctgccgctgtacgggttacaaaaaaattgttgaggccattcagatcgcggcccggtttttcagagacgatgttcctgtgccgaaaccacgcttctcggggtttttgggtgaacacatacaccgcgtggacgcggcggcaaaaattctgggtacaggtaaatatgttgacgatcttgagtttccgcttatgctccacgcctcggcccctcgttcagcctatccgcgcgcgcgggtgataaagatcgatactgccgctgccctgtctcatccggaatgcgtttgcgtactgaccgcgaaagacgtaccggggacatcaaattag

SEQ ID NO: 19712 - protein, 310 aa, Unknown
  Obtained from environmental sample
  DOMAIN (80)...(138): 2Fe-2S iron-sulfur cluster binding domain
  misc_feature (1)..(310): Xaa is any amino acid
MPGNAGASGLGCTSGWPGIQLIWSRTGRPALFTSRPARRLCLHWHRSPWEYPRGLLGRTAGRGHRLRGLYGDKLLSMINFSVNGKPVQGQAEKELLCFLRDDLRLFAAKNGCASGACGACTVLVNGKPVRSCITPLRKLEGKNVVTVEGLSEREKDVFVYAFAEAGAVQCGFCIPGMLLSAKALLDINNNPDEKTIRRAIHSNICRCTGYKKIVEAIQIAARFFRDDVPVPKPRFSGFLGEHIHRVDAAAKILGTGKYVDDLEFPLMLHASAPRSAYPRARVIKIDTAAALSHPECVCVLTAKDVPGTSN

SEQ ID NO: 19713 - DNA, 912 bp, Unknown
  Obtained from environmental sample
  misc_feature (1)..(912): n is a, c, g, or t
atgagagataaacctgattttactctatcccatcccagctatttccagtacactaaaaccatggtcaatattcaaaacagactgaaaaaatttggtgtcgcgatacccgaaattctcctgccacgcgctgaactgaagcaatgggcggttattgcctgcgaccagtttacacaagatagaacatactggatgaaagcggctgaagccgccattggttcgccttccgctatagacctgattttgccggaagtgtttctggacgagggaaaccgcgcgggaagaatcgaagacattcacagggcgatgcgtaaatatttggataccggcatctttgccgcgccgaggcggggctttgtttaccttgaaagggataccccgttcaaccggagcagaaaaggacttgtcgttgccgtggaccttgagcgctactcgtggtcgccggcggagaggcctttgatccgctcgaccgagggtactgtgagcgagcgcctgcctccgcggatggcaatccgccggaacgcccctgtcgagacgccgcatatacttctgctcattgatgatgaaacaaacagcctgctgcaagggctggggtcacgggccaggaaaaccgatccggtttaccagggagagcttatgtttgattccggaagtatatccggatggtttcttgattcggaagatgaatttgcctttcttgccgatgggcttgaagaacttgcccgcagagccttgacccggtacgaagccccgaacacgcagccatcgtctgttacacagccgtttctttttgcggttggtgacggcaatcattcgcttgcaagcgccaaagaaatttgggatgaatacaaaaaacagaatggcgtaaacgaccacccctgccgttatgccctggtgaaatcgaaaacattatga

SEQ ID NO: 19714 - protein, 303 aa, Unknown
  Obtained from environmental sample
  DOMAIN (32)...(303): Protein of unknown function (DUF1015)
  misc_feature (1)..(303): Xaa is any amino acid
MRDKPDFTLSHPSYFQYTKTMVNIQNRLKKFGVAIPEILLPRAELKQWAVIACDQFTQDRTYWMKAAEAAIGSPSAIDLILPEVFLDEGNRAGRIEDIHRAMRKYLDTGIFAAPRRGFVYLERDTPFNRSRKGLVVAVDLERYSWSPAERPLIRSTEGTVSERLPPRMAIRRNAPVETPHILLLIDDETNSLLQGLGSRARKTDPVYQGELMFDSGSISGWFLDSEDEFAFLADGLEELARRALTRYEAPNTQPSSVTQPFLFAVGDGNHSLASAKEIWDEYKKQNGVNDHPCRYALVKSKTL

SEQ ID NO: 19715 - DNA, 828 bp, Unknown
  Obtained from environmental sample
  misc_feature (1)..(828): n is a, c, g, or t
atggtcgacaggtggatcactttgaatgagcctttatgcgttgccaacaacggttacaataacggccgccacgcgccggggattcgcgatcctcaaaagtggctggccgcggttcatcacctgaacatggcccacggtgccgccgtaaaagcttaccgtaaaacagggttgaaagcgccgataggcataacatggaatccggtaacgccaaggcccgccaccttaagagccgccgataaagaagcggcaaaaatcatgcgggcgtttgaaactgaaatttatatgttcccctgcctgggtaaaggttatcccgaaattgttaccaaagatttcaattgcgcccttcccgttcaaagcggcgatatggaaacaatagcccagcctatagattttatcggcgttaattattactacgagcaacctgttgccgccgatgacaaagcgcagtttaaatattcgatcaggccgtcatggcaggatcgttccgacatgccctggccctcggttcctggcggccttgagcgccagctcctgtggattgccgagatttccaaaggcgctttcgggaaaaacgagattcccatttacattacggagaacggttacgcccgcaaagacgaggttgaaaatgacggcngggtccatgacagggagcggatcgtgtacatacgacaacacctctgtgttatccccgacttaataaaaaaaggactgcctctcaaaagttattatatgtggtcctttatggacaattttgaatggctatggggtacaccaaacgttcgggcattgcccatattgattaccacaccccaaaaaccccgctaa

SEQ ID NO: 19716 - protein, 275 aa, Unknown
  Obtained from environmental sample
  DOMAIN (1)...(273): Glycosyl hydrolase family 1
  misc_feature (1)..(275): Xaa is any amino acid
MVDRWITLNEPLCVANNGYNNGRHAPGIRDPQKWLAAVHHLNMAHGAAVKAYRKTGLKAPIGITWNPVTPRPATLRAADKEAAKIMRAFETEIYMFPCLGKGYPEIVTKDFNCALPVQSGDMETIAQPIDFIGVNYYYEQPVAADDKAQFKYSIRPSWQDRSDMPWPSVPGGLERQLLWIAEISKGAFGKNEIPIYITENGYARKDEVENDGXVHDRERIVYIRQHLCVIPDLIKKGLPLKSYYMWSFMDNFEWLWGTPNVRALPILITTPQKPR

SEQ ID NO: 19717 - DNA, 384 bp, Unknown
  Obtained from environmental sample
  misc_feature (1)..(384): n is a, c, g, or t
ttgcttgccgttgcgtacggtatgtgggattttgtaaagaacgatcctgaaaacaagaaaaagtacgcttgctttgatcttgactggataggttttcttccaggaaaacgtgagagccgccgatatgtgggcgactatattatgacccagggtgatgtcagcaacgaaggcaaatttgaagatctggttgcttacggagggtggaccatggatgatcatcatcccgaggctttcagaacaaccgagctgcccaatattttccaccccgcgccttcatctttcggcatcccctaccgctgcctttattcaagaaatgtagagaacctcttttgcgcggggcggaacatcagtgtcagccatgtcgcgcttaggaattgtcgataa

SEQ ID NO: 19718 - protein, 127 aa, Unknown
  Obtained from environmental sample
  misc_feature (1)..(127): Xaa is any amino acid
MLAVAYGMWDFVKNDPENKKKYACFDLDWIGFLPGKRESRRYVGDYIMTQGDVSNEGKFEDLVAYGGWTMDDHHPEAFRTTELPNIFHPAPSSFGIPYRCLYSRNVENLFCAGRNISVSHVALRNCR

SEQ ID NO: 19719 - DNA, 837 bp, Unknown
  Obtained from environmental sample
  misc_feature (1)..(837): n is a, c, g, or t
atgttttggatagagtgcattcctgcggctctttatggtttgctcgttttgtttatccccgaaagcccacgttatttggtagctcgcaagcaacctaaaaaagctggagaaattttgagcaaaattctttcgcctagtgttgtagctcaaaaaatagaagatattaaaaagagtttgcactccgaagttgccccaaagttcagcgacttgctagaaaaagttgctggcaaaacccgcttggctcccattgtttgggttggaataggtgttgcggcattgcagcaatttgttggcataaatgtaattttctactacggaaatgttctatgggaatcagttggttttacgcagcaagatgcgatgaaaacaagcgttctatcttccgttgttaatatagccagcaccattatagccatagctttggtggataaacttggcagaaaacccttgcttttggcaggttctgttggaatgttcgtaactcttggcattatggcggctatatttggcacagcgggattagattctaatggtaatccagaaattagcggtgccactgcttacattgcggttatatctgcaaatttctatgtggtattttttgcattctcatggggacctgtatgctgggttttgctaggcgaaatgttcaacaaccgcatccgcggcgcagccctagccttgggtgggttatcgcaatggctctctaactttgcaatatcaagctctttcccaattttgctggcaaaaataggactcggcggtgcttatggcatttacagtttctttgcttttgtgagcatattctttgttcttaaaaagggttcaagagactaa

SEQ ID NO: 19720 - protein, 278 aa, Unknown
  Obtained from environmental sample
  DOMAIN (1)...(275): Sugar (and other) transporter
  misc_feature (1)..(278): Xaa is any amino acid
MFWIECIPAALYGLLVLFIPESPRYLVARKQPKKAGEILSKILSPSVVAQKIEDIKKSLHSEVAPKFSDLLEKVAGKTRLAPIVWVGIGVAALQQFVGINVIFYYGNVLWESVGFTQQDAMKTSVLSSVVNIASTIIAIALVDKLGRKPLLLAGSVGMFVTLGIMAAIFGTAGLDSNGNPEISGATAYIAVISANFYVVFFAFSWGPVCWVLLGEMFNNRIRGAALALGGLSQWLSNFAISSSFPILLAKIGLGGAYGIYSFFAFVSIFFVLKKGSRD

SEQ ID NO: 19721 - DNA, 588 bp, Unknown
  Obtained from environmental sample
  misc_feature (1)..(588): n is a, c, g, or t
atgaacccaatcctctctctcatcgctttcctcttactccccgccctgctctttgctcaggactacgtttggtatagcggcaaagacagcccctacaccatttcaaccgaagcagatttgataggtctccggcaactggtttcctccgatttggataactttgacggtaaaataattctgctgggaaacgacattgcccttacaagcacttggacaccgataggcagcgatacctacccattcaagggaactttggacgggcagggcaaaaccatttctggtttagcggtaaatggcggagattatgcgggattgtttgggtatgttggggaaaatggacagataaagaatcttaatgttgtaggaacagaagtcaagacagcaacagggggaagtacagcaagatatgcaggcgttttggttgcgtattacgcctctgccaaacccatagaaaattgcggagtgaaggcaacttccatcattgccactggtagcggttatggcagtcctggtggctacagcggcggtcttgtgggctatgcctctgcaacgtttgccataaccaacagctacgctctgccaatctga

SEQ ID NO: 19722 - protein, 195 aa, Unknown
  Obtained from environmental sample
  SIGNAL (1)...(19)
  misc_feature (1)..(195): Xaa is any amino acid
MNPILSLIAFLLLPALLFAQDYVWYSGKDSPYTISTEADLIGLRQLVSSDLDNFDGKIILLGNDIALTSTWTPIGSDTYPFKGTLDGQGKTISGLAVNGGDYAGLFGYVGENGQIKNLNVVGTEVKTATGGSTARYAGVLVAYYASAKPIENCGVKATSIIATGSGYGSPGGYSGGLVGYASATFAITNSYALPI

SEQ ID NO: 19723 - DNA, 726 bp, Unknown
  Obtained from environmental sample
  misc_feature (1)..(726): n is a, c, g, or t
ttgctaattacaaactaccatgttatatcaagcgaagttgatcccaaacgcaaaggttattcgcgaatgtatatccgcatgggggattcttcaaacccacgggttcccgctcgcgtcataggctgggataaggctcttgatcttgcgttgattaagactgaaataaatactgattatgttttttcacttgtagatcgcgtaattccgcgcataggcgatacggtgcttgcgatgggctctcccataggactgcaaatgacggtgacatcgggcattgtttccgcgcttggaaggcgtttcttgcagataggggatgttattcaaatagacgcggccgttaatcacggcaattcaggcggtcctgtagtggacaatgaagggcggcttgtgggaattgtttttgccggcgtggatcagcatcaggggctaaatttcgccattccggctgaaacgcttgccgccgcccttcccaccatgataaagggaggaaaatcccagcgcccgtggcttggaatgacgttatgtgaaacttattcctcggctgaaattatctataccgcgccgaatacgccggcctctttacatagggttcgcgaaggcgtttttataaagacgataaatggtaaaaccgtaaccgcccccaatggcggtattattcccgccttacagagcatgatttttacatgcggttctgggagaacttgtaatattggagactgtcgataa

SEQ ID NO: 19724 - protein, 241 aa, Unknown
  Obtained from environmental sample
  DOMAIN (8)...(156): Trypsin
  misc_feature (1)..(241): Xaa is any amino acid
MLITNYHVISSEVDPKRKGYSRMYIRMGDSSNPRVPARVIGWDKALDLALIKTEINTDYVFSLVDRVIPRIGDTVLAMGSPIGLQMTVTSGIVSALGRRFLQIGDVIQIDAAVNHGNSGGPVVDNEGRLVGIVFAGVDQHQGLNFAIPAETLAAALPTMIKGGKSQRPWLGMTLCETYSSAEIIYTAPNTPASLHRVREGVFIKTINGKTVTAPNGGIIPALQSMIFTCGSGRTCNIGDCR

SEQ ID NO: 19725 - DNA, 810 bp, Unknown
  Obtained from environmental sample
  misc_feature (1)..(810): n is a, c, g, or t
ttgcaaaaaactgatttaatcattttggcggcgcgcccttctatgggaaaaacagcacttgcgctcaatatagccgcaaatgcggcaaagcaaaataaaaccgtgctgttctttagcctagagatgaacgcacaacagctggctataagagtgctcagttctgaagcggaaattgaccaaagtctgttacggcatggaaagataggtgcaggaactgttcattctttgctcgcaaaatcaaaagagatggctgatatgccgctttttatagacgattcaagcgaggtgcgcgcctttgatttgatttctaagtgcagaatattcaaaagaaagcacaataacaatttagacctcgttgtggttgattatttgcagatgatgaagataaatggaaactcggaaaatagggcagttggcgttgctgaaaattcccgtatgctaaaagtgctggcaaaggaactccaagttccagttctcgcccttgcccagttgaacagaaatgtggaaaatcgccctacgggcgggcgcccgcagctctcggatttgcgcgattcaggttccatagagcaagatgccgatatggtttggtttatacaccgccccgcanaggaaaaggaaaaaaagggaaaagatgcttatgaaattccagaagaggaaaaacgggaagctcatttaataattgcaaagcacagaaacggccccactgcggatatccggcttgaatttcacggcgaatttaccaagttcanagaccatagatttacaccggttcaacatccggatgatgnctttagcggggcttatcaatga

SEQ ID NO: 19726 - protein, 269 aa, Unknown
  Obtained from environmental sample
  DOMAIN (1)...(182): DnaB-like helicase C terminal domain
  misc_feature (1)..(269): Xaa is any amino acid
MQKTDLIILAARPSMGKTALALNIAANAAKQNKTVLFFSLEMNAQQLAIRVLSSEAEIDQSLLRHGKIGAGTVHSLLAKSKEMADMPLFIDDSSEVRAFDLISKCRIFKRKHNNNLDLVVVDYLQMMKINGNSENRAVGVAENSRMLKVLAKELQVPVLALAQLNRNVENRPTGGRPQLSDLRDSGSIEQDADMVWFIHRPAXEKEKKGKDAYEIPEEEKREAHLIIAKHRNGPTADIRLEFHGEFTKFXDHRFTPVQHPDDXFSGAYQ

SEQ ID NO: 19727 - DNA, 936 bp, Unknown
  Obtained from environmental sample
  misc_feature (1)..(936): n is a, c, g, or t
gtgccttattacgaagaacgcttaaaacccgtgcagaggcgcatttgcaccacgctctacgaaatgaatagaagcgatgagcgattgcataaggtggcaaacattgttgggcgcgctatgcaatatcaccctcacggcgatgttcccataggcgatgcccttgttaatatggggcaaaaaaaactgttgatagaaacccaggggaattggggaaatttaataacaggggattcttccgctgcgcctcgttatatagaagggaggctttcccaatttgccatagaagtgctttttaacccagaaaccaccgagtggattcctaactacgatggcaggagtaaagagccggtttgcctgccggttaagttcccacttgtgcttgcacaaggcgtggatggcattgcggtggctcttagcaccagtattttgccgcataatttctgtgagctttgcgaagcgagtatttctgcgcttagaggaaaaaagtttgagctttacccggatttcccaacaggtggcataatagatgttagcgattataacgatgggcttcgcggcgggcgcatcaaagtgagggcgcgcatagaaaaacaggattccaaaactcttgtgataaaggaaataccttttgggactacaaccgtaagccttgtggacagtataacaaaggcaaacgaaaagggcaaaataaaaataaagaaagttgatgaccatacatccagttctgttgagcttgttatacatctgcaacccggaagcgacccgcaaacggttatagatgctctttatgcttttaccgattgcgaaaaatccatagctccaaacaactgcgtgatagtggaaaacaagccccagtttttgggcacaaaggaaattttaaaaaagagcacggcgcacacaaaggaactctggaatgggaactcacaaacaaaatga

SEQ ID NO: 19728 - protein, 311 aa, Unknown
  Obtained from environmental sample
  DOMAIN (8)...(311): DNA gyrase/topoisomerase IV, subunit A
  misc_feature (1)..(311): Xaa is any amino acid
MPYYEERLKPVQRRICTTLYEMNRSDERLHKVANIVGRAMQYHPHGDVPIGDALVNMGQKKLLIETQGNWGNLITGDSSAAPRYIEGRLSQFAIEVLFNPETTEWIPNYDGRSKEPVCLPVKFPLVLAQGVDGIAVALSTSILPHNFCELCEASISALRGKKFELYPDFPTGGIIDVSDYNDGLRGGRIKVRARIEKQDSKTLVIKEIPFGTTTVSLVDSITKANEKGKIKIKKVDDHTSSSVELVIHLQPGSDPQTVIDALYAFTDCEKSIAPNNCVIVENKPQFLGTKEILKKSTAHTKELWNGNSQTK

SEQ ID NO: 19729 - DNA, 636 bp, Unknown
  Obtained from environmental sample
  misc_feature (1)..(636): n is a, c, g, or t
ttgtatacattaactgcggatgagcttgcagaatacgacagaatgggagaaatctcggcagccaaagtaatacggcatattcaaacaaaacgtgagctttcactcgcggtatttatagcgggatttgattttgagggaatcgctgaaaccacaatggaaaaaattacggcagccggttataacactccggaaaaattaagagcggcttcaacaggggatttatccgctgtttacgggttaggtgatattacagcggcagttattgttgacggcttaaaagaatgcgctgaagaaatagacgctgttttaaaaacaggagtgataacaataacagcgcctgtgcctgaagaaacccttcctctgcgcgggctttctttctgttttacaggcgaaatgaaaactataaaaaggacagcggcggaagaaaaaattaaattactgggcgctcaggcaaaatcatcggtggttaaagggctttcctaccttgtaacaaatgatccagagtcgggatcggcaaaaaataaaaaagccaacgaacttggaatccctattattagcgaggaagaatttttagcgttaatctcaaaaactaaaaatgaggctcaattacagcatctacagggtgaacttttttaa

SEQ ID NO: 19730 - protein, 211 aa, Unknown
  Obtained from environmental sample
  DOMAIN (116)...(194): BRCA1 C Terminus (BRCT) domain
  misc_feature (1)..(211): Xaa is any amino acid
MYTLTADELAEYDRMGEISAAKVIRHIQTKRELSLAVFIAGFDFEGIAETTMEKITAAGYNTPEKLRAASTGDLSAVYGLGDITAAVIVDGLKECAEEIDAVLKTGVITITAPVPEETLPLRGLSFCFTGEMKTIKRTAAEEKIKLLGAQAKSSVVKGLSYLVTNDPESGSAKNKKANELGIPIISEEEFLALISKTKNEAQLQHLQGELF

SEQ ID NO: 19731 - DNA, 495 bp, Unknown
  Obtained from environmental sample
  misc_feature (1)..(495): n is a, c, g, or t
atgtttggatgctacagttggatacctgccaatcaggaatattttcgcggaggcggttattcgtcaaaattcctctcgaaaggcggcatgcctgtaacgatggttcgtctcaatctcgtaaaaggcttgggacctgttttgcaacttgccgaaggctggagcgttgatttgcccgaagatgtttacagaacaatagacaaccgcaccgatccgggttggcccactacctggtttgcaccgcgcctgaccggtaaaggcatgtttaaagatgtctattcggtgatgaacaactggggtgcaaatcatggctcgttcagtttcgggcatattggagcagacctcattacgctggcttctatgttacgtatacctgtgtgtatgcacaatgttgatgacaacgatattttccgtccaagcgcttgggctgctttcggtatggacgccgaaggcgcagattatcgcgcctgccagacttatggagctatgtataaataa

SEQ ID NO: 19732 - protein, 164 aa, Unknown
  Obtained from environmental sample
  DOMAIN (1)...(128): L-fucose isomerase, C-terminal domain
  misc_feature (1)..(164): Xaa is any amino acid
MFGCYSWIPANQEYFRGGGYSSKFLSKGGMPVTMVRLNLVKGLGPVLQLAEGWSVDLPEDVYRTIDNRTDPGWPTTWFAPRLTGKGMFKDVYSVMNNWGANHGSFSFGHIGADLITLASMLRIPVCMHNVDDNDIFRPSAWAAFGMDAEGADYRACQTYGAMYK

SEQ ID NO: 19733 - DNA, 354 bp, Unknown
  Obtained from environmental sample
  misc_feature (1)..(354): n is a, c, g, or t
atgtacttggcgggaaaatgtactcactcacagcacgacaagggtctttacgatgacagcgacccgataggttgtcttgatgtaacagtgctttcaaaccttgttctgacgccaattctcaatattaccgacctgcgcaattctaaacgcatagatttcgttggcggtattcgcggcttgggcgaactgaaacgccgtgtggattccggtgaaatggctgtcgcctntgcgctgtatccggttagcatgaagcagttgatagatattgccgacacaggaaatatcatgccgccaaaaacaacatggttcgagccgaaacttagaagcggattagtggtgcatagcattatttga

SEQ ID NO: 19734 - protein, 117 aa, Unknown
  Obtained from environmental sample
  misc_feature (1)..(117): Xaa is any amino acid
MYLAGKCTHSQHDKGLYDDSDPIGCLDVTVLSNLVLTPILNITDLRNSKRIDFVGGIRGLGELKRRVDSGEMAVAXALYPVSMKQLIDIADTGNIMPPKTTWFEPKLRSGLVVHSII

SEQ ID NO: 19735 - DNA, 774 bp, Unknown
  Obtained from environmental sample
  misc_feature (1)..(774): n is a, c, g, or t
atggcatactatgtcaacgcaggagcgaagctgaaattgtgcggcaagcccatggcgagcataacggacagcaagcctatggtgaacataaagcccttcggccagtgcagctcgttggccaatccagtagtagcggctgcaacagcggccaactacggcaggctgcagaaaatgccctgcattcccaacaccatgtccccctgggttaacggcaagatcaaagtctcggaaatgtattggagctatggagatggctacaaacggttgtccgacaaagcccgtttttatacggatttgaatcttcatgtgaaaacggagaattacaaagatggcgattccgtgagcatctcactgaaaagaaaagacggccagccattgttcggcacaaccaaaacgctcgatttgacagggactgtttccaacaacgaggccgttgtggagaacgctctgaaaagctatcccctgcatgtcctgtcagagataacggcagagtgttcaggtgtgaaatcctccattaatccgagaaggcccaaatgggaagatgtctatgggggttatccaaagataacgagagacggctcggaaacggatatgtatatggacgatgttttcaaatacatcctcggcagcaattacgacaggaagatgttcaacaacggcggagccgcccgcgtatccgtcagcctgatagaggcaggcatggatttgaggaaggatttcctggttcaggacggcagcgagttcaagaagaagctggttcgtaagaaccagtga

SEQ ID NO: 19736 - protein, 257 aa, Unknown
  Obtained from environmental sample
  misc_feature (1)..(257): Xaa is any amino acid
MAYYVNAGAKLKLCGKPMASITDSKPMVNIKPFGQCSSLANPVVAAATAANYGRLQKMPCIPNTMSPWVNGKIKVSEMYWSYGDGYKRLSDKARFYTDLNLHVKTENYKDGDSVSISLKRKDGQPLFGTTKTLDLTGTVSNNEAVVENALKSYPLHVLSEITAECSGVKSSINPRRPKWEDVYGGYPKITRDGSETDMYMDDVFKYILGSNYDRKMFNNGGAARVSVSLIEAGMDLRKDFLVQDGSEFKKKLVRKNQ

SEQ ID NO: 19737 - DNA, 576 bp, Unknown
  Obtained from environmental sample
  misc_feature (1)..(576): n is a, c, g, or t
atgacaacagaacaaatgcttcacatgagcggtatccgccttgtaccgtatatccaggctgccaccctgcttatcggaaaatcccgcgaaggaggcggaaatatgttccgccatcagcttgatacaatggcaattttaattgactacggatatatcgacgccgtcctgttaaaagcctctcttgtacatgatctaatcgaagacatacacgacttagaccataatattcttttatccatagatgttgacagccccgccgtatacgacctcgtgcaggaagtttccaggcggaacggagaaaccaaggctgattttctaattcgtatcagaaaaacaggttcacaaaacgcaaaaatccttaaagtggcggatcgcctttcaaacatgatatccctgggctttgtaaacaatcttgatttcgtcgaacgttatattaatgaaacaacggaatatgtgattccgattgccagggaagtcagccagtacatgacgcaggaacttaccgatttaattgactcaagaaaaaaataccttgaaagactgcgcgatcaaccggtaataataaaaggcgcttga

SEQ ID NO: 19738 - protein, 191 aa, Unknown
  Obtained from environmental sample
  DOMAIN (35)...(129): HD domain
  misc_feature (1)..(191): Xaa is any amino acid
MTTEQMLHMSGIRLVPYIQAATLLIGKSREGGGNMFRHQLDTMAILIDYGYIDAVLLKASLVHDLIEDIHDLDHNILLSIDVDSPAVYDLVQEVSRRNGETKADFLIRIRKTGSQNAKILKVADRLSNMISLGFVNNLDFVERYINETTEYVIPIAREVSQYMTQELTDLIDSRKKYLERLRDQPVIIKGA

SEQ ID NO: 19739 - DNA, 867 bp, Unknown
  Obtained from environmental sample
  misc_feature (1)..(867): n is a, c, g, or t
gtggacaggaactggaaaattcagccttatggagccgaattccgccgagttacagttacgcgcaattatcttgacgtaatcgcgtcccttccgtggggtgagataaaacctgaagtttttgacttaaaaaacgcgcaggcgattcttgaaaccgatcattacgggcttaatgatgttaaaacaaggattgtggagtatcttgccgtaagaaaactgcgtaaggatacaaaaggttcaattatctgtcttgtagggccgccgggagtagggaagacatcggtaggcagatcaattgcgcgcgcgcttggaaaacagtttttccgtttttctgtcggcggcatgagggacgaagcggaaataaagggacacaggagaacatatatcggcgctatgccgggtaaaattatacagggactgaaaattgtcaaagcaagggatcccgtgttcatgatagatgaaattgataaaatgggagcgagttatcagggtgatcccgcaagcgctctccttgaagtgctggacccggaacaaaatcacgcgttccgcgatcattatcttgatctgccgtttgatatttcccacgtgttttttattgttacggcaaatacactggataccattcccgttccgcttttggatcgtatggaaattattcagcttccagggtacatagatactgaaaaactggagattgcccagcgttatcttcttcccaaaagtcttgagaaaaacggacttaagaagaatcaggttaagtatacaaaggacagtcttttacacatagcgaattcctatgcgcgggaagccggcgtgcgtaattttgagaaaaaccttgacaagattcaccgcaagcttgcaagcnaatag

SEQ ID NO: 19740 - protein, 288 aa, Unknown
  Obtained from environmental sample
  DOMAIN (80)...(223): ATPase family associated with various cellular activities (AAA)
  misc_feature (1)..(288): Xaa is any amino acid
MDRNWKIQPYGAEFRRVTVTRNYLDVIASLPWGEIKPEVFDLKNAQAILETDHYGLNDVKTRIVEYLAVRKLRKDTKGSIICLVGPPGVGKTSVGRSIARALGKQFFRFSVGGMRDEAEIKGHRRTYIGAMPGKIIQGLKIVKARDPVFMIDEIDKMGASYQGDPASALLEVLDPEQNHAFRDHYLDLPFDISHVFFIVTANTLDTIPVPLLDRMEIIQLPGYIDTEKLEIAQRYLLPKSLEKNGLKKNQVKYTKDSLLHIANSYAREAGVRNFEKNLDKIHRKLASX

SEQ ID NO: 19741 - DNA, 531 bp, Unknown
  Obtained from environmental sample
  misc_feature (1)..(531): n is a, c, g, or t
atgtccactgcgccgtacggtacatcgcaggatatcaacatgcttaccctccagtttacaaacaagccgcctgacgatttcatcgaaattatcgggaaagttcttgacgccaatgtaaattccgcaaaacgaaaggatgtccgcatacccttatccgccgataatatgcgaaaattaaatattttatcatcagaaagcgcggtttttattgaaaaggttccaagacgctgtatattaagggatctttcattttccggctccaaaataatcatggtgggaatcgcaaaatttcttgtgaataaagaagttgccctaaaagttgaatttgaagacccaagagaattatttttaataagagggaaatttgtccgcgctgaacctgttgaaggaaagaaagaaatggtcgctcttggtttaaattttgacgaagcctcaattcccatgggttacaaaatacgcctcaatgagatgttaagctcatcgcgggctgattctcgcggcactctggaagaacttaccgcgcaggcatga

SEQ ID NO: 19742 - protein, 176 aa, Unknown
  Obtained from environmental sample
  DOMAIN (42)...(160): PilZ domain
  misc_feature (1)..(176): Xaa is any amino acid
MSTAPYGTSQDINMLTLQFTNKPPDDFIEIIGKVLDANVNSAKRKDVRIPLSADNMRKLNILSSESAVFIEKVPRRCILRDLSFSGSKIIMVGIAKFLVNKEVALKVEFEDPRELFLIRGKFVRAEPVEGKKEMVALGLNFDEASIPMGYKIRLNEMLSSSRADSRGTLEELTAQA

SEQ ID NO: 19743 - DNA, 564 bp, Unknown
  Obtained from environmental sample
  misc_feature (1)..(564): n is a, c, g, or t
atgggtttttatatgactgtcatttttgcggctttctccacggcgggacagttcttctccctgcaaatgggatttggcgcttcagaaacttttgatcccgtagcgcaggtagaaaacccacttatggggcaatattttaacctggtgtcaatgctcatctttgtgacgattggcggctttcatcagctctttcttggcggcttttggcgttccgtgcaatcgttgaatataatgtacttgattgacggaagggaacatcttgtgggaatgttcgcctccgggctttcgcgcctgttcatagacgcgatagttatctccctgccgattctcggcactttgttattaacgtcgcttacgacggggcttatatcaaaagccgcgccgcaggtaaatattctttccgaagggtttcccatttccatcaccgccgccttcttgcttattttcgcctctcttccgtttatgatagaagcgtttaccagcgtaattgattccggctttagaaatattcaaactctctacattcaaatcggcaggcagattacggcaggaggcgggttttga

SEQ ID NO: 19744 - protein, 187 aa, Unknown
  Obtained from environmental sample
  SIGNAL (1)...(26)
  DOMAIN (1)...(171): Bacterial export proteins, family 1
  misc_feature (1)..(187): Xaa is any amino acid
MGFYMTVIFAAFSTAGQFFSLQMGFGASETFDPVAQVENPLMGQYFNLVSMLIFVTIGGFHQLFLGGFWRSVQSLNIMYLIDGREHLVGMFASGLSRLFIDAIVISLPILGTLLLTSLTTGLISKAAPQVNILSEGFPISITAAFLLIFASLPFMIEAFTSVIDSGFRNIQTLYIQIGRQITAGGGF

SEQ ID NO: 19745 - DNA, 750 bp, Unknown
  Obtained from environmental sample
  misc_feature (1)..(750): n is a, c, g, or t
ttgctcgtagcccacttcattgacaagaatgtcttgggcaaaggcaacacaaactgcaagaaaaatagcgaaaaaaagagagtaataacgcacaatttaaatatagtaaaagtttttactatattctaccttgaaatatcactcaaagaggtttttatggctaaaaagaaaatcgcgcttgtgggcgcagggcaaataggcggtacaatggcacttgtattggcgcaaaagcaacttggcgatgttgtgcttgttgatgttgtggaaggcgtgcctcaaggcaaagccctagacattatggaaggtcgcctgtcaataggcaccagcgcagttctatctggcacaaataattacgacgaccttgcagggtcagatgtagttattgttacggctggcgttccgcgcaaaccaggcatgacccgcgatgaccttttgaacatcaattacggcattattgaaaaagttgggcaggctcttaaaaaaactgctcaaaatgcttttgttatagttgtgacaaatcctttggatgcaatggtttatgcaatgcaaaaagtcacaggctttgcttcggaaaaggttgttggcatggcaggcgttttggatagcagccgccttgcttgctttgttgcaatggaactcggcgttgcggcagacgatgttcangctgttngtatgggtggccacggaccatctatggttagcctttacgactttgtttccgttggtggcattccgcttccccnactatga

SEQ ID NO: 19746 - protein, 249 aa, Unknown
  Obtained from environmental sample
  DOMAIN (56)...(210): UDP-glucose/GDP-mannose dehydrogenase family, NAD binding domain
  misc_feature (1)..(249): Xaa is any amino acid
MLVAHFIDKNVLGKGNTNCKKNSEKKRVITHNLNIVKVFTIFYLEISLKEVFMAKKKIALVGAGQIGGTMALVLAQKQLGDVVLVDVVEGVPQGKALDIMEGRLSIGTSAVLSGTNNYDDLAGSDVVIVTAGVPRKPGMTRDDLLNINYGIIEKVGQALKKTAQNAFVIVVTNPLDAMVYAMQKVTGFASEKVVGMAGVLDSSRLACFVAMELGVAADDVXAVXMGGHGPSMVSLYDFVSVGGIPLPXL

SEQ ID NO: 19747 - DNA, 906 bp, Unknown
  Obtained from environmental sample
  misc_feature (1)..(906): n is a, c, g, or t
atgaaacttgaaaacataagttcccctaaagatatgaagggttgcaaaatagaagagcttgaagctctggcagacgaaataaggtctgttattttgttgcaggtatctgaacacggcgggcatttatcgtctagtcttggaaccgttgagcttgccattgctttgcactatgtttacgacacaccaaaagacattttaatctgggatgtggggcaccaagcttatgcccacaaactgctaaccggacgctatggaaaaattttcacaatgaggcagtatggcggaatttccggttttccaaaaagaagcgagagcatctacgacccttttggtaccgggcacgcaagcacatccatttctgcggctttgggctttgccgtagcgcgcgaccttgttcaaaaaaacaatcaggttgtagcggttataggcgatggctcaatgactggaggaatggtatttgaggctcttaacaattcaaggcaaacaaaaaagaatttcaccattatcttaaacgacaacaaaatgagcataagcccaagcgtgggcgcactctcaaaattattcagcaagctatctgttaagcacagccactccctagaagaagtcagcaaatttttgcgttccattcctgaacatataggcggcggaaaattgcgagaatttatggagagcggnaaattagctttggaaaatatggcaaaccctgggcaatttttcagagatttgaatgtacgctattttggaccttttgatggacataatttgcaagaattgattgagacattaaatggcataaaagaattgccagaagtttgccttgttcatgttttaactcaaaaaggcaaaagctacgaagctgccaccctctaccccacaaaatggcacggcgcagacccatccacataa

SEQ ID NO: 19748 - protein, 301 aa, Unknown
  Obtained from environmental sample
  misc_feature (1)..(301): Xaa is any amino acid
MKLENISSPKDMKGCKIEELEALADEIRSVILLQVSEHGGHLSSSLGTVELAIALHYVYDTPKDILIWDVGHQAYAHKLLTGRYGKIFTMRQYGGISGFPKRSESIYDPFGTGHASTSISAALGFAVARDLVQKNNQVVAVIGDGSMTGGMVFEALNNSRQTKKNFTIILNDNKMSISPSVGALSKLFSKLSVKHSHSLEEVSKFLRSIPEHIGGGKLREFMESGKLALENMANPGQFFRDLNVRYFGPFDGHNLQELIETLNGIKELPEVCLVHVLTQKGKSYEAATLYPTKWHGADPST

SEQ ID NO: 19749 - DNA, 501 bp, Unknown
  Obtained from environmental sample
  misc_feature (1)..(501): n is a, c, g, or t
atgtacccttttgaaattgtcatactagtgctggcggccttcgcgtggtatcttttttataaaacgcgtttcggccttcgcctgcgcgcctgcggcgacaacccccacagtcttgacgcggctggcggcgatgtcggcgcgactcgcgtcaaggccataatgttttcaggcgctttttcaggcctcgcgggaatgtgctttgcctattcgataatggcccaattttctcccagcatatacatgggttacggctacctggccatagccgcgctgatcttcggcaactgggacatactgatcacttttgcggtctgcctcttttttggcctggcgcggtccggtggctatcagctgtgtctggccctgggaatgtccagtaatttttccgacctgttctatgtgcttccctatgtgctgacattgctgtcgctggtgttcttctccaggcacaatcatccgccgcgcgccataggtgaagtattcgataaaagcaagcgatag

SEQ ID NO: 19750 - protein, 166 aa, Unknown
  Obtained from environmental sample
  misc_feature (1)..(166): Xaa is any amino acid
MYPFEIVILVLAAFAWYLFYKTRFGLRLRACGDNPHSLDAAGGDVGATRVKAIMFSGAFSGLAGMCFAYSIMAQFSPSIYMGYGYLAIAALIFGNWDILITFAVCLFFGLARSGGYQLCLALGMSSNFSDLFYVLPYVLTLLSLVFFSRHNHPPRAIGEVFDKSKR

SEQ ID NO: 19751 - DNA, 936 bp, Unknown
  Obtained from environmental sample
  misc_feature (1)..(936): n is a, c, g, or t
ttgccacgaggactattgggggtataccgagggccttctacgccgtgggctttcaggcccggcgacgttgtgcagaacaccttcaactaccacctgactcccgccgggctgatgtttgaagaacccctgcgtaatctgggctgtgcggtcatccccgccggcccttccgatgcgggcagtcaactggaaatcatgcaaaagttgcgcggctccggttacgtgggcacgccgagctaccttttgcacctgacccagcgcgccgaggaaaagggactcaacctgcgcaaggatctttttctggaagtggcctttgtcaccggggagcgcctttcggaaaaaatgcgcacccaactggaaaaaaagtacgacctcatcatgcgccagggctacggcacggcggatgtgggctgcatcggctacgaatgttttcacaagaacgggctgcacatcgccaaccgctgttatgtggaaatctgccatccggacaccagcattccgctgaaggacggcgaagtgggcgaaatcgtggtgacggccttcaacaagacctatccgctgatccgcctcgctacgggcgatctgtcctacatcgatcgcgcgccctgttcctgcggacgcaccagtccgcgcctgggcagcattgtgggccgcgtggacacgaccgcgcgcatcaagggcatgttcgtctacccgcatcaggtcgagcaggtcatgagccgctttgaggaaatcaaacgctggcagatcgaagtgaccaatcccggcggcattgacgaaatgacgctcttcgttgaaagcagcgccttcaaacgcgaagacgaactgctccaccagttccgtgaaaagatcaaactgcgtcccaacctgtccatcctcgcgcccggcactttgccgccgcagatacgccccattgaggacaaacgggagtgggactga

SEQ ID NO: 19752 - protein, 311 aa, Unknown
  Obtained from environmental sample
  misc_feature (1)..(311): Xaa is any amino acid
MPRGLLGVYRGPSTPWAFRPGDVVQNTFNYHLTPAGLMFEEPLRNLGCAVIPAGPSDAGSQLEIMQKLRGSGYVGTPSYLLHLTQRAEEKGLNLRKDLFLEVAFVTGERLSEKMRTQLEKKYDLIMRQGYGTADVGCIGYECFHKNGLHIANRCYVEICHPDTSIPLKDGEVGEIVVTAFNKTYPLIRLATGDLSYIDRAPCSCGRTSPRLGSIVGRVDTTARIKGMFVYPHQVEQVMSRFEEIKRWQIEVTNPGGIDEMTLFVESSAFKREDELLHQFREKIKLRPNLSILAPGTLPPQIRPIEDKREWD

SEQ ID NO: 19753 - DNA, 684 bp, Unknown
  Obtained from environmental sample
  misc_feature (1)..(684): n is a, c, g, or t
gtgggacgtccttctcggcgggagcgggagcctgatcgccgccttgtcggcggcgcggcctccatgatcctcgtttacggcatcacccgcgccaaaggcggcttttcaacgcctgtgatgctcctcgcgggggtcgtcatcaatttnttctgttccagtctcgtgatgctcgtccagtacctgagcggttcccacgacgccctgcggatcatgcactggctcatggggtctttgaccggcattgagacagcgcgccttgcggacttgtttttcgtgacggtcgcgggaagcctcgccatcctgcgccttgcgccggaaatcgatctgctggtcgccggcgaggaatgggcggccagccggggggtttccgtgcgccgcgcgaaaatcctgctgttcgccgttgcttccgtcgtgatcggagcggtcgtttccctggccggccccatcggtttcgtgggcatgatgatcccgcacgtctgccgcctgtgcttcggctggcgccacagactcctgttgcccgccgcctttttcgcgggcggctgttttctggcgttgtgcgacctgggcgcgcggatcgtcctggcgccggccgagttgcccatcggcatcgtcaccgcgctcatcggcgggccgttctttctctggacgctgttcaagacgcatgccggcggagacatattttaa

SEQ ID NO: 19754 - protein, 227 aa, Unknown
  Obtained from environmental sample
  DOMAIN (1)...(219): FecCD transport family
  misc_feature (1)..(227): Xaa is any amino acid
MGRPSRREREPDRRLVGGAASMILVYGITRAKGGFSTPVMLLAGVVINXFCSSLVMLVQYLSGSHDALRIMHWLMGSLTGIETARLADLFFVTVAGSLAILRLAPEIDLLVAGEEWAASRGVSVRRAKILLFAVASVVIGAVVSLAGPIGFVGMMIPHVCRLCFGWRHRLLLPAAFFAGGCFLALCDLGARIVLAPAELPIGIVTALIGGPFFLWTLFKTHAGGDIF

SEQ ID NO: 19755 - DNA, 603 bp, Unknown
  Obtained from environmental sample
  misc_feature (1)..(603): n is a, c, g, or t
atgtctccgccggcatgcgtcttgaacagcgtccagagaaagaacggcccgccgatgagcgcggtgacgatgccgatgggcaactcggccggcgccaggacgatccgcgcgcccaggtcgcacaacgccagaaaacagccgcccgcgaaaaaggcggcgggcaacaggagtctgtggcgccagccgaagcacaggcggcagacgtgcgggatcatcatgcccacgaaaccgatggggccggccagggaaacgaccgctccgatcacgacggaagcaacggcgaacagcaggattttcgcgcggcgcacggaaaccccccggctggccgcccattcctcgccggcgaccagcagatcgatttccggcgcaaggcgcaggatggcgaggcttcccgcgaccgtcacgaaaaacaagtccgcaaggcgcgctgtctcaatgccggtcaaagaccccatgagccagtgcatgatccgcagggcgtcgtgggaaccgctcaggtactggacgagcatcacgagactggaacagaanaaattgatgacgacccccgcgaggagcatcacaggcgttgaaaagccgcctttggcgcgggtgatgccgtaa

SEQ ID NO: 19756 - protein, 200 aa, Unknown
  Obtained from environmental sample
  misc_feature (1)..(200): Xaa is any amino acid
MSPPACVLNSVQRKNGPPMSAVTMPMGNSAGARTIRAPRSHNARKQPPAKKAAGNRSLWRQPKHRRQTCGIIMPTKPMGPARETTAPITTEATANSRIFARRTETPRLAAHSSPATSRSISGARRRMARLPATVTKNKSARRAVSMPVKDPMSQCMIRRASWEPLRYWTSITRLEQXKLMTTPARSITGVEKPPLARVMP

SEQ ID NO: 19757 - DNA, 729 bp, Unknown
  Obtained from environmental sample
  misc_feature (1)..(729): n is a, c, g, or t
ttgatacgaaacgaacaggaattggcaagccaggaggaattagcgatgaagaagttttgtgcggcactgtttttattgacggctgcgctgtctttcgcgcagcagaaatacgcgctggtcatcggcaacgggaactatgccaacatcaccaggcttaacaaccccgtgaacgacgccaacgacatggccgccgccttgcagggccttggctttaacgtcgagaagctgcttaacgccacccttgaccagatggaaagcggggccatacgccttaaaaaccgcctgtccaattcaaagaacagctacggcttcctgttctacgcgggccacggggtgcagtccaacggcgagaacttcctgatacccgtggacgcgaacatccagagcgagagctttctgcgccaaagggcggtttctgtgcaggccctgctggacgagctaaacgaggcgggcaacgagctcaaccttgtggtgctggacgcctgccgcgacaacccctttagctggcggcgctccggcagccgtggccttacggtggtagggaaccagcctgcggacagcatcgtcgtgtttgccaccagcgcgggttccaccgccgccgacgggactggaaggaacggcctgtttaccggccactttttgaaacacctgaagacccccggcattgaagtagccgaggtcctgcgcctgacgatgggcgatgtcatacgcgccagcaacaaccagtag

SEQ ID NO: 19758 - protein, 242 aa, Unknown
  Obtained from environmental sample
  DOMAIN (36)...(242): Caspase domain
  misc_feature (1)..(242): Xaa is any amino acid
MIRNEQELASQEELAMKKFCAALFLLTAALSFAQQKYALVIGNGNYANITRLNNPVNDANDMAAALQGLGFNVEKLLNATLDQMESGAIRLKNRLSNSKNSYGFLFYAGHGVQSNGENFLIPVDANIQSESFLRQRAVSVQALLDELNEAGNELNLVVLDACRDNPFSWRRSGSRGLTVVGNQPADSIVVFATSAGSTAADGTGRNGLFTGHFLKHLKTPGIEVAEVLRLTMGDVIRASNNQ

SEQ ID NO: 19759 - DNA, 345 bp, Unknown
  Obtained from environmental sample
  misc_feature (1)..(345): n is a, c, g, or t
atgtgcgacaacgccgtcttaaacgaggtaacctctagggtctgcgccgccgccaaggaggtgttaggcggcaagttgaagaaagtgatcctctacggttcatacgctcgcggagactacaacgagtattcggacatagacatcttcattctcgccgacataccgcaggaggagtgttgcgacgcgggttcggacattcgggagtttatatgggagtatgagttggagcaaaatttaatcatctgtccgcacgttacaggttgcgcgacattttataaatatttgaacgttttgccgttttatatgaatgtggtaaaggagggggtggagttgtatgcagcctga

SEQ ID NO: 19760 - protein, 114 aa, Unknown
  Obtained from environmental sample
  DOMAIN (7)...(111): Nucleotidyltransferase domain
  misc_feature (1)..(114): Xaa is any amino acid
MCDNAVLNEVTSRVCAAAKEVLGGKLKKVILYGSYARGDYNEYSDIDIFILADIPQEECCDAGSDIREFIWEYELEQNLIICPHVTGCATFYKYLNVLPFYMNVVKEGVELYAA

SEQ ID NO: 19761 - DNA, 555 bp, Unknown
  Obtained from environmental sample
  misc_feature (1)..(555): n is a, c, g, or t
atggtgacaaagaccattgatattgacacatcgcccgtaatttttgccaaaatggagtgtgtccgcccggtgccaaaatgcctgtcggatgaattttggattgatggatcaggagtgcttgtgccttacgcgatgctggtttccgacccccttgcgccgatgctggttctgctggcgctgctatggctggctgcaaagttggggggcgaggccgccgtgcgcctcaaactgcccgccgttgcggggcagatacttgtcggcgtgcttctggcggcgctgcccgggttgttttcaggtctgcccgattccatgggctttctgaagtcccccgaactccttgattttctgaacttcgaccatgcccacaatcaagaggcccatgtgctgtcctatgtcggcatcgtgctgctgatgttcatggtcggtctggagtcgtccgtcccgcagatgatgaaggtggggtgggcgtcactccgggtggccgtggtgggcgtcataggcccgatggtgctgggtctggtgggcgcgtatttcctgcctcgtgccgattactga

SEQ ID NO: 19762 - protein, 184 aa, Unknown
  Obtained from environmental sample
  misc_feature (1)..(184): Xaa is any amino acid
MVTKTIDIDTSPVIFAKMECVRPVPKCLSDEFWIDGSGVLVPYAMLVSDPLAPMLVLLALLWLAAKLGGEAAVRLKLPAVAGQILVGVLLAALPGLFSGLPDSMGFLKSPELLDFLNFDHAHNQEAHVLSYVGIVLLMFMVGLESSVPQMMKVGWASLRVAVVGVIGPMVLGLVGAYFLPRADY

SEQ ID NO: 19763 - DNA, 945 bp, Unknown
  Obtained from environmental sample
  misc_feature (1)..(945): n is a, c, g, or t
atggcgagttatacccattataagaccctgttaccaaaagaccnggtcttaaaagatatgctcggtgattattctatcggcggaaaatacggtaaaattttcgacgccgaaacaacaggcctttccctggacactcgttttctcgccatagaaatggaagcgcttatgagccgaggagaaaactgtgtggtccctgcccttgtttttttgttcaattatgtcgaaaagaaatttgacggccgttttactttgcttgtgcttgatgaagcatggttattccttaaaaatgaaactttctcagagaaaatcactgaatggcttaaagttttacgtaaaaaaaatgtttatgtcgttttcgctacccaggacgtcgccgacgtcgcaaaatctcccttaaaaactactatcattcaacagtgtttaacaaaaatatatcttgctgacccgtccgctgttacggattttatgaaggaagtatacagcggtttcggccttaccgattccgaaataaaccttatcgcctccgccaccatgaaacgcgattatttttacactagccccatgggacggcgtctgttccagctcgatcttggcggtcttaccctctccctcatcggctctccggaccacgcgctactcgacgagcttgcggcaaggtacgagcccggaagcgcgttatgcgccgaaattcttgccgcgaaaaatattaattataaacgctatcttggcgaagacgccccanatgatccggtcccgataccccgtcagactaaaattagttactccgctccgactcanattgaaactcaaactgaagcctctccggnaagtattacaactattgaagcaacangacaaaactcagattttcttgatgccgttgctgcccttccggaacgcaagaaaaataacggaacaggnccgcgccgcgaagaccgtcgctaa

SEQ ID NO: 19764 - protein, 314 aa, Unknown
  Obtained from environmental sample
  misc_feature (1)..(314): Xaa is any amino acid
MASYTHYKTLLPKDXVLKDMLGDYSIGGKYGKIFDAETTGLSLDTRFLAIEMEALMSRGENCVVPALVFLFNYVEKKFDGRFTLLVLDEAWLFLKNETFSEKITEWLKVLRKKNVYVVFATQDVADVAKSPLKTTIIQQCLTKIYLADPSAVTDFMKEVYSGFGLTDSEINLIASATMKRDYFYTSPMGRRLFQLDLGGLTLSLIGSPDHALLDELAARYEPGSALCAEILAAKNINYKRYLGEDAPXDPVPIPRQTKISYSAPTXIETQTEASPXSITTIEATXQNSDFLDAVAALPERKKNNGTGPRREDRR

SEQ ID NO: 19765 - DNA, 345 bp, Unknown
  Obtained from environmental sample
  misc_feature (1)..(345): n is a, c, g, or t
atggcaggacatgaaaaagtagatatcccaacctccaggcttaagcttgagatagtcaaaatattaaagactgaagggtatattaaaaatttcaagaaggcgaatcaggaaggagcgaatgtaatccgggtcttccttaaatatgatgacaataccgctccgattattcacggcatagagaaggtgtcaaaacccggccgccgtgtttacatgggatatcaaaatatgccgagggtattgaacggatacggaaccctgatcgtttccacgtcgcagggtgtaacaacaggcaagaaagccgcagagaaaaaagtcggcggcgaagttatctgcacggtgtggtaa

SEQ ID NO: 19766 - protein, 114 aa, Unknown
  Obtained from environmental sample
  DOMAIN (1)...(114): Ribosomal protein S8
  misc_feature (1)..(114): Xaa is any amino acid
MAGHEKVDIPTSRLKLEIVKILKTEGYIKNFKKANQEGANVIRVFLKYDDNTAPIIHGIEKVSKPGRRVYMGYQNMPRVLNGYGTLIVSTSQGVTTGKKAAEKKVGGEVICTVW

SEQ ID NO: 19767 - DNA, 492 bp, Unknown
  Obtained from environmental sample
  misc_feature (1)..(492): n is a, c, g, or t
atgtcgagaatcggaaaaataccggttaaggttcccggtggggttaaagttacttttcaaaatgaagagatgcttgtagaaggcccaaagggaaaacttaaacaaaaatacaatcccgtcatcacttttgaagacaagggtaaggaaattatcgttggcagaaaagatgaacaaaaacagacaaaggcttttcacggtctttatcgcaaccttttgaataatatggtaatcggcgtttcaaccggttttaataaatcgcttgtggtaaccggagtcggctacaaagtcgaagtgcagggaaaactccttgccatgagccttggttattccaatgacatttatgtcgccattcctgacgggctttccgccgcaacggacgcaagcggcaagatcactattacgggaattgataaacaacgcgttgggggaattgcggcgcagattcgcaaattaagaggaccccagccttacagggcaaggtatccgttatga

SEQ ID NO: 19768 - protein, 163 aa, Unknown
  Obtained from environmental sample
  DOMAIN (90)...(160): Ribosomal protein L6
  misc_feature (1)..(163): Xaa is any amino acid
MSRIGKIPVKVPGGVKVTFQNEEMLVEGPKGKLKQKYNPVITFEDKGKEIIVGRKDEQKQTKAFHGLYRNLLNNMVIGVSTGFNKSLVVTGVGYKVEVQGKLLAMSLGYSNDIYVAIPDGLSAATDASGKITITGIDKQRVGGIAAQIRKLRGPQPYRARYPL

SEQ ID NO: 19769 - DNA, 789 bp, Unknown
  Obtained from environmental sample
  misc_feature (1)..(789): n is a, c, g, or t
atgacagatgggacgagcatccagcgatttcgcgtggtggaggaggagctggaaacggcgattcgcgaaacggcagcggcgggcggaaagatcatcatcccgtcgttcgcggtcgggaggacgcagctcgtcgtctacatactgcacaagctgtttgatcaaaacaggttgcccgaaatgcccatatatgtggacagccctatggcctgcgacgcgacggatgtcttcaagtcgtacgagaactacttggaccgggagaccaagcgcgtatttttggacaaccacgagcagccgttcgatttccagcggttaacgtatatacacgatgtcgacggttctaagaaactaaacggtttgaccttcccccacgtgataatctccagttcgggaatggcggagggcggcaggattttgcatcatctgcggaacaacatggaaaaccctaagacgctgctactattcgtaggctacgcggccaaggacacgctggcgcgtaagatcatggacggccagaaagtcgttaaagtattcggagaggatcaccaggttcgttgcaagataaaggtgatagacgcgttcagcgctcacgccgacaggagagaactgttggactacgtcggcctgaacgatccggcaaggctgaaaaacatcttcctcttccacggcgaggcggatcaagcgacgtcgtttaaagacgccctgaggagcaagggctaccaaaacgtctattatccggcgttgggggaggcgtttgaggtcagtccgcggggagaggtttcggcgggataa

SEQ ID NO: 19770 - protein, 262 aa, Unknown
  Obtained from environmental sample
  DOMAIN (179)...(225): RNA-metabolising metallo-beta-lactamase
  misc_feature (1)..(262): Xaa is any amino acid
MTDGTSIQRFRVVEEELETAIRETAAAGGKIIIPSFAVGRTQLVVYILHKLFDQNRLPEMPIYVDSPMACDATDVFKSYENYLDRETKRVFLDNHEQPFDFQRLTYIHDVDGSKKLNGLTFPHVIISSSGMAEGGRILHHLRNNMENPKTLLLFVGYAAKDTLARKIMDGQKVVKVFGEDHQVRCKIKVIDAFSAHADRRELLDYVGLNDPARLKNIFLFHGEADQATSFKDALRSKGYQNVYYPALGEAFEVSPRGEVSAG

SEQ ID NO: 19771 - DNA, 786 bp, Unknown
  Obtained from environmental sample
  misc_feature (1)..(786): n is a, c, g, or t
atgatcagatcggccgagctcttaccgggaaatgacacagacagcgccattgcgggcattattgccgacagttttaacgcgggaacggctattaacgctcttggtattaacctgaatttagcgccggtggcggaatacttacacgatgacaatcgtgaatttctggaagaccgttcctatggctctgatccggcatttgtcaccgaagccgccgccgcttttatcaccggaatggaacaggccggcatcctttgtgtggtcaagcattttcccggcagcgccggggccgatcctcatcgttttccttccgtgttgaaaggcggcagggaggcccttgtggaactgaccgcccctattgccgcccttatccacagcggccacgcgcgggcaattatgatttcccatacgactgttcccgcatgggacagcaaaaccattgccagcctttctcatgcggtaatggactcttggctgcggcaggaattgggttttgaagggatcatcgtatgcgatgacttttcgatggccgccgcaagcggcccggctactgcaagcagcccggtctccgtagaagcccagggcagtctaaagcccgaaaccacggtggtgttgtctctggctgccggcgcggatatggttttggtgtggcctcctgacctccggcggactcaccacgcgattgtggcggcgcttgacaacggcgggctttcccgcanacgactgcaggaggcggcaggacggattatttttgaaaaaatacggatgggactgttgcatgacgaatga
